United States Patent Application Publication US 2013/0129668 A1 - sequence listing, part 4

SEQ ID NO: 50065 - DNA, 122 bp, Homo sapiens
gatcagagtaaatgtatgtgaaagttgccatcagtctggcttcttccagcatgacccaggcgtctgggaaaggaggtcctgaagatccagatagccgttcaccggtggtgggttgggctatt

SEQ ID NO: 50066 - DNA, 122 bp, Homo sapiens
taagtatagctcatcacctggtaaaagctagagcatcccatcagcagttaacaaggtgatcggcagccatctttccagtccttctaatgcacgatccaaacaaaatttgtgcaaatcagaga

SEQ ID NO: 50067 - DNA, 122 bp, Homo sapiens
tctctgctctcaccgtgggaggaaccgctgccctggatggtgacgatgagcgaggtctcccgggagcctgcaccgttactgacgtgacacacgtactcgcccgagtctgccggagtcacctg

SEQ ID NO: 50068 - DNA, 122 bp, Homo sapiens
tcctagaggtctttggctaggcctgggtccgatctaaataggaaggtaattctagtgttccgcaaatccttgccgaattccatcccggccaaagcagggacccgggggagcctctggtcgca

SEQ ID NO: 50069 - DNA, 122 bp, Homo sapiens
cggtgactgtgctctcagcccccagcaggtgggttgtgcgagcaactgagtgtaggggtccgggggctgctccaaccgccagcataggagcaggcttcacacggggcttgtagctggaccag

SEQ ID NO: 50070 - DNA, 122 bp, Homo sapiens
atgtcccttacctcttctgaacctccaggaagaaataatcggtctttttcatctgcagttcgtatatggcccggagaatgtgcagaggggcattgagggcatcatgagccatctggaggcca

SEQ ID NO: 50071 - DNA, 122 bp, Homo sapiens
atctatggagtcacgttgttagccaatctgggcatgactgcactgattcaggtcagctctcggctccacacccccgtgtactttttcctcagccacttgtcctttgtagatttctgctactc

SEQ ID NO: 50072 - DNA, 122 bp, Homo sapiens
gaccctggcgagggtgagcccctccccggaggcgcctgtggaatgtccagggctctggtccgctcctcgggatggggggtgcctaatcctagagccgcattccaggataaggggggtgggga

SEQ ID NO: 50073 - DNA, 122 bp, Homo sapiens
tcttggatggagggttccaggtcggtccccagtggctggcgtgtgggaccctttgaggatcggcgccgtctccgggccttccctggatcctggcccctagaggccgtgggggaccccttttc

SEQ ID NO: 50074 - DNA, 122 bp, Homo sapiens
ctagagttcagaatgagcaagctcctgcctaactgaaagtaaaatccacactccgccaaacggcactgaggctgcattcccacccagccctggagcattgctcagagcccaccttgtcccag

SEQ ID NO: 50075 - DNA, 122 bp, Homo sapiens
catacatgttggacatcaatcacatcagtccaccaagtaacttcatcaagcacccatgtacgcccagcacagcgtcccaagggtgccccacttacccacagaagaagaaaggcaactttgta

SEQ ID NO: 50076 - DNA, 122 bp, Homo sapiens
cctgtgaatcgcgcccaccggagggtctcacagcgaaatacaaaagcagctgggaagcggcggggactcgagttcccagcgccgggcggagcgccggacagagccccgcagcgccccgcggc

SEQ ID NO: 50077 - DNA, 122 bp, Homo sapiens
atttttgagttcacagcttggggactcctactgaagtctgtagattggcaggacctgcttcggggcagccatgactggcacctattgtaggaagtgctctagacacaccccaatgtctcagt

SEQ ID NO: 50078 - DNA, 122 bp, Homo sapiens
tctcattttcctctacctaaggatcttcctccatgcaatttcggcctaggaggcccttcccgccccttttcgcctagctaactctttcggtactcaaccaccaactcctaatcctccctggt

SEQ ID NO: 50079 - DNA, 122 bp, Homo sapiens
gagcatggtcaaggacagacacctgggcagtgcaacttcctcatccccaagatgagatagcgcctgtcctcttccactccaagcagggagagtggaagacttgggaaatgcagattaatggg

SEQ ID NO: 50080 - DNA, 122 bp, Homo sapiens
gctgggaggtgttgtcctcggaaacgtcgctggcgcggagggatggttcggcgctttaggcgtctgtcacagacctatctgcgggtcgccttcacccagcatctcagaaactgcgcgcggga

SEQ ID NO: 50081 - DNA, 122 bp, Homo sapiens
gcggagagaggcagcagcctggctcctggttggcttagggatcgcgggctgtacggaaggcggcagcagctctgcgcctgcgcagtgaggggagcgtgctagaacaggagggtggtttggga

SEQ ID NO: 50082 - DNA, 122 bp, Homo sapiens
gcaatcccaagtgcttgtcacacggcgcctgcgacccctttcactctcactggcaacgcgcgggatgggaggtgaagccacatcacttccaggggcccccgtggctgccacggaggtggggg

SEQ ID NO: 50083 - DNA, 122 bp, Homo sapiens
cagtgcagtaaaaggagagataatggagaagaacagagaagctccccaggactcccaccacggtctgtgataagatcattcccactgccacataccgggaggccattctgccactgatgtct

SEQ ID NO: 50084 - DNA, 122 bp, Homo sapiens
attgttggaaaaatataattaaaaaccaaaatctcccaacccagaaatcctctccacaaacgttagtagacaaaacacttttattactgaataagcattaaacgagactgtgatacacatca

SEQ ID NO: 50085 - DNA, 122 bp, Homo sapiens
tcttcagctcctcgtggctctgctgggtgataagcacggtctctgcggaggtgatgcagccgctgcacgccaggcagtcgtttagcgagaccttggccttctccagcctccgggtcccgccg

SEQ ID NO: 50086 - DNA, 122 bp, Homo sapiens
tttagttacacagagcgtaacattaacccaagagcagaaaggttttatttacagggttttcgaacttggtttgtaagacagctgccatcacaagcatagcttacaaatgtgctggggacccc

SEQ ID NO: 50087 - DNA, 122 bp, Homo sapiens
gtaagcaagtttgcaggaggatttgctcttgcaattctgagggctacacaaaagcagactcggtaattatgcctgctcaaatgatgcctaaacgtgtgtcctgaagaaccagggtccccaag

SEQ ID NO: 50088 - DNA, 122 bp, Homo sapiens
cctcactcagaggagaggagcccacccctcccaggacacctggctgagccggaacagcagcgcaggggagctgtgacagcagagagcagcaccaggtcacacaagcagccgccccggaagga

SEQ ID NO: 50089 - DNA, 122 bp, Homo sapiens
gccataccccacacagtctccaggcgggaagaggacttccttcttcgtgatcaatatttgcgtagcactttgcaagtgttttcgggttcatcattgcatgtaagcatcctaggatcccattc

SEQ ID NO: 50090 - DNA, 122 bp, Homo sapiens
gcgctccgccctcggcctcctccgggcttcggctccccctcctggccgtcgaggctactgcgcccagccaggccacagccacgcgcccacccgccccctggccgtgggttcccccgggcagg

SEQ ID NO: 50091 - DNA, 122 bp, Homo sapiens
tgaggaaaaaaatctctgttgaggggggtactgtgtgtctctgaagtggcctctgtgttgcgtctcaggcgtcctggtcctgtcctggtacccacctggcatggctgatgataacggggagc

SEQ ID NO: 50092 - DNA, 122 bp, Homo sapiens
accgccccaccctacctcaccctcaagcgtgagtgaatgcgcaaataagggttttcaaggcgtcagtgggaaagagggaggggaaggcaacgctgaggacgggaggacagggcggtggcatc

SEQ ID NO: 50093 - DNA, 122 bp, Homo sapiens
cctggccatcagtcactacagtttcggacattcggtggaaaagcgaccagggacagaaggcgccaccataaaggtcacctggcccgagcagacgccaggtcgctgcttcttccttggctgct

SEQ ID NO: 50094 - DNA, 122 bp, Homo sapiens
caaattttatcccagaggtccgcatacttttttcgcaaaaggccagagagttggtatttccggctttgccggcccagcggtctctgttgcagcccctcaccgaaagccacagacacgggaaa

SEQ ID NO: 50095 - DNA, 122 bp, Homo sapiens
tcccgggcgcggggcggtgtctcagggaggcgtctcagccgagctgcagggcgaggggagcgagccgggtcccgggggaaggcatccggtcagggcctcgcccacccggatggctcctgcgc

SEQ ID NO: 50096 - DNA, 122 bp, Homo sapiens
cgcccaatgctgtagacccgcgtgatgccggggcattcgttttgcaccttgtacagcgtccgcacaagatcatcatagcggtggtggcgaaaggtcaccggggcaaccaacttgaagagaag

SEQ ID NO: 50097 - DNA, 122 bp, Homo sapiens
atcatgcggagggaagagcttagcagccaagtggaggacagcaccctccatgcctggattcgttactcgctcgttctagatgctgagctgctggcgcactgcagcacaactagagatgtacg

SEQ ID NO: 50098 - DNA, 122 bp, Homo sapiens
ggcctgcgcctctggataccgctgggctgacatggcggtggctgaacagggttgcgcaaccgcgaacagccaaggaagctgctttatttaaacccaactaacttcccccgaagcagcgcccc

SEQ ID NO: 50099 - DNA, 122 bp, Homo sapiens
tctcttttcttctctatgcgaggatttggactggcagtgagaataagagacaacgattcacgtctactttctaggatgacttccatgtgctccatctcgcgcgtccctgagcatgttgaatt

SEQ ID NO: 50100 - DNA, 122 bp, Homo sapiens
tgaaaggagaagaaagtgctgttcatctttttccagaaggaagtaaaactaaggttgctgcgatgagctcttgtgtggtgctaggttttcagtgtgtcttcagcctgagtttcctactgact

SEQ ID NO: 50101 - DNA, 122 bp, Homo sapiens
tgttcatggctgaggcgatgcattaggaagatcctggacctagagaacaagtcccccgaacgctgagttggaggcgggacttcgggtgcgcgttggtgcgtcaacgtggtgggggggtgtgt

SEQ ID NO: 50102 - DNA, 122 bp, Homo sapiens
gaggcccctgggccagggccagcttcgtgcacatgtgacctgtgcggtagcgcagagccccgtacttagaagggtcccaacacttggctaaatgctctgccgctgctgtcttgaaattctta

SEQ ID NO: 50103 - DNA, 122 bp, Homo sapiens
gaccgtccccgctgcgcagccgcctgcgtcgccagccaaccacgcgcggccgagtagccccgcccctccacatggccaatggccgcgcgctctgcccgccccgcctcctcgctgcgggaagg

SEQ ID NO: 50104 - DNA, 122 bp, Homo sapiens
gcctgctccacggagcgaggctgtgtatgcagctgtggtttgggcagctgcagcagcacccggggagctaccaccccaactcagaaggggtggggctccagcttgtccatggtcccctggct

SEQ ID NO: 50105 - DNA, 122 bp, Homo sapiens
cggccctgacaacagtcctgggggcccctggaactcagagctgttgccttctgatctcagcggaaccggggtcagcaggaaaaactgggagcagctggggctgggcccaggccgcaccttgg

SEQ ID NO: 50106 - DNA, 122 bp, Homo sapiens
tgtgtcgtcgatcaggagggccaggtggcggcgagggcgggtcgttagtggcagccggagcggcagggaggcggcagccccgcttcacgggcggggagacatgctggccgggcggcgcaggt

SEQ ID NO: 50107 - DNA, 122 bp, Homo sapiens
aggacccactggatgtcaagcattgtgcatagttttcttcgattgttgcaacatcccttgcgaggtaggttcccattttacaaagatggaaatacgtaagtccaaagggtgttagtgatttt

SEQ ID NO: 50108 - DNA, 122 bp, Homo sapiens
caattcttaaaaaaaaatggctttccgctgttataagcctccttcctaagactcagggtccgcagcagaataccctgacccaaaataaaaatactatgacaaaaatactccaggaggcagcc

SEQ ID NO: 50109 - DNA, 122 bp, Homo sapiens
tattagacaccaggcatttagcaggaggagaaaggaagaggagatttctcaagtcaatttcgtatttgggtagaaatctgcaggcttgaggcacctatcactgctatgtctagactggtgga

SEQ ID NO: 50110 - DNA, 122 bp, Homo sapiens
tagaaagaaggattaacttgaacagggaaagagccctagggtttactactgaggaatacgcgggatcgtgcaaaggaggtggtcccagagcagtaggaacacttggtgacaacacggacctt

SEQ ID NO: 50111 - DNA, 122 bp, Homo sapiens
cagtagccaagcctgtccatggggccctggttccagagacctttgccctcccaaggctgacgcacagcagagatcccggtgcaatcgaggccgggtcggacgctggctctggccaggcacgc

SEQ ID NO: 50112 - DNA, 122 bp, Homo sapiens
atcgagccttcccagtgttgcactgggaccctagggtggccctggggtgcccaagagatgcgcaagcatctcgcgccttccaagcgatcagcgaggaaaaacggggtccaaattcgagtaga

SEQ ID NO: 50113 - DNA, 122 bp, Homo sapiens
gagaggccaccttctggccttgcgatgaatcctcggtttccccttctcagatggggttttcgtgagggtacaacgtcggcattagacattccaggtgacgcccgtacgcggtgggcggttcg

SEQ ID NO: 50114 - DNA, 122 bp, Homo sapiens
ctgtgtttttgcagaatgacaggcttgggggctgcctatgcgcagaatcagagcgggcggcggcggggctggcgtaaccggcagcagcggcggcggcggcggcggcggcacgagcgcgggca

SEQ ID NO: 50115 - DNA, 122 bp, Homo sapiens
ccttgtctggcttttcttgtcatagcagcacatggagtctattagcctcatttttccattcgtctttgaagttttctcttatcgctcccactcctacaaccaacaacaaaagagtcctagcc

SEQ ID NO: 50116 - DNA, 122 bp, Homo sapiens
aggatgggagggagcacgtctgatagaaaacgtcaccgagacacaccccagggccagaggcgaacgcatctgaggggtggctgggcaggagcaccagggctatgtacacggtcagggtcttc

SEQ ID NO: 50117 - DNA, 122 bp, Homo sapiens
ttaacagttcaagtaggtattttggaagatgcttacctcccagttgggtgtatctccctgcggcttaggtgagcgccgaggctttggctcctccccagctgctgcgagcttcccactgcgcc

SEQ ID NO: 50118 - DNA, 122 bp, Homo sapiens
ggagttgtagtttttttgcctttgcctctccatgacgcaattcctgtgcgacatacgtagcggccgccattgttccgcgccgatggcgagatccttgttcctcagatagcgttcatcgcccg

SEQ ID NO: 50119 - DNA, 122 bp, Homo sapiens
gggcccaggggcggggcctaggggcctcggggcaggacaggacggctgaaaccgaggtcccggcgcgcggggcccaggcgccgtgcagtgagagcacgccgcttgaccgaaggggcggggcc

SEQ ID NO: 50120 - DNA, 122 bp, Homo sapiens
tcggagcttctgaggcggcggcggcgggagccggtcagagggggcggcccctggcggcgacgcccccaagcccagccctgcccggccccgctccatccccagccagagcctggtctgaccgc

SEQ ID NO: 50121 - DNA, 122 bp, Homo sapiens
cgggcagcttccgccggccctggcttctctgtggccgttcgaagcagcagttccgtcagccgcttcctcgggcgggggacctctgtcagcaacgtagaatgtctccaggctgtccctgggcc

SEQ ID NO: 50122 - DNA, 122 bp, Homo sapiens
gaaacagccaagttgggttacattatgggacatgctcatgatggcatcatatttaagtgacgtttttgaagcacggtagtgacttttggaaaaggctcaatacatcattttaatgagacgtg

SEQ ID NO: 50123 - DNA, 122 bp, Homo sapiens
cagacttcatccctggatccatcttggttcacatttcccaggattatgagccctagtcatcgtaagggccagtagtgactcaagtggaattagataggcatatcctattagctagaagagat

SEQ ID NO: 50124 - DNA, 122 bp, Homo sapiens
actacacagaagccgcgccgggcccgggaggtgtgggtctgatgtgccgatctgcgaccacgctgcctctggcattgtgtcagggtgatgccggccttcccgcattgttcccctctgctttc

SEQ ID NO: 50125 - DNA, 122 bp, Homo sapiens
gcaaaggcgccgtcacgtagataggcggcctctaccaactcacgacagctaggcggggagcgccgcctcaaagggtgcaaccttgatttcccagaggacgagtctgtctcagtatctacgtc

SEQ ID NO: 50126 - DNA, 122 bp, Homo sapiens
aaaaggcaagaaaactccaaagttggacagcaagcgtcaaaagactgcacagcaggaaggcgaaaccgaacagaactgctgctgcgcggcgacagctgaagtgggtggagaacgggagggcg

SEQ ID NO: 50127 - DNA, 122 bp, Homo sapiens
cgcgccgagtcgttcctgtggaccaatcacaacgtacagaatttcccactggccaaccaccgcgccgagccgtttccattcgctcaaccaatcaccggcgtcgtccgccgcacgctcagaga

SEQ ID NO: 50128 - DNA, 122 bp, Homo sapiens
tgattctagtgctaacttgtcatttctctgggctctctgtgacttctcagatcctgtccccgtcactctgccacccccagacctagaccatacctgtaactcctggatctcctggtacgtgc

SEQ ID NO: 50129 - DNA, 122 bp, Homo sapiens
tccacaatctgtcccttactcccagcccactggaacttcctttgctctaaaaaggcagagcgagaaagagttaactcttagagggaattccgctcattttttttccctgaaagattttaaaa

SEQ ID NO: 50130 - DNA, 122 bp, Homo sapiens
aaagattccttagaactcttgcctacttgattaaggatactggtaaagaaaatgctatttcggaatcttagatactgtctactctggtcacatgccaatcaggctttaagtaaagatatgag

SEQ ID NO: 50131 - DNA, 122 bp, Homo sapiens
gactcatcgagccgtagccggctcctcagtacagtgacttgcacacaagctccaaggagccgcgcttatctcctctggccagcctggcgttgcaccgtttgtccgcctgctggggcctggtc

SEQ ID NO: 50132 - DNA, 122 bp, Homo sapiens
agggggcactacagtgggtagactaggaaggaaggcaagggacgcgaggtgggaaccaggcgaattcctagacctgcttgccgcagaagagtgcccgctcaagtggaacaaaagcgcagcta

SEQ ID NO: 50133 - DNA, 122 bp, Homo sapiens
aggggctgtacgaggtgagtaggctgtggaggcacggccaggcagcctgggcgtccctctcggatccctgccctccgttccccgtgcttcctctttgctgttagattctagaacgcagattc

SEQ ID NO: 50134 - DNA, 122 bp, Homo sapiens
gagccgctcccccttcggttcccttttcccttttgggtctgaggttaaacagagggcagccggggcccgcgacctctgccctctgacatctttgaactcaaaagtctttgatgttttaacat

SEQ ID NO: 50135 - DNA, 122 bp, Homo sapiens
aagccatccacacttagagagcttgagcgctatgtcctttcctgcctacgtaagaaaccccggaagccctacagtacgtatgaaatgaggttcatctcatggttctgaggacagttgaggaa

SEQ ID NO: 50136 - DNA, 122 bp, Homo sapiens
ttcaaatgtccaggcagtggtgtaggcaggggtcagctctgaagctggcctcctctcattcgggagacccctcagaggtcccagcctccaggatgcagtgttcagagcaatacttctcagtg

SEQ ID NO: 50137 - DNA, 122 bp, Homo sapiens
cacaaaaacggaaaggaatttccgctccggataagccccagtgcaaacaagctgcaacagcgggctcggcgggaggaaggagaaagaaggggaggcggcagcggaggaggagcagggcacat

SEQ ID NO: 50138 - DNA, 122 bp, Homo sapiens
tatcatcctctcccacgttgaaattaggaaaaatatcactgggggcgtgtccaccccatgcgatgttgaaagtaatatcctcttgtctcatggatcatgggaacaatatcagtggcgtggtg

SEQ ID NO: 50139 - DNA, 122 bp, Homo sapiens
ggcaactctttgtattcttatgggaattaacctacatctaaaatatacatatctggcccacggctgtcgctcatgcctgtaatcctagcactttgggaggccaaggcaggcagatcatctga

SEQ ID NO: 50140 - DNA, 122 bp, Homo sapiens
cattgtaaacaccacatttatttgtctgaggcttgcaaacctctggtaagaagcacagaacgcagggctctccttcatgctgccctgggccccagctcgccaggcatgcaggacagagctgg

SEQ ID NO: 50141 - DNA, 122 bp, Homo sapiens
acgtccagggccaggcgggttgccggaatccgtggaggatggatgctggttcacaaccgtcgggagccgctgtggggaccctgcggcaactccctaagactcgaaggctccatctaatgaac

SEQ ID NO: 50142 - DNA, 122 bp, Homo sapiens
taaaagcaactgtgtgacgattcctccaagcaagaaattggaattgaatgtctcaagtctcgttgcggttgctgaggggattggatatagggacctggactccaacatgaagaagctaggga

SEQ ID NO: 50143 - DNA, 122 bp, Homo sapiens
gctggggttctctgggaaagcttcagaggaagcagcatgggaactgagtcttttcactgccgagatcgcgccactgcactctagcctgggtgacagagcaagactccgcctcaaaaaaaaaa

SEQ ID NO: 50144 - DNA, 122 bp, Homo sapiens
ctcccaaggcctgaagggggctgattgggccgggggctcccagaggataaacctaggggccggtcggtcttcctcggcgtggaagtgagagccacgcggcgtggcggagctccaccaccgtc

SEQ ID NO: 50145 - DNA, 122 bp, Homo sapiens
atagatacgcatgtgctttccttctagaaggcacgttcacgcgtattctcagtttaccttcgtgaaacggtggggtcacaccgcatgctgtgtttattgtgctgatggggaaatgaagggtc

SEQ ID NO: 50146 - DNA, 122 bp, Homo sapiens
acttcctctcactcagtctgaagcagttccacaggcattccgtgaccctcctcaccctggcgcttgaaggtggcagtctctttgttttgtagaatgtctccggtgtctcctaatgattccgt

SEQ ID NO: 50147 - DNA, 122 bp, Homo sapiens
gagccgggctccgggcccgaccagaggagggcggtgctgcagggctggtccgggaggtgacgaccggcttcggagagtctatcatggcagctcggactggtcatacggccttgagaagggta

SEQ ID NO: 50148 - DNA, 122 bp, Homo sapiens
gccggcaggagaggaaactgcggtgtcactgcccgccggccgtgggggctgcacccagcgcggctcacaggggtgttcttggtatcgctggcctccacatttcgttctctccatgccaagtg

SEQ ID NO: 50149 - DNA, 122 bp, Homo sapiens
ttgagcccggggtcgaggctgcagtgagactaggtcattgctaccacactccagcctaagcgagagagagaccctgtttcaataaaatgaaataaaatagctttcacactatttcaactgat

SEQ ID NO: 50150 - DNA, 122 bp, Homo sapiens
cactcggacccacagattcttcattctatgggggtgaccagagcagaattcctctatagccggggacccaggccaagggcctttcattttgtccttttattgtagtaaaatatgtatgacat

SEQ ID NO: 50151 - DNA, 122 bp, Homo sapiens
tggagagaaaggagatgcgtgacacaggccctgccaaggtggaggcagagatccaagcgacgcgtccactagcccgggaagcccagaatgccacgcgccggacgctaggaagaggccgggat

SEQ ID NO: 50152 - DNA, 122 bp, Homo sapiens
gggaaattatctcatggtcatgcactgggggagacacagccaggcctgtctgttcagattcgcctctgtgcccccggatcttcagagattaggatgtacagggagggcacctctgctctgag

SEQ ID NO: 50153 - DNA, 122 bp, Homo sapiens
caggccatcaaggaaggcgaagacatgatcgcggaggagcacttcgggtcggagaagatccgtgagaggatcatttacatccgggagcagtgggccaacctagagcagctctcggccattcg

SEQ ID NO: 50154 - DNA, 122 bp, Homo sapiens
agaatctctaaagcaaatcaggctgaagaggggaaaaccagcagggggaggcagcattcccggtgcccagtatggtctaggaggcattgaaattccagggccgaagtcctgagacaaagatc

SEQ ID NO: 50155 - DNA, 122 bp, Homo sapiens
gtgcactgcgcgccggcacgagggtgttttcgacgttggctgtggggaaacagcaagcggcgtggacgaccgttgctgagctggtgtggaacgtctgtgatcaggtaggtgtagtctcgtcg

SEQ ID NO: 50156 - DNA, 122 bp, Homo sapiens
ggcctcgcagagcggcgaagggagactcgggagtcctccttgtccccccttggggtcctacgccttctggcacgcggctcctccaaatgtaggaaccacggatccggctgagacagctgaag

SEQ ID NO: 50157 - DNA, 122 bp, Homo sapiens
ccaccacgtctcgagtgcaggcccagtccactgtagatgcgcttccggcggagccgaggccggaagcggaagaaggggacacagacctgcgtccaagctgtgccacctgagacgtgggcggt

SEQ ID NO: 50158 - DNA, 122 bp, Homo sapiens
cgcgcggagctgggcgactggggcgaggactcgcgcacaggtgagtactggccccggttgcggcatgccaggcaggccagggtcgctcgggggcgggcaggttgggtttttgctcaagcacg

SEQ ID NO: 50159 - DNA, 122 bp, Homo sapiens
ccccgtcccgctgctgatacagagcctgggcatccgcccctgccccggcccccggggtcccggctccttccagcactgccaggctcctccagggctgcgctggcagcgctggtccccggccc

SEQ ID NO: 50160 - DNA, 122 bp, Homo sapiens
ctccagcgcccggcgcccgcacactcgccagcccagctgccggcacgccggccagccagccgctgccgcttaccagtggcgcctcgctgactccccgggggcagctcttcaacggttcccgc

SEQ ID NO: 50161 - DNA, 122 bp, Homo sapiens
aaatgaattagaggacaaagaaaaaccaccagacatccaagagctgaaactcagagagggcggacccttttgaggaaagaggaaaaaagaaatcagcaaaggagactgttaaagtcagataa

SEQ ID NO: 50162 - DNA, 122 bp, Homo sapiens
gaggccgcagaagggtggggcaatgcccgagtgccggaggggcgacctcccataaggcaacgacagggcccggagtgttccaggggagacggcgtagactagggggtctccaggggagggag

SEQ ID NO: 50163 - DNA, 122 bp, Homo sapiens
ggaaccaaaggtcaagataatgctgagtctgccttacacccgcaggcttgctgggacccacgcagcccgagccccggcccgtttccttctcgggctggggcgctggatggagcaccggggta

SEQ ID NO: 50164 - DNA, 122 bp, Homo sapiens
ctctctgctttctgtgtcagctcacctgtcacctccgcctctgcagaaggagggtgatggcgcgcaggggtcaggcacaccccgggtgctcctggagtctcatcttcctgttttcttccctt

SEQ ID NO: 50165 - DNA, 122 bp, Homo sapiens
atctttacttgtgggaaatggagctgatggaaagatagcaagccctcccaccacctggaacgtgagagataccacgtcacccagcaacaaagcccacatctttacggggacgctatatttac

SEQ ID NO: 50166 - DNA, 122 bp, Homo sapiens
cctccgggactcacatggggctgggctcaccccggggcacaggccctgtaccccagttagcgcctcgggctgccaggcagatcttgggctcccgaggcctcagtctccccctggttagcacc

SEQ ID NO: 50167 - DNA, 122 bp, Homo sapiens
aggaaaggcacggtgagcccccttccttcagtaaaactgcagttcccagaacactgatgccgtccccctaacgccactgtgaacacctggacaagtcacatttcaatacgtgcaccttcgtg

SEQ ID NO: 50168 - DNA, 122 bp, Homo sapiens
aataaatgtaaaagcacaaaagtctaacagaaattatgatgtatttccataaagtcaccccgagggtgcctgcctctcctgctccctctacctcttccacctctgccacccccaagacagca

SEQ ID NO: 50169 - DNA, 122 bp, Homo sapiens
ccaggaagcccctgcagacagtatgtgttttaggctttgctggccaaatggtctctgccgcgactactcagctctgccattgtggctgcagagtgaccatagaccttctgaaagtgaatgag

SEQ ID NO: 50170 - DNA, 122 bp, Homo sapiens
ccgcggcccccgcccggcccgggcgcctgttattgttgggccctcagcccaaactgatcccgcagaggcggcagccagctcgtcagtgacttccgggacgtcccccatcccgcgctccctgc

SEQ ID NO: 50171 - DNA, 122 bp, Homo sapiens
agggctgggtgaagcactgtggagcctgtgtgagaggaggcacgggcgcgaacacaggagcgcacttcctcattccgtttctcctcatcctctctcccactgccactggcatcactcatccc

SEQ ID NO: 50172 - DNA, 122 bp, Homo sapiens
tttatgcatgttagacaaacaaatcacacactctgggcttccagttgggatcttttccgacggcccccttgtggccaccggagcctccgtctggggaaaagtgtttgccttttaagcaacta

SEQ ID NO: 50173 - DNA, 122 bp, Homo sapiens
ccagccgggcaggccccgccccctggtcctccaggaaacgctgccgaggagtaggcggggcgggcgctttggttccgagggtgcttctgctccgactgcttttcccacgggcgtcatctata

SEQ ID NO: 50174 - DNA, 122 bp, Homo sapiens
tctttgcattcatggctgggttggaaccagcctcaggaaagcggtacccatccccagcaacgctgagcttggcttcgtcctgaggagctccagccaaggccccgggctgtgtccaccacgca

SEQ ID NO: 50175 - DNA, 122 bp, Homo sapiens
tttttggtttttttttttttaagaaaaaaaaaaaggaaaggaagaaagcaattaaaggggcgggggggacttaaagtttgcacctcagcatgagtcaccgaatcaaagttcagcaaccacat

SEQ ID NO: 50176 - DNA, 122 bp, Homo sapiens
ggaaaacaataggtgctggggtttaggagacatttttcttgggaagagtcacattcgtaacggcgatgtctgctgcagttcccactttgtggctgttacagttgttttatgggttttttaaa

SEQ ID NO: 50177 - DNA, 122 bp, Homo sapiens
gccaccagagggcactcagactctgcaaaccagcctggctctgggtggccagctggggggcgtctcctctcccagctgcctgcctgctcgcatgaccaccccacactcccagcaaacccacc

SEQ ID NO: 50178 - DNA, 122 bp, Homo sapiens
gctggcgtcgccgcccggcgctcaggttgctcagcaacgagggaacgtggggcgggagctcgcgctggtccccagcccgccgcccgtctcctgccggcttccgctcccgttcttccccaggt

SEQ ID NO: 50179 - DNA, 122 bp, Homo sapiens
cacttcagcctccctagtagctgggattacaggaacacaccactgcacctagctgagatgcgtgcactttgcctgacaactcctcccgcaacctccataatacctgagacacggtgatgcca

SEQ ID NO: 50180 - DNA, 122 bp, Homo sapiens
ccaaggattccttccgtgcagggttacctgggcaagcctgggggttgcagtcctggtactcggcagcatcgcccacgcagggcaggcccccgttgcggggctccgggttagtgcacgttctc

SEQ ID NO: 50181 - DNA, 122 bp, Homo sapiens
tgatggagtcatgtcctagacgtgaaactatggggctgtgatcacaagcaaatgtgtgggcggatccgttgcttgggttcttccccgccccctctttttttcggaccatgacgtcaaggtgg

SEQ ID NO: 50182 - DNA, 122 bp, Homo sapiens
agtcattctcaactcccaggggcaacagaatgccctttgccagtgacagcagctggccaacgtgacatccccctggagcacccacctctgtgcagttcagtggtcagaggttacactgcctc

SEQ ID NO: 50183 - DNA, 122 bp, Homo sapiens
tggatgctttatgtgaatgcaaggctccaactcttcaggctgctgtctgggtgtgtgctgcggcattgttagcccatttggattgaagcctatgcatccagagaactacctcctcatcctta

SEQ ID NO: 50184 - DNA, 122 bp, Homo sapiens
agtgggggcctggggtgggagggacacatccactgagagggacaaggggacagctcgttccgggcaaggtcgttcttgactcccaggacccaaatgcccatgtggacagtgctttagagacc

SEQ ID NO: 50185 - DNA, 122 bp, Homo sapiens
attggctctgacgtgcgtggtgcgtgaaaacgtcacgagacgccggcgttactataagagcgcagccgtggcgcttgcgcgcctctttctcagtgaccgggtggtttgcttaggtgaggtgc

SEQ ID NO: 50186 - DNA, 122 bp, Homo sapiens
acacactgttgaatactgtaaccttgtaaccatgaagttggagtttcatgcagcatgtaccggcttgtttgcattgctcagagatagcagtgagattgatgctatctatgcacctggtctca

SEQ ID NO: 50187 - DNA, 122 bp, Homo sapiens
gtcgcgaacctgcattgcgaggtggtctctccctcacaccacctctgatgtcccaaaagacggggagaaagttgcccgccccgggctgcggcggggcctgctgctccgccccggcgctggcg

SEQ ID NO: 50188 - DNA, 122 bp, Homo sapiens
gcgcacaactctctgggaccggaagcaggtgaggcagagtgggcggagccgctcaaagcccgcgtccacgttctgctcccatgccctgctcccatgccctggctgcaggcgcctgcggagtc

SEQ ID NO: 50189 - DNA, 122 bp, Homo sapiens
gttcacggaaatgcggtcaattaggctggtaggaggggtaaaaatgacgggtctttcatgcgcatgaaagcagggatttagagcgcattgcacggtgttcccaggctccggagtacagttcc

SEQ ID NO: 50190 - DNA, 122 bp, Homo sapiens
tgcaccctccgcagctgctggcccaggtcctaatcccctcactgcctgggctggcagggccggccagccagccgctcccagtgcggggcccgccaagcccacgcccacccggaactctagct

SEQ ID NO: 50191 - DNA, 122 bp, Homo sapiens
gtggacggggacagcccatgcgtgatggaaggacatctccgtggacagggacagtccatgcgtggatggaggacaactccgtggacggggacagcccgtgtgtgatggaaggacatctccgt

SEQ ID NO: 50192 - DNA, 122 bp, Homo sapiens
tccactctactctgagccctgagccctggcggctgagtcagggcagagcgggagcaaagtcgtcctggttcatacctgaaccgagaggcccggccgcggctgtggtctgcaaactcaccaag

SEQ ID NO: 50193 - DNA, 122 bp, Homo sapiens
tacctttgccccgagtgtgtgggccaaggcgccgcgcctactgggttgcaagactcggtccgcgccccggggccgggccggaggggagcgggactccgagggtgcggttcagtggccgctcc

SEQ ID NO: 50194 - DNA, 122 bp, Homo sapiens
acagtccccaggctaccgctgccgttcattgacaggagcgggcgctcggacgtcagcagccggacctttggcaaggctgctcccgcggagacggctcccacccccgcacctgccagcccgcc

SEQ ID NO: 50195 - DNA, 122 bp, Homo sapiens
agccgtagggattcccattcagtttcccactgctcttggaataaggttctcatcccttaccggggccctgcctaacctggcccgccagcctcatcttggctgccctcacctgtggtctagtt

SEQ ID NO: 50196 - DNA, 122 bp, Homo sapiens
ggtggcgcagcagcggcggcggcggctgtgggtaaaggcgcggcgcgcggcccccgagcgcgccaaccttgccctagccggagcccgctgcggcccagcgcacggccctcaccccgcatcgc

SEQ ID NO: 50197 - DNA, 122 bp, Homo sapiens
agtcacattaacttcaaacagaactcttggcttgcttaataatggctggcaaggcaacatcgtaactttttccctaattacagaagcatactcctggtataaaattcggaaaatataaacca

SEQ ID NO: 50198 - DNA, 122 bp, Homo sapiens
cagaggcttccagaggctggagcgtcactgtatttataagactggtggattgcacaacctcgtcgacggaactgaagggaggtgccacagtcaagggtgaacttctaatcgctaacccctgg

SEQ ID NO: 50199 - DNA, 122 bp, Homo sapiens
tttctgaccacttgtttgtgtcgagatggagtgtctgacccacaaaccggccccctggtgcgtctggcaggcaggcccctgctggcccggccacacctgggagcagggaagtgctcactgcg

SEQ ID NO: 50200 - DNA, 122 bp, Homo sapiens
aaagacttagctaaagaatctcaagtaagcctgaccttgggtactggagacctaaagctacggtatctccaggtcccgagcgtcagtaagatggagctaattaggaggaaaccgaggtcggt

SEQ ID NO: 50201 - DNA, 122 bp, Homo sapiens
gccggacaggcccacaaaaggtagcatgagagaaagtgaaggtgtgacacctctctgtcacgttgtagaaggagacctcaccagcatcatagtccaagaaaatccccacccgctggagcggg

SEQ ID NO: 50202 - DNA, 122 bp, Homo sapiens
ctcggctgcgctggccctccaggagcagtggctgcaggccggcaacggcagaagcacgggcgtcctcgacacgtccagactgacttccttcattgagcggcgcaaacaccagaatgatgttc

SEQ ID NO: 50203 - DNA, 122 bp, Homo sapiens
tcatcttctggcaactctggctgtacccagtgctctgtcattgctatggatatgttacgccgttagtcttaattttaaaaaacttgttccttgtcaaaaacactgataatttttcaggagac

SEQ ID NO: 50204 - DNA, 122 bp, Homo sapiens
ttcttctgattggccgagccgagtcgtcacgagccatgattggctcagggccaaccaccccgccccttcacctagggctcggcccaggttctgctccctgacacgcagaggccctgcgtccc

SEQ ID NO: 50205 - DNA, 122 bp, Homo sapiens
ctgcactccagcctgggcaacagagcaatactctgtctaaaaaacaaaaacaaggcttgtcgcgatggctcatgcctgtaatcccagcactttgggaggctgaggtaggcggatcacaaggt

SEQ ID NO: 50206 - DNA, 122 bp, Homo sapiens
ttcagacgtggctgcagcagatcggtttctccaagtactgcgagagcttccgggtagagtcgcgtgggatacgcctcccccgagtcagagcgggcgccctgtgcacagggactgcgttccct

SEQ ID NO: 50207 - DNA, 122 bp, Homo sapiens
tgcggccctagggcgccgtctgagctgagctgtggtcttcggctcctcggcgcctcgaatcgcagatctcggtagatgccgcccagtccccgccctgcttgcggaaagaggcgggcgactgc

SEQ ID NO: 50208 - DNA, 122 bp, Homo sapiens
taaccaagttgatttcaccgaaatgtgaatgatgcaaagtgaatgatgcctggatgatgccggagtggggctaagggggctagcttcaatttggccctgacccccgcccccagggtcgtatc

SEQ ID NO: 50209 - DNA, 122 bp, Homo sapiens
gaaggcccactgtcgagggtcctgtccagggaatttgcctcccaggcttcttctgatccacggactcacctccagggtggtggggtcttgggcccgaggaaaggagaagataccctgtgttc

SEQ ID NO: 50210 - DNA, 122 bp, Homo sapiens
cagcaggcttagaggagcgtgaccacactttgggggctgagttcttcattagctgtgctacggtcacctgggctttggggcacctgtctggatgggatgttgctcaacgggaggaaaggtgc

SEQ ID NO: 50211 - DNA, 122 bp, Homo sapiens
cctggcgagactgcaaggttagggatctcgtacccttcagcttttggcagcggttcggaacggtcaattcaatgagagcggagttttagaataaaaatactcttctatccgtgcagcacccc

SEQ ID NO: 50212 - DNA, 122 bp, Homo sapiens
tacgctcttggagggaagctccactcccgggcctgccaagggctggggccagaccggaaacgggatcatcttcgatcaagggctgtgggctctgctggttcctgctgcctgtgccggctccc

SEQ ID NO: 50213 - DNA, 122 bp, Homo sapiens
ggaaatacccctcttttgggaagcgcgcccctgccttccggaaaggaagaaacgtgatcacgccgctgcactcaagcctctgggtgatagagcgagaagaccctgtctccaaaacacaaaca

SEQ ID NO: 50214 - DNA, 122 bp, Homo sapiens
tcggcgccgccctcctcggcaccgactgaggcgctggcccgggagcggatcgcggggccgcggtggctgagtcacattcccggagccccgccacccaggacaccgcggccccggcccccagc

SEQ ID NO: 50215 - DNA, 122 bp, Homo sapiens
gctgatccagcagtaggtgagcgagctgtcccagaccacatggcccaacatcctgtgcaccgtgcgcggctgccgcaagatcctgcccaacagccccgcgctcaacatgcacctggtcaaga

SEQ ID NO: 50216 - DNA, 122 bp, Homo sapiens
ccacgtccctgttttgcgtggacctgttggtgagtgtgtccagacgtgtgtctgccctgacgtcctttgtgaatgtctatgttggggtgatgatctcctgtgtgtgcatttttttaactata

SEQ ID NO: 50217 - DNA, 122 bp, Homo sapiens
agaaggaaaaggaaaacttgaaacaagagcaaacatctgcagcttccccccagcactgtccggtatccaacagcaggggtggtcaaagctctgcctctcccctctcccaggacaggcgtcca

SEQ ID NO: 50218 - DNA, 122 bp, Homo sapiens
gacgccctgtctttacgttgcaggcaaactcgccgagtatggggccgctagcccctccagcgcgatccgcacgaatttcagcaccaagcaactgacagaactggaaaaagagtttcatttca

SEQ ID NO: 50219 - DNA, 122 bp, Homo sapiens
gggggagagtcaggtgtcggcgagctggagctcggtgtgccggcacccagtgactgctggcggcctgggctgctggggccgacgcctgggtggctgccgccgccgcacctgctgcgagatag

SEQ ID NO: 50220 - DNA, 122 bp, Homo sapiens
ccggcgtgccctgcccgcggcaggggtgggggctttggggcgggcacccggctgcgggcccggaatggtttccccagctagtggttcttatattctgcaaggtagtgagcgcccaccctgcc

SEQ ID NO: 50221 - DNA, 122 bp, Homo sapiens
catatgaaagagacatggagttctaacttttggttaacaagctagacatgcccccaacaacgtgacaaggttgctaagaaatctaatgaaatctcagcctccattaagaatacaatgtccag

SEQ ID NO: 50222 - DNA, 122 bp, Homo sapiens
cagcgcgggcagggccacgggtgcccggctgtttcccgggtgtggaaggcgctcaaggtgcgcggcccggggcgcgctactgggggcgccctccgcggtgggcagcgcgccagggatcggcc

SEQ ID NO: 50223 - DNA, 122 bp, Homo sapiens
gacagaacacaccaatatgattccagtttgtagttctggtttctaattcaccaaactccccggagttaaaaaagccaagtggaaaaccagttaaatgctaaattttcccttacccagtgttt

SEQ ID NO: 50224 - DNA, 122 bp, Homo sapiens
gagccgccggcagcgctgacggctgcacctcccctcccacgcggacactacctgcaggatcggacgacccccagaactgtttgccaacaaagacatgcagggggcggagcctgagcgtcaga

SEQ ID NO: 50225 - DNA, 122 bp, Homo sapiens
ttggacagctcggcgccctgctcggtcactgccttcatgcaggtggccatgtcgtcgtagcgctcggcctgctcggccagcttggccttctggatcagctcagtcttctccatggcgggcgc

SEQ ID NO: 50226 - DNA, 122 bp, Homo sapiens
taccccccatgccaggcacttgctccctgagcctcggagtggagagtgaagtggtgtgtgcgaggcttggcaagtttttgggggggctgtccaaggtctagtccagccccctctgccgagga

SEQ ID NO: 50227 - DNA, 122 bp, Homo sapiens
atctggaacgggaatgcaaactagaatgtgaaatgcaaagccctgccagggcggaacatacgatttcatgctgatggcccacagaacagaacagaaatcctctccctttctattctccattc

SEQ ID NO: 50228 - DNA, 122 bp, Homo sapiens
gtggtaaggatggccacctgaggggaaaggcttggcctccccccagtcaatgggagccctcgtgacggtctacaggacagtcctttaagcagcagggcaacccagtctcaggctgggatcat

SEQ ID NO: 50229 - DNA, 122 bp, Homo sapiens
gacatggcgccgccgcgctgcccgctccggcctccctcctccgcccgcgcctccgcctcacgcgtccaccattagcgagccggctccggctaatacaaatatttactgtgcggctctgactc

SEQ ID NO: 50230 - DNA, 122 bp, Homo sapiens
tcaggtgtcacttactcctctgcatgcacccttgcatactgaacaactcattgctatccccggcttgccaggctatttcaactctccaatgttttggcataggctactcatgctttccggac

SEQ ID NO: 50231 - DNA, 122 bp, Homo sapiens
cttcgcctcctggcttctcatccactggggctgagaacatggcacactcctcaggcttcacgtcctcggccttcccctctgcaatcacttcagactccgacctccctgccccacaggtttct

SEQ ID NO: 50232 - DNA, 122 bp, Homo sapiens
tataatttttcatctttcccttgcggtactatatctattgcgccggtttacaatttctatcgcctatactttatttgagtaaatggtttggttaaggttgtttggtagtaaggtggaatggg

SEQ ID NO: 50233 - DNA, 122 bp, Homo sapiens
gcctttctgagggtctaagcccatggggcccgctgaccctgcctgtctgcccagacactgcgccactttccacgcgcgtggttcacccacctttctgagggtccaagcccacggcgcccgct

SEQ ID NO: 50234 - DNA, 122 bp, Homo sapiens
ctgactaattttctaggatgacctggtggggtgatgtgaaggtttgcaggtgccgccccccgacccccgccccaggcctttgctcagtcaatgctgtacttgtttctagaggaagatttaaa

SEQ ID NO: 50235 - DNA, 122 bp, Homo sapiens
tgcttgggcctgtgaatccgtggccggctctgggtctccctggacttggccatgttcacccgtgaatctgtgggccctgtgggtccccctggacttggctgggctcacccgtgaatcggtgg

SEQ ID NO: 50236 - DNA, 122 bp, Homo sapiens
cacagacgtgtccaccacggtgctgtggatgacctgtgggcagcggcagagatcagcgcacgtggggcctgcgcaggtcctgctggagaaccgcgcgggacccgggccggcagggcaccttc

SEQ ID NO: 50237 - DNA, 122 bp, Homo sapiens
tgccgggcccgcgggctgcgggccggcctgcggctccaagtgcggggcccgcccagcccacgcctaccccgaactcctgctggcccacaagcaccagcgcggttccctcccgcgcctctccc

SEQ ID NO: 50238 - DNA, 122 bp, Homo sapiens
aatttcgtttccctcacctgtggaatggggatgacaatagaggctggcccatgagatgcccggtgggaggaaaccaatgcccagccagcactcccaaccagcaggcactgaggattctggcc

SEQ ID NO: 50239 - DNA, 122 bp, Homo sapiens
cagcgtccttcggattacgcagccaggacaggaatgggggtggaccgagccatgaatacccgtggagagcggcctaactcggccacccactctgtgagagaccccttttccagctggactgt

SEQ ID NO: 50240 - DNA, 122 bp, Homo sapiens
cagacaggctggcattctagattacttttcttactctgaaacatggcctgtttgggagtgcgggattcaaaggtggtcccacggctgcccctactgcaaatggcagttttaatcttatcttt

SEQ ID NO: 50241 - DNA, 122 bp, Homo sapiens
actgcagaaaatgtccacgtaccccctgccctgacacaggtacaccctccaccacaggagcgcactggttccatgtgaggaatctcgatacgttgttatcaaccagggtcctggagtcacat

SEQ ID NO: 50242 - DNA, 122 bp, Homo sapiens
agtgggtgtgggtgggtctttcggggctcccggcgacccgcggtgccgacgcaacgccgacgtatggtgccaagcgaactttaaaaagctgcttcggacaaaccagagccaggatttccact

SEQ ID NO: 50243 - DNA, 122 bp, Homo sapiens
ggagcgcgcgggcacaagggcgaggggcggggcctgcgtcgcgctgcgggcacgtcgccgcgcgtcttcagtatttaatgtctctgtgttccacccgcctgggctagcacgtgggggagctg

SEQ ID NO: 50244 - DNA, 122 bp, Homo sapiens
gccctctttcatgctatttcgctgacataataattttcgtcttgaagaaatacatattgacggcctactcagtcaggctaggaagtgtcattgtatttaactctctaaattgttcctgacct

SEQ ID NO: 50245 - DNA, 122 bp, Homo sapiens
cacagggcagagaccaggctcgggctacctggggtaaagggtccggatggaaattcaacccgacccaccaggaagctgcctggacaggagactgtgttgtctggaagccctgggaagctcct

SEQ ID NO: 50246 - DNA, 122 bp, Homo sapiens
atattaggactcctgaaagccaagagaccccagagcccgggaatctgagaagagtccacacgcagaacagcatttgcttgctgtcactttgccaagagattgtggatttcagggctgagtgg

SEQ ID NO: 50247 - DNA, 122 bp, Homo sapiens
ggacgagtgacaggttggtccggcgcagcaaagggagcgggtgcggcggtagggcctctccgggggcagcgcgagggcctcccccggggcagcgcgggccaaggcggggcctccagagcggg

SEQ ID NO: 50248 - DNA, 122 bp, Homo sapiens
ctgggctggggggtagggggagctcccttcggatcgaacaggtggttttgcaacgtgagccggctgagttcgccgcagcttagtgcgatggtgacgggggtgccggatgcgcccccagccac

SEQ ID NO: 50249 - DNA, 122 bp, Homo sapiens
cacggccgccccagggtgggcttcctacacgtctctttaaagggcagcctgagcggccaccgggactcggaaatgctacgtagttttcgttctcagaagcagctgtttatgcgcaagcgccc

SEQ ID NO: 50250 - DNA, 122 bp, Homo sapiens
tcggagtcccgcccaccgggagcctcggaaggaccggcctcccctcactctaagcatgcgcgttaaagcgacagcataggctatagaaagctttatgagaatagctgggagccatacagccg

SEQ ID NO: 50251 - DNA, 122 bp, Homo sapiens
cacacggcggatcctcttccggcctatcgctagccaacttcctcatatcttcaccagcatcggagaggactatgatgagcgtgtgctgccgtccatcactaccaaatcaagtcagtggtggc

SEQ ID NO: 50252 - DNA, 122 bp, Homo sapiens
gagggggaatagggctgaagagctgaggcagggaggctgaaatgaagcagccgaagggtacgctagactcttcttgacttagggaaagtgctgaaagtcagagctcatcaataaaatctgcg

SEQ ID NO: 50253 - DNA, 122 bp, Homo sapiens
tgatcatggacttccaatatccagactgcgggaaatggatttctgctatttaagtcccctcgccccctccccagtctgtggcactttgttatgacagccttactaaactaacacagacccaa

SEQ ID NO: 50254 - DNA, 122 bp, Homo sapiens
gtgtaatctccgtggtcagtgaagcaatgctgtgcgcacagttctgtgttgtgcctctcccggggaaggggtgtatttggcctgtgccccaccctagccctccttcgtcttccctctttcac

SEQ ID NO: 50255 - DNA, 122 bp, Homo sapiens
tcaggatgcgagattgacggctgcaataactaataggaacaagctactgccgaaggggcccgcccacagaagggtggtggccacggtccaggctggacacaaccaaaggcggaggacccgtg

SEQ ID NO: 50256 - DNA, 122 bp, Homo sapiens
agttaagtggcacacccagcaagtggcaagagtggcagtgttctgatgacaagtactgtgcgttttccattacaccatgattcgctttaaaaaaaaaaaaatcctaggctgacttcaacctt

SEQ ID NO: 50257 - DNA, 122 bp, Homo sapiens
tgattaaagagagaccacactcttttacatggtcctggctacagctctgggtagtgggcacgtagacttcagctgcaagtaaagctgtcaaatcaatacaagaggtcagagaaaaagttgag

SEQ ID NO: 50258 - DNA, 122 bp, Homo sapiens
tgtctcttcttgtaaattcatccgtcgttggatcagggcccacccggttcctcgtggcctcgccttaactgggccatgtctgcagagaccctatttccacataaggtcctattcacaggaac

SEQ ID NO: 50259 - DNA, 122 bp, Homo sapiens
cacgagcccggggtggggctgctgcccgcccccacccctccttccactccaggccctgaacggacttcctagattcatgccagaaaatgacatgccagaaaatgaccctgctcccaagcagg

SEQ ID NO: 50260 - DNA, 122 bp, Homo sapiens
agcagggattataggcacataccactgcacccagcttagtttggctttttggattaagtacgcatattatccatttattcctgcagcaagtacttcctgactgtcctttatatgtaaagata

SEQ ID NO: 50261 - DNA, 122 bp, Homo sapiens
gccagcaggcaaaaataaccagttaattcagtggcttaaagaaaccaaacctacccacaacgcttgacctcccattgatccatctgcgacaccggcagtggctaccatttattgagtgctga

SEQ ID NO: 50262 - DNA, 122 bp, Homo sapiens
ttctattccaccttaaaccacatggcagcctttgtcaactataaagggactgtgtgtacacggatgtattttagacactgttttctgctcagtggctctctctctgtccactctcttgagaa

SEQ ID NO: 50263 - DNA, 122 bp, Homo sapiens
acttcttgttctggccccgggctgatctgcacgcggacttgagcaggtgccaaggtgccacgcagtcccctcacggctttcggggggtcttggagtcgggtggggagggagacttaggtgtg

SEQ ID NO: 50264 - DNA, 122 bp, Homo sapiens
agaaacattaggaagcatgtttaacaaagcagtcacaggaacagaataaaagcacgactccggcattcaacagtgtgtttcctatgtttttaaatagaaataaatacagttgcttctgaaat

SEQ ID NO: 50265 - DNA, 122 bp, Homo sapiens
ctcccgcaactgtcaagcgctggcggcggaaatgatgaggcgctggccattttccgagcccgggtttcctgcctgagccccgctcgagcgagccgcgagcgaggagccggcgggcgggagag

SEQ ID NO: 50266 - DNA, 122 bp, Homo sapiens
gaggggacggggcgaacccaggcgtctggggctagggaaggggttgggttgaaggatggacgaacttacaagtctggggtccggggctccccggagctggaagaccaaggcccctgtgcctg

SEQ ID NO: 50267 - DNA, 122 bp, Homo sapiens
gagggcagtgttggccctgggaggggggactgtgggccacagtgcagtgcctgcatgtcccgggctgacactacagggtacacatagctggcatccctaaatgtaaggggtttgcttcaacc

SEQ ID NO: 50268 - DNA, 122 bp, Homo sapiens
tctatcatatctttttaaatgcatgtgccgtttaactcagcaatcttactctggcaatgtcgtccatagacaaactggcacatgtaaagaaatgacatgcatggggctacttagcacatcac

SEQ ID NO: 50269 - DNA, 122 bp, Homo sapiens
gaaattcaccccaggtcctcctgctccgggctcagcccgggccccccaccgtcctacccacgaagaacagcaaacaatagcacagccccggccctggaagccgagctagccgcagagggtga

SEQ ID NO: 50270 - DNA, 122 bp, Homo sapiens
ccccccgatcatcgagacggcggcggtggtgggctagacgagtttcgcgcggccgctcgccgtcccccgcccagtcgtactcggcgccccagctcggtgctgccgccatcttcttggaggac

SEQ ID NO: 50271 - DNA, 122 bp, Homo sapiens
gattgagagcttcccagagagcatcacaagaaggcgtcgcaccactctcgaaggcagtcccgggactgcttggcgctggcgccacaagtgtctttcagccattcccggtagaggtcttcatc

SEQ ID NO: 50272 - DNA, 122 bp, Homo sapiens
tttctccgccacctgggccgtgattgggcgcgacctgggctcctgggtgctcattggcgccgtgaagtgctcgtcaccgccccctcctgccccttcatgcatgcgcggaggccgcctgctag

SEQ ID NO: 50273 - DNA, 122 bp, Homo sapiens
tagtcctaatgaagcagagcaaatcaaagttttgtttttaaaaaacaccatctttttagtcgactgatctgatttcagttcctagagtacctagatctcaagttggtgccagcgcctttacc

SEQ ID NO: 50274 - DNA, 122 bp, Homo sapiens
gtagaaggtagaatgggatcttcatggcatttctgattcacaatgctcctgaaagttcctcggcatgtggaaaggccacagatgaatttaagcatgtgaaagaatactcatgtcagaggcac

SEQ ID NO: 50275 - DNA, 122 bp, Homo sapiens
ttgtctaagaactcattcttggcgttcactgcaagctataaactctgcaagtggtgcacccgacgtgatcgccttgaagttatgcgtgaaaggaggagagctcatcaattttaagaaaatcc

SEQ ID NO: 50276 - DNA, 122 bp, Homo sapiens
cgtgagggtgggataggacaaagtgcccaatatacagaagagttgagttcctaagtaactcgctcagagtcgccagccagggatcgggtgcgtgaagtgaccgtctgtctcctgcagccaac

SEQ ID NO: 50277 - DNA, 122 bp, Homo sapiens
tggcaagttgattacaccacaaagcaggatgctttatcatgggggcctctcaggaggcggcgggaggggcggtcagctgctgctgtcactcttcccccctcggatcctgagtgacggctcgg

SEQ ID NO: 50278 - DNA, 122 bp, Homo sapiens
agaacctggattggttttaattaacccacgcgcaggcaaggtctgagagccgcgtttctgcgccctttgcagcgcaaatcaccgctggtgagaatctgaaggtttcttttcggtttctccgt

SEQ ID NO: 50279 - DNA, 122 bp, Homo sapiens
gcaagggcccgcagcggccgggccgtttacctcagacccgcgccgcagcctcccggagcccgcgcccaggactccctcacgacctctccagggtcccggcccgacaccaaggggcaggtgag

SEQ ID NO: 50280 - DNA, 122 bp, Homo sapiens
cttcaaccatggttaacacatatcaagctatataagtagtcttatggaaacccctgtcaccggaattgagtgccagcttacccaatccatttgggtggtgaaggttggtaattacagtatag

SEQ ID NO: 50281 - DNA, 122 bp, Homo sapiens
cgggaacagttaaaaccatacagaaaatgccaagtacagcataaaagaatttttaccaaacgagtcagtaagtgtgtgccggggccgagaggctggggtggcggagcccagcggtgtggtac

SEQ ID NO: 50282 - DNA, 122 bp, Homo sapiens
tcccagcccctcctgcctgcttttccatctgcccagggctattttcaggaggtgcctgggcgctcctctgtcccacctctcaagcctccccactcctggaccttcctactctgggggcaggg

SEQ ID NO: 50283 - DNA, 122 bp, Homo sapiens
cggcttcgccagaccctgcctttggtgacctttagaggctttgatcagggctaaagcgtgcgttgatgctgcccttttctcttgctcaacgcaagtgattttaaagacgcaagttcatcccc

SEQ ID NO: 50284 - DNA, 122 bp, Homo sapiens
cgtctccgccgcggggcgggtcatgcacggggcgagcaggcggaaagggcgggcgtgtcgcgcgcgcgaccatcgtgggcgcaggcgccagggagggaaccagagcccgctgtggcggatga

SEQ ID NO: 50285 - DNA, 122 bp, Homo sapiens
accgaagtcctcaggcttagctctgtcccccactttccctctgcccagcctcaaagattacgtggaagaaaaccacagggtcctaggtaagcacaggctatacatgggtggaaactctgacc

SEQ ID NO: 50286 - DNA, 122 bp, Homo sapiens
ccggagatctgagtggcctctgccccctctgcgctgtggagtgcatctgattgccagcctcgctggaccgttgagaggattcatcgagaccctggatatgaatatgcagtgtgaactgaagt

SEQ ID NO: 50287 - DNA, 122 bp, Homo sapiens
ggaactgagagacaatgaagatgcaggcagaaaagacaattttgcttttagagagtaccacgaataaagggaaagtgtagggctgctttttagagtccagctaggctgcctggtaggccaag

SEQ ID NO: 50288 - DNA, 122 bp, Homo sapiens
ctgctaaagtatcagttcttgggcgtggtgatgtaatgagctttgagcagggcgttttgccggtccaggaaaagacgccctaattttggcgcacctagaggtctcctagctaccatcttgtc

SEQ ID NO: 50289 - DNA, 122 bp, Homo sapiens
aggcgggcagggagcctccgcggacggaagggccgcaccgggggcggtgcggggacgctgcggccagctgccaggagtaggggagccacgcactcaccgctttgctcccccaggaacaccag

SEQ ID NO: 50290 - DNA, 122 bp, Homo sapiens
gaatactgtagggttttttgtttgtttttaaagtcgaatatattaggaggtgaggattagcgttgggggagataggatcagttgcccagaggctcccatatttaggtaaatgtatgttaatc

SEQ ID NO: 50291 - DNA, 122 bp, Homo sapiens
tctccaggaacacagagccgaaaaatcacaggtccctgagctgactcttcctgtgggggccggaacaaaaggggctcctaagctggccccgtccccctgtcacacggaaggaccaagtgcac

SEQ ID NO: 50292 - DNA, 122 bp, Homo sapiens
gggaggaggaacacaagaacattctcggtacatactcatcgtacatgagctgctaaggcacgcagggggcctgtgggacgggctcccgattcccctctttccagacagaaaaccaaggcacc

SEQ ID NO: 50293 - DNA, 122 bp, Homo sapiens
aggaggagaacgaggagggagaggagggggcgcacccgcaagcgcgcactcacccgaactcggtgttctttctggagccgacagtcctccaggcccagcccggcctctgcgggaggcgacgg

SEQ ID NO: 50294 - DNA, 122 bp, Homo sapiens
agagcaacctcattccacggggtgagcatctcgcaccttggtgcggaagcccagagcccacgctgacttctgcaatagcctcagtaaagcgacgggcgacggccatggcacagagcactgag

SEQ ID NO: 50295 - DNA, 122 bp, Homo sapiens
gccccggcctgggtgagtgcctaggtggtgaatggcctgggtttttccgaggccagcactcgcacccttggggtcagaaccggaaagagccaagtcactccactctgaacgcgctgggcaga

SEQ ID NO: 50296 - DNA, 122 bp, Homo sapiens
gggccggtcgcagttgtctgggggccctggggctctctgcgtcgagagcgctcgaagacccgggattcctggcccgatcgcgggcggggggagaccccagctccaccccagctcccgccggc

SEQ ID NO: 50297 - DNA, 122 bp, Homo sapiens
gtttgtttttcccttttttagggccattttccccccttaaatattttatggttatgagcacggtaggactgaagagaagcctctcttcagtaaacacccagagaacattctgagagacatga

SEQ ID NO: 50298 - DNA, 122 bp, Homo sapiens
cttccatcactaacctcccggaggtcatcaagccaaatttatgagtggccgctcgagtcacgtgactctatttaaggctcccttatttgggaagagcgcataggataaagaaagagatatct

SEQ ID NO: 50299 - DNA, 122 bp, Homo sapiens
cgctggcagagcccacttcaaaaaatgctgcaggaagccattcacactcattcctatccacgtttttaaaaatgcgaaatagtgatttaaatcagaacagaacctcttccaatgggggtttc

SEQ ID NO: 50300 - DNA, 122 bp, Homo sapiens
tttagcataccaacagcctgtgacctgactcctgcattatagtgtgttgggccactaccacgttttgtccacagcttgtatttaacatggagctaagacacgtctcaaaagctacagcttcc

SEQ ID NO: 50301 - DNA, 122 bp, Homo sapiens
ccgctccatctattaacgttctcttctgcccagccacgcccccggcgttctccgtggttgcgcacctgacgtacatcgttcaaaacgtgcccagtgtttccctccgagggcactgcgtgccg

SEQ ID NO: 50302 - DNA, 122 bp, Homo sapiens
gcggactcccgccttagtgggcggagttgtgccgcgtctgatgcgcagttccctttatagcgcggcaagccgaatcctagaggctaacccggcaggtgggagggagaaagttgctttctgca

SEQ ID NO: 50303 - DNA, 122 bp, Homo sapiens
tccagtcagataacatctggagtgtggggcaccagcaggcttccctgctccaggtggaaacgtgaggtagctagaggggcccgagaagcttcctttccaatcctgctgagcacatttcctcc

SEQ ID NO: 50304 - DNA, 122 bp, Homo sapiens
cagcagcctccctcaccaccgtgcatggactaacaaacatgaaacaccacgagcaccaggcggcctaggggaggagaagaatggtgcccgagaagagtgaggggcatctggctagccttgct

SEQ ID NO: 50305 - DNA, 122 bp, Homo sapiens
ggagatagctagaggccagttcagttccctctcccacatttctgtggcacccgggttgtgcgctgaggcccaggtttcctggaggttaggcaaagcttggctctggtccttgcgcattggcc

SEQ ID NO: 50306 - DNA, 122 bp, Homo sapiens
tagcagtgaaaaaggccattctcttgtgagacttttcctttcatctgggctgagatcagacggagttctgcattcaccttgctaaatgtcttctctctggaaatggtctgtagagtttacac

SEQ ID NO: 50307 - DNA, 122 bp, Homo sapiens
ccaatcagcaggatgtgggtggggtcagataagggaataaaagcagggtgccggcccttgcgccaagaacctgctcgggggtcgtatcccaagatgtggagcgtttgttctttggctgtttg

SEQ ID NO: 50308 - DNA, 122 bp, Homo sapiens
aagatcctcatcgacaggtcggttcctctccccacccgtcgatccttcccttccctcacccgcttgatctcgtctgatgttgacttgactgcaaggactgcagagagttttctggagccagc

SEQ ID NO: 50309 - DNA, 122 bp, Homo sapiens
acagctttctgtcccttacatcccagactcagttacacttcagcgtcccggctccctggccgccaggctcacaccacagacagcccttggaggcattccattcctgccccgacccttcaact

SEQ ID NO: 50310 - DNA, 122 bp, Homo sapiens
gggaagcatagtacactctcatctcagacaccacctccccggcagcgccacctccttcaacggcggaaaaacttcttggtcaggaaaattccaatgcttttacttaaaatctattaatagat

SEQ ID NO: 50311 - DNA, 122 bp, Homo sapiens
tgaaggtgagcaggctcacactgtctggccggtggctctcttccgcctccttctcagtgacgagctcctccatggcgctgctgttctcgaccgccgccccagaggaggaggccgaggcctcg

SEQ ID NO: 50312 - DNA, 122 bp, Homo sapiens
agtaaaaacctctttgtgtttttgcttttctttactgatatcatatcagagttcctccagcgaataaaaggatcctagatggcccctgggggcaattaactgctttttggaagctttcaaac

SEQ ID NO: 50313 - DNA, 122 bp, Homo sapiens
aatgtgggcggcttcaagaggaggctgcgctcgcacacgctgctgcgcttccccgagacgcgcctgggccgcttgctgctctgccactcgcgcgaggccattctggagctctgcgatgacta

SEQ ID NO: 50314 - DNA, 122 bp, Homo sapiens
actgtctggcactccctagtgcgatgaacccggtacctcagatggaaatgcagaaatcaccgtcttctgcgtcgctcacgctgggagctgtggaccggagctgttcccatttggccatcttg

SEQ ID NO: 50315 - DNA, 122 bp, Homo sapiens
ggcaggggcaatgaggtatttctggctggttgtcactattttgtctaaaacacaaagcagcgaccaagagtgaatgcaaatctgaagagagaggagaagatggaaagttccctcctgagagg

SEQ ID NO: 50316 - DNA, 122 bp, Homo sapiens
atgacatcagaggcctgtgctcagggagtgggggtctgagccgggctggggcggcgggggcggcagtgagtggggtgggggcgagcggacctcggcggagcctccggcctgaggcaggatca

SEQ ID NO: 50317 - DNA, 122 bp, Homo sapiens
aatgtgtttgttcttgaaagaaaaatgtccctcattgcttggattaatggtgctttaagacgtgtttattcaaagatggcagcacagaggtgaataggctaaatgctctacattagacatca

SEQ ID NO: 50318 - DNA, 122 bp, Homo sapiens
tgaaaggtgcaataaggtgtatttctattgttattctgtatttcagagacagggcaaatccgccgttgtgacgaaagtgcagggacaaagcacaaactcggctctggtggaccggatacgga

SEQ ID NO: 50319 - DNA, 122 bp, Homo sapiens
gcctcaacagggaatgaataataataatacaacaacaataataacaataacattagctgacgtttgctgagcatcccacttgccagatggattactgagtacttcgcacgtgctgtctagct

SEQ ID NO: 50320 - DNA, 122 bp, Homo sapiens
gctccctttgatcgcgccctgggatgggaagccttcgggcaaagccctgggggcaggacgcgtttttttttttttttttttttttttttaatcgatcccggaaccttcgcgcggcggagggg

SEQ ID NO: 50321 - DNA, 122 bp, Homo sapiens
gtggatgtcaagaatcttttttatttatttatttattttgtcccacagtttaattggggccgcagtttaagtaactgttcctttgatgcatagggggggtgtgtgtgtgtgtgtgtgtgtgt

SEQ ID NO: 50322 - DNA, 122 bp, Homo sapiens
acctctgcggtgaggtacttcaggatggctgcgctgtacacagcggcagtcgcgcccacacgtccatgattggtcgtcctagatttcaggtgtagatgaatacgcccaactgggaactgcaa

SEQ ID NO: 50323 - DNA, 122 bp, Homo sapiens
aggaaatgccctggagtgtgtgtcacctgtccaggacgacttgttgattcccaggagggccgcctttccggtctgggtccccgagaggactgccttgctcacctgtcccctcggcgcggccc

SEQ ID NO: 50324 - DNA, 122 bp, Homo sapiens
attccccgaggttgctgaccctcccggtgtgtcccgggcctgctctgggggacacagcggcgaatacgttgaacgaggcccctgtttcacggagctaaagatccagtaaggacttcacccag

SEQ ID NO: 50325 - DNA, 122 bp, Homo sapiens
tgggctagctgccctggaagatcacctgtctgatagcttgcaatctgaggtgtgtgtgcgcgcccgcgtgagagagagggagcggaacgtgcctgagcatggggggaattgggccatgcccc

SEQ ID NO: 50326 - DNA, 122 bp, Homo sapiens
ggggcacgagtgtccccaaccccacttggagggtcccggggaggaccggggtgggagggccgccaggggcgtgggctgtggtcccgtagaggaaactgaggcctgagcagggccggggaggg

SEQ ID NO: 50327 - DNA, 122 bp, Homo sapiens
gccttagaactggggctgagctcagggagaacaatgcaggatccagcatcctcaattcagcggcctgacccactagggttaggcccagtagtcttcttccatctctgatgctgaggattcca

SEQ ID NO: 50328 - DNA, 122 bp, Homo sapiens
ctccctgcctcggcatccgcgcaggcctgggccgcagcctgccccctgccccagccccggcggcaaagtgctggggccccagggagcttccgaaccagcccatgtcctcaggggcttgaagg

SEQ ID NO: 50329 - DNA, 122 bp, Homo sapiens
caggcctgtgcggagtggacctgcacacacagcaaacgcacacaccgcgaacgcacacaccggatgcttcccgctgtggagacccacaaggcaatgtcttctgaagttaaaaggatgccagg

SEQ ID NO: 50330 - DNA, 122 bp, Homo sapiens
tttcctactctagtgattgctagatgtcaggtatcacggtgactccagtccaggtgaaaacggagtcacgatacagggcaacagcgccacctcacggccggccccgtagcagcggcctccat

SEQ ID NO: 50331 - DNA, 122 bp, Homo sapiens
gaccacaagacattggatgaagtgcagcagaatggatgacactgcagagccgaaaagtctcggtaaactcggccaggcattgtgaaaagggtaacaaaaggatgaggcactggttttggaaa

SEQ ID NO: 50332 - DNA, 122 bp, Homo sapiens
ggcccagcggctccctggcgcaccccggacacggtggccacgaggagccggggctgtggccgagggctgcccgcaccccgagacccttcctcgtgggcccctctgcccggggcgccgcccag

SEQ ID NO: 50333 - DNA, 122 bp, Homo sapiens
tcatttgtccaaattcgtagaatgtacaacaccaagaatcctattgtaaactctgaatgtcgagtgatgatgatgtaacaatgtaggtccgttaattctaactaatgtgccactatcttatg

SEQ ID NO: 50334 - DNA, 122 bp, Homo sapiens
acaatttaaaaaatctaatattcatgattgttacataggggcaatcacaatgaaaacaaacggtaatgtaaaccatatcctctatgataaaggaaaggatttctacacctagacttatgtcc

SEQ ID NO: 50335 - DNA, 122 bp, Homo sapiens
caggctcatcagcagggttctgggcagctgccaggaatctgccatgccacttgttgcagtcgcccacaagctgcaacaccagctccagcagcttcacctggagggaggggtgctcagctgcc

SEQ ID NO: 50336 - DNA, 122 bp, Homo sapiens
gccgagactgtcgctgcatgtctggggaggtgccgtcagatgtctgtgttttcacccctccggttgttcattggttcatttagcacacatttactgggtacctactgtgtgtctggctttga

SEQ ID NO: 50337 - DNA, 122 bp, Homo sapiens
cagtcgcagcgcctccctcaagtctctgagctcactgttgtgactgaggcaggctgatcgcggacctcatttgcatgccgccccgccattggctagtgggacaaggtaatgctcaggccctg

SEQ ID NO: 50338 - DNA, 122 bp, Homo sapiens
gcgcgggcggtcccggcaggccccgcgacgcagccaacggccgggacgtgcgcgcatgcgcgctaggactccgctccgcctacgctgcaggcggagagcaaccgccaagcttggtgggagtc

SEQ ID NO: 50339 - DNA, 122 bp, Homo sapiens
ctcggcatccgcgattgtctaaggggcctccgagacgttcgggcagcgtcagtcttcagccgccaagccgaggagatctgggaaggagtcggtggggagctttgggtttgagctccaggagc

SEQ ID NO: 50340 - DNA, 122 bp, Homo sapiens
cgctatcctgccccgggctcctccgcctcgcccgccgggaccctcgctccccacccctcccggagaagaaaagaactcgctctcatcagttaattcagcggcgcgccgcagccttccgctgc

SEQ ID NO: 50341 - DNA, 122 bp, Homo sapiens
ggctcactacggggggcggggcttaccgcaaacgaaggcgtcggtgcgatgtgctggtctcgggcacgctggcgcttccaacgcactccttgggtgccctgtcacttacatggaggcttatt

SEQ ID NO: 50342 - DNA, 122 bp, Homo sapiens
gagctgggccctgtgcgggtggggcgaggcctgagccccagaaggttcgggggcggggcccggggtggtcctggggtggagaaggctggaggaggccatccgatgcggagatggaccgaggc

SEQ ID NO: 50343 - DNA, 122 bp, Homo sapiens
ccctgctgggcggagccggggcccaagagggctgggctcctgtgcatgggggttgggggccggcttgagggtaggaggtcgtttctgcagtggacagggtgaacggtggaggacaggtggtg

SEQ ID NO: 50344 - DNA, 122 bp, Homo sapiens
actacaacttccagggtgcaccactttcgccccgcccatgacgttgcagctcccgtttctcgccaggctcccggcccgaactacaaatcccagaagacactgcagccccgctcgcgttctcg

SEQ ID NO: 50345 - DNA, 122 bp, Homo sapiens
ggaagggactaacccctggcctgtggctgaagatcctggggcaagggatggggctggctccgtttgtggggcctcctcagggtcctggcaccttcagcccagtccacaaccccgagtggtca

SEQ ID NO: 50346 - DNA, 122 bp, Homo sapiens
tggcgttcagcgaggagggaggcgccaggagagcgctgaggcgccaggagagcgctgaggcgccaggagagcgctgaggcgccaggagagcgctgaggcgccaggagagcgctgaggcgcca

SEQ ID NO: 50347 - DNA, 122 bp, Homo sapiens
acgattaaggttgagaagaacatcactggcatggcgggtgaactggatacagctgtcagccggcgaggccattttgtcttcacttgaaaaaagaggccaaaatcctgttagtcctccagaac

SEQ ID NO: 50348 - DNA, 122 bp, Homo sapiens
agtcagagatggcctccctaggaggtggaatttaactcgaagcctaagtgtcatgaaatacgaccctttaaagagcaggaggaggagtgtaccgagcacagggaataggagcataagacctg

SEQ ID NO: 50349 - DNA, 122 bp, Homo sapiens
cccaggaaatccttcacatctgagcggcgcgcatggcttgttcaccccccaccatagagccggagacatggaaagtgtgcagatatgtgctgttaggccacgtctacaaacctctgcggggt

SEQ ID NO: 50350 - DNA, 122 bp, Homo sapiens
ggggagagcggaatgatattcccaatgaccgcagtcagaaccatcagcgcattcctaggacgctttccagctgctgggtggcttcataccccggtaaagtgaatggtttccaagttcccgct

SEQ ID NO: 50351 - DNA, 122 bp, Homo sapiens
gtccaaaattcggcactgcgagcgccgcgggtctggcttcgggaactagtttgggagacccgggaacggatcgcctccgatgggccgggcgcggtggtctccagcggagcgcgaacccaagt

SEQ ID NO: 50352 - DNA, 122 bp, Homo sapiens
cccctcggaattcccggctccgcagggggggcgggtctggccgggaggaggggcggggaacgggctagaaagtttgcagcaacttttctcgagcttgcgtcccaggagcggatgcgcgtggc

SEQ ID NO: 50353 - DNA, 122 bp, Homo sapiens
ccgtcctcgtagtaaatgatgtcttggggctgtggcccgagctgcctcaggtagatcccacgcaggcccccgctggtggagcaggtgatgttgacggaggctcccacggggacagtcgtgca

SEQ ID NO: 50354 - DNA, 122 bp, Homo sapiens
cattgagcacgcaggaaagccaaccgactgctcttttaagggcaggcaaatgtgtgttttcgcacagaggcttattggattaagtaggtagcttaaaaatgggggttctcactttgatcatt

SEQ ID NO: 50355 - DNA, 122 bp, Homo sapiens
ctgggggtgtttttcaccaagctcccagtgactccgatgattcagaaagtgtgggtaacccggagatgaacagctgctgcacgttccaagatgcccgaggaaagccgaggtgcaggctgagc

SEQ ID NO: 50356 - DNA, 122 bp, Homo sapiens
gaggagcaggagaacagaagcaggtgagcacatggcttccctgactccacttgtgccctgcgtggggtcacagtggagggacagtggggtgaggagggaagagcgaccttagctgagaggga

SEQ ID NO: 50357 - DNA, 122 bp, Homo sapiens
tttcacctcaactgctccaataatctaactgatctaccaggtttttgggttcctctttctcggatccagtttacaccttgctgccagattaatcttaaattccattgcgggcacgttaactc

SEQ ID NO: 50358 - DNA, 122 bp, Homo sapiens
gggcaggggacgccgccagcggctgcggcgcgagtctccgagcacctcccctgccggctgcgccccccacgtcccagcaggaggaggggaccccctcccgcgccgtgcccctcgcagccgat

SEQ ID NO: 50359 - DNA, 122 bp, Homo sapiens
agaaaagcattagcccagcttatctgagtcttagtttttatatgtggggaaaaaagaaagcgagtctctcagctacaaggcaatgtagaaaccaggcctcctgggcagaacagaatgtggtt

SEQ ID NO: 50360 - DNA, 122 bp, Homo sapiens
atccagggctggtctggaggcgcgaagtaggttccggagtccgagacctgggctgtcggccgcgggcccctgagtagcggatggggcgggctccccggcctcggggccgtgctcagtctgcg

SEQ ID NO: 50361 - DNA, 122 bp, Homo sapiens
gttatattggggacagccaaggtccctgtgagctatgctttctttgaggagacgcctggccgcgatgccctggacccttcagaggtgagctggttccttgtgccccagccattttgtgggtc

SEQ ID NO: 50362 - DNA, 122 bp, Homo sapiens
tcgggagagggcgccggatctgtgggcccatgagcggttgtcccctttctcgccacacggcggcagccacaatctgactaacattcttggcactcagagcccagggtctaccctgagcttgt

SEQ ID NO: 50363 - DNA, 122 bp, Homo sapiens
ccttcgttggatggaccagacccagaaaaagatccctctgtgttgattaagactgctattcgttgttgtaaggctctgacaggcattgatctaagtgtgtgcacacaatggtaagtactaat

SEQ ID NO: 50364 - DNA, 122 bp, Homo sapiens
tacttcttacttgagctaaaaccctcaagtaaattactccgacaaacatccgtggctgtacgaccccctcaacctttaaaatacatctcccaaattttaaaagcaagggctccacaccctgt

SEQ ID NO: 50365 - DNA, 122 bp, Homo sapiens
cggtagagtttccaacacgaaagcccgtgtggtcgcgccgggagctcacggcgttccaagcggcacttatcccgcgttgatgcccaggcaccccgcgcgccctgtttcaccaggcccagtca

SEQ ID NO: 50366 - DNA, 122 bp, Homo sapiens
gagtgagagagcgtggtatgagagtgtgtgtttgcattcatatgtgcccacacaagcactcgtacatacgagggactcagctggaaaggggacaggtggcttttaaaagcccaagctcatat

SEQ ID NO: 50367 - DNA, 122 bp, Homo sapiens
gatgaacgaatgccgcttcaaaggaagaagcaaaagaaccatattaaccctgcttacaatcggatttagattggtgatatattctgtccacactcaactgggtttatcctgacattcaacag

SEQ ID NO: 50368 - DNA, 122 bp, Homo sapiens
ggactgtccctacctcgagaaggtgacggggtttcctgcgctgccagccgatgaggcggccgtgacgcagcccgccgtgcagagtccccgtcggccgacaggcgtgcagagctctgcagagg

SEQ ID NO: 50369 - DNA, 122 bp, Homo sapiens
ggcctggccctcgtccgcggacagtctcccagtggggtcctggcagggcccctcgcccagcgcagtggacattcaggagctccaaaaccttggggtccaagcaagtcagcgcaggtgtattt

SEQ ID NO: 50370 - DNA, 122 bp, Homo sapiens
ctcctcctaataagcctgggagcactacgggagactggggcttatttcatccctacagctcgaccataaaagacagccgcaccccgaagcggccattttagaggtctaccctcagggacaca

SEQ ID NO: 50371 - DNA, 122 bp, Homo sapiens
agcccccgcgagttcgggacccggggtttccggggtggcagggggttcccatgccgcctgcgaggcctcggctcgggccgctcccggaacctgcacttcaggggtcctggtccgccgccccc

SEQ ID NO: 50372 - DNA, 122 bp, Homo sapiens
gcactgccgcctccttattaccgacctcagagctaaactcattatctcttcgcacagagacgttcctctcaagaacgattttaaccccctacccaaggcagcaagacgcccacagccgttca

SEQ ID NO: 50373 - DNA, 122 bp, Homo sapiens
tttcttgttttgtttgttgcttgccacgctgccatcaagtgctcactgtcgcaaaagaaccgtccccatgcagtactgtacttttcttttcccttctgccgtcaacctcggagtagcttcgc

SEQ ID NO: 50374 - DNA, 122 bp, Homo sapiens
cagctcctgctccgggattggaacaaccccctagtctggggtttctcctccacctcaatccggagcgttctgggaaaggcctgggtgtcctgggttctgaagaccccagggacgcaccccgc

SEQ ID NO: 50375 - DNA, 122 bp, Homo sapiens
aaagccggcccccctgtccctgctggctggttgtgaggtcttgcttgattctagggcctccgtgcagctgggcctgagcctgtctggaactggcccacccttccaggcctgagcaggggttg

SEQ ID NO: 50376 - DNA, 122 bp, Homo sapiens
tcccgccggcttgggtgcttggtttctaacccgagtatactcggagtctctggtcctgcgcgcccccctcctcccgggagagccccgtatctggctgcgggtaagggaaaacttcgggaacc

SEQ ID NO: 50377 - DNA, 122 bp, Homo sapiens
cggtcctggaagcggccctggccccggccccgcatgaagccatcaagggagccccgctcccgggctgggtctcggcattcactgtactgccccccaaagctgccattgcggtcggaccccag

SEQ ID NO: 50378 - DNA, 122 bp, Homo sapiens
agctcaataaatctgtatggtgctggtggctgttatcagttcttggcagcggctgctccacgatttccacttgtcaagagtatagggtagccagtttattggaagcagcagctagggagcgc

SEQ ID NO: 50379 - DNA, 122 bp, Homo sapiens
ccgccaccatcgccaagcagaaggctgagatcgcggcttccaggtaggagggcgagggggcggggggcccttcttggtgcccagaaggtgtttgtgagcccagtctgttcagtcctgctgtc

SEQ ID NO: 50380 - DNA, 122 bp, Homo sapiens
gctgcagaatgcgctccttcagcttctgaatggccagctggtccttctgcttggctttctcgtaggtgcctagcagctcagacacctcggatatttgattctccagggctgccaccctctgt

SEQ ID NO: 50381 - DNA, 122 bp, Homo sapiens
caggcctccccacagcacctgctcctgggtgagccctcaccctctgcgctgcggcttccccgtctgtctctgctcccaggccctgagcctcagggcaggcagctcctcctgttcatgtctag

SEQ ID NO: 50382 - DNA, 122 bp, Homo sapiens
ccgcacgtgccctgggaacgggatgaactcggctcgtttatttccacccagttgtcatggcgataggggaggggggcaaggagagcaatgggcctttccctttcaaggacctgcccagtaca

SEQ ID NO: 50383 - DNA, 122 bp, Homo sapiens
ccccagctccacttcggtgcttcacgattccttctctggcctgccttcctgataaatacccggtgaggtcacctaaacgctctcctctctcagttatttgcttctttccaacgtttggcgcc

SEQ ID NO: 50384 - DNA, 122 bp, Homo sapiens
cgtgcgccccagcagtggcgccccgcgctgggagactttgactagacgcctccccacacacgcacacacctcttatcagcctggttgccctgtcgcgcccgctgataccctcgaccccgctt

SEQ ID NO: 50385 - DNA, 122 bp, Homo sapiens
tgtggctgggacccagggcccttccccactcttcagccccgagtcatgtgtctgaggtgacggactgagacgcatctggtcctgtaattcagagagtgggcacatcaccaaagaactgcatt

SEQ ID NO: 50386 - DNA, 122 bp, Homo sapiens
gatgacctgaggaacggagtgcagggggctggttaaaggaaaggcaatggatttccccctcggagacccgagttcctcgcccagccccgcccccgctctacagtggacctgggccctcacct

SEQ ID NO: 50387 - DNA, 122 bp, Homo sapiens
gggggggggggcgtggcgtgggggacacgtagaaggaaacatggctgtttatttcctttccggatggggaaggcttttctaaactccacatagttgaaggaatttgtagaggcaaagactga

SEQ ID NO: 50388 - DNA, 122 bp, Homo sapiens
acattagagcccatggtccatcattcatttgtcagtctctgagtgcctacttacaggaggcgccactctgcacagcccactgccatatccaccttcaactagctgcaacaaggtcattttgg

SEQ ID NO: 50389 - DNA, 122 bp, Homo sapiens
gcctgtgacacgggggcttcaagttaccgtgttctccctgccgcttggctccctttcagccgcagatatgccgctgcagccactgtgtcggctggggcagcgctaccctcggggagggctgg

SEQ ID NO: 50390 - DNA, 122 bp, Homo sapiens
gctttgagtgagcctcttctgatcattggctccttccccgggtttcttttgctatgtgttcggggtggttgggctccctctgacaggctgcatccgggagataggccggccatacgctttct

SEQ ID NO: 50391 - DNA, 122 bp, Homo sapiens
gacgatttggaactgacccgggagggccaagaaacaccttccgagtaccaggctaaaccccgccagggagagagaccgggacgaaggtcccaggctagtgcgacaccgcaggtcggggttcc

SEQ ID NO: 50392 - DNA, 122 bp, Homo sapiens
agcttgggcaagcctgtgcacatacactaagagaaaaactttctgaggtctagcagctgtcgatcaaaaataggttatcctaggcccttccaaatagagggactggggaaggaagtttaatt

SEQ ID NO: 50393 - DNA, 122 bp, Homo sapiens
gcgtggctagaggctgagatgcgccgggtgggctggggctggggctggggctgggcggagcgggcggctcagcactgcagcggaagagctttcttgctacacgcagttgaggctaagctacc

SEQ ID NO: 50394 - DNA, 122 bp, Homo sapiens
aagaaagggagggggagctccctacaagcacccaattgcaatatggcctgggagcatccccggggctactgctccctcagcctctttgtcatcattcctctagtctctcaattaaatactac

SEQ ID NO: 50395 - DNA, 122 bp, Homo sapiens
gtacaccctccgcagctgctggcctgggtgctaagcccctcattgcccggggcggcagggcgggccggctgctccgggtgcggggccggccaagcccacgcccacccggaactccagctggc

SEQ ID NO: 50396 - DNA, 122 bp, Homo sapiens
tacagagcacctctttcactccctgagaatgctgaagagccttgagaccaggtcaaaatacggcaagagaaaaacagcatgtctacaccactgaaaattaatacaattcaatatttatgttt

SEQ ID NO: 50397 - DNA, 122 bp, Homo sapiens
cccactggacattttaccatctcggcagatacccataatgcccttgaagttttggagagacgttgaagatattttgccttgtgaataaattgttcctgtaacgtttgagtcttcttcccccg

SEQ ID NO: 50398 - DNA, 122 bp, Homo sapiens
atttcttaggaggtcgcattagcagaagagcagaaagggctgacttccccgacacatctccgcatgttccctaagcacatctgtccctgaagggaaattcccaggaggacacaggacaggta

SEQ ID NO: 50399 - DNA, 122 bp, Homo sapiens
agaagagagagtagcagcagagataaagggggaagctacctcccttccagcctctccttccgaggactcttaaagcaccaaaggacacatgcatggagcaaaaatagaggattgcatcggtt

SEQ ID NO: 50400 - DNA, 122 bp, Homo sapiens
ctgctgagggaccggggctgcctgctttcccctgggccttctgcagacaggatctgtgcacgctctgtgggactggccgggactgctgtcattgctcctgccttggcaggaagtttccatgg

SEQ ID NO: 50401 - DNA, 122 bp, Homo sapiens
cggctgagagccgggctaccggcggaacttgtccttgcagcaaaaatgtgtttttctctccgcagagcacaggctgccggccccagctctccaggcagtgtgggaccgcggggaggagcggg

SEQ ID NO: 50402 - DNA, 122 bp, Homo sapiens
acttccttaggctaaagggctaggggctgccaactatggctaagacggccttttctccctcgccggttttttttttttttaagttaactatccccacctaaggatgatgtaaaaggccactc

SEQ ID NO: 50403 - DNA, 122 bp, Homo sapiens
ggctcccacgggaggggcctggctgcggggggcggggcggggtgggggtgcggccttgctcgggtagaccatgggtgtgacagctgggagggctgtgtgtgtgtgtgtgtgtgtgtgtgtgc

SEQ ID NO: 50404 - DNA, 122 bp, Homo sapiens
tctcgcctcacggcggcctcccgggaccaagtccctgcctgcctcccagcagcctgtgtgcggcccagctcctctgtcacagtggcctgttgaggcccaactcatgcttctggcaccctttc

SEQ ID NO: 50405 - DNA, 122 bp, Homo sapiens
gaaggctaaagcggcagatcttttgcagccttttcccccgggatcctggaatgggggttacggagaagtgaggggggttgatccccagagtcgccagggtacgcagagtgggggaggtagcc

SEQ ID NO: 50406 - DNA, 122 bp, Homo sapiens
acaaagtggcaacgcagtgggctggagcagctctgtgaactgagaatccaagaaaaggggcgaagagcagctgggatgtattggatgcttgtgctggcttggagcattgctcacattcttta

SEQ ID NO: 50407 - DNA, 122 bp, Homo sapiens
gcaccccgagtctggggtctccaggtgagcccctgcaaggccagccttggactagtggcacgtggggcgagttttattcttccttcacaagcggtcaccagggctggcaaaatgttgcacca

SEQ ID NO: 50408 - DNA, 122 bp, Homo sapiens
acctcaggtgatccacctgcctcagcctcccgaagtgctgtgattgcaggcgtgagccaccgtgcctggccttaattttttaattctataattaccacatgtaggggtgggttgcccctcca

SEQ ID NO: 50409 - DNA, 122 bp, Homo sapiens
tgagcggcaccctgcggggcccagcggctccgggggccataacgggtgcctgcgcatgcgcggcaggtgggtcacggtgcggggcagaagccaagaaccctgctctacctcgccagttttgt

SEQ ID NO: 50410 - DNA, 122 bp, Homo sapiens
tattataaaggcaaaggataccgatgaagagacgcatagggcaggtaatgggggaaggggcgcagggcttccatgcccaatgctgctatgaacatggttgttcaaacatctccctggatgcc

SEQ ID NO: 50411 - DNA, 122 bp, Homo sapiens
cagtgaagtagaaagaagctgcataggttatctttccccagatgggaattccctgccttccgagggctcttgcaatgctacctggagcctgggatggtgcctctgaatcctccttgctctgt

SEQ ID NO: 50412 - DNA, 122 bp, Homo sapiens
tgggctctggagcccacatcgcccccccaggaggagaagcagttcctgcctgcgtccagccgggctggggccagtccaagcaggctggcagcggccccattaactaccagggagatagcatc

SEQ ID NO: 50413 - DNA, 122 bp, Homo sapiens
ctgctcacatgtgccgatgtggagtgccacctgctcacacacgtgcccatgtggagtgcccgcctgctcacgtgcccatgtggagtgcccgcctgctcacacgtgccgatgcggagtgcccg

SEQ ID NO: 50414 - DNA, 122 bp, Homo sapiens
ccgggtttccgtccacgttcacgtaaacctccctacgaggggaaactacaggcgcgctgccggagggcgccgccagtgggcactcacgcacagctgctttggccaccacaggcgccccgggc

SEQ ID NO: 50415 - DNA, 122 bp, Homo sapiens
cgacccaggtgagcacctggggttgagggagggagaaaccgggccagctgtcctgtcctccgcccagagtgaccaccccggctatggccagccagcctccagggagcgcgagtgctgctgac

SEQ ID NO: 50416 - DNA, 122 bp, Homo sapiens
agattcaaagcaagatgaattacacgttgatccatacctaggccgatgcaatggaggccgcggagcaccaggcccagggtgaatctcccgagagcaactggagagaaaacatggctgcctac

SEQ ID NO: 50417 - DNA, 122 bp, Homo sapiens
ttgttccttcagatgttcagacgtgtccagagtttcttccttctgatgggttcgtcatctcgctgacttcaggagtaaagccgcagaccttcgcagtgaacattacagctcttaaaagtggc

SEQ ID NO: 50418 - DNA, 122 bp, Homo sapiens
tgcagccaggtcgtgcagcggagctggtcactgcgggcagagaggtgcacctgttagcgccgccacagcccgccgggtgcccgcccggcccccgcccccgcgcccccacccgcgtccccgcg

SEQ ID NO: 50419 - DNA, 122 bp, Homo sapiens
tctccaactgtcgcttcggggcgacccttcgacccgggttcaagcccccatgttgggcaccgcttgccgagaccagctcggtcgtggagaccctaacccagcagcactagaggaattaaaga

SEQ ID NO: 50420 - DNA, 122 bp, Homo sapiens
gcgcgaagggtcatgaatcccgccggccagggaggatcgtctcctgtgcagaatgaggtgcggtcagaacacggcagaagctgggagctcccacccggctgcccgagacacctcccctcaag

SEQ ID NO: 50421 - DNA, 122 bp, Homo sapiens
taaatttatattttttgttctgtccactgaaaaggactagcaacagtaaccaattattgccgaagggtaggcctagcacccagattgtgactccctgaagaaatggctaattccaaccggaa

SEQ ID NO: 50422 - DNA, 122 bp, Homo sapiens
tctccgcgtgccctgagaagggccttgcgtggtgcctgtgtcagggccgggtctccccaccggcccttctgagccggcagctggggtggccaggccgtggcttctgctccgggcctggggac

SEQ ID NO: 50423 - DNA, 122 bp, Homo sapiens
ccgcccccgccgccgcgccgcctcctcctcctcctcctccccgccggggtgaaactcgagcgccccacccgcgcctgacctccccgagcccctccccgggccccgccccttcccggtacagg

SEQ ID NO: 50424 - DNA, 122 bp, Homo sapiens
gtgttgggaaagactgtcgccttatgggcgaggactgtgggtgtcagtccccgggacacacgcggggctgaaagctccggacatggccacctgggcgggcgtctgtaaaaggtgctaatgag

SEQ ID NO: 50425 - DNA, 122 bp, Homo sapiens
cctcccccttctctgtctcttgcttggtgttggttttctgtgtgtctctgtgtgtccccgcgccaccccctgtgctgtgtcccaaaactctgcctggctggtgcctgtcttctctcttgagg

SEQ ID NO: 50426 - DNA, 122 bp, Homo sapiens
cctggatccccttgccccgtcgcgccgtcgtccccccgctatccggttttgtgatggccgcgccgtggctgcctccctagagtccctcagggccctttaaataccgcgttgggggggacact

SEQ ID NO: 50427 - DNA, 122 bp, Homo sapiens
aggagtccccacctcctctttagccccagctggagtccagccctccaggggttaagggggcgggaccagctagttgccatggtgccagactgtttgggtctgctctctgacccttgggggct

SEQ ID NO: 50428 - DNA, 122 bp, Homo sapiens
acttaaaccaatgaggagccgggctttctcctcctcttcctgctgttgcatgttcaggtccgatttagtttctagctttccccggacctcagagcctgttgcagacttcagccttagcttct

SEQ ID NO: 50429 - DNA, 122 bp, Homo sapiens
ctgccatgtgtgcactctgctccagctgcactggtctcctagtgtttctggaacattccacgcgctccccactgcactagctgttgcctccacctgggaaactttccccctgatgctgtctt

SEQ ID NO: 50430 - DNA, 122 bp, Homo sapiens
atcctgcagaagggacctttaggctcactcctctgtctgtgaagccaggctaccaggggacggggcaggtggttggactcaccctctccgccttcttcttctgtgtggcggtgacagcagag

SEQ ID NO: 50431 - DNA, 122 bp, Homo sapiens
ttcaagggacacaattcactccaagtctcttccctttccaagccgcttccgaagtgctcccggtgcccgcaactcctgatcccaacccgcgagaggagcctctgcgacctcaaagcctctct

SEQ ID NO: 50432 - DNA, 122 bp, Homo sapiens
tataaatcatgcgtattttcatggtaacaataatggctcatggcttccataatcggcaaccgccacagtgaccgttctcacatattggagcaattctgccattgcattccttacaagtcagg

SEQ ID NO: 50433 - DNA, 122 bp, Homo sapiens
ctgtcgcgccctcggaacccgcctgcgcgcgccagagaccagctccgcctcgcctcccggcggatacaggcccacaacccatagccccgcgcctcccagacccccagacccccagaccctcc

SEQ ID NO: 50434 - DNA, 122 bp, Homo sapiens
tggccgcggtaaaagtggtagcagcggaggcgagcggagggtttcccgcggcgggtgaggcgctgggtatgctgggaaggtggggtcgctttggggttctgtgtgcagcgagcatggtgtcc

SEQ ID NO: 50435 - DNA, 122 bp, Homo sapiens
gccctcccaccaaacaccccgccaggtttgctgaagtccacaggagactgttcaaggcatcgttccagacccctgtccctcggcaggtgaagtggcagcacatggctgcctcgccatgaaca

SEQ ID NO: 50436 - DNA, 122 bp, Homo sapiens
ttttttgatctagcattgcatttgtgactatcaaggtgcccatgggtttgtctccatgggcgccgccctcttcctaggagagtaggtggggagtttctgtgccccctcccccaccacgggaa

SEQ ID NO: 50437 - DNA, 122 bp, Homo sapiens
cgaggaatgctgggatactggaggtcggcccagcgcttcctgcggggttagcgctttttccgagttgtagaggtgatttttttttttttttttttttggtctctaccttgttattcggactc

SEQ ID NO: 50438 - DNA, 122 bp, Homo sapiens
acagatcccctgtttctgtccaacagtgaggaaagagagtttcaagtcaaggcagtgttacggatcaggcctggagggtcgtgtgcactttttgttcctagttaccactggctaatgctcag

SEQ ID NO: 50439 - DNA, 122 bp, Homo sapiens
ggcgcccctgcagcggcccgagctgtggccggcgtggatgaggggcaggcgaggcagggccgcccctccagtattgccgcccctcccgccccagggcagggctgggagggtacagcccgggg

SEQ ID NO: 50440 - DNA, 122 bp, Homo sapiens
cgcagaatctcagcccagggccgctgccaagcggacccggcacgtgagtaggaggtcggccgcagacaaggggtcctagggtctctgaggtctctcctgctggcctctgggcccctaaagcc

SEQ ID NO: 50441 - DNA, 122 bp, Homo sapiens
ccggccgcccccaccccccccccccaccccaaggctgaggtcgccgtccctaagccacctcgggctcagggctgaggcctggcccaggcctggctaatattatttctggcgctggccatcag

SEQ ID NO: 50442 - DNA, 122 bp, Homo sapiens
tcagtggacctgggggtgcacacagcactgctccctgatgccaggctcttagggcagtcgcgtggcccaggcctggggagtccctggactccgtctcctggtcacagggacgggcccaggat

SEQ ID NO: 50443 - DNA, 122 bp, Homo sapiens
ccttttccatgtttagatacacaaataccattgtgttagaaatgcctacagtactcagtacggtaacatgctgtatcagtttgtagcctaggagaaatagtcatatttaccacatatggcct

SEQ ID NO: 50444 - DNA, 122 bp, Homo sapiens
acatgatggtggagcgctccacgaccagccgggccacgtcctggtgtgtggacaggggggcgtcagaggctccgagacagctctgctctccggccagctggggtgacctcgtcgcaggcacg

SEQ ID NO: 50445 - DNA, 122 bp, Homo sapiens
gcagggcgcggcggaatgcaggggcgcggtggggtgcaggggcgcaggcggggttcggggcgctggtgcagggcgcggtggggtgcaagggcgcaggcggggttcggggcgctggtgcaggg

SEQ ID NO: 50446 - DNA, 122 bp, Homo sapiens
ctattcttctttggatttttcccccggctatgtaaacatgtaaaaataattctgagcttgcggggccggacaaagtaggcggcgggtcttggctcgcctacccctgctatataaatcattaa

SEQ ID NO: 50447 - DNA, 122 bp, Homo sapiens
aaatggatggagggaggtggggagaggaggaggaattttaaccaggtggcgagagggaggcgccgtcctttaaggtggacggccgttgggtttatcaattatttctccgggatacaaaaaaa

SEQ ID NO: 50448 - DNA, 122 bp, Homo sapiens
ctaagacaagaggccctcagaagagtgaggatcgacaaggtgatggaaaggagctgggtgcgctctttctacgaggtagccctgctctgactcccaccctttgtgcgctccccaacccttac

SEQ ID NO: 50449 - DNA, 122 bp, Homo sapiens
cctttcctgcaggggctgagcgggtgatcacgctgaagatggagatcccgggctccatgccgcctctcatccaggaaatgttggagaactcagagggcctggacactctgagcggacagccg

SEQ ID NO: 50450 - DNA, 122 bp, Homo sapiens
ggtaaaactgaacagtcccaaagcaggtgaggaggcagccgtgcagaggccctggggcagcggcgaggacagcggggaggtgagagccgtcctcactgcctcccagatgcctccgagattta

SEQ ID NO: 50451 - DNA, 122 bp, Homo sapiens
ctggtagaaaatatgaaaaccagtcttgtccctctcgataagtatctctattattatcatcgttatttggaggaattttaaaaacgtgctgtgttttgcaaaagggtgcaagctgccaaatg

SEQ ID NO: 50452 - DNA, 122 bp, Homo sapiens
gccttccctcctggctccctgtggacctcagaacttgccttgtcagcttggggcggggaacgctgaggggcccagcttattgtgatggatgaaggcagtccctcagaatttcccattaataa

SEQ ID NO: 50453 - DNA, 122 bp, Homo sapiens
atggcctatgacaggtatgtagccatatgcaaacccttatactatgtggtcatcatgagccgaaggacatgcactgtcttggtaatgatctcctgggctgtgagcttggtgcacacattaag

SEQ ID NO: 50454 - DNA, 122 bp, Homo sapiens
caaccaaccaaggcagctcctgcgcagcaagcctcagccgcccttatttaagataccgcccgagagggcggggaaagaaaacccctacaggcaggacagcccttcgcccctcccaccaccac

SEQ ID NO: 50455 - DNA, 122 bp, Homo sapiens
tcggctctaccaatcagcaggatgtgggtggggccagataagagaataaaagcaggctgccggaaccagcagtggcaaaccgctcgggtctcctttcacgtttttggaatgtgttttgcaat

SEQ ID NO: 50456 - DNA, 122 bp, Homo sapiens
tttggcccctccccccatcgccatatcttcatcctacttcgcttgtgccttccccagcctcgtgggttgaaagtgtccctcaaatacctaggtagtcctccaggcaggactccaggggtgtt

SEQ ID NO: 50457 - DNA, 122 bp, Homo sapiens
gagatcctcctcaacaaccccagatagtggcggccccggcgggaggggcgggtgggaggccgcggccaccgccacctgccggcctcgagaggggccgatgcccagagacacagcccccacgg

SEQ ID NO: 50458 - DNA, 122 bp, Homo sapiens
cagagcacagatgcccgaggctgcacctgcaccaagacctgaccttaccccccagggccccggaccacacaggggctcacccgggtgttggctcacccgggcgccttctccgaacaccttcc

SEQ ID NO: 50459 - DNA, 122 bp, Homo sapiens
caccgcgccaggccttttgactctcatacatttttaatgaaaggaaagagagactaggaacgccacggaccaaagctcttcccattcatgaacccggcacccgtcaggattcgcccctgacg

SEQ ID NO: 50460 - DNA, 122 bp, Homo sapiens
acctcctgctcgcttactggttcctcgaaggccctgggccggtacaggtccgcggccgggcggttggggagcccctgctctagtgactaggtgaactactccaggggcccccggaccagagg

SEQ ID NO: 50461 - DNA, 122 bp, Homo sapiens
ctgaggccaagggcagtccagagctaatgcaaagtagatctgacggtttccctttgtttgcgtcgaggtcttcagggcagtgggagtaaaggggtgaaaaggcggacagccatgtccttgaa

SEQ ID NO: 50462 - DNA, 122 bp, Homo sapiens
tgttaaagattaagagcggcaagaagtcagagtcggcccaccctccgagctctcttagggcgatgtccttgctaatttggagactgattcagtccccttttggcccccaagttacgtaaaga

SEQ ID NO: 50463 - DNA, 122 bp, Homo sapiens
gccccggacgcgcgaggagcgcggggcgcgggaaggcaggcgggtgcacatgggtgccggcgggcgagctgcggggggagggggggcggggtgtggcctccccgcctcccgggcgggatttg

SEQ ID NO: 50464 - DNA, 122 bp, Homo sapiens
tctcccgagccagggttctcaggagcgggccgcgcaggagacgttagagggggttgttagcggctgttgggagaacgggtcacggaaacagtcccttccaaagccggggccatcgtggggtg

SEQ ID NO: 50465 - DNA, 122 bp, Homo sapiens
tgctccataacggggatgggcctgcgctgggaggggccgtagccgggagctgcgcatgctcgctttttgggggcggagcttaagcagcctggctaggaggctcaggttattcatttccggcg

SEQ ID NO: 50466 - DNA, 122 bp, Homo sapiens
ttatgtccccctgttaccttatcctatttataatttcacagcatttgccataatgtgaaacgacttcatttttacattcattttccccctctagaatggaaaccaatgagaacagggacctt

SEQ ID NO: 50467 - DNA, 122 bp, Homo sapiens
caccttttatttccctcaagccctgatttttagagtttctcttaccccctgacttccagccgctctccctgtcctcaccttccttcatacctccttggaaaagcccccatatgattctgcat

SEQ ID NO: 50468 - DNA, 122 bp, Homo sapiens
ctcaggtgatccacccaccttggcctcccaaagtgctgagattataggcatgagccaccacgcctggccagatgcatgttcaaaccaatcaaatggtgttttcttatgcaggactgatcgat

SEQ ID NO: 50469 - DNA, 122 bp, Homo sapiens
gggcaaggcccccacctgcacccgcccctgcacctgcagcctcctccatcctcgatcacccgtggcatcgacttgcaaaccccatacattgaaaattgaaagtgttcctacttgaaaagtat

SEQ ID NO: 50470 - DNA, 122 bp, Homo sapiens
gaagtgccggggatgcgtgagtggctgaggtggagccaggcactgcggcttgttttcctgcgcaccaccttctctctctggcttcaacttctgtgcatcacagggtgggagtcaccaggctc

SEQ ID NO: 50471 - DNA, 122 bp, Homo sapiens
gggcggggagcagcctctctctgtgaattagcttggcaggttggaatgtaagtcagactacggtgaaggctggatgccgtagggtctcatttggtttggacataggagagtagctgagggag

SEQ ID NO: 50472 - DNA, 122 bp, Homo sapiens
cccaggccagtgaggccttaactctgaaaggcaaaaagactctcaggcgctcacagccggcgtcacaaaaggaacggcgcaccgctgacgtcatttacgctctccgcctcgggccaggcggg

SEQ ID NO: 50473 - DNA, 122 bp, Homo sapiens
ttgattctataaatttttgtccttccaggccatccatagcctggagtgacatcccctacccggtactcccctgctctactcagatcaggctcatttccctgcagacagataatgttccttac

SEQ ID NO: 50474 - DNA, 122 bp, Homo sapiens
tggaactggaagcaccatttgacaacattttgtaaatcattacttctgaggttgttatgacgacggggtgtggcagtccggcttcacctgtggcagcagcttaggtccctgccctcctgcag

SEQ ID NO: 50475 - DNA, 122 bp, Homo sapiens
cttcctcctgggcaaaaactcttcaggtgggactcccactggcagatgtgaagaacgttgcgggcagtgggaggtgcttttgagtgagtgctgcataggcgtcctggacgggtctttgtctt

SEQ ID NO: 50476 - DNA, 122 bp, Homo sapiens
ggatacattgtgtttgctgttgggccggagacattgctctgctgctattagagggtgcagcgtgggcagctgattaaaatgtttggccagccttctctgagcccggcctacttaacttgaga

SEQ ID NO: 50477 - DNA, 122 bp, Homo sapiens
cctcgagtccacgcgcacctacctgggcgtggagagcttcgacgaggtgctgcggctctgcgacccctccgcacccctggccttcctgcaggccagcaagcagttcctgcagatgcggcgcc

SEQ ID NO: 50478 - DNA, 122 bp, Homo sapiens
gcagaccccaacttccagctcgccctaaacttcgcctggtccaacttcaggtgtggggcacggcgcgcgggcgggttcccggccacagcccggagcccgcgcgtgggtcccgcacagcccgg

SEQ ID NO: 50479 - DNA, 122 bp, Homo sapiens
tttctatttatttatctgatcccgaataacaagccgggaagttctgcttcatgggggtgacgtaagtgatggatgtgagtaccgcgtttcctaagccacatgcccggcctcacggtctgaca

SEQ ID NO: 50480 - DNA, 122 bp, Homo sapiens
ggtcttggcggagacatttgtgtttcgggggcagcgccccttcctacatccaggaggccgcgttgcccgggttaccgaaggccgccgcaccgacgccccgcccctgaccgccgatgcccctc

SEQ ID NO: 50481 - DNA, 122 bp, Homo sapiens
tgtctagcgcctgatttgcttcaaattacagagaatccctattattggggagtgatggaccgttatgaagcagaaggccttcttgaagtgaaacctgaggcctgaaagcgcgtttttgctca

SEQ ID NO: 50482 - DNA, 122 bp, Homo sapiens
gcagggaggggcacttaacggtggtggctggttctgcgccggatccgggagaggggcgggcgccattgtgcttcgctgccgactgcatttcctcagtcacgggcctagaactccaaggagaa

SEQ ID NO: 50483 - DNA, 122 bp, Homo sapiens
aggaaaaaagcaaactgtgcctttaaaccagggcgaccttcattcccacaagaaggactccgccttggtccccttgggtgaaagctgccgctgctgagcgcctctgcggcccggtgagatcg

SEQ ID NO: 50484 - DNA, 122 bp, Homo sapiens
ttgatgttactgagaggtgacaacgtgctggcagccctcacagctctcgctcgctcttggcgcctcctccgccttggtgcccactctggccgtgcttgagaagccctccagcccgcagctgc

SEQ ID NO: 50485 - DNA, 122 bp, Homo sapiens
catgttccagggacacacaggcctgaagaccttcctaaacagtgacgatatcacctcaggcgggacccagcagaagcccgcgagtccccggtgccccgccgggatgggcctgtgggccggca

SEQ ID NO: 50486 - DNA, 122 bp, Homo sapiens
cagccacttaggcagctctagcaaaacaaaaccctaagactttcctctccctgctggcatcgctctttaaaacatgttgtggctgccacagaatcacaggattttcgagcaggaaaggacct

SEQ ID NO: 50487 - DNA, 122 bp, Homo sapiens
gttgacttcaacatgaactcattggatttaactccagtgatattaaatgaggcacagaaacgggcaaagagacttctcaagatcagtattaaagtggcggcaaaacagaagttttattataa

SEQ ID NO: 50488 - DNA, 122 bp, Homo sapiens
cctcacctctgcccccatccccgtcctcagggtcctgcactccagcccggaggcagtgcccggggagccaggaggggcctggtctcagcccacgctctcctgaggctcctcctgccagcctc

SEQ ID NO: 50489 - DNA, 122 bp, Homo sapiens
gagggacagctctccaccgaccgaaggaggagaatgctatttatttcagcaccaaatatccggacagcgcctctcgggaggtccgagaagagaaccgcgatctgtttcagcaccggggctca

SEQ ID NO: 50490 - DNA, 122 bp, Homo sapiens
gaggagccgtgggttgaagaccgggagagacctgagttccaggcagtgcagaggggaccccggccaggtgagtgctgggctgtctgggctcggcgggccccgtccctgtggcccacagctcc

SEQ ID NO: 50491 - DNA, 122 bp, Homo sapiens
atattgcaaagtggacatagtacagaggcacatggctgatccttgtaagctgaacggcaccgaagaatttctacccctgtcatcgttaatgtttgctacacagaagcggtgacagaggctgc

SEQ ID NO: 50492 - DNA, 122 bp, Homo sapiens
gcctccccggccaccttccattgctaccccaggattcccgagtgcaacgttcccggctcgcgccccacacacggctcagcgcacactgcgcggcttccacctttactgacggagcatgcgcg

SEQ ID NO: 50493 - DNA, 122 bp, Homo sapiens
atatacaaatctattataaaaaattaacatttatcaaaacatatgcacacaaacacagaccgtacacggtgccatttgcagttaagagaaatgtaaacaaacttaaagatgcaatattaaaa

SEQ ID NO: 50494 - DNA, 122 bp, Homo sapiens
ttgctttacttttcaccttgcaaagagatccagtacctagtattggaagatccaccttaacgaccgtgcatatgaaaaccacagtctaaggaagtgactgcagaaagctcacagcgaccctg

SEQ ID NO: 50495 - DNA, 122 bp, Homo sapiens
cggatgctccacgccagctggtggcttagatgttttctcgtttcaagacagggagacagacggagtgatctctcgaggacccttccagctctgtgagtctaggaatcaggggaaatgacagt

SEQ ID NO: 50496 - DNA, 122 bp, Homo sapiens
ccccgcaagcggcgcctggcctccctcaatgctgaagctctcaataacctgctgctggagcgagaggacaccagcagcctggcaggcacccgccgcagtcgagcaggggatccccaccgcag

SEQ ID NO: 50497 - DNA, 122 bp, Homo sapiens
agcctggctgagcgcggtgcgtgtggctctctcacttccgaccgaccctcccctccggcccgcagccctgcccaaacggaagtgcgccctctacccgggtcccccaccgccgcgaggcggaa

SEQ ID NO: 50498 - DNA, 122 bp, Homo sapiens
tctggaaatacgcaggcgcgagatgaattgtttgattggctattcattgtgatgcacccacgagctgaagctccgtctaagccccgccctttcctgtcgtgacttaacgcacgcaagcggct

SEQ ID NO: 50499 - DNA, 122 bp, Homo sapiens
aagaggaatttgctgagacagggagaggtctgtgtgtgaaggaaaggggtggtctgggaacggggaggaggaacatggccacctctgctcagaatatgggagtgtcagcccagagaatgagg

SEQ ID NO: 50500 - DNA, 122 bp, Homo sapiens
tttatagaccttttatcctattcccagggttcctcttcctccctataccaatctttatggcgcatttctatgaatcaaaatgttcatatgtgaaaaggaaaaaaaaagaacatatttttctt

SEQ ID NO: 50501 - DNA, 122 bp, Homo sapiens
cctgggggaggggtgcagcgcggagctacgggtcgccccgaggctcagccgtggggaccgcggacgcgcttagcctaggtctggcctcattcatttcactcgcgcgggcttctgggccaggc

SEQ ID NO: 50502 - DNA, 122 bp, Homo sapiens
cgggcgctggagtgagatgggattcctgtgtcggggctgggaggcagcagggccgggcagcgttgtgaggagctttccagaagaggcgggggcaggggctgaggacccgaggaccacccagg

SEQ ID NO: 50503 - DNA, 122 bp, Homo sapiens
ttgcttatacctttctttgtaaactgtcagatttctgccccctccctcagttcagccctgcgcagccttgcctgccactggaggcaaactgggacagaaactgcgctcgctctctttttata

SEQ ID NO: 50504 - DNA, 122 bp, Homo sapiens
gcagagttagctggtgagagagatggcagtgaaaacacttctgggctaaacctactaaaccgtcaagtaaaaagtgactatgagattcgtggtgtttccttttgtccttcactctgctgaac

SEQ ID NO: 50505 - DNA, 122 bp, Homo sapiens
gagtaaagatgctcagaccgggtgaaactgagcagtcactgtcaacatgtgatggggctgcgactcatctttgcaagttattttctttttctaagtacacatttattccggactgtctcagg

SEQ ID NO: 50506 - DNA, 122 bp, Homo sapiens
accctggcctgtgtcactgtgagtgagcagtgtgacttctcagggctgcagtctccttgtcggaaaatggaaactaaaattgctgggattaaaagggaggaaaatatgggaaagcactttgg

SEQ ID NO: 50507 - DNA, 122 bp, Homo sapiens
cgcacgtcggtctgggccagcacagcctgccagcgctcaagcaactgggcgacccgctcccgccagcgctccacctccacgtcccgctccccgtgccgctgctgcagtcgctcccccacctc

SEQ ID NO: 50508 - DNA, 122 bp, Homo sapiens
gatccggagcgcgtggcgggcgtcagcgcggtggccagcgcgcagaggcgggcgcggaggcggctagaaggtgaccgcggatcccagcttcctgcagccaggtaaggctgccacccgccggc

SEQ ID NO: 50509 - DNA, 122 bp, Homo sapiens
gacagtggttgtttgggaaacagacacgccttctctggcaccacagcactctcggcctcgcgttgacctccccgcccctatggctagtgcgcaggcgcggcccagccttttttttttttttt

SEQ ID NO: 50510 - DNA, 122 bp, Homo sapiens
cagcacagatcatgccgcagccgtcacggatgaaccagacccggtcagccacgtcagcctcggaggaggaggacgatgaagagtcatagttgtcattttcagccaggagaggatgatgctcg

SEQ ID NO: 50511 - DNA, 122 bp, Homo sapiens
aacgctgtggggcctcagagctcagcgattctgcatcatctgtgattacgacccacagcccgttcaaacgagcgttagtagcctgctaacctgcaggaagtggtgtgaatattaattacaag

SEQ ID NO: 50512 - DNA, 122 bp, Homo sapiens
tacaaaggtccctggggcatcacctgctcacctaggaaccaggagtactggatactgttccgttactggtaacctatctggatgtaaaggttcataagttacaatgctttttttgtttaaaa

SEQ ID NO: 50513 - DNA, 122 bp, Homo sapiens
cctgggtttctttgtaggtagaacgggcgtggcagacctccctgcaggcttgttgctgggcgaacgagaaggatgccatgctgacacactgacgtgctctgtctccttgcagacggaggccc

SEQ ID NO: 50514 - DNA, 122 bp, Homo sapiens
tggagtcctacgcagagctacccccagcagtggcgtgcgggtttcttgaactttaagttacgttttttgcttttctttttccctgacagtgtctcataaataacccatgttgccttatgcgt

SEQ ID NO: 50515 - DNA, 122 bp, Homo sapiens
gtattaattctcatagtagcaataataggaaatctgtttgtgttgtatatgagttaataacgatatgttcaaatgggtggactcagtagttgattcaggtggagagaaatagatcctttcag

SEQ ID NO: 50516 - DNA, 122 bp, Homo sapiens
ggaaaggggttggaatgagagaaccgtttggaagcactggaatacagctttattcctacacgattagacccgttaccccgtgggtctggccgaccgtcctgactcggagatccctgagctgc

SEQ ID NO: 50517 - DNA, 122 bp, Homo sapiens
ccaaggggacagaggacaaagctgtgggcctggtctcagccccccagggtctaagcacatcgttcaggaatacagagctgagatctgtggccagaacttaagctctgcttagaacactgagt

SEQ ID NO: 50518 - DNA, 122 bp, Homo sapiens
gaacgactcagtctctcaaatcatagctaattctcctctgagggccttgctgaagttctgcgtttgcttgctccgctttcctctcattttggacctccagccttcctgtagtccgaggccct

SEQ ID NO: 50519 - DNA, 122 bp, Homo sapiens
gacttttgccctcctggaataacaagaaaatgagtgtcgcctctgtttttgtcggtccgccgcagacccgcggcccccacgtgcgcactccgatgacctttccgcctcgggtgatctggggg

SEQ ID NO: 50520 - DNA, 122 bp, Homo sapiens
gggcggagttcccggcgtctccgccccttacccggcgtgccccgcgcccggaggcgctgacgtggccgccgtcagagccgccatcttgtgggagcaaaaccaacgcctggctcggagcagca

SEQ ID NO: 50521 - DNA, 122 bp, Homo sapiens
tgataaataaagtaggttgtggagtgtgtgtttctgtgtatgtgctagtttatgtgtgtccgtgtgtgtgcatgtacgtaatccacacacaggcactcataaactggtatttcagtaggggt

SEQ ID NO: 50522 - DNA, 122 bp, Homo sapiens
caggactttgacctaatcagagtcatcgggcgcgggagctacgccaaggttctcctggtgcggttgaagaagaatgaccaaatttacgccatgaaagtggtgaagaaagagctggtgcatga

SEQ ID NO: 50523 - DNA, 122 bp, Homo sapiens
gcgcagagaggctgtacctggcaggtacccacgtacctatcatggtcactgggtaggtggcggctgcgggccaggaacaggcccatgcgcgcagcggcgccagccgcgcctcccaccagcgg

SEQ ID NO: 50524 - DNA, 122 bp, Homo sapiens
attttattgtttcagtcatttgctttgagatctttaagctgtagcatgttatttgtaatgcgccaaggaaggtacgttgactcatttgaaactttcattattgttaaaactaatgcagtgaa

SEQ ID NO: 50525 - DNA, 122 bp, Homo sapiens
cacctcccttagagctggggtaccgggtcactgctgaagacctggaccaggagaaggaggcggctttccagcgcatcaagagtgcactgcaggttgaggacaaggccatttagtactgcaga

SEQ ID NO: 50526 - DNA, 122 bp, Homo sapiens
accactcgggtgagggaaagaagagacccctggaggggacgcctctctcctgcctagaggcgaggaagacccctgtactggccggggaggagacccccagaagtggaaagaagggagctttc

SEQ ID NO: 50527 - DNA, 122 bp, Homo sapiens
ccattaaaaggtatcaatatgacaaagatggagcaatgtgcctcaatgcgtgaggataggcgaggtgagctgaggagtgacatctgatttctgggattttcttagaagagatatcctaggct

SEQ ID NO: 50528 - DNA, 122 bp, Homo sapiens
cagcttctgaagcaattaggctgacgcacggaaaatacagtaaaatcagcccagggacggcgctccccttcccgtgcactctcccaatctgcggccctttgtctgtgagtttctgatcttag

SEQ ID NO: 50529 - DNA, 122 bp, Homo sapiens
acgagcagccagacagacttccacactggccacagagccttcctttctggggggccctggcgaatggggaaactgaggcccagagagggagaggcgcggcccagggacatactctgaagccc

SEQ ID NO: 50530 - DNA, 122 bp, Homo sapiens
tagagaggaggtttctcacctgtatgttactcaggtttgtctcgaactcctatactcaagcgatccgcccgtctaggcctctcaaagtgctgggattacaggcatgagccgccgcgccccgc

SEQ ID NO: 50531 - DNA, 122 bp, Homo sapiens
cctggctcgaagtctccagaattcccgccagagctgggctgggctcgcggaccgctcatgcgccgtctcccaggagcctccccccagcccagtttaatagccggccctgaccagtccagggg

SEQ ID NO: 50532 - DNA, 122 bp, Homo sapiens
ttgaattgggcctggtcaaagttctcaaagtcacccagcttcaccccaccagccatggtgcgcctgaccttgtccatggggtgtgttgttgtcactttggagttgaaagctccaggcagcat

SEQ ID NO: 50533 - DNA, 122 bp, Homo sapiens
gcttcatcagtgatattaagcatttccccatccctgtctcctagcaggagagaggcactacgtctggattatgagagcaacttgtctgcattgtctgttggaaaataaagatgaacttactt

SEQ ID NO: 50534 - DNA, 122 bp, Homo sapiens
ctgtgtctacctctcggggcctggctggagggtgaagccagggcaggatcaaggtgagggcggaatcaagggctgccggccgcctgctctgtagggaggaccacgagattgggcccgagacg

SEQ ID NO: 50535 - DNA, 122 bp, Homo sapiens
cgggccatcagtgctggggtacccagcgccccctccacagctgctggcctgggtgctaagcgcctcactgcccaggccggcggcgcccgcccgctaagagtgtgggtcccaccgagcccacg

SEQ ID NO: 50536 - DNA, 122 bp, Homo sapiens
ccaacaggccccaattgccaccagaggtagccgtaaacccatggtccccgaaactccttccgggcctacctgacaaaaactgggacaacctccttaggcccccgggattccccctgtgccgc

SEQ ID NO: 50537 - DNA, 122 bp, Homo sapiens
tgctggcactggctcaggctttcacacacacacacgcgcacacacacacacacacacacacggacaggcacccccttggtggccttcacagtttcaccttcaggtaaatgggctcatccttt

SEQ ID NO: 50538 - DNA, 122 bp, Homo sapiens
cagggctgggggctggggcctgggcagggccaggcactcaagtgaggccaagtcctggagcgaaccagttcctggtggccgttggacagctcacacagctccctgccaggtcacccgccatg

SEQ ID NO: 50539 - DNA, 122 bp, Homo sapiens
tgagcaagggaatggaaaacatgtcttggagggccggatcgccgcagaggcccagtcaggcgtcctggtctgaagacgccgggcctcccgcctcctgttgcaagggaggcctccatttttac

SEQ ID NO: 50540 - DNA, 122 bp, Homo sapiens
ctcactggcaatgggtcctaagcgtcctgccctcctctggctgaaatgttggattcacttcgatgaatgctgctatagggaaagaacccagtggccaccagccaggagcacacgtcttgctc

SEQ ID NO: 50541 - DNA, 122 bp, Homo sapiens
tttgtccttgtgaacctttcaataaacggattaatttataaaacagttccccccactacacgctccctctgtggaacgctccctcttgggtttccgggaaaggtgacggtgtggtcagtcct

SEQ ID NO: 50542 - DNA, 122 bp, Homo sapiens
tcgcggcccgcgcgctgcttaagtagagccgcctgctctggtgccgtggcgcgcaggaggcgtgggcggcggcggagcctcgcttaccgggcgaggggaggtggggagcggggactcgattt

SEQ ID NO: 50543 - DNA, 122 bp, Homo sapiens
cctgggccgactgggagacagtcctggcaaagcctctgaaaacagccagcccctaaggagcggttctgttgggggaagggagcctcaaggctaacgaaggagctcccaccctacccttcaac

SEQ ID NO: 50544 - DNA, 122 bp, Homo sapiens
gattggcctggttaagagtctttcatgtagggaagtagtaacaaataaggttgtatggaccgaagagggccagattatggatagcctcaaataatagtctaaggaatttggacttggaaaca

SEQ ID NO: 50545 - DNA, 122 bp, Homo sapiens
catcccaagtctgttcctgcaggatcatgcgcgcacagcccagtgtggtgctgagtgcggcgcacacggtggcagccaggatgtcgcccttcgtgcgccagatggacttcgccatcgactgg

SEQ ID NO: 50546 - DNA, 122 bp, Homo sapiens
aactcctgacctcacgtgatcccccaaccttgggttccgaaagtgctgggtgtgagccatcgtgccaggccaataatttgtaattctaaatgcccccttctgcaactaataaccaattttca

SEQ ID NO: 50547 - DNA, 122 bp, Homo sapiens
tttcgggtgaaagtaggcggctcttaaaagagcctttttaagttggatagaattactgcccggaaacctctacgctctctccccacgaatgcggcgagcgagctgaatgtccttgggcatga

SEQ ID NO: 50548 - DNA, 122 bp, Homo sapiens
ctgaagaggatgctactgccactgccaaacactaggtgccatcagccctgttgtcagcatcgctcaaccactgccccagccccttggtctcactgccattgctccacccccagagaaggaga

SEQ ID NO: 50549 - DNA, 122 bp, Homo sapiens
cttgatttttttttcttcttcttctaggagtaatgggagtgtgttgggtgagtattgaaccgaagagtaatgtggctcaactgccttttgaaaggacatgtatggtgtggaggatggacttt

SEQ ID NO: 50550 - DNA, 122 bp, Homo sapiens
ggcatccatggctgcaggagaaagggaggtgtccagcacaggcggagataatctcacctccggggaagacacttaggcggctgagactctgggatttacccagccaggaggagtggggggaa

SEQ ID NO: 50551 - DNA, 122 bp, Homo sapiens
gagcagaaaaaggagagaaggaaacagggaggaaggacaaagccgacaatgaaggagaggcggctgcagcagcagtcttggttctaaccagatctcttcaagacctgatgctgagcaatttc

SEQ ID NO: 50552 - DNA, 122 bp, Homo sapiens
acttccctgtccctccaggtggggacgctttgcagagctgctacctgtagcctcccaggacgcctttcagaggcagtggatgcagagttccagtctccaccctgacacttagtgagagcttc

SEQ ID NO: 50553 - DNA, 122 bp, Homo sapiens
actggtgacccgagacgcacgggaactcgcagtcacttgaccaagtagcggccacgtttgcgccacacttccataaacgtgaccagtaaggaagcgacaagcctgaagggtcctgaccattt

SEQ ID NO: 50554 - DNA, 122 bp, Homo sapiens
ggcagagcccctccacgcatcggggcccggcagctcatttctaggattctcctgaacacgcgaaggagggcacccaccatgctcgggactggctgcttctctgtgaggcctccaggcagaac

SEQ ID NO: 50555 - DNA, 122 bp, Homo sapiens
gagagggatactgcgagagggctaggggcggccagtccggggctgccggccaaggctaggcgctgccagcccgattctcctctgctctccacccccgcctcacccagtggccggccggacct

SEQ ID NO: 50556 - DNA, 122 bp, Homo sapiens
actacaaaatttaaaagacattggcggggtggggtgggggtaaacccactgccactgccccgccccaggccctggattcccctaggcacagtgttactctttccttttggagttttccctga

SEQ ID NO: 50557 - DNA, 122 bp, Homo sapiens
cccaggctcccgtgaccccagaaaccaggtcacatggaccacagtgccagatcctcatcacgccggtgagcacctagaagtgagaacactgtattcctacaatgtacacttggatatttctc

SEQ ID NO: 50558 - DNA, 122 bp, Homo sapiens
ccctaaaccctccctctcccagaaatgacaacagagacggcagccgagatcggtaggaaacgtctcgttgacagctcagagcttaaaaaaaaatatatacacatatataaaaaacacttctg

SEQ ID NO: 50559 - DNA, 122 bp, Homo sapiens
cctgctgcttgtccattacataggtcttgatctaggagtagattttaacaaaagtcacatcgagatgtaaaagcattaagctgacttaagggccatggacagaaaacagaaggaagtaacac

SEQ ID NO: 50560 - DNA, 122 bp, Homo sapiens
tagagacgctgggccacacggagcaaagcactcaggggttcaagcagcatcagacttccccgcgaggttcctccactgcctttgtcacccgccagtgtgaagtctccaaccctccccgtgtg

SEQ ID NO: 50561 - DNA, 122 bp, Homo sapiens
gccaacctgtgctgtgtcatcagttgggggcccctgcccaagccgagctcgagccgtgggcgggagtcgttgactctccaggtgagggcgacccctctgccctgtccttgggggggtcccct

SEQ ID NO: 50562 - DNA, 122 bp, Homo sapiens
acagaggagtctttaacccacatcagccttgatctaagtgtaccactttacttaaaagttcgtgggatctggagctcctggtctagcaagccatgaaaatgccaataaatgtttgtaataaa

SEQ ID NO: 50563 - DNA, 122 bp, Homo sapiens
aggtaattctccacaccactgcctttttttttttttttttttttttttccaatgcagttgcgtggtgtgaaggcgataactgcagacactcaggtgtaaacaacccagggaatcaatgggtt

SEQ ID NO: 50564 - DNA, 122 bp, Homo sapiens
ccaaactcccaggcgcccggcaagagtggcgggcgcggaccctttaagaaggccggggggcgtggcctcggggcgtggcccggggcgtggcatcggggcgaggcttcgggggcggagcccag

SEQ ID NO: 50565 - DNA, 122 bp, Homo sapiens
ggtgacttgcattttagtctcagctttgcctctgagtcctgctatgtactttaggcaagtcgctgaacctctatgctttggtttattcatctaccaaatgggaatattacaatttgtcctgt

SEQ ID NO: 50566 - DNA, 122 bp, Homo sapiens
tccctcacctccataggatgagaccggggcctacctcattgaccgtgaccccacctacttcgggcccatcctgaacttcctccggcatggcaagctggtgctggacaaggacatggctgagg

SEQ ID NO: 50567 - DNA, 122 bp, Homo sapiens
cctgccagtggggaaggaggtggctgctcctacggctgggccagaggtgtccctgatgtccgtggatggtcctggcaaccaagaaagcggctgctcttcctcctccacacagccaccttggt

SEQ ID NO: 50568 - DNA, 122 bp, Homo sapiens
aactagggaggtcttcaagtcgccaaaacacaccgggatgtggctcgccaggacaaaacccgcgggttccccggtttttccgtgcgccccgcggcggggagaggggcccaggcgctgaaacc

SEQ ID NO: 50569 - DNA, 122 bp, Homo sapiens
cagacgggaccaactgctagccttcaaggccattacctttaccaaggagggtaccatgctcgtggctgaggagccaacaggaggaagatgaggtggacgatgtgccagccactgtaggccct

SEQ ID NO: 50570 - DNA, 122 bp, Homo sapiens
ggggtgcggagagcgggcctgtgattcaccagagggttgcagagagaggcccaagaatcgcgggaggggtgcggagaggggcctgtgaatcacgggaggggtgcggagaggggcccgtgaat

SEQ ID NO: 50571 - DNA, 122 bp, Homo sapiens
gttttcagagttcatctgtgttggcgcacgctcgtgcctttttatggctgagaaatagtccgctgtgttgactcagcacgttgggtttctccacgcatctgttggcggatgtgttagttatt

SEQ ID NO: 50572 - DNA, 122 bp, Homo sapiens
agattaacccgtcccgcactgcgtctcacgcgagattaacccgtcccgcactgcgtctcacgcgagattaacccgtcccgcactgtgtctcacctgagaacactcaggtgtgcacatggtta

SEQ ID NO: 50573 - DNA, 122 bp, Homo sapiens
tctccagcctgcagggccgggcttccaccacgtgggtggctgcggccagcaggatcaatccgcgaagggtgggggtaggaggcgtgcccctgcggtgggaggcggggtctgcgcagtgggtg

SEQ ID NO: 50574 - DNA, 122 bp, Homo sapiens
gttcgctctgagcagcagctgccagtttagacagatgcggggcttccctcacacccctgccgtcctctcctcctcctccctctcaccctctgggctggaggccatgaactcagatcctctgc

SEQ ID NO: 50575 - DNA, 122 bp, Homo sapiens
atattgaaattgaaagtgagctctgggagggcagcggggctggcactcaggtgattgcctcggccgtgacagccccttcgtcttgcggccgccgtgcaccctttagaggcagctgctgttat

SEQ ID NO: 50576 - DNA, 122 bp, Homo sapiens
caggcagcagcatttacgcatatttcatatcattaaggagatggaactggagagagaaagcgggagtaggggacaatttttaaaaatacccaacttggtttagtttggggataattttcttg

SEQ ID NO: 50577 - DNA, 122 bp, Homo sapiens
cccgctggctgcatcattccagagtctgggtgtctggggcaaagggagacaatgctgccacgagggcatgtgcatccatgtgtgtcaggctggtagcagctgcaataatgcttccccatctg

SEQ ID NO: 50578 - DNA, 122 bp, Homo sapiens
aagaggaaggcatctgtctcctgcccgtccctgggcaatggaatgtctcggtataaaacccgattgtacattccatctactgagatagggaaaaaccaccttagggctggaggtgggacatg

SEQ ID NO: 50579 - DNA, 122 bp, Homo sapiens
tattaaaagtggaggccaggcggcctctcagctgcagtctctgggtctcgagctcttccccggaactgtccatgggtcagtgaggacctaccctttgccctagggcaggagaaagaaggggg

SEQ ID NO: 50580 - DNA, 122 bp, Homo sapiens
gcgcggcccccacgggcctcaagtcctcatcctccgggacccagggtgctgggagcctcacgtcctcatccttccgggacccggggcgctgggagcctcacgtcctcgtcctccgggacccg

SEQ ID NO: 50581 - DNA, 122 bp, Homo sapiens
ctggctaatgtccagttcgcagagaatgccagcaataatgggaacaatgctcactcgtcccggacctgtgatgagaaaactttcccaattccccagttccgtggctgaaatatggcaaagcc

SEQ ID NO: 50582 - DNA, 122 bp, Homo sapiens
ctcactcttgctcaagggctggactcccctttattcttttaaggcttctctgattaccaccgccccccatccttggctccccatctccttgttttacattttcccaaagccatccccgaaac

SEQ ID NO: 50583 - DNA, 122 bp, Homo sapiens
cccccgccgcctctgtaccagggagagcgcctggaaggcgccgctgcctctctctccctacgtgcccacctgcctctaggaactggtgagttacttcagttctatgtgagtctccagtgcca

SEQ ID NO: 50584 - DNA, 122 bp, Homo sapiens
gactcgagcgtccacgggaatggctggttgagatatcttgctcttccaatacttactctgcggcttcctggctgtgcggctttgggcaaatgttttaaactctgagtgtttcttcagctgta

SEQ ID NO: 50585 - DNA, 122 bp, Homo sapiens
tggttgaaacctgaaggatgaataagagttaaggtgaagaggggagaggggaggaactagcggagcattcacagtagcccagaagtagaagccagcagttggcacacagccaaggacagaac

SEQ ID NO: 50586 - DNA, 122 bp, Homo sapiens
gacagaggtggaggcggagagcagcgtgcggttctcgagtttgtccactgggatgcactgcgctcccgcgttggggacgaaaaggccagtagttgttagcccgctgcttgagccgcccccac

SEQ ID NO: 50587 - DNA, 122 bp, Homo sapiens
ggcttgaggtggctatcaggccttccatcacagcataaagctccttcagggagagaagagcgaaggcacccaggctggggaacagcagctcctactatacctaccctgcccactctggtcca

SEQ ID NO: 50588 - DNA, 122 bp, Homo sapiens
gtcttattctcactcatctcgtgtccgggcgtgctgggggtgtagacacatccaaattcccgtcttattctcactcatcgcgtgtccaggcgtgcagatacatccaaattcccatcttattc

SEQ ID NO: 50589 - DNA, 122 bp, Homo sapiens
aaaagtagttgctgctattatatcctgaagcatctggctgtcctggtggggacatatgagcgctgccacaggccgggaatatcccaggcgagtaagaatagcccacaataagagatgactgc

SEQ ID NO: 50590 - DNA, 122 bp, Homo sapiens
aaacaagctgccgggggtgagatagtttaacttgataaacaagaacctgataaccaccgccgagagaggagcaatggtaaccttcaccgagaggagattatggaccacacggtctccgggcg

SEQ ID NO: 50591 - DNA, 122 bp, Homo sapiens
ccaatcccaaaagagagagaagcccctcccgggcacagaactaagcgctgcacattccggcgaaggatgtctagcctgctggcagtcccattaactggagctgttttccggaatacagcaac

SEQ ID NO: 50592 - DNA, 122 bp, Homo sapiens
caccagtgataattgtgcttcttctaagcagtgtaattgttttctcttatggatcctcttcgatatggatctggttagatttctctattggtaaagcccagagcctaatttgggcctaattc

SEQ ID NO: 50593 - DNA, 122 bp, Homo sapiens
aggctgggggcagcagtgtgcgagccccggcactacaaatatcatagaaccccgggcggccggggacttcccagaagtcacttgcttaaatgcaaacacagaacaaccccatggggtcagac

SEQ ID NO: 50594 - DNA, 122 bp, Homo sapiens
cagagagagctggctaggtagagctccagctctggcttctgagattcaagcagctgcggtcgctgcgggcagtggctgctccgagctccgggcccagaaggccgctccaccgctagcgcggc

SEQ ID NO: 50595 - DNA, 122 bp, Homo sapiens
ctggagtttgcaggcagagagccccgttctgaacagggagccggagcctcagcgcggtgacgaagcacttattcattcattcggcagatatttgttgagtgcccactatgtgccaggttttt

SEQ ID NO: 50596 - DNA, 122 bp, Homo sapiens
gcagaaagccgtggcggcagcgggggtgggcaaaaagccaggtcgggcaaaaagccgctgcggcggggggggggtggggggcaaaaagccgcggcggtagggaattaaaagccgtggcgggc

SEQ ID NO: 50597 - DNA, 122 bp, Homo sapiens
ggcaacacagcaagaccccatctttacaaaatctttaaaaatcagctaggtgtggtggcacgcatctgcagtcttaggtactcaggaggttgaggtgggaggatcacttgagcccaggcagt

SEQ ID NO: 50598 - DNA, 122 bp, Homo sapiens
gagctggaggatattctttaaaataggaaaagacatcttgggtgctcatctcatctactccgcaaatatagattgtctccagtctcaccttggggattgctagaaagacaagacacagaaaa

SEQ ID NO: 50599 - DNA, 122 bp, Homo sapiens
ttgtgtttccctttcccagcctcactcagagccacttgaccatctctttttctcccaccccggtgtgcagagatgaaaagggaacggaagcaatattctggcctctcatactttctagagtt

SEQ ID NO: 50600 - DNA, 122 bp, Homo sapiens
acccacccacacctctagactgtattctgggtttcactctgcctcctgtacgtttcagctcggaggccccactcacctcgtatcccccggcccgagcaccggcagccgccagcaacaaaagg

SEQ ID NO: 50601 - DNA, 122 bp, Homo sapiens
cttgctgcgctgcgagtggctgcggttgcgagaagccgcccggcaccttccgctagttctcggctgcaaatcttcgtccttgcacttgacagcgattgtacttaagctcccagggcgcgctt

SEQ ID NO: 50602 - DNA, 122 bp, Homo sapiens
cccaagttccccaattcggctcccattttcccaaacttcgggtgtgcaatccccctcccacgcgctctcgtgttccgcagtttctccatgcgtttattcatgtattctttcattcctttgtc

SEQ ID NO: 50603 - DNA, 122 bp, Homo sapiens
tcactcacctcttatggtttgttgtggttcttacggcagtggggcccggtccagaaatctcgaaagtacccagtgaaaggggcaagaatgcgccagagaaatgctgtagggggaaacgctag

SEQ ID NO: 50604 - DNA, 122 bp, Homo sapiens
gcgacgccgagatgcagacgctgaaggatccggcagctgcacctagactgatccaagcaacggaaacgccagcggccccaccccggccctgcccggcttggcccgtcccacccccgccaggg

SEQ ID NO: 50605 - DNA, 122 bp, Homo sapiens
tttgacctctactgcggagctttcaagcttcgctgttgtgacaagtgctgccactgacatcggctggtttcataacgcctggccccacgagtgcttcatgctagatggctgaattttgatga

SEQ ID NO: 50606 - DNA, 122 bp, Homo sapiens
tgacgttctcaccgatccacgtgatgagggcaaacttggacctcttgctcatggcatccccggtggtgaagcgcacgaaggcaaacaaccggacgtcatctgtggccaaaagcgaaaagaga

SEQ ID NO: 50607 - DNA, 122 bp, Homo sapiens
ccgtggttcccctcttagcactgtaacttcctgggcgccaaacaggctgcccaggcagcccggaggagcagcagcttcaacgcaacccagtacccagccctgcgactccccagccactctgg

SEQ ID NO: 50608 - DNA, 122 bp, Homo sapiens
ctggtgcggcacgtgcgacaccacacaggcgagaagccgttcaagtgctacaagtgcggccgtggcttcgccgagcacggcacgctgaaccggcacctgcgcaccaaaggtctgggccggtg

SEQ ID NO: 50609 - DNA, 122 bp, Homo sapiens
gggaaaaataaaagctaaaattagttatatctcatccacccaaaatcaggcttcccctcacgtctttctgctcagcgcctacaagtaggtctcttcacaccaactatgttaataccaacact

SEQ ID NO: 50610 - DNA, 122 bp, Homo sapiens
tggggaggagtgcctcagagggggcctgagtcaggagcttctcagagtgtatgatgtcagcggagggtggtggggtggaggtccccctccttctttccttccttccttccttccttccccag

SEQ ID NO: 50611 - DNA, 122 bp, Homo sapiens
tgtgtgcccggccgtctgccaggagttccacctgggccctttcacgccaccctaggatatcgatactggtattcttgttttacagacatgaagttttagactcagagagcttaagaaacttg

SEQ ID NO: 50612 - DNA, 122 bp, Homo sapiens
tgacatcatcatgtcaggatagagctcagacccagaggcaatgacatcatcacgtcaggacggagctcagacccagaggcaatgtcatcatcacatcaggataagagttcaggaaagacaag

SEQ ID NO: 50613 - DNA, 122 bp, Homo sapiens
gggttacagtactgacttgccactttacgaagcagtctttttgccaagcgtagctgtgtccgctttcacagaacccccgtagcagcagggcttgggcgtggagcagccaaggcccacgtagc

SEQ ID NO: 50614 - DNA, 122 bp, Homo sapiens
gagcactcaccagcgggcagggagggcggcagggcacggcggtggcggtgggtcggcgaccggcgggccgaagactggaagcccgggccgctgaggctccgcagccccctccgcgccgcccc

SEQ ID NO: 50615 - DNA, 122 bp, Homo sapiens
cacgtgggtcagctttgctgcgggggtgggggttgcaactctggaggctcattttatcgccgggccagggcagtgatctgctcggtgagaaaagaaaaggccattccctgcctttctgctgg

SEQ ID NO: 50616 - DNA, 122 bp, Homo sapiens
gaccaaaggaaatctttgggtctggaaggcgacaagagatcacaggctttctaggtctaccgcgcaccccgatgacgtcacgcggcgacgttctctgacgtcagagtttcctgcccaccatc

SEQ ID NO: 50617 - DNA, 122 bp, Homo sapiens
attacgacagatatataaagcaagtatcatcaaactgctgggtttaaaatggtaaaatatcgttcatgtgtttggagaaggagaaggtttcagtggtagggtagctagctgtgggactcagt

SEQ ID NO: 50618 - DNA, 122 bp, Homo sapiens
gctcattcattcaaccaatatttattgaaagcgtactacaggcgctgtgcaaagaccctgcggaaccggcccttgggagtttgaattctaatggggaaatggagggtgaggggtcagctagt

SEQ ID NO: 50619 - DNA, 122 bp, Homo sapiens
gcagaggggagagactcagctgggttgaaacctggctcccactgcagcaagctcatatgacggcagacaagtctcatatctctctgaatctcagtctccacgtctgtgcaatgggtgaatga

SEQ ID NO: 50620 - DNA, 122 bp, Homo sapiens
tgggacttgaacgatttctttttttacatttgggtctctaattcatttgaagtttcttcccgcatagggtgtgaatctaggttcattttccacccgactgacgcattgttcctgcaccagtt

SEQ ID NO: 50621 - DNA, 122 bp, Homo sapiens
gtgtggttcgcattggggtgccgggtggttccgagtcagctgccccctctgcctcctccccgtgcccatcacaactgcccccagtgctgggacctctgggcaagaggctgaggctgacactc

SEQ ID NO: 50622 - DNA, 122 bp, Homo sapiens
cattcggtgagttaaaggctgagcccaggctccatcctgggtgtcctgacgtccagtctacggccctgtccccccacttgcagtggcctcgtggtgacttgtgttttccctttcatggcggg

SEQ ID NO: 50623 - DNA, 122 bp, Homo sapiens
cgcccggccaacccgcggcgtgttgctatgtgctgagccgaggggataggtgcgggggcgcgtccatcacggggtagcccccggcccggacccggagggatgcggagtggcggccgcggcgg

SEQ ID NO: 50624 - DNA, 122 bp, Homo sapiens
agctcgagactgaggcgaaagactgagcctgcccagtaatcgcctgtggaaaggcgacgacggcgccctcgtgactccgcgccgaccaaccaaagctcgcggccgtccccatgagccaatcg

SEQ ID NO: 50625 - DNA, 122 bp, Homo sapiens
gcaggcaccggcctgacggccaggcagacacaggacgtacgcagaacatgcaacatcgagcggttctcacattgtaattctcagaggtgaaaactacagaaattgctggagcagtttgaatc

SEQ ID NO: 50626 - DNA, 122 bp, Homo sapiens
tcccaggttccaaggcgtctggaggcggtgtttctccagggtccagggggagcgacccctcgaaccactgctctgtagccatggtagggccggggggcgggaacctgagctctttaagcttc

SEQ ID NO: 50627 - DNA, 122 bp, Homo sapiens
ctgcttctcccgagaggactttctcgagcgctcgggcggcggccgggtggggcgagcgcacgaggcgggagctgcagcaggtcagccttgcttagccttccgtgccctgcccaggaaccgcg

SEQ ID NO: 50628 - DNA, 122 bp, Homo sapiens
ggtatctcaacttttacaaacagacgatggaccttctgactggcagcgggatcattaccccgcaggaggcggcgctgcccatcgtctccgcggccatctcccacctgtggcagaacctctcg

SEQ ID NO: 50629 - DNA, 122 bp, Homo sapiens
taactggaggcagcaaaatgttcttccgccccactggggtgaacctggaatgtggaaggacgggaaataatacaaagtcacacgctttaggttctacaactcctgactggctgaattggccc

SEQ ID NO: 50630 - DNA, 122 bp, Homo sapiens
gcagccccgcgcggaccagacacaaagccgatcaatcccggaggcgtgggggcggagggacgacccgccggggctttcccgggcgctgctctcctcctgctgccccctcgctaggacccggc

SEQ ID NO: 50631 - DNA, 122 bp, Homo sapiens
atgccaattgagtttttaactgtaaaacccaatcagcattaaataaaagtgaacacaggtcgaagaatctgtagtagaatctgatttattcttttttgagactggatcttactctgtcactc

SEQ ID NO: 50632 - DNA, 122 bp, Homo sapiens
ccacctgcggtggagcaactagcttcttgactgccctgaattttgtgacatagagccccccgtggcccaaaatcaagaaacttacttgttttgtcatggagtcaatgaggcgcacgtagaaa

SEQ ID NO: 50633 - DNA, 122 bp, Homo sapiens
gctgcagcagccaggggaggagcagccaccagctcaagccccagggcacgtctgcaccgccgcccaccatctgcagcccaccccggggcaggacgctcctgcctccacagccccgggggtga

SEQ ID NO: 50634 - DNA, 122 bp, Homo sapiens
ggtcgccgccatggcccgctggatcccgaccaagaggcagaagtacggggttggtgagtgcgcgccccaccttgtcccggcccgacccacgcggccaagttcgcggacagcggccctgccag

SEQ ID NO: 50635 - DNA, 122 bp, Homo sapiens
acaggcctgcatggggagcagggagggaggctcagcccacaggaggactcagctccaacacgcctcagggctgtgatctagccccattttcagcacagtgtttccttataataaacacattt

SEQ ID NO: 50636 - DNA, 122 bp, Homo sapiens
tgggtgggccggggggcaggggcctgcgctgcgcgccccctcctcctccacctcctcctccgcgtttcctgtccctggccttcatcccggcctcccggggcgtaaacttgcagcggttgggg

SEQ ID NO: 50637 - DNA, 122 bp, Homo sapiens
gggagagccagcaggcaccgggccctgcccgctccggggctgctgggaggcggggaggagcggctctgctgttgctacccgatgaagagcatgtcagccgcgtatttcaagctgctgttttc

SEQ ID NO: 50638 - DNA, 122 bp, Homo sapiens
ggacactttcaccagcccactaggaagagcttttaaatacaagttttgcctacacattaacgttttaaaaatatttaatttacacacagcttttgaagaactccccatgcacgtctgtcatt

SEQ ID NO: 50639 - DNA, 122 bp, Homo sapiens
ctgtcgttgtgaatgaaaaggatcacaaactctgatgtttagaatgagtcaaatctaggccgggaacagtggctcaggcctgtaatcccagcattttggggggccgaggttggcggatcacc

SEQ ID NO: 50640 - DNA, 122 bp, Homo sapiens
gagccaggcagagtcgccagcggagactcgcgagtggcgcgcgggaggagcggccgccggcgctgggcttgccttgctgctgctgctgctgctgcctccccaccgcctttttttttttttaa

SEQ ID NO: 50641 - DNA, 122 bp, Homo sapiens
tcagggttggtaaatacctctgggtagacgtttcacaggcaacggggtctaagagccgggcggaagttctccctgtgtcacacaaggtcggtttgacttcaggcttctgtggcctcgatttc

SEQ ID NO: 50642 - DNA, 122 bp, Homo sapiens
gagacgccagggttggctcctgcggacctgtttactgagccatctggacaccaggacgagcggagcctgacgccctagagcgagcgtcctgtcctcatcctcaactctcctgcctcgctggt

SEQ ID NO: 50643 - DNA, 122 bp, Homo sapiens
gggatgccggggtccccgctcacctccatgcctggcctggcaggcggcatgagactgcctcgccccgcccagtcccactcccacggtgacgcccgccaggcagtcctgtgggggaggcccgg

SEQ ID NO: 50644 - DNA, 122 bp, Homo sapiens
tcagtgactcggactctgacctcagcttgcccggtggtgctgaagtggaagcactgtccccgatggggctgcctggggaggaggattcaggtcctgatgagccgccctcacccccgtcaggc

SEQ ID NO: 50645 - DNA, 122 bp, Homo sapiens
gagcctttctgtaccatgtcacaggccagagaacatcttgtggctaaaaggggaaaagaacgtattattctgttatcagagagtcaaactaaatgctaatcctacagactgtctcctttttc

SEQ ID NO: 50646 - DNA, 122 bp, Homo sapiens
catcacattgggagttaaggcttcaacatatgtatttagggaggacgcacacatttggtccgtagcgagaattcagactcaagcccttgcctcaggctctaatgcacccaaacccagcagcc

SEQ ID NO: 50647 - DNA, 122 bp, Homo sapiens
ccagattatttgagggggacaattcactcaactgcactaattgtttcttcatctataaaccgagtccttgtgcctagaaagcaccagggtcaaacctcagttgctttcccatgtaagaccct

SEQ ID NO: 50648 - DNA, 122 bp, Homo sapiens
agctggcaggcgctcgggtttggccgcgcctcctccgccttcctctccacccgcgtcccccggggtccatgccgcatttctttgttttgaaagcgcctcctccgcccagaggcttttccccc

SEQ ID NO: 50649 - DNA, 122 bp, Homo sapiens
atcaatcacccgggagcccgggattcaaacccgctctggagcggggctggggcgcaaagccggagttctacagctgaaacctcccggagactttgcacacttctgcaaacgcgcggggctgg

SEQ ID NO: 50650 - DNA, 122 bp, Homo sapiens
gctaatttgcccaaatacacccaattaacacatatcagaaccaaaattttattaaacccacgtctttctgactctacatcacaccactagtcactgtgtcatgaaatactatggtaggggtc

SEQ ID NO: 50651 - DNA, 122 bp, Homo sapiens
acccacactacaggaccctgctgttccagccgctttcctctgccactagctcaggaagagcgagggctgcctctcagacacagggagttcctgcaggctgacttcaggcactccagaatgag

SEQ ID NO: 50652 - DNA, 122 bp, Homo sapiens
ctcgactttaaaaagctccaaatgcagctttaaaaaattaatctgggccagaatttcaaacggcctcactaggcttctggttgatgcctgtgaactgaactctgacaacagacttctgaaat

SEQ ID NO: 50653 - DNA, 122 bp, Homo sapiens
agagctcactcctcacaaaccccaccagggaaaggtagcacctgagcctcccgggctgtgcggacatctgtctccccgcgggtgccgcctactgctccggtggactccagtccccaggttcc

SEQ ID NO: 50654 - DNA, 122 bp, Homo sapiens
ggtgccacccccagaggctctggcttgatagtccccaggtacgggctgggcacagggcggcggcagtctagggcattcgtctgaagggcaccgctggggaaatcctgacgtaggcacacacg

SEQ ID NO: 50655 - DNA, 122 bp, Homo sapiens
gacccacacctcccatgggctgcggaccctctggcaggctcgggggtgaagcatgctcggcgtaaagcgctttgcagacagtcctgggcctgtgggaaaagagcagatgacgaaggcgcaaa

SEQ ID NO: 50656 - DNA, 122 bp, Homo sapiens
gaaaaacatagtatataaaaggtttgggcgtcgatcagcgagggagcagcaaatggccggcggttggcgcctcgcggggggcgggcggcgcagagtagggggcggtggccagggccgaggcg

SEQ ID NO: 50657 - DNA, 122 bp, Homo sapiens
ccctctgtgcgagccctgggagaagcctcagggaacgactctggcactggggctcggccccggagctagcgcagagcgtgggtgggagtcgacatccaggcaggaggcaaagaagaggcccc

SEQ ID NO: 50658 - DNA, 122 bp, Homo sapiens
gtcaccatcctcaactggggagtttgcatctgactcaaagtcgaactcgccctctggaagcgggagctgtttacggggaacagaagagcaaagcccaggtcctgagctgccaccccttgtat

SEQ ID NO: 50659 - DNA, 122 bp, Homo sapiens
ccaggcctatgccttccacctcgtggggcatcctgcccacgtggcagatgaagttgatgacgttaagtgactcaccaaagtcatgcagttaggaagggtcagggaagggctggaacccaagt

SEQ ID NO: 50660 - DNA, 122 bp, Homo sapiens
gaaatcaacttcaaagtggtgactcacaaaaaacaaaggtggcttgactcattcagtgctcgggaaaggggatgtgtgtgcagaattcactcatccagaagcagaagttgaagacaaggagt

SEQ ID NO: 50661 - DNA, 122 bp, Homo sapiens
cccgaacacccgccgggtgagcgaagcacagcggggccacggagcgcctcgacgcggggacggggagggcagtgtccccttcataaaccagtctcctgggtgaagcttctggggcttggaga

SEQ ID NO: 50662 - DNA, 122 bp, Homo sapiens
cagcccacctgcacaggacgggatggtggtcaggcgaacggaggccaggtgctcctgggccgaggtcgacaccactgtgtgtggctggggccactgacttccctgctcagggaagctttggc

SEQ ID NO: 50663 - DNA, 122 bp, Homo sapiens
gcattaaaaccccctaccctcaatcacttccatccccacccaagcacacaaaattttacccgaagatgtttgtagcagctgtgaaactgtccaactattagaagaaagagtggagaaatggg

SEQ ID NO: 50664 - DNA, 122 bp, Homo sapiens
gcccggtggagacacctccttctcccgggacgagggctgagagattccctttggaaaggccgagtctccggccgcccccacccccagagttgtttcaggccagggccggccgcaaccagctc

SEQ ID NO: 50665 - DNA, 122 bp, Homo sapiens
gacgggaccctaagactcagagagggtaagcgacttgcccaaggtcacacagctagtaagcggcagggccaggaattaaacatagctgcaaagtgcatgtgacactcccccgcagccccagc

SEQ ID NO: 50666 - DNA, 122 bp, Homo sapiens
gaatctactgcagaggaggcaatgccaataaaagaggtgtttccgcagccgctttatcggcggcagacagaacaaatgaacaaatgaaagggctttggtggaatatcctaattggggctgga

SEQ ID NO: 50667 - DNA, 122 bp, Homo sapiens
tctcgccactgaatagggcctgtcgcgggggctaagggggtgggggggcctgggctttgccgtagatcaccatggaaacggcagcctcggccaatcagtggacaggcagcaccgagtgcagc

SEQ ID NO: 50668 - DNA, 122 bp, Homo sapiens
tacaactcgtccattttaatagcctttctgttaggtaataaactaaactatcctctcctccgtctttaccccagtctacctacccattcttcctttctcctatacttcctaaagttttagtt

SEQ ID NO: 50669 - DNA, 122 bp, Homo sapiens
gccccttcccgggaccagaatccttttccatagaggtccgtgcagtgctgtgccccttcccgggaccagaatccttttttgatagaggtccgcgcagtgccgtgccccttcccgggaccaga

SEQ ID NO: 50670 - DNA, 122 bp, Homo sapiens
gccgcttaagtgtgcgctgttggtcccgccccgccccgccccgccccgccccgccccgctcggtcccagaggcctcaccctatattcctgacaaatgccagacaagggcttagacttcacaa

SEQ ID NO: 50671 - DNA, 122 bp, Homo sapiens
ttttaatctactacagccttgttagatgacttggataaagaactaaacaactacattatgcgatgtagagaatggtatggctggcatttccctgaattaggaaaaattatttcagataattt

SEQ ID NO: 50672 - DNA, 122 bp, Homo sapiens
aataatgacaatgacagtgagcactgattgagcgcctcctaggagccggggccctgcgtgcgtgcctcccggacatcatctaatttaataaacacggtgaaaggtaggtctaatgatcacca

SEQ ID NO: 50673 - DNA, 122 bp, Homo sapiens
ggccggcatcagcggcccggtattgccaattgggttctgggtcagggacagcttctgccccggctttatcattgttaggattatggacatgagcttcatctgcccaagcttgaccatatgcg

SEQ ID NO: 50674 - DNA, 122 bp, Homo sapiens
cgccgcgcctgaggcgcttctgtgctgagactagatcctttctgaagtcgaaaacagcaccgtggggtgtgaggctggaacgcggctcctaatacgcccgagtacggtcagtagcttgcgag

SEQ ID NO: 50675 - DNA, 122 bp, Homo sapiens
gaaaaccgccgagggccctgcgggcagacgcccctgaattcttttggtggggagaaaagccgcggagctccccaatgtgccaattggtttgttgttgttttgctttttttgaatacacaaac

SEQ ID NO: 50676 - DNA, 122 bp, Homo sapiens
gctgagaccgcttaataaagcattacatatctcaccgcttccatatttcattacctcacgcggagcctgtgagagggccctaatgggagtcagctgtgtttttactttctgttgtcggccgg

SEQ ID NO: 50677 - DNA, 122 bp, Homo sapiens
ccatcccccggagccccccgctcggtcccggcgtcccctgccaccctctcccgcggcccgcggccccgtccccgtcccgcgcccccacgctccccgatccccgcccccgcgccgcgcgtccc

SEQ ID NO: 50678 - DNA, 122 bp, Homo sapiens
atcacctgaaatccgtccctccagccccgccacctacgtgctccaggcctgtctgggcgccgccatcttgccccgcagagatcgcgtttccgccgccgccagattccagcttccgccccgca

SEQ ID NO: 50679 - DNA, 122 bp, Homo sapiens
agtgtctctacggaatccctcacaggacaagcttctctatccgcggccgcttttgtttcacggcaaggaaatgctaggttaacccttttatgagtaggaaggacagggactattgcttgtct

SEQ ID NO: 50680 - DNA, 122 bp, Homo sapiens
accactgcactccagcctgggcgacagagcgagactccatctcaaaaaaaaaaaaaaacccgaagggctgataagcagcaagacccaatgatgagttctgaacctttcccagcccttcctct

SEQ ID NO: 50681 - DNA, 122 bp, Homo sapiens
cgagggcgagagtctgcggcgccttggccttccgcacaaccagttggccgcccaggccggcgccaccacgccttccgccgagtccctgggctccgaggccagcgccacgtcgggctcctcag

SEQ ID NO: 50682 - DNA, 122 bp, Homo sapiens
tgggctggaggcatctgaaggcatcaacacagagcactaacaagacacggtgtgagagctcggctgtttccacctcagcctcctcgtaacaagcacaccctgcactcatctgacccgttaca

SEQ ID NO: 50683 - DNA, 122 bp, Homo sapiens
caagttccattcacggtggtaaacattgttacctgtgaacaccgccaccaccgggactagcgagcattgtcgcaaacaggcattagcagcgtatccaacacatccccaccagcaaggttatt

SEQ ID NO: 50684 - DNA, 122 bp, Homo sapiens
aggaaatgattcaaaactgccccccaaaacctatatcctccaggagcactgaggttggggcgacctgctgccaactggtctggttttcccttttaacacacgcttcttgcccactatccggt

SEQ ID NO: 50685 - DNA, 122 bp, Homo sapiens
tcttatttatctccgtgtctgtcattcgcacaagcggctttagagagcgactgagcgtctcgctcaggtgtacaccgctgtgcagagatgccagccctcctggaactgcacccaagaagccc

SEQ ID NO: 50686 - DNA, 122 bp, Homo sapiens
attacaggcgtgggtcaccgcgcccctcccactgaagttcttcttcagccaatcactgctcgaggcttagagcctacccgcgagccgcgcccagcaactgcccagcctttctgtatgcaagc

SEQ ID NO: 50687 - DNA, 122 bp, Homo sapiens
cggactgcagcaacaggcaccgtggctagaccctaggagggacttcccaaccctgacaggcggcgggcaggtgggcagggcctcgcagtccagcttccccaccttgtctgcctccacagggg

SEQ ID NO: 50688 - DNA, 122 bp, Homo sapiens
ccagcctgggacaaggctggctgaggcgtgccggatcctccggggaccgatcggtggcctcgcgcggctctcatcgctctccgagcagtgctccagggggcggagggagcctcctcgggcgg

SEQ ID NO: 50689 - DNA, 122 bp, Homo sapiens
tttagagttgtgccagagaatttggctttctaacaagctccctggggatgccaatgctgccgatttgggaacactgctttgaaaaccattggtctaagatgaccaaagactgcagatcatct

SEQ ID NO: 50690 - DNA, 122 bp, Homo sapiens
atctttcagggtctgaggctctcacttcgacccctcagtagaactgggcccccttctgctcgagtgccctcccattgggcggtgctgttatccggaagcctatggaaaaggccaggatcgca

SEQ ID NO: 50691 - DNA, 122 bp, Homo sapiens
aggggttattcccactgagacgcggtcgcctccgctcctagagaggcccacggagggcgccgcacttccggcctgggtccagctttggctccggctcccgctcctgacctgctgcttcccgg

SEQ ID NO: 50692 - DNA, 122 bp, Homo sapiens
gttgccaagggcaacgcgggacgccggctagcgaggccttttgttctctgggctggggctcgccggctccagccttagggcgggaagagaggcgcggggggaggggaaggctggcgcctgcg

SEQ ID NO: 50693 - DNA, 122 bp, Homo sapiens
cacagtgcaagtgcagcccaagccgaacgcccaagagggctccggggtcctaccgatcaccgcttaccatgtatgcgataaaagctcaccgaaagcgggacctcgtgcgctgtgcaaatgag

SEQ ID NO: 50694 - DNA, 122 bp, Homo sapiens
ggcagccgcacacctcataggccgtggctgtcatcacaggctggggggtcccgtctgtggcgggactcccaggcagggacctcgtcccaccatcctggagcaggtggcctggcgagtcccca

SEQ ID NO: 50695 - DNA, 122 bp, Homo sapiens
aaataggaagaagggcaatctcatgagagaacataagtttagttttggtaatgttgtgctcgggcctgaaagacagccagacagtaaggtacaggagacagctaatcttctggatttagagt

SEQ ID NO: 50696 - DNA, 122 bp, Homo sapiens
aggcctgagggcggcttcctctcacctccaggggcagcgactccgccatcgcatccctgccgcctccgcccccactgcgcaaggctttctgggaaatgtagtctcgcctctttggggcgggg

SEQ ID NO: 50697 - DNA, 122 bp, Homo sapiens
tgcacctgcccgtggaactgtggagagagccggcggatacgcaggtgcagcagagcaggacggacggaggagcgcatggacttgcttccattgttcaagcgccttcatgtagtcagatattg

SEQ ID NO: 50698 - DNA, 122 bp, Homo sapiens
aaaccttaagtgttatttcaccttcagatgtcaacatttagtgctcttctcactatatttcgaggtggtaatatttacttttagggcctcaaccatgctcatatcatgctcatacatgttcc

SEQ ID NO: 50699 - DNA, 122 bp, Homo sapiens
agttttaatgtgagagtcaaggactacagtggcatgctgaggtaacaactgcaggagcatcgaggtaacagcaaaaatcttttactccaattgggtcaatccagttaaccatgtaagaaact

SEQ ID NO: 50700 - DNA, 122 bp, Homo sapiens
cacctgagcctccctgcccctctttcctcctagacggaacaaaaacgaggtccattttgtcgctccaggaagggactggtggagagccggcttcctttcctcccagggtagtacagtgggga

SEQ ID NO: 50701 - DNA, 122 bp, Homo sapiens
cagaagaaggcccagatcctggtggccaaacccgagctgaaggatcccatccggaagaagcggggacgaaagcccctgcccccagagcaaaaggcaacccgaagacccgtgagcctggccaa

SEQ ID NO: 50702 - DNA, 122 bp, Homo sapiens
ccccatttcttgggtgtagacagtgactgggcccaggcctcttccggctccagtaccccccggggcgattctggcaactcagccagaggaagcctggccctcgcctcccagcgttccccccg

SEQ ID NO: 50703 - DNA, 122 bp, Homo sapiens
ggcttttccgttctcctgcctggggcccggctcgagggccgctgtgggcccaccaatgcccgggtcagatgccatctgggtaagtagctgccgcctactgacaacctccttgcctcgatgat

SEQ ID NO: 50704 - DNA, 122 bp, Homo sapiens
aatgtgggggaaggttaggaaactaagcctgcctgctgctattctgattacagcatttgtcgctggctgggagagacagctctgagattgatgctatttttctcccttctcaggaaaatggc

SEQ ID NO: 50705 - DNA, 122 bp, Homo sapiens
tgccaggtcctgatcctgtttgttgctgctagtttattgggcagagagaagcaagagtctcgtaactttggctgggaacatttagttactcctaaccacagttccgtctttacctggtactg

SEQ ID NO: 50706 - DNA, 122 bp, Homo sapiens
ggtcccgggggtaaaggggtccgaagaagcggcccccggggacgcaagggcagacgctggcgaggacagggtaggggatgggccacagcaggagccgggggaggacgaagagagacgagagc

SEQ ID NO: 50707 - DNA, 122 bp, Homo sapiens
cactctggtactatataatttcatccttcctatattaattcagaaacatttattaactaccgtgtggcaggcattgcgccagaaacaaaaatgcagatgcaacagtcccaattctgaaggag

SEQ ID NO: 50708 - DNA, 122 bp, Homo sapiens
ccctgagtagccgctgctcgtgggatgcaggggaaatggcgccctctggtgttggctcaacgcctgtgttcagcaccgggagctgcccaattcggccttgagagccaagtctctgcaaagca

SEQ ID NO: 50709 - DNA, 122 bp, Homo sapiens
ccggactgaagtcactccctggcgctgctaggggctcagggtggagggctcaagggtgtccgggaagggccttcgcccttcagcctcaaagcccccccagtcctctggttttctgttcctct

SEQ ID NO: 50710 - DNA, 122 bp, Homo sapiens
tttgttttgttttccttttccatatactacaggggcggtgtaagaactttcccgagccatcggaggcatcaacgggaatcactggaataataatattagtaaagttgtttttatgaccactt

SEQ ID NO: 50711 - DNA, 122 bp, Homo sapiens
aggcactgggtaaacatgcagtaaataaggcagagccaccacagcctgcccctttgcttccggcacttgtaaaggatcttggttgctgctgcctcctatacctgggcttcttttgtctgcgc

SEQ ID NO: 50712 - DNA, 122 bp, Homo sapiens
tatggagaaagggctgacatgaggagaaaagcttggggaggggggttccttccagtttagcgggcagagagtagttcacagtgggagggttcactctgttcattcattcatccatctctcac

SEQ ID NO: 50713 - DNA, 122 bp, Homo sapiens
ctcgccggtcctgcaggcagtgagcggccgtcagcacccagcagggggcgatgaggctgccggcgcagaaactgtggccccagtacagcgcggcgatgtaggggtgcgccccgcgtagcgcc

SEQ ID NO: 50714 - DNA, 122 bp, Homo sapiens
attatctcccctgcttttcagactgactcttccatgttactttcagtggcttctctctctcgtattggatagctagatgttacttctgttctcaatcttttcccacatgtttttcctctgat

SEQ ID NO: 50715 - DNA, 122 bp, Homo sapiens
gtgcgggcgccggcagcagggcaaggcagggactgtgcccagtccgcccgccaaggagatcgcacgccggcttcgcttctgaagctgcagacggaggccgtggtgagccttagaaagatccc

SEQ ID NO: 50716 - DNA, 122 bp, Homo sapiens
gagccatctgattcacctgcccaaaagctcatgtacttctctcctcagtgtggactgacgcgtgtcagacacaatttcagagtttggctatctggtttcctagcccaccaaagctggaagct

SEQ ID NO: 50717 - DNA, 122 bp, Homo sapiens
aaatgattaatatttgtatttttgttgtaaagctttattttataatgctactgtgtcatacgattccaggaaacacacattgctttaaactatgtgagtactgccccctatgtgtttgtatt

SEQ ID NO: 50718 - DNA, 122 bp, Homo sapiens
ctggacccccacccccggtgtggaaagctcatgttatactccactggcccccacccccggcgtggaaagctggtgttatactccgctggacccccacccccggcgtggaaagctggtgttat

SEQ ID NO: 50719 - DNA, 122 bp, Homo sapiens
aaatacagtaccaaaacagctcccatgcaataatacagcatatcatttggctgcctggttcgtattcctttgtttttctttctatggtcaaataatatgcggtaacctgggaagaccacagg

SEQ ID NO: 50720 - DNA, 122 bp, Homo sapiens
gtgccacagacagtggtagacatgagctgtcacatctcctgcaaaagagtgcaggggagacgaggaggaggaggagccccagatctgcccagcggtccaaggaggtatcactgaggaagtgg

SEQ ID NO: 50721 - DNA, 122 bp, Homo sapiens
actgggtactacggggaggggggctaaggagatgggagtttcaaaaccaattgctaggtccgtgggttatgcaggtgagtgggttacagtgccattcaccaagatatcaaaccgaggcatgg

SEQ ID NO: 50722 - DNA, 122 bp, Homo sapiens
gtgaagaagctgcttgagcagaagtcctactagaggtacttgaactgtttttggctctgacgttttccacgtcagctgagtttctattgctgtgactgctgtgtgggtggaccgatgggcca

SEQ ID NO: 50723 - DNA, 122 bp, Homo sapiens
ttgcctaccctggcccaagttatttgtggaatgcagggtccctgatcctagctaaagcaccgctgtctttactgtgtgatgatctattatcatgcttttactgagtttgaaatggcatcaga

SEQ ID NO: 50724 - DNA, 122 bp, Homo sapiens
ttcttacctcatgtaaaaacgaatctctgatcatctgtaaaatgctgatgataataattacgataggtctgttgtaaagattaaatgacataatgcctctgaaagcaaaaaggatgagtagc

SEQ ID NO: 50725 - DNA, 122 bp, Homo sapiens
acacgcaacatggtgtgcagtatggacaccacccagctcaaggctagtaagcaggcacaccgttggtgattcattaccaaagcatagtgcagggggtcacagatggccacatagcgatccag

SEQ ID NO: 50726 - DNA, 122 bp, Homo sapiens
ttccaaaagaagatacacatgcggccaacaagcatgttttaaaagctcaatatcactgatcgttagagacatgcaaattaaaactacaatgagacaccatctcacaccagtcaaaatgcctc

SEQ ID NO: 50727 - DNA, 122 bp, Homo sapiens
gccttcgacaagcttctaatccaagaggcctcccagatgcacctcaaaatgtgcccatttcgcggacggaaacaccttccaaatagtaggctccgttccaagcgcgggggttattcctgccg

SEQ ID NO: 50728 - DNA, 122 bp, Homo sapiens
ctgggaccttctagccagggaaccaggaggctgaggtgacccccgatggcctgcaggggccgggtcgcctccagagctcttggggactgaagcgcagaggagactgcgggcagctctcatcc

SEQ ID NO: 50729 - DNA, 122 bp, Homo sapiens
gaatattggtccacatggacagccaggttctgggttctctctgctcctcagcaccactgccgaggtgaacttagagtccacagttgacacctcaatgactctaggccctgactccactgggc

SEQ ID NO: 50730 - DNA, 122 bp, Homo sapiens
atttatccatgcctgagtgtgctgtcattacacatctgtttataggagcatgtagtcttccggagtcagttttgtcaactatgttggtctcttgtgcctgaaacaatctttaggggaacaag

SEQ ID NO: 50731 - DNA, 122 bp, Homo sapiens
aaccccgggaccagggcttgcgtcctgatcccaggaagttgtctcaggatcgatgtggaccgtgtttgtttgtttcggtttttcttaggtgcagacactcctgcagcagatgcaagataaat

SEQ ID NO: 50732 - DNA, 122 bp, Homo sapiens
ctcctccccccacctctggaattccacctcccttgttgcgcccatcgctatggtgacgggcgctctcagtacactgtctctacaggccaggaaagagttgtgtgtctttggggtcccttccg

SEQ ID NO: 50733 - DNA, 122 bp, Homo sapiens
taccttcgacccaggacgagaccctcagtagtaaagcccttaacaggtgcttgtggactgcgcatgtgggatgctgaggtgctgcgggcgaggctgagtctgtgaggtgaggagctccatct

SEQ ID NO: 50734 - DNA, 122 bp, Homo sapiens
ggtgacaatgagactgagcagtcaggtaaagggccaggcagagcagaatggtaaggcacccggcggcggcgtgtgccagcgaggccagaagaccctggcaggtatcccaccacgcccaggcg

SEQ ID NO: 50735 - DNA, 122 bp, Homo sapiens
cctgactgttacacttgttgagagcatgtgctccagagccccagctgagtgcagatcttacgagggcattagagagagcaagagcctcagagcatcctgccgctgggtgcaaaccccagctc

SEQ ID NO: 50736 - DNA, 122 bp, Homo sapiens
agaagtaacgcgagagggtgcctagggcgggggcgaacaccagggcccaaccaaagcctgcgaatgaataggaggggatgggggccggcactggggacgcccgccccagcattcccagcccg

SEQ ID NO: 50737 - DNA, 122 bp, Homo sapiens
aaaagttccttcagggcctccaggaaccactaaccaacgtccctgttgacctcagtttctcgcctgtgaaataaattggaactggaagttctggaggctgcctcggctctaaaaaagcccat

SEQ ID NO: 50738 - DNA, 122 bp, Homo sapiens
gctcgttcggccccggagcctttaagtgagaataactagatttttttttttttccttcaacgcttccctaacctgtgtccaggcaacaaaggggtccttgtttttgcacacaagagagctaa

SEQ ID NO: 50739 - DNA, 122 bp, Homo sapiens
gaccagggagcattcctgacctcgatgcacctcatagagtctgaattaaaacaccaagatcgccacattatctcagttgacagttttgcgccaagccccttccctgcatcagctcgtgtcct

SEQ ID NO: 50740 - DNA, 122 bp, Homo sapiens
agggctggcgatggacaccatctttagggtaattgcgaaattaggggaagggctgaaatacggaaggctcgccgaagatctctaggtagttaataactatcaaaatgtcacttctttggcct

SEQ ID NO: 50741 - DNA, 122 bp, Homo sapiens
atggcagccagactataaaggcccattgaaacactgctccagaaggcctggggagcaccccgctaggagccctgacttcacatcattcctagctaagatgtttttggagcttctgaggccaa

SEQ ID NO: 50742 - DNA, 122 bp, Homo sapiens
agagcacacacaaggcaaggatgttagtggccagccccatgcaccccgatgagctatgctcgcttgggagacccatcctccttgaaggtgagtgaaatctcaacacgagtatggttctgaga

SEQ ID NO: 50743 - DNA, 122 bp, Homo sapiens
cagccacctgcttgcctcacctcctcagggctggccacctgtcagcagagtagaggaccccggaggccctggcttcaagtttgtccagattcctaactgatagcaagtggccaccgagtggg

SEQ ID NO: 50744 - DNA, 122 bp, Homo sapiens
gccggggccggttctggagcccctcaaagtcctggatctggaggaagttttctgcagagacgcagctgcggatgcgctggcgggcagggcgattctcctgcaaatccagcaagtcaaaagag

SEQ ID NO: 50745 - DNA, 122 bp, Homo sapiens
cggaagctggggagcagaatctcaatgatgcccacagggggcaggcagaatgccaccactcggccaagaaggcgtgtttggctacgacagcccagagtccagagccacggcacttccggttg

SEQ ID NO: 50746 - DNA, 122 bp, Homo sapiens
ctataacattcttcaattttattttaaaacggtgagattttgttttgtctgagaaaatctcgctgttttagactgaggcagtgtgttatgatagagagcactaaacagagagtgagaagacc

SEQ ID NO: 50747 - DNA, 122 bp, Homo sapiens
tgaaggggttattcccactgagacgcggtcgcctccgctcctagagaggcccacggagggcgccgcacttccggcctgggtccagctttggctccggctcccgctcctgacctgctgcttcc

SEQ ID NO: 50748 - DNA, 122 bp, Homo sapiens
ggaggagagaccggcgttcatttagcgtctgcggggtgcccaggttcgacagcatctcaccgcatgttcatagaagcccttgaagctagcagcactgtcactgcttttatcctgatcaggac

SEQ ID NO: 50749 - DNA, 122 bp, Homo sapiens
ggaacgggaggcggtgcctggggccacggggtcgtcccccaggatgagggcgtgtcccagcgcgcgggaccctcggaagtccgcgctgggccgggcgggcaccagcctcggactcagcgggt

SEQ ID NO: 50750 - DNA, 122 bp, Homo sapiens
cctgcattttggctttgaagggactacgcaaagtttgcctaggttctaccattttaaatacgcattatggtctgtttctatagccgttagatttatttgactgcatctaaacctcccttagc

SEQ ID NO: 50751 - DNA, 122 bp, Homo sapiens
tgctaaaacaaccagggagatcctctcagacaaaaggaaatacagcactatttactgtatcgaaaccattaagacttgcaggccgtgtgtatagcactggggataaacgtgggatgcagtga

SEQ ID NO: 50752 - DNA, 122 bp, Homo sapiens
acaaacatcaagtgataaggcgaaaaagccagatgacaccctccaagggtaggcagagaacgggaagggctacagacactttggctcccaaggatacttgtgctctgagaaagctgagtgcc

SEQ ID NO: 50753 - DNA, 122 bp, Homo sapiens
ggttttccgaggctttggagcctgcacaattgttctacaaaaggcagtagctccgccgaacgttggatcgtcccttggtctggtgataccagaacgagagttgactgtgtgtctcagtcggt

SEQ ID NO: 50754 - DNA, 122 bp, Homo sapiens
tcagacaacactgagaacttcatcctctgtactcccactagtttctaagctgcctgagggcgatgacttattttgcaacctcccttcaaatgagaggccctacgttatctcccttgaaaagg

SEQ ID NO: 50755 - DNA, 122 bp, Homo sapiens
gcctttggggaacttggtcaggaagctgtgtctagttccttttgtccctttttttccttgcgttcattttgctgtacttctgtcccgaagtaaatgtcagaatcagatatgttctgtatgtt

SEQ ID NO: 50756 - DNA, 122 bp, Homo sapiens
ccctgacagcccagggtcactgagtccagaagcagcagaggccgaccccaggctgagacacggtggagctgggtggctccactttatctccaccgaggggtgacgcctgggttcgtggaaac

SEQ ID NO: 50757 - DNA, 122 bp, Homo sapiens
tcctcccccgcttatttacttaattaaggccctggggctgcaccccaccggcagctccttcgggggtgtggccgaagagctccgagggcggggctgaccgagccatattcgggcgtggccgg

SEQ ID NO: 50758 - DNA, 122 bp, Homo sapiens
ggtcacatggtctgccccccaacctctcagcagagatgcaaagctacctgtccaggatggcggactccagatgggccccgccctgtggtgcagaagtgagatttgctgctcctcctgcgtct

SEQ ID NO: 50759 - DNA, 122 bp, Homo sapiens
gcgaatgtcccagtcagtgtgcatgctgcacagacctgttgctgcacttgtctgttgttacgcatgtctgttgctacacgtgtctgttgttgcgcatgcgccttgctgcccgccttctgtcc

SEQ ID NO: 50760 - DNA, 122 bp, Homo sapiens
gcctgttccttattgctgggacatgcacaaactagaatcattattgtcagcatctgaggacgttttaactaatccagttattctccagacaaattagaagctgcatgttctcatttggaaac

SEQ ID NO: 50761 - DNA, 122 bp, Homo sapiens
acattgctctatggtggagctgtctgtccgtctgcagccactggctgcctgcacgcatcccgaacgcagaaccgatgctcttctcagcaacacgctgacgtcacgccaccctccgccgagtg

SEQ ID NO: 50762 - DNA, 122 bp, Homo sapiens
ccacagacactctagacccaggacggtcttgtaggctcaatgtgtgtgtttcatcccaggcgcggccggcatagcgctcggggtgcgggtggaaataatagcagcagtgttagcgccttggt

SEQ ID NO: 50763 - DNA, 122 bp, Homo sapiens
aggctccgccatccaggacaactgctctgccaacgaggtcccgcgagaatcgagagatctcgcgatacaaacccactcgcatctcgcgagcttccactagacccaacatggcggtacagaaa

SEQ ID NO: 50764 - DNA, 122 bp, Homo sapiens
atattacagaagcttgtgtttgcaagttttgatggtagtacagctctaaaataaaacctccggccgggcgcggtggctcacgcctgtaatcccagcactctgggaagcctgggtgggtggat

SEQ ID NO: 50765 - DNA, 122 bp, Homo sapiens
aaccgaccctcagtgcttgaagctttctttcgcctgggcgtccgccctcagctctttctgcgctcgcctgcagcagcctggcccgtggggagtgggcggtgggtgggggtaggggtggggtg

SEQ ID NO: 50766 - DNA, 122 bp, Homo sapiens
aaaaattcaaaataaacaaacaaacaaacaaggcagaaccaacctctacttcaaagcagccggcacaagccacccgtgtctgccacccagagaggggggtctctggcccgtggtggaggagt

SEQ ID NO: 50767 - DNA, 122 bp, Homo sapiens
gggtgagtctccccagaagtcgtgcccccgagatctcgaggacaggactgccagcgtgcccgggggctattcgctcacacaagtttcgttcccgacgagagcagaacccggcagccacaggg

SEQ ID NO: 50768 - DNA, 122 bp, Homo sapiens
tagaggcggcatccagctcatcataatagactggctgccgggaggggcttgggatccagacggtggcatcctgccgcccgtagctggcgggctccttccactctcgcagctggtaggcaggg

SEQ ID NO: 50769 - DNA, 122 bp, Homo sapiens
cggaggctggagggcagcagccacttgctgccccagtcgctggggctctgggtgccagtgcggcccccggcagagcccagggcgtcagggaggccgtggagagccatgatctactgcaccgc

SEQ ID NO: 50770 - DNA, 122 bp, Homo sapiens
tccttctctgcaacgataaagaatcgtaagaacagcgcaacccaggggtcctggagttcccgccctcctagagggcccggcgggggggacttggcttgagcaaagaggtgggtgcactgaac

SEQ ID NO: 50771 - DNA, 122 bp, Homo sapiens
ttattgttcaacagaatgatctggttgagcggctttttgtacctcacaatacaaccaaaacgcttactctgtacttagatcaagttgctgtattaatgtagtgtgcaaggctgtgcacaaca

SEQ ID NO: 50772 - DNA, 122 bp, Homo sapiens
gtatgaacccctttgctcctgtttctctgagcatagagaggaaccccccccataatctgtcgcgagtcaactgcattttgtttttttaaagtattcttttttttttttttttttttacgaga

SEQ ID NO: 50773 - DNA, 122 bp, Homo sapiens
caaaacaaaaaccagcaagtgaaagacgacctaggacccccctgggggccaccctggagacggtcgtcaggcctcggaaagagctccttcctaaatgatttggagtatgacttcaaggaagt

SEQ ID NO: 50774 - DNA, 122 bp, Homo sapiens
taaggtgtggccccacccccgacagctgttctccatagtggtgttcggctccatcgtgaacgagggctacctcaacagcgcctccgagggggaggagttctgcatctacaaccgcaacccca

SEQ ID NO: 50775 - DNA, 122 bp, Homo sapiens
agcgcatcttcgcggacaagaaccgttcaacacagaaaccccagaatcgcttcctcctcccgtttgttattgtttcttgcaaggcttttccactgaggttcaggacttttccggaagttacc

SEQ ID NO: 50776 - DNA, 122 bp, Homo sapiens
cgctgggatcttcccgtcctgcagaagaggatgacacaggtggcaggaagacggtgcctccggggtcttcccgtcctgcagaagaggatgacacaggcaggaggaagacacaggcaggagga

SEQ ID NO: 50777 - DNA, 122 bp, Homo sapiens
gatgggaggaagagcgagacctaagagggtacctgtagctgggaatgtcctacgtgttaccggtaagtgggcgcgagctgggctttcaaatagggatttatgagcgggcaggagtttgagga

SEQ ID NO: 50778 - DNA, 122 bp, Homo sapiens
gtcaccagatctcgtcccgcctgcattcccagggcttgcagcgacattgaggcatctgcccgcctgtccgaccacccgggaggggggtaagatttgagaggtactttataggggcagttaaa

SEQ ID NO: 50779 - DNA, 122 bp, Homo sapiens
actccgcgtctctgcctgcggggactccacggagttcgataattacctagagctccaccgcgccgccattacaccggacgtacgtcacttcctcttcccgagcaccgacggtaggaagaagg

SEQ ID NO: 50780 - DNA, 122 bp, Homo sapiens
ccagctgctaaatttaaacagtaaatatcacattttgtcattaacacagctataacttgccgtggttctcagatttattttggactattttgatgccaagtgaatataagagcttgtactga

SEQ ID NO: 50781 - DNA, 122 bp, Homo sapiens
agctggaagaatcaggagatcaaatggcatggctgcaactcacagcggcagaagacccagcgtgaagggtcgcatccttcctagacctccctctgagaccacaccaaagcccttccctcctg

SEQ ID NO: 50782 - DNA, 122 bp, Homo sapiens
aaccagcatgacacagatctctcttgtcctccccttgtttctcaataaggacaatatttgcgctcaggggagaagggcacagcttgcccctcccttccttcctcagccaacggtttggcttc

SEQ ID NO: 50783 - DNA, 122 bp, Homo sapiens
gggcctacagcaaggagcagcaccagcgcctgtgtgtgtactgtggccgctgctcggccccgggcggtgcactttacctgaaccgtccttccaggcctcccaagccatctgcaggaagtgct

SEQ ID NO: 50784 - DNA, 122 bp, Homo sapiens
tgggaccctctggctccaggaggtgcccgagagagcgagaggcgaatgaggtgctcgcctcgggtgcaaatatttgtttgtttttaaaatttcagtagcttttggggtaccagtggtttttg

SEQ ID NO: 50785 - DNA, 122 bp, Homo sapiens
gaaagaaagccagggccacagacaggaaccaaaggaaatcagtcacttaggggaagataacgaatccacaaagtgaaaaagggaaagaaaaaaagaggcaacttcaacactccaacccatgg

SEQ ID NO: 50786 - DNA, 122 bp, Homo sapiens
gcaacacagcaaagaggaagcccaggaaacaaataccttgtttaccctccccctttcctgcgattagccactgggaagtccaccggccacagagccaatcagaagccagagagggggagatc

SEQ ID NO: 50787 - DNA, 122 bp, Homo sapiens
catgaaagaaagttaatttttaagacatatttgcttggtttgaaaatgtcaaatattgttcgaaaatataccagtggttgtctttggggtgattggcttatgcctgagtttgcttattatta

SEQ ID NO: 50788 - DNA, 122 bp, Homo sapiens
ggacgtgggtgtctctttttggggttccgcattctcctactattacggtctctaggcctccgggccagcccctctgctgcctgggtctgtgggtggctccggccccactctggccctgccca

SEQ ID NO: 50789 - DNA, 122 bp, Homo sapiens
aatacaatgaatgattagttacaagtttttcccattgagtttctagtacttaacactgcacgaggcacatggacaactgtttgttgagtgagtgaatgggagttcactgctgcagtaaagat

SEQ ID NO: 50790 - DNA, 122 bp, Homo sapiens
cgatgccttggatggagacgatgacctggtgatcgacatcccggagtgaccgtgacatcacgccatgcccaccacggccccgcccggcgccctccccgtgccagcacacacgagtccagctt

SEQ ID NO: 50791 - DNA, 122 bp, Homo sapiens
gtgtgccctgccctcccagccctccgccccctcagccccttcctccccaagcgtccagcccgacccagccacagctccatgacccgccacagtttatcggacagacgggcaccgtgcatcgt

SEQ ID NO: 50792 - DNA, 122 bp, Homo sapiens
atataaccactgtctgggccctgagttgatttgaatttccacttccaatctgtggtgcaacgtatgtaacacagcaaatcagtaaggctttatcaagcactttctttgtgcaaggcccctgt

SEQ ID NO: 50793 - DNA, 122 bp, Homo sapiens
aaggcacaatatggagagaggagacaggagagagggagaagggagaagggagaggggagacggggagagaattatctcaacacaaaaaccacatactagaaaaagaacagatgtcccacgga

SEQ ID NO: 50794 - DNA, 122 bp, Homo sapiens
ctgagcctctggttcagggctctgagctctgccaaggcccatgtcatttagtggcccctccggggtggggacggcctctctcggaagggtggggaagtccctcgaaactatgggcagggaga

SEQ ID NO: 50795 - DNA, 122 bp, Homo sapiens
tataaattaataaattaatttataaattaataaattatacaatattgtcagctttgtgaacgcagaggccttattttgttcactgctctatcctcagtgcctggaacactggtagttgtctg

SEQ ID NO: 50796 - DNA, 122 bp, Homo sapiens
aaaaaccaacaatcagagataattccataaggctgtataaaccctttcaactccacctttcgaggaccaactgaattcaaactgttttctgtggaacacagtttttaaaaccctgctttaca

SEQ ID NO: 50797 - DNA, 122 bp, Homo sapiens
tcctgagggctgggagacagctggataaacagcggggagcagggctggggacagggcagacgagggggagggctgactgcaccttgaggatcaccagagctgtgcttccagattgagatccc

SEQ ID NO: 50798 - DNA, 122 bp, Homo sapiens
ccgccatggctgagaatggcgagagcagcggccccccgcgcccctcccgcggccctgctgcggcccaaggctcggctgctgccccggctgagcctaaaatcatcaaagtcacggtgaagact

SEQ ID NO: 50799 - DNA, 122 bp, Homo sapiens
gccttccgcccccggcccgcgcgctgccctcctgcggcccatggcgcggacctggggtgccggggactccccaccccacggccgcgcccctcggcctcccaatgggctgtgcggctgccagc

SEQ ID NO: 50800 - DNA, 122 bp, Homo sapiens
acttaacttcaataagaggattattttaagtattaaagtgtttagtcttaactcagctaccgtaggaggaaaagactactgcatttggaagtccttacacataaccatagcacatagacaaa

SEQ ID NO: 50801 - DNA, 122 bp, Homo sapiens
tcttcagcgccacctccacctccagataaaccacaaattacatctaaagggttgtttatccgtgtctgttttgcaattgaccagtttcttttaagttcagtcctcctgttttcatttataac

SEQ ID NO: 50802 - DNA, 122 bp, Homo sapiens
gcaaggagagactcgtgagcgcctgtgtgtctgccagggaaacagcacgggatacaggcgcgcgggtgcgggtgcgcgtgtacatgcgtatgtgtgtgtgcgcgcgcgcgtgtgtgtatgtg

SEQ ID NO: 50803 - DNA, 122 bp, Homo sapiens
ctccacaggttgtactcctctatgccaattatttcagtttacttaaatgagtgttgctggcggagcctcctcaggtggagatgttttagaattttgttgcccaaaatgtggatcaagagcca

SEQ ID NO: 50804 - DNA, 122 bp, Homo sapiens
cacctccgtccgggacgttggcctgcagaactgcgggaggacactttccgttgttgaaaccgcccgtttgggggaccttgcaagggcagcttgagcaggtggacacccctgtccttgccgga

SEQ ID NO: 50805 - DNA, 122 bp, Homo sapiens
agtgaaggtggcgccccagaggccactcctgggagaaacctcatcccctccctccttctgcgacttcacagcctcacacacagttgtctgggaaacatcagatctaaccacctcgagccttg

SEQ ID NO: 50806 - DNA, 122 bp, Homo sapiens
atttactgagcatctcctgggtgccaggcactggactaggcactgccttaacagctctttcggagttgattttgaacgcatacaacgacggaaagagcaccgcagtgggaatgtgaagactt

SEQ ID NO: 50807 - DNA, 122 bp, Homo sapiens
aaagtaggggccccagataggcctgggctctcagaggcactgcctgcaaccaccctgccgcgtcggctggggcttcggtgaactgccacatcacctgctcccagctcttcagccaggcctcc

SEQ ID NO: 50808 - DNA, 122 bp, Homo sapiens
aggttatgattttaatgccatgtgctcagggagccttttctgatcctcaggtcaggttcccggtccaatcccacagccccccgcgtgtctccctgacaacagtaattgcgcttgtaatttcc

SEQ ID NO: 50809 - DNA, 122 bp, Homo sapiens
ttattttaatttacttaatttaaggaaccaaactaccggctcacccaactcagaagtggccgcagaagacattcaagcgctcccgggggcccggccagcgggcggggaggagccgcctccat

SEQ ID NO: 50810 - DNA, 122 bp, Homo sapiens
cgcctgcgaacgcgagcatagttggcttcttgaaactctttcatttttttcctcttcagccggaactgatggctacagctcacattgtacctcttagcgcaagtcatggagcagaacctctt

SEQ ID NO: 50811 - DNA, 122 bp, Homo sapiens
gataactgaggaaattaagtgcaaaattctgtaccatttctgatctgctcctaaacaatccgtttcaattgtatttgtagcagaacataatgcccttttaaagttatttgacttgtattttt

SEQ ID NO: 50812 - DNA, 122 bp, Homo sapiens
catgcttgacataagcatatgaaaacaagacaaaaatgtcagctgaacaataggcctactcgtatatgcagtgcctgaaatccagtatattttttaatgtttgtgttctattttagcaaaat

SEQ ID NO: 50813 - DNA, 122 bp, Homo sapiens
actcacagctcacacgtggacagggagacaagacacgcacggagcccaggaagctagaggcgcgccgaggccagggaagcgccgccggagcgggaggcgcggagacagcctggggcacgcgc

SEQ ID NO: 50814 - DNA, 122 bp, Homo sapiens
taggccctttgcatctgtttggtttttttaatccttacagtaaaactacaagatggtcatcgtgtgaaagaagaggaaacaggctcagtactttaagtgtcagaggcaggatttgaagccaa

SEQ ID NO: 50815 - DNA, 122 bp, Homo sapiens
cccctttgctcacattacccccccactgtgcaaggagcctggctcagggaagccagcagacgcagcccccaggcggggccttctgaacaggtgctggtctggcacagggactatacctggcg

SEQ ID NO: 50816 - DNA, 122 bp, Homo sapiens
tccatgcactggcggagcagctctaggcggcggcttctactttcagtttcgtgcagagcgcggaggagccgcgagcgctgagggtgagtgccgggagctctgagggtgagtgccgggcgtgc

SEQ ID NO: 50817 - DNA, 122 bp, Homo sapiens
gagtggggacgtgcgctctttggcactgggtggacgggcccagagtgcgtgggggccttgcgggtgaccccccctgcgccccctccaccctgacccgcgccccccgcaggccgcccatgcgt

SEQ ID NO: 50818 - DNA, 122 bp, Homo sapiens
atgctgctaggtatgctcatattcataagagatcaactatttcgtgtgaggcaggcaacccgtttccccagaaaggtcagttttcattgctgtaagtctcccggctgcggggtgccgatgga

SEQ ID NO: 50819 - DNA, 122 bp, Homo sapiens
ttccctggctccaaatatacactgcctaccctgtggctaggcagtcaatcaatatgtgctcgttgaaaaaatgatctatctcccacatacagttttccattttcagtttcaggcagcacaag

SEQ ID NO: 50820 - DNA, 122 bp, Homo sapiens
tccatcttggcaagactaaatgcacagagggggatttgcgtttgggggtcagcatatcctcgcactctcccaacattcggggaagggcgtgccttcaggatttggagtagaaatcctcaggc

SEQ ID NO: 50821 - DNA, 122 bp, Homo sapiens
ccttcttaccctcgtttgatgtgcaaatttccttctctttgcacatttttctcgcagtggcggggggaggtgggggaggagggcaactgaaggacctcaaagccggggatctaactcagatc

SEQ ID NO: 50822 - DNA, 122 bp, Homo sapiens
ctctccatgaagcagttcctggacttcggtgagtgcggcccgggaccttgggcctttttgcgcggtcccgggcggggagctgcggccgctgccccaggccgggtcggcgccggccagctctc

SEQ ID NO: 50823 - DNA, 122 bp, Homo sapiens
accagctggagctttggggaggagagggtggcgaggaaaggcacgctccaaacaggagggcggcttttaagtttgtggtgtgaccgcagcagctgtcctgggagagactcagtctttctaaa

SEQ ID NO: 50824 - DNA, 122 bp, Homo sapiens
caacatagtgagaccctgtctctctcaaaaaaaaaaaacaaacaaacaaaaaaaaaaaaacgagggaccttattttaagatgtccgaggcagcttggagtagtggagaacaggtagctggtg

SEQ ID NO: 50825 - DNA, 122 bp, Homo sapiens
gagcaaggaggttctggggcggtagcaggaggtctggcaggggctggactccacataggacgtctggcagctggtgggctcccagcagatctcctgacagcccctatagagagaggaaccca

SEQ ID NO: 50826 - DNA, 122 bp, Homo sapiens
cgggacgcgcggggaggcggagctggagctgcagctgcggcccgcgcggggcgaggtcagcgcggggagcgaggggagctagggcagcggggaccccgggcccaggcccgggccgagctggg

SEQ ID NO: 50827 - DNA, 122 bp, Homo sapiens
tgagtccagaggaaccggctcctgggaaggtggagggagagagaagaaggtcactgctgacgtcagggacattcaggtagaggtaaacacaatgtgacctacaattatccacctccccccac

SEQ ID NO: 50828 - DNA, 122 bp, Homo sapiens
tcagtcagctgaaggtcacgtgggcgcggtctcagctctcggctggggttcgtcactgggcgcgggatttggccgccgcggggctccggagccgctcgctcccgacacggctcacgatgcgc

SEQ ID NO: 50829 - DNA, 122 bp, Homo sapiens
actccctttgatgcagagggggcactgaggaacttgccctttcattccaggtttgctggtcgctaggcaggtgtcctagagtgagactggcttagcaagtgggtgtctccttcagagttggt

SEQ ID NO: 50830 - DNA, 122 bp, Homo sapiens
ggaccgtcagctgggcccagatggagtcttgggagccctcaagtgtctcctgtccttgcccgcgccgcccctcgccactggcgctgaggcctgacgccgcctgcgtcccggctagaggcgcg

SEQ ID NO: 50831 - DNA, 122 bp, Homo sapiens
ctccagaggctgtaaccaggaatctccaattagggcaacctgggtttgtggggcccaggacggggagcagccctccttgaaagaaaggaacggagaggagggggagcgactgctcactcggc

SEQ ID NO: 50832 - DNA, 122 bp, Homo sapiens
tttcttcttaatatcaaacaaagaactgctgctattcctttgggctggcgcagcaggggccggtgaaatgcaggctgacgacggcgcgccaggggctgagctcgccccggtcggcgacgcgc

SEQ ID NO: 50833 - DNA, 122 bp, Homo sapiens
gcccctgcccctcaccccttcctggccctgctcccaggaaaccctaacagctccctgtgccggcagactggtttcctgcgtttatcacgggggccacgtcaggagccattgctgcgggagcc

SEQ ID NO: 50834 - DNA, 122 bp, Homo sapiens
aagaggcctggtactaggagtgagacccaacccattgacaaatatattctgcgcagcatccgcgcaccccagacactgctaaagcaccccaaaagccgcagaaggtgaaaactacgacaccc

SEQ ID NO: 50835 - DNA, 122 bp, Homo sapiens
gcagcaccagcttgttgtcattgtcctcggtggcgtaggacaggagggtgcccaggcggccggaggccgtgcggacccagctgcagaaggacagggctcgcagggcagtgacgaaaccaggg

SEQ ID NO: 50836 - DNA, 122 bp, Homo sapiens
atgcacataccgtggatttctacacagaatccgtgtgggaggagctggtcgacttgccaccggagacagtgctggctgcgctgaggaagtcagcgtcggagacggaggccctgccctcagag

SEQ ID NO: 50837 - DNA, 122 bp, Homo sapiens
cgggaggacaggcctcttcgggggcctcctcccaggttgctcctgcattcatgacaagttcggcccctgtgagttgggggaaattcttcaacagctccctggccagggaggggaccctcggg

SEQ ID NO: 50838 - DNA, 122 bp, Homo sapiens
gccggcgggctgggaggaagacggcttaatccacagcgcctggctctcggcttcccctcccggctccattcattattcatccagctgcgggaagaagagttcacctgcccagccgcaaacca

SEQ ID NO: 50839 - DNA, 122 bp, Homo sapiens
atttctaagtggcccccgcccccaagcatgtctcatcctagcccccggaagctgtgaacacgtgagatcacacccatgcctgtgctgttacatggcataggaatccttaagggaggggaaac

SEQ ID NO: 50840 - DNA, 122 bp, Homo sapiens
tcagtggtttggagattgtaaaatgatgatgttgataatgttgatgtcatttttagctgtcgtaagtgaaacgtgatgttaaatagtgatattatcatgcttactctctcagctactttata

SEQ ID NO: 50841 - DNA, 122 bp, Homo sapiens
aggcatgctctggagggctcagaacagagagagctgctctgacctgggcaaagtggccagcgacagtagtgtgcaactaggctccaaagaaaacaatttttgccatttagaggtgtggatgg

SEQ ID NO: 50842 - DNA, 122 bp, Homo sapiens
atacactcctggaaggctcacatgactggaattctgttgacacctctgctggcagaggagcggcttctgggagtggatgttggccttgcttcccagctgttctcattttgcctccgccagag

SEQ ID NO: 50843 - DNA, 122 bp, Homo sapiens
ttctttgtacatgcactgactgccatggaatcaggtgtgcttttggccatggcctgtgatcgtgctgcggcaatagggcgtccactgcactaccctgtcctggtcaccaaagcctgtgtggg

SEQ ID NO: 50844 - DNA, 122 bp, Homo sapiens
actcaacgtttgatcagctcccactactttgtctttcccttttccaattgcttatgacctcggacactcagaaccactgatgtgaaaccacccacctgggtgctctctcggtggtgactttc

SEQ ID NO: 50845 - DNA, 122 bp, Homo sapiens
aaaaccttctacggcgcaaattgttcttgcccttaaccaaaatggtcgttaaggttgtcccgaggtttgaagcttccagcccttaactaagatggcgcctggaggcccgttaaaaattacct

SEQ ID NO: 50846 - DNA, 122 bp, Homo sapiens
acagctggcacttgtcagtccccagggacctcccagtgcctgatttcatgaggatggcctcgtatgggaagctgaagatgagactaagaagaagtgtggggggctgtgtgggggagggcaca

SEQ ID NO: 50847 - DNA, 122 bp, Homo sapiens
cttaaccgaaaccagttttgcaatcaattcctgttcaaaggccaccctactcttcctatccgtctttctccagcccagacactcacagccccctgccagaccaggggacctcggagaggcaa

SEQ ID NO: 50848 - DNA, 122 bp, Homo sapiens
tgactgagaccgtgtgtgtgaccgcagcaaagcgcagcgtgtggatggatcagagcccctcggtgcagctgtctgcatcttccaagcactttacagataccttggaatgtatatttttgtct

SEQ ID NO: 50849 - DNA, 122 bp, Homo sapiens
gcagtcggcgaactgtctgggcgggaggagccgtgagcagtagctgcactcagctgcccgcgcggcaaagaggaaggcaagccaaacagagtgcgcagagtggcagtgccagcggcgacaca

SEQ ID NO: 50850 - DNA, 122 bp, Homo sapiens
ttcaaccatggccaatactttttgggaacttaatgtgttcttggcacacagctctgggtccgttcaccttctaaagataaacagggccctgaaatcacctttcctcactctccaccacatga

SEQ ID NO: 50851 - DNA, 122 bp, Homo sapiens
tacaatgccataattgagcaaattagaaggatgcctttatagagcagtggatctcagcgccgtcagcacattagaattctccagggaatgtataattatatacgaatagtcaggccacatcc

SEQ ID NO: 50852 - DNA, 122 bp, Homo sapiens
tgggggtgagtgagagattcgctggggctggtggggtgggggcaggagtgtggaggagaacggttatcaggtgaaggtggattgctgtagacagagacgctggcaagttcaggttcaggaac

SEQ ID NO: 50853 - DNA, 122 bp, Homo sapiens
gaaacgcatgccagttagagtggctgaaaaatagcatggacaacaccaagtgccacgggacgtgcagccgtgggacccctcactgctagggaaggcaagatggcacggccacttaggaagac

SEQ ID NO: 50854 - DNA, 122 bp, Homo sapiens
ctccatattccggagaggatctaagcctcagggaaaatcctggtgaccttaagcttctgacggggccatgggggagggcctcagcccagagcctctgggtcccctggggtcccctcttcaca

SEQ ID NO: 50855 - DNA, 122 bp, Homo sapiens
agatgatctctctttttgttggcagatggtggtctctgctgtagctttgtcccctggtgacgggactcaggcagcaacccccatcattggcaatacccccacctctgagaatgtggagagga

SEQ ID NO: 50856 - DNA, 122 bp, Homo sapiens
gtgggtgcagtttccccgaggaaattggagggctgttcttggagcaaggacatgaataagcggcttacaaagagcaaataatcgttgcttatggcactcaaggtgttctgtcaccccatcca

SEQ ID NO: 50857 - DNA, 122 bp, Homo sapiens
tctatggcttatttttgatgaatgttcctcagatatcctatggacgcttatgaaggcagtcgagtggcatttgcaaaaaaagaaaaattgcagtcagagcacagacaccctgaatgaagccc

SEQ ID NO: 50858 - DNA, 122 bp, Homo sapiens
gtccgaggcgcctggaggcctggcagacgctagtgggccagggcctaaggtggggatctccggtggagggagggagcaggtctgaatggtgggagagtgaagttctgcttgtgggtctaagc

SEQ ID NO: 50859 - DNA, 122 bp, Homo sapiens
acgagtctctcctgagctccagatccttgtggtctggactctgtcctcagacgccaagtccgcctgcacagggatgggggtaaccccgaccccaacagcccctcctgcggctgtggcatctt

SEQ ID NO: 50860 - DNA, 122 bp, Homo sapiens
ggtgaagagccccgcaaagtgactgtccaggcggctctggaaggggtcaatgggggaggccgggatgccaccccggcggggccgggaggccttcagcctccgcaggaggctcatcttgccgt

SEQ ID NO: 50861 - DNA, 122 bp, Homo sapiens
ggtcttcgttccctgcctgcctcctttctgaggggctgcttcttcactgtgtggcctcaccgcctccagtgggtgcctctggagcaaacgtgccctggatctgctccatctctgccatcttc

SEQ ID NO: 50862 - DNA, 122 bp, Homo sapiens
gtgtgcaggtggcacgccatggtcatcccccacgtttctaccgtaacttccgccgggtaacgtcttctagcaggtatgagggagacaactacaaacgccagaggctcagccgaaggcgtcgt

SEQ ID NO: 50863 - DNA, 122 bp, Homo sapiens
accaggtgtttaaactcaatctgctaaatatggcttgataccttgtactcaagcatcagtcgcgatgatctgttaatcacatatgttactcataacaaggattcttcttcccattaccatat

SEQ ID NO: 50864 - DNA, 122 bp, Homo sapiens
cctccccaaaactcacagctgctccagaggttcctccagtcaaaccctttctggaaacgacggcggcccggcgggtccaaaccacctaccatccccgctcgcgtttccaggctccctacccc

SEQ ID NO: 50865 - DNA, 122 bp, Homo sapiens
agactgaggcgacgcacatcctcggtggaggactaatggagtccctctggtgtgctctcgcggtgggctgcagagctctgggggtgggccagggcccgagcgctgcagggccacccaccgga

SEQ ID NO: 50866 - DNA, 122 bp, Homo sapiens
gaggcaggggaaaaagggccttatctgccgctcccaaaggtaagagcatgtcaaggaaaccgaggatggtgcttaatgcaattctgtgctcctgtgactcactaaataacacagatggacaa

SEQ ID NO: 50867 - DNA, 122 bp, Homo sapiens
cctcctccccgcacttgggggtctccccacagcccgggccggccgcctgggctgcactggcgtctgagagctcctgacacaaggctgtgggaaggaacccttttaagccaaactgggggcaa

SEQ ID NO: 50868 - DNA, 122 bp, Homo sapiens
tgcacaggtgggcgatgctttgctccggccggctcacctccccgatgaaagcccgctcaacggcatctgcagggcactgcccaccccaccgcggggctgagacaccttccctagcacggcct

SEQ ID NO: 50869 - DNA, 122 bp, Homo sapiens
gtcaagaaattccttgtcatcagcaaattggcatccaagtactggactctagtttcttcccgtgggaagaaacaaagaatggaaacgaccaacattgttatgtgcgttgacacttcagcctg

SEQ ID NO: 50870 - DNA, 122 bp, Homo sapiens
tctaacctcttacgtacgtgccttttttgtggaggtctggggaagggggggccctactaccgaatgaatctactccttggtgcctcttggcacctaattggcttgcaaagctcagctgtggg

SEQ ID NO: 50871 - DNA, 122 bp, Homo sapiens
ctcacccagcgagatgacagggctcctccacggggtacagccagggccccccaagttaggcggtccaaatgcctcatcctcaagtgtaaacaagcctagcttagtgaaaacagagtaagcag

SEQ ID NO: 50872 - DNA, 122 bp, Homo sapiens
ggctgttagtggcgtggcccgccgggcattgagctgtttcctccaacgcccggtcccccgcggcctaggcccagtgtttgcttttgcagatacgtcagagggaacattcaggaggggcgggc

SEQ ID NO: 50873 - DNA, 122 bp, Homo sapiens
agcggctgcgggcattgctgggctgcggcgtgtggccattgggggccagagcgatgagagcgatcgctacatcggtgagtcctgctgcccctaccacagcccacctgggccaagacccctcc

SEQ ID NO: 50874 - DNA, 122 bp, Homo sapiens
gaacgttgaggagataatctcggaaaagttacggaaacctgggaagtcggcgaaaccctacgttcgggtgttttcggaagcagccgaagcggccgcctgcttcgccttcgtccagtatccgg

SEQ ID NO: 50875 - DNA, 122 bp, Homo sapiens
ttccagaccagcctgaccatcatggtgaaaccctgtgtctactaataatacaaaattagccgggtgtggtagcacacgcctgtaatcccagctatttgggaggctgaggcaggataatcgct

SEQ ID NO: 50876 - DNA, 122 bp, Homo sapiens
ggcggggcggggccgttgcttgggcgacaggctccagcgtctgcgttctgtgaacctagccgctgggctgtgcggacaggttcgcgtggggctcctgggcctcccgcagccgcgtaggtttc

SEQ ID NO: 50877 - DNA, 122 bp, Homo sapiens
aattttttttttctttttgagacagagtctaactctgtcacccaggctggagtgtaattgcgtgatcttggctcactgcgacctccgcctactgggttcaagcaattctcctgtcacagcat

SEQ ID NO: 50878 - DNA, 122 bp, Homo sapiens
tgtaagcccttccagacactgcctgcatcccttctacattgatgggagcgatcttatccccgtggctgctcacggcgggtgtgggggtgaacatcaaatgaggaaaatgcagcggcagtcct

SEQ ID NO: 50879 - DNA, 122 bp, Homo sapiens
cccagaaggaaaaacttgctctctttacccccgaaatcggtgcctgtaaaatgggctggacgcaggtctcccgggcagggagcagcgaggcgctgcgcggtggcttgtctaaatgcccttcg

SEQ ID NO: 50880 - DNA, 122 bp, Homo sapiens
ttgctccctcccacttcattcacttgcaaatcagtgtgtgcccacaagagccagctctcccgagcccgtaaccttcgcatcccaagagctgcagtttcagccgcgacagcaagaacggcaga

SEQ ID NO: 50881 - DNA, 122 bp, Homo sapiens
ctgcttgtgagaccggttccgcggtccgcagcgctggtggctgcaaggtttgtgtacggacgcatctgtcggctctcgtatttaaaaacgacggcttctgccaaaagagaaaagccatatct

SEQ ID NO: 50882 - DNA, 122 bp, Homo sapiens
atcaggtgtccatttcagaaagatcaatctgtgatgtgaatatatgttgagaggctgttacgcttaagtcatgcaggtaagagattttggtggtttgagctagggtggtaaaatgggatggg

SEQ ID NO: 50883 - DNA, 122 bp, Homo sapiens
ggggtgggccccccggaaatcctgctgcgctgtttaaacctaaggtgacctaacggatggcgggagcggccgcgcgagccttggagcagggcgcggccattggtgacgcacgccggggagca

SEQ ID NO: 50884 - DNA, 122 bp, Homo sapiens
ggcttgacaaagattaaaaaagaaggcaagtccttctttccaagagatgctgaggtccctcggcgacgctaggtcatgattttatcatgttcagagggcaatgaaagggacagaaaacaagc

SEQ ID NO: 50885 - DNA, 122 bp, Homo sapiens
cttcaaagaaaagcattatttcttgggctggggaagaagcagtgaaaatcacagtttacacgaaccatttgatcactgtctaggttaaaatgggtcattctctacctttgctgagttcactt

SEQ ID NO: 50886 - DNA, 122 bp, Homo sapiens
cccggggctcccggagcctcctggctccggcagacagaagcgggtgcccagccgaaggtgcgccaggcgcggctccggcccggaagaccccgcggactccgctcaccttaatgttgccgaag

SEQ ID NO: 50887 - DNA, 122 bp, Homo sapiens
ggaacgggaagctgggggaaacatggggtcctccggtctttagggctgggtctggcctgccgcctccacagtcccggcagggagtgccctgagctgccatccagggaagaaagctgatgata

SEQ ID NO: 50888 - DNA, 122 bp, Homo sapiens
cttgggaaggagagtgatggcaatttccataggaaaactcttcctccctggggaacaggccgggcgttaccctctgcccttgtcaaactaggggtcacacacgggcggtgccctcggcaaaa

SEQ ID NO: 50889 - DNA, 122 bp, Homo sapiens
caaagatgagtcaaattcattctgataagagagatttgtaagtcactagcaattatacagcgtggtaggtgccatgatagagatgcataggagaaacccagacttggcggctgaagggcaca

SEQ ID NO: 50890 - DNA, 122 bp, Homo sapiens
tcggtcaagccaaactctgcctttgattggtctttctatctgcccatcccggatcgggggcgggatttccccggaagacccacaccttgttgccactggccgaacagtgcgcctgtctgaag

SEQ ID NO: 50891 - DNA, 122 bp, Homo sapiens
aggcacggcttctcccctgcataaggagcaaactccttgtggctccaccccatgtgtgggcggttagtttgagccacattgatttatttcccttactgcacatgtgttgagaaatggaatct

SEQ ID NO: 50892 - DNA, 122 bp, Homo sapiens
ctactctgggtcactggctctccattccagggcatgggcaagtgtgcctggcttaggctgcgtgccagtgcctcagctgcacggcaggccaggaaagcggctcccaggccttgtgtctctcc

SEQ ID NO: 50893 - DNA, 122 bp, Homo sapiens
gtgtgtgagcagggatgataagtagagtggggggtgtgtagaggcctggtctcctccggacggtgcccctcccaactgcagagctgccctcctgtaagccggctcccgagccagctgccaac

SEQ ID NO: 50894 - DNA, 122 bp, Homo sapiens
gaaccaaagaagccacagagcccgaaaaagacctgcaacaggaggtagagaccgaggaatcggccccaagctgcagactccggagatggccagacccacagacacgacttaatcccactccc

SEQ ID NO: 50895 - DNA, 122 bp, Homo sapiens
ttagcatgacaaagacacttcaatcacccgcagcccatccatctgagagcgacatggaagcgtcaaaaacatctttcttcaaagacttttggaaagaagggaccagagggagagggggaaaa

SEQ ID NO: 50896 - DNA, 122 bp, Homo sapiens
cagaggcaggggctgccccgggctggcacatttggaaaggatgcacttgcaccctgtccacggaagagctgtcatcaggcctcaagcatctcagaatcctccccaggcactgcctccatgga

SEQ ID NO: 50897 - DNA, 122 bp, Homo sapiens
caatgtttttcccctactaagcacttctgatgaaatggtgagggccgtaagtcagcgttccgggtaaaggttttagtggaattgagaaccgaatgcgttaatgacgggttgcttgctgccct

SEQ ID NO: 50898 - DNA, 122 bp, Homo sapiens
gaagaaattgatctcccgaggatgtctcctggactaagtgttcataattatgtcactcaccgcgaagttggagaaagttaggtttgtgactttgggaaagcgagaaggacaggacggagtcg

SEQ ID NO: 50899 - DNA, 122 bp, Homo sapiens
gggccacaaagggcgaatccgtcaaaaaaaaaaaaaaaacgtgggaaatctctcatcattcggcctcaatgctgtaccctagaaaattatgagacgggaatgatttggggagcaagtgacag

SEQ ID NO: 50900 - DNA, 122 bp, Homo sapiens
ctgtggcactgggtgcgagccgatgagcgcttccaccgcgtcctcgggcgtcaggttgagcgcctcggggttcatctgctggtagttgctcgccatccagtacagatcctcgaggtgtgtct

SEQ ID NO: 50901 - DNA, 122 bp, Homo sapiens
cagggtcaccgagagggcaaacgaggcaaagcgctgtcacctccgcagagctgacccagccgcccttcctcccgcccgtcctgcaggtggctccctagcacggcccgcaactgtgcagggcg

SEQ ID NO: 50902 - DNA, 122 bp, Homo sapiens
aatcccacaaccctgagcctcaggattcctgccctcgggaggccagatgtctgcatgcaccggagacgctgcccccacggagcctgctcccatcccgaggtggccgagcctcactccgggta

SEQ ID NO: 50903 - DNA, 122 bp, Homo sapiens
ttaacattctgaccaaaattctcaactcgatgcagtcagagtctgcgcaacctgggacctcgagccaagaaatcctcaagtgaccttacttggcaaaaccaacaaaacaaccaaatacaggt

SEQ ID NO: 50904 - DNA, 122 bp, Homo sapiens
cacacgcacaggcggtggccaagcaaacacccgctcatatttagtgcatgagcctgggttcgagttgccggagcctcgcgcgtagggcaggggttcgagcgccccttctccctgcctcgcct

SEQ ID NO: 50905 - DNA, 122 bp, Homo sapiens
gaaatgtcgggtgcaggccggacgcaggcgctgcaggctccttatgaggctccacatgggcgagacctgtgcgcaccgctcgtgtgtttgcgtatcctctgctctgtggtgtacagatactg

SEQ ID NO: 50906 - DNA, 122 bp, Homo sapiens
agttgcctactttccccgcagtgcgataaacccctcgttggggccgccttagttctcggccgctctcggaggatggcgatctgggagcccctccatgggacccctctcacactttgtcactg

SEQ ID NO: 50907 - DNA, 122 bp, Homo sapiens
tacaaacaaacaacaacaacaaaacattaaagagagacccaactaggtgactgactttcccgtgcacatgaggattctgagtagagttagggagtgtcagctgactgcatttctcagacagg

SEQ ID NO: 50908 - DNA, 122 bp, Homo sapiens
cgtcgggagcgcgctctgtgtggtcgctgctgcagtgttgttgtggctgtgagaaggcggcggcggcggcggagcagcagccggaccagactccctagtagctcaggcgctgccctgcgccg

SEQ ID NO: 50909 - DNA, 122 bp, Homo sapiens
ggtaggttaccctggccccattcccagaatttaacagtaggggccttgtgaaatgctaaacgatgtgtataacagtattcaggctctccaagagccaatccgtcaaaacatttgctgctttg

SEQ ID NO: 50910 - DNA, 122 bp, Homo sapiens
tctctgatgcctgagctgagtccaggagtcccccaaaaggaaacttggccttgaactgctcggacatgagcggcaacaaagggttggtgaaggtggtggcactgcccgcggggccgcagtct

SEQ ID NO: 50911 - DNA, 122 bp, Homo sapiens
tgatgagggccccacattcttacaaactcctgtagacaacaaggggctggaggaagaactcggaggatcccctgatatccccctaggtgtgagctttgtcatgactgacaacaccaaggcac

SEQ ID NO: 50912 - DNA, 122 bp, Homo sapiens
cgtacacacagctgatcatagacatttagcttagacacatgcaaaggcacactcagatggcgcattcaggtgcacagtggcacacatacccctgcacgtctgcacagagctctttcctctcc

SEQ ID NO: 50913 - DNA, 122 bp, Homo sapiens
ccgagcgggccggggcgggcgtggcgtgggtgtgccaggagctccgcggttgccgcgaagcgagctggagctgaccctcggcgtcccgtgagcaccccgcggatcaacaccttcattgttgt

SEQ ID NO: 50914 - DNA, 122 bp, Homo sapiens
gaggcttggtggggcgggtagcctgcggtgccccagacaccgcgtgcaagcccacaggtccgttaacccttgcatggagtgctggagggtggagctcagaaagttcctcctcccactagacg

SEQ ID NO: 50915 - DNA, 122 bp, Homo sapiens
gcctgcagcccgcaccgcggagcgctggaggttcctgagcccggtctggggaggccaatccgcaggtgcctggtgcccggtgcctgccgcagtctcaaaagcgcctggaggtgacatccagg

SEQ ID NO: 50916 - DNA, 122 bp, Homo sapiens
gcgggcgcagcgtccagcggatggtttacattcttggcatatcttctcccaaccgcaggccggggcccgggcctcctgctcctcctcctccatcgccgcctcctatcctgtcagccgcagtc

SEQ ID NO: 50917 - DNA, 122 bp, Homo sapiens
taaaataagaaatagaggtttgagtctttcctggtaagcatatttatgctctaccacagacggttcagccttggggcaagacagtctttctcctaatttttgtagttttgaacattctaaag

SEQ ID NO: 50918 - DNA, 122 bp, Homo sapiens
ggctctccaccctggtcctgtggtgactgagccgccggctctcctgcagaagctggtctgcgcaggccagtatgggccgggcatggcggagctggaggaacagatcgcggagctcaacatcg

SEQ ID NO: 50919 - DNA, 122 bp, Homo sapiens
ctccctctttgccctccatcatgattggaagcatcctgaggccccgccagaagcagaagccgctatgctttctgtacagcttgcagaaccgtgagccaaataaatctcttttctttataaat

SEQ ID NO: 50920 - DNA, 122 bp, Homo sapiens
attagacaacaaaaccctcacttggaagaattggaatcagggaaacaagcctcaggtatgcgggaaagatgatctaagccacagagctgactactgctgctgctggccctgtggagataagc

SEQ ID NO: 50921 - DNA, 122 bp, Homo sapiens
tacccactcgctgcaggtggggccctgggtgttggggcggcaccggcagacgcccgtcctcggttcacagctctggcccagtgcaccgccaatgtcacaccggcagcctgcagggagaaggt

SEQ ID NO: 50922 - DNA, 122 bp, Homo sapiens
gcgctacttcggcggcaccgaggaccgcctgtcctgcttcgcgcagacggtgtcccccgccgagaagtggagcgtgcacatcgccatgcaccctcaggtcaacatctacagcgtcacccgta

SEQ ID NO: 50923 - DNA, 122 bp, Homo sapiens
aatgtgagacagatcaatggaatacacacaataacagataaaggaaatacacaggaaatgcgtgcaagaaaaacacctgggtccctgaatgacaggaaatagtgctgtctaatagtgcacta

SEQ ID NO: 50924 - DNA, 122 bp, Homo sapiens
cccccgcgctgccgagcgctcgcatctaaaggtcttgaacgcgttccaggtttctaatttcgtttgcttatgcaaccaaaaatattatggccgcgtttcctgggggtgatgaagtctatatt

SEQ ID NO: 50925 - DNA, 122 bp, Homo sapiens
atctccagaagtagaacagatcacagttaacaggctggggccatacagctaagtaaacaccgacgcacgattcgctcacacggaataagaactccacgaaggacacttggggaccacactgg

SEQ ID NO: 50926 - DNA, 122 bp, Homo sapiens
tcctcactttaagaaaagaaagcatgttagctttctgctgtcctaatctctcttaatgctcgacactaaatttcttgaacaattgctctgaatccagggtcttcactttctcaagggctccg

SEQ ID NO: 50927 - DNA, 122 bp, Homo sapiens
tttctacactgtctggttttgtcccagggaactaggaaagcacagaagtaattgtagccacgcaattccagaaccaccaactgcaagccgtggaatcctgggagctgcagacacagaactcg

SEQ ID NO: 50928 - DNA, 122 bp, Homo sapiens
ccgtattgattaagaaggggacggacttaccttccactgtgagagttacccaaagctcggcgtccgtgatggtctacggggcttccaaggcaatcaggcagcgtcagtcttcagctgctaag

SEQ ID NO: 50929 - DNA, 122 bp, Homo sapiens
tcagactagttgggtcatttgaaggttagcagcccgggtagggttcaccgaaagttcactcgcatatattaggcaattcaatctttcattctgtgtgacagaagtagtaggaagtgagctgt

SEQ ID NO: 50930 - DNA, 122 bp, Homo sapiens
ctcttgtgcttgagttcagtgttagtggtagcgtggctcactccacttggaggtggcggccgtctgaccgtgtgttactgctttgccgacggggcctcccggccctgatgcgtgtacactct

SEQ ID NO: 50931 - DNA, 122 bp, Homo sapiens
ccttaatgtctccagtagtaaagaaaaatgaaaataatcatatgagttttggaggattagcgtggtgacccaatgagatctagaacatgaaagtatcgctactgtgcctggcatttataggt

SEQ ID NO: 50932 - DNA, 122 bp, Homo sapiens
ataaaatgaatattggtcctagttcttcccccacaggaatgttatgagtaataagtgaaccgactttattaaaattcatggaccagtgcctggcccattgggagtgctctaaaaatgcttgc

SEQ ID NO: 50933 - DNA, 122 bp, Homo sapiens
ttccttcacacccaggccagattggattcagatgggcaaagacctcccagcagcctgcagcggggagtggccgcccggacacaccttcgctttagaggaagggtagaggaccgtcgagcttg

SEQ ID NO: 50934 - DNA, 122 bp, Homo sapiens
gagtgagctgacctaagaccttgggttccttgtgcctctgcatacttaaagaatgggaatcggccgggcgcggtggctcaagcctgtaatcccagcactttgggaggccgaggcgggcggat

SEQ ID NO: 50935 - DNA, 122 bp, Homo sapiens
cgcggtcgcgtgcgcgctcctccctcgcgctgcccggtcaattccttcttttactcccggcggcgaagccctttcatgcccccaaacagcaggagggaaaccgaaaagaactgccaactgca

SEQ ID NO: 50936 - DNA, 122 bp, Homo sapiens
ggtgagtgggtgcccctgaatgtctggagatctgctcaggagtggagtggagagggctttcgctgcataaggtctctgcacaggagggatgggacaactcaggcttctggatcaggcaagca

SEQ ID NO: 50937 - DNA, 122 bp, Homo sapiens
ccggtgtttggcactgagcccactatggtttggggactactttatctcggcggagtgttacgtaggaagtggttgtgacgtcattctggtcccttccctaggccgcagggttgggcgcggcg

SEQ ID NO: 50938 - DNA, 122 bp, Homo sapiens
tggtaattttctcaaattctaggatctttctacctccacagtggcttcttctgcaataggcgattaggagagcagtcaccagacagaccttggatttgagtttagctcagccagttataaag

SEQ ID NO: 50939 - DNA, 122 bp, Homo sapiens
cttcagtattgtgcacctattcctgagttctctgcctttccaggcaaacacaaagcactacgaaggaagggacagtactctgtacactcactcatcccctgccccctaacaatgcacctttg

SEQ ID NO: 50940 - DNA, 122 bp, Homo sapiens
acatttcacaaagcatgtctcaccgaagatgagttttgcctaattttaatgaatgtttcacgaaaaaaaaaaaagcattttgtgatttaaaaaatatatggagctgggttgaatacaactaa

SEQ ID NO: 50941 - DNA, 122 bp, Homo sapiens
cagtgtttgactgccccctagtggccagactcaaggcatgcctggcatggtcctttcttacggatgtcagtttcacttggccactctgacttgagaaaaggttttccatctgaattttaatt

SEQ ID NO: 50942 - DNA, 122 bp, Homo sapiens
ccaaaggaagagaggggaatgcgaagagcgggctgctttctgcggatcgtggtttaacgccgagtgccccccactggctgtgcagtcctgagaaggccactcaacaccccagggcctcagtg

SEQ ID NO: 50943 - DNA, 122 bp, Homo sapiens
gaggtctagcccctaccccaaatctccttctaccagcagtcaataggaagcaaagtgagacgatgtaggggaagaaatggctctcagggactgaggcatttgagaaacctctgttcttttgc

SEQ ID NO: 50944 - DNA, 122 bp, Homo sapiens
aacaaggtgccgtgaatatttgctggttgcatgaatgaggacagcagtcccaccctgtcccgggagtgcctagaattccactgtttgtggccaacccagaatacataacctgggggccggag

SEQ ID NO: 50945 - DNA, 122 bp, Homo sapiens
ggcaggggcgcactggccaaggccggccactgatgccccgcgcgccttgcccccagaatgcgctgtaccagtcctgccacgaggatgagaacgacgtgcagaccatctcccacaagtgccag

SEQ ID NO: 50946 - DNA, 122 bp, Homo sapiens
actgcagatggagcctatgccgctgcctctcgccctcctctgaacgtgtgcgtgtgcgcgcgtgtggctgcctcctccagccccagccccgaacgcaaatactccaccgaggcacagggaag

SEQ ID NO: 50947 - DNA, 122 bp, Homo sapiens
tgcccacctgccacctgctgttctaaatacacagagaataggcttgctaaaaatcaaattcgactcttgtctttctgcttgaaaaatccttcatacactcctcattactcccaggataaact

SEQ ID NO: 50948 - DNA, 122 bp, Homo sapiens
aggactgagggggtgaagagcaagcagaaaatggatttccaccatgggctagactgttcacgtggcccagtggtggagagaatccttagggaaagcctaactccgaagcccagagaaggaag

SEQ ID NO: 50949 - DNA, 122 bp, Homo sapiens
ctgacccgcaccagtctgagctcttacctgccaaagagtcaagcccaatctggagttgcccgccgggcctcctactctgacacccccacccggccccacctcacccccccctcccattccca

SEQ ID NO: 50950 - DNA, 122 bp, Homo sapiens
attgaccattaaaatataaaaagtctgattgcctgcagatgtgccaacctgagaccagaccgccacaaagacttactgatacttgtctcctcccccatcttccttccagcagtggaaccaga

SEQ ID NO: 50951 - DNA, 122 bp, Homo sapiens
gccctctaccggaaccgagggagccagacagctgcgatattgggaaggcctccggagccgcgaagagcgcacgcgcgagcgcgcgcccgcgttctcctggcgggcttggtatttggcgcctg

SEQ ID NO: 50952 - DNA, 122 bp, Homo sapiens
gtagcctaagcgagcctcctggaggccgccctgtggctgccctgcctgctggaccccgcccgggcccagcctcccacctgcagcgggtaggacatggagcccccctgcaggggctggcaatc

SEQ ID NO: 50953 - DNA, 122 bp, Homo sapiens
ctattttatcttcagttctgaaaaaataacgggggaaaaaatctatgctccagagagctgcgtcagtgttccctggtgtttacgaatttcttgcgtttgccccgaccccaattagagaagca

SEQ ID NO: 50954 - DNA, 122 bp, Homo sapiens
ttcaggaactcatctttcatttcctagtggaattctggggttcacaagagaattgcaccccgttaaccaaaaaccaataaaaaatgaagatcctgtcttggtaatcctgcctctttggtctc

SEQ ID NO: 50955 - DNA, 122 bp, Homo sapiens
tgggcagcaggtgggcgtggcaggcataggcggagtcaatctatgagtgggtgggcctatcgccaggccgagagtgggcgtggccgacgtggggtgggtagcagccgaccgagtcggaccgg

SEQ ID NO: 50956 - DNA, 122 bp, Homo sapiens
gccgggcggattgcaaatgaagtgtaatgcattgtgggacgtgtgtaaaatcggagccttcgccgtgggggtgtgggggggcgtggggagggccggacccgccgctggcggtgtagacgccg

SEQ ID NO: 50957 - DNA, 122 bp, Homo sapiens
tctatggaataatcaatgaactctgttgccttttgacttctttttactttttctttttttcgaaataccttgtagcagaatggtaagagcacagtttctggagctagaatgcctggtagcct

SEQ ID NO: 50958 - DNA, 122 bp, Homo sapiens
aagcgctaggtcccgaaactggccttcccccggggcccatctcccggctaatgtttaacccggccacactccacattatccacactcaggagaccggggtgaggtgagggtggaggctgggg

SEQ ID NO: 50959 - DNA, 122 bp, Homo sapiens
tggatgtcaatgtttacttgatcattgccatctgcgcggtgtccagcctgttggtgctcacgttgctgctgtatactgcgctgcggtgctcggcaccgcccaccgagggcgcgtgcgcgccg

SEQ ID NO: 50960 - DNA, 122 bp, Homo sapiens
tacccactccccacctcatcctatcccatccaaacccaggtcagcaccgctaggcaaaaacgcaggtgaggcttgtgttataagccaagggacccagttctgttttcttttggcaaaaaagc

SEQ ID NO: 50961 - DNA, 122 bp, Homo sapiens
aagaagcctcatggatcagccaacacaaaaccctcaagagacctcatgcctggaagcaggcgggatccctgaccttcccagtgtcatacacagaatgatactcttttagcagggaaagggtc

SEQ ID NO: 50962 - DNA, 122 bp, Homo sapiens
aaggtagggtgggagcctggagctcagtaagctctctgcaatttatgtttgcctccaccccgacccccaccaagcttgagcctcctctcccccatccccatatgggagggggagctaggaag

SEQ ID NO: 50963 - DNA, 122 bp, Homo sapiens
tcttctccttctctcgtgctgggtggtgccgttcccacggctccaggcccttcccaaagtcgccgtcggacttgtccttgaagccactctcgcagccacactccttcagctcctcccggtgc

SEQ ID NO: 50964 - DNA, 122 bp, Homo sapiens
ggctcgggttcccggacccacagccttccaaccaggtggggaccccacccacggactcaccggaactgctccgagtgcccgtcaagagttacttccggtttccacggagctccgccccttag

SEQ ID NO: 50965 - DNA, 122 bp, Homo sapiens
gttaggacatatggcttcacaaaaagaaatacttccagataagtcagagagacagttggacgtcttgagcaaatcttgaaagagatagggaagaaagcagaagttgttgggtggtgcttgta

SEQ ID NO: 50966 - DNA, 122 bp, Homo sapiens
cgagccaactcaggtgctctcctggcacctgggggcggtggggaaagggggcgcggccgccggagcacgccccctgctgggctgagccgccgcccgtcccgttccccaccctcggagcccct

SEQ ID NO: 50967 - DNA, 122 bp, Homo sapiens
tttgtcgtggcagcatgggaaaccagagggaacccaacatgaagacgcgggagaagatggcgacttagatgccaggagaggggccctgggacgggtccttccttgcagcctcagaaggagcc

SEQ ID NO: 50968 - DNA, 122 bp, Homo sapiens
ttgcctgaatttcgcatccttttcccatggaagtggttggggaccgaggatgtggcctcccggcagcctggaaggctgggctgaggaggacacagggccgggaaggcccagactggtcccta

SEQ ID NO: 50969 - DNA, 122 bp, Homo sapiens
gccacccatcgtcacctgggctccttctacaacctggctgtggatgctccctaacctgaccgagtctgtgtctcttcacacacacactctctgggactcacagtaggtcctcagcattgcct

SEQ ID NO: 50970 - DNA, 122 bp, Homo sapiens
tacaatcaatcagattcaattaaagaatgaagcaagagctacctcttcattgactggacacggccttgttagattaggtgttttaagaatggaagtaatctcatgccaactagtgttttccc

SEQ ID NO: 50971 - DNA, 122 bp, Homo sapiens
agtcagggaccagtgactcaccttcctcctcagcctcctggcagccggccagccctaccccggccctgccgggacgaaggaggccacccactgtctagacagataacactgtgggtatactt

SEQ ID NO: 50972 - DNA, 122 bp, Homo sapiens
gttttggaaggtagaggctgcattccttcatttctatctctcccccagggcctagcaaagcgttttataggttgtaggtaggaaaaccaaagtgaattaaggctgccattaaaatcgacaag

SEQ ID NO: 50973 - DNA, 122 bp, Homo sapiens
gtgtcagaacattatgaacagcccgaagatgggctgtgagcggggataagtgaagcgcggcgtggaggccgttcggtaactccatccatctgtggacaggggcgtgaggacaaggcgaacag

SEQ ID NO: 50974 - DNA, 122 bp, Homo sapiens
ctgattccccatggctcagccacccactgccgctctgtaatatttcagcctctccttaggcgaaagaagccattgttctgagcttggcacgagctcccggacccttcacgtattgtgtacat

SEQ ID NO: 50975 - DNA, 122 bp, Homo sapiens
ggttcagaatttaagggggctccaaaacactcagtaatcaagataaatataatactgcaacgttttaaaaggtcaaaagtaatgcaaaaagtctatgatcaaaatgtttttaaaaataagga

SEQ ID NO: 50976 - DNA, 122 bp, Homo sapiens
gggtggacagaggagcggagggacgagagggaagcgcacgatagctgcgcggagagagagcgaagagcaggcggaggaacaaaggcgacccaagacacccagagagggacaggtaaggaggg

SEQ ID NO: 50977 - DNA, 122 bp, Homo sapiens
cagggaaatcgaggagtttccgggaaccgaaccacgctgggagcgctgaggtctgcgcagcggcgggggccgggggacgggcgggcgtccagtgttaccggccagtggccagctggaagttc

SEQ ID NO: 50978 - DNA, 122 bp, Homo sapiens
ttctcaagcgctgctgcatattagaaccatctgggaagctggaaacaatcctgctgcccacgctgcacctcctgccaattgcatcagaatctctgggggagccactggccagcaagattttt

SEQ ID NO: 50979 - DNA, 122 bp, Homo sapiens
tacctgtgttgtgccagaggttctgatgataggcttataggcggtagtttcctcagtgtccgtgggtcgcccccggtcccgggttggatgccccgcggtccagcaccgaacctttcggggtg

SEQ ID NO: 50980 - DNA, 122 bp, Homo sapiens
tcctgaatttttcacacagggggcgggtcagacacgcggttcccatggcactagggcactcgggttacagtcgggttacccccatacccccctcgcgcttctggagtgccaacccgccctcc

SEQ ID NO: 50981 - DNA, 122 bp, Homo sapiens
cagtttcttatgtgtttgatatcttcttcctggtgtgaggacttagctttgagtgttaaccgaaaattctaagtctagggttcctaagttgttatgtgctgcactatacaagtaaacctaca

SEQ ID NO: 50982 - DNA, 122 bp, Homo sapiens
aatgcctcagcccggagccttggctggagagcggggcggtgcgagcgccggaagtgaacccgacgaggtcagtgacgtcacgccggcgcagttccggccgcgcagctctcgcggagaggggc

SEQ ID NO: 50983 - DNA, 122 bp, Homo sapiens
tgatactacctgtggagctttggagggtccctttttctaacaagaccacattgtcacccacgaagttccctttgttccacagactcctggatgtttcctgcctcctgtccttgtaattacag

SEQ ID NO: 50984 - DNA, 122 bp, Homo sapiens
gtgggacttttctgtttacataggattataatatcctcactggccacaatctgtaaaagtcgatactggcacttttttttgccccctcaaaggaaatatgctaatagacagcccctttgcaa

SEQ ID NO: 50985 - DNA, 122 bp, Homo sapiens
catcacttttgccgggaagtttgagcctgtgcagcactggtgccgtgccccgaggccagacggccggctctgtgagcgccaagaccggctgaaggtgaggccgtggcccgagggcgggggtg

SEQ ID NO: 50986 - DNA, 122 bp, Homo sapiens
gagtgatgccccagtgacagctctctccatttttattcatctttcattccagccactcaccgaaggggcatgagtccaaacagttggacattgctctgagtaacagagccagaatctccttt

SEQ ID NO: 50987 - DNA, 122 bp, Homo sapiens
gggagagcagggagggcaatcatccatttgcatgaaatacaggaatattcctagaaagttcggaggctcactctcaacgatctgtccacgggatcataaggctctccttggattagtaaaag

SEQ ID NO: 50988 - DNA, 122 bp, Homo sapiens
atcccggtgctcgggaagatgctagcggctaggtcgacagcgctgcaggagcgacggcggcggcggcgcgcacacttccaccaattctgtggcttgaagtcaaagtctcccctcgagctctc

SEQ ID NO: 50989 - DNA, 122 bp, Homo sapiens
tggaagagggcaggggagcgcctctccaatgtagttgcggggggcgggcggtgaggacaccgcttcataagggaaggggtggctgcctccccaagcagggggtggcccctgaggtccctcca

SEQ ID NO: 50990 - DNA, 122 bp, Homo sapiens
caggccaccaaccagcgctggccaggccaatgccgacaattcttcctccgccacctggggcgcctcagccaatcgggagcagccatgctgcgcagtgcagaacgccatagcgacggatgacg

SEQ ID NO: 50991 - DNA, 122 bp, Homo sapiens
agtccccgagtctccccggaaactgccgaaaacttacgagcgtccacaactgagaagggccggaaacactgtacaattttgtagagggtaaagtatgggaggctgtccggaaagtggcaaca

SEQ ID NO: 50992 - DNA, 122 bp, Homo sapiens
ggcagcccctccacggcactcacctccgcctgcccacgtcggcctgctccgctccgccatcgctctcagctgcgtggtccacatgtctctcggtggccgaatccagcagggccagcagctga

SEQ ID NO: 50993 - DNA, 122 bp, Homo sapiens
cgctcctcagagacatggagccgttggctaccacctctgcttcaggggagaaatttggcgcgctcccacccagactcgcgagagccggaaatgccgccgtccatcaagaggcgcgctccgcc

SEQ ID NO: 50994 - DNA, 122 bp, Homo sapiens
acccagtatgcttaaatggccacgggtctgtgcacacatgcttattggttcaaagtggaacgactagtttctcagagaaccaatcagctcttcaggtggctgttctctgatggccactcaca

SEQ ID NO: 50995 - DNA, 122 bp, Homo sapiens
tacttaaagtgtcacacgacctgggtataccctccattcagacgcactcacccgcacacgcgacccatagtcagagatctgctcagatacagcccatagggagtccccgcgcccgcgcgcca

SEQ ID NO: 50996 - DNA, 122 bp, Homo sapiens
ctggagtgtagtgggaggatcatggctcactgcacatactgcttgtcttgatgtttcttgcgcaccccaagcttgtcttgcttcaagatcttacactaactaccctcttctagggtgctcct

SEQ ID NO: 50997 - DNA, 122 bp, Homo sapiens
tgcttggcctcctgagttcttctaacacaactccagcagtcttgctacctgttatagcaacgtacaacaagctcatcttgtacatttcctgtctcagatctgtttccttttagtggtaagtg

SEQ ID NO: 50998 - DNA, 122 bp, Homo sapiens
tagtgtcccatgctgagtggcgggtaggggaatcggaattccttgtcctaggctgggagccgtgtgggggctccatgtttcgggctggaggagctgggcgagtgggaggggctggacctaga

SEQ ID NO: 50999 - DNA, 122 bp, Homo sapiens
ttatcttaagacaaacccccctgttcaatgatgctgctgatctctcagctgatgtctaagcgggagttaggttgttagtggataatattgcttctgttcacgtctctcttctccagggcttt

SEQ ID NO: 51000 - DNA, 122 bp, Homo sapiens
acacgggactgtggccgacaccccctggcctgtgccaggctcacgggcggcggcggaccccgacctccagttgcctacaattccagtcgctgacttggtcctgttttctattctttattttt

SEQ ID NO: 51001 - DNA, 122 bp, Homo sapiens
ggcgggtggatcacttgaggtcaggagttcaagcccagcccgggcaacatggtaaaaccccgtctctactaaaactacaaatattagccaagcttggtggctggtgactgtaatcccagcta

SEQ ID NO: 51002 - DNA, 122 bp, Homo sapiens
acaatatagggaatagttcattttagccatagtaaaaatctacattccagatttggccaccgtaagtgccactactatttgtatttcaacagataactgaccctttgctaatcatcatattg

SEQ ID NO: 51003 - DNA, 122 bp, Homo sapiens
aattggcaactctgtggccttccttatagggctagcagtgccaacagttttcaagaggcacgatactaacacatttgtagggaaaggagccaagaggacgaaaaaggctgtaggtatgactc

SEQ ID NO: 51004 - DNA, 122 bp, Homo sapiens
cgtcgaaagctgtggaggctggaggtaagctagctaccagaccgactagggcgaggctcacgaattaattaccacaaccctaccaggtattggcgcttcctgcttgcagcccagggactttc

SEQ ID NO: 51005 - DNA, 122 bp, Homo sapiens
ggtcaccacgtggaccctgtccttgcaacgtgctgtagccagaattcattttgcatccaccggtctcccacggagttctgtttcctcaggcactgcactgtatacaactctaaatgcaccct

SEQ ID NO: 51006 - DNA, 122 bp, Homo sapiens
gacaatgggagtgaagagggaaacctgccggcgtacagacagttaaggcagccaggaagccgcgcgctccgtggaaaacctctgttgaaagccccttcagtagtttaaagtctaaagagtag

SEQ ID NO: 51007 - DNA, 122 bp, Homo sapiens
cgcttactggtcctgccgtaggaggcgggtacgtgagcgcaccaatctgtggccggcgagcgtaaagggcggggctccgcccaggctgcaccgcccagagcgcgcgtgcgcgagaccggaaa

SEQ ID NO: 51008 - DNA, 122 bp, Homo sapiens
tgaacttaaacacaaacacactccagtgacccccatctcagactgaggaatcggagcacccggaaacaggcctgtgaggatcaaacctgttgagaagtcccaagtgactgggcaccatagat

SEQ ID NO: 51009 - DNA, 122 bp, Homo sapiens
cttgcatggagagcaggcgttacgctggaaggaagcccaggagtgtcagtaatggggaagcgtgccctgaggcatggaatgctgccggtgatcaacaacagcttcaactgtagactctgtct

SEQ ID NO: 51010 - DNA, 122 bp, Homo sapiens
tggaagggcgggggcggtgacagcggcaggggcgggacccggaggcggggcgtttgctcacgtcgtccagtagcggagggaggcgcggtcccagctccgcgctcaggagccgcacaggcgcc

SEQ ID NO: 51011 - DNA, 122 bp, Homo sapiens
gggacctgaggatctggggtggggaccctgatgtgagggtacctgactctggctcagagccgagggtgggactgggtgctgctcctactggcgggacttgggtgtcggaggttgggattttt

SEQ ID NO: 51012 - DNA, 122 bp, Homo sapiens
aagccacggggcgcgggccgctgggcccccaggctccgccctcgccccgccccggcgccgcggcgggagacacgcccccgagctccacgccctcgagctccacgcacctccccgtagcagac

SEQ ID NO: 51013 - DNA, 122 bp, Homo sapiens
aatgggcctcaaactccaggagggggaccttctcatgggtcctgttttctggtctctcctcgcttacccctgggctgatcaccctgggaagaactgagccaaggtttctcaccctcaggtcc

SEQ ID NO: 51014 - DNA, 122 bp, Homo sapiens
gagaaatgtgtggtgagcacaggcctggccggggcacgccgtctggggagcggctgtgggcgggattgtgatggctggtcagaagggagcccatctaaccagtgcacactcgtgaaacagat

SEQ ID NO: 51015 - DNA, 122 bp, Homo sapiens
agacaacgggcccagtcgcgtcacccgcccgcgccggcggcagacgtcaccaaggcgcgacggccctgctccgcctctgggctcgtcttccgcctgtcggacagcagatgcgggcatgcgct

SEQ ID NO: 51016 - DNA, 122 bp, Homo sapiens
cacacccacgggcacacgcgcgcacacagacccacaggcaccacacgtacacagacaactcgcgcagggccgcacactcaccacacgtgtacacatgtgcactcccaaagtcactacactgc

SEQ ID NO: 51017 - DNA, 122 bp, Homo sapiens
atggacaggcaatagtcaccaataattgtgggtcacggaagagcatctttccccaccccccggtgggcggggcctgaggcgtaccggaggccctgaagaggtgaaaggtgaagtgagcattg

SEQ ID NO: 51018 - DNA, 122 bp, Homo sapiens
tgaatcttaggggaaaatgcttttccaataaggttcctcagaagtcatcagccctaggagcggtgtgctcaagcgctttcagcaccagccaggaccaactaagaggggagcgcttagctccc

SEQ ID NO: 51019 - DNA, 122 bp, Homo sapiens
ccggagccggctgaggatgcgctctgggcgcagggacccgctggcccccgggccgggaggcgatgtttaggcagcgaccccccagaggctgccggggccaccctggccacgggcccgccggg

SEQ ID NO: 51020 - DNA, 122 bp, Homo sapiens
cctcgccgccctcagcctgggacttggggatcgggcgcttgcccagcccgcgtcccagcgcggccacatggctccactccgcgcgctgctgtcctacctgctgcctttgcactgtgcgctct

SEQ ID NO: 51021 - DNA, 122 bp, Homo sapiens
agaagaccagacgttctgtcttggggcctccctcccggccctttagcctcacccagtgcccggtcctgacacaccccagcactaccagacgaggaagggcagactctccacaccaggctcag

SEQ ID NO: 51022 - DNA, 122 bp, Homo sapiens
agtcagctctggttcggagaagcagcggctggcgtgggccatccggggaatgggcgccctcgtgacctagtgttgcggggcaaaaagggtcttgccggcctcgctcgtgcaggggcgtatct

SEQ ID NO: 51023 - DNA, 122 bp, Homo sapiens
cctccggtctagggctctttgtctttgcaaagtgtcgaaactgtctggcatagtgggctccgccggcggaggctggagccgaggaagcgaggaggcgggatgagggtgggagagggctcggg

SEQ ID NO: 51024 - DNA, 122 bp, Homo sapiens
ccttactctttccacgagccaggcctttcctttgcatgacgcagaccggcggctgagacccgtcctgaggccccgcctttcattcggtttatgtggccccgcgcagttcacgcagttttctc

SEQ ID NO: 51025 - DNA, 122 bp, Homo sapiens
aatgttttttaactcagatgggcagagtttgggctgtgcttatgcagtggccatttgaaccgcacagtcacgaatgtggggttttaaactagagtgatgaaggcacaggtgcttgcaggctg

SEQ ID NO: 51026 - DNA, 122 bp, Homo sapiens
ccgtggtccctggatgcgggtgctcgaggcctgtgtgggtaatcacgcttcccgtctccacgccacccttcccccacagagtcgcctgcccttccacacagacaaggggccacaaggccgca

SEQ ID NO: 51027 - DNA, 122 bp, Homo sapiens
agcaggcggggagaaaactcagcgtggctaccattggggaccttgattagtaggtcataccgcagtgcccaccgcaagggtggccactgcggacgcgagggcagccccgcctcaagtagcgc

SEQ ID NO: 51028 - DNA, 122 bp, Homo sapiens
ataaatttacagggttgatttgggaagcagagcacagcagcccaaatttgcttgtaatgtcggcgactacaggtaaggcactaaattgtaaataatttaagctgagtttacatttttacact

SEQ ID NO: 51029 - DNA, 122 bp, Homo sapiens
gcacatcggagcattcgcggattaggatgggtaggtcgggattcgccttcttcagctccacgtagcgtttctcaatgaagtccctgcggggccggagagagcgccgcgcgtgctgtgggcgg

SEQ ID NO: 51030 - DNA, 122 bp, Homo sapiens
caggaagaggacgacccattccctggggagatctgaggacggtggtccccgggagaggagcgcacagcacaggcctgctgaggggcgggtttgcccctactgggggaggggcggggagaaaa

SEQ ID NO: 51031 - DNA, 122 bp, Homo sapiens
ggccctctggctcttccctgtggctgcagatggcacttagcggcctaggacgtctattcacgggaggagggaggcactgccctcctcaggtctgcccaagcagcttgtagctagcactgggc

SEQ ID NO: 51032 - DNA, 122 bp, Homo sapiens
gcggccggcgactcgcagtaagagacgcaagtctcagcattcatgcctggcttgcgcaggcggcgggcggggacgcgagcgagggcgcgaggacgccaccgcgcgccttggctgggagtttg

SEQ ID NO: 51033 - DNA, 122 bp, Homo sapiens
gaaggaaaagggaagcgagtgcagggactgttttatgtgaggtcgatctaaaaatcacagcgctatgaattttctgctgaattatagtagaatcaaagtccgattagaggtgaatttacaaa

SEQ ID NO: 51034 - DNA, 122 bp, Homo sapiens
cccccaccgtttgcgggttgctcacatcgatctcgaggaagttgctggggggtccgtaggcgtcattcaggttctgcggcttggtgatcagccgccgggtgtcagccacggtctccgccatt

SEQ ID NO: 51035 - DNA, 122 bp, Homo sapiens
aaattggcatgagacatttgacaacgaggccagccatgcaccgagctcaggttttatttccgttgtccttctgacgtcagaaaaagcacgagttgctgcacagtttcttttatcaaggtgac

SEQ ID NO: 51036 - DNA, 122 bp, Homo sapiens
tcccctgcagggcaacgcccagggaccaagttagccccttaagcctaggcaaaagaatcccgcccataatcgagaagcgactcgacatggaggcgatgacgagatcacgcgaggaggaaagg

SEQ ID NO: 51037 - DNA, 122 bp, Homo sapiens
gtgggggcctggccctgtctgagaaaatgtgacaatgctaattgaattctgagggggtcacgaacctcagaattgtgggactctgggagtctggccagccccagctgccgtcttagctggag

SEQ ID NO: 51038 - DNA, 122 bp, Homo sapiens
aggtcgtgtgtcgtctctccttctccgctgttgcagcacagatggaaatggaatgggtctcgcttgcagtctgtcacgacctccactgacttcttcagggtggtcgctcgcggtggtcctaa

SEQ ID NO: 51039 - DNA, 122 bp, Homo sapiens
aggagaggcggtggcagcagacaggggggcgggcagggtctctttgttcatctctgttggcgagaccacagggcttggggcacgtcttgttcctgaggtcctgctttcatagtcggggggcc

SEQ ID NO: 51040 - DNA, 122 bp, Homo sapiens
cgacaggcaccagcatgccagcaggccaccgaccggcagaagcagaacgacacagtttggcgggggcagttggaggaaagcccaggccactgagcggcctgactccaggggaagaccttccc

SEQ ID NO: 51041 - DNA, 122 bp, Homo sapiens
tactgcacttttaaacttgttttgtggactctgattttctcctcccctggatgaaatcctcgggtaggctccatcgttttttgggtcattctttgatgatattatgcaaagtccattccagt

SEQ ID NO: 51042 - DNA, 122 bp, Homo sapiens
ctctcctcctccgtgtgagtgtctggccctgccttcctgtgtgcggcatcgtcctgaggtcggtgggaattgctgcagtggatccgggctccccatgcgacctgggtggcctcagaggctgg

SEQ ID NO: 51043 - DNA, 122 bp, Homo sapiens
gttcaatatgatgccattaagaagcctctttacttcccactttcaggtgagcccgaaactcggcttagggaaggggatcccctctacgcatccagaagacataaaagcagccctttcctaag

SEQ ID NO: 51044 - DNA, 122 bp, Homo sapiens
gccccagacaagggggttggtcctgagggcagcccaggagcatgtgccagcacaaggccacgcctccgtggacaccgcagcatgccagcacaaggccacgcctccgtggacaccgcagcatg

SEQ ID NO: 51045 - DNA, 122 bp, Homo sapiens
cccgccccattccaacactcagaccacggtggtggcccttgaagctctgacccgcttccgcgaagctgtccccttcaagggcatccaggatctccacgtccagatcagagcccccaagacag

SEQ ID NO: 51046 - DNA, 122 bp, Homo sapiens
ggtggggccggggctcctggccagatggtggtcttggggagggtggcactgcattctacccgccgtcaagccggcaaggccacgactcatccgtgcgatgcttcgtcatcttagttcctccc

SEQ ID NO: 51047 - DNA, 122 bp, Homo sapiens
aagatgagtggctcccagacctttcagttatcaatctgtcacaagtgcacactggtatctcgtgacatgatgatccccgagatgtctgagatctgtgcatccttgaccgatcccaaatttct

SEQ ID NO: 51048 - DNA, 122 bp, Homo sapiens
gaccgccaccacggcaccagggcacaccaacaacacagacagaagcggcaatgcatctcacgtgccgcgtgggaacacagcattctaggtgtgcactgcggggaacaagttgtcactcagcc

SEQ ID NO: 51049 - DNA, 122 bp, Homo sapiens
agtgagccaccatgcccggccttaagtagatttttttttttttaaacccaccaaagataacgacatctgtacctgaggcaaatggtgaccagctgtaaccacaaatgagcctctacctcctg

SEQ ID NO: 51050 - DNA, 122 bp, Homo sapiens
tagctcaaagggttcattagcgttgtggggccctaaaggtagagagaatgcactgcagttcgattgttaacttccaaagcagcctgttggttggagccccacttagaggttgctgttttgct

SEQ ID NO: 51051 - DNA, 122 bp, Homo sapiens
ttgcacacacatacagagatttttccttcacaatgtgtctataatgggatccttgcaaagcgaaggaaccctgactgctgatcaaaggcagaaagacaggaggaagaacagtttgctcttca

SEQ ID NO: 51052 - DNA, 122 bp, Homo sapiens
gcaggcgcggaactcccacaacccgcgtagattccaagacaggaagcacaaacacgaccccgaaaacgcaccatgtcctctggccggaaaacgcaggctcgcgccactctctctgggcatgc

SEQ ID NO: 51053 - DNA, 122 bp, Homo sapiens
tatcctctaagaggacaaaacactagttatgcacacactgcagaaaacaaactcgcagaccgataacctaaatggttgaataagcatcaaactggtatctggaactccctagtgtgctcatc

SEQ ID NO: 51054 - DNA, 122 bp, Homo sapiens
cctatttcagtattaacacaagtttcaaataaagcacacttgccattggtaattctagagcgacaaggcgcataattaataaatccaaacggagcatctttctatagaatacaaagccatct

SEQ ID NO: 51055 - DNA, 122 bp, Homo sapiens
tgatgggggaccccgagggcgagcacgaggaccagaagcagatctcttctgtggcctgagcgcccatccccacccggccaggtaggaagggcggggagagcacacggcattgctcagccaca

SEQ ID NO: 51056 - DNA, 122 bp, Homo sapiens
tcgaacaccagcgcctcattataggtggggttcagcgtgttcttcttgatggaggttttccgcttcttcagacgccgcccctcgctgatcagggaggccttcacgtaggggtctgggaacag

SEQ ID NO: 51057 - DNA, 122 bp, Homo sapiens
cacttccgggtcgggcagcgggagccccgccttctctggggaccggagcgaacagaagtgcgcctgcgttgcgactccgctttcgcgggggctgctggggcgtaggtgtcggggacgcgcgc

SEQ ID NO: 51058 - DNA, 122 bp, Homo sapiens
atggtgcccagcccgggttcctccttgcaccaaaagcgaagcacatctgggggtttttcccggcgggacgcgccagctggagcgcggcggcgggaggcgcccagcgccaacacccagctcct

SEQ ID NO: 51059 - DNA, 122 bp, Homo sapiens
aaccaagcgggtcttacccccggtcctccgcgtctccagtcctcgcacctggaaccccaacgtccccgagagtccccgaatccccgctcccaggctacctaagaggatgagcggtgctccga

SEQ ID NO: 51060 - DNA, 122 bp, Homo sapiens
caagatggtggctgggccagcagcagggacccccgtgtccggcctcatgccctccggtcccgtccctgcgtggcgtcctgctgtgcgcccacagtgcgagtattccccagattgttcgggga

SEQ ID NO: 51061 - DNA, 122 bp, Homo sapiens
cacacgaaggtgagggcgagtggtgctgaaactcacagaagcaaccccggcccgtgtgcccgctcagacagtgctggtggtaaaccacacgcaccttccttcgcggatctccagagtcatcc

SEQ ID NO: 51062 - DNA, 122 bp, Homo sapiens
ctgccgctgcagcgctgctgctcaggtagctcagcagcaggaagggtagcgggcagcaggcgacagcggggtcctccaggagcgctgctgctcagctgtgggcgcactccgaagccggctcc

SEQ ID NO: 51063 - DNA, 122 bp, Homo sapiens
ctcagtttgcaatcaggtaacccgctactgacaacagaaccctcaaggcctgtttatatgcggttctcaggtttaggtctagggaagtttccaggaagcttagtgttcagggaggaattcgt

SEQ ID NO: 51064 - DNA, 122 bp, Homo sapiens
tggcggggcaggccccctgcccggcacagctgtgggagaccccacactggcttggggccccggaacctccagcatcgaccccctgtggggaattgggagagccagggtgagctggaggctgt

SEQ ID NO: 51065 - DNA, 122 bp, Homo sapiens
actgtcagggcagtgcgcctcaggctgtgcttgtctctgcagaaatgtcctggccccgtacgcggtgccctcggagctggtgctggtggaggagatcccgcggaaccagatgggcaagattg

SEQ ID NO: 51066 - DNA, 122 bp, Homo sapiens
ctgggggaagagtatgttccaggcagaggaacaaccagtgcaaagactgtgaggtgagagcgcacctgacaagagttcaggaacagcatgaaggctggagtccagtgaataagatccaggag

SEQ ID NO: 51067 - DNA, 122 bp, Homo sapiens
atttagtattcaaacttctaggaatttcaatgcagctcagtgtgaagaatcactaaaaagcgaccactagtcctcaacttgagggccattaaggggcaaagccgtctagccagtgaagagcc

SEQ ID NO: 51068 - DNA, 122 bp, Homo sapiens
cccgctcccgcgggaaacgcagggacgggaaccggagccagaaagcggccggagggcggccgcggggcccggtacccctgtgggtccagctcgcgggtggcggtgcccagcaaggagcctgc

SEQ ID NO: 51069 - DNA, 122 bp, Homo sapiens
gggcgcgcacctcggggcgatctcggtgctccttacctgggaggtctcccggcttagtttcggcctcgttgggtcggaatctccaaagacagtgggtttcagccagaaacgcgaagacgaac

SEQ ID NO: 51070 - DNA, 122 bp, Homo sapiens
tgggggcgggatggaggcggggcggggtgtacgaggggcgtgtacactggctcagggacacgcgctctcggccacagcaactggctccaagttccctccctcactctccggcgaagcctgcc

SEQ ID NO: 51071 - DNA, 122 bp, Homo sapiens
accagctggctggtgctcttgaagagtttatagatcctgatgaacttctgcccaggcctgcggtggcctcggcgttcctggctgccacgcctccaaggccactcggaggagctctcctcgct

SEQ ID NO: 51072 - DNA, 122 bp, Homo sapiens
taaacagtgaacacggacggatggggtgtgccgggagggccatcgtcgccgtctcctgaccgtcattcttccgcatggcttccggcagcctgttcatggataatgactgcatgagcgcaggt

SEQ ID NO: 51073 - DNA, 122 bp, Homo sapiens
tttgttttcttcctttttctaagctgctgagctgtccctggaattgtgcaagaggtcacacggagggactgtcaacagctccctaacgtaggttcctaccccagaaagggggtccaggtttt

SEQ ID NO: 51074 - DNA, 122 bp, Homo sapiens
catggtcgcggctggagggagacacggggcagcggcgcacaatggacgggttataaactgcgcggggggaggggagcggagacgagccacccggcctccacttcctcctctgccctccccaa

SEQ ID NO: 51075 - DNA, 122 bp, Homo sapiens
ccctggcggccaggccgggctggagccacatgcgtcgggggagcgggggtcagtcccagccgttgtctttgatcatgtggttgagttcaatgatgtacttcccctctttgtacttctggctg

SEQ ID NO: 51076 - DNA, 122 bp, Homo sapiens
tcacagcgccctctgctagccggacgaggagaggcgggcgacttggtgtgggaccagctgcgcaagcgcactactgctgtaaacgcttcctgaagctgcgtagcctttaaggagcgtgagtg

SEQ ID NO: 51077 - DNA, 122 bp, Homo sapiens
gcacaaggatgaacagctgcggatactcggctttggtgccaggaagaccgcggggcgtggcggggaccgggccctgcgaatggagcagctgagactcagctccgcggaatgacacaagcctg

SEQ ID NO: 51078 - DNA, 122 bp, Homo sapiens
gtggacccactcatgagcctggattagccagttttaatatattcagagagtagagccaaccgattaggagaattaaatcatctgtattcaattgacctgctaggctcaaatggtacctagac

SEQ ID NO: 51079 - DNA, 122 bp, Homo sapiens
cgcggtagaactgctgggctcgcagggcatcctccagtcgcttccctcgaagttccagctcgtggcccaggcgtttccacatttcctgcagctcagccagctctggacctgctgctgctgca

SEQ ID NO: 51080 - DNA, 122 bp, Homo sapiens
ggcacatggtctggtgcgcacacatactcaacaaatgctttgagcaccaaatgacatcaccggtcagcgaccctcagcttagcacaagtttgtggtcgtggccaggcagtgaatgaaccagg

SEQ ID NO: 51081 - DNA, 122 bp, Homo sapiens
gtttcctagcttttaggtggtaaaagtgcctggcagcttggctgccgtggaggagtcagtcgtggttggaggttcattgccgtgctttcatgcagagtgttttgccttcatgttagcttccg

SEQ ID NO: 51082 - DNA, 122 bp, Homo sapiens
gttgctgtaggtgggggctggccgatccacagggggggcgaagcgttcaggggctgtccgcgtgggggccacctcgggggcctggccagggcctagtccctgcaacagaatacgaggacagg

SEQ ID NO: 51083 - DNA, 122 bp, Homo sapiens
ggtggctatgtgagatggccttcagcggtctttccagctccacggttttacagtgtggagcggggaaagaaaaactctaaggtcctcgctgcaaagcaaccatcagagctccgccgcgccgt

SEQ ID NO: 51084 - DNA, 122 bp, Homo sapiens
cggcctgcccggccctagctctcttccaggtggaggctgatgaactcctggatacacctgcggaactggagctccgtggggctgcccgccagggcgcccgggggaccaggggcagcctcggc

SEQ ID NO: 51085 - DNA, 122 bp, Homo sapiens
tcgctgcgcgcacaccaggagacaaagttgccatctgctccggggaccaaggcaactgggcgctgggaggggccttcctcccgcggctcccgctgccccgggcggcctcctcttcccggcct

SEQ ID NO: 51086 - DNA, 122 bp, Homo sapiens
ccgcagcaccctgactgcaggtgccaagtcacaactgcaaagaaacttccttttctcgagcgggggtgggacttggccgggtcccgaggcccctggccggcgggctcggacgttaggagcag

SEQ ID NO: 51087 - DNA, 122 bp, Homo sapiens
ggaggagggcggggctaaaagggagatgctgcctagtgattcgttgtggcgcattagtaacgcgactacagggggctggaaacagttcagtctttgattggttgctgagaggcggggctact

SEQ ID NO: 51088 - DNA, 122 bp, Homo sapiens
aaacacagcaactgagacaagggggtccagacagaaaatttgagatttttaaaaaatacgcgatagaatgaaaagagacctgggctgaatcagggagaaaaatctttgtccaggttctataa

SEQ ID NO: 51089 - DNA, 122 bp, Homo sapiens
ggctttaaaagggcctctccctctgtccgaaggactgggatttataaatactaaagctgccggccattgtgattgcttttactttgggactgtttataaaagtgagggagtctgtggccttt

SEQ ID NO: 51090 - DNA, 122 bp, Homo sapiens
ccgcgcgggcgccggagaggaaggaaggctggcagcctcgtcacgtgtccgctgcagtcgcgaaacaggtctgatcaatttctgtttacgtctgcctggattgcgcgcctatcgatcataga

SEQ ID NO: 51091 - DNA, 122 bp, Homo sapiens
cgccttccagtccgctggcagcccggtgccgagccccgtgcgaacgctgcgccgggtctccgtttccccaggccaagccagccccttggtcacccccgaggagagcaggtgaggaagggccc

SEQ ID NO: 51092 - DNA, 122 bp, Homo sapiens
agctctcatttgatgcacttttcctccaaatctaccctgactctaaagatgcaacttaatcgtcatcttccccagtaccctttgcaatttaaactctactggaaaggggctctattccctat

SEQ ID NO: 51093 - DNA, 122 bp, Homo sapiens
ggaagaaacaggaaaagtggcatttgtggagagtgtagcattgaattgtatctagattatcgggacttgaaagaaaaacagcttgtttgagtatttttattgtaaaagagataaacagttga

SEQ ID NO: 51094 - DNA, 122 bp, Homo sapiens
ctcagtgttggttataattcattgggacagagaacattcctaggccatgaggtcagcaagcggcagggaagaactggaacatgaaccgggctattctaactccaggacccacactttaaatt

SEQ ID NO: 51095 - DNA, 122 bp, Homo sapiens
cctggcggctgggcggcagccaggagccctgcctccgcccctagcagccgcagagacctccgccccgccccgaaatcgcatcctagagtgacaggatctgaaccacctccaaaggccgtttg

SEQ ID NO: 51096 - DNA, 122 bp, Homo sapiens
aagacagtttacgtaacactaccattttaagttgagttacttcctatcgcgggactactccgttgtggtagaaataacggaatgtcagggagctggtacttttggccatcacggcaacagtt

SEQ ID NO: 51097 - DNA, 122 bp, Homo sapiens
cctcgagcggagcttcactcccagggctgcagccctgcgcacaggggatgcctgggaggccgccgcggagcaggtgccgaagggggctgtcccgcaaacgtcggagcgaccccagctcagag

SEQ ID NO: 51098 - DNA, 122 bp, Homo sapiens
gttgttgacactcgaacgggggcggggcgggtctggccctcctccgggcctctgcccctgcgggtccccgcttgggtacccttgctccggtccctccttggtgaagttgatctgatgataag

SEQ ID NO: 51099 - DNA, 122 bp, Homo sapiens
ttacagagtggacatagtagccagtagaccggtgcaggtggcagcagtggcactaacagtcgtggccagagacatgactgtgactcacatagcagtagtgggagcagaagaccagagaaaaa

SEQ ID NO: 51100 - DNA, 122 bp, Homo sapiens
cccctactgcatagtcataaggcgggaggctctgccttcggggcggggcagacagctcctcgcgctcgggcgcggccggttgggggcacggcctagctccgggtgcgggcggggctggaggc

SEQ ID NO: 51101 - DNA, 122 bp, Homo sapiens
catcatcatccagcatgtccctcgtgctgctgtacttggcctgcatctggattcctacagcggtgagagtgaaatgtggtcggattgccctgggccgccgggctactgtgagctagttcagg

SEQ ID NO: 51102 - DNA, 122 bp, Homo sapiens
acaccttgagctggccaggagctaccagcgtctgtctacacctgggtgagccgtactggtcgtagtggccccaccctacaaggatgcccttcctacagtattactgatggctgtctaatccg

SEQ ID NO: 51103 - DNA, 122 bp, Homo sapiens
agaaacaccgggcacgcgcccgccttagagccaccgggcatgcgcccgcctcagaaacaccgggcacgcgtctaccttagaaccaccaggcacgcggctgcctcagcaccaccagccatgct

SEQ ID NO: 51104 - DNA, 122 bp, Homo sapiens
tccaagccactgggaaaggggaaactggtgactgagcggcgcccgtcagagccattaaaacgtgagggaaaactgcaccttacggcacacgaacccttagaagaggcaaaacactactgagt

SEQ ID NO: 51105 - DNA, 122 bp, Homo sapiens
cagccaccacgccacagatggcgcccttcaacagtgtgtaataccacaacatgctgtaatcgtttactctttacaaatttctttttcacgtactcacaaaatagtacaaattaaaaaaagtt

SEQ ID NO: 51106 - DNA, 122 bp, Homo sapiens
taagagtaagatgatatctctctctgaatgcaagatacaatttttttccattgcaattggcgtaaccacagaatgttttctcttggcaacaatggcatatgatcgctatgtagccatatgca

SEQ ID NO: 51107 - DNA, 122 bp, Homo sapiens
aggtgcccctcaggctctgtagggtcttggaggaagggcccgggcagcatgagggagcggcgcgtcctgggacctgcctccagccctgggcttggggccgtggtcactcacacaagggagca

SEQ ID NO: 51108 - DNA, 122 bp, Homo sapiens
aggcacagtgcctgacatggagtggcatccattaacattgactatgagattggccggccgcggtggctcacgtctgtaatctcagcactttgggaggctgaggtgggcagatcatttgaggc

SEQ ID NO: 51109 - DNA, 122 bp, Homo sapiens
tcggattttaaatcgtgagaaaatttctctgaaatgtattgtccgtttttaggctgtaatcggcattactgtcagccagtcagcaaccttatgccataaagcctacctcacgcagtgtcagc

SEQ ID NO: 51110 - DNA, 122 bp, Homo sapiens
ctatcaaagaaaatgttgatctaaatctatttagaagcattctggcacttgaatttgatacgctatttgggtaataaagagattgtgctgcctactccctagtgccagaatgagcagtttgg

SEQ ID NO: 51111 - DNA, 122 bp, Homo sapiens
aggcgctggtagaggacggacacagaggctgcttggacgtcaaactctgcaaccaaagggcgccgtcgccacctccgcgggccgcccgcaggccaagccccagctgcggacaccactgcttc

SEQ ID NO: 51112 - DNA, 122 bp, Homo sapiens
ggtgggtctgagtaccagccccaaaggaaggaggtgggcgggagggagcggaggagcagccgggcaagcggtcagcggtcaccaccgctctcctggctccactgcctcctctcgctgccgcc

SEQ ID NO: 51113 - DNA, 122 bp, Homo sapiens
cctggccgcgcgggcatcaaggaggaggcgcccttcagcctgctgttcctgagcagggagcggggtaagtgtcccagcactgtgtgtggtgtctgtggcaagccttttgcttgcaagagcgc

SEQ ID NO: 51114 - DNA, 122 bp, Homo sapiens
atgaaggaactgttaatattggggcagatgtttcaagtatggcagacaaaggatgttctgcgtggggaaatgtggtgacacccatttcacaaggacagctcacatagattgagtgctcagga

SEQ ID NO: 51115 - DNA, 122 bp, Homo sapiens
ccctccaccccttgaagtgtcaacgtgcgtgtgtgcagtgtttgtgcatgtgagcatgcacgtgtatgtgggtgaacacatgtgtgcatgcgtttgtcactgctctggctaggcccagctgc

SEQ ID NO: 51116 - DNA, 122 bp, Homo sapiens
gagcatgctgtgcaggaacaacagtgaagcatttggccttggtatttttattttagtatgcgtacttgcgaaggacaaaagaaaggtcggaaagcaaacaatgcaggaagcagttgaaaaaa

SEQ ID NO: 51117 - DNA, 122 bp, Homo sapiens
ggtggcagtagagagccgttcactgcccagtccgctgacgtcaccttgtttacccggctccgggtcatttttagatctaagatcacaggatgttaattgggccaatgatttcccattcattt

SEQ ID NO: 51118 - DNA, 122 bp, Homo sapiens
gcacacatcccaacagctttagaagctgccagctgtggatttcttccaagaaactttcttcgctgtggaggcagctgtacagaccaggtgaaggcacctgtcccctttggagtctggaacca

SEQ ID NO: 51119 - DNA, 122 bp, Homo sapiens
ttttttttttttttaagtctttttatcaagaaaaagaggaattacactgagaaaacataacgtgggcctccagcaactctcacagcatagagcttgctgcctgagtggtgcttaaaggaaaa

SEQ ID NO: 51120 - DNA, 122 bp, Homo sapiens
ccccgttaagtctgaaacattattgacaccccacatcacttactctgtttaaagactttacgagtagtgagtcacatgtttaggatgatcactttgggaaaaaaaaaattatagagtaaagg

SEQ ID NO: 51121 - DNA, 122 bp, Homo sapiens
tcttctctgtctctttatactatggaccccttctcttcatttatgtgggccctgcatctccgcaagcagatgatcaagatatggtggagcctctattctacactgtcatcattcctttgtta

SEQ ID NO: 51122 - DNA, 122 bp, Homo sapiens
gtgtctcctccgcaggcggagaggcgcccgcagcccgtccgggacactttccagaagccgcgggactatttcgccgaaggtatgtgcccgctgggacagccccccactctcgattcccgctg

SEQ ID NO: 51123 - DNA, 122 bp, Homo sapiens
ccgccgaccaaaggtttgccagtgggaccggcccggagacaatagctgcccccgcgggcgcgctgtcggcttgtttggaaagcccagaggcgcttcgaggtaaaaaggtcagcccgggatcc

SEQ ID NO: 51124 - DNA, 122 bp, Homo sapiens
tgtattgtttgacttagccctcaccccctgaatgtaatattagcgggcactgtagcccagcggaacccaccaggcacttggtaagatcttgctgaaatgtatgaatgattggaagtgtgtcc

SEQ ID NO: 51125 - DNA, 122 bp, Homo sapiens
aatctcccctggaggagggctaagaaatgcacctccagagggtctgtttgccattggaaccgcgtagagaaagcgtgcaaacccgtcaactgctcccgccgttcctctccctcctcaaccca

SEQ ID NO: 51126 - DNA, 122 bp, Homo sapiens
attaaagtaaaggagactttgaggacattttggttaattttatagcatagacaagggaagcgaggcttaaagaactgcagataattgtttctgtttacacaactagttactggaagaatcaa

SEQ ID NO: 51127 - DNA, 122 bp, Homo sapiens
tgaaatcatactagagatgtgaatataccaacaaatagagacacgccggcagtactaccacgtcaacttaagcagctgtgtccatagtggcctctgagatgctgctcggggtctgaggtcta

SEQ ID NO: 51128 - DNA, 122 bp, Homo sapiens
aaattttgctatgttttgtttctttaagggcaagagaaaggggaagttcagagaggaggccgtggctcctctcgagagaatgttaggcaggaatttattaatgttgtcaggcatcctgaacc

SEQ ID NO: 51129 - DNA, 122 bp, Homo sapiens
ctcctgccccggagccgggccctggcgaggcaggaatggccccgaggcctccgaccgccgcgccccaggtgagcaacgcgttcctaacctcctgggcatcccatccatctatccatcccatc

SEQ ID NO: 51130 - DNA, 122 bp, Homo sapiens
gctcgctgcctcccccacctgggagggaagcgcctggattttgggtcccgccgccctccgcgccctgggcctccacctgtgttcccaaagcccagccacgagtctgggggtgccgggcgtgc

SEQ ID NO: 51131 - DNA, 122 bp, Homo sapiens
ctctaagctggacacagagttgctcctccgctggacacagaagagcctgaaatgacctgacgccacctcagcatgctttatatatgaggttatgcaaatgcagttcctggactacatgttct

SEQ ID NO: 51132 - DNA, 122 bp, Homo sapiens
atacacacagagagagacacataccccagacaaggaatcctccctgattctcaacaccctcggcaaagctgggtaagtgcatcatggtagatgctcaaggagtgtttgctaaatgagctaga

SEQ ID NO: 51133 - DNA, 122 bp, Homo sapiens
gtgattgttagattcaaatccaagagtcatcatttttctttttttgaggagtctctctgtcgcccaggctagagtgcaatggcacgatctcggctcactgcaacctccgcctcccaagttca

SEQ ID NO: 51134 - DNA, 122 bp, Homo sapiens
accccgttcccacaggctgggccccctgcaacgacccagcggggggtttcaaccttgttgcgactccacatgggacatcctaattcagtccaggacagatatttttaatcaattactataga

SEQ ID NO: 51135 - DNA, 122 bp, Homo sapiens
cagaggaggaccacctgtggtcacagccatcgtcacgaccccctgccgcgcccacgcacgcgtggatggggccaggctctgggtgccacctgggaggagcatccattcataatccggatctg

SEQ ID NO: 51136 - DNA, 122 bp, Homo sapiens
tgaatgtgtttcccatagggcaggtggaaaaactaaagcatgactttaactttggaactccgaaaaagtcaataaaaagacaagccagtaaacaaaggggtgagggtgcagaagactttaac

SEQ ID NO: 51137 - DNA, 122 bp, Homo sapiens
gtgcccggtccccctactccgtggttcccccgtgggactcgcattccttcatttttatcccgcgttgcacgttcctccaagtcctgttgtttcctcggggccatttttaactttctgaaaag

SEQ ID NO: 51138 - DNA, 122 bp, Homo sapiens
gaggcctgtccctttaaggaggcggccctggctgggtgtgccccgtctccatggttaccccggtgcaggcggcgggcgcgggagggagggagggaggctgcagcttctccccgacagacgga

SEQ ID NO: 51139 - DNA, 122 bp, Homo sapiens
gccgcggcggcgcgaggggcgggctttcaggctcccggcggctgcttgcgccccagcgcgcgcccaggcgccttggaatccccgtccttgggcccccgcaaggtccccggccgtgcgcgagg

SEQ ID NO: 51140 - DNA, 122 bp, Homo sapiens
aggaacagaagccaagtcggcttccttaggagctgctcgccctgagtctccatgtttcctcgcagtccggggcagaacccaagcccgtgccttcctcgccctgccttcggagtttcctgcta

SEQ ID NO: 51141 - DNA, 122 bp, Homo sapiens
caggaactcagcttggttaagcatttttaaatcatagcaagcaaaatcacatctgatgaccgagcgttattattatgaccctccattactatgaagtttttttcaagacttatgtatcttct

SEQ ID NO: 51142 - DNA, 122 bp, Homo sapiens
cctgcgcctgggcagggagcagcggcgctactcactgtgggactgcctctggatcctggccgccgtggccgtgtacttcgcggacgtgggcacagacgtctggctcgccgtggactactacc

SEQ ID NO: 51143 - DNA, 122 bp, Homo sapiens
cagagttccgccgcctgggacgccgggcccacgggccacaccaggccgcagcgggggcgccggggacagggctggcccaggccctcccaggacctgccggtctcacctagcgcttgcttccc

SEQ ID NO: 51144 - DNA, 122 bp, Homo sapiens
atgtgcaagccctcttctcttgcatttcctccagcccgtcaccaagtactcttccaggcacgccaggcccgagtgtcctaggataggaaacctgagcaacaaagggaagtggggtgtaagct

SEQ ID NO: 51145 - DNA, 122 bp, Homo sapiens
ggagctccggtccttactcggaaccgtggggcggggagacagtgactgaggcgctccagtcgcaccggggtccggatcatcagacgcgcgccggccaggtctccgcccctccttcttccgcg

SEQ ID NO: 51146 - DNA, 122 bp, Homo sapiens
ggggctgcagccggcacacccagtggtggagggccggcgctgccactcacggtgggtggccgtgggccaccttccctgcaatgggtgcacacgcggctcccatccagccctctcagcgtggg

SEQ ID NO: 51147 - DNA, 122 bp, Homo sapiens
aaagagggcaacattggcgactgcggctcggaggggctggagcgcgtgaagccgtgggggcgccgtgcgcctcccgctctctcgtttcggccgcaggtcctgggactccgacttcggtgctc

SEQ ID NO: 51148 - DNA, 122 bp, Homo sapiens
cctctcctctccccttgctcgcgcgttccctctcttcctccgttttctggtgtgctggaacgttcagcggaatatgatgaatgatcacctgtcacagcttgtttattataatgcaggcaatc

SEQ ID NO: 51149 - DNA, 122 bp, Homo sapiens
atttcgtcatgaaaggagcatataatgcagttatttagggaataactcccaaaaatatctcgcttggtggaaaaactgcggaaaaccgacggaggacataatttccagccgacctaaacgaa

SEQ ID NO: 51150 - DNA, 122 bp, Homo sapiens
tggggacgcggcgcggggagtgaggcagtggcggcggcggcggtaagcggaacttcggcccgaggggctcgcccgctcccgcctctgtcttgtcggcctccacctgcagccccgcggccccc

SEQ ID NO: 51151 - DNA, 122 bp, Homo sapiens
aaaagcaggtttgggggttagacggtgagttcagctttgaacgatgttgagtgggcgtctcgttttacagaaacttacttcccgacgtcacagccacagaaaccacaggtaaccagacgcct

SEQ ID NO: 51152 - DNA, 122 bp, Homo sapiens
ctgggggaggggttgggctttccgaaccactaggagggcggcccaggaagggcccgagggcggagggggagcagacagggggcccgaggggacgcacgtgtacctggagggctttccttctg

SEQ ID NO: 51153 - DNA, 122 bp, Homo sapiens
ccagcgcgtggtgggggaactgctggggaaggcgattggcatcgatctctccatcccttccgaggcccgacttcggtcagttttcttcgggcaacaattttctaaattggctggggtctggc

SEQ ID NO: 51154 - DNA, 122 bp, Homo sapiens
ataaaacaaagccagtgtttggactcccccaactcctgccattctttcttgagagagtctcgctgtgtcccccaggctggagtgcagtggcacgatctcagctcactgcaacctctgcctcc

SEQ ID NO: 51155 - DNA, 122 bp, Homo sapiens
ccccggcgcgcgcaggcggtggaaggaggcagcgaaagttgggcaggaaacttttggccccgcccctccgccccgcccactgcgtcccgccccgcccggcgatccgctatctgcctcgcggc

SEQ ID NO: 51156 - DNA, 122 bp, Homo sapiens
gcaaggggctgccgtgtcctggtctggaggcggcccaggctgccttggtgattctggcttcgcggcctcatggcttgcggccggtttgcgcaacggcctgcgaaccaccaggcgcgtccccg

SEQ ID NO: 51157 - DNA, 122 bp, Homo sapiens
gtgggccacatcttcgagtagggcgcctgggtccccagggctccttgaggaccgtggcatcgatttccttctttaggattggggatggagatgggaactctgggagctggtgaggaggaagg

SEQ ID NO: 51158 - DNA, 122 bp, Homo sapiens
gaaaaaaaaaaacagctgaggacgctgggatgatcccctaaagtgattagcaggggccctcgcggagcaagtcgggctagggattgttccttccctcaccgaggggctctttatctgtttaa

SEQ ID NO: 51159 - DNA, 122 bp, Homo sapiens
aggctcagaactcagatccttgtacgaaacgtcctgattttggcaggacacaatggctcacgcctgtaatcccagcactttgggaggcggaggcaggtggatcacctgaggtctggagttta

SEQ ID NO: 51160 - DNA, 122 bp, Homo sapiens
gagctcacagcccggtgtccagagtgaggcggggctgatgggggtcgcggaagctgccgtcgcttgtgtccagaacccgtcttaaaagaacccgggccagcatccccagtcgcgcgccctcg

SEQ ID NO: 51161 - DNA, 122 bp, Homo sapiens
agctgtacacatgttagactgaaagagtttacaggtaaatgtggcccaaggccactgccacgtcattcgttggccggaacacttgcagtggtaaagtgagacggagaagctatttaattctt

SEQ ID NO: 51162 - DNA, 122 bp, Homo sapiens
atcctaaccggctccctggatataagagcctcgggcgtaaagcgcgggctgggaggcagacgggttctgcgcctcgaggctcccggatggcctcggctcccgggagggccggggccccgccg

SEQ ID NO: 51163 - DNA, 122 bp, Homo sapiens
ttgatcctatgaatttataggctgggtctacaatcttttttttttcttttttttttgagacggagtacacaatcttaaaggggagggaaagacagcctgagagaagaaaatcagggaaataa

SEQ ID NO: 51164 - DNA, 122 bp, Homo sapiens
cggtggcgtccagtctgttggaggctttgtgcccacccggctctctcagtgtagtgggaccggctttttctcacctctggacttttgcacatgctgttcccatcagcttgatgctcttcctg

SEQ ID NO: 51165 - DNA, 122 bp, Homo sapiens
gaggtgtctggttccccccagaaggcgagtgggttataaatagcggatgacgggctgtagcgagagctgcctctagcgtaatcgtcgatttcgggagcggcccggctagggctgggagggcc

SEQ ID NO: 51166 - DNA, 122 bp, Homo sapiens
ctccccagtctaaacaaatccactcagacagaaacaatggggtctctttgtttgggtgttcggcggctgaaagcgttgagccatatacatctgctcggcccgactcataagtagctgacccc

SEQ ID NO: 51167 - DNA, 122 bp, Homo sapiens
gtgtccacccacactgagggctgctgttgcccactcagctcaccaacttacatgactctccggaaacaccttcacagactcacccagaaatcatgctttaccaattctccatgtattattta

SEQ ID NO: 51168 - DNA, 122 bp, Homo sapiens
agcggaagtggaacggcggcgggggtagaaccaggaagtcttgtcaatgggcagggcttgcgatcttcgcatgtgtcttatcgtaaagaattgttaaaatttaggatagggaaaaaactatt

SEQ ID NO: 51169 - DNA, 122 bp, Homo sapiens
agagatataaatttaggatttgtcagcatgtggatcggaattggcgcattacatagagaacgaatatgctacagaataaaaacaattaaaaataccagccgggcgcagtggcttacacctgt

SEQ ID NO: 51170 - DNA, 122 bp, Homo sapiens
aggcattctagtattaaagctatgttgactaatttccatctattcctcttccttaaagctcgaattccccagtcttctatgataccatgtttgcacattttgctctttcctcaccctcctcc

SEQ ID NO: 51171 - DNA, 122 bp, Homo sapiens
tcttgtctcttttggtaattgtatggcatttagtgttctaatttataaaattgtaactcacggttaatacttacaaacttgttttgaggcacaaatgtgatgaggcatgaggaaataattat

SEQ ID NO: 51172 - DNA, 122 bp, Homo sapiens
cagggcgctccccattcccgtcgggagcccgccgattggctgggtgtgggcgcacgtgaccgacatgtggctgtattggtgcagcccgccagggtgtcactggagacagaatggaggtgctg

SEQ ID NO: 51173 - DNA, 122 bp, Homo sapiens
ctgagcttttcagaacacaggaaacgtggggctagatgtaggttttcagtctccaaaagccgggtcttgtttttatgtctctttggagtccacatgtgatttaaatggatttgtctccagat

SEQ ID NO: 51174 - DNA, 122 bp, Homo sapiens
ggtcgcaagctgcctggtagagagacggcccgtggtttgtaccagaccggagggctcttccgaagagagggaagggtgatcccagcccggccacatcgccgtgtgacaaggacatgtgagaa

SEQ ID NO: 51175 - DNA, 122 bp, Homo sapiens
aagctgtgtctcgctatttttaccacattttaaagtaagctctgtctgcatgcaaccaaccgcaaccaagaaaacagaagtgtcctaaaatgtacctattcgccgcaataaagccaaaaaat

SEQ ID NO: 51176 - DNA, 122 bp, Homo sapiens
ccagattcattaggtttttcagtgtgccgctcaagtcagttaaattgatacatttcctaacgaaattgaagtgctttgtgctgccagtggaaagccgggtgacccgcctcggcccgctgagc

SEQ ID NO: 51177 - DNA, 122 bp, Homo sapiens
atacaaaatagcattctttcaaaaataggacccagaaaacatcacagagagtgggaccatcggataggatctgggagactttctttccgattgggaccagggagcgctggtactcgtgggga

SEQ ID NO: 51178 - DNA, 122 bp, Homo sapiens
gaggtttgctggcgtggctcttcctttgaccccgccacggagtgggggcgcggttgggggcgggtgtctgccattgcccgctagcgttggcgccccaagctcggtttcactccctccggaag

SEQ ID NO: 51179 - DNA, 122 bp, Homo sapiens
gaccagcctggccaacatggccaaaccccgtctctactaaaactagaaaaattagctgggcgtggtggtgtgcatctgtaatcccagctacttgggaggctgaggcaagagaaccctttgaa

SEQ ID NO: 51180 - DNA, 122 bp, Homo sapiens
tcactccacgcggtgggaaaggttgactttgacagaggtcgtgagcagttgcggggtcggcggcaagttagcagaaaacttaaaatggagcagaaaggaagcagaaaatattccttagaaac

SEQ ID NO: 51181 - DNA, 122 bp, Homo sapiens
gccccagtggtgagatttagcagcttgggtttcccaggcttcaatattggtgcgcatttgcggggcttccagcaaaggaaaaggctcagtcctggggctgctgtttcttgtaaacaccatgt

SEQ ID NO: 51182 - DNA, 122 bp, Homo sapiens
ccgagcgctgcgccatggtgcgccccgccccttccgcgggtccccgtttacaccgggcagcgccctgctggctcagcgccgccccggacaaaagatttgctgggccggccccggagcgttag

SEQ ID NO: 51183 - DNA, 122 bp, Homo sapiens
atgacctcccggtcccgcttcaccgccatcccgggtaagcgccactctgcccatttcacccggtgcccatcaaagccccagcgtccgtcattcctggaataagaagcagagctcggtcagct

SEQ ID NO: 51184 - DNA, 122 bp, Homo sapiens
cgaacgggctccaaaggggaggtcccgcggtgcccaccgcgcagagctcagggggtggtgcgcccggcccttctgcggcgcacagcccagcccaggaacgcgggcggtgcggactcagcggg

SEQ ID NO: 51185 - DNA, 122 bp, Homo sapiens
aacacctaatgggttgcaagtcttcgtgttctttgatcacattgactgagagttggcgggcgtatgctcattacttgtgtgctccttgcttcggcgtttcactgatttttgagttggagtat

SEQ ID NO: 51186 - DNA, 122 bp, Homo sapiens
agaaagtgtatctaagcttttgggctgtagcgggtaggaagaaaggtctcttttaagaaccggaacgaaccctgggcctgcaacccacatagatttgggcttcaaaattatactttcaatta

SEQ ID NO: 51187 - DNA, 122 bp, Homo sapiens
agggagacatgagacatcaatcaatatatgtaagatgaacattggtttggtccggaagggcgggacaactcaaagcaaaggcaggagggagcttccaggtcataggtaaatatgagacaaat

SEQ ID NO: 51188 - DNA, 122 bp, Homo sapiens
gccccagagcatagtttaaataaagaagcactttgaggatgccccctgctcgggctcccccgcaccctggctcagtgttggtgtctatggctagcactgtgcttgtgtatgttccagtcatc

SEQ ID NO: 51189 - DNA, 122 bp, Homo sapiens
tgctgaaatccaacactggggagatgtcgtgaagcttttttaactccatcaggcggccgtcgcgcttcccttcacgctttccttcacccctccacggacatctggccctcatcccatccatg

SEQ ID NO: 51190 - DNA, 122 bp, Homo sapiens
ctgtacacacgaatgcacacagcacacagatacacagtacacatgaatgcacacaccactcgtgcacacacacacacggcacacaccacccacggacacatacacagcacgcacaggtcaca

SEQ ID NO: 51191 - DNA, 122 bp, Homo sapiens
ctgctgctctcgggctctagccccacttcttgtttgaacacatggctcaaggtttccctacgggtggaaaagatgaagaggacactggaggttaagaacccagcaggccgagcagtggcagc

SEQ ID NO: 51192 - DNA, 122 bp, Homo sapiens
ccagggagtcggtggcacagctaaaccagaggttctcgaagatggtgttggtggtgatgacgttcccgtgcacagtggacactcgccagtagctgtttggcagagtcacccccagcatcagc

SEQ ID NO: 51193 - DNA, 122 bp, Homo sapiens
agtatttacaggaaagtcgtgattcatcattttcattgataaaaagaattagtcctaggccgtaggtgctacgatttaagataagagcaagctagactagagatctaaatagagatctttga

SEQ ID NO: 51194 - DNA, 122 bp, Homo sapiens
tctgtgctttttgacgcgagaaaataggtagtagacgggctaggaagtgggttggtgttacgattgggccagtgactcattagagggtcagatcgaacagggttgaagctccgttctgccag

SEQ ID NO: 51195 - DNA, 122 bp, Homo sapiens
agcctggtggaagatgttggcaccatttcgtttggaggaggctgaatgactcataagccccggggggctctgatgtcattgaattaggggcctcctttgaccagggttaaccagcaccttgg

SEQ ID NO: 51196 - DNA, 122 bp, Homo sapiens
accttcagcaccaaggccagcgcacctggctccacgaggctcccagaaccttcgccattccgggactctcatgcccagaactgcaataaaaaatgttatttctcaatgaaattcaccttcct

SEQ ID NO: 51197 - DNA, 122 bp, Homo sapiens
ggcagcgcgagccccgggcgccccctgcaggttgtacgggcctcagctgcgcagcgcagacggaggagggcgctggcggttaagaactcctacttgtcaaccggaaaaacatcccccataaa

SEQ ID NO: 51198 - DNA, 122 bp, Homo sapiens
acaaggttacgagtgggtgcggggaagcctccctaacctgggggccgcgtcccagagctgcgagccacgcctcctctctcccgcccgccgcgccgccggactcttattttgaagggcggcgg

SEQ ID NO: 51199 - DNA, 122 bp, Homo sapiens
gcatcatggccgagtgcctaggcctgactctgagcgcaggcctagcgtggatggcatgggcgctacacagctccaagttacgcgattcaaactcttggaataaacccagggcagccctgggg

SEQ ID NO: 51200 - DNA, 122 bp, Homo sapiens
gcccggcccggctccggccgctgccgccgtcgctgaactttccctcctgcgcggccgccgcggactcggctccacctcccgctccggcagccgcggagcctccagggaccccgggggcgggg

SEQ ID NO: 51201 - DNA, 122 bp, Homo sapiens
tcaggaagacagtcttcccttgttgtttaatcacgcggggacacctgcctgaatattcaccgacgtttcagaggtgtctgaccacgcggggacgcctgccttggtccttcacccttagtggc

SEQ ID NO: 51202 - DNA, 122 bp, Homo sapiens
acgtcagactgcctgcctcggctctccccgtggccgcgcggggacagcttggtgggtgcccggtggcccacctgtctctggtgctgccatctgtcctgggtgtgccttcgccccagtgcctg

SEQ ID NO: 51203 - DNA, 122 bp, Homo sapiens
aggaaagccagtttcaagccaaacataacatgtcaatcacccgattctgggcggctgagtcgggaggtgacgggcatgggtgtagagcctgatgggacccattctgtgtcagtttctatgtc

SEQ ID NO: 51204 - DNA, 122 bp, Homo sapiens
tgggctgagcatggtcagcagctgcagggggatgatggagcccaggccggcccgcacggccgtcacgcactccacattctgcagctcccgcagccgcaggctccggatggctgccgcgtaga

SEQ ID NO: 51205 - DNA, 122 bp, Homo sapiens
tggatcgcgggaaccccacagctcgctaagttcagaaaagggcaccaccccgccccctgccgccctaagcatcgattgtattgtggtttaaaacaagaaaaaggaggccgggggcggtggct

SEQ ID NO: 51206 - DNA, 122 bp, Homo sapiens
gttcagaaagccgtggcttctgttaaatctaattacttcccccctgtggctttaaatcgacggcggctcctattaaacttaattaccctcccctgcagctttcgttttaaagatccgtggta

SEQ ID NO: 51207 - DNA, 122 bp, Homo sapiens
ctaaagagcgtttccattcgtggtcctggtgattccaccatcttttcttcacaacagtgacggttctggaatttctacacagcctgaggggctgacggggtagaccaggtgactgggaaggg

SEQ ID NO: 51208 - DNA, 122 bp, Homo sapiens
gggcggaaccagggccttcaaccctgtctgagcccacagaggtaatccttagtcaccaagcgccgctgtgtaagggacaaagaccgcacaaacggccggagaagacgcgagagatgtggccc

SEQ ID NO: 51209 - DNA, 122 bp, Homo sapiens
aggctggaataatcctgcgggtgaattgcaaattgctaagtatatttggtgagtgcaaaccgcaggaaactgacgacccggtttttctgaggggtggtgcggcagcaagacagtaggagaaa

SEQ ID NO: 51210 - DNA, 122 bp, Homo sapiens
ggggtggctgcgaggctcgcaccggcgagggcagtgtgggggcgagggagccagcgagagcgaggagctgtggggagtcggcagcaaacagccagcaggctgccactttgctttctttttct

SEQ ID NO: 51211 - DNA, 122 bp, Homo sapiens
gcccggccgcctcgctcacccacacgaagaggctgtctgagagcaggtactgggccacatcgcgggcccggggtcccccggcgctcggccgggcgggcgccggcggctcaggctgcagcgag

SEQ ID NO: 51212 - DNA, 122 bp, Homo sapiens
gtggacccattcagactatctaggacagtctctctaagttaaagtcaactatttggcaatcggaattccatctgcaaccttaattcccctttgccatgcaacataacatactcacagtttcc

SEQ ID NO: 51213 - DNA, 122 bp, Homo sapiens
ccagcagcggcgacagcagcctgaggaagcgcgggggagggtccctccgatgcgccgaggcgcctctcaaccggggcggagacgacggaggggaggagtcccgacggccgctttcccgaact

SEQ ID NO: 51214 - DNA, 122 bp, Homo sapiens
atccctttccggagggatttaggaagtctcggcgttggtccaggaacgacagtcccaccgcgcctcacatggcgcattacccagcgactccgcttacccacacgtccccgccccctcagccg

SEQ ID NO: 51215 - DNA, 122 bp, Homo sapiens
taaattgcctttgaaaaatagctttattgtctccgtatgtaatgcaagtaggcattcccccggcaagttcgggggagtagctgacatttgttgactgtttactgtaggtgtgaactttatat

SEQ ID NO: 51216 - DNA, 122 bp, Homo sapiens
cagcctgctggaaatgcaatgattgttgctacaaggattgaaggcaatgggctggaaacacgcacccagctcagaccctgccttcggtcggtgccggaatccttccttgaccccagcctcac

SEQ ID NO: 51217 - DNA, 122 bp, Homo sapiens
ccggggctgcggcccctagcgctgcgagggatcccgagcctgtgcccaccccaccttggacgtcaccctcctcggaccacccaacccacaccttccgcctagggcggggcgaggggaggacg

SEQ ID NO: 51218 - DNA, 122 bp, Homo sapiens
cccattcattggccagtctaggcctgcgtgctcaaggtcacatggctagttgggtccagtcggggtttgaggatggcagggtgacacccaaccactgcctcaagcaatgagtgcctcacagg

SEQ ID NO: 51219 - DNA, 122 bp, Homo sapiens
ataactcaccgttccgccccgccctgccgatccgtctgttcccggtggtcccttcggaaacggttcccgcactggccggctccgaaagcaggaaaacaaaggttcccacagtaggggcgggg

SEQ ID NO: 51220 - DNA, 122 bp, Homo sapiens
tctagacaaggctgcgacatgacattctcattctgtttggagcaggatgaagggttcgtgcgtaacactatgaggcgtggacggggctgagaactggcgcatggctgccacctgctgtggtg

SEQ ID NO: 51221 - DNA, 122 bp, Homo sapiens
gaactcaacaccagtttcacccttgctccagtggagggagggccagctgggatccagtcccgtgcaaggcctatgggactataaagagcttctcggaggtcagattgacaagttctttagcc

SEQ ID NO: 51222 - DNA, 122 bp, Homo sapiens
tgaattctctggacatgagctcattggtatcacactcttcatgctggggaagcaaacatccgtggctctgtctacaggcagcacctcatagatcaaatcaatggttagcgagtgagcaggcc

SEQ ID NO: 51223 - DNA, 122 bp, Homo sapiens
gtgctcccccgatggccgcggcctggcaccgggcagggccgcagagccggccacctcctccgaggtgccctttggctccgatccaaaaggcgtggagatccactccgggttttccgcttgct

SEQ ID NO: 51224 - DNA, 122 bp, Homo sapiens
aataatactttcactgcaaaagaccttatttatgagggaaaagcattatgtgatagttaacgatagttaatacttattaaaatgaagggaagaaattgtaagattgggtaaagtataatatt

SEQ ID NO: 51225 - DNA, 122 bp, Homo sapiens
tccgctacgtggctatgaccccatccctgcggctccccgagcgtgtgtccctgtgtgtcacgcaaacccctgccacacaggggacacatgccacacgcctgacacaggctcagcacacagcg

SEQ ID NO: 51226 - DNA, 122 bp, Homo sapiens
agggcactagccattcatgacggatccacccttatgacccaaacgcttctgaccaggccccgcctccaacactgggggtcacatttcaacatgaaatttggaggggacaaacatccaaatca

SEQ ID NO: 51227 - DNA, 122 bp, Homo sapiens
tcccccgaccctgcctgatcatctgaggggcaacttcgctgcgcttggaaatcctcttgacgactttgtctgccaggacgccccagcggggccagctgagcgtcctggcctgcggctacagc

SEQ ID NO: 51228 - DNA, 122 bp, Homo sapiens
gaggcctacgggcgcgccctggaccggcacggggtacccagcaaggggcgcatccgcaggcgtgcctcccagctcaaagtcaagatccccgacttgactgatgtgaattccatagacaagtg

SEQ ID NO: 51229 - DNA, 122 bp, Homo sapiens
gaagagcatctggagaaagagcactcagaatagcatttggtccaaagtagctattatggtcgaatgtaacagtttactgttattagaactagggtaatattctacataattatactttctct

SEQ ID NO: 51230 - DNA, 122 bp, Homo sapiens
tgctgtagccgcgcgcaggcgcagaataagagtgcacagcgagaacgcggcgacggtagccgaaggagttcaaaagacctctagtgcgcccaccgcaggtgacagccgaagttcatttcgtg

SEQ ID NO: 51231 - DNA, 122 bp, Homo sapiens
cactggtgtggcactgtcacccccacagctgggtggggcactgtctactctgtgcctctccgttatttggtggctcataccacgcttctctgtcagaggtgtgaagctgttgtgttttgtgg

SEQ ID NO: 51232 - DNA, 122 bp, Homo sapiens
ccgcctgatctttgacaacctgaagaaatccatcatgtacaccctgaccagcaacatccccgagatcacgcccttcctgatgttcatcatcctcggtatacccctgcctctgggaaccataa

SEQ ID NO: 51233 - DNA, 122 bp, Homo sapiens
caaggacgggagcgcatgcagcaggcgctctccctgcgttccggctggggcccggctacacgaggctcccctctggctcctggcaccaactccaggcagtcacatgatgccggcgccgctcg

SEQ ID NO: 51234 - DNA, 122 bp, Homo sapiens
ggtccaggggagaggggactctgcgccgtgtttcactaaaccaaggtggtgtccacggcacgaaacgaccaaaacacgcgtctcagctcaacagaatggaaggggtgggacaagtgggtgct

SEQ ID NO: 51235 - DNA, 122 bp, Homo sapiens
ggcaccaagatggggagggctggatccaccctccagagaacaagaatcctgggcagtagccgggacatggtgggggaggctgaagggttgtccctgagcatccccaacatggagctcggaag

SEQ ID NO: 51236 - DNA, 122 bp, Homo sapiens
cgggattgaagcgtcgtccggcccctcccgtgccgggaggcggggtttccagagcaaaggcgcccccagaggcctggggcttggtcctttctaacttgttgacatgtagagaccttgggaag

SEQ ID NO: 51237 - DNA, 122 bp, Homo sapiens
caccagcgccaaactcagtgataagtcgcgctatgattactttgccaggaccgtgccccccgacttctaccaggccaaagccatggctgagatcttgcgcttcttcaactggacctacgtgt

SEQ ID NO: 51238 - DNA, 122 bp, Homo sapiens
gtttttgtttttgtttttttatcaaatcctgcctgactgtctgcttgttttgcctaccatcgtgacatctccatggctgtaccaccttgtcgggtagcttatcagactgatgttgactgttg

SEQ ID NO: 51239 - DNA, 122 bp, Homo sapiens
ccagccagtcgtggctggcctttcaaagtgtgcagttgtctcctccctgtccagccccatcgtcgcccaggaccagctgggccgcggtctgacctgaggctgctgctcagcgccggggcgct

SEQ ID NO: 51240 - DNA, 122 bp, Homo sapiens
aaccttgatcacagatgccccccgccggccttccttccaccagaccagtgggagagggaccgcaggggcatcaggcctttctcaacatgcgactcttaatttgggacggacagaacagccgt

SEQ ID NO: 51241 - DNA, 122 bp, Homo sapiens
gaccttcagcccacgttggcctcccaaagtgctgggattacaggcgtgagccaccatgcccggcctaatattttttaaaaatgtctgtagagatggggtctcacaatgttgcccaggctggt

SEQ ID NO: 51242 - DNA, 122 bp, Homo sapiens
taattgggataaaagccaactagcttcctcttgctgtttctttagccactggtctgcaggcgttttcttcttctaacttcctctcctgtgacaaaagagataactattagagaaacaaaagt

SEQ ID NO: 51243 - DNA, 122 bp, Homo sapiens
cgatggaaaggggtgtaagccccccgagtacaggaattaccagatcgtcttcatcgtcttcggcgttctcatgaccatggccttgatcgttgccactcagttccggttccgctacaaccatt

SEQ ID NO: 51244 - DNA, 122 bp, Homo sapiens
ctataattctgccagctactgtggaggaaaagttaaatattaaatttgaactcaattgaacgtggacacaatggtcaagtcccgtaacaggttgcatgagccccttgaggcattcattcatc

SEQ ID NO: 51245 - DNA, 122 bp, Homo sapiens
aggagatgtggggtttggcgttcccctgcacccgggctcggaacacggctttgtcccctgcgatgagcacaggacgcgttttcgcctcttagccaccaggctagagcctctgccaccctctg

SEQ ID NO: 51246 - DNA, 122 bp, Homo sapiens
agagatcttcccttatatgttccaggacccgctagtgatacctagaatcgcagatagtaccgtcccctatatatactgttttttcaatatatacatacccatggtaaagttcaacttacaaa

SEQ ID NO: 51247 - DNA, 122 bp, Homo sapiens
cactgaggttataatactattgtttccaagcactcagccttagtaatccccctccctcttcgcagaaaaagaaaacaacagcaaaaaaggacagaaaatgaaatgatctgtgtccagcgagt

SEQ ID NO: 51248 - DNA, 122 bp, Homo sapiens
gtcacacctgtctccctgtttatcttctgcttggagcgcagcagtgcactttgttggaagcgaaagcagccagaccacagcctccatgctttcaattaaaacgagcatcatcgatacaataa

SEQ ID NO: 51249 - DNA, 122 bp, Homo sapiens
tcacagcgccccctggagcgcggggggacccgccgggcggtgccggccccgccccggccccgccccggcacgccccgccgcctacctcgcgccctccgccaccctcgccctcccgccgccac

SEQ ID NO: 51250 - DNA, 122 bp, Homo sapiens
agaagctgaacttgcacacatactatgtgactcatctccaaagcttaactttccccttggcgtaataaattaagagcgtcctaaaattacaatccacagataagtatagatacagcgcttta

SEQ ID NO: 51251 - DNA, 122 bp, Homo sapiens
aagggtggcaggctaatggaaaagtggctgctggtatgctcagcactctggcataattgtcgacattcttgctcatattttatttccgtggttgttgcctacaattgccattgaatggcaaa

SEQ ID NO: 51252 - DNA, 122 bp, Homo sapiens
tttaatttacattttatgttttatagagacaaggttcggctatactgcccaggttgatctcgaacccctgggttcaagcgatcctccctactcggtcccccaaagtgctgggattacaagcg

SEQ ID NO: 51253 - DNA, 122 bp, Homo sapiens
ttccatctttatttttcttacttgtttactttttttaatgtcagaaccatttgtatcatgcgcaggaatgtctccctcaatgtgagctttggaggcaaaacatatttttggagtgagttatt

SEQ ID NO: 51254 - DNA, 122 bp, Homo sapiens
cataaatatactgcacatgaccccccagtctctccccactcaccggctgtctgcagagaacgagagcgggaaggggcaagcccttcaggaccccctgactgctatgtgccagccacccagac

SEQ ID NO: 51255 - DNA, 122 bp, Homo sapiens
ctttggtgtccttgtctgcgtgtgacatgaagccgcagatctcaaagatctctttcattccgtgaaagcgctctcaatgtgtgaagttgactgcttctcctgctgtttaccaagagaataat

SEQ ID NO: 51256 - DNA, 122 bp, Homo sapiens
caccagcgactcgcaggggggtgtgggcagcaacgctgcagcagcctctcgcagcctggccggctccagcagcgccgcggcgggtggtagcgctggagccgcgacgcccgggccgggggtcg

SEQ ID NO: 51257 - DNA, 122 bp, Homo sapiens
gggccgcggagcctctgggagatgctgcccggggctgcagggagggaggagcacgccggacgcctgtgcacttcctgatgggttctgcttaactccacagtcccgccagtcctcccacaggg

SEQ ID NO: 51258 - DNA, 122 bp, Homo sapiens
attcatttcattaagtgttttgtgaaggacataaccccccgggacacacgagaatgcctccgttgggactggaatcgctgcccacaaacaaacggagaaacagtcaaaggtggcctaagacc

SEQ ID NO: 51259 - DNA, 122 bp, Homo sapiens
cgcgtatgaaccacggtttaacactacgtctacgccgaagttcgggttagtcagaggccacgcccaccgcaggcccgaaaacaccagcctgcactggcgcgccggattgtgcgcaggctcca

SEQ ID NO: 51260 - DNA, 122 bp, Homo sapiens
taggcggagagagcaggagccggggggcggagggacagaattggagggggggccagcaggcgggtgagggggggctgaaacaaagagctgccaatcaccctggaggcatcatcagctctggg

SEQ ID NO: 51261 - DNA, 122 bp, Homo sapiens
gtgctcacctgggatgactcttctggctcctgaaaaataaggatgctgattgcctcctcacggaatcccagtggaccaagccaggaaagaagccgagcagggcttctggggaagaaagtccg

SEQ ID NO: 51262 - DNA, 122 bp, Homo sapiens
ggctcactttaaaagtttactcgggccgggacgcagggcaaagcgagccatggctgtctacgtcgggatgctgcgcctggggaggctgtgcgccgggagctcgggggtgctgggggcccggg

SEQ ID NO: 51263 - DNA, 122 bp, Homo sapiens
ggctgagtcaaggccaggttttctgatgcaagttcagtgcagcttcactcctcacagctacgccaggttggcccctctccactcctgacgtcagggccatctgaggggaggacatggctgtc

SEQ ID NO: 51264 - DNA, 122 bp, Homo sapiens
tttcattaaagagatttttaaaaaagtatacagaatttctctttcattaataatatttaccgtgcccatcagaactccactaatgggccgggcacggtggttcacacctgtaatcccagcac

SEQ ID NO: 51265 - DNA, 122 bp, Homo sapiens
aagtcgtccttcatgttcccgttgaagttgccacacaagccgcagaggggatcctgcagacggtggcatcaggccgggcccaggggccgtgccatctgtctccacccctgcatcagggaggg

SEQ ID NO: 51266 - DNA, 122 bp, Homo sapiens
atcgcacccaacacaggcacccccatctacagggtggctggagatctatgaccattgtggcgtacctggaccaatcaataaactggaccaattggatttccatttttagggatttaaattca

SEQ ID NO: 51267 - DNA, 122 bp, Homo sapiens
ggctcccactcccccccatgagagaccatccacttccaccctttcacttaggcttcctggcgcagcctctatccaggaactctgtcccatagctgtactgcccaggtcgagctttctaaccc

SEQ ID NO: 51268 - DNA, 122 bp, Homo sapiens
gaagacactctattttctttgcacatctgatgtattgtgagtgattttgtgaccctgctacgtgcacgcatatgcacagaaaaaaaatatcttagaatgtagaccaaaatattaacagtggt

SEQ ID NO: 51269 - DNA, 122 bp, Homo sapiens
cccccagcaccaacgcgccttaaaccaagccccacaaagaagtcacttcggcgatgtaaacgcgactttgcggcttcctgggctgctaaggtgaaggacgcccgccctccccagaacttgag

SEQ ID NO: 51270 - DNA, 122 bp, Homo sapiens
ccacctcgcaggaccccactctgtcccgtggcggggacagaagtctgcgtaagggctcaccgcggctcagccccttagctgggcaggcagtgccctagccactcccaggtgtgtgggaaagg

SEQ ID NO: 51271 - DNA, 122 bp, Homo sapiens
accccaacaaggttttgttttacattgcaaacacaagcaggctcatagaaccctctgccccgccgacagactccagacctcagctccccctgcacaaacgcaaggctgtccctcctgccaaa

SEQ ID NO: 51272 - DNA, 122 bp, Homo sapiens
taagagaatctgggtacctcagttggaaatgcagaattcactccccatttatttccatctcggcgggagctgcagactggagctgtttctacttggccatctaggcgtctcctctgctccac

SEQ ID NO: 51273 - DNA, 122 bp, Homo sapiens
ggagaagcaagattcgagcttggccaggggtgagtgagtcattaactaaaggagccctagcgagtatgtgtcagggtcaggcccctccacacctaagaggacagcaacaagtggtcagggcc

SEQ ID NO: 51274 - DNA, 122 bp, Homo sapiens
cccgtgcgcagccctgtgcacccagactgcgattccctcctcccgcagctgcgccatccccggacccttcctgctgggctgcttctccacggaaggtccccatgggtttcgcctccaacact

SEQ ID NO: 51275 - DNA, 122 bp, Homo sapiens
cacctctttgcagttcttgttttggggcaggggaggggtagagtaggaagaaggtggactcgatgtcattggcacatgccttgcataccaggaacccctgatgacctttcattcctcgcaca

SEQ ID NO: 51276 - DNA, 122 bp, Homo sapiens
ggataataagtattgcctcactggtaaccactgttacccagaggacaataaatgttgcctcgtgggtagccactgtaagcccctggataataagtgttgtctcacgtgtaaccactgttacc

SEQ ID NO: 51277 - DNA, 122 bp, Homo sapiens
gttcgcggaaaggcagccagactcctccttatctccagtgtcaaacttgacatcagcctgcgagcggagcatggtaacttctccagcaatcagagcgctccccctcacatcagtggcatgct

SEQ ID NO: 51278 - DNA, 122 bp, Homo sapiens
tccagaatcttagagaaattccaggggccccttcaatcacctatgaggccaatacccagccggcacctgcgtgtacccggcggtgtcctcactgcacacggagaacagcgccgcaccagtgg

SEQ ID NO: 51279 - DNA, 122 bp, Homo sapiens
cttcggtgggccactgcataaatggatgtttctgcagtattgaaggccagtcaggcaaaccgtgtgctttcctacgcagtggggaatgtgtcgccctttccttacatcttggagaccaaagc

SEQ ID NO: 51280 - DNA, 122 bp, Homo sapiens
acaggggtaatgacagcaccttcgtcacagagtttgtttggaggcaatgaaatggaaatgcgtgtaaagagcccagtaatagatggaatgtacaagaactattagtgttgtaaacggcgctt

SEQ ID NO: 51281 - DNA, 122 bp, Homo sapiens
ctgggttagggtctccatgaccgagctggtctcggcaaatggcgcccatatatgggggctcgaatctaggtcgaagggtcaccggagcgatggagaacatggaactaagctggaggacacct

SEQ ID NO: 51282 - DNA, 122 bp, Homo sapiens
aatcagctttccacttgattgctagttttgatttgacatttgattgatcacctgtcatctcgctgcctttgatctattcattcttgatatatatcaataaatcactcaccatggtaactcag

SEQ ID NO: 51283 - DNA, 122 bp, Homo sapiens
cccattgcccttagaacaaagccctacatttttctcctgttctctaagccactgtatgagcgggccccagctgtagctctcagactgcatatcttacttttcccccttccattcacttcact

SEQ ID NO: 51284 - DNA, 122 bp, Homo sapiens
tgcactccagcctgggctacagaccctgtttcttttcttttcttttttgagacagactctcgctctgtcgcccaggctggagggctgcagtgcagaggcgcgatctcggctcactgcaacct

SEQ ID NO: 51285 - DNA, 122 bp, Homo sapiens
gacttcccggtgggtgcgaccaacgtgaggcgcgggtcctgggtgggcgcagagagtgcccgggagtttgtttcccttcctccctgctccctgcttggctcgcgcggtcctgctgctcttcc

SEQ ID NO: 51286 - DNA, 122 bp, Homo sapiens
gtcttccccactggctgccgtgagggcgctggccctgcccatcctccgggaccataggagcgtgtcctcgccgaccaggtggaagcggactttcatctccacggacaggctgccgtcctcat

SEQ ID NO: 51287 - DNA, 122 bp, Homo sapiens
caactgcttgcatacaggtctgcatataacacagcagtctctggcaaagccaataactcacgttcaacttcagaaatcctggtggccggtaacacagagtaacctgtgcgcacaacccttgg

SEQ ID NO: 51288 - DNA, 122 bp, Homo sapiens
tcttgatcttcctgtctgggcagacttcagagactttgtggcctggaggcctattaagcacgacacagtatcagtggaattgatccataaacctccctgtccacatcttgcccaatggggaa

SEQ ID NO: 51289 - DNA, 122 bp, Homo sapiens
tcggtggcccagcggcccgaggtggttgcctgcagtttggcctggtcgaggcgccagtagcggtcatctcggaagaagatgatggagccatcgggcctcggcagggcgccgctgacctcctc

SEQ ID NO: 51290 - DNA, 122 bp, Homo sapiens
gaggtgagtgagccgacccgcggccggccgcgcgccgctgagcctcaggggtcgggggcacggccggggcatccaccttgcccccacttgggactcttcccaggcctttgtgccccggatcc

SEQ ID NO: 51291 - DNA, 122 bp, Homo sapiens
cacatggctacgtaaagagctgatgcaatgatgacaggtgacgaatcccatcacttcatccgacgtccctcagtggcggctctctgtgcccgctacttggttcacacccacgaggcaaagcg

SEQ ID NO: 51292 - DNA, 122 bp, Homo sapiens
tcttcggccgccgccaccacacacatccgggtccccgcctttccttcactcctagaggcccgccccgtcccccatctaagccaatcagcaacggcctctgacgacgggcacctgcaggagcc

SEQ ID NO: 51293 - DNA, 122 bp, Homo sapiens
tctgttccccagaggccaacacccagtgctctggggcagtgttcacctcccccactgactcgatggaacttcagcacacgctgcagggatctgggggtgctcaagggcctccctcattccct

SEQ ID NO: 51294 - DNA, 122 bp, Homo sapiens
agcaaggagaatttctcaaagcgtttccaaaatggaaacgcttacgcagagcagagcagacgcttggaaagccctttttagaaacccacacctgacaccctccggagctctcgagggagagt

SEQ ID NO: 51295 - DNA, 122 bp, Homo sapiens
tctgggctgtgagtctgtggctctggtgagctcacagggcctgggcagaactcacggctacggggctcagggctggccagagacagagggaaaccctaggactggatgtgccaagatcctga

SEQ ID NO: 51296 - DNA, 122 bp, Homo sapiens
gagattcaccaccttcctgcggcagagcccgccctcatgctttctctgattggcccgaggcgctgccggccgaaccccgctcccaacccattcttgagtgcacttggagagatgtttcctcc

SEQ ID NO: 51297 - DNA, 122 bp, Homo sapiens
ccggcttggggctccctttgcgcccggccggcggagagcttcgcgggcagtgcttccgcccggccgcagaagtgaatgcctcgttcgtgtttacacggtggccaatttgacggggatatttt

SEQ ID NO: 51298 - DNA, 122 bp, Homo sapiens
gacaggactgtacacccaggacatctggctataaagaacctgcttttaaccactattctacgctgattaatagattgctgcactcactttattgcaaacagttaaacttcctggaactacat

SEQ ID NO: 51299 - DNA, 122 bp, Homo sapiens
gcgacaggcttggaagttggagcccgggccctgggttctctcagcttccagctcaggaggcggagtgggaggagcgggcctggcggccgtgggggcggggctgctccactaacggttactgg

SEQ ID NO: 51300 - DNA, 122 bp, Homo sapiens
cgcggcctcgggagctgcccggcggccccggaccgaggcagccctcccctttaaaagaagcggaggacaggattgggatccttgaaacccgaaacccagaaacagcatcggagcggaaacca

SEQ ID NO: 51301 - DNA, 122 bp, Homo sapiens
tggtgacaggaacggtaccccgcacggtaagggtcaggcaggaagggcctcccaccgcggcgtggctgccgccgttctaagaagagaccatgaaaaataaggaagaaggctagagaaaaaga

SEQ ID NO: 51302 - DNA, 122 bp, Homo sapiens
taaccacagaacgtcccaggcacaggatgggggagagggagggctgaataagaggtaccacggtctgcagccccagaggagacaaaagttgaggatttgttgaacaggactttttttcccct

SEQ ID NO: 51303 - DNA, 122 bp, Homo sapiens
tggcggggagggtggtgggtaaaggtagccaggagtgcttgactgggactttgcaccctgcgcttggccctctcccgctgtgatggtttaagacttcggaaaaaacaactcttgccccaagt

SEQ ID NO: 51304 - DNA, 122 bp, Homo sapiens
tgtccgcggagactggatggaacagggttggaggacacccagtgggtgcctgcggagactcgctggagcagggttggaggatgcctagtaggtgtccactggagacttgcttggtgtttggg

SEQ ID NO: 51305 - DNA, 122 bp, Homo sapiens
attttaatggaaccgacctgaaattaatgagcactgtcacactgagtaaatactgcctctcgggatgagagcggcaatgggtagaaggcagtgtgacaattcaaacccaaggccacggacaa

SEQ ID NO: 51306 - DNA, 122 bp, Homo sapiens
cagtcctgcgcacccggcctcccacggcaaggcgcatgcgcctcttgctgacgccgcaggcgacatgttatctgctgtcagaaggaagcctgcctctttgcatgcaggtgtttgcggggctt

SEQ ID NO: 51307 - DNA, 122 bp, Homo sapiens
gctcaattttcatctctgctgggagaggcaggtgccggggaatgcgttgatacccactttcgggtcagtgcgccacgtgccgcgggagattcggatgagagggatgggcgtcggcagcccca

SEQ ID NO: 51308 - DNA, 122 bp, Homo sapiens
tggcctagcctcacacctggttcttcaaaatgtccattcctcatcctgcatccgacccatcgcttcccccaggctccctcctcctcccctcccgctcctctcctccagggcctcctctgcct

SEQ ID NO: 51309 - DNA, 122 bp, Homo sapiens
attcacctcaggctgatgacagtggcagtgcgcaggggcgctgcaggaggccggggaaggcgaggtcacaacaggcacaatagggagtcgttgccaggcaacctctctaggcttctgttgtg

SEQ ID NO: 51310 - DNA, 122 bp, Homo sapiens
ttccattcagtggaaaacgaaagctgggcggggtgccacgagcgcggggccagaccaaggcgggcccggagcggaacttcggtcccagctcggtccccggctcagtcccgacgtggaactca

SEQ ID NO: 51311 - DNA, 122 bp, Homo sapiens
cattcctacaggatctttcctttttatctaaaccctcagggacaggggctgtgtctcattcgtctttataataccagcatgcaacactctgcatgatacatattagacactcagtaaaacac

SEQ ID NO: 51312 - DNA, 122 bp, Homo sapiens
cccccagaggagaagcgggaggatgagacagacaggccgcccccgtaggtgctgggggcgcggcaggaccctccggccaggacggaggagatgcggctggagccgcccccgatgccgccccc

SEQ ID NO: 51313 - DNA, 122 bp, Homo sapiens
cgctgccccgggtcggagagcccagagctgggggaggagcctggcccggcagccgccgctcgcccagtcattggccttttgtgctgcaacttttcccgagcctttcggggagccacgccggc

SEQ ID NO: 51314 - DNA, 122 bp, Homo sapiens
ccgtcttggcactggcacttggtctggtgaccaccactagcccacagttgggtcagaaaacgttacagaactcctctctcccccacccgaaacacactcagcccttgcactgacctgccttc

SEQ ID NO: 51315 - DNA, 122 bp, Homo sapiens
ggagggcgaatgcgcatgttaaacatatgtaaatcctagaaaccgaggtagcttcctagacgtgggaaggcaaatggccagaagagacagggaccagagaaaaggccctggtcttgctaaag

SEQ ID NO: 51316 - DNA, 122 bp, Homo sapiens
cctcctcagtttacctaagtgccctaccagtatcatattctgtgtatgctgtgatgtgaacgaggtttgtaaacacaggctggtctaatggagcccaatgagaccgccagaggattagtgtc

SEQ ID NO: 51317 - DNA, 122 bp, Homo sapiens
gggacaaggaaaaaaaggaaggagggagggagagaagcagcaaggaggggtcgcctggcccggctcccccagtgaggaaaggggctgtggcacagagattccatctgcagggctgggggcag

SEQ ID NO: 51318 - DNA, 122 bp, Homo sapiens
tggagtcctgtgggtgctttttaagcaaagattatcaccaggcaggctaaacttagcaaccggcttttagctagaagggcagggggctggtgtcaggttatgctgggccagcaaagaggccc

SEQ ID NO: 51319 - DNA, 122 bp, Homo sapiens
ccggagactgctcgctgggcggcggggccggagtcgtcgcagccacctcattgcacaacccggcttcccaactgtttacacagcccggcctgtgagtgtgtgtgtatacagcgtgagtcacc

SEQ ID NO: 51320 - DNA, 122 bp, Homo sapiens
tggggccctggggacagtctggtctggccagtggtcagccttggtggtggaggacagagtcgcagggagttacccaccctgaagtaacccaggggagctgccgaaatgcaaacccagaagtg

SEQ ID NO: 51321 - DNA, 122 bp, Homo sapiens
cagaaccagggcagggagagtccagtggggcgtcccgcagtgcgcgcaggaagcagcctgcggccggagctcagggccggccaaagactccgggcagccggctgagccagatcgcaccccgg

SEQ ID NO: 51322 - DNA, 122 bp, Homo sapiens
ggccgctgcttctggccgtgtcgcgtggcggcttccgtgtctggcttccacttagcaccacgtcctccaggcctggccgcgtcgccgtgcgcaccagcacttcgcccctttttatggctgaa

SEQ ID NO: 51323 - DNA, 122 bp, Homo sapiens
gcctctccgtgtaccatctccgcagcgtggacacggtcaagttccatacgaagcggctgccgctgaacagcaggtcctccacgccacacatgaacaccgaagccatgcctcctccttcgctc

SEQ ID NO: 51324 - DNA, 122 bp, Homo sapiens
gtgtgtgtgtgttgggggggtggttctgagtggttggggtcttaccccactcccaacatccgtccagccctgctgtttttctttcttttgcatattgagcttctgagcaagatttcatccac

SEQ ID NO: 51325 - DNA, 122 bp, Homo sapiens
ccgctccatgacaagtttaacaatctagaagttgggtcggtggattgtctcctacaccaccgaacctgtctctgagtcccaagcatcagtcagtctagctaaactgtcaacagttgcatctt

SEQ ID NO: 51326 - DNA, 122 bp, Homo sapiens
cacccggagacgtctgaagtctctaatcgctcagcgaaaagttggtttcgggaagggcagcgccggggtgcgggagggcaaaggaggaagaggaatgcatatgactgtgagaaggaaaagta

SEQ ID NO: 51327 - DNA, 122 bp, Homo sapiens
tggcctgtaggatgggaagctgtactggtgcgatgcacggacagacaagattgaacggatcgacctggagacaggtgagaaccgcgaggtggttctgtccagcaacaacatggacatgtttt

SEQ ID NO: 51328 - DNA, 122 bp, Homo sapiens
gcctctgcctccttgagaatgagcccattagccgcacaaattcgcagcaggcggctggggcggcggctggggcagcggctgcagcagcggcggacgctctgcattacccagtcttgcgtcct

SEQ ID NO: 51329 - DNA, 122 bp, Homo sapiens
caggtgccttcccttgactgctgttcccaagatcaaacagctagtggcagttgtagaacacggatctcttggccatggagcttttagaaatgctcatgcccaggctccactgcagattagtt

SEQ ID NO: 51330 - DNA, 122 bp, Homo sapiens
ctcagctttgccaaattctccaaggagactttccatgaggcgcctcctgccatctgtgggcggcgttgggaactgcggccaccgctgcttgggaatcaggacgtcccagctcccaaccggcg

SEQ ID NO: 51331 - DNA, 122 bp, Homo sapiens
aaggttattacggaaaacgcgacctgcaaacgggcgagaggcatgatggaccaggaggggcgggggccgagggcgagggcgggggcgggggccgagggcgagggcgggggcgggggagtcag

SEQ ID NO: 51332 - DNA, 122 bp, Homo sapiens
cgcggcgcactgcacgcagctcacccacctctacctgcgccgctgcgtccgcctgaccgacgaaggcctgcgctacctggtgatctactgcgcctccatcaaggagctgagcgtcagcgact

SEQ ID NO: 51333 - DNA, 122 bp, Homo sapiens
caggaatcaagggaaagtcctccgacttggtaaaaagcaccacgaagaaccctcagctcacgctgcttcacggaagagtctggccgccttccctcattcggtcagcggagagctggctttcc

SEQ ID NO: 51334 - DNA, 122 bp, Homo sapiens
tttaaaaactgcggagcacattttgtgtacatgctgtttttattgttactcatgaagacgcgggggaagctttggttgtgtaaagctgagaactgcacccaagcttccccgttcaccccacc

SEQ ID NO: 51335 - DNA, 122 bp, Homo sapiens
ggctcgtgcctgcgcgaaactcgcgcacacagaaaagaccaatcaaggacgggtcattcccgccccccgcgcgccttttgcgaccgcccactcgacaggttgacaacctagacagctccccc

SEQ ID NO: 51336 - DNA, 122 bp, Homo sapiens
ttgaactgcagtaaagaaagctgggatgggctcctctagggatacttccagatccctgggcggttgtagccctggctcctctttaaatggatttggtttcaaagacgatcatctccgtcttc

SEQ ID NO: 51337 - DNA, 122 bp, Homo sapiens
cgagcgccgagaggcatatgtgcgcaccacatgccacaaacacaagctccgagtcctaaacgaatcacaccaggatggagattgcaggatggcgtgtttccatcgcgtgtccaggcgcagtg

SEQ ID NO: 51338 - DNA, 122 bp, Homo sapiens
gaagggaagtcatcacatagttgtccttccatgactggctcatttcacttagcacaatgtcggtaaggttcacccacggtgccgcgtgtgtcagaatttccttactttttgggggtgaccaa

SEQ ID NO: 51339 - DNA, 122 bp, Homo sapiens
agaaaaggcaagtgaccgccattattttcttattactactgtgggaggcgggcagcgctacgattaagtattcagttctagaagagagggacagcggctcttttgtggccaacttagcaaaa

SEQ ID NO: 51340 - DNA, 122 bp, Homo sapiens
cttgctcttccttaaacactatctctgaaagatcatcctgaagcattttccttggagaaccggccataggcaccaggttgggtttgccacaagggaccaatgcagaccttgtcaaagaagtg

SEQ ID NO: 51341 - DNA, 122 bp, Homo sapiens
gaagctggtcccggatcctgggaggattctgtgtgcacacgccagggaagatgctggccccggatcttcgtgggactttgttggtgtacaccagggaagatggtggcaaaagtgtgagaggc

SEQ ID NO: 51342 - DNA, 122 bp, Homo sapiens
aaacgaactacaattcccatgaggcggtggggccacgggaccacaagtcccagcatccaccgcgcggcccaggactgtcagggtagtgggcgttgcgtgaggcgggtaaatgttcgcggaag

SEQ ID NO: 51343 - DNA, 122 bp, Homo sapiens
cgactccctgtccgttctcctaactcagtccttggcagtagaaagctcccttctactcggcgcactccatctcttgcgttatcagcttttcagcgttgactcgccaaactactccagccaga

SEQ ID NO: 51344 - DNA, 122 bp, Homo sapiens
ggggctgagggcagacagctgaggaccagcccccatcctgcactgagggatggagaattccgggaaggctgcctgaaggagacagccttgaaaccttgaaggattccgctatcgtttgtcca

SEQ ID NO: 51345 - DNA, 122 bp, Homo sapiens
tctgttgctcctcattctgcaatcgctcctgaatcagctgcagttctctttctctccttgcgtttgtgcagtttacaacttgtttcatggttttctatgtatttttttttcctccttcatcc

SEQ ID NO: 51346 - DNA, 122 bp, Homo sapiens
tccagctgggactgaatgcatatccagggatgacgctgtttgtggattgattactgctgccgtggtggtttccttgactgtgtagattgctgcagctacacgtgcaggcaggaaaccaaatg

SEQ ID NO: 51347 - DNA, 122 bp, Homo sapiens
ggaatcaggagctggtcgggcaatatggtgtagggtgaaaccccagccagagccgggtgtcggtaccgacaacccctgccactgggtaccacataccagagggccctgagccccagctccct

SEQ ID NO: 51348 - DNA, 122 bp, Homo sapiens
gggcagctcactctggagccatccctgacaaggctgtgggaggggtgcgcagtgccctgccgctctcattggcaggacatgggggttagcacagacatctctaggactggattgaagagctg

SEQ ID NO: 51349 - DNA, 122 bp, Homo sapiens
ccggccccgctcggagtttgaggagatgaccatcctgtatgacatctggaacggtggcatcgatgaggaggacatccgcttcctgtgtgtcacctacgagcgactgctacagcaggacaatg

SEQ ID NO: 51350 - DNA, 122 bp, Homo sapiens
gtctcgctcaaccgctgtccgcgcagctgggcccagatattgtgccccaccccggaattgcgtgaggggcccacaagtcaggctttccctaaaacactcacttgtggggttctggagaccgc

SEQ ID NO: 51351 - DNA, 122 bp, Homo sapiens
ttgggtagcattctcctcataaagaaggatacattaaaaaaaataacttgtttcgcgactcggcatccataaggaactcaaatgctgcccagagaggggctgagtatttccttccaagtgag

SEQ ID NO: 51352 - DNA, 122 bp, Homo sapiens
cgaccgcgatccacgagcggagttgacagaacccgagtgcaatcattacgtgtaactgggcgacaggcactatgtattctgacccagtaagtaatctgcataccccagctgactgccacata

SEQ ID NO: 51353 - DNA, 122 bp, Homo sapiens
ggaaccgtgctctgcagggccacatggggaacctggggaaccgtgctctgcagggccacacggggaacccggggaaccgtgctctgcagggccacacggggaacccggggaaccgtgctctg

SEQ ID NO: 51354 - DNA, 122 bp, Homo sapiens
actactcgctgtacttgccgctctgagtcagtggccccttcgttccttgtaaataaatcccgcccccggaaatgacgtctccaccttcgtgggtcgcgccggataaggtgggctttgggcgg

SEQ ID NO: 51355 - DNA, 122 bp, Homo sapiens
ttagcgcttcaccctttaacaaaacccaaacaaaccaaacggcgactggagcgaggtgggcggaaaaagccacctgggaaagtcagcggttttgtggattaggtagtgtaaccccgcaggag

SEQ ID NO: 51356 - DNA, 122 bp, Homo sapiens
tatgtgaactgagggtccatggcaactgaacaacaactcacaactttgttacataaaagtcgaaccagattggcctggtgtagctaccataagagtaggcaattcaaagaagaatcataaat

SEQ ID NO: 51357 - DNA, 122 bp, Homo sapiens
gtttaagatttactctattagcaaatttcaagtgtacaatacagtattaactacagccaccgcactgtgtattaaatctccagaattattcatttggtatcactggatctccctttgaccaa

SEQ ID NO: 51358 - DNA, 122 bp, Homo sapiens
ggagtgtgagggatgcacagctgttcagggctgagacattctgggctggggctgtcccagcgtgggaggcgtgcgggctgtagggccccgaagctgacctccacctttctgcttctctctca

SEQ ID NO: 51359 - DNA, 122 bp, Homo sapiens
ctggcgcctcgctgagtcggagcaacccccggcaggagctttcaggctctggtcaagcctcgggacccgggaagctatccctgccctcgggggctcgagcctggagtggggcttgcaggtaa

SEQ ID NO: 51360 - DNA, 122 bp, Homo sapiens
gggcccgaccttcccttcgggatgctgccgggtgggggctcccgagaaggcgcaggtgagcgccgcggccccgcgctccggcgaaaagggcctcggtcctccccacgcgcaggcagcgggga

SEQ ID NO: 51361 - DNA, 122 bp, Homo sapiens
gagttaaaacaggtgtttgtatatctctatttcctgaggcccagtagagtctcctcttttcggaaagtgttggaggggggacgtatttgggcatgattttggatgtctcgtcctattgaaat

SEQ ID NO: 51362 - DNA, 122 bp, Homo sapiens
ggaagccacgctgtctgaggcccggctcaagtcggtggtcgtggcctccagtgagatccacgtggaggtggaacgcaccagcactgccaagccggcgctgacggccagcgcaggcaacgaca

SEQ ID NO: 51363 - DNA, 122 bp, Homo sapiens
gagggattcaatgagacaagaaaaggcagaaagaaaaatgagacaagatagacaatatgccgttgctacctctcatgtccctgctgcagctcacattgattgggtacctattgaatgccagg

SEQ ID NO: 51364 - DNA, 122 bp, Homo sapiens
cctggtctggtgagcggcaggtggagcgccagctgcaacgcggtggggagcagtgaggggcgtggcacagcaggcaggagcccgcggggcgaggcggcggcccgcagacagctgcagctact

SEQ ID NO: 51365 - DNA, 122 bp, Homo sapiens
gaactacttcccccgctggccccgggaaagacacattttcagtgttccggaaggtcgctccgaggcctcaaaaccataatcgggtctcaacagactctgggactttatacgtcgcccggtgt

SEQ ID NO: 51366 - DNA, 122 bp, Homo sapiens
ttcggcagcgccgcctcggagactgtcctcaccctcccctcgatggcgaagcggccagggcgtgacctaccagagccacccagccaatgtatgcggcagcccaccagaacctgggcccggga

SEQ ID NO: 51367 - DNA, 122 bp, Homo sapiens
ggatgggcccacggagcagtgcccggacccgctgcccttgccggccggcaactgcacggacgaggtgagtcccccgccacccccagctcctgggcagggacggcctccaggtccagggggag

SEQ ID NO: 51368 - DNA, 122 bp, Homo sapiens
ctcattaacccgtggtcacaccgtccaattcgtcaaagaaacctgaagcaaggggacggacggaaccggcacatgcatgggtgcaggcgaatccctggctttgctaattggggttctcttcc

SEQ ID NO: 51369 - DNA, 122 bp, Homo sapiens
tggtttggagtaaaccctggcctgggaaaatcgagacgataactgaaaagcagtcactgacggcaaatgagcccctgggacttctctccgcgagctttcccagccaccaggccgctcccatc

SEQ ID NO: 51370 - DNA, 122 bp, Homo sapiens
gaaggaagatctggggattcctattgtaatttttcagtagcaatttgtataactttatagcgagtaagcagtggagccagaatttataccaatattcattatatcaggtctcctaaccataa

SEQ ID NO: 51371 - DNA, 122 bp, Homo sapiens
agggtgcctgacagtctgcgggatcgaactgggaggcaaattcagatttcgctgggggaacggagtgcgaagtgtcagggtagctggacgctaaactggcgcagctgcgcgcgcccgcgcgc

SEQ ID NO: 51372 - DNA, 122 bp, Homo sapiens
gcctgggtgaggccgtggccgtcagactcacagggattctcaaacacccatccggagtttcgctttatcaggtccatgacactctggtcacaccctcccagcctggaaaagaaggggcctgt

SEQ ID NO: 51373 - DNA, 122 bp, Homo sapiens
ggtggggcgcatgcccgccactggactgaaagctgagtcacaggaatcgtacccctgcagcgggccaggccctccagggagggacaccgcgcccttgtgtggagatgtccacagtagacaaa

SEQ ID NO: 51374 - DNA, 122 bp, Homo sapiens
cctagcttcactctctgcagtggagggattttgttctaagttggtctcatctgctcatggcgattcactggagtgcttcatgggttagcagaaaagggaaaagaacgcagaatgacatgctc

SEQ ID NO: 51375 - DNA, 122 bp, Homo sapiens
aattcatcattgctagattagcatattaattttgagctatggcacttatttttaatctttcgtagtgtaatggaaaaaataccagaaagctcagcattgaacttcaaagtgtgaaatcaagt

SEQ ID NO: 51376 - DNA, 122 bp, Homo sapiens
tggaccccagagaccaatggaaggttaacattgcactagatgaagatacctggtcccctgcgccccatcccagaactaagaagttgttgaaccagggggctaagttccctagttcctgaggt

SEQ ID NO: 51377 - DNA, 122 bp, Homo sapiens
ccctgcctcgtggtcccagtgccgcctgtccgagacccgggtagctggatgggagatttccgaaagaggagaaggtgtaggtgcccggggagggagcgcccgtccggactctacaggtagga

SEQ ID NO: 51378 - DNA, 122 bp, Homo sapiens
tttaccacgcggaaagcagcttttcctgtgcttcctgcttcccccggaagtgccttgctacgggaagtgacgagagccgggtggacccagggtggggaactacctcttcctctccacgcggt

SEQ ID NO: 51379 - DNA, 122 bp, Homo sapiens
accccgctccggccgccccctcgccgcttccgcccgtgtctgtttccacgcgctcggagccgggtggcatctccaccctcaggccttccggccctgcccggctggcccagccccagggccgc

SEQ ID NO: 51380 - DNA, 122 bp, Homo sapiens
ccatcttgacttggaatcaaccaccctataggccacgctgtagccttagatactctaactcgtgaaattttcatcgaccgtcgtccatagggcaaggcacgcttctgccctctgtgggacag

SEQ ID NO: 51381 - DNA, 122 bp, Homo sapiens
tgccgcgcaggctgcgcgtgaagggcgggtagttgaggaactcgaagcgcaggctctgctcggtggtgtggtggccccggggcagccgcttcatgaagtggacctcacgctggtgctgccgc

SEQ ID NO: 51382 - DNA, 122 bp, Homo sapiens
ggccagcgaggtccgtgcgcagccccggctgccgcctgcgcttctccctccacacctcaccgttagcagagggagccggctccggcctcagccagccccagagacaggcccccacagcacag

SEQ ID NO: 51383 - DNA, 122 bp, Homo sapiens
tgggtaaggaacctgagttctttagaggcagtctctaaagagagaagtctttcattcatgcgtatttgtatccaggctgtgagctgagaactctgtcaatggtctttgcagatgcaattcca

SEQ ID NO: 51384 - DNA, 122 bp, Homo sapiens
atttccatcatggttaaagtgatgggttagcaggactatgggtgagctatctacttacagcgagtgtgtcaaattggggtcagacagaaagagcagcaaggaactaaactgggccatggtga

SEQ ID NO: 51385 - DNA, 122 bp, Homo sapiens
agcggcaggcagagttcggggtcggggagtttatcctgcgctggcctcggcaggggtccccggggtggttgatcctcgactggcccgggaggcgcctgggtccgcgcgggacctctctgcct

SEQ ID NO: 51386 - DNA, 122 bp, Homo sapiens
attcctctctcgccgaggaatagtccatggagtggtccgaccacgttttgtgtgtcctttcgtctgccagggttccactttggagcagccgctctgcaccaggcattttcacctcctgcctc

SEQ ID NO: 51387 - DNA, 122 bp, Homo sapiens
agggtctcactctggtgcccaggctttactgcagtggcgcgtcttggtgtactgcagcctcgacttcctgggctctagtgatcctccaaactcagccttccaagtagctgataccacaagtg

SEQ ID NO: 51388 - DNA, 122 bp, Homo sapiens
caccactgcagccaccagaacccgggcttgagtcatattcattctcgttcctcctgggagcgggagaaaaggaccctcagtcccgtgagtgacaggtccaccccctccagtttctaccctct

SEQ ID NO: 51389 - DNA, 122 bp, Homo sapiens
acgtccgccccgccctcgccccaccctcgccccgccctctccccaccctcgccccgccctcgggttctccagactgagccttgcttcaggggccactgcctcggtccctcctccacgagccc

SEQ ID NO: 51390 - DNA, 122 bp, Homo sapiens
aatcccagctctaccactgggcagttgtgtgacatttggcaaattacttatactccctgtcgctcagtttctttgtctttcaaatgggttaataatatcacctcatggggttgatttaaacg

SEQ ID NO: 51391 - DNA, 122 bp, Homo sapiens
cagcaccgggggacgaagaaggtcttgctaggatgggggagggcgggaagacggggagcacgagccggctttgccctcccatccagccacgcggagaatccatccctggcggtgccgactgc

SEQ ID NO: 51392 - DNA, 122 bp, Homo sapiens
aaaaaagtttaatagaagagagtttgatgaaaggaccacatgcagtgatgtggacaggaccgagagaaccaataaggggtggtgaaactcctgggtctagcaacagctggaagctgtagcca

SEQ ID NO: 51393 - DNA, 122 bp, Homo sapiens
ggtgacctcaagaggggctgctcctgcaccaaggctatgtgtgcatgctaacacagtaaccgtcatatactcaaagtgtcagctctaagaactggagatgaggagctgcaagccactctaca

SEQ ID NO: 51394 - DNA, 122 bp, Homo sapiens
gccatctctccggcgccgtaaggggcggggcaaagcctgaggggcggggcaatgagcgcgcgcggcgcctgacgggagagtggcggacccagaggcggagtctacaggtgggggcggggcct

SEQ ID NO: 51395 - DNA, 122 bp, Homo sapiens
agcgagcgcgcgcaaggagggggcggggcgggagcgcgcggaacggccgcgggctcggctcgcgccctgagggtcagctccgcccccgagccccgcccccatcggaaccccgcccccggggc

SEQ ID NO: 51396 - DNA, 122 bp, Homo sapiens
gtagagggaattagatgataatcagtagacataagaaacaagtgctgtagcaaactagcccgtggtgtatgatcagtgaactgagagcaacagtagagcagagtaggggagctccctggggc

SEQ ID NO: 51397 - DNA, 122 bp, Homo sapiens
tgcagtagattttctggggctacaccaactgaaaatgggccggaccgagatccgggagagcgttttcctgcgctagacacggcgttcagcctccgggttccgggtctagctgagtcagggcg

SEQ ID NO: 51398 - DNA, 122 bp, Homo sapiens
gggccgggataacccgggctgcagcaaccccgggcggcagcaggactggagagctggtgtcggacgcactgcagagacgtccctgttttcggcgcgtcctccgacacccagcagagagcttg

SEQ ID NO: 51399 - DNA, 122 bp, Homo sapiens
aagctgttataagggaaggagcaggcggtgagcgcgaggccgaggtcatccagggagcttcgtttctctgcaggaacagcccacagaggcggctgtgagagtagttcattcagcctggagtc

SEQ ID NO: 51400 - DNA, 122 bp, Homo sapiens
atttcccgagcacaagcatggagattttgaggaaaatctcccgggccctgtgaagtacaacgtgtcttatcttccccaatgtcaggtgcccaggttagaatttgcgtgtcgtcctcatgatc

SEQ ID NO: 51401 - DNA, 122 bp, Homo sapiens
cacggagggacggggcgcgtctccttctgaatgacgcaaggggcggggcgcgtggtggggcggggaaggcgcgaggcgcgccgcgatcggggactgtcctaagacgggcggggcgcgctgcg

SEQ ID NO: 51402 - DNA, 122 bp, Homo sapiens
cgctgactccctccgacctgggctccgatggagcagaaatagcgggacctggacttgtggcgcgcctggtgccacatctcgggctctgcgagcgtcctggcgcgggatcctgccgtgagaag

SEQ ID NO: 51403 - DNA, 122 bp, Homo sapiens
tgtctgtcgccctggcagcaaatgagtctcgcaccttgctccacacctggcccccggaggcgagtgagctgggggggctggccccttctgactccctggcaaactgagcagcatctgaccct

SEQ ID NO: 51404 - DNA, 122 bp, Homo sapiens
ccaaggcagaataaacctaatcctgttgttaggagtttgagaccagtctgaccaacatagcgaaaccccgtctctactaaaaatacaaaaaattggctgggtgtggtggcaggtgcctgtag

SEQ ID NO: 51405 - DNA, 122 bp, Homo sapiens
tagtgcaacttaaggactgagtttgtaattttatttaattttaatttgaaaataaaaagccgcatgtagctaatggctactgccatgttgaacagtgacaatatgctgcattccaaaggttg

SEQ ID NO: 51406 - DNA, 122 bp, Homo sapiens
cccaggtcttccagcaggtggccctgctgcctcttgagtgctggcagcatggctgaccctcggggtggttttatggtgcaggtcacttgggtcttcagggtcccttccgagggcatgtgttc

SEQ ID NO: 51407 - DNA, 122 bp, Homo sapiens
ccctggcagtgggtctgggacagagcccgaggtggcgggagccagggcagcgggaggggccgtcgcagtccagctcccgttcccagagggctcctgagcctctgaggtccccagctgccaaa

SEQ ID NO: 51408 - DNA, 122 bp, Homo sapiens
gggacctgggggcgggagaggcagccggaacggggtggccgggagcagggctgctctgaacgcagactgctggccctggctccgcagtactccctctgctctcttgcttggtttgagggacc

SEQ ID NO: 51409 - DNA, 122 bp, Homo sapiens
agaaagaggtttctgtaagtagcccggacaatgagaacaagaccggctgtatgccaagcacgggatcccggccaaaacacatatcattagcttggaccagctataagcaaggaaatgagaaa

SEQ ID NO: 51410 - DNA, 122 bp, Homo sapiens
gaatttttctagccattcatgtgcacacagaaaccaaaaccctccgcgcaggttcttctgcgcactgcgctgctcccagcgcagaggggccgtgttccgggaacacgtttcctgctctaaaa

SEQ ID NO: 51411 - DNA, 122 bp, Homo sapiens
aaatcaggtaaaagccattcctgcagcctgagccttttaggcacttttccagcagcagagcgggaactgcagcatcactctgggtgggggggttacggaataggattccatgtccaattcca

SEQ ID NO: 51412 - DNA, 122 bp, Homo sapiens
cgctcccggcccggccgcctcccattggtcgcgggcgcgggggcgaggctgggcggtgagcggtactgcacgccgggttccccaggctgcaaatggaaaggcgaagacaggagaatttaaat

SEQ ID NO: 51413 - DNA, 122 bp, Homo sapiens
cagccctgggaacttagaagggagagcttaaaggggcagcaggccctttatacatgctctcgcgataatactgtttaaggttctgtggaactttgttgttgcctaatagggaccgagtatac

SEQ ID NO: 51414 - DNA, 122 bp, Homo sapiens
gcccgcgttcctctctgcactcaggagctgcgtcccgttccgtgctggcgatgaggacgccggcctccgccaggccgagtcagcactctgtccccggggtctgactccgtggcccctgtcct

SEQ ID NO: 51415 - DNA, 122 bp, Homo sapiens
ttcagtggcttgcaggacctccggcgaggatgagtctccaaaccatctcagcctactcaacggcatctgggatgtccccctgcctctaagtcagaccccaagaaagatctttgaggacttga

SEQ ID NO: 51416 - DNA, 122 bp, Homo sapiens
aggacgtgcggcaggcaggagagccctctcccgacctgaccgtcacggaagcctctcagccggtgtctgagctgggactgggacccagagtcctcagtcaggctcttccctccgaggtgggg

SEQ ID NO: 51417 - DNA, 122 bp, Homo sapiens
agcatgagccaccatacctggcctagaattcacccttttaaagtgtaaatataggccaggcgtggtcactcacacctgtaatcccagcactttgggaggccgaggcgggtggatcacctgag

SEQ ID NO: 51418 - DNA, 122 bp, Homo sapiens
gtggagcagggggtggcgctcgtcggggtggctcaggctgcacaggagcccatggagcggcgaggggaggctcaggcatggcgggctgcaggtcccaagccctgccccgcgggaaggcagct

SEQ ID NO: 51419 - DNA, 122 bp, Homo sapiens
ccaccagacggcggtgtgtccatggcagctcccaggttcacttgggatttgctcctttgacgtttgacagttctggccttagcagggcctctgacgctttcgttttgttgaagtcttacctg

SEQ ID NO: 51420 - DNA, 122 bp, Homo sapiens
tatgcaaatttctttagccagtctgaatttctcctcagaaaacaggattttcttttcaatcgcattgtcaggctgcaaattttccaaaccacttcccttataaaactgaatgccttgcatta

SEQ ID NO: 51421 - DNA, 122 bp, Homo sapiens
ttaataataatataacaatagttatatagcatgctttgtgtcaggccttgttttaagtgccggctaaccataggtcgaaggcttcctggattccctagcagaggaatgaatgacatgaaagg

SEQ ID NO: 51422 - DNA, 122 bp, Homo sapiens
tcctggtagaaaaaatcagacctcaatgtcttatttttacacaaggaattccttttacatcgatgtctttaaaattcacaggaaaaaaaaatctcaacaccagttgaaaattcaatgtccct

SEQ ID NO: 51423 - DNA, 122 bp, Homo sapiens
caatgaggattaagagagatgcatggcataaatgttggggccaagatggggcagcttcaacgtgaaagagtcaggatttatttcaggcctcctgcttccaagcctgatatggtgatcattct

SEQ ID NO: 51424 - DNA, 122 bp, Homo sapiens
tgaggttggggcctctgagctcaggtctcaggaggtgtctgctggtggcctgatgggctgcgagggtcttggtggtcagtggcccccccatgaacagcagcaatgcaagctgctcccacaga

SEQ ID NO: 51425 - DNA, 122 bp, Homo sapiens
cccggcgaaagtccatcagactcccatctcatctcctttctgtctgtagagctatctgcgcggtctgtctctccaactctctccctctctccatctgtctcttcccctccctccccctttct

SEQ ID NO: 51426 - DNA, 122 bp, Homo sapiens
ccacggccttgttggagggcgtcctgttagccctgctcagcctgaataactcaaattctccgaattcgcagggtaatccgcttcgcttggagccgtgtaaactcaggctgacatacacactc

SEQ ID NO: 51427 - DNA, 122 bp, Homo sapiens
aggcttcgcgggggccgggtgctcctggttaggctaaggtaggagcggcctgaagacgcgcgtttagaaggcgcgggtgaaggcgggcaacaagggcagagcccttctcccgagccttgggc

SEQ ID NO: 51428 - DNA, 122 bp, Homo sapiens
gcagccggtggacgtgtgtagaggctgaaggagagctgtgttgctagctttgtatttgaacggttcgtacacaaacagttctctttgattaagtatccggtgaaaccaattcacatgaactc

SEQ ID NO: 51429 - DNA, 122 bp, Homo sapiens
ggagcgcaacaagttcgggaagcagaaattgctctaggggttttctgtgcccaagtttcccgccgcgcgctggcgccgcgcagtacgcgggaggcagggcgtaaggggcgtctgcgcctggg

SEQ ID NO: 51430 - DNA, 122 bp, Homo sapiens
aaggcttgtccacggaaaggcaaaagcgactcccgatcaaaatccgggggcacctggtagcgctctccacgccagcagaaacgcccaactgacttcttaatggagggaaaccccgggcttgg

SEQ ID NO: 51431 - DNA, 122 bp, Homo sapiens
tggggctgggagcagtggctcacgcctgtaatctcagcactatcattttctcacatgaatcggaaaatgccgacgtctgcatcctaaatctaaactaatttcccactcacttgctaagcttc

SEQ ID NO: 51432 - DNA, 122 bp, Homo sapiens
aatgcagcgtgaagctgcagttctgccatcactcaagatggctgcccccatcaagatgaccggggtgtgccggggggaaaggggcagcatgatggtctgagatggtaagggatactgcacca

SEQ ID NO: 51433 - DNA, 122 bp, Homo sapiens
ggaaacccagttcgcctcccgcgccgctgtgtgaactgactgtgaactcggggtgggggccgtccccaaatgtgtatgagtctctggctccccttgggtaagatgcagtgcctctttgggtg

SEQ ID NO: 51434 - DNA, 122 bp, Homo sapiens
cagattcctgggcccggctgcagactccctgaatagaatcactgggggtgaggcccaggacgctgtgtttttaacacccttcccaggtaattctcactcacagccaagcctgccgatggctg

SEQ ID NO: 51435 - DNA, 122 bp, Homo sapiens
gggcacctgtgcctttcccaccacggggcttggggatttggtgctgccattgccctccctcgtaggtggccctaggggggtccctccgcctccgtttcctcatccagaaaccggcagtgacc

SEQ ID NO: 51436 - DNA, 122 bp, Homo sapiens
atcctaagctgaaagtcccaactccaatattaagtacataatctaggggttaccaagaatcgttgagttcctcttgggcttcttcacatacctgttaggctgtgggatatatattaaggcag

SEQ ID NO: 51437 - DNA, 122 bp, Homo sapiens
gcgtgagccaccgctcccggccccggaaagatcttttttcctaccatatcgagtgcagagcgttaaagagttttaaacattaaaaactaaaccctttctcagtactttttaacttacatttc

SEQ ID NO: 51438 - DNA, 122 bp, Homo sapiens
gaagaagaccctatttctgatgggcaaattataaagaggaaagggcgggtctagcctccgcgggtctccttaaaaggggcgggctttgtcccttttgcaccactcacaaaggggttgagccc

SEQ ID NO: 51439 - DNA, 122 bp, Homo sapiens
ttgggaggccaatatataggccctttttcctacccgggttctcgctgaaatgagtaaggccggagatggctcaggaaagccaaaatatcacctagataaaggccgggttgggaagcagcagg

SEQ ID NO: 51440 - DNA, 122 bp, Homo sapiens
ctcttgcaacactctttccagagtgagccgccgaggggtgagcgtagtggtccaggcgtgcgccagccggtggcctctgacacaggggcatcacccctcacccaaagaccgggcctccaaca

SEQ ID NO: 51441 - DNA, 122 bp, Homo sapiens
gtgagcgtgctttaggccacggcaactcccgagaggccaactcagaggtcaggcggagggcgaggtccctgccctgggtcccgcccggtccactggggccagaacctcccctgctcggagtc

SEQ ID NO: 51442 - DNA, 122 bp, Homo sapiens
ccaggtcagccccgccctcatttcggtcaggtaacccagccccaaggttcctcccctttccgaaggttgctgcctccctcgatagagtaagccagaccccacccacctgcccgggaggccac

SEQ ID NO: 51443 - DNA, 122 bp, Homo sapiens
aggtcgggagggagcttggggaggaggcgctctgggaaacccccggccggacggggcctgcggtcccatgtttactggaagaccttttccagtgacctgggattgtcactgtgcttgggggt

SEQ ID NO: 51444 - DNA, 122 bp, Homo sapiens
tacaggcatcagccaccatgcctagtcgattatgccccttttaatggatgagcaaagagtcgaggttccactggttttccactgcagtgtctctgctgaaggattaaaaaaaaaaaaatcac

SEQ ID NO: 51445 - DNA, 122 bp, Homo sapiens
tctaaaacaaacgaacctagaatttcaaaataccctcttaactggaactaaatcaaactgcgatttcattcaaaattatttgatttgaagaagctgttccttttgctttcaagaatagggtt

SEQ ID NO: 51446 - DNA, 122 bp, Homo sapiens
gtgagccagcggtggcctctcccttctttcatacacaaaaagtagcatactcttgtcaggcgcggtggctcacgcctgggcaacaagagtgaaactctgtctcaggaaaaaaaaaaaaagta

SEQ ID NO: 51447 - DNA, 122 bp, Homo sapiens
cgcacgacagggctcgggagagcatctgaacgcacgacagggctcggcggagcatctgaacgcacgacagggctcgggggagcatctgaacacacaaaggcctgcctgctgagggatcggca

SEQ ID NO: 51448 - DNA, 122 bp, Homo sapiens
aaaagaattccagtagcaacatgatttaaaccagaaatgctatgccaatcagaaggccaccgaggctctcctgcaccctccccattttcagtagcagcgttctgctgctcctcaaactgtaa

SEQ ID NO: 51449 - DNA, 122 bp, Homo sapiens
gtcgcccactcaactctctttctcattcctaaaggaaaatatttatattacgccacagaacgggtttccatgacagtgacgactgtaacactgttgccttagcaaccacttgagtccatctt

SEQ ID NO: 51450 - DNA, 122 bp, Homo sapiens
tgctcaatttctctgagccttgtctttatcacctgtaaaagggagatgataaggagtacccgaaacatagaaagtactcaataggtgccggctataaccttacaatagggaagcatccctta

SEQ ID NO: 51451 - DNA, 122 bp, Homo sapiens
gagctggcaaggtggagccagggagaagcagagcagagggggccgatctccaagctgggccgggccccagcaatggaaaggcatcttgtatactgtagagggacacacagatgttaagggtg

SEQ ID NO: 51452 - DNA, 122 bp, Homo sapiens
gtatacatctatcttattagtactgtccttctagaaaaccctaactaggatgggtgagtgcggggcgggcgtggggaaggaccgggctcccctcgcatatggttggagagaggtgaaacgcg

SEQ ID NO: 51453 - DNA, 122 bp, Homo sapiens
gtagagcacctgggctggggcgaagcgcctgccctgaagccctgggccaggaggtggtagcgcgggggtggaggtgtcggataatctaatgattaggctcgctgtggggcaggagggctgga

SEQ ID NO: 51454 - DNA, 122 bp, Homo sapiens
aacgtgagctggtgcttcgtgtgctccaaaggtgaggggcctgggggtgtctgcggcacacgcctctcacactcccaggagccacatatcaaggcaggctcattccttgtctgcgctgtgtt

SEQ ID NO: 51455 - DNA, 122 bp, Homo sapiens
aatcttttcttctttttctcctcttctttagttaatcctgaaattttactgggcattgagcgtgcagaggaaaggcctagaactgaatgacaaagaaagacaaaggactgaagaacagcaga

SEQ ID NO: 51456 - DNA, 122 bp, Homo sapiens
cttcatatgcttacaaaaacagcaatgcttggatttgagagagcaatgtttatttgccctcgacataaaggaggaacctctggaggccttgggacttagggcaagaacttgctaatggtaaa

SEQ ID NO: 51457 - DNA, 122 bp, Homo sapiens
ttatctcccaggagcaagtatcctgtgtgcgcagcgcatgaatgtgtctgggcatctccgcgtatatttatatagtgtgtgatgcgaaaagcaggaccagcaggggaggaagagggggtgtg

SEQ ID NO: 51458 - DNA, 122 bp, Homo sapiens
tactattatccccattttacagatgatgaaactgagggacaagttttttttaagtggctacgtcactaaaggtagtagctgagcaatactgaagtgttagtctgacttcaaagctggtgtaa

SEQ ID NO: 51459 - DNA, 122 bp, Homo sapiens
gcaagttgcttaattcatctgtgcctcagtttcctgccctttaatggggaccacacataacggtgctgcatagggtgtgaggagagttcaatgagtcaagcccgcagaagaacagccagcac

SEQ ID NO: 51460 - DNA, 122 bp, Homo sapiens
tggcaggagaattgagcacaaacatctttcaattcctggtgttgaaaacaaactatcctgcgttgaattgatcctggagagatttctccagggccctttcaaaaaccagacactcattagga

SEQ ID NO: 51461 - DNA, 122 bp, Homo sapiens
ctattcctaatgccatcattatagtctggaccatgcctattgcaatgagttaagtgtcttcgatttctacggactataacaccaccctacatgttgtgccacccaagtagttaccttttgtc

SEQ ID NO: 51462 - DNA, 122 bp, Homo sapiens
agtcgggcagcctgtgaaaggccagatatccggctatcatatgcaggccagtatccagagcgggtcatacaaatagagcctgacacgaccacatagactcaatgcttcctgcacgctggaat

SEQ ID NO: 51463 - DNA, 122 bp, Homo sapiens
gtgacttgcctaaggtcacacagctgggagcagcaggccaggcctgttgtttccgccttgcggcgcagctggaagaccctcctggtggctgccagcccatgctgagcattgctttctgaact

SEQ ID NO: 51464 - DNA, 122 bp, Homo sapiens
gagctgggaaggggacggggacgtattctaagaagggcacccaataataataatgcatcccgaacaaacataaggcagatatagaatgttctgtccaaatctttgtatttcctcagtaaaat

SEQ ID NO: 51465 - DNA, 122 bp, Homo sapiens
aacctcaatccaccgtcaagtccaccctctctgggtcttggtcattccccgtgctctttccggagccagaatcaacccccttcatgcttggcccactagacagaactcacgtggattttgaa

SEQ ID NO: 51466 - DNA, 122 bp, Homo sapiens
tgttcgggtgaccctcaagccgggtgcccaggccccctttaaagtgtgagctctgcaacccgcaaatgcttctgggcatcaatcaattcgatttaccaaacgccttgcctcttcttctcacg

SEQ ID NO: 51467 - DNA, 122 bp, Homo sapiens
caaatcctataaaatggccccagccctatttcccttagctgactatttttggactcagctcgcctgcacccaggtaattagaaagctttattgctcacacaaagcctgtttggtggtctctt

SEQ ID NO: 51468 - DNA, 122 bp, Homo sapiens
aggccagcactcgcacccttggggtcagaaccggaaagagccaagtcactccactctgaacgcgctgggcagaaaaatatgtaaatcagggctccctgcgccctggagagtggcgaaattac

SEQ ID NO: 51469 - DNA, 122 bp, Homo sapiens
cacgtgtggttcggcctcgccaagctgggctgcgtggtggcctttctcaacaccaacattcgctccaactccctcctgaattgcatccgcgcctgtgggcccagagccctagtggtgggcgc

SEQ ID NO: 51470 - DNA, 122 bp, Homo sapiens
caggtcccgagccctgccccacgggaaggcagctacggcccggtgagaaattgagtgcagcgccggtgggccggcactgctgggggacccagtacactctccgcagccactggcccgggtgc

SEQ ID NO: 51471 - DNA, 122 bp, Homo sapiens
ggcctcggctcggggtggggtcccaggcgggcttggggacccggcgtgggctggcggagccgcccgaggggctgctcgggatccccggcggccgtcgtggccccgaacccgggttcgagcct

SEQ ID NO: 51472 - DNA, 122 bp, Homo sapiens
gggctcaagtgatcctcccacctcggcctcccaaagtgctgggattactcgcgtgaaccacggtgcctggcctgcacttggtttttaaatggcaggcttctggagcactattaaactaaagg

SEQ ID NO: 51473 - DNA, 122 bp, Homo sapiens
ggaactttcagttcggtacgattttactgagtagataccctcagccttctgtagggcccccgaacgagcagtatcccctcaaagaaactcaatccttggcagcatgaagcaaggtcggccac

SEQ ID NO: 51474 - DNA, 122 bp, Homo sapiens
cgtgcctggggatgctcgattcccagacaccatagagagtgttcctgggtttgagaaggtcgtattttgagatctcaactgtaggggactccttgacttagtccagtgctttcctcttggcc

SEQ ID NO: 51475 - DNA, 122 bp, Homo sapiens
cgctaaccccaaggctttagtcatgctatattgttccactgagctctcaaaatgtttaaccgtggcttttacttaaagaattccaggaactggccttacgagacccaaactatcaaaccaaa

SEQ ID NO: 51476 - DNA, 122 bp, Homo sapiens
actatcgagatttaaatgcctgttttctccccagaggttgacggatatattcagacgttacgacacggatcaggacggctggattcaggtgtcgtacgaacagtacctgtccatggtcttca

SEQ ID NO: 51477 - DNA, 122 bp, Homo sapiens
ctcccgcggagcccgcctccacctcgcccccgcccttccagccctctcccgcacggcccccgcactcccgccgctggattccagccgagattcaagctcccgggatcccccttcccgggcgg

SEQ ID NO: 51478 - DNA, 122 bp, Homo sapiens
atgattgcccaactgccctgctatgtagcaggtgtttcctagggctgccttctaaccgcccgttactgggtcctggcactgaaagttcccagagaaagtgaggagtttcagggtacccctgt

SEQ ID NO: 51479 - DNA, 122 bp, Homo sapiens
aatgtcttatatacataaatgttgtcctctccaattaaaatgttaacattttaggttgggcggggtggctcacacttgtaatcccagcactttgggaggcccaggcagaagaatcgttttag

SEQ ID NO: 51480 - DNA, 122 bp, Homo sapiens
gaggagtcacaggccggcaatgttgggaagactcctaggatccgattgatagacaccaaccgggtgctgcaggttgtgaaatggccccttcctgcccagagctgcccaatgaggttctcatg

SEQ ID NO: 51481 - DNA, 122 bp, Homo sapiens
ggcttccccggaaaaggtggggaggggctcctaggcactcgcggtttcctggagatccaccgtctccctgggtagctcaggccggtgctccaaggccattgcctgctgacgcagccgactct

SEQ ID NO: 51482 - DNA, 122 bp, Homo sapiens
gtctgggtgggggttcggcggagtcgggagacctgggctgtcgtcagggcttgtcatggacgcgccggagaccctgagaaagcattctcctcccccgggcctcagtttccctcctgttgcct

SEQ ID NO: 51483 - DNA, 122 bp, Homo sapiens
agccacctctgaggagcgttggggacgaaggtgggggcccagcaggcccctgggtcggttcggacgccgttagtgtatgctagggtgggcggaacagggatgcggagcgggaagcctagagg

SEQ ID NO: 51484 - DNA, 122 bp, Homo sapiens
aagtcccgcccacgccgctacgggaacgcccctctgcgccttccgtctatggcttggggtcggcttccgtcccttgtagcactgccttctgggtaatgtagtttgacggaatccgggtggta

SEQ ID NO: 51485 - DNA, 122 bp, Homo sapiens
tggagagagatgttcaaagtgttcagatgcatcgtcatgtcaaccaagaaggccaggtctcggatccaatctatggagctcagttgaggcaggggtttccctctggatgacatgaaggagtc

SEQ ID NO: 51486 - DNA, 122 bp, Homo sapiens
tgccttcatccttccagttgcagggctggggttgcctcgtgtgtctgggggcgcccagcacgcttccttctcctcttgcaccggcccagggcctgagaagcacatggtgggttgtcttggcc

SEQ ID NO: 51487 - DNA, 122 bp, Homo sapiens
acagcagcccctcggtacacgcagatacgcgtgcagagtgggctgtgcctgtacctggtgcgatgagactgtggtgcttgcagtgtacgatggctgctaccagcaggtccttgaggacacac

SEQ ID NO: 51488 - DNA, 122 bp, Homo sapiens
cgtccagcatctctccaatgagaagagaggccaggctccatctcagattaggcatctcaacggccactgtggaagctgtgaaccacatacttgaggatccagggcaggggatggggtggtct

SEQ ID NO: 51489 - DNA, 122 bp, Homo sapiens
tagcgtctgacgatggagtcgtttcccgggggctcggcggtgattgacatgatgctgctgcggctccgggggggctgcttcagacacagacacacacacgttacgggtgcataaatattaca

SEQ ID NO: 51490 - DNA, 122 bp, Homo sapiens
gtaggttacgccccagaagcaggactttctgcctctgggaaaactctaaaaccgttcacccggaacctttacttcagaaaaattaacctcacgctgaggcatcatttttaaatgttatattc

SEQ ID NO: 51491 - DNA, 122 bp, Homo sapiens
ggccggggccagtgggaagccctaccattgacactgcctaatgagtccagctggcactcccgggaccctctggaaccaaagcccctgaccttcatcttcactccattcctggccaggatgtt

SEQ ID NO: 51492 - DNA, 122 bp, Homo sapiens
aatgcatgccaactatttttctttattcaaagtctgaattggaggggcctgaaacaaaaacgcctgttttcctcacaggaactgccctcgtccttaagcattttctaatggtggcataacca

SEQ ID NO: 51493 - DNA, 122 bp, Homo sapiens
gagtaagcggctgagactagtttagactgtctctacctaaaggctgtcctgactttgtatcgtggcggtggcggccatgtgcatcaggtgtggtagatttcttgccaacttgaatgggccgt

SEQ ID NO: 51494 - DNA, 122 bp, Homo sapiens
aagcacagcaagggagcccttttacccactactaaaacctggctctgcactgaggccatgcgcagcccagtcaggtggacgagggggtaacgactggaccgtggggaggcatcagaggagga

SEQ ID NO: 51495 - DNA, 122 bp, Homo sapiens
gccaactggatgacagcattacctggacctgtcttgccctgtcctgtgttgtgtctgaaccgtggtccccttgaggatgtgactgaaactatctggtagatgactgtctccctccctagggc

SEQ ID NO: 51496 - DNA, 122 bp, Homo sapiens
cagcatgcagggccaggtcttggagtcagtaggcagagctcaggcgcccaccactgctctcgactccccgaggctttggcgcccgggctagtgtcccggctgcagggctgcattcgggaagg

SEQ ID NO: 51497 - DNA, 122 bp, Homo sapiens
tgtgttttgcaagctcggtgcaaaccagcctgaaggtgcaaagcgtcattgctgtagtgccgtgcgttcttgaggacacggcaacagcacgttatgcttcgcctacttagactttgggtaat

SEQ ID NO: 51498 - DNA, 122 bp, Homo sapiens
tggagtagttgctattaacattttgcaggccacagaccagaggggtcttcagttgttactcgcccatcttacaggtgagataacagcctcgtggaggttgagtcagtagaataagattgcat

SEQ ID NO: 51499 - DNA, 122 bp, Homo sapiens
tccacatttaatccaaagccaacagttccatgggtgactgtgctgctggctgtaggaagccgactgtggacagatgaggataatggtctgagtgaattagcaagtctggagaggagcgccca

SEQ ID NO: 51500 - DNA, 122 bp, Homo sapiens
tcgagaggagatgagaccattctttatttcttattttcttctttctggtgactgccagctcgctcagattcctccaccttccttgctggggtgctgccctatcagccccaccctttctattc

SEQ ID NO: 51501 - DNA, 122 bp, Homo sapiens
gcgggaggaggagacacgagtatggagcttgcgcagtatctacccaacctgcggctggcccgtgccaaagaggaaagtgcttccggcagcctggttaggggtggaaccaggaaagcgcaggc

SEQ ID NO: 51502 - DNA, 122 bp, Homo sapiens
acactctcgtgtcgttgcctatgaggctctcgctccctctgcaggagtagtgcacgacggcgccataggtaaacagctctccagtgaggacggcgttggcagggacccctgggtgtccacac

SEQ ID NO: 51503 - DNA, 122 bp, Homo sapiens
tggggggattaactttcagtcacatacgttcaggactgtgcgtatgcgtgtcgggagacgcgtgaaccaaagaagccacagagcccgaaaaagacctgcaacaggaggtagagaccgaggaa

SEQ ID NO: 51504 - DNA, 122 bp, Homo sapiens
tggatggtgagggtgtggggaggatggagagggtgtagggaagttggttgtacatactctcggactcacagaggcctgggctactcagttccccgggtgtcaagtgaggcctggattcgcgg

SEQ ID NO: 51505 - DNA, 122 bp, Homo sapiens
atctgcccacctcggcctcccaaactgctgggattacaggcgtgagccaccatgcccggccgagacaaggcaaatcttaatatttttaaatatatatagtttggaggagaacaagcactgag

SEQ ID NO: 51506 - DNA, 122 bp, Homo sapiens
ttgggagagtttccgtggtaaacggggggattgctgtaggaggggggatgagctagccctcgggcttccccatctagctgggacggatatcgtgcatgacttggaggctgtactttaaaagt

SEQ ID NO: 51507 - DNA, 122 bp, Homo sapiens
gtggatgccctgggtatatactctctgacacagaggtgactgcctaagcagtcagatttgcgacagtgtgatcctttttggaattcatatactggggcaagtattggaaccaaggttgccag

SEQ ID NO: 51508 - DNA, 122 bp, Homo sapiens
cgcaggaacgccacgtagcactagtcctgtgaggcgtcggcagcccctggcgacactgcccgcgccaaaccaggtggaaaatcgggctgcaagggctttattgtaatttgtgactgagttct

SEQ ID NO: 51509 - DNA, 122 bp, Homo sapiens
ttccctcagatcgattcctttctcactttttttctcagctgctggttctgcggcttggatcgatggagccacctccccccgcccgtccacgcttcctctccctgctgctcattagcgccccg

SEQ ID NO: 51510 - DNA, 122 bp, Homo sapiens
gatgtctgatgatgttgctcagatgtttagacccagcttaaatcagcagctgagccaagacgtgctttatttttcttttactttttttttttctttagagacagggtcttgctatgttgccc

SEQ ID NO: 51511 - DNA, 122 bp, Homo sapiens
atgcgcgcgcccgggcggcgcgggatctgggtctggggatgtggtaccggctgctggcggcggccggcagtagagcggtggccaggccgctggccttgctgtggcgatgtggtggcccagga

SEQ ID NO: 51512 - DNA, 122 bp, Homo sapiens
cctttgacagaaactgtactgtgatcacagtgaccctaaaacttgagcatgcttcagtatcgctggactctgagatgcagattcaggacattggggtggggccagagaatgtgcatttccaa

SEQ ID NO: 51513 - DNA, 122 bp, Homo sapiens
gaagaaatatgaaaattgtcaaccactccttccttagggggtaaaagcaacattcagcaccgggggcaggtcaaggcaaggtagtcacgtggggggtgcctgggccaatggggggccctggg

SEQ ID NO: 51514 - DNA, 122 bp, Homo sapiens
gaggaggaggaggaagagaggaacgaggcggacaacttcgacttggtcgcggccgcccgtcgctaccccataagaggctttcgcatggagtttctggacatggtccactcccttctcctccg

SEQ ID NO: 51515 - DNA, 122 bp, Homo sapiens
ttctcaggagggagcattaaaacaaagagccaaaagttctaaaacgggggacttttcactcgaaatgggcagatgcagaagataccattagtcaatttgtaccagattcttgatttattccc

SEQ ID NO: 51516 - DNA, 122 bp, Homo sapiens
atatttcctccccagccctcggcccttaagccccagaacgctgccccgccctgggtggaacgaagctgagctccaccctagaggggcggggccctttagctccgccccactcaggagaaccc

SEQ ID NO: 51517 - DNA, 122 bp, Homo sapiens
taagtgaagcttggcctgagtcactgcaacagaatatagagcagagatggggccagaattcggagctgagatggggccaaaataagaagacatggcagggcagacaaaagcccaccacagga

SEQ ID NO: 51518 - DNA, 122 bp, Homo sapiens
tgtcagagtgagagatgaaggggagatacagaaaggataatgcatttgagagctacttagcgggcagattccgcaggactcagtgttgattgactgttgaaagtaaaatacatgattcccct

SEQ ID NO: 51519 - DNA, 122 bp, Homo sapiens
gatggatgactttgggcctgccaagaacctcatgaccatgtgcttcacctactaccacatcggtaagacatgggtgggctgatgtggggctcacctgaggctagtctgctgataatatggtg

SEQ ID NO: 51520 - DNA, 122 bp, Homo sapiens
ggcttcagcttcctgtgggaatggggagatgagccacgttctgccccggtatgtctgcaacgacgggatcagattacggagttcatatgagggtgaaggaactcggctcagggccgggccca

SEQ ID NO: 51521 - DNA, 122 bp, Homo sapiens
actgggcggtgcagctctaggacatgtctgttgctgcagaaagccctgccctgcgccctccgttgctgtctgctcccccatgggccttccacttgctcttcctctcacactcgctcactcct

SEQ ID NO: 51522 - DNA, 122 bp, Homo sapiens
cgagaggtggggagagaggcagcccagtgatgactaacccaggcgccccacccagccagccggcttcccaggcagtcagggccaggcctgggctaggggcctcacaatcggacaggctgggg

SEQ ID NO: 51523 - DNA, 122 bp, Homo sapiens
aatacctcagcattagcaggagttggtcctgtgttgcacagtttccgtgtctatgatctccgacacaagagagagaaagactatctaaccagtgatggctcagccaaaaactcctgtgtgtc

SEQ ID NO: 51524 - DNA, 122 bp, Homo sapiens
agtacttgtcactgctgtatgtccccagatggacactctgcaattgcctggagatagcggcggattggacagtccaggtcgctgagtcaagctaaagcaccgttgttttgactcactctttg

SEQ ID NO: 51525 - DNA, 122 bp, Homo sapiens
ttccacgcagggaatcagtgtgtctaattttgaggtctctccattctcactgaccactgccgtcctgctggcctctgggattccaagcttgggtgtttcctcaccgtatcacctgaaagccg

SEQ ID NO: 51526 - DNA, 122 bp, Homo sapiens
tgtgttttgagccattcaataacccttagggtcagataactggaggaacctcccaaacaacgctgttcagttaaactaaaatcatagcacatcatgaaaatgaggactccctttattccatg

SEQ ID NO: 51527 - DNA, 122 bp, Homo sapiens
aagggagcccagggcctggggcacaaagcccagggccttagaagatcaagtgccccaggccggctgtacatactccttgaaacagtgggcagcagtgatcacccagcggctggtgagcagag

SEQ ID NO: 51528 - DNA, 122 bp, Homo sapiens
cttgaaggggttcagaggccagttattccggaaaccttcccccaagtggaggaaagatgtcgaaggggcttcaccgtccagagattcatcagactacacctgcctttgcaaatgtccgcata

SEQ ID NO: 51529 - DNA, 122 bp, Homo sapiens
gcacacagctggggcggtcctaggagggagcgagaagccagagtgactgtaatcatacaacgatttccaacaacaaaggagagacgcacacagctggtgggtatctgcagtgagcaccaagt

SEQ ID NO: 51530 - DNA, 122 bp, Homo sapiens
gccctgcacgtgcattgtcctgtttctgttcaaagtttgaaaaacccaaactgctccccacggaggcacgctttctttgcacgatgaacgaaggaaatgtgagggtgttgtccccggtcacc

SEQ ID NO: 51531 - DNA, 122 bp, Homo sapiens
cccatcttcttgggactcctcttgcccctggggtaggaaaatgaaaagactgtttaaggtcgtttctttaggctcagagttctcctggaccaccagaggttctgcctcagagggacctagga

SEQ ID NO: 51532 - DNA, 122 bp, Homo sapiens
tggcctctgcacttcagctggtttctgacacctaaaaacagaagtggaaaagggagcagacgcagccacattttgaaagctgattcggttgctttctggcagaatccctgcccccaagcacc

SEQ ID NO: 51533 - DNA, 122 bp, Homo sapiens
catcacaaagcgaggggcacacctgaaccggggctggcgggaagaggcaagtattgcgcgcgggctggctcccacatggagctgcctcccggtgcaagtgttgcaagggtgcgctgctccag

SEQ ID NO: 51534 - DNA, 122 bp, Homo sapiens
ctgtcactcgaacgctggggtaagtctggggcagtgcatacgccaccgaggtcacactcacgtcagggacgacactgccacagccagcaaatctcactcagccagccctcgagggcaccagt

SEQ ID NO: 51535 - DNA, 122 bp, Homo sapiens
tttttcatggttcctcaaacacatcatgaccttttgtgactctgggcccatgcccagatacgtttggaatacctttgtgccttggtcaatgcccacctcaccttaaaaatgctgcttaaatg

SEQ ID NO: 51536 - DNA, 122 bp, Homo sapiens
cggagacccgacgtcatctcggggctgaggctgccctaccattacagagcggcccgggggcgcggagcggccccgccacacggggtcagtgtgggcaggggcggcgctgccaaggcccgcag

SEQ ID NO: 51537 - DNA, 122 bp, Homo sapiens
gccatgagccaaaaccacacgagcctctccgggaggggggggtcactgctgcggaatcagcgacaggtttccgaatccacggcacacgctctgaggtaccagaggtagcaaagcaaaataag

SEQ ID NO: 51538 - DNA, 122 bp, Homo sapiens
gctaccctttcacatactgcatttgtttactctcccagcctggtgtggactaaacagagtcggttagaaaagtgttctgatgcagtcacagctttcaaggcctcagcttgcataattacaag

SEQ ID NO: 51539 - DNA, 122 bp, Homo sapiens
gacgctggtgcgcagcgctgtcaatggatgaatgaaagccttgagttctggatgctggcgcgctgcgctgtgaatgggtgtttgagagccttgagttctggatgctggcgtgctgcgctgtc

SEQ ID NO: 51540 - DNA, 122 bp, Homo sapiens
gggcagcggtctgcgaggctgggggatcgacccggcgcgagggtgctgggtgcagggcagcgcgacgcgggctcggccacaccacccgccgttgggagccggcgctgtgtctgctcctgggc

SEQ ID NO: 51541 - DNA, 122 bp, Homo sapiens
gtgcaacacacaggccttctgtccacgcccaccttacctgctgcttcccagaagaggaagcgggaagaggaaaaagactccagctcaaagtccaagaaaaagaaaatgatctctactacctc

SEQ ID NO: 51542 - DNA, 122 bp, Homo sapiens
agtgcgatgggaaactcgggctgggtctctgtggccaatgactcctgagcctcgccggcacgttttattcccggctgtccttccagtccggaagcctgaagtggacaccgaggaactgcggt

SEQ ID NO: 51543 - DNA, 122 bp, Homo sapiens
tctccaagatgcagagcctgatccacagcatttagtaggctgctctccaaatcctggggacgctcaaatctggagccaacccaggatttcatctgtccctccagcctgggaggatcccactg

SEQ ID NO: 51544 - DNA, 122 bp, Homo sapiens
ctttactgcccctccgtggacagtcaccttataaccaaatagaggcacaggattccagcgcgtatagttgggcttctacaaagtgatgcttgctgatacatattcttgaaatttcaagagct

SEQ ID NO: 51545 - DNA, 122 bp, Homo sapiens
ccccgggtgtccgtgggaagctccaaagccgggccgcgggacggctaccctgggctgtgacgcagtccaggatcttcgccaaggcacctgctggaggcccctcctgggtcccacgaccccga

SEQ ID NO: 51546 - DNA, 122 bp, Homo sapiens
ctcctggaacccagggcaggtgcgcggcacaagctgctcctaccttctcatcggtcacaccgtcattgtcatcgtcatcatcacaggcatcgccaatcccgtccttgtcaaagtcttcctgc

SEQ ID NO: 51547 - DNA, 122 bp, Homo sapiens
agaagcagggggcggtacccagtggtctaagcagcctggggggcgggtggcttgccagggcgctgggcatggctgtcggcagggactgcaacatgtgcgtgtggcaccctgcccaggggaga

SEQ ID NO: 51548 - DNA, 122 bp, Homo sapiens
ctcccttccttcctttcctttcttttcgtcttttttttctttccttttctttcagagtctcgctctgtcacccaggctggagtgcagtggcacgatctcggctcactgcagcctccatctcc

SEQ ID NO: 51549 - DNA, 122 bp, Homo sapiens
gctctccacactggcgcaagtgtaggtggtgctgcggcagcgtcgcggggccacaggaaccgacctcgtctggagaaattccactcgtgaattctgccaaatgaggaagtgttgaggacggc

SEQ ID NO: 51550 - DNA, 122 bp, Homo sapiens
tcagcggcgacagtttgacagtttggatagtgccataaaatgtgaccagagggatggtgccgtgtacaagaaaagtaccacagtcagatgcacgttcctcttctaggcattgaggtcttgaa

SEQ ID NO: 51551 - DNA, 122 bp, Homo sapiens
cggggctgcggaccggccgggggagggggtgactccagtagggaagacccacccacgccccgcccgccgccgcggaggccccgcccaccccgcctgcccacccctaccgcacccgcacgccc

SEQ ID NO: 51552 - DNA, 122 bp, Homo sapiens
aaacagatcctcttggcagctcttcccagaatttctgaggccagggcacaggttctctggcgcgttgattatcggtttgttgcggggagcagagcccagagtcctcagccccctagcgggtc

SEQ ID NO: 51553 - DNA, 122 bp, Homo sapiens
aacaatttaatcttcctacatgagtcaacccttggaaagaaacagactcaggtggtaaaccgcaggccatttacataccccatggtttgacttttactttaaggagaggaaagatgggttga

SEQ ID NO: 51554 - DNA, 122 bp, Homo sapiens
ggatggcatgagcgcagccttgatatggctgagtccatttatgggtctactggccacagccggggaggctggggagaggtagcctgggaacattcctgccatcccagagcacatctgaaggt

SEQ ID NO: 51555 - DNA, 122 bp, Homo sapiens
gcgcctcccctcagctccgccccccactccagctcccatgtatggaaaataggggtggagcgcgctctgccatgctcggtgcttagagaactagtgaagaggacagtgtggggaggatggaa

SEQ ID NO: 51556 - DNA, 122 bp, Homo sapiens
catatggaaaccagagtcttttcataaccagactctacaaacaagaaatgtgtgccaagacgtgacaaacacaatcttaaaaagcttcacagatttaaatcttccatttaaagcacaactta

SEQ ID NO: 51557 - DNA, 122 bp, Homo sapiens
agcggaaaaaacatttgattttatcttttgaagacaaaacgcctctgagagtaactggaacgttctgtttgcctctagccaacggcagaaaagcggattcaactctgactccttaacaagac

SEQ ID NO: 51558 - DNA, 122 bp, Homo sapiens
ggctgagagcgcacagagcgcacgtgcacatacctctgctagaaactcctgtcaaggcagcgagagctgatgcactcggacagagctagacactcattcagaagcttttcgttttggccaaa

SEQ ID NO: 51559 - DNA, 122 bp, Homo sapiens
ggggtggcaggttctactcgggaagcctgttttatgtcttctttcacgcccatatcacaccgacaagggtgaagctgtggaacttatacctcggctgggccccgccgccaactcctagggca

SEQ ID NO: 51560 - DNA, 122 bp, Homo sapiens
gtcagtctccctaagtgtcgaggccccagagtctgacgcggctgtaggtggtgccactcacggatgagatcagccacttcatgcagccaatgcgaaacagtcactctcccaatatagcaggg

SEQ ID NO: 51561 - DNA, 122 bp, Homo sapiens
ccaaacgaggctgcaagtggcttaacgatatgttcctggaagaaaaaagccacaaataggcgtcgctcaactggattccagcctgtgaccgcacagggcccaggggcagcagaggggcatac

SEQ ID NO: 51562 - DNA, 122 bp, Homo sapiens
gagctccctgccgggtgctcagtggcatcactgagccaggcgtgggggacccaggagccccgggctgcctcaaccacgctgcatcggtcccctcttggcatcttcccacagacaccaggcca

SEQ ID NO: 51563 - DNA, 122 bp, Homo sapiens
tttgcagggcagccaagcatcctgatctttggaggtagccctgatccagcccaggagtcccgcctgatgatgtcccgacccacatctcagctgagggtttggaaatggtcccaggagccaca

SEQ ID NO: 51564 - DNA, 122 bp, Homo sapiens
caatcggggtcctagtgcccttaagtccctcctctttatgcaaataacctccgcatgctccgcgcgcccggcccttttttttttttttttaaactaaagacagccctggaagtagagggtta

SEQ ID NO: 51565 - DNA, 122 bp, Homo sapiens
aggattcaaaggcgaggagagatatgatcaaatctgcacttgggaaagcgcaccttggtgcgcatctggggatagaggaacgtagggatgggaggatgggggatgggagtttggggatgagg

SEQ ID NO: 51566 - DNA, 122 bp, Homo sapiens
ctctgctaagacaagagttagcccctgagctatgttatcagttcaaggctttgcagatagcgctgtatcgtgggggaaaaatgaacatggttttcaaaaaggaggagaacatttctataacg

SEQ ID NO: 51567 - DNA, 122 bp, Homo sapiens
gtgtgggccttcgtacccgggctacaggggtgcggctctgcctgttactgtcgagtgggtcgggccgtgggtatgagcgcttgtgtgcgctggggccaggtcgtgggtgcccccacccttcc

SEQ ID NO: 51568 - DNA, 122 bp, Homo sapiens
ttttcacttcagggttctttcagataaagtactttatgcattaacaaatctccatcttcccggaaatctattctcacaattggaagcgtgctccctacaaaccggacagccccataggcccc

SEQ ID NO: 51569 - DNA, 122 bp, Homo sapiens
gggagctgtgtggcggcctgggcggctgctccccttgtaacagactccaccgacaggaggcgctcctcctgtcaagccacagcttaaaaggacaacagcaccaccgcccccgctaccgcctg

SEQ ID NO: 51570 - DNA, 122 bp, Homo sapiens
gcggccttgggagccaaggagccttcagaaatcactgcttacacttggggcgagggcaagcgactgatccgctccactgagggcggcgcatcacaagccctgccaagcctggggccgcagtg

SEQ ID NO: 51571 - DNA, 122 bp, Homo sapiens
caaaggtatgaaatcaaccatatccaaaatgtaggaaattatatgggacaaatgatctgtcgtcttcaaaaaaatggcaaagtgggaaatgtgggaggggaaaacacttcagaataaaagag

SEQ ID NO: 51572 - DNA, 122 bp, Homo sapiens
aaaaagactggccttcccaccctagtattttattatacaaatgcggcctccacctggtggcggccatgatacctgtacacgtgctttaacctggaggctgccttgacacctgtaaacgtaga

SEQ ID NO: 51573 - DNA, 122 bp, Homo sapiens
gtggggcggggagggatccggaaggtggcacggagtgggatcgccgctggggactcgaggcgcagcctgcgccgccgggagcctccctcccagtgggagatgggttgagatgcccccgccag

SEQ ID NO: 51574 - DNA, 122 bp, Homo sapiens
gggcaaacgcgggatctcccagggaagctcggagggggacagggagctggttcccctctgcgactcgcccctctctggctggccgagtgtctggcgccaacctcgctggaggaggctgtcgg

SEQ ID NO: 51575 - DNA, 122 bp, Homo sapiens
atttcagtttcaacttttttacttgctcccagagcccaatggcaacacaatgaaagtggccgtggcaacatgacagccacagtactctatgaacagagtgtatcaataaacatgatgctttt

SEQ ID NO: 51576 - DNA, 122 bp, Homo sapiens
tctgggtcgcgggtgggcgccgccaagggcacagcctgtccctcccggatggacgggggccgcggctgcagtaggtggcaggcctgccctccccaaggtcttcccagctcggccgcaccggg

SEQ ID NO: 51577 - DNA, 122 bp, Homo sapiens
ggaagcgctgcgcacacgctgcctctggcagccgcacagcccggctgtttccagccagtgcggcctctccacagcagccccagggaaaccctacgcctgccaagaggcaagcgcgcggcatt

SEQ ID NO: 51578 - DNA, 122 bp, Homo sapiens
cggtctggacctagcagctgagtgagtcctgggaggaagtggaagccagcccctcctgcacgctgcctcatgcccatggtgctcccctggggcctcacagtgtgagctgactcactccgcct

SEQ ID NO: 51579 - DNA, 122 bp, Homo sapiens
gggcagcgctctctagggtggcaccaagttgctggttgccctctctccacgcagcctctgcgcgcaccgagcgggcactgcggtcgggcgacaccccttccacgcccccctcccccgccccc

SEQ ID NO: 51580 - DNA, 122 bp, Homo sapiens
tacatggcggggaagaggtgcggttccgggagcctgcgacgcctctggggagtccaagcccggctcctagccctttgcccgaggacggaggaggacctggggggcttcccctagctggtggt

SEQ ID NO: 51581 - DNA, 122 bp, Homo sapiens
ggccggccccgcccccgcccccgccccgctgggctgccacactccagccaatccctgccccgctctccgccacaacccgctcaagtagggggactctgactgccccgcgcaggtggcctgcc

SEQ ID NO: 51582 - DNA, 122 bp, Homo sapiens
caaaaaaaccacaaaaccaaaagagcaaaacaaaacaacagaagaaacacacacacaggccggaaagcacagcatgcgaagggcaaacacaaagcaaccaaaataacaacgggtttgggggc

SEQ ID NO: 51583 - DNA, 122 bp, Homo sapiens
cgcccacccggaggcggaatgtaacgcgctgtgggaaacgtggcaggagccctgaggcggcgtctttttcctcaggcgcccgccgagggtcccgcggaaagcctcgcgggccgccctcgcgg

SEQ ID NO: 51584 - DNA, 122 bp, Homo sapiens
tggcgggaggctcaagtcaggcgtcccagcagcttcggtgcaacgcctcctgcccggctgcgtggggaggccctccaagacaccagctggtctcaccgcgaggcctgacttcgagccagagc

SEQ ID NO: 51585 - DNA, 122 bp, Homo sapiens
aggctggggttgagtcagaacccaaatactcagaaatgcaacctctcagaactgctttaacgaaactttgagctgtggctcaccaccctcagacacaaatgagaacactgaggctccaagag

SEQ ID NO: 51586 - DNA, 122 bp, Homo sapiens
cccttggggagccacaaaattccccttcttagagcccctgcgaggtcctgcgaggaccaacgcccaggacaaaacaagttagaaccaaatcaaaaagtgtgggctttaaaaaaaaaaaaaaa

SEQ ID NO: 51587 - DNA, 122 bp, Homo sapiens
agacgggacaactaggttctgggaagccatggcagaaatcacgcagactctgattcccgccgagaaccagcctaaagaaccactcatggcaagacgggggcccaccggcctgctggctcctc

SEQ ID NO: 51588 - DNA, 122 bp, Homo sapiens
gccccgggcagagcacttttcctccacccctcacagaggcgcaggttacttgtaccagcccgatgcaaatgctttggtgaatgggctaccctaaaacagaggatgatgaagaacgatggcca

SEQ ID NO: 51589 - DNA, 122 bp, Homo sapiens
catcagaggggaactcactactcaggaggtgacggtgacgtggtgccggtccctgaagtacgcgcacaagctccggaggttgcgggagctgagggaggaaacagggacacgatcagattcgc

SEQ ID NO: 51590 - DNA, 122 bp, Homo sapiens
cagcgggtggctcctgtccagcacctcccgggctggggcagggccgtgcaaaacaccatgcgctctccccatttggtctcacaagtgcctgggggtgtcgaatgcaggtggatgatcatttc

SEQ ID NO: 51591 - DNA, 122 bp, Homo sapiens
gaggagtgtggtgtgatccctcaggggaaggagaccagtggggaaaggcctgtccggaaacggggccttgaaggccacagacaggagcccgggacctgcctttaggtgaatggggagccacg

SEQ ID NO: 51592 - DNA, 122 bp, Homo sapiens
ggaacgcgacctgcggcgcacccttggctaaacgcggctgcacgcagggcatggggtggccggccaaagcgcatgtgaacctggtaatgcaatgtcccccgtgggtccgaaagccctgaggc

SEQ ID NO: 51593 - DNA, 122 bp, Homo sapiens
ttccccagcctttgtcttaatttatgtatcagcagcatttgacacagtcaatctctccctcgtttttgcaaaacttctttgatagaattccagaacacttaacctactttccccaacatttt

SEQ ID NO: 51594 - DNA, 122 bp, Homo sapiens
ccccaccccttccgtagggacagtcttacgccggaaatgctcctttgctgtccgggttagcggagggagggaggaacggctctccccgcgtgccccgcggctggaggcggagccgagcctgt

SEQ ID NO: 51595 - DNA, 122 bp, Homo sapiens
atgtttctgtgtacctacatggcccaaggctgaaaaaatgactaggaatcctgggatcctcgtgcaaatcttcgaattggttccctgagagttcctcaagcacatattctggattgattttc

SEQ ID NO: 51596 - DNA, 122 bp, Homo sapiens
taatctccagggggtggagtatgacgttacttccaatatagcactgggtgtgcatccacccggtgattttgctcctaatattcacggaagaagagaatgctattactcccagtatggcagga

SEQ ID NO: 51597 - DNA, 122 bp, Homo sapiens
ggtgagttagttttaaaggcattacctctggcctcttgttgacttggagaaacatggtgacggtgcatcttactgagaacatgttattatgctttattctcggtactgaaagttcttacaaa

SEQ ID NO: 51598 - DNA, 122 bp, Homo sapiens
catatcagttgcaaaactacacctattgaagttaagtacattttccaacttgtgtcaattcggtaccattagcataaattcaaaaatgatattgcataaattcaaaagccattctaaattta

SEQ ID NO: 51599 - DNA, 122 bp, Homo sapiens
ttttctccacatttcggggttctggacgtttcccggctgcggggcggggggagtctccggcgcacgcggccccttggccccgcccccagtcattcccggccactcgcgacccgaggctgccg

SEQ ID NO: 51600 - DNA, 122 bp, Homo sapiens
tctccactcaccaagcacagtggcaacacccacaaggggcagaggcccagtcatcctacacgggtctttggcttggccagcagcaccacactttgctgtacccatcagtggcctgccttctc

SEQ ID NO: 51601 - DNA, 122 bp, Homo sapiens
tgtaaggggtcatggctgcggaatccagcaggggcattggggttgacgtgcactcagcgccgagcttcttcgtagttcctcacccccttggctactatgggctggtccggaaggtcaggcaa

SEQ ID NO: 51602 - DNA, 122 bp, Homo sapiens
acagatgtaggaatatgtctatgggacagaattctcagaaaggcagggtgggtcaaacagcgcttgcattttgatcaactttgccctgaggaaaaccactgaagacgtgcctgagctaagcc

SEQ ID NO: 51603 - DNA, 122 bp, Homo sapiens
tttgatctaatgagaggagagacctggcttccaataagaattcactagaaaatatatttccgttgtgactatataaaactaattaaggtacttgcctccatggctctgagttgagcttgact

SEQ ID NO: 51604 - DNA, 122 bp, Homo sapiens
ttaggagaagcggagccttgcctctggtgcttcctgtgaactacaatctgaatgacaatccggcagcccagagcctcccctggattccagggaagccgggaaaagctgcttcctgcgggact

SEQ ID NO: 51605 - DNA, 122 bp, Homo sapiens
ttattgagaagatgaggtccctttcgtgagtctgcacggagccgccgtacaccatgaaagcgctcacttgtttaaagtttgctctaactttgtacattttttcctttttagttttggctctt

SEQ ID NO: 51606 - DNA, 122 bp, Homo sapiens
ccctggtgcttgggtttgggcctgcctcggggctctcagggtgcgggggtgacgctggctcgtggccgctgtgtcagggccgtgccgctgcgaggtcggtgtccctcggccgtctgccctag

SEQ ID NO: 51607 - DNA, 122 bp, Homo sapiens
tcttctcttgcgtggctctccgccgccttctggtctttaccgccgtggagaagcctaagacgcaggaaaggcttgcaaaagttggctccgggactctgccacttgtctccggtcctcccagc

SEQ ID NO: 51608 - DNA, 122 bp, Homo sapiens
cgggctggcctctccgggaagccttgaaactcaactcctgggtgggccaggaaggttgtccgagttgggcagcgccggccggggcccccctcagagccgagctgctcgcctccctcgagacc

SEQ ID NO: 51609 - DNA, 122 bp, Homo sapiens
ggctcagagctaacgctaagccccttaaggccctctccagggccctcttctctcgccagccgccctcagccagctcctgaccccagccgccctcagccagctcctgggtaccactctgggtg

SEQ ID NO: 51610 - DNA, 122 bp, Homo sapiens
cagcatgccaagtgcttaaaagctgcaccggggatctcagagtggcttctgcccgtctcgcggatctgccatgtttatggctgacttgtactaactgctcattttaatgctggattctggca

SEQ ID NO: 51611 - DNA, 122 bp, Homo sapiens
atcacagatcactgcagcctcgacttcccgggttcagttgatcctcccacttcaggctggcgcgtgccaccagacctggctaattttttttattttttgtagaggtagggggtttcaccatg

SEQ ID NO: 51612 - DNA, 122 bp, Homo sapiens
gaatcccgtgcttctttcacttcctgagccgggctggctgggtgggaacaggctccttgccgcctccccagcgctggccactaccacactgccgcccgcctgggcctcctttcaacctcgtg

SEQ ID NO: 51613 - DNA, 122 bp, Homo sapiens
gcatgtggcaggcgctgacgttgcttttctcgctactgccttgcgcgctcgtgcagctcacgcttctcttcgtacaccgcgacctcagccgcgaccgcccgctcgtactgctgctgcacctg

SEQ ID NO: 51614 - DNA, 122 bp, Homo sapiens
tcctttcctctagacggggtagggctggttctggatctttttccgcggtagctggagagacgtaggacctgatgatggctactagatgcctggtaaatgatccttcaagaagtgaatgaacc

SEQ ID NO: 51615 - DNA, 122 bp, Homo sapiens
cgaagcagggcgaggcattgcctcacttgggaagcgcaaggggacagggagttccctttccgagtcaaaaaaaggggtgacagacgcacctggataatcaggtcactcccacccgaatattg

SEQ ID NO: 51616 - DNA, 122 bp, Homo sapiens
ctctcgctgggcttcttctccctactctggctgcagctcagctgctctggggacgtggcccgggcagtcaggggacaagggcaggagacctcgggccctccccgtgcctgccccccagagcc

SEQ ID NO: 51617 - DNA, 122 bp, Homo sapiens
gttttctcgagggtgctagggagaatgggctcattctccacagttccctggggtttttgacgatgttaatacccccagtaccttgatcttttctggctgaggaatcctcaacattttagacc

SEQ ID NO: 51618 - DNA, 122 bp, Homo sapiens
agtcactgattctgaagatcaagcatgtcccccgtcattcctccgttctcccacctgacacgactggaacgagctcctccttgccatgtcgaggattcttggaaagccttttgcagcgtgtt

SEQ ID NO: 51619 - DNA, 122 bp, Homo sapiens
catcttttggaaatatttgaggacttggctgaaggtgaagaccataaattcatcaaggatcgtttcagagccaaaagcaggtaaaagcaaataacttggattgccaactcagaggtgttggt

SEQ ID NO: 51620 - DNA, 122 bp, Homo sapiens
ccccggggtgggcagcccaggggggtgagcggggcccaccctgcccagctcagggattggcgggcgatgttaccccctcagggattggcgggcggaagtcccgcccctcgccggctgagggg

SEQ ID NO: 51621 - DNA, 122 bp, Homo sapiens
gagtagcgtctccaaagctgagcagaaggtgccgccccgactagaggactgaacgagggccgcggcgtctcccgtcctgctggggagttttagcaacaacacaggacctctcgtctgctcca

SEQ ID NO: 51622 - DNA, 122 bp, Homo sapiens
aatacaaaaactttgacccattcctatgcagccactcgtttcttctcttcatagcatcagcgtcttgaaaggtcagccatacttgctgttctgcttgatcacccactaccccttagctcctc

SEQ ID NO: 51623 - DNA, 122 bp, Homo sapiens
tctcccagagcaacgtctcctcctacgtggtggatctgacgcgtgtcaccaggactggcacggtggcccgggaccctgtgcaggaccaccggcccctggcacagccactgcccaaccccagc

SEQ ID NO: 51624 - DNA, 122 bp, Homo sapiens
aatgaattcatcctagcagatggccactttaacactcagttagccctttagataattgagcgttgactccggaatcataaaatggatggctcgtttgtacattttactgaaatagatcaccg

SEQ ID NO: 51625 - DNA, 122 bp, Homo sapiens
gtacttactactttagtattggatttttccactagttcaatttgaaagcaagcttaccatcgaggatattcacgttataatgggtggagggggtgggtcacataagtgggagaaacagacag

SEQ ID NO: 51626 - DNA, 122 bp, Homo sapiens
caaccgcaagaagcccgggatctacacccgcgtggcgagctatgcggcctggatcgacagcgtcctggcctagggtgccggggcctgaaggtcagggtcacccaagcaacaaagtcccgagc

SEQ ID NO: 51627 - DNA, 122 bp, Homo sapiens
ttcctcctgggtgcgccaggcccaaggacagaggatgatgcccacgcagccaggaaagagcggcatcattgtcagcccctaccccaccctcgtcttgggagcctgcaggctccgtggtgcca

SEQ ID NO: 51628 - DNA, 122 bp, Homo sapiens
aatgatggtgaggtggcacttaaattgaaaagagcaccaccagtgctgcttagagccagacgctctctctctttactagaggataagtgaaacttgacactgggcttctggatcttatttcc

SEQ ID NO: 51629 - DNA, 122 bp, Homo sapiens
ctctctttgcctccctccttcccttccttcaacaagtatatagtgaacacctcctgtacacgaggcactagtgctaagcactgttttcaagctcaagagatgtatttgctagtgaatttctt

SEQ ID NO: 51630 - DNA, 122 bp, Homo sapiens
gttagcttaaaagatttttatatatttagttacgtatttgtaaaaactttcatttttttacggtatggtgttggcaaaacggtgcaatttaccttggagtaactagatatgattgatagagc

SEQ ID NO: 51631 - DNA, 122 bp, Homo sapiens
tgggctgagtcccccagaccagacatggctctggctatttgctcagtaagcaggcgatttcgggggctgccgagggccaggtgctgcggcaggcactggagaaacggccgagacactgagtg

SEQ ID NO: 51632 - DNA, 122 bp, Homo sapiens
caccacagcctatgttcttaatcactaccactgcgcatcaactacgtttctggcacatgccgctggggatatgccagatacatactcttttgcaccttgtacaataccacagagaaatgcaa

SEQ ID NO: 51633 - DNA, 122 bp, Homo sapiens
gtctccccttcctttcctcttccctcctttggcttcaggttttgtttttccctgtctacacgcacgcataagctgtccctagaacagttccagccttgttttgcttctggaagctctccaga

SEQ ID NO: 51634 - DNA, 122 bp, Homo sapiens
gctgtaaggaggatggaaaaataccatcttccaattggttctcaatatccagcttcatcccggaaactgtaagtttaatatggaaaggcaatgaatgcatcagccctcccaagctgatcatt

SEQ ID NO: 51635 - DNA, 122 bp, Homo sapiens
aaacctgaaagatctgctgggtattctcttctcagcaagtttacaaatcagcctcctcggcgggagagtgtcaagggactggtgttggaagcgttaacccgcgatgggtttccatccaacca

SEQ ID NO: 51636 - DNA, 122 bp, Homo sapiens
ttacataaacgtaatagctgtatctaaaagttgacctatctttgtgttgaaaatttccatcgggccgggcgcggttgcccatgcctgtaatcccagcactttgggaggccgaggcgagttcg

SEQ ID NO: 51637 - DNA, 122 bp, Homo sapiens
tcgaattctacctacgctgaatatctggattttcaaacaacccttgggaccatgccagcccgggcccggggcccagtccaggcagcgggagcccaccgtccccagggcgctgggggtccgac

SEQ ID NO: 51638 - DNA, 122 bp, Homo sapiens
cctttctaccttcttcaggatgggtagaggcatgaagaaatgcaggctcccctccccctccgggccacgcttcccggctgggtggaaactatctcattaccacattttcaacaagtagacca

SEQ ID NO: 51639 - DNA, 122 bp, Homo sapiens
caggatgtgggtggggccagataaaataaaagcaggctgcgggagccagcattggcaactcgctcgggtccccttccacactgtgggagctttgttgtttcgctttttgcaataaatcttgc

SEQ ID NO: 51640 - DNA, 122 bp, Homo sapiens
gcacttggatctcttgataaactcttaccatcacactttcctttctgacagttaaatagccggaatgttaaataaatagaactgcaaaacttactagatagcattgcttgatcaatttttaa

SEQ ID NO: 51641 - DNA, 122 bp, Homo sapiens
accagaaaggagcaagtgaagctctccacactggcgcaagtgtaggtggtgctgcggcagcgtcgcggggccacaggaaccgacctcgtctggagaaattccactcgtgaattctgccaaat

SEQ ID NO: 51642 - DNA, 122 bp, Homo sapiens
gtgagaagaggcgataaaggaagagggcagagctggcccgctgctgtgaccgggtagcaccgtggaaagcgcccatgcccagctccatggctcgctgtgggtgaccctgtgcactaagcttc

SEQ ID NO: 51643 - DNA, 122 bp, Homo sapiens
ccctgtttccggcgcctttaaacctggaagtactgctgtgtccaatcctggccctccttccgcacttagtctttgagtccttccctctcctggcttgtgctggagccaagcaggctatggct

SEQ ID NO: 51644 - DNA, 122 bp, Homo sapiens
aaaccaggaatcagactgatgaggttcttctcttcagggtgcctaactagaatttgtcctcgagaaaaagaataggaaagttcccatgaccccaggaatcgaagagacaaccaagggcacat

SEQ ID NO: 51645 - DNA, 122 bp, Homo sapiens
cctcagttgcagctggggcaggagaccctggtgtggcggcacgggcactggcctgtgtggcggacgtcctgggctgcatggcagagggccgtgggggcttgcggagcgggccagctgccaac

SEQ ID NO: 51646 - DNA, 122 bp, Homo sapiens
tctgaatgttgatttctgtgagacctttcttcttgtatttcctctgttcattcatacggacgtataaccacttagccaggtgagaagtaaagtaccttctgctgaagtgtaggtattaaaaa

SEQ ID NO: 51647 - DNA, 122 bp, Homo sapiens
acggaaggaggcagagagctgtgactgcctgcagggcttccagctgacccactcactgggcgggggcacaggctctggaatgggcactctccttatcagcaagatccgagaagaataccctg

SEQ ID NO: 51648 - DNA, 122 bp, Homo sapiens
gaggagagaggatagtaccccaagtgtcatcatccattgacaggtcaataggtagtacagcgacatgggaacagagcaggtgtgcacagaaagcatggtttcccagggagggcagtattttt

SEQ ID NO: 51649 - DNA, 122 bp, Homo sapiens
cgcgctctgaggagctgccggggacacactgaccacactccacgttatgggcccagagtccgcgctctgagaagctgccagggacacactgaccacactccacgttatgggcccagagtccg

SEQ ID NO: 51650 - DNA, 122 bp, Homo sapiens
caggattaaattttggtgaaacaaactaatcacctatattttaagtataagactaaaaagcggaaaatactgtttgttataagtaagttaaggagatatattttaccaaatattggggtagg

SEQ ID NO: 51651 - DNA, 122 bp, Homo sapiens
acttaatgaacagtgtgtaccaaactctttgtttataacacatcagaacctcattagatacgtatgcccactttacaaattaggaaactgaagcacagagaaataaccttgccccaattaaa

SEQ ID NO: 51652 - DNA, 122 bp, Homo sapiens
cggcgggatcgtcttacaaattggctagatgcgcatgacctcgatcatgtatggccctcccgcccctttccacagacaattgccttgagcctttagcagattcatggcaaatcaataaatag

SEQ ID NO: 51653 - DNA, 122 bp, Homo sapiens
tcgatgctggacagcctgcgatgtacggtacactctcatatagggaagaactggttcatacgtcacacaactttctaaagagctgccaggcagtctggtgggtgaaaaaatctatttttaat

SEQ ID NO: 51654 - DNA, 122 bp, Homo sapiens
gtactggtagaaaagtacaattaccaaacacatctaatttggtaaagatgtgttgaaggccgaggtggcccgtggctgagagaaagcctggagacatagaccatgggaccctggagtgatcc

SEQ ID NO: 51655 - DNA, 122 bp, Homo sapiens
ataggtggtttcagacccacggtcgacaagaatttggggttcttgttggctagttacttccgatgttgaaactgttggtgttgaatcattttctgaagaaatggggagctgtccctcggggc

SEQ ID NO: 51656 - DNA, 122 bp, Homo sapiens
gtcagcccctgtgtttcaagcttaaccttgaacctcatcattaatcaggtgaccttagaccgttttatcagccacgtatctgctagcataaatctcccttctgtgaattcagaacactgata

SEQ ID NO: 51657 - DNA, 122 bp, Homo sapiens
tggccaatatggtgacaccccgtctctactaaaaatacaaaaattagccgggcgtggtggcgcgcgcctgtagctactcaggaggcagaggcagaagaatcgcttgaacccgggaggaagag

SEQ ID NO: 51658 - DNA, 122 bp, Homo sapiens
aaactgaggcccagaaagtttgagttgcttgccctaagtctcagcactcggggactgcaccgggaactcttgagccccgcggttgtcgggctgtgacctcattccctgtcctccgcagcgcg

SEQ ID NO: 51659 - DNA, 122 bp, Homo sapiens
tgaacttctggagtcaacaagtctgccttcctctgccttccatagtgctaggatggcaggcgtgagccaccacccctgcctaacttaattataagacattaaacatgtaacttagttttaaa

SEQ ID NO: 51660 - DNA, 122 bp, Homo sapiens
caggcctcgggcgccgccatcttggggaggtgcgcgagcccgagagtgtcgcccgcggaccgccatcttgaaaaggtcagcagttaggacggctccataagcgatatggggaagaatgtgaa

SEQ ID NO: 51661 - DNA, 122 bp, Homo sapiens
ggcgcctctgcgggtcagggccgggggcgcggtcggggccgggcggggcccaggttggctcgcgggtaggcggccccgccccccacatccgggggccggggccgggctgtgggcttgccgcg

SEQ ID NO: 51662 - DNA, 122 bp, Homo sapiens
gagcagcccctcgctggcttgctcctgcccggactcgaacgcgattccacctaccgtcagcggccgcgagagcgcccactctcttagccgcacgcacgctttcctgcccgctcgcgcaaacc

SEQ ID NO: 51663 - DNA, 122 bp, Homo sapiens
gcggccccccgacagtgccagggtggtagccgcggtggccacactcaggtcgaccctggtcgttgcgagcggcgccgggggagtcaaaggtcacgagaggaggactcgggccacgggggcgg

SEQ ID NO: 51664 - DNA, 122 bp, Homo sapiens
ggccgctgcccggaaagttccttttccttcttgtaactgagaagaacttgccttgagccacgtcaagtcccgtccgtcgcagccactgcccacaagcgtgagtctgctgtgagccagcggct

SEQ ID NO: 51665 - DNA, 122 bp, Homo sapiens
ccaccccgcttctatgaggcgggtgaggagctaactggacccggggccgtggccgctgcccgcctctacggtctggaacctgctcaccccttgctctacagccgcttggctcctccaccacc

SEQ ID NO: 51666 - DNA, 122 bp, Homo sapiens
ccagcattttatgattaatgccacagggaagcttccatgcagccataccagtcacaatcacgctgatgagtgttactcacaggaacatttaacaatttaaataaagattcaaaaagttattc

SEQ ID NO: 51667 - DNA, 122 bp, Homo sapiens
ttacacggctcggtgtaattgcaaattcgaggtttacaaagcctccccctggaggccccacgtgagtgtgagcgaggccccagcccacccctgtggccccaagaaggctctgcgacaaaata

SEQ ID NO: 51668 - DNA, 122 bp, Homo sapiens
atgctcagtggtagagccaggcggccctcttctcctgaaagccttgtcctgggtcaggcccgggaagaaaggatggggacaggaaaggacgaggctgcggctgccgtcccccagggcagcca

SEQ ID NO: 51669 - DNA, 122 bp, Homo sapiens
gccgagacccaacaggccacagaggactgactggtgctcagaatttgatctcagagatcccggtgactctggacctgaggttgcgtgagatcccctcccctgtgccaggtctcactggtgca

SEQ ID NO: 51670 - DNA, 122 bp, Homo sapiens
aaacactggggatgttgccagagaaggatgttgcctccttcctatgactgaaaaacaaatcgttgggtctcccggccaaagaggaggtcacggttggaaccgcgatcccaatacttaggtcg

SEQ ID NO: 51671 - DNA, 122 bp, Homo sapiens
tgatcttaaagccacggctggctgtatttctttcctatgaaacaaatttttattgatcaccgtgtaacgaccaagagtcacacaggcctggcaatggcatttgggagaaacttcataatctt

SEQ ID NO: 51672 - DNA, 122 bp, Homo sapiens
cagtggggagatgtgttacagcaaattcggtgccatggccctcaagagccgggcctgccacgagatggccctgagaattgtcctgcacagcctggacctccgcgccaactgttaccagcgct

SEQ ID NO: 51673 - DNA, 122 bp, Homo sapiens
caccccgtgctgccctgggtggtggacttcactacgccccatgggcgcttccgagacctgcgcaagtccaagttccgcctcaacaagggggataagcaactggacttcacgtatgagatgac

SEQ ID NO: 51674 - DNA, 122 bp, Homo sapiens
aagcgcgtggtaccagacgcaagctaggggcgacattgtttggaatgctgggttgagtcccggctggaccgcgcccctctcggaagtgtagccaggagtaggggtgtaggatgtgcagctgt

SEQ ID NO: 51675 - DNA, 122 bp, Homo sapiens
gagggtggcgcgtgccagacaccaacggtcggaaaccgccagacaccaacggtcggaaaccgccagacaccaacgctcggaaaccgccagacaccaacgctcggaatacacgccagaccacg

SEQ ID NO: 51676 - DNA, 122 bp, Homo sapiens
cattcataggcttgactgcttttctgtttggggaggacacttgtcattacagaaccattccgaagaaggggttctcaaagtggggctggcagctgaaattagcctatagtggttcctctggg

SEQ ID NO: 51677 - DNA, 122 bp, Homo sapiens
ggcccgcagcgagggcggcacggaaggctggtgcacgtgctcgtggaacctctggaccaccgtgagctccacgaaggccagcgccaacggacggccgtgggacacctggaacacaggacggc

SEQ ID NO: 51678 - DNA, 122 bp, Homo sapiens
cggaggacttagccctcgtgtgggtctggaagtagtcctgaggcaactgagggtttctggcgggggctaccccgtggcgttatccaaaggcttctggactgacctcagcctctgaccgccca

SEQ ID NO: 51679 - DNA, 122 bp, Homo sapiens
caacctctgtcgacctctgcgcggagtcccccacgctcttcacagggagagagaagtgagcgggctgtgaacctgcacaggcaacaagacaggattttggccaaacccgcttgacaggtttt

SEQ ID NO: 51680 - DNA, 122 bp, Homo sapiens
gcgcgagcgggaactgaggctgcgcagggcccttgagggctagctggacttccgggtgggcgtgggcttggcggccccgcactcggagcagccagctggccctgccggcccggagcaataag

SEQ ID NO: 51681 - DNA, 122 bp, Homo sapiens
cagatgacgtcccaggaggccagagtgcagggccggccagagggagtcacagtccggcaccgagaggcaactcggcagctggcggggcccgggctcgaacccagggactcacccaaaccgag

SEQ ID NO: 51682 - DNA, 122 bp, Homo sapiens
gtggaggacagtcagtgagtcaggccgccggcagggcagcgagttgccagccaggtgaaacggccgaggcctcgctgtcctcgccggcctcgccctccccggtgagaggcggcgcggcgctc

SEQ ID NO: 51683 - DNA, 122 bp, Homo sapiens
gtccgctccggcgggggtggcctggcttcctggcctggcggggcgggggctatcagcctgcgagtgtgtggcatctgatgcggggggttttgggtaaggacccgggctctgccgcaagagcc

SEQ ID NO: 51684 - DNA, 122 bp, Homo sapiens
tcttagcagcacacaacaatcacgttgttcagctcaggaacaaaatactaagtcactggtcgtttaaaaagcatattgtcccaattagaaaccccaattttttgcatgtgttttatgaaatc

SEQ ID NO: 51685 - DNA, 122 bp, Homo sapiens
tcgctggggcccggcagcccctctgcagcgcggtgcgagttcctggaaaggctgcgtttgcgctccccggccctgccctcgaggcggggacaacccgcggcttcagcccggcgtccccctcc

SEQ ID NO: 51686 - DNA, 122 bp, Homo sapiens
ggctgcaggtaccaagccctgccccgcggggaggtggctgaggcctggcgagaattcaatcgtggtgtgggtgggctgggagtgctgggggacccagcgcaccctctgcagctgctggccca

SEQ ID NO: 51687 - DNA, 122 bp, Homo sapiens
atttggagcacagaccccactgtaaggaagttgacaatgtcagcagcagccatgctgaggcggccagtgtaagcggaggctaggacagtctcaaaggcgcctgggtccatgacactgggcag

SEQ ID NO: 51688 - DNA, 122 bp, Homo sapiens
agtagttccgcctcctcagaggcccccgggatgaagtgacccagcagaaataccagagaccggagacggaatggcccagggtcagcctccacccggaaccggaggatgcagcgaagacgtct

SEQ ID NO: 51689 - DNA, 122 bp, Homo sapiens
cattccttatcctaagactgattctgaaatcatggaatccctcaagaattgtgtgagcagcggctcactcctgtaatcctagcactttgggaggccaaggcaggcaggtcgcttgagctcag

SEQ ID NO: 51690 - DNA, 122 bp, Homo sapiens
ctgtgttctcttcgctgtttagttagcgagcagctagggtggagtcggcctcaaaggttccgctctcatgtcggcaagtgtgatttgaattttaaaacactgagctttgccggtggaagagt

SEQ ID NO: 51691 - DNA, 122 bp, Homo sapiens
gggacaggaagggcgcctttccctcacgctgggtctccctctgcgggcgcgcagagcagacgtgcccagcagagcccctgtcggccctgcagaccctgctggcagtgagcccgttcctgctg

SEQ ID NO: 51692 - DNA, 122 bp, Homo sapiens
cactgactgcaggtggccacctagagcaatctggggactggatgagccttgaggacatcacgctaagagaaacacaccagccaaaaaaggagagctaccccttacttctctttcatgaggtc

SEQ ID NO: 51693 - DNA, 122 bp, Homo sapiens
ttaggtggaaaaaaagcgtccgaaggcaccgtgaaatgattaaggaactaaagagcttctcgccatgtgagatcatgtcctgttctcgccaacatcacaagatgtccccagacacgccgcgc

SEQ ID NO: 51694 - DNA, 122 bp, Homo sapiens
tcttaagacctgtgataagggctgacttgcaagctagctgccatccatcttaatatctgacgagcccagtcatgttggctgtgtttaattgatccatttcctacttgcttcctcaacccaga

SEQ ID NO: 51695 - DNA, 122 bp, Homo sapiens
gaggtgaagctccccggtgcataagaaaggcacacagaacaggagcgcgcaggaagggctcgcagagcaggagcgcacgcgtaggaagagcacgcagagcaagagcgcgtgcgtaggaaggg

SEQ ID NO: 51696 - DNA, 122 bp, Homo sapiens
ggtgctgcagggtctcaggggcggggaaagaaatgcgactgtgcgcagctgcagtgggtgcgagcgcgacaatcatcgccccgcctccgccacgctatataggtcccagatctgatttggtt

SEQ ID NO: 51697 - DNA, 122 bp, Homo sapiens
ccaggcctccctgtgctcttgggggcgggcagccggcagcagcctggacgccatggatggcggcaagaggtatacagaactctggacccgccgaatgaggaggctaaaagagcttaacacaa

SEQ ID NO: 51698 - DNA, 122 bp, Homo sapiens
gttgctgaggcactgcagcgtggcgttcatgaagcacgtgttgccgtggttgcggagccccgccacgccgggcaccggctcggcggcgcaagcgggcggcgcgggagaggcgggcggcggcg

SEQ ID NO: 51699 - DNA, 122 bp, Homo sapiens
attagcacactaatacctacaactaagggccatgtgggaggtcaaatgcattggcccatgcgtgaagcctaccactgagcttaacagatggacaatgagctcagtccctatcctttcctcct

SEQ ID NO: 51700 - DNA, 122 bp, Homo sapiens
agtggaggactttagtttctttttcaacatcaagctgtgctcctctcctggacagatccccgcaaaagaagcatgtgagtgagatactcgccagcacagttcccaccgaccctcatttccaa

SEQ ID NO: 51701 - DNA, 122 bp, Homo sapiens
cctgtttcttcactctgtgtggctgcagcctggctctctggcttcctgtggccgataagccgtcctgcatcatttacgacgctgggccaacatctggctgccagtgtggtcaccagtcctgc

SEQ ID NO: 51702 - DNA, 122 bp, Homo sapiens
ccaggctggtctccagctcctaaccgcgagtgatccgccagcctcggcctcccgaggtgccgggattgcagacggagtctccttcactcagtgctcattggtgcccaggctggagtgcagtg

SEQ ID NO: 51703 - DNA, 122 bp, Homo sapiens
ctctagagaactaaatgtacctgacctctcacagagctttcaggtggctgcctgctagaccgctctctatgtccctgtcccatagataaatcaaactcaacataactaaaatggaacttaat

SEQ ID NO: 51704 - DNA, 122 bp, Homo sapiens
tttcaacccagaggagcaggatccaggtacagcggagcgcttccggtctggcagcctgggcgaggtaggcggaagcgaaacggaaggggcgggtgcggacgtggagcttccggccttgcagt

SEQ ID NO: 51705 - DNA, 122 bp, Homo sapiens
acatcgtggagtccgggtgcacctgctggagcacaaagcaccacttgcagacatcctgaccgcccccctttgaggttggggtggggactgaccccaaggcaacggggatgtctgattctgaa

SEQ ID NO: 51706 - DNA, 122 bp, Homo sapiens
cacacgtgtctggcaaagaacttgaaaaataatcttcaaaattctcagcctaacaagtaacgcttttccagctatttatgcagttttgtaaactaataaatttactaacataataaatctta

SEQ ID NO: 51707 - DNA, 122 bp, Homo sapiens
ctttctccccacctgtgaagtcccatcctttaaggtccgatcctacctgaaagagtttcccgactcttcagtgctcagagctggctctctcccttgaacccccctagtacctgctgcctgta

SEQ ID NO: 51708 - DNA, 122 bp, Homo sapiens
tcaccgcgcgccgggtagtctctctcacgccctggcgggtgcgcaggtctctaaactgggcggagcaagggaagtgatgtgtggcctccggaaggacgcgcgtaaatcctcacccataagta

SEQ ID NO: 51709 - DNA, 122 bp, Homo sapiens
agagttcaactgtaaggaacataacagagctactaaagccaacgtcttccatccttgtgtcgggtctccaaacgtcccccaaaattatctttaaaaggccaaatttatgctattttttccaa

SEQ ID NO: 51710 - DNA, 122 bp, Homo sapiens
gcgcggtcttgtggatgcgagtcctctcagggtcgttcgtgaggccccagggcgtgggtgcgccccccgccccgcggccttggtgcggcctccccgtcgcacgcacatggctgggctgtagc

SEQ ID NO: 51711 - DNA, 122 bp, Homo sapiens
ccagccgtggccgcaaaggacgttgggaaatgtagtcttcataagggagccagtcgctcccgggacagtggggtccacggctgcgggaggggaatagaggtggggactgtcattccctctgc

SEQ ID NO: 51712 - DNA, 122 bp, Homo sapiens
cttggctaggggaagctgggtaacaggttgtagatccactgatctgtgcccaatgggaaacggatcacggggctgtaaagaagagaaaatgggccgggtgtggtggcccacacctgtaatcc

SEQ ID NO: 51713 - DNA, 122 bp, Homo sapiens
gtggcaggaatccccagttacagccacagagatgtcacagtatcttaacaccggcccaggcgacaccaaggagagccctagatgttccggttctccgagacaaaccacaaacagggcccttt

SEQ ID NO: 51714 - DNA, 122 bp, Homo sapiens
gctgccctgacctgcttcctgaacgctccggccacccaggcctgcgtggagtagggtccacgggcagacagatgggcaggccccttaggcagagcagccctccccatcccggcagtgtgggg

SEQ ID NO: 51715 - DNA, 122 bp, Homo sapiens
tctgaggaggtcacagcttgtgccggcatctgttggtcgccagcacagacacgcatcacgcgtctcacgctgggagttcagaaaccccacaggcaaatctgcggaaggtgcggcgcgactcc

SEQ ID NO: 51716 - DNA, 122 bp, Homo sapiens
gagtccacccaggtccggcacggccctggtacggattgaagttgtggacatcaatgacaacgtcccagagtttgcaaagctgctctatgaggtgcagatcccggaggacagccccgttggat

SEQ ID NO: 51717 - DNA, 122 bp, Homo sapiens
atatcaggtgtcatgaaacccagtttcgaaggagaggggagggggcgtcagatctgcagacggaagcaggccgctccggattggatggcgagacctcgattttcctaaaattgcgtcattta

SEQ ID NO: 51718 - DNA, 122 bp, Homo sapiens
ggtactggaccaatccctggatcgagaaaaggtgtctgagtttagtttaacgctaacagccgtggatggcgggtctccgcccaggtctgggactacactgattaacgttgtggtcctggaca

SEQ ID NO: 51719 - DNA, 122 bp, Homo sapiens
cttcggagtacttctgctgacacccatgctataagaacacaggaaagagaggcaggtgaccggaggaatctggaaaggctccctggaagtagcacatgggtagtcttttgactatgacaatg

SEQ ID NO: 51720 - DNA, 122 bp, Homo sapiens
gttgaatgaatgacactgcaaaagtgcctgtagggtggaggtccagcacagctgctccgacgtacccaggtcagactggagtggtctgagggcatccacacaccatcctgcttgctgaagca

SEQ ID NO: 51721 - DNA, 122 bp, Homo sapiens
gagcccggcgggaaatgggtaagggaccacggggaggcctgggccgggcgggggcacccccggccgtcgccgccctcgacggtgaccgtgtgccgtgcagcgctctcgccacgccggcgagc

SEQ ID NO: 51722 - DNA, 122 bp, Homo sapiens
taattgacacttataggatacctcatccagtaacagcagaatctacgtttttgtcaagctcgcctggaacattcactgagacatcacattctgggccataaaacacacctttacaaatttaa

SEQ ID NO: 51723 - DNA, 122 bp, Homo sapiens
tgacgtaagctgtcccctctctctctccgcctcggctaccaaacagggaatggccccgttcggtggacacatgactcgcgtgaccttacccttacattggactttacattggagatgactca

SEQ ID NO: 51724 - DNA, 122 bp, Homo sapiens
ggcgggcctgcatctgaagaatacgctcggaggctggcaggttgctgcccccgcctcgcacgaccctcgcttcccacctgtgaaatgcacagaacagggcttcatttatttaacgaatcgtt

SEQ ID NO: 51725 - DNA, 122 bp, Homo sapiens
ccgctcttccccgtcttggccctggtctttgagaaatgtgaactggctacatgctctccccgtgatggggccggagctgggctggggacacccccgcggcggcgacgtctgctcctctgatt

SEQ ID NO: 51726 - DNA, 122 bp, Homo sapiens
cctcccggaaaaggcgcctgcggttgagaagggtcttgagcagcgcggaggatcggattccgggctcctggcctcttcccggtccgcgggcacctcggctacctttcggcagcggagaaccc

SEQ ID NO: 51727 - DNA, 122 bp, Homo sapiens
ggctaaaatgatgtgtctaggaattgcttcaatatggaggagagcgagtggaaatccagacgaagcaggaatggccatcagtcgatgatttttacagctggatgttaggttcatggaggaaa

SEQ ID NO: 51728 - DNA, 122 bp, Homo sapiens
ctaagtgctcagggctgggactcagactctgggccttttgactccaaacttcagtggcctcgagagagaggaagcgtgggaacagtagggaaaagcccctgggtctcgcaggagagggtaag

SEQ ID NO: 51729 - DNA, 122 bp, Homo sapiens
cactcacttatttgttcttttattcatttatttactcatatttactgtgcatctaacttacggacagggaatgtgcttggagatggggaattcatagtgaggagaagacaggcctccactca

SEQ ID NO: 51730 - DNA, 122 bp, Homo sapiens
gtcctcccccgagggacagtggcctggggtgaccgagaaacctggccctcccaaggtccccgggctgccaaggaggacccttcggccttagggcggagcctcccccgccgctcaggggaggt

SEQ ID NO: 51731 - DNA, 122 bp, Homo sapiens
gccaccctccgcgcgtcacgtcgcgcccctcgccggcgagacccgatcgtggctgcccagcgactccaggtgcccctgattagcaggctccgccttcggcagggaccctctgattggctggc

SEQ ID NO: 51732 - DNA, 122 bp, Homo sapiens
tagtgaggctgtggctggccctggctgcatccagaccctggagtgtcctgcagccaggggcggatgcaggttttgtggggcctgaggcttctgtggtttaagggaccttccttaagaaaata

SEQ ID NO: 51733 - DNA, 122 bp, Homo sapiens
ccgcgccacggcctctgcaggacagactccagcatccccggggtgggtttccggaggccccgctccccgccgcgccctggaaaggctccagaatctctcggcctggaggcccctggcggcct

SEQ ID NO: 51734 - DNA, 122 bp, Homo sapiens
gcggagagaccaggtcctggctgctgcctgtgggggtgggcagaatgagccttgcattcccggaccctccagtgcccgaaggctgattctcggagagctcacagggtactacggggtggcgg

SEQ ID NO: 51735 - DNA, 122 bp, Homo sapiens
gcacaaatctatttgtggcctttatccattaaatttcagtagcattgctcatcgtagtgacggccccaaatgctccctttgtctcagagatcacttcctatgtattcataagtacaatcctc

SEQ ID NO: 51736 - DNA, 122 bp, Homo sapiens
tttttagttttaacataaatgataatatattataaatactgttcatgcaatgtgtcccagcgcattaccaccttcacatatactatttatgcctgcaatgttctttcagtacttcatacacc

SEQ ID NO: 51737 - DNA, 122 bp, Homo sapiens
gggcgtcctcttctccccggggagctgcaggtgcgtccggacaggaatgagcggcaggggcgggagcgggtgggacctgccactggggggaggggcgcgtgccaggtccccacccccacccc

SEQ ID NO: 51738 - DNA, 122 bp, Homo sapiens
atgctatgtgaggacacaggaacccagcacacatccatctcaaagtacaactctgtatgccgtctaagctccaggtcaggacaattctcaggcctgcagggctagactgaccactgagctgg

SEQ ID NO: 51739 - DNA, 122 bp, Homo sapiens
ggcccgagcccacaccaccttcctagcaaagcaagcagcgggacgccaaggccagcaggccgcattaagaacgctggactgagccaaaagcctacacagaccaagccgctcgggaaaggatc

SEQ ID NO: 51740 - DNA, 122 bp, Homo sapiens
acaggaaagaactccaaatgttcttcctcctaattccagtggatgggaggccgtttctcccgggtaccaattctcatgtcttcccaatccccatgtctaatttctgttttgggagggtaagt

SEQ ID NO: 51741 - DNA, 122 bp, Homo sapiens
ttctaccgcggaggcaaaccttggacttcaagtcccaggaagcaacgcgtgtccgttttccgggcgccccgccgcggcgccgtggttcccagtgtgccccgctgttgttattccttttatgt

SEQ ID NO: 51742 - DNA, 122 bp, Homo sapiens
gctgtccagcaagtgtctggaaggtgttctagctgggtagagagcctattctaacagacacgcacatcgcagaaagcagcatgaacagaaccacatcctagataagagttctgtgtacagaa

SEQ ID NO: 51743 - DNA, 122 bp, Homo sapiens
ccagggcagccacgtgctgacacgatgcagaggccagagcccagagccctggaccacacacgaccagttcttctaagacagcaggctgagcaaggcctggggagttgaggcatgctgcagca

SEQ ID NO: 51744 - DNA, 122 bp, Homo sapiens
aggcaggagtatggtggacccgttcccccagggatgggagagctgaggaaggctgcaggtcggatagctagattccatgatgcccccaagaagttgccagactccagtctgggagctctcaa

SEQ ID NO: 51745 - DNA, 122 bp, Homo sapiens
cgtgcccgagaaaccaacggattagaaggacttttaaagatgtgtgaggaaagagctcaccgctgaagaaggctgctgcatcactgaacttcttatcactaacatagcgagattttagtttg

SEQ ID NO: 51746 - DNA, 122 bp, Homo sapiens
gtgctggtgaaagcctgggccatgtggggcgactacctggagaacatctttgtgaaggagcggcagctgcacctgggcgtgtctgccatcacctgctacctgcacgcctgccggcatcagaa

SEQ ID NO: 51747 - DNA, 122 bp, Homo sapiens
gggcggtgaagaaggggcctggcacctgggaaggctgcggcctggcgagtgccccctcagcggtgtggagtgcggagcgcccgagtgagaagcactgcaaggtctcacctccgccatggaag

SEQ ID NO: 51748 - DNA, 122 bp, Homo sapiens
ggtccttgggtaggggcagcaggggctggcagaggcctgtgtgggcctgttctttctgggcgcagggtccttgcccatgcaggggctcgtggcagctttcagagctggagggaatggaccag

SEQ ID NO: 51749 - DNA, 122 bp, Homo sapiens
gagctttgcccggaacacagtggcctcctcctctcgaagcatgagaacagatcttcctcccgtggccaaagcccccggcatcactcggacagtgtcgcagcggcagctgagggtgaaagggg

SEQ ID NO: 51750 - DNA, 122 bp, Homo sapiens
agattatcttaaggatcacctgtggtgctcattaaaggggcagattccttggtagactctcgcctccagagattccaatttagtacagtgtaggatttaggttatgcactttggattagttc

SEQ ID NO: 51751 - DNA, 122 bp, Homo sapiens
gggctctggccgggcctcagggtcgggcttgtttgctcagcgaaactggtcagaggcagccgggagggagcccgacgccgccaaggtcccggggcctgcgctgagccgggaacccgccacgt

SEQ ID NO: 51752 - DNA, 122 bp, Homo sapiens
agggtaagaaaatggagttgcctctaggaagaagaatcaggcagaggaaacattcagggccgctggcggaccactgacaaaaagaaatcggacgcaaaagaaacctccccagaagaaactgg

SEQ ID NO: 51753 - DNA, 122 bp, Homo sapiens
gcccactgggctctcccggctgcagtgccagggcgcaggacgcggccgatctcccgctcccgccacctccgccaccatgctgctcccccagctctgctggctgccgctgctcgctgggctgc

SEQ ID NO: 51754 - DNA, 122 bp, Homo sapiens
aattgacacaatatagaccaacagtttcatcctggggcttatgggtctcataggagcacccgtatgctgaagaaaggcaaagagagaactacagaatttgtagaaaagttttgttgtagttg

SEQ ID NO: 51755 - DNA, 122 bp, Homo sapiens
ggatcaacccatggatatgcttctaggcctagatatgctccggagacatcaatgttccatcgatttgaagaaaaatgtgctggtcatcggcaccactggcacgcagacttattttcttcctg

SEQ ID NO: 51756 - DNA, 122 bp, Homo sapiens
agggtcacatggttcttttatccaaattccagtgggtacctacctcctggaggtgcaggtcgaaaggttctgtgtatttggtactaggacacacaggtaggtgttgtcagtagtgcagcctg

SEQ ID NO: 51757 - DNA, 122 bp, Homo sapiens
gacggaacactggctcccggagcgggtgtccatctgcaggacacagaaggggaggacctgcgccgtcagatcctgggagggccggccccgcccactgtcacagagaccaaggggactgggaa

SEQ ID NO: 51758 - DNA, 122 bp, Homo sapiens
gaaccctccaagtcgcggcctgaggaggaaggaaaagggggcggcccgggagagccgctgcgaaatcagcaacgggcgggaaccaggttgcctccctgagtcccttctctccccggccggct

SEQ ID NO: 51759 - DNA, 122 bp, Homo sapiens
ctgtttggggccagatttttttggacatgtgttttcccttctaaactgcttctgtaggatcggttactacattcctgaaagtcctttcattgtcagtgtctgtagaattatgctttaggctc

SEQ ID NO: 51760 - DNA, 122 bp, Homo sapiens
caccattctcagagcaaacaccccaagcatctcctggcacgaggtgctcaacactgctcccggccaggctttgttacccccaagagagggcccaggagggggccatgtccaagggcacgcag

SEQ ID NO: 51761 - DNA, 122 bp, Homo sapiens
tgaggccctgagaagaggcttgctcaaggtcatcttgctggttagaaccatcacttaggccgggtgtggtggctcacagctgtcatcccagaactttggaggcggaggcgggcagatcacaa

SEQ ID NO: 51762 - DNA, 122 bp, Homo sapiens
cagaggcccgtttttccaccgcgttgccatagcaacggcctggccggctgcgccccgggccgcccgccccatcccgcgggcccgccctgagccagtgactccagggaccactcaccgcggcc

SEQ ID NO: 51763 - DNA, 122 bp, Homo sapiens
ccagcctcatgttaccttaaccacctctgtgaggaccccatctccaagtaaggtcccttgcggaggcattggggcttagggctgcagcatacagatctgggggagacacacggcccctaaca

SEQ ID NO: 51764 - DNA, 122 bp, Homo sapiens
ggtgccccaggggcttggctttgtccagtggaggccgcttcccggctgtgccgtggcctccgggggctggaggactcctgcccgtgtctgcagtcctcgcagaagcatcacagctaatggct

SEQ ID NO: 51765 - DNA, 122 bp, Homo sapiens
tctcttttacagatacatatgaaatatgtttctatacacaatataagacatcatttgaaccggtgttcctgtctaagactatacttccctaggccttctacctacatcagtttggggccaag

SEQ ID NO: 51766 - DNA, 122 bp, Homo sapiens
tttaatacagcaaaaaccacctttgttacagggaatgggaagctatactgtgaagcagaacgtaacggaacagcagtgtagggtgcctgcagcaggaacccagacctcaggcagcaccaggg

SEQ ID NO: 51767 - DNA, 122 bp, Homo sapiens
cgccggcccgcccgccgcccaggaccggcccgcgccccgcaggccgcccgccgcccgcgccgccatgggagtggagggctgcaccaagtgcatcaagtacctgctcttcgtcttcaatttcg

SEQ ID NO: 51768 - DNA, 122 bp, Homo sapiens
agaaacacctcccagctgccgcctacttgcccaggctcaccctgccctacacgggcgcaccgcctcagggcttcctgaaacagcctcacttaccagcgcggccaggatatcagcttctccct

SEQ ID NO: 51769 - DNA, 122 bp, Homo sapiens
tccccagtgggcagaccccgagtttattgtgttgtgtggcaaatgctgagtaattacacacgatgcctgtctatatgcaggatggggtcaaactctgtggcaaagacacagctgctggtttc

SEQ ID NO: 51770 - DNA, 122 bp, Homo sapiens
gttttgccgggactgttggggaagctttagtgttctccgcttctacttcgtttgtgtgtacgtggtttgcgtctcagattcacttattgcgaaactgggagtagcccgaagaagctggaggt

SEQ ID NO: 51771 - DNA, 122 bp, Homo sapiens
tcctgcaaaagagaaaaagcccacaggctttggtagggaagatctgggtttccattccagcgctgccgctggtgatgggacaatgggcgggggctctgagccacaggttcctcggggcacat

SEQ ID NO: 51772 - DNA, 122 bp, Homo sapiens
gggttcagtgcctaaaatgcagcaggaggaagatcttgggagtcctgctttctgtcgcgccgggactctggcatcactggatggcaaaccggctccatgggcgaatagtcagcaaaatgccg

SEQ ID NO: 51773 - DNA, 122 bp, Homo sapiens
tgctctgctctcctcctttctttgggtaagctcctttgctctgattttatctggaatcatcgagagcctctatctgtctagaaaaagcacttagcaatgaggaatcagcactgcggagaata

SEQ ID NO: 51774 - DNA, 122 bp, Homo sapiens
gctccactgccaccactgcccacgccctgcgtccccgtttgaccgcgtggagccggaccccgccttcctcgccccgcgctgccccaggcctgccccgcaccagcagctaagcgcaggtctct

SEQ ID NO: 51775 - DNA, 122 bp, Homo sapiens
tggccaaggccggagtcggcttcctcagcttgcgggaaagtgtggcgggaaaggcgcgggcggaaaccggggctgcgcggggtgcttgccggccagcgcgagttccggttcggtgtgggctc

SEQ ID NO: 51776 - DNA, 122 bp, Homo sapiens
gaactcaagccccgtacactttgcattcttttccagcataactcagccagtgtttcggatcgagattggagaagcaactttaaagcaggagttctagatctgaggcctatggatggactttg

SEQ ID NO: 51777 - DNA, 122 bp, Homo sapiens
gaaaaaaacaaaaacataaacaaaatagtatctgcctatgattaatagtatttaattacacgcacttttgtttgagtttacttccttgctttctgaaaaaaacataggtatttagacactag

SEQ ID NO: 51778 - DNA, 122 bp, Homo sapiens
tctgctccatctccgggaagcaaagggacttggggtgtggcacaaagagcagggatgcagcggccgggtcacttggatggtgtcctcatctgaggccaggccacacctaggcctccccacac

SEQ ID NO: 51779 - DNA, 122 bp, Homo sapiens
gcagcctgcagaaactggagggcaaggagcatcccccaaccgcccggagcctccaggaggcgcaaggtcctactgactccctgacttcagacgtccagtctccggaattttgagaggatcca

SEQ ID NO: 51780 - DNA, 122 bp, Homo sapiens
cactaaaactagactaggaagttggaaataaacatgcaaaacaaaccacaataaaacacacgcagcacatgaaaaataaattcaagaaatgataaattatcaagtagtcactatgattttaa

SEQ ID NO: 51781 - DNA, 122 bp, Homo sapiens
tgaacccaggaggcagaggttgcagtgagccgagatcgcaccactgcaccccagcctgggcgacacagtgagactccagtttgacaccaacctgggcaatgtagtgaaaccctatctctata

SEQ ID NO: 51782 - DNA, 122 bp, Homo sapiens
ctagaaggccccgggcgagaagaccactaggcctcctccgcctggcctccccgaccccaacgctgcccggtcaccctctcgtttatttcaacgtatgaaaagctgtttctagcagggcgcag

SEQ ID NO: 51783 - DNA, 122 bp, Homo sapiens
tgcgattgcgagtctacagctgggatgttgtcaggaggcagcaactccagcagcttttaacgccatctccttacaggtggacctcgagtcccagcgccggaggaagcggcggcctccgcaca

SEQ ID NO: 51784 - DNA, 122 bp, Homo sapiens
tgggcttatattatgcatacaattttacacatgacctttcctcccaccttgtatgacttacgtaatttcccatgttgtcatgtattctttaaagatgtaattttaataactgggcattatac

SEQ ID NO: 51785 - DNA, 122 bp, Homo sapiens
aaacaaatgaatgacaaaaatggatgtgctgctggctgccaacttgattaaatcacttgacggtaaataacttggcagtaacagactaatggcagaaagtacactcaatcagtgatgcaagt

SEQ ID NO: 51786 - DNA, 122 bp, Homo sapiens
gaacctgagtgtgttagactgcgtgtggggctacctcgctggcagccagcgctgcgtgtgcggtgatgagccatgtctcccgtcttcagcctcgtagagacgcgggctccacactgcctgct

SEQ ID NO: 51787 - DNA, 122 bp, Homo sapiens
catgaacattttgcagtactgcccctcttccgacatgtggacgctctttgaaacatgtgacgtccacattcgcaagcagcagatggtgtctgtggaagagaccatctacatcgtgggggggt

SEQ ID NO: 51788 - DNA, 122 bp, Homo sapiens
tgtaggtttggaagtcaccaagtttcagtgcggggaggttccgggcagcaagtagttaggcggctgctccacccgcttgccccaggccccagacgtctggcaccaggcgtcagcaccaggga

SEQ ID NO: 51789 - DNA, 122 bp, Homo sapiens
cagtctttctgcaggatctgcaagcagatatttggaccgctttgaagccttcattggaaacgggaatatcttcacataaaaactagacagaagcattctcagaaacttctttttgatgtgtg

SEQ ID NO: 51790 - DNA, 122 bp, Homo sapiens
cccccgcgcccgggcagcgctgccatgcaaccagaggcgaggccggcgtgggggtgggggcggctggggagtgaggagggggagtaataaaaaatgaaataatactagtggaataattcggt

SEQ ID NO: 51791 - DNA, 122 bp, Homo sapiens
gcctatccacactgaccatctgttttctcattcagaatcggcaaggttggaaaccagaagcgtgttgttggtgtgcttttggggtcatggcaaaagaaagtacttgatgtatcgaacagttt

SEQ ID NO: 51792 - DNA, 122 bp, Homo sapiens
ctggcctcactggactcacagtacccaaggaacaacaaataaatgtctctgagaggaaaacggaaagagaaaccatctgataagagaatcagactttggaaaagcaagcccttagaaccaga

SEQ ID NO: 51793 - DNA, 122 bp, Homo sapiens
ccctggcgtgataacaccaaattcatgttattagaaggaattaaattttaaaaagcacaccgttccaggcacacagaaggagcccccgaacgtttgttttataaacgcaggttggttgctga

SEQ ID NO: 51794 - DNA, 122 bp, Homo sapiens
cgggtcggccgggaggttaggatcttgtgtttgtggcctccgcagccagcttaggctgctcggtgtcgtgtcgcagttatgtactgccatttattatgactcttagaatatagttatttctt

SEQ ID NO: 51795 - DNA, 122 bp, Homo sapiens
gttctgccccataggaagagcaactggaggtcccggcaacttaatgacagctaatgaggacggagttctccacaggttgtactggctgtgcaaagcagcctccaggcgttatcacatttccc

SEQ ID NO: 51796 - DNA, 122 bp, Homo sapiens
ttgcacacttgaacaaagggatttaaatatatactctgtttcagacgaaagttctaggtgcgtagggttagtaggcaaggcagcgagatgctctgcagggcttacatttcattgtgttactt

SEQ ID NO: 51797 - DNA, 122 bp, Homo sapiens
ttgttgttgaatgcagaaaaatataacaatgtgtataaaggtgcagtatgagtcacttcacggaatgtctaggcccctttgctggcagcaaacaagctttccagccctcttttgaggaagcc

SEQ ID NO: 51798 - DNA, 122 bp, Homo sapiens
gaacaaaattagtcaagaagtatttcatcaaactaaccaattgtaccaagtttgccgaaacgcttacctgttctgaagattctgcttgtgacggggaaggtagaagctgctgcttttatagc

SEQ ID NO: 51799 - DNA, 122 bp, Homo sapiens
tctctttttggaaatgcgaggagggtatttccgcttctcgcagtggggcagggtggcagacgcctagcttgggtgagtgactatttctttataaaccacaactctgggcccgcaatggcagt

SEQ ID NO: 51800 - DNA, 122 bp, Homo sapiens
tagggccttatgcaagagctggaaactggctgaccatgataataaccctggaggcagacacgggatccttgggagattcttgccttaaaaatgagacacaaggaagtctcagaagtgtcctc

SEQ ID NO: 51801 - DNA, 122 bp, Homo sapiens
taacacttatcacgaagatctgcagcttcactcctgagcccagcgagaccacgagcccaccgggaggaacgaacaactccggacacgctgccttaagagctgtaacactcaccgcgaaggtc

SEQ ID NO: 51802 - DNA, 122 bp, Homo sapiens
cccctgccctccctgactccccgcccacacccctggttactgcccctggtcctcactgaccggcaggtgctccccattgaggtccatcttgtagcacatctccaggaagtgcctcaggtgct

SEQ ID NO: 51803 - DNA, 122 bp, Homo sapiens
ctcccttcctgggcagcccaggccagagctcccctggggtcgagctgggcgactggtgcgcggtgtggctgtcgcccttttgtgctggcctcagggtcaacgcgcactctctcttctgcttc

SEQ ID NO: 51804 - DNA, 122 bp, Homo sapiens
ggccatctataatagaggccagggagagaggcctcaggagaaaccatccagctgacacctcgatcttggtctgtagccctcagaactgggagacaataaatgtgttgtttaagccacatggt

SEQ ID NO: 51805 - DNA, 122 bp, Homo sapiens
attgcccgctttgttgccgagatggtgtttcggaaggcgctgtgaatgcacttccctttgcggggctcacacagacaagatgtgtgttgcaaggatgaggcgcctgctcggcctccagccca

SEQ ID NO: 51806 - DNA, 122 bp, Homo sapiens
ccacttagcccggcttccaattcatctttccattgtgcacaaggccttccccgtcagagccgtccccaaagttccagaatgcttcccctcaatagattccacagtctccggaagcagggctg

SEQ ID NO: 51807 - DNA, 122 bp, Homo sapiens
gcttgatgggaggctcctcatacagataatgtttgcttagggacttggtattggcctatccgagactttctcataactgcactgctgtgggaggttctttgtacctaactactcctttgcct

SEQ ID NO: 51808 - DNA, 122 bp, Homo sapiens
gcaccccgcgctgctggatcaccagggtctcgttgatctccaggaggccgctggtccaaacgaagcggtccatggccgctgccacccagccccggccctccgaggccgcgagcagcgcgcca

SEQ ID NO: 51809 - DNA, 122 bp, Homo sapiens
cggcgtcgctgtgcacccggagcctggacaggaagacgctgcttctgaagcaccggcagacgctgcagctgcagccgtcggaccgggactgggtgaggcaccagctccagcgcggctgcgtg

SEQ ID NO: 51810 - DNA, 122 bp, Homo sapiens
ccagggcacccacacacaccacaggaaggaggagcaggccggggcagcctcctagacacgcgtgcccaagatcgtgtcctatggtctcgcttcggccgctcttcaccaaagcctcttccttg

SEQ ID NO: 51811 - DNA, 122 bp, Homo sapiens
gcacacctgccacacccatgcacccatcaccaacgtgcaatggtaactctgacaggctcacgcagtggccccagaacacaactttggtcaggcatgcagtcacttactgcgccctcagcatg

SEQ ID NO: 51812 - DNA, 122 bp, Homo sapiens
tccaactcaaagtaaaaaaaaaaagaaggaggagccatgtgacagccagggaaaaacagccgaggcagagggaacagccaatgcaaagacttggttgagaattcagtagatgaatctaatct

SEQ ID NO: 51813 - DNA, 122 bp, Homo sapiens
actgtatgtggggcagtcggcctgggccccatggctcgtgtttgttgctgaattgggcaacgtgggctgcggttcacagggcaacagagacttcaccacctaacacatcggggctggtgcag

SEQ ID NO: 51814 - DNA, 122 bp, Homo sapiens
ctgttcttaaaaagggtttataactgcatctactataataataaaatgtaagcaaccttgcgctaggtactgaacaatttcatagctttgaactctccaaaatgttctagaagccaatacag

SEQ ID NO: 51815 - DNA, 122 bp, Homo sapiens
gcccgctcttccctccgccccgcgacctgaacctcgacccctgaccccagcagcaggaaacgcatggcgattcaaaaccagtacagctttattggctcaggcagcggacactctcattgtcc

SEQ ID NO: 51816 - DNA, 122 bp, Homo sapiens
ttttctgtcactctgcagctcaagcctcacatttcactgtagtgactcatatcccataatcggtagtcattagcaaaaggagcagatggggaagcattttcagttttcttttgaggtgtacc

SEQ ID NO: 51817 - DNA, 122 bp, Homo sapiens
ggtgatggaatgagaccccatctcaaataataataataatcagagaagggaattctttatcggtataggtggtttgttcccccaactacctggacagagttagcagcactctgtcagtgttt

SEQ ID NO: 51818 - DNA, 122 bp, Homo sapiens
ttcacagacaccgtatccggacaatccatttgttctgtctttaatcagaaatggccatagcgaactaccgtgcgtccaacctgagacacctggggatggtggagccaggggagatgccgcgg

SEQ ID NO: 51819 - DNA, 122 bp, Homo sapiens
gcagagtcctgaataatatctgaaatagctgaaagacctgcagttgtgctctgatctttccgttgtttgagctcctacatcaactgcttgagtggcttgattcttactgctaagaagcaaaa

SEQ ID NO: 51820 - DNA, 122 bp, Homo sapiens
ccgccccgcgcggtcagaggcaggcgctgagtgtgcgaagaggatccgggttgaaatctgcgcccccggttctcgtccccgccccgtcccaccgccccatccccctcccggagtcgaaattt

SEQ ID NO: 51821 - DNA, 122 bp, Homo sapiens
cccgggccgcgcacgggaaatgaagcactgggctctaccaagagccacgggccgggggcccgggggggggacgcgacccttgcacacgccccgcctggccgccaggaccctcgacgcgccgt

SEQ ID NO: 51822 - DNA, 122 bp, Homo sapiens
ttcaggtgcccctactacaccagcgttcagaacatgtgtttagactgtctgtggggtggccggcaggtccctccccaccggagccctcagtgactagtcccttgtacctaaaaatagaactg

SEQ ID NO: 51823 - DNA, 122 bp, Homo sapiens
atatagaggtaaatatttgtccctgaaaccttctgcacttaaaaaactccacccaaagaccgtgctggttgcacaagataaaaaggaaaagcagaagttattttctacgattgctacggaat

SEQ ID NO: 51824 - DNA, 122 bp, Homo sapiens
gaaaagatcttgaactctgtgttcccagaccttcagggtttgaccagaggcaggatctgtcgcagagggtacaaaaatggggtcagctgcccttcatgtgctgagtagaggacttcagctac

SEQ ID NO: 51825 - DNA, 122 bp, Homo sapiens
ttaccaaaagtcgccttctgcacggtcacaccgagccagcgcctgggcctggaaccgggccgcagcccctcagccttgcccaccgcctcccgaccatggacccccgcaaagtgaacgagctt

SEQ ID NO: 51826 - DNA, 122 bp, Homo sapiens
gtgaagatcacaggatttaagctgtcagcgtgggacgggcatgtgctttaaggatgattgcgccagcaaagccgccttcctgagccatgcttatgccaggctcctcctgtctctgagcaaat

SEQ ID NO: 51827 - DNA, 122 bp, Homo sapiens
tttctaattcagggcctcctcatggcctggttccataaatggtcaaatgcagcctgacagcgcagcctcctatcagcgctgggctccgtaccgccacacagcccacataccccgttccccag

SEQ ID NO: 51828 - DNA, 122 bp, Homo sapiens
tgacctggtccatgggggtcacatgggcccgtgtgacctcaaacaccagctcggtgccgccgcggaccctggtggatggcgtgcccctggtgtagcggccggcggcatacacggtgaaggtg

SEQ ID NO: 51829 - DNA, 122 bp, Homo sapiens
cgaccctgctgagggcaccctcagccctgctctccagctcccgcccaccggacgctaacccgctgaccgtgcacaggtgcagtcacagcacagcctgcatgagaatggcgcgctggtgccac

SEQ ID NO: 51830 - DNA, 122 bp, Homo sapiens
taaagcattccatgataagcacattaaaaagctatgaaaaggaagggacactggcatagtcgagcaattgatacgagcctatgcaattaaagcctatagagtaaaagcaaagaataatgcaa

SEQ ID NO: 51831 - DNA, 122 bp, Homo sapiens
cctgaagccctttagaccttaggccacgagtcagttccataaattcctgagaaaaggactcgactctggtgatgaaatggaacgtttctgatgggttcagtcctacctaggaagaatgaaag

SEQ ID NO: 51832 - DNA, 122 bp, Homo sapiens
ggaaggtaaaaccatacagttgacagaagatttgggagctgtgcagcctgagagtggaagcgaatactgaatgaatgctaccggcacagatcctaggaggtgcagggcagtggcgtgcacat

SEQ ID NO: 51833 - DNA, 122 bp, Homo sapiens
ccacatctccacttcatcgctgttgttttttttttttaattcttagtcctctcatttcagcgcatccctcagaggagtttcagcatttggggatttgaacggcccatgaccaatattgtgaa

SEQ ID NO: 51834 - DNA, 122 bp, Homo sapiens
gggcccccgcgggccccgtccagcagcgcgaagccgaaggccagcacgttcttcgcgccgcgctcgcacagcctctgcagcactcgggccaccagctccttcaggcaggacacctgcggggg

SEQ ID NO: 51835 - DNA, 122 bp, Homo sapiens
ctctcgcaggtgacgttgcataatgcttgcctgggccagctgcattcccccttttcttctcggcccactcttctccgtgttgccccccaatcctcccacccgccccttcacacacaaacaca

SEQ ID NO: 51836 - DNA, 122 bp, Homo sapiens
aaacttaaaaaaagaatcgtgctgtcatctctgttcctgcggggacaggcacccatttgtcggctcacttcattgctccgtcggccgggctactatttcagggctccctggaagagtaagtc

SEQ ID NO: 51837 - DNA, 122 bp, Homo sapiens
ttgcggtttcgggggccggggcagagtggcgaggctttcccggcctggggcggggcagggcgagggccgggggtccgcgagggccacgaggacgggtctgggcccaaggaggccgggcaggg

SEQ ID NO: 51838 - DNA, 122 bp, Homo sapiens
gggagggggccggaacgtgcagagggatcgaggctctgctgacctgcacggggcggggagcggggaggtgcacacagaggccgagggggcaccctgacaccggccctcttctccgacgcaaa

SEQ ID NO: 51839 - DNA, 122 bp, Homo sapiens
tcactctgttcagactagccgctccctatttgttttgtttttgtttttgttttttaccttcggtgctctctctcaggatgcggaggagaaaactccaccaaggttatcccaaataacttaaa

SEQ ID NO: 51840 - DNA, 122 bp, Homo sapiens
gactatggtatcaaaataaggtaccagaaaggatttccttcatattttccttagtgactccgaaataaggtagacacacatacaatatttaccccaatatatatctctttgttccttcccca

SEQ ID NO: 51841 - DNA, 122 bp, Homo sapiens
gaaatgcttaggttcttgctacccaaaatgcggtatgggaccagcagcatcagcatcatccgggagtttgctacaaatgcagcttctcagcactggattaagatatctggggaatgcccaag

SEQ ID NO: 51842 - DNA, 122 bp, Homo sapiens
actctgttcatgaatgtttcctcattttcaacagtaggatctacctgggcccttttctttcgaggaggctggggagtctcactggtactgccaccatctccatttccaggtgttttctgttt

SEQ ID NO: 51843 - DNA, 122 bp, Homo sapiens
gtgaaggggccatgttgatgggtgacccggggagaggtacccggccagaggcgagtcctgcggagtggtagcgcgcacggcctgcgggtgagtgagagaaggaatgagggccgccggcggct

SEQ ID NO: 51844 - DNA, 122 bp, Homo sapiens
ctgctcgcagcactggcagcgaggacctcggaatcgcttccgccctcgggccttctcacgcgtctagggactgcctccagcaggtgcagccccaggtgcccaattgccagatctttaacctc

SEQ ID NO: 51845 - DNA, 122 bp, Homo sapiens
gtagggggtggggcgccgcttaggtttgggaagacacgaagcggctcctcgggcttccagcgtccacttcctacggcaagcaggaggagacaagcgccaccctgcgctcgcggagccgaccc

SEQ ID NO: 51846 - DNA, 122 bp, Homo sapiens
ctgtggcacggaggtggtgcagaccagcctggaggcagaaggcaggaggctgggacatcccgagtgtggcttcagtctaccacctggccctttagccctgagtgcccccctctaactcccct

SEQ ID NO: 51847 - DNA, 122 bp, Homo sapiens
ctgggttgttagtgtctgttcagggttgttcctgcctgtttggggttgttcctctcagttcggggttgttcctctctgttcggggttgttactgcctgtttgggattgttcctctctgttcg

SEQ ID NO: 51848 - DNA, 122 bp, Homo sapiens
atgcttcctgactatttttctaggaattcctaggtctggtgcctgcacctcagctcacatcgctgtgcatggatcaagaatccccccctccctgtactcttttccgggcagtccttcatact

SEQ ID NO: 51849 - DNA, 122 bp, Homo sapiens
acatcatggaacccgcacgcgacagaaccgccaggcttcctcctgaccactcccaccaggcgaccttctgaggaccctaaccctctggaaaagctcagaaaaccccaggtgtcctcagagaa

SEQ ID NO: 51850 - DNA, 122 bp, Homo sapiens
cgcccccgccgggccgcagagagcgccagcgccgttcaaactcctcctctgcttcggtggcgcccttggcacacaggtaggacagcagcaggtgcacctcctcggctgtgggccgctgctcg

SEQ ID NO: 51851 - DNA, 122 bp, Homo sapiens
cggagtcggagtcggatccggattcggattagcagcccgggaagagtgccgtggcacaggcgccggagggagcgcgaccctcggaccccgcctggcccgcggggctgggacccggccccggc

SEQ ID NO: 51852 - DNA, 122 bp, Homo sapiens
actgaggagcgcagagcagagagcagactctgcgctgacttcgatgctccccggctgtcgcgcttctgtggatgtgggagcccaggccaggcagagaacagatgcagggactctgcctcatt

SEQ ID NO: 51853 - DNA, 122 bp, Homo sapiens
cattcccctccttacagcgttttaggatgcagattgagaggagataacgttagcccgaagcgcctttgcagcctcttttgcgcggctgaaacacagcacaacccacccccccgccccacccc

SEQ ID NO: 51854 - DNA, 122 bp, Homo sapiens
gctccggcgccccttaaggggccctgttatagtgtgcatcgcctgatgggagatgtagtccgcctcggtcagactcgccctattactgcgtgaacgactgggtttttttttttttaacctcc

SEQ ID NO: 51855 - DNA, 122 bp, Homo sapiens
tggtttatgggagtccactcagactatcatttccctccaaagcctcgggtgcttggagagcgtgaaggcaatgtcacctcctctccgacatcagatctgctcactacttttctgccaacagg

SEQ ID NO: 51856 - DNA, 122 bp, Homo sapiens
cggcaaacacgctgcacagactccctggtgttttctgtgtgagggccaaggcgctgccaccgggcagccgaggtgaggcaggtgctctaaggcatacgtgtgttcacgtgtgcatggacctg

SEQ ID NO: 51857 - DNA, 122 bp, Homo sapiens
ttgtttgtaaccataattaggaaggcgagagcattactggtctttattggactggggctacgaatgctatgtagtctgcaatggaagggacaggtccatacaagggatcaatagttatactt

SEQ ID NO: 51858 - DNA, 122 bp, Homo sapiens
ccgggactctttcttgccatctgctggtgggaggtcagaagtcccgagttgaggaaccgccgcggaaagagggtgtctcctaagggcgatttcctccctcccctttttccgcccttcctcct

SEQ ID NO: 51859 - DNA, 122 bp, Homo sapiens
ctgaacctgtgcttcaaattcctattgttaaaatagggataataatagtcaacctcaccgcgttgttgtaaatcacctaagacatgtgaagcacctggctgggacttcgcactcagaaagcc

SEQ ID NO: 51860 - DNA, 122 bp, Homo sapiens
aaaatgagcttcaatatttgtgcaaatcatagagtcaaaagaaaaaaatcgatggactatcgactactggggatgatcacattcattttgccctttgtggttggtgaaatccatgctgcaat

SEQ ID NO: 51861 - DNA, 122 bp, Homo sapiens
gccccagcatgccagttgtgcacctgtggcttttcccttggccactttgcagcaccggcacgagagaggcccacagggtgagcctccacaccaccagccaccctttgtccctcagaaagggc

SEQ ID NO: 51862 - DNA, 122 bp, Homo sapiens
gcccttgagcggcatgcgcgctgcctgactgggacacagggacaggaaattcgctcctgccgagctcactctccggctggcctgcacaacagacacagtccaactcatggctgctcactcaa

SEQ ID NO: 51863 - DNA, 122 bp, Homo sapiens
cacgtgctccttgataggtgttcaaccatagtgcccaaacacggccctgctgtgggtcaccgcgctccaagcctgagaagccatggggacgacaggatgaaccgctggctgggcgcggcgtc

SEQ ID NO: 51864 - DNA, 122 bp, Homo sapiens
cgaaccacggccccgggagcagagccgagcgcgcccccgagccgccgcccgccggagctgcgagcgctgaagccattcatgattttggtgacgttattccaggagtgggcgagggagggcgg

SEQ ID NO: 51865 - DNA, 122 bp, Homo sapiens
attggaaaagcgagccctgagtactcagcccacccgcccttctcctgctgaactgtcgaacgtagccaccagctagcctgagcttgttctgatgtcttctgggatcgtcattgttatgggtt

SEQ ID NO: 51866 - DNA, 122 bp, Homo sapiens
gaactccctttcgtgtcttagataaccacctgatgtagtagccacctgatgtagcccactcggtcccaggcctttctccattcacagcctgggctttggacacctgctatctgttctggggg

SEQ ID NO: 51867 - DNA, 122 bp, Homo sapiens
caagcgcccaccgatccggaggctgcgggcagccgttatcccgtggtttaataaagctgccgcgcgctcaccaagtcctcttccgcgtctgcttccgcgtcgggcccgggcggggcggggcg

SEQ ID NO: 51868 - DNA, 122 bp, Homo sapiens
tggtattctgtgagattgttcacgtccgttaggagaataacatggcctacctatgggggccgggcctgcttctgggtgtcagaggctgctcccttcttccctccctttttctctcatgctaa

SEQ ID NO: 51869 - DNA, 122 bp, Homo sapiens
gtgaggttctggtggaatttggcatagcagcgcaaccctccaggaagtcttggtgatggtcgcacggttccccttctgctgatgatgtttcgttactgtcactggagagtttaccctggttt

SEQ ID NO: 51870 - DNA, 122 bp, Homo sapiens
aatgtacattgggaatctccaagggacatctcccaaactacctgaccagggtgtgggttccgccgaatatcttttgggaaacgctgtgcgggggtccctagagcgtgtgggtcctccccatc

SEQ ID NO: 51871 - DNA, 122 bp, Homo sapiens
ccgccccggagaccacctcctcctcctcgtcgtcgtcctccgcctcctgcgcctcgtcctcgtcctcctccaattcggccagcgccccctcggctgcctgcaagagcgcgggcggcggcggc

SEQ ID NO: 51872 - DNA, 122 bp, Homo sapiens
tcttctttcatgctcatcgtccaaccctggtctcccttgtcctccttctcctcccctagccgattagtaggcacagcggcaatagaccgtcaaatattgctcttccacttagctcctctgca

SEQ ID NO: 51873 - DNA, 122 bp, Homo sapiens
ctctttggcaagtggtttgtgcatcaggagaaactttccacctgcgagccgaaccggcgccgagtgcgtgtgtttctgcctttttttgttgtcgttgcctccacccctccccattcttctct

SEQ ID NO: 51874 - DNA, 122 bp, Homo sapiens
ggtggccctgtgggcattgagtttgcagttcctggcaagaagcttccccaggtctaatggcgaagcttccctcaacctaacgtttcagggttaggactcctagagcccattaggacgagact

SEQ ID NO: 51875 - DNA, 122 bp, Homo sapiens
ttccctgcgtctttcgggccgggcccctctccaccgcctgccgcgccccgacccccagggcgcccctcactcaccagggcgcagacctaggcccagctcctgctcccgggtctccgctcggc

SEQ ID NO: 51876 - DNA, 122 bp, Homo sapiens
gcagcaaagatagatcacgtcagcagcgaccaggtggaggatgtataccatgtagggattcgtggccccacagcaaagcagccagaagacagtgccattcaataagaccccacagagggaga

SEQ ID NO: 51877 - DNA, 122 bp, Homo sapiens
ggtgttggggttcagctggttctgggaccccgcttgcggcttgactgtgtgcagacaggccgggtgcgaccctcgtgcttgcctttccgccgctccgggagaggctggggctgccgccccat

SEQ ID NO: 51878 - DNA, 122 bp, Homo sapiens
gcgcgcccccaaaagctccccagcggccggccctctctacgtcatccgcaccctcccgcccgctcctgaactttaaaccacactcggaagaacaacctggaggagggggatttctcaggagc

SEQ ID NO: 51879 - DNA, 122 bp, Homo sapiens
gagtgttgttttccatgatgttctccagcacttgcagcctctgcaccgagtcatcgtattcgagcggcgcgtccctctgcacagcattggacacgtaggggctggaggaagagcggcagttg

SEQ ID NO: 51880 - DNA, 122 bp, Homo sapiens
tcagccgctcgtaggttgctgggcatttgcgtcgtttccacctttggctgttacgaacagcggactgtgaacgttcgcgtacaaactcttgtgtgatgtttcttttgcttgaatatgcctta

SEQ ID NO: 51881 - DNA, 122 bp, Homo sapiens
ggcaggcggggtggctgaggcctatcaggtggccacccagaggcatgtgcagttacaaaccgtgacaaaggaaaggtgcagcaggttctgacagccgatgcagaacagtgcgggaggctccc

SEQ ID NO: 51882 - DNA, 122 bp, Homo sapiens
ggataagaagtttgtatttcacatgacagaaaatacagatttattaaagggtttcagaaacggggtttgactttttcagggctagataaaaacaggatggatttagccaagctgcacagacc

SEQ ID NO: 51883 - DNA, 122 bp, Homo sapiens
gaagccacatagctggggaccaggtgcacgggtgcttccagcggacttgggggtacttaccgtactggaagtagccagtgccgtatccgggccggtacctgcccccaggtctgggcctttca

SEQ ID NO: 51884 - DNA, 122 bp, Homo sapiens
catgccctgtgtatctcaggatcagggatttgagctttgtgtcctcctgtgtgtctcccgcgtctcattccatggagagccttcctgcccaactggagccctcctgattgctgttgttcagc

SEQ ID NO: 51885 - DNA, 122 bp, Homo sapiens
agcagctcacccgggtgcacagcccctcccgcgggagccgctgcgaaagggccgtccccgcggtgtgcaccgacctgcgctcagggtactttgcgcccgacccgtctgctgcgcacagccca

SEQ ID NO: 51886 - DNA, 122 bp, Homo sapiens
ttcatgcacatggtgggtcagaatgttatttttataatataaaccacctggccttctcctcgtttacctctgccgcaatgctattctacacacatacctagaccaaggtccctggtagctat

SEQ ID NO: 51887 - DNA, 122 bp, Homo sapiens
cctccactgggagctggggccagggtctgggcgaggggctggagtcagactgtgggagcacggagcccaggatctgagcctgcccgcaggctgcctgtcttctggtctctctcctcctgctc

SEQ ID NO: 51888 - DNA, 122 bp, Homo sapiens
acgcccaggacctctgtgacgtttccctcacggaatctcacacgcccgggacctccgtgacgtttccctcacggaatgtcacacgcccgggacctccgtgacgtttgcctcacggaatctca

SEQ ID NO: 51889 - DNA, 122 bp, Homo sapiens
ctcctgacttgcattagcatggaccggtacatcgccattgtacaggcgactaagtcattccggctccgatccagaacactaccgcgcagcaaaatcatctgccttgttgtgtgggggctgtc

SEQ ID NO: 51890 - DNA, 122 bp, Homo sapiens
agatgaggttgagaaagaccagcacggtcttggaggaggtgatgccgcactggcccatggcgccggtggcccgcgaaggcccggcccggagagcggggctgcgctcaccgagagagcggcaa

SEQ ID NO: 51891 - DNA, 122 bp, Homo sapiens
ggcgcagaggcgctgggaacccacgggcttctgaggagcgcagcgggcacgacgacggagcggagtcctgaggccacagctgaggaaagggtcaagctcaggctcccaggcggtggccgagg

SEQ ID NO: 51892 - DNA, 122 bp, Homo sapiens
gccgaggagacctgggctgggctggcaagtcccggaccggggaggaggggagcagccctccgatgtgagggatcgcagaggaatgagcttcgttctggattaaaaaaaaaaaaaaaaaagtc

SEQ ID NO: 51893 - DNA, 122 bp, Homo sapiens
caatttaacaagctgttaattttaaaggctaccaaaataataagttaggtaaatgttttacgtaatatatgattgccatattgaagtggtatgttttaggacagattttgatttttaaattt

SEQ ID NO: 51894 - DNA, 122 bp, Homo sapiens
tacctgtcttttgtcatcaatgtttgcagctgcaacaaaaggctgggcccttctgttgtgcgcggtaccaatgggtttgaattcctgtacaatggcagacaaaatacacagccacacagcgc

SEQ ID NO: 51895 - DNA, 122 bp, Homo sapiens
ccagggaggaaaagggctgaaggtgggagcctctgtctcaacctggacccccatatttgtcgcccactccccagatgtctaaagcagctcctgccaaaaagccagtggctgtggccccagct

SEQ ID NO: 51896 - DNA, 122 bp, Homo sapiens
gggcggctgccatgctggtcccgatggtcagccctggttggctgagccacgcacattggacgtgccagcacgagacagcccggggcaggagtggtcacagcgtgggacctgcctggatgcgg

SEQ ID NO: 51897 - DNA, 122 bp, Homo sapiens
ttctctacagacttctaaagtcagccacttggtatcacgaatcagggcaacattgacagccgtcatattgaaagcaaaattaaaatccaatgtaccctctttaggacaatattactgtggac

SEQ ID NO: 51898 - DNA, 122 bp, Homo sapiens
gtttgattggggttttctttcttgtggaggtttctcagagtgattcaagttcccccaccccgcccacagatggttctgagactttggaaagaaagaaaaggaaaaaagaccctgcccgcgcc

SEQ ID NO: 51899 - DNA, 122 bp, Homo sapiens
agcagcatgaatgttgcctttattttttctcacaagtatgattttagaaaacagctgtagcgcatgttgacaaatgagaaagcggcagacgtggtaaagcactttcggtcaaggccaagagg

SEQ ID NO: 51900 - DNA, 122 bp, Homo sapiens
aaaaaaaaaaaattcttaatttaatgcttagtcgactcctccactactgagggagcaaggcggagaagttttgatgcggagcgttgcctgaaagatgtttttgtagaggcattttagaaatg

SEQ ID NO: 51901 - DNA, 122 bp, Homo sapiens
cagagggaagatgcagctcttggccacgctggcgccccctccctgggtactcccttaggtcggccagtctgttacgacattaaggaccccctcagaaccaaagagagcccagggcatttgga

SEQ ID NO: 51902 - DNA, 122 bp, Homo sapiens
ggctgggcgatttgcccaaggttgcacaggtcagcagtgacacagcggaattcagaaccacggtctggctcctgaagcagccctctcaagcagtcatcctgctctcagtcagaaactgcttt

SEQ ID NO: 51903 - DNA, 122 bp, Homo sapiens
cactggagggtcttgactgtgagtcatccaggttcttggcattttgaacgaagaattgaacggatcacacatacaaagcgacaaaagaatgaagcaacaaaaacacagatttattgaaatga

SEQ ID NO: 51904 - DNA, 122 bp, Homo sapiens
cccgagtccgctggctggacgcggcggaggcgccccgggggtgcccagcagggcgcggcacgcggcactgcctaccttctgcctgtaggctgcggatgatgtctgccctcggcagcgggtcg

SEQ ID NO: 51905 - DNA, 122 bp, Homo sapiens
tctgagctgggttttaaaagacaggtaggagttttcatgggaggtgagggcgaagggcatcggaaagggaagggatggcatgagcaaagacatggtaagaaaacatggtgaagggaagtgtc

SEQ ID NO: 51906 - DNA, 122 bp, Homo sapiens
ctagatccaggagccctctaggccacgccactctgaaacacacacgaaaactgctctgaacgaataccaccagtaaaagggttccatggccatcggcaacaaggggtcgagatcaggaggtc

SEQ ID NO: 51907 - DNA, 122 bp, Homo sapiens
gtgcaccgtcgaggtagaaggctcagctcctagtcgctcccaaattactttgttggtgctcgaggcagccccatctcacgtctagtgctccggcctgggactgggtgtgggtgcccgcacgc

SEQ ID NO: 51908 - DNA, 122 bp, Homo sapiens
tctgtaattagtaagtagtctgtaggggtgatcattccacacgctcgaaataaactgccccgcacaactgttcacctgatggttttagcgtccatcaatgatctttgcctgagttggtgata

SEQ ID NO: 51909 - DNA, 122 bp, Homo sapiens
ctcagaaccaccttaaatgacctccactctaacctatgatatgtgatctatgtgtttgtacgcaggatacatgtatttatatcacaggctcaattatgaaggtgtgctgtttcaaaatcttt

SEQ ID NO: 51910 - DNA, 122 bp, Homo sapiens
agggaccgttctcgttagtctctcaagttcggtttgatcttcaaatattctggactgcagcgtggcggcagtcagaaggggaaagacgactactccgggccgttcagagactgaatcttccc

SEQ ID NO: 51911 - DNA, 122 bp, Homo sapiens
ggctgcggtagtctgcagggcttgggatcctgcggggctgtgcctgctccctgcagccgccgtggtcgcgactcctccgggactggtgccagaaggaactgcgcccaccgaccccttctctc

SEQ ID NO: 51912 - DNA, 122 bp, Homo sapiens
catagcggaccccgcgctgtttccgggccggggtgctgcgcatgcgcactgggtgtgccccgcccacccggccggccctgcagtcctgcgcctagcggtccagtccagcctcaggtctatga

SEQ ID NO: 51913 - DNA, 122 bp, Homo sapiens
ccagccgagacctggcagaacttcctgccttccagaaccagctatgtcaaatacacatcgcgattattttactgaaggggcttcagccacctccgcacattgctcaggctgagtaaaaaata

SEQ ID NO: 51914 - DNA, 122 bp, Homo sapiens
agaggttgcggcgcaatggaaggtcttaaaccgagagtatccgggattatttttccccgccgtgcggtgcgtgtcccggaagtgacgcatggccaaggccgggcggccgccttgcccccgct

SEQ ID NO: 51915 - DNA, 122 bp, Homo sapiens
ttatccataaacgagcactttatctagaagatcatttaaattctaaatgatcttcaaaaacgcactttactctccaccctaactagctgaatcatctcccacatgggtcactatgagagcct

SEQ ID NO: 51916 - DNA, 122 bp, Homo sapiens
ccaccaggcacagaggctatgcccaccagacaggcatgctcagtggctacctggtcctatcggatgctccccctaaaccactcttcccctccccactactcccaggagagcactcccatgag

SEQ ID NO: 51917 - DNA, 122 bp, Homo sapiens
gtgaggacgcaggcagtggtgtaggcgcggctgaccggtgggatctgcaggtactccagccgcaagctctggtacgccatcttccccaccgtcgcctgccccaccccccacccaccccattt

SEQ ID NO: 51918 - DNA, 122 bp, Homo sapiens
tagacactacctgagagggtggggcatccagctcctaatgaaaaacaacttttgataacacggataacacagtactatcaccttcaaagtgtttggtaaacattaagctttcttttcaccct

SEQ ID NO: 51919 - DNA, 122 bp, Homo sapiens
gccaggagccacgcaaggaatgcatgccgcagcaagtgccggaggacgcgattctgccggcgtccagcagtgctcacgccgacattccccggagcttcccgaaggtgtcccggggttgcgaa

SEQ ID NO: 51920 - DNA, 122 bp, Homo sapiens
agcaactcacatatagaactcatagttatgcagtttctagctaattatagctcctcttaacgtgataaaagcaactctgactttccaacaatcaaataaatgcattgttttcaaactcttaa

SEQ ID NO: 51921 - DNA, 122 bp, Homo sapiens
attttctcccagttcatagtcatagtaggaggaacctctaaaagttcattccttgggtttcgttgtattaagcagtgaggtagtttgcttttgagtataggtttagattctgaggttgggtg

SEQ ID NO: 51922 - DNA, 122 bp, Homo sapiens
agggcggtgcgctttgctgtcccatttagcaaggattcctattcatattcattgtggggccgccctgggacacctctgctccgaaccgctaggagcccccaggcacaaaaccctctgattga

SEQ ID NO: 51923 - DNA, 122 bp, Homo sapiens
gcatgaactcatctggcctctccacaaaaggggggccttttagcagtgttcccaaccaaccgctgctcagcgagagtccagcatctggtttgaattagattccctttgccaaatatttcata

SEQ ID NO: 51924 - DNA, 122 bp, Homo sapiens
gcggccccgcctccgccggcgcagcgtctgggacgcaaggcgccgtgggggctgccgggacgggtccaagatggacggccgctcaggttctgcttttacctgcggcccagagccccattcat

SEQ ID NO: 51925 - DNA, 122 bp, Homo sapiens
caacattccccggtgaagttttccagccggagtcagggtcagaggcagcctttcctactgcgcaggctcagtgctgcttacccatcatggaagcaatgtggctcctgtgtgtggcgttggcg

SEQ ID NO: 51926 - DNA, 122 bp, Homo sapiens
accatggcgtatcggccatagtgttcatatagtcatggtgaatcaccatggcgtattgggcgtagtattcatatagtcatggtgaatcaccatggcgtattggccgtagtgttcatatagtc

SEQ ID NO: 51927 - DNA, 122 bp, Homo sapiens
gatggtccaggcaggaaagggtccattcaacccaatgcagtacagcttctagctgagactcggtgcacgggtgagggcttgaggactcccaggcaacatgaggggttccacaggatctccgg

SEQ ID NO: 51928 - DNA, 122 bp, Homo sapiens
tcttcagtgtgagctgctgaaaggcaaaagctgtcttatttatccgtgtgttccctggggcggggaacacagtaggcattcattaattaattcggtcgctcattcaccaagcatttattaag

SEQ ID NO: 51929 - DNA, 122 bp, Homo sapiens
ggcactcacccgagcggaccttggctccggataatccgtttccgggtcaacaaaaaacgtcgcgcgaggggcggggcgcgtacgtgcagggaggggaggcagagaaaaaggcggggccgggc

SEQ ID NO: 51930 - DNA, 122 bp, Homo sapiens
ggggcaggaacaaaaggtctggagcgcctttgattcgccaaggtccttgtgtgcaaagcccgggacacggaggaggaaggaggcgcgagaggtctcgctgcaaggctgcgcgaccaaagcgc

SEQ ID NO: 51931 - DNA, 122 bp, Homo sapiens
cctgactgccttggctccagctggtacaggtacaggccacaggtacagctctggccactgcgctggagagtgcaggccaccataaaccttgatggtttccacatggtgttaagcctgtaggc

SEQ ID NO: 51932 - DNA, 122 bp, Homo sapiens
tgggacccgcgccggcagccaggccaggcctctgagtggccccagagccctggctggactcgtccacggcggcagcgatctgcccggggtctcggaggccatcccttcagagtcggccctgt

SEQ ID NO: 51933 - DNA, 122 bp, Homo sapiens
ggagtcaaggagtcgggagctgagaggagtcctcttcatgctgcaaaaaggctagagaaacgtggtgctcttgtcacttggatctgccacctctgaacacagcagaaatggcaggaggttgt

SEQ ID NO: 51934 - DNA, 122 bp, Homo sapiens
accctgaagtttgacactctggtgctgctgacttaccagattcttgggaaaatcactccacgttacaatgtctgagtttcaataagggagaacggttttctttcttccgacttcaacataat

SEQ ID NO: 51935 - DNA, 122 bp, Homo sapiens
tctgcaggtcacctgactgggtgtcaggtgataggtcagaaacaggggctttggggatcccgggtgtgtgtgtgtgtgtgtgtgtgtgtgtgtgtgtgtgggcacttgcaggaggctgctat

SEQ ID NO: 51936 - DNA, 122 bp, Homo sapiens
tggatggaagactaaaagcgtcccctgatcctcagtgtcccaggctcccaagctgccttacgtcagacacaccagcatgtgaatttccaggaccatgtattaaccctatactaagaatagct

SEQ ID NO: 51937 - DNA, 122 bp, Homo sapiens
taacactgcttgcctagactcaggccaagttcggagagtgatcctggggttattttagaacgtgtcccttgcttcccagaaaaattcagtcgttaactcaagtccagatgcccaatgaccat

SEQ ID NO: 51938 - DNA, 122 bp, Homo sapiens
tatcaagttggcaatgagtagcatagaccaaatgtcaactttctgatctgatttcccaaacgtacaccctcaaaaccacaaggtaaataaataatgccttgagtcagcaaaaggggacaaaa

SEQ ID NO: 51939 - DNA, 122 bp, Homo sapiens
gaccctgtggaacggcgtactgcctttttacccccagccccggcatgccgcaggcttcagcgttccactgctcatcgttattctagtgtttttggctctagcagcaagcttcctgctcatct

SEQ ID NO: 51940 - DNA, 122 bp, Homo sapiens
cgaacatcgcctctgtctcgtgctgtgacccggggagagactgtgggcaaaacccagtggcgtccgagggtctgtgtggccccgaactcttagtgctgacagcaacatgaaataatgaaggc

SEQ ID NO: 51941 - DNA, 122 bp, Homo sapiens
tgggagtgcctggggagggaggcaggcggtccctaccgcaggcgcggggagctgcctttccgcccctccgcctgctttccaagcctggactcttaggagtggctgaagctgcggagcgcttt

SEQ ID NO: 51942 - DNA, 122 bp, Homo sapiens
aacaaacacagaaaagcagtgttggtgttcaccattaacttgcaacacatgagatctgcccggaatgttttgcttattggggcaggaaatcgtttgctgaaatcagaaacattgtgtctctt

SEQ ID NO: 51943 - DNA, 122 bp, Homo sapiens
cccctcagttcccgactcgggaagctctgcgccttctacacgacaggggaggaatccacacgccacaccagcagcgactgaggacaaaccacgcaaagaaccggctcatggatttcgcattt

SEQ ID NO: 51944 - DNA, 122 bp, Homo sapiens
gcgcggagaagtgaatgcagagaccaacgggagcgcagggaggtcgcctgtagcagccagcgcttgcaacccgcaatgagcatagagtatttcttttctgaggggggtcgtctagagtgtcc

SEQ ID NO: 51945 - DNA, 122 bp, Homo sapiens
gacggacagcgggcgcgggggcgcgtccaggtccccgctggggcggatgtggacggcgcccgcggttttcatggaaattgcactgcctaacggtgccagtggtccacctgcggtggcgtctt

SEQ ID NO: 51946 - DNA, 122 bp, Homo sapiens
cctgtggcctcaaattcaaccgggtgtgtggggtggggacaggggcggggtggggtgtcacggtgggcacccacccttacggggctgcccgcccctggcttctcaccccacactcctcgacc

SEQ ID NO: 51947 - DNA, 122 bp, Homo sapiens
agggcgggggcgatgctgccggagccgccgccgccgccgccgcctcgatgagagccgcgccgcaccgctcatagccgcacaggctgacaggcaggaggaccgacttccctctcccgggcatc

SEQ ID NO: 51948 - DNA, 122 bp, Homo sapiens
tccaacctgtcaatctcccagatgggggcagtgaggcccagagagaggagaggactaaaccgtcagcgggactgtgagttcccggaggcagggctgagtcttttatttttcttttcatgtct

SEQ ID NO: 51949 - DNA, 122 bp, Homo sapiens
ggctgtcggtctccccgccgctgccccgcccccttctccaatcctgccctccttctgggacggaaaggtcagtgttgccctaacaaggccattggatctcagaagctgctcccaaaataacc

SEQ ID NO: 51950 - DNA, 122 bp, Homo sapiens
ttggagaacctagatgccagattgaggcttagctctgttctctgctggcaactggcaagccgtttaatgtctctgagcctcagtttcccatttgtaaaatgggaaccatggcagtgcctacc

SEQ ID NO: 51951 - DNA, 122 bp, Homo sapiens
tcctcccccgcgccaatgggtgctgcagaacggcccacgcccactgccgttcgcccggggcgcccctggcaggcttctcggtctttgtgggggctgcagcacctccacttcaccgtgatgtg

SEQ ID NO: 51952 - DNA, 122 bp, Homo sapiens
gcccttgactgtgagctgatcctgaccggctgctttgctttcctctttgtgctgccatcccgagtttctgcacctcagagggtctttgtaacgtttttgctgagcttcagtgctctccttta

SEQ ID NO: 51953 - DNA, 122 bp, Homo sapiens
ggggcgccaagaggggttaggcgaggagaggcctggccacccagttgctagactttaggccgcactccaggaaggagcagtcggcttccttcctaggccgcttctattgcgcgccactcctt

SEQ ID NO: 51954 - DNA, 122 bp, Homo sapiens
attcattgtcgttttgttttatttgttgtgttttgtttttgcaactatgggaaactggaacgagcttataggaaaggggaagcaggaggggtcagcaaggagaaataacttggagtctcagt

SEQ ID NO: 51955 - DNA, 122 bp, Homo sapiens
gtagtgtcaaaagaggcggagtcggcgaggctggactatggggtggagctgagcaggcggcgctcggcccccggccgctgcgggcatcctgcctcctgggcggggcgcagggcagagagagg

SEQ ID NO: 51956 - DNA, 122 bp, Homo sapiens
cggtcgatcgagcgatcggttggcggctctttctcctgctctggcatccagctcttggggcgcaggcccggccgccgcggcgcgcgcccggtggccgttggcgctcgcgccgcgtctttctt

SEQ ID NO: 51957 - DNA, 122 bp, Homo sapiens
gggcggggctccggccgcctctgacgagtcccggatttaccagggccggtgggatcccctcgggctcccgccttagcatgctggccgggacatctggtgaacatggcctctgctactgcggc

SEQ ID NO: 51958 - DNA, 122 bp, Homo sapiens
aaagtcaattcacatctcttccttcactcagggttctagcccccccttctcctaagtctgcgattcatttaaacaaaggttactggacagcactctgctgcatagaaacatcgtgaagggcc

SEQ ID NO: 51959 - DNA, 122 bp, Homo sapiens
cgaggaagcggacaagcccgggtggcccggcgtgtagagggaagggggcggggctagacgcggcctggacaactactagagcgcctcgggctgtgctgctcgagactacatttcccagagcg

SEQ ID NO: 51960 - DNA, 122 bp, Homo sapiens
ccaagtttgttctaatgagtgtctgtacatggatgcagacacatgtgcatgttccatgtgcgtgtaggtgcacgggtgcagacgtgcgtgttccatgagtgttccatatgctgagtgcacaa

SEQ ID NO: 51961 - DNA, 122 bp, Homo sapiens
tcgtaaactcctggcctcaagcagccctcctgcttcagcctcctgagtagctgggactaccgctgcacaccagcaggccctgccaattgactgcttttacagtgagtggtaagcatgctgtt

SEQ ID NO: 51962 - DNA, 122 bp, Homo sapiens
taagtgtccttacctggatctttctctagttagtacaaatttttctatctaccattggagcgaacattttttgaaactttgtatcagtcctgccttactcttggtggaatcctgtggtccta

SEQ ID NO: 51963 - DNA, 122 bp, Homo sapiens
atatgtaatttaaataaacacagctgagcaaacagaagacttaagcaaaggctggatttacgtagccatttccttagtgtgttatgtgccaaatgaattcaatggctttttgacgtttttcc

SEQ ID NO: 51964 - DNA, 122 bp, Homo sapiens
gcgacgggcttgtcatggggatccgggctgcgagacggcactcgtagcatctggggactccgagggggacaggaagtgtcagcgcccgggaccccggcgccggccccgccgaggggatcccc

SEQ ID NO: 51965 - DNA, 122 bp, Homo sapiens
tccttcctgtttcgctttctttcccagcctgcaggaaacggtctgctggtttctctcttccgttactgctcactcctcttcagtctcctttgctggtgtctccttatctccttaacctctaa

SEQ ID NO: 51966 - DNA, 122 bp, Homo sapiens
agggagaaaagcaatgtcgctttagctttttagggagtaatcagaaagagggcagaaaagcgcatgggagaagttctctcccgccagccttgctgagtgcctgggatgcagaagcaaacaag

SEQ ID NO: 51967 - DNA, 122 bp, Homo sapiens
aagattagtatgtcacctggctgtcgtgaattaaataagttagttcacgttaagtccttacgatagtgtctagcacatagtaagtgcttataaacgttagttcccatctctaatcttccaaa

SEQ ID NO: 51968 - DNA, 122 bp, Homo sapiens
ccagtggagtggacgggcaaggggggcgcagtttgcgaactgctggggttctcggagggccggacagcccggtgttttctaataactccctcctgccgcttcagatttggaaacgcatttcg

SEQ ID NO: 51969 - DNA, 122 bp, Homo sapiens
ggctccagacgtgccattcccggcttccccgggaacctcccgcttccaccaacaactccgcgacgcgcgcccagcctcacctctccgggcaggtccaggcagcccatggtggggatgcgccc

SEQ ID NO: 51970 - DNA, 122 bp, Homo sapiens
tgggaggtgccggtatttatgtcacataaaacagtttgctcggctgggcgcggtggcccacgcctgtaatcccagcactttaggaggcagaggcgggtggatcacgaggtcaagagatgaaa

SEQ ID NO: 51971 - DNA, 122 bp, Homo sapiens
taccttgggcacctgacatcatccctttgagtctcagtgtcctcttctttaaagtgagggcgctctacctgaggagattgctgtaaggttggaatgaacctgcatgtgtgtgtcatgtggga

SEQ ID NO: 51972 - DNA, 122 bp, Homo sapiens
tgaacaggtttagagatgcttcaggcacagtttttttacctgagagctcccagattggggcgagaaaggtaagagccatgaagacaaataatcatacagcagcttagcaagtagtaaatgtc

SEQ ID NO: 51973 - DNA, 122 bp, Homo sapiens
ggaacatggggggcaaagaccaggaacggaaggacctggctgagggcgggctccagaccccgccaacatgtgcgcgatgggcctcagcgtccaggaagcaaaggccctcacaagccaccccc

SEQ ID NO: 51974 - DNA, 122 bp, Homo sapiens
cccaaagacccccagggaaaactgtatttttatgctgaagttcaatgaagaatgggcagtcgtgtagaatcgtaactggacaaaaaggggtatgacataaaggtaataaactggggaaactt

SEQ ID NO: 51975 - DNA, 122 bp, Homo sapiens
ccctagttctgccaccaatttgaagtcacttaatttcagtctctctaagccttagctgctcgtctttcaaaaagaataaaggcaggatgctaaggtagttgagtgcttgtggccatgtaaaa

SEQ ID NO: 51976 - DNA, 122 bp, Homo sapiens
ggacacttttcagaactgcatggagagtgcactgcaggtggggtctatctgtacaaagaccgtgaaggcaccatccaggtgcagagacaggagcttggcgaggtaacgggggcggggagggg

SEQ ID NO: 51977 - DNA, 122 bp, Homo sapiens
cttgggcgagagagagacagacctcatctaaaaaaaaataaaaaataaaaaataataatccggaagcaggttaggtcagagagaaagttaggatgaagttcccacgtgaggtacttattgag

SEQ ID NO: 51978 - DNA, 122 bp, Homo sapiens
ggtagatgcaagagtacgaaaggttgatgctccaaaagatcagatggacaaagagtgggacgaattccaaaaagccatgaggcaggtcaacactatttccgaagccatagttgccgaagagg

SEQ ID NO: 51979 - DNA, 122 bp, Homo sapiens
cggccagagtctcctgctcccggctcctcgcagctgcgccgcaggctccagccctgcccccgctgcgctaatgaccggaaagcccgcctgagcccgccgccttccacgctatccctggaaac

SEQ ID NO: 51980 - DNA, 122 bp, Homo sapiens
gtccacagcaatgtgagtggacttcatgctggactgcaaactagaaagcgattagaatggcgaattatgtcaagtgtactttactacaataaaaaacaacaaaaaaagtgtgttccttggac

SEQ ID NO: 51981 - DNA, 122 bp, Homo sapiens
tcgcagactgtatttgctggtgccctgctcactgtgatctcgcaggaccttgcggacttacggagacgaaaagtggcctactttgagcttctctgatccttaggggaaatgagtgtccaaag

SEQ ID NO: 51982 - DNA, 122 bp, Homo sapiens
cccggggaggcactacggatgattttctccaagctcaagagagacaaactgaactttaagcgccaggggccccatattttgtctgctctacagatcccacccgcgggccacaccctcccttc

SEQ ID NO: 51983 - DNA, 122 bp, Homo sapiens
cgctggcgagagccgccgcccgcgagggatgctggtgaggaagccgtcgggagccgccgccgccatctgagggaggtaccctggaaaccaccttttatcggtggggaagtgcagtcgcggtg

SEQ ID NO: 51984 - DNA, 122 bp, Homo sapiens
gaaaccacaggctgggttggggacccctggtgctccaagagagcagtgagtgctgggagccgctaaccccgaggcgcctagcacagactcttctcaccccttatttctgaaataaagccctt

SEQ ID NO: 51985 - DNA, 122 bp, Homo sapiens
ggaccacaaggttaaggtaaccccgctaggtaaccctgataggcctgctgcggggcagaccgacagagagagagagagtgagggcgagggtgaggtaagcaacgccccgggaaccccggggt

SEQ ID NO: 51986 - DNA, 122 bp, Homo sapiens
gctcagttcatagccaccaaagaaaaagaaataacccggtacttcttgaagtagagtactcgagagtccatggtagaagcccaaggggccatcctttttaaggatacccttcacgacagacc

SEQ ID NO: 51987 - DNA, 122 bp, Homo sapiens
ccctccatctcctgccctgcctcggccctcgcgctcctcaccgggcctctacacctcccccggccaggacagcctgcagcccactgccgtgagccctccttacggcggtgacatctcccccg

SEQ ID NO: 51988 - DNA, 122 bp, Homo sapiens
agctgggtttacgggaagcctccaagtttcgggaaccacccgcgttcacaacaagcgtgacggtgaatttattattttcacgggaggcaccgcacccgcggttcacgctaaaggaagcagga

SEQ ID NO: 51989 - DNA, 122 bp, Homo sapiens
gcaaccacccctcaccctctgtctgacctgtctgacggggacccctcctcaccagccccccggtctgtctccccatcacctcggtatgtggtttccaggtgccctcagggggcagccggcgt

SEQ ID NO: 51990 - DNA, 122 bp, Homo sapiens
tcaggggtgtccgccaggtgtccctactgtaaagtgactccccgttgagactggatatcccgtttgtcaccaaattgtccatctccccacttatttattctccgtttcggtatggacacctg

SEQ ID NO: 51991 - DNA, 122 bp, Homo sapiens
ttgcagcttcaggtcttaggatggatgtgtaatgttgatcagtttcctccaggtgaacaacgtaagcaaaccagcatttgggaagccccagaaagagacaggaataggccttagggttggca

SEQ ID NO: 51992 - DNA, 122 bp, Homo sapiens
cagctaaaagtgattggcagctgccatgtccacgtgctccgagcttggaaccagctgtcgcgagaattcgatgtaaacagaccagtctccctgtcctccggctccaacctgaaacgctcacg

SEQ ID NO: 51993 - DNA, 122 bp, Homo sapiens
tgaattttttcagactcatccacagggtaaacctgcttgtctcctgagctactgcatgtacgtaattacactcagaaggacaagtagagtttggctgtgaacaagagcaaactttaaaaata

SEQ ID NO: 51994 - DNA, 122 bp, Homo sapiens
tgagctgccctgctcttccttctttttccccttctggggtgctgcaggtggtggacggcacgctgtgctctcctgactccacctccgtctgtgtccaaggcaagtgcatcaaggctggctgt

SEQ ID NO: 51995 - DNA, 122 bp, Homo sapiens
acacacatccacacatgtagatgcagtccccgcctcctggcccagccacatcctttgctccggctcaggagactgagcgaaggacaaaccatccgtagacacggtgctcacaactaggaaga

SEQ ID NO: 51996 - DNA, 122 bp, Homo sapiens
gccgcctcccggggcccagccgcccgtccccgatctccggctccccccgcagaccccgagcgtttcggaggctccgcccggcctcgtgcaagtcccagtggctccctcccctttcccaagat

SEQ ID NO: 51997 - DNA, 122 bp, Homo sapiens
ccaggtattattttttccggaccaggaaggccacaccgagaatcagggctatggctgccacggccacacccccagccaccagcagggggttgaagttctcacaggaccagggacctcggccc

SEQ ID NO: 51998 - DNA, 122 bp, Homo sapiens
gacttaccggctcgctgatgggggacctacctggtttgaaagtgatgctcgaggtcacagcgctgcaacacctgggtgcagtgctccctgaatgggcaggtcaccagtagcttgttgaggag

SEQ ID NO: 51999 - DNA, 122 bp, Homo sapiens
ttgtcatcctggcccgttctcaatgagctgtcgggcatacctcccagacggggtggtggccgggcagaggggctcctcacttcccagtaggggcggccgggcagaggcgcccctcacctccc

SEQ ID NO: 52000 - DNA, 122 bp, Homo sapiens
tgtcgccgccggatgggttttggggggactctttgcacacggcttccctttccaaacgatcgtacaaaaggaaagtttgattttgttctcagcaaggggtccctgaatttatgttcgcttct

SEQ ID NO: 52001 - DNA, 122 bp, Homo sapiens
acaggaagcagaaggtgcttgcgaggtacctgaagcggctgcagccggggacactgcgggcgcggcagctgctggagctgctgcactgcgcccacgaggccgaggaggctggaatttggcag

SEQ ID NO: 52002 - DNA, 122 bp, Homo sapiens
cggtccctctcactagcaactcctaggtatgtgacaaagttgggatgtttatcaacggtccgcctcctggctagggaaagagctctggggcggagaatgcactttctgttttttgaaaacaa

SEQ ID NO: 52003 - DNA, 122 bp, Homo sapiens
ttttgatgaaaccctttgccacagaattcacacacaaacggtttgtagcccgcgtgtattcgggtatgagtgtttaaagtggaacttctattaaatgctttgccacactggttacatttgtg

SEQ ID NO: 52004 - DNA, 122 bp, Homo sapiens
gcctggccaaaatggaacattttaaaatcccaaatttactacacaacagactgtcctttacgactgaagtcatggagatttgtgaataaaatgttgaatgtttctccatgtttgtttatttg

SEQ ID NO: 52005 - DNA, 122 bp, Homo sapiens
catcgtccacccacaagcagagaccgcaggataaagcagacatccaatgtaaatacaacccgtgcaaaaagcagagtcggcagacctggagtgcattcgcagtatctcccgggggtggggga

SEQ ID NO: 52006 - DNA, 122 bp, Homo sapiens
taagaccccaaaataaaaatgcctctatggtgatagagaccagaacagtgagaacctttgcgggtaggctgtccaccgtgaagggaggggaataagggagtctctggagtgctgggagtgtc

SEQ ID NO: 52007 - DNA, 122 bp, Homo sapiens
tatcaggccttcccttcacagcaactgggagctgttaaaaatgacctttccagctgggcgcggtggctcacgcctgtaatcgcagcactttgggaggccgaggcgggcggatcacgaggtca

SEQ ID NO: 52008 - DNA, 122 bp, Homo sapiens
tttgaaagcagacagactgggtttgaaccctagccctcccacttcctaggtatttgacctcgtataagttttctgagacccaacttatgtatctataaaatgaggataattaaaattcctta

SEQ ID NO: 52009 - DNA, 122 bp, Homo sapiens
cggcgctccgctccgctccagctcggtttcatgtcccgccaggcgaaggatgacttcctgcggcactacacagtgtcggaccccaggactcaccccaagggctacaccgagtacaaagtaac

SEQ ID NO: 52010 - DNA, 122 bp, Homo sapiens
ccaggctctcttcgcacagaggccttaggcaagaccctcccccggatggagaccggattccgtgaatttctaaacaccagctaccagagcttatgactctgaggggccaaaccagggaagat

SEQ ID NO: 52011 - DNA, 122 bp, Homo sapiens
ccctagcggcagggactgaatctcactcatctttgtctccgcagtgcctagcactgtgcccggccccaagcagtactcagtaagaacttgtggacccaattcaagtgtcctagttggtgatt

SEQ ID NO: 52012 - DNA, 122 bp, Homo sapiens
tgagtggctcagggaagggtcgctgaggctcttcccagggcccccgggcctctcttgggccgctccctgggagtgctttaacctctgccgccattccgcttcgtcttttcctgcaataacac

SEQ ID NO: 52013 - DNA, 122 bp, Homo sapiens
gttcctatgaatccctggatgacagaaccacacgtaataaccccaggctggtaggatgctcgctttccctctagagctgtgccaaccaatatgttagccaccaaccacatgtggctacttaa

SEQ ID NO: 52014 - DNA, 122 bp, Homo sapiens
tcttttaaaataccatatccctataaacagttctcaccagaattcttctaaatcttgtttcggtctggtccttctcggcagcccactgagcagaatgcagctctacaatgaaggcgcaagag

SEQ ID NO: 52015 - DNA, 122 bp, Homo sapiens
gtgcccgcaggagaggctgcttggggctgagcagcttgtagaggtcgaagtgtgcaccctcgccccagccctccatgaagaagagccgtgcctcgtgggccaggccgggaaactgccgcagg

SEQ ID NO: 52016 - DNA, 122 bp, Homo sapiens
agggtggccgtggagctgatggtctcccgccactgcatgtaccgtggcttggtcacagcccgctgtgctttttcctcctcggtgggggcctcggggtccacctcgatcatcttctggtacat

SEQ ID NO: 52017 - DNA, 122 bp, Homo sapiens
gcgcgggctcgggaaggggcggggcctcgggaagggaaggggatggcggaggcggaaggacggggactcccccgacgctcaccatctgcgggcgccagcagctcctcctgctcccgggcgcg

SEQ ID NO: 52018 - DNA, 122 bp, Homo sapiens
ccctagtttccttaagcagttttataaaaaaccttcagtgaaaaatactagccaagaaggcgaaggcatctggaaaatccccagatttggctattgtgtgctgcaatcccagcccccttcta

SEQ ID NO: 52019 - DNA, 122 bp, Homo sapiens
tcatacttgtaaattttaatgctttgtgtaattggtttgaaaaacagtgaaatgggtaaacgcaaaacttttgtactttattacgagtaaagtgtaatgagtactgtggaaaccaaatttga

SEQ ID NO: 52020 - DNA, 122 bp, Homo sapiens
agacacaccacgcctcgtcagggtctgtctcagggtggcattacacagggtattcggaaacgcctaagtcgcctgggagaaaacctgccgtgcattcctgggcctcttcacagacagaagga

SEQ ID NO: 52021 - DNA, 122 bp, Homo sapiens
cccggcgctgagcacggctgctggggtcccagggctcaccccactccgcctgctcccttccgcgggcactgctcaattctcaagccccgactgggggctccctgctgccgggctgcacgggg

SEQ ID NO: 52022 - DNA, 122 bp, Homo sapiens
agcgaacatctgcatctgaccccaacctgcctgatgaccttacccgctacttcacaatcccgtccaggaaaatccctgggcacataacactgcaagtcccaggtgtccgctgaagggcgcct

SEQ ID NO: 52023 - DNA, 122 bp, Homo sapiens
tcagtgcagctccttgggtccaaatccaggccaaaaccaggaattggaagacccaaaaagcgggaccagcgacctgcggcgaactttgggactaaggtggcaagcgagtctggagaacagct

SEQ ID NO: 52024 - DNA, 122 bp, Homo sapiens
cccctctcacagctcccaccatcccacatttcaccacaacctgcaggcagccctccttcccgcaccagcctcaacgtctatgaggctgagccagagaaaagcagatgtggttgcagtggggt

SEQ ID NO: 52025 - DNA, 122 bp, Homo sapiens
gtctgcccacctcccaggcttttggcccaggagacaggatcagccacagttgtgaaacctcgttccaccctcttctggcttccatggttgctattcttgattccactgctggtttgttattg

SEQ ID NO: 52026 - DNA, 122 bp, Homo sapiens
gaccagcctgggcaacatagcaagacaccatctcaaatttttttaataaagaaagatgcacgaagtgttgtgaggacccagagcacagaagaaccaactctgcctgcagaaggcaaggagaa

SEQ ID NO: 52027 - DNA, 122 bp, Homo sapiens
cgacttggacaagggctgcctctaatgtgcgatggcagattccctcttgctgggctctggcgggtgccatgttgtccccagcccactttcggcctctgatgcccagcgtgggcttccagaag

SEQ ID NO: 52028 - DNA, 122 bp, Homo sapiens
agaaactcctcctagagagatcttagcgctccccagaccccagtaggttattcacgtcatcgtataacccccaccttcaccccgattccatttccccttcgttttcgtggctctcctgtagg

SEQ ID NO: 52029 - DNA, 122 bp, Homo sapiens
ttatagcagataccagtaggatcccagattcttcctggcctttatctgttccttcaaaaacgctgtgcaagtctgggcatcttcccaccctgcctctcccttcttctttctctctccacccc

SEQ ID NO: 52030 - DNA, 122 bp, Homo sapiens
gactcagtctcccgcatacttacaaattgaagcatgtcgattaatagctcctgaggttcacgcccaacgggcccagttccaggactgtgtttgcactcaatgacatccttttggattcaaac

SEQ ID NO: 52031 - DNA, 122 bp, Homo sapiens
gagattgcttttgaaagtttgccccatgtaatctatttcctggctacctaagagaacagccgttttcttcatgaaaacacaaagaggggaaagaggctgctgctgttccagtgggaagttat

SEQ ID NO: 52032 - DNA, 122 bp, Homo sapiens
tctgtggtacaccggagggctgtgtgaggcccacccgcccctcttctctggcctccgtggcggccaccagggcaggtgggaacgtacctgcacacttcttggtgctgtcctcaaaggtgtga

SEQ ID NO: 52033 - DNA, 122 bp, Homo sapiens
caaacatgaccttaagcaacagatcagggttaacacaccagtgacaggacaagccaccatcgggtgtgtacctcctaatagtggtccactgagaagaacagtgtcatgtctgtggcttcctg

SEQ ID NO: 52034 - DNA, 122 bp, Homo sapiens
ctcgggctaccacaccggctttcggctcacgagggccaagcacgctacggaaaaggtagccgagccgcgcgacactctccaccgccttggctccgggaccaggagtttcccagccctgggag

SEQ ID NO: 52035 - DNA, 122 bp, Homo sapiens
ttttttcgtctatttttctttccttctagaaaattcctttttgaaagatggctttgaactcggaccagtctataaggaatagattttactgtttatcattaggaggagaggatttttttacc

SEQ ID NO: 52036 - DNA, 122 bp, Homo sapiens
tccgccagcagcttctcagtggaagtgcaggcatcctggagcttcaggagcagatcctagcgttcagacagggaaggaggggagggagtatactgaggtttggctggtgaccagggtgccgc

SEQ ID NO: 52037 - DNA, 122 bp, Homo sapiens
gcctgttatctgtgacattgaactgttatttcagataatggccattgtttgagagaaaatcgcacagcagtggtaggtaggacaggaaaaatcctttgtaaataacctaaaacccggtcaga

SEQ ID NO: 52038 - DNA, 122 bp, Homo sapiens
gcgtgtcctgtgagcttgcacaggcccgcgggccgagctgcgtcccactcgctcagaatgcgaccttgctatgtgcgctgtgccctgccggggtcccagcggccaaccctctgccttctcct

SEQ ID NO: 52039 - DNA, 122 bp, Homo sapiens
tttatggccatgtaaaatcactaagagtaaccatcgggggaagagggattctggctcaaccgatctaaaggattcttgtagaactcaggccagggtgaaaagacatgactgggggatagagg

SEQ ID NO: 52040 - DNA, 122 bp, Homo sapiens
aaagcgttcattccaccagttctatgcccttcaccccatgcatcgggcctggccatgggccgggcctgcccctgcaaggacaggacaaactgatccatgtcctgtctcgaagctggtttcct

SEQ ID NO: 52041 - DNA, 122 bp, Homo sapiens
tacatgttccgggtggaccatgacaccatcatcgacgccaccaagtgcggcaacttcgcgcgcttcatcaaccacagctgcaacgtgagtgcccagcggggggtggcccctgcccctgctcc

SEQ ID NO: 52042 - DNA, 122 bp, Homo sapiens
agccactctcgggtcggtgcctcccactctgaggaggcctgcggtgcagagaaggtccctcgcacccttccgtggggacacgctgccacctcagccaactcccattatacaagtgctgggag

SEQ ID NO: 52043 - DNA, 122 bp, Homo sapiens
tggccaggtgtggtctgtgggcgtctccatcgtgcccgggcaggcgtgggcgggtgtgggcgcacctgggaaccgtgtggggtggcggttctcaggccgacggcgctgccctggaatccctg

SEQ ID NO: 52044 - DNA, 122 bp, Homo sapiens
ggggtgctcctgaagattgtggagcagatcagtgagtgtccgctgcccgcttgctgaactcggcaccatgggcggccgccacgggtgtctctgggcacttccgggccatccctgctgctcag

SEQ ID NO: 52045 - DNA, 122 bp, Homo sapiens
gcccacccccctttgctcagtctcctctgtcctcttctcgcggctctgtggtggagggggcgcggctccggctgcagggggtggggccgagagggccgaaggggccgggtggcctgggttac

SEQ ID NO: 52046 - DNA, 122 bp, Homo sapiens
tcccacagcccctcccgcagcggggctttgggaggggccgtccaggccggggctgagctgcgcacactcgctgtgtggtctgccctgagccccagacttttcgcccgtccacttcaccggcg

SEQ ID NO: 52047 - DNA, 122 bp, Homo sapiens
gcagccaggggtgccaagctgcttgggtgttgtaggagagctctggggaggactcagcctcgctagcgggatctggttggtcctggtgggaaggacgcctagtggggtgaagagagctcagg

SEQ ID NO: 52048 - DNA, 122 bp, Homo sapiens
ggacactgctgcctccgctgtgctgctgtgccaggcccagggaggtgccggggctggggccggccttggcacccaccatccttgtcccagggattaggcttaggtccaccagatggaaggca

SEQ ID NO: 52049 - DNA, 122 bp, Homo sapiens
ccagccacattcactttgtccccagaaataaacagctgcacagcagtctctgctactttccgaacatagttatgtcgcttttccattcttaaacgggcaaaacgcaaggctgactgacctcc

SEQ ID NO: 52050 - DNA, 122 bp, Homo sapiens
agggcctgagatctgacaccctgggagagcctgagacttcaggaatggaagcagagccagcggagggatgagacggctgctgcccataaagctaaaaaaaaaaaaaaaaaaaatccacagct

SEQ ID NO: 52051 - DNA, 122 bp, Homo sapiens
ggaatgaatggcagccccactgtccctggggagcggtggcttccctgggcttgctatccacgcagacggggtgacgggacagattcatgggatgagctttgaaacctcactccacgggcccc

SEQ ID NO: 52052 - DNA, 122 bp, Homo sapiens
gtggccagggaggaagcacagttgttggtgctcatctgggccaggagatgagcagagccccggtggctgaatgggtgaaacagactgagtgtactcaatgcagccagcatagctgtgtgtcc

SEQ ID NO: 52053 - DNA, 122 bp, Homo sapiens
gcggggacaagtttggcagagataactggatttttctaatattcatctctttctctaaagcgagtagctttaccctgaagatgcccacagagttagctctgagacccattaagttaataaaa

SEQ ID NO: 52054 - DNA, 122 bp, Homo sapiens
ctccgcaggcagcgccgctctatgcaggccacaggggcctaggcaaggagcccggggcgccggcacctaggcaaggaatccctaagccaggagagctggacctggagcacccctgggcgctg

SEQ ID NO: 52055 - DNA, 122 bp, Homo sapiens
ccctctggtctctccccccacccgccaccatcgaagctgggggtgtgtgtggagggtgtgcgccttgtggggtgaatttcaagaggcaccgccccttttaaaattaggtgcttggagggcgg

SEQ ID NO: 52056 - DNA, 122 bp, Homo sapiens
aactatgatctctcgaactagactctagaccaatgctctcactttaaaccacggaagcggcggcaggaccagagctgagtacagctcttcccagacaggactccacaacagcacacagagcc

SEQ ID NO: 52057 - DNA, 122 bp, Homo sapiens
tctccgcagaactatgtgtcattaagtaaggtgataatcaatattcaatatcaaaagatgcgtctatttctcgatgaggagaagcaacttcatctgcaggcactggacagagaagcaaaagg

SEQ ID NO: 52058 - DNA, 122 bp, Homo sapiens
gccgcacgtacatgaaggtggcgcagccgtagtgcaggaaggtgactgccaggtgcaaggcgcaggtggaggcggccttgccccggcctttggggcagcgcaggcggcgcagggcggcggcg

SEQ ID NO: 52059 - DNA, 122 bp, Homo sapiens
gcgagaggttaaggtcagaagctcgggaagctgcttgggccgccagtagcagccgcctcccgcagcctccgcgcgccgcgggctcctcctcccgcccaagcgtggccaagtgaggactgctc

SEQ ID NO: 52060 - DNA, 122 bp, Homo sapiens
aaagctgcgtgtgtgcaacgcgccagtcccaggataattttaactcgcggccggagagaacgcgccgcccgcccggcgtcttttttgttttcgcccaggcgggctgggcggcggcgcggggc

SEQ ID NO: 52061 - DNA, 122 bp, Homo sapiens
cctggtggcccctgtggaggacaggcagggctggcagcatagcctttgttgccacacaaccggaatttgctcccccaggactgtgggagccagtgtcccagctgaaatctttttagtgtgtg

SEQ ID NO: 52062 - DNA, 122 bp, Homo sapiens
cccgcgcgccctcaaggtgccctcctacctcaactaccacttcctgggggagaaggactgcggcgcaccttgtgagccgaccaaggtgtatgggctcatgtacttcgggcccgaggagctgc

SEQ ID NO: 52063 - DNA, 122 bp, Homo sapiens
gcccagacttgaaggaaggagttcaagctgagaggggctggggacaggcaggcgccaagccggtcgctccgacagatcacccccgccaggcgcctagtggttcatgccgagcatccggtggg

SEQ ID NO: 52064 - DNA, 122 bp, Homo sapiens
ttccactaaccccaggataaagctatttaatcctctcttgttcctcacagccattataaacggtgcaggatcgttcctattacccactcatggcacaagatcgtccccgttccccttcagga

SEQ ID NO: 52065 - DNA, 122 bp, Homo sapiens
tgggggaggatcacaagacacgagggctgacgaggatgggcagagcatcccctgcctggccgggggtccttggccaattcgaaaatagataacagggggtctcagagctcccgcggcaagag

SEQ ID NO: 52066 - DNA, 122 bp, Homo sapiens
aggacgacaagcaaaggcttcgggaggttgggttttccaggccagcatgcaggaagggagcgagtccatgaagccaggctgtgtgcaggatcttgacgagccaccagtcctgttcttccccc

SEQ ID NO: 52067 - DNA, 122 bp, Homo sapiens
ctggacggtgtcagctccgctattaagtccagtcagggagcggctgctgattgagcccagcgccgcgtggtcgccgctggggactgaggctcgggagcgtttgttttctggcggcggagggc

SEQ ID NO: 52068 - DNA, 122 bp, Homo sapiens
tgggaatgggggttgctcacctcctcctggggatccaccactggcacccacttgaagatacgaagggaagtgtcgcccacagtcacccatcgcttctccctgtgggagggtggggggctggg

SEQ ID NO: 52069 - DNA, 122 bp, Homo sapiens
cgatcttcccctgtgaagctgtcagcgaccatcagagggtacgccggggtggcgcggggacgatgccaggagccttggagtgaagaaggcttcgactccccgcacccacagagttgcgtagg

SEQ ID NO: 52070 - DNA, 122 bp, Homo sapiens
cgcccaagaacacatagccaattagtggcaggtatggggctccatttaagtatatgaccccgctctggttcagtattcttatccccaccccaaataaagagaatcacacgaccttattgtga

SEQ ID NO: 52071 - DNA, 122 bp, Homo sapiens
gggatttccactcagcctaaggattcagatgctcctctctgggcttttctccctgttatacgtcttcaccctgctgggaaatggggccatcctggggctcatctggctggactccagactgc

SEQ ID NO: 52072 - DNA, 122 bp, Homo sapiens
ggaagtctcccacacggacctcgctctgctccctcctcctcacggctgaccctgctgggtcgtcctgccagctcggacacttgtttgttgtggcttttgtaaaatactctgtagtcattttc

SEQ ID NO: 52073 - DNA, 122 bp, Homo sapiens
cgaacggggggagattctgctcacggaactgcaggtaagggccgcggccctggtgagaggcgctggcggaggagacagggagagagccccgcgcggcgtcggggaccgaggaaagccctgcg

SEQ ID NO: 52074 - DNA, 122 bp, Homo sapiens
atttcacaaaagagagagcataaagatgggctttcgtgaatgggcaagatttgattaacccgatgaggaaaggggcattcaaggaagaagccatggcatgggcaaaaacttagagataataa

SEQ ID NO: 52075 - DNA, 122 bp, Homo sapiens
agggacgattttgtggaacttgtcgcaactcaatgggagtgccgtggcccttacgcccaacgacaccatcctgtcacttcgggagtttttcctaaaacaccattccccagaccaacggcgct

SEQ ID NO: 52076 - DNA, 122 bp, Homo sapiens
cttctctggtccagggaagaggccggagtccccagggtacaggctcacagccatggcccccgctgctagctggggacctagagcaagtgactccacactgagactgtctgggccttgattct

SEQ ID NO: 52077 - DNA, 122 bp, Homo sapiens
taaaatctgaatgttgggtcctgattctgctaggatcagaggccagaggcatgaaaagaacgtatgttgtctaacattgccttacctgtaaagtgatggaactgggctagatgagtaatttt

SEQ ID NO: 52078 - DNA, 122 bp, Homo sapiens
catcagagccggagaacctgcagccacgacggcgaggatgtgcagtggtctctggggaaacgccgccttctgccctcacccggcgcgtgtggccctgtgccgtccgctcgccgcctctctct

SEQ ID NO: 52079 - DNA, 122 bp, Homo sapiens
tcgccttctttgcgcactttggttattgatcctgctgaaccggccggagcgcagcggctgcgcttctctgggaaagaacggagtggggaggtgagtaggctaggggaacggtggaggggagg

SEQ ID NO: 52080 - DNA, 122 bp, Homo sapiens
ttctaggcactgacgctaccgctagacaaaggtccgctaggcaaccggcgtcttcccaggcgctggcgttaccgctagaccaaagagccctctagtggccccgtccgggcataacagaaggc

SEQ ID NO: 52081 - DNA, 122 bp, Homo sapiens
aatgcggctagtgtagaaggggacactcatctccttggccagctcctccgcttcttcctgcgtgcggccccacagcgccttcaccgcgaagccctcgtctttcagcagcgggatgatgacac

SEQ ID NO: 52082 - DNA, 122 bp, Homo sapiens
ccaggagagtataaaggcgatgtggagggtgcccggcacaaccagacgcccagtcacaggcgaggtaaggtgcttggctccatgggtggggcccggcaaggtcacactggcccttgctttgg

SEQ ID NO: 52083 - DNA, 122 bp, Homo sapiens
gccatacttgttgccatcgtaaagctaagaagccgcaagaaaattctagtttacgacggtcgtaatttaacaaacaaaccgggacttccggacccgaggaaggaggagcacggctccaccaa

SEQ ID NO: 52084 - DNA, 122 bp, Homo sapiens
ccagcggagctacgagctctccaggatccgcccggttaccgatggcacttgctttcttggcggcttctggggagaccgagcaacgagagcaccgaggacacaaaggtccactttctacttct

SEQ ID NO: 52085 - DNA, 122 bp, Homo sapiens
gaattgcaaacacagcctgagttcccaagtcccatgaacctacccttttaggatgtacctcgcctacagtgagagtgaacactgcaataacagatcatcatcataagggcatgagccaattc

SEQ ID NO: 52086 - DNA, 122 bp, Homo sapiens
aggaaccggagaggagaaagggaaaaagaaaggagaaaagagaaggattgagaacccaagcgcgagtctcgcctcttccgggcgccgactggctctttttggtcaggccagcctcgcatttg

SEQ ID NO: 52087 - DNA, 122 bp, Homo sapiens
tttctggaaccttcctcccccgcccatctgaccttccaaactgcaccacacagctggaaccgggattgcgggcaggagcagaaatcaacggaaaaagaagacaaagagaacggggagggcca

SEQ ID NO: 52088 - DNA, 122 bp, Homo sapiens
attgctcaagctccaaatcacaactcccactccttggaacccacgatttagttcaaacatcgatgatcagcctgactgcaagcagtttcccttggccagagatggggtggagaaagaggggg

SEQ ID NO: 52089 - DNA, 122 bp, Homo sapiens
tatgagctgtaacactcaccgcgaaggtctgcatctttactcctgaagccagggagaccacgaacccaccaggaggaacgaacaactccagacgcgccgcctcgagagctgtaacactcacc

SEQ ID NO: 52090 - DNA, 122 bp, Homo sapiens
ctgctggcagtatgccccctactgaccagtgcgcagtgtttgcctcaatagcctcagaggcgttttggtggcagtgagggtggctgtgttggtttatttgcccagggctgcttaaaaggtct

SEQ ID NO: 52091 - DNA, 122 bp, Homo sapiens
taatcacaccttggtctttctggtgactatccccctcctgaaactacaggagccaccaatcgactcagtagcattaaacagacattcatcacttaggaaattctgagggttttaggagctgt

SEQ ID NO: 52092 - DNA, 122 bp, Homo sapiens
gctcctgcctcccagcaagcaagctcttttggctcagctcccgccggtgtttgtagaccccgaagtttctgcagccaagctcttcaggcccacatactgcctcccagtggcctgtagagtcc

SEQ ID NO: 52093 - DNA, 122 bp, Homo sapiens
catctctttacttggggttccaagagcccacgactaaagggaaacacttgcagaatgtgtcggatggagtcagcgacgccagaaacagagaatagccccaccctcccctgtcaagccacact

SEQ ID NO: 52094 - DNA, 122 bp, Homo sapiens
ttacgttcacattctctgacgtccaagttgaactgctgtaatgctcccaaggtgagctgccgcacttcagcttccaacaaaagttgcatcaaggatgtggctaaatgcttgcaagctgacat

SEQ ID NO: 52095 - DNA, 122 bp, Homo sapiens
accaatttcagagaaaacttagactctggtttgtaggtggttctcttttgcttctttttgcgaggtgcttttaacatttacaaattgttttcatgtagataagatgttcatatggttcaaaa

SEQ ID NO: 52096 - DNA, 122 bp, Homo sapiens
gagtcccgggcgtgggtgtggggagcgggggaacccccgccggcccctcccaggccccagcgggcggagggagcctccccaccgggcctcagcgtcctcctctgtaaaatgggccccttctg

SEQ ID NO: 52097 - DNA, 122 bp, Homo sapiens
ccttttatctcggtgctgccgggggaggcgggaggaggagacaccaggggtggccctgagcgccggcgacacctttcctggactataaattgagcacctgggatgggtagggggccaacgca

SEQ ID NO: 52098 - DNA, 122 bp, Homo sapiens
aacaggtccaagctctgcaacatcctcttctccaacgagctgcaccgtcgcctctccccacgcggggtcacgtcgaacgcagtgcatcctggaaatatgatgtactccaacattcatcgcag

SEQ ID NO: 52099 - DNA, 122 bp, Homo sapiens
cactgcgacccccggcatttccctcagactaccccagacccccaataaacagcgaacaaacgcacctcaggccaagtcccccggctcctccgagggaaagctgcagccccggccgaaacgcc

SEQ ID NO: 52100 - DNA, 122 bp, Homo sapiens
cacccggcctagatcaggttctttacatagactaaacaaaccatttccttctcctaacaacgctatgtagtcagtacccttgtcatcccccgtacacttgaggtaattgaggaatacaggtt

SEQ ID NO: 52101 - DNA, 122 bp, Homo sapiens
ccccacccaccagtcagtgccgtgaggccccgggtggggaggagagacactgcctgggcccggttcttctcccggtgagatctcaacttctgtctgtggacaggcgagacctccacgtgtgc

SEQ ID NO: 52102 - DNA, 122 bp, Homo sapiens
ctggttggtcaatgttcaaagtcttttctctgacagcatctgtctctaaaggccgaacaacgggagatgcagcggaattggattaaaagactctgaaagtacagtcgttcatctttatatta

SEQ ID NO: 52103 - DNA, 122 bp, Homo sapiens
ctctctggcgccctctgctggccgctcgcgcgcaccgcggacacgccgggccctggcctgcgctgcgctcacctgccccggcccaagcggtcgctgtcccctgcctgtggccatacccgctc

SEQ ID NO: 52104 - DNA, 122 bp, Homo sapiens
agactcccacccttgtccaccctttcctgcctcatactagtatcatgagtttagggctgtcgttggaaagtctggcagcccaggccataggattccagttcagcctacgatttcctagggaa

SEQ ID NO: 52105 - DNA, 122 bp, Homo sapiens
aaagtgagcgtgaagcaggagccttggagccccggccgccagggccacgtgggaaagacccgtgggcgggaatggagcagcacggactctggactcttctccgctctggccacgcttctcca

SEQ ID NO: 52106 - DNA, 122 bp, Homo sapiens
tagggcatggtattttgttgtaggcctgtcactggggtggttataaagagggaggaattacggatgcatttcaggtttccagtctgtgaatgtagcagatattgggacaagagaggtagtca

SEQ ID NO: 52107 - DNA, 122 bp, Homo sapiens
tcctttcaggagtccttctctaattgtttacacgcatagaacttgagtctccagctggttcgtaagtcccttggggccagggtttcttttgtgtccactatagtacctaacacagtttgggg

SEQ ID NO: 52108 - DNA, 122 bp, Homo sapiens
caccgtgggcgtggggccgggttatctgttttaagaagtccttcaggggattctgcctcacgtacaagttggagaagcagggtttagatgatgcagtggaggccctgcatgctgctcccagg

SEQ ID NO: 52109 - DNA, 122 bp, Homo sapiens
aaactaatgataagtattaaaaggctgcttgatggattattaaaatagtaaatgtgtcaccgaagtttatagagaccagaagaaatttaaaaataggttatacatactaagatgttctaatg

SEQ ID NO: 52110 - DNA, 122 bp, Homo sapiens
actttttttactccaaaatgcggcccgcattcaagctcctgaatgatccaacagcagcagcgcaaaccatcccacaggccgtggaatcatatggatggtcaagaaaggtcattgcccctcgg

SEQ ID NO: 52111 - DNA, 122 bp, Homo sapiens
gttggtggttccaagagggtggggcctcggtttctccaggatctgggctctgggcctgtccgtagggaggcagcagagcctagtgcaagagggctggtgcactgcagccagcctgtggcccc

SEQ ID NO: 52112 - DNA, 122 bp, Homo sapiens
cacacgtggacattactgcttccggtactgtttcgtgcattttgtttggtgcattttgtccgtctccctggcacctggtgggtggtgaatcagcagtttttgaacgaataagtggttatcac

SEQ ID NO: 52113 - DNA, 122 bp, Homo sapiens
ttcactcttcgataggtcccggtgtgtgttgcttccctctatgtgtccgtgtgttctcatcgtttagctcccggttgtaagtgagaacatgagcactgagttttaatatgcaacagatttgt

SEQ ID NO: 52114 - DNA, 122 bp, Homo sapiens
agtgatgacagatgacaggcccagaggccctcctgtcctgcaggctcaccttgagggggacgctggtctccgaggtactgatcacagggatgaaggtgagagtgtaggcatcgggaaagatc

SEQ ID NO: 52115 - DNA, 122 bp, Homo sapiens
agcatcaacaaattgttttctaaatgtggaaaaagagacattcagtacaggctaacgtaacgtgggacagcatgcaaagccatgagaagtgggaaaatgagagagaatctgggcgtggctta

SEQ ID NO: 52116 - DNA, 122 bp, Homo sapiens
cctggcggaaaactccccgcctgctcaccccatccgcccaagaatgcgccttcccgtcttcggtggccctacccagaatcccaaaatgtggattccaacccaggccctgaacgtcttctcaa

SEQ ID NO: 52117 - DNA, 122 bp, Homo sapiens
aattaaatggacataaaaaacattagtaggagaaaaataactttaatttatggacatatgcgtgggaatcccactaaaaatgagactcaaggaagtacccagataactgagacatatgtcag

SEQ ID NO: 52118 - DNA, 122 bp, Homo sapiens
cagatgttgccatagctacctggtgtgggagaccccacaaaagtcaaagttcaaagtcagcggacgtgacaattaagaaaacactggaagacctactctcagagggaaacacagtctcctca

SEQ ID NO: 52119 - DNA, 122 bp, Homo sapiens
ctttaatgggtgtgtagctcacgcccaactgatggcacgtggtgggcttctgtagacgttcgtaagaccgaatgggttcttggagtctgattcacttaacataatttattcaatagtcaccg

SEQ ID NO: 52120 - DNA, 122 bp, Homo sapiens
gatctttccagctggcaggtcctgtgactcggttcctccccagggctgagccgagggggccgcctctcccacagctcatcagccattaagagaaattcagaagaggctggggtcctcgtctt

SEQ ID NO: 52121 - DNA, 122 bp, Homo sapiens
caggatgggtgtttaatttcagccccgtgtgtacgcctggtgtttctatagcagccgccgcggcggcaggaggcaaggggtgggagccccgggtggcgtggtttttgcggctgccccttggc

SEQ ID NO: 52122 - DNA, 122 bp, Homo sapiens
tcggaggctagcctgcaagccttgctggtgggtggcctgtaggggtgacaggaaaccccccgggcctccgctctttaggggagggggagcctcgcccttgcccccctccgggacgagcgggc

SEQ ID NO: 52123 - DNA, 122 bp, Homo sapiens
tgtggccaatttcaagccactaaggtaaggtcaccaagcagggccttggggatagatggtcgcagttggctctcacaaggcaggtataaaggctgcagcacaaaagtcaacatgaaaaacaa

SEQ ID NO: 52124 - DNA, 122 bp, Homo sapiens
accacttggcgactagtccagaaccggcaattttgaaaaatgtggcccccagctgactagcgatgcatctgcccaataatgttttgcctgtcccccgaggtccaaataaaaggatgctccga

SEQ ID NO: 52125 - DNA, 122 bp, Homo sapiens
caggtttttaaagtcccttttatagcaaataaataggaggttttgagggctgtttatgagcgcattccattacagtgtctttcagcggagccagagctcagccaatcctaattaagaagcaa

SEQ ID NO: 52126 - DNA, 122 bp, Homo sapiens
ttctaaggccacttcctttctccagcctctcgcgcccagttgactcccggcaacacctcccgccgccacaaggagacgcccgaggacttccctccgacaaagccaaaaacggtattgccacg

SEQ ID NO: 52127 - DNA, 122 bp, Homo sapiens
gaagatcaaaccacaaataaggggaacttgcatgaggctaccttagttacaaggggcttacgagtcacccaggttacctctgtatcaggagccacggggcaggagaactgtgggaatgaaga

SEQ ID NO: 52128 - DNA, 122 bp, Homo sapiens
catagtggaagctgagcagctcttgtgatggagctgtttaagaaagagagaatcagcccccgcattggggagctggtccagcacacatggccttggggttctcctgttgagcacacatgatc

SEQ ID NO: 52129 - DNA, 122 bp, Homo sapiens
gtgtgggccacaggcgcccagtcgtgttgaggacatagaatcagccgctggaggggctgccgactgcgcgggcccttcccgctctcggtctcaccctaagggctaaggcgaccgagaaagcc

SEQ ID NO: 52130 - DNA, 122 bp, Homo sapiens
ccgccagggctcagggtgtgtgcactgtgggtcccagtttctgtcagctatggagaaggacggggtgttctcctgagaacaaatgacagcccagctagaggcggtcatctcaggacaccaac

SEQ ID NO: 52131 - DNA, 122 bp, Homo sapiens
tattatgaggatggtcttttccttatgtttcgctttagaaattcagtctataggactgggcgcagtggctcacacctataaccccagccctttgggaggctgaggggggcagattacctgag

SEQ ID NO: 52132 - DNA, 122 bp, Homo sapiens
ttgctcctaggtgagtatatcgacttgccactagatcattgagtccttttagccagattacgttctcattttccccctttatgcgtaatagtctgtattatcagctatcctgccgaaaagct

SEQ ID NO: 52133 - DNA, 122 bp, Homo sapiens
gggggcgtctccgaggtgggttttcaggttgcccagccagggggccggcgggacctaccgcggactcgcgcatttacgttcgcaagaagtgaatcaccaaacgtgcccacggctaaaactct

SEQ ID NO: 52134 - DNA, 122 bp, Homo sapiens
tgggcgagggccgcctgggccaaccggctttttcagggtcccgggtgatgctaatgtgcccgccgttgctgaaaaccactgtctctaggagttttgaaaaatctcggagctctctggcaggc

SEQ ID NO: 52135 - DNA, 122 bp, Homo sapiens
ccgccagtggggacaactacatctgggaagacagagatgccgctaggtctgttccgcagccggcagaatcttaggctgcacgtgccagatgcctaaactgtgcagcctgaatgactgttggg

SEQ ID NO: 52136 - DNA, 122 bp, Homo sapiens
gaatccatgctgcagctgcccctcaccctaccccatcccaccacatccattaggactaagcgtagaagatcacttaatatagctcagaccaatcctcttgtgagtggtaagtgatgggttca

SEQ ID NO: 52137 - DNA, 122 bp, Homo sapiens
tccccctgttcctgcactcaaacctgggcctgaaggactgcagcatcaaccccaagtccccgctgctctacgtgacgcgacctagcgaggtggagaaaggtgtgctccccggcgaggactgg

SEQ ID NO: 52138 - DNA, 122 bp, Homo sapiens
gcctctgtcctgccaggcgctgctgggtttgggaggaatgcgtttactctccaggaccaacgagtctgtgcaggcctgggtgtgtggatgtgtattaatataggcaattctcacattttctc

SEQ ID NO: 52139 - DNA, 122 bp, Homo sapiens
ccggcggctgcgggtggagggggcggttcctcgagtgtcggcgacccgagggcgggcaggcgggcggcaggtgccgccgcagcctctggctggtcccgcgtctccgtcctccggcggcgatg

SEQ ID NO: 52140 - DNA, 122 bp, Homo sapiens
tccagggctccgtttctaccgcggaggcaaaccttggacttcaagtcccaggaagcaacgcgtgtccgttttccgggcgccccgccgcggcgccgtggttcccagtgtgccccgctgttgtt

SEQ ID NO: 52141 - DNA, 122 bp, Homo sapiens
actgtggattactctacttataaacttggagattcagtctctagacggctcacactcagccgaggtttggggtactagttgccaccgggttgaagagagaatagacaataaaaatagctaca

SEQ ID NO: 52142 - DNA, 122 bp, Homo sapiens
agcaacttccatgaggcaggcgagggtgagacggaggccagcctgcaggagggcatggaccgtgtgcgggatgtggtgcgggccagcaccttctcgtgcatcatgcagaagtggggaggcaa

SEQ ID NO: 52143 - DNA, 122 bp, Homo sapiens
tcaccctactgatctattgaactctggttgtctttcttctacctaattgtatacttataccgtttaaccaacctctctttatcccacgtcttccctcctctttccaggccctgataaccacc

SEQ ID NO: 52144 - DNA, 122 bp, Homo sapiens
aggcctcaggggaaggagcagcagggcttgtgggactcctgggttcctgaccccccctggcgttcccggatgggtgggtggatcccaaccccacctcttctggcgggatgagctccccaggc

SEQ ID NO: 52145 - DNA, 122 bp, Homo sapiens
agcattgcagcagttagtggctcagatttgcccctctcaagaggagacaggtcagctcctcgcgccctgttctccggaggcctcgtctctgctgagaggtgtctcagttggccccgctgcag

SEQ ID NO: 52146 - DNA, 122 bp, Homo sapiens
ccgcccggctgccgcgtgacgtgtctgtttggcggccagtttggccaatcatcggcagctcggtgggtggtgctcctgggcgattggttggcagaatgagggcgctgcgcaaaaacggagaa

SEQ ID NO: 52147 - DNA, 122 bp, Homo sapiens
gctccggctggacacaaaatagatagaggagccggccgctattgtgcgcagtttgggacgcggggggaggcggcggcgggcgggagggaggcaggcttggaggaggagggcggggggaggga

SEQ ID NO: 52148 - DNA, 122 bp, Homo sapiens
ggggcctgcaggggaagagctcaggcccacatggccacaggtgctgcccaagtggggccccggggctgacagcaaggagtctactgtggagaagtgggcagaaacccgggcacctggccagt

SEQ ID NO: 52149 - DNA, 122 bp, Homo sapiens
atgcccattctgtgaaactgaggctccaaggggttaagcagcatgccccaggtcacacaacggaaatggaaccagggttctattgcatccccattgtgccccagggcccatgctgttaactg

SEQ ID NO: 52150 - DNA, 122 bp, Homo sapiens
gtcctgaggcggggccttcccgtccgtgtttcctgggtcctgaggcggggcctccccgtccgtgtttccttggttctgaagtgggaccttcccgtccgtgtttcctgggtcctgaggcgggg

SEQ ID NO: 52151 - DNA, 122 bp, Homo sapiens
gcgctcttggtgggaagggggcggagcctgcctggcccggagcccggggccacgcccccacgctttgcatatgcgaatccgggcgtccagacctttcatcccagtgtggaagcccagatttt

SEQ ID NO: 52152 - DNA, 122 bp, Homo sapiens
ccacacgctctgcgacaccccagccccgggacctcgggttgagtggcttcgttcaaaggtcgatttacagtattgaaaaagaggtcataaaagagacccaaatgacatcgtaattttgtaaa

SEQ ID NO: 52153 - DNA, 122 bp, Homo sapiens
gtggttgtttccgtgacggactgagtacgggtgcctgtcaggctcttgcggaagtccatgcgccattgggagggcctcggccgcggctctgtgcccttgctgctgagggccacttcctgggt

SEQ ID NO: 52154 - DNA, 122 bp, Homo sapiens
aagcggggaccccgtccccttcgacttgagggttctctggggccaggcgggcggcggttgcgcctcgtctgagccgcctcgggtgttgggcagccaggaaaggagtgtttgaaggggaggga

SEQ ID NO: 52155 - DNA, 122 bp, Homo sapiens
cctttatacaaagcctggaacggagtgtttccgttaaatattaaaagctgtaagagccagcgcctttatacaaagcctggaaggtaacaaagagttttccctaggcttctcctgggccttga

SEQ ID NO: 52156 - DNA, 122 bp, Homo sapiens
gtcagccactgaccaagacgagggcatcaactcagaaattacttattccttctacagaaccgggcaaatctttagtctgaattcaaagagcggagaaattaccactcaaaagaaactggatt

SEQ ID NO: 52157 - DNA, 122 bp, Homo sapiens
ggcgagttttctctttccctgggactgaactatcacaaagcactaaagggtttaagcaaacgtgagtatcactgaaaagcactagaagaaagtctcaatgtggctggaagaaaccagaaggc

SEQ ID NO: 52158 - DNA, 122 bp, Homo sapiens
tgcttgtttttagtgcagccagaaaaagagcgcattaccggcgcgcaatctcttgttgtccgcgatcagcattctgtgggtctgagctggcttacaacggtgtaaagaccccagcggcatgt

SEQ ID NO: 52159 - DNA, 122 bp, Homo sapiens
acagatgaaggaaccggatggtggtttctgcacagacaccctccgtctgcgtattaaacacgcaggaatactcttcccttccacagagaaagaactttgctgtctcgcatttttctggtaac

SEQ ID NO: 52160 - DNA, 122 bp, Homo sapiens
tggtatttttagtgcgttttctgtttgacaggatgtttcttgcacatattttcttctctccgtattcccactgttcctctgaaactaatcattccctgcctgtatttattcgccagttcccc

SEQ ID NO: 52161 - DNA, 122 bp, Homo sapiens
gaaaaacagtttttaaaagacacaggaggagagaaagaagaaaaagctttctccaccttccgtcggctcggtgcaatggctttacggctctccagcatagtaagccccgagaggcaggcggc

SEQ ID NO: 52162 - DNA, 122 bp, Homo sapiens
ttgtctgttcacctgtttaggaacacttggttgcttccacattttgactgttatgaataacgctactagcaaagtgaacacgagtgtggtttcagttcctgttttcaattcttccgcgtctt

SEQ ID NO: 52163 - DNA, 122 bp, Homo sapiens
cggcctgccttgggcggagccaccgcgcatgctccggaggcccgcggcagcgcccgcaggcgttgggtgcaagtgttctgtggttgcttttagttcctcacaccaggctagaggttgaagtc

SEQ ID NO: 52164 - DNA, 122 bp, Homo sapiens
attctcataggtatgtgttgtcaatacaccatttaagaaagatttatatctaagatcattcgtttccattcaggtctatacgtttgtgcctctggctggtcacatggacacatgctctgttc

SEQ ID NO: 52165 - DNA, 122 bp, Homo sapiens
gttctctgcctttctgaaacgccgggcaaaagtccctcagcaagtttcaaaactaatgaccgtacagcgctgcacaaataacaaaagcttaataccaaccaccaggccgtcaacccgctcac

SEQ ID NO: 52166 - DNA, 122 bp, Homo sapiens
tgggtttgatgactgtggcacgtgatggcagggtgggcatgggagcccgccactggctgacgcccccccccgcccttttgcagctgtgaggtggagcctcgttggtggacgcaggccgcggg

SEQ ID NO: 52167 - DNA, 122 bp, Homo sapiens
ccaatgggcaggcccggaagacagaggcgtttgcttccgtggccaaaggcgcttcatttccgggtgaaactggcattgagggtactggggcgtgcgtgaggcgtttactgatgcttcctggt

SEQ ID NO: 52168 - DNA, 122 bp, Homo sapiens
cgagagggaatgggctcagcggagcttgggggctcccagctccccaacattcttggctgccgctctactccattggaagtccttccttatgcctgcctttcacccctcacgctgcagcctca

SEQ ID NO: 52169 - DNA, 122 bp, Homo sapiens
tgacctctctgaaccacaaggattccatgaggtcatggataaaactgttgaccacagggccgggtacatggttagtgttcaataaatgtgagccatgactttgacttcagaggcagtgtagc

SEQ ID NO: 52170 - DNA, 122 bp, Homo sapiens
ctcccacatggcatcgggggcgctggcgttggagctggctgtgccctgcaggatcacctccgcccgctccttggtgatgctgccgggagaccgaggcaggccaggcccacgtcacacaccgg

SEQ ID NO: 52171 - DNA, 122 bp, Homo sapiens
gcgcgtgcgcgcgcacctcgctcacgcgccggcgcgctccttttgcaggctcgtggcggtcggtcagcggggcgttctcccacctgtagcgactcaggttactgaaaaggcgggaaaacgct

SEQ ID NO: 52172 - DNA, 122 bp, Homo sapiens
aacgcgggaggatgtggaacccgaggcggggggagccggaggggcgggcagaggaggtgtcgaggccctgagctcccggggagtttttactggaggcaaaagtccatagcgggagggctgag

SEQ ID NO: 52173 - DNA, 122 bp, Homo sapiens
cggcctgcaggtagcgcgaaagtcctgcgcgtcccagatgcccaactaaaagcttcgctgcgggaagaaagcctgacctgactacacccagacccagaacgcaggatctcggtaaaggatga

SEQ ID NO: 52174 - DNA, 122 bp, Homo sapiens
gtgcctcagggctatcctcgagcttcctgcccccttcccgggccccagccctgcctcaggcgggtggttgctttcagctcaccctgtatatgccaagtttaggagagagataatttatacta

SEQ ID NO: 52175 - DNA, 122 bp, Homo sapiens
atcctccgtaggctgcattctgccctagtgagcgccggtttttgagccttgctcttccctcgctaccgacgtcgaatcattatgcggtcaacaaccgcaggtgggttatgtgtcatagcccg

SEQ ID NO: 52176 - DNA, 122 bp, Homo sapiens
ttaaggaattttgattttatctagaagggataggggacaactgaaggctttaagcagatacgcattttatgctcagctatacattttaggaaagtgattctgggttgttatgtggacaatag

SEQ ID NO: 52177 - DNA, 122 bp, Homo sapiens
agggctggcagttctgagcgctggcaaggctaagtgggtcagaggagaccctcgccaagccggtgactcactcactcgctcaccctctctcactcttgatgggccaagtacctgccatgtgc

SEQ ID NO: 52178 - DNA, 122 bp, Homo sapiens
caaaatagtctctcctaggaagtcaggatggccgagcggtctaaggcgctgcgttcaggtcgcagtctcccctggaggcgtgggttcgaatcccacttctgacaagcgctcttttccggtat

SEQ ID NO: 52179 - DNA, 122 bp, Homo sapiens
tggctacccttcccttcgtctctgatggtgacatccaaacaataaatatgcaataaatagcgctcctgggctgggccgggccggctgccttcaaaccccactcggcccctaccagtcttctc

SEQ ID NO: 52180 - DNA, 122 bp, Homo sapiens
tgcggggctgctgctgaaacacaggaggccacgggggtgggcataacaccaggggaaaaacgtgcggccatgccttcgaagtcccagtttttctggtttaaaaaatgcaagaccctacagca

SEQ ID NO: 52181 - DNA, 122 bp, Homo sapiens
catcccataacacacatgatttagctattttacatctttcgttatctagcgccctgaaaccgaacatacagccatatattagattgaggttagaagaggtggcgactgtttattcaaggtga

SEQ ID NO: 52182 - DNA, 122 bp, Homo sapiens
tctccacatgatatggaagttgtagaacattgtgttattagtattcggggtattaaaaggcgaagtctgcaggatgatctcatgaggcttgctgtcatccacaagaggtcagggcaacttca

SEQ ID NO: 52183 - DNA, 122 bp, Homo sapiens
acatattgattcattcattgaacaaaaatttacttgctacccagattcaatcccagccctcgttacagtctaaaaagaaagatgagttacatattttaaaatatttagagtagtaactggat

SEQ ID NO: 52184 - DNA, 122 bp, Homo sapiens
actgaaagattgcatcctctttccaaatacctctagaaagctgtgggggggctatccatccgtcacacctgagtattaattatcttccacacagcattttatacaacggtagaaaggcacct

SEQ ID NO: 52185 - DNA, 122 bp, Homo sapiens
cctttcccctccactgcccacctgcacccgcccgccctgtccccactccccgcccctctacgcagccagcgtccaatgctgggcaccccccgaggctcaccctgccaagcctggggctcccc

SEQ ID NO: 52186 - DNA, 122 bp, Homo sapiens
cagacgggcgtccgtctcccgactctggggagaccaccacgatttcgagagtacgggcaccggttaggattttcctgcagaacaggcaccgcgaagctgccccgctaagccggcgccgcggc

SEQ ID NO: 52187 - DNA, 122 bp, Homo sapiens
gggatcagggactcatttttcagatcacagcatttcaggaggacttttacctacacctgacgccggatgctcagttcttggctcccgccttctccactgagcatctgggcgtccccctccag

SEQ ID NO: 52188 - DNA, 122 bp, Homo sapiens
ctttcacgccgggatccgggtcccggtgcttctcggttcattcccagctgggtccgggcccggccagactgggtggaaatctggctgaccttggtggtctgtcttggccagctggagcaaag

SEQ ID NO: 52189 - DNA, 122 bp, Homo sapiens
agcgtgtggattcccgaaaattctcagggcttgtgtgacctttaggagagttggagggggcgtagtagaaatctcaggctaattgatttcttgtcctccaccacggaggcagacaggagccc

SEQ ID NO: 52190 - DNA, 122 bp, Homo sapiens
gctgcaggagcgggagcgggagtgccagtcgcaggaggagctgctgctgcggagccggggcgagctggacctccagctccaggagtaccagcacagcctggagcggctgagggagggccagc

SEQ ID NO: 52191 - DNA, 122 bp, Homo sapiens
ttgttccttctcatgttctgatgtgttcggagtttgttccttctggtgggttcgtggtctcgctggctcaggagtgaagctgcagaccttcgcggtgagtgttacagctcttaagggggcgc

SEQ ID NO: 52192 - DNA, 122 bp, Homo sapiens
acagacccagaaagcacgtgaatgaaaagatctgtttgccatatttacgccttatgtcatcgtatctgctttaagaaaaacacttcttcaaaatcctacactatgaaaaactgtcttcagga

SEQ ID NO: 52193 - DNA, 122 bp, Homo sapiens
cccccagcctctcactactgcagccaacccatctcctggaagggcgctcccgcccacccccgctactgcgcagccgcactgaactctggtcccacttagcgggagaaactcgggccacgtga

SEQ ID NO: 52194 - DNA, 122 bp, Homo sapiens
tgcgatctggcagtcagagcccacctgtgtgtctgcaggagcatccctgactacacaccacgggacggcagggaagggtccctcgggccccacccctttgttctttcaatggtaaaggttca

SEQ ID NO: 52195 - DNA, 122 bp, Homo sapiens
cctgcgcgccccgagggcggccgcattacctcgagccggctcaggctggagctcttggagcgcgacttcctgcgcaggtacacagagaagaacctgcgcacggcgaacttcttcatgctcag

SEQ ID NO: 52196 - DNA, 122 bp, Homo sapiens
ggccccttcgctgacgtgcaggtaacccggcacagatggcgtttcaccgggcaggtgacccgcatggtgcagggctataaataaccattacatgtccctttcagagtgggctttttttccct

SEQ ID NO: 52197 - DNA, 122 bp, Homo sapiens
tgggaagatgatcctggattactcaggtgagccctcagaatcttttccagctgcaatcagcggtagacttgaggatggaaggttcagagagatggcatatcactggctttgaagatggagga

SEQ ID NO: 52198 - DNA, 122 bp, Homo sapiens
tcccgtcaacatccagccgcctgcgtgttccagccgcctcggttcctccggtgatgcgcccgtctccacttgctgagcctgcaatgtcggcctgttacggtcttgagggtttttataggccc

SEQ ID NO: 52199 - DNA, 122 bp, Homo sapiens
tcttcatgtatctaatctcaacccaccaccgccccgagagctaccttctcgttattgccacgtggtggagtccggactccgtctggttgagacgtctgtgagcaacaccaggacacaaacct

SEQ ID NO: 52200 - DNA, 122 bp, Homo sapiens
cgctgggatcctgggattcccacaccaaggcctaggcgggcagcatctccggcagggccacggggtctcggctcctgcctccctgggtttccagctggaaccacccttttgctgggacggct

SEQ ID NO: 52201 - DNA, 122 bp, Homo sapiens
acactcgtgccccttgcctgggtcctgggatgcagacaacgtggcatttaaaagtgaaagcggaaacaaacagcagccccgccagcccgggcccggaggcccagccccgcgccaagggccac

SEQ ID NO: 52202 - DNA, 122 bp, Homo sapiens
acgggagtttccgggccgctggtccaagaggcaatgccagtttcggtacctttgtgttttcgtccccgaagtagtagctctaggaacctgcgctttcgaatccctttggggtttgtcctaaa

SEQ ID NO: 52203 - DNA, 122 bp, Homo sapiens
ctgttgctgaacccgcaggaagatcccgggtttcagaaggagggggcgcaggttcgcaagcgcacaactctgtggaaaaaaacaacttacttctggagtagtctgtgtgcgccacctaccta

SEQ ID NO: 52204 - DNA, 122 bp, Homo sapiens
caacaccacttccgcgtttctcttgcgccctggtccaagatggcggatgaagccacgcgacgtgttgtgtctgagatcccggtgctgaagactaacgccggaccccgagatcgtgagttgtg

SEQ ID NO: 52205 - DNA, 122 bp, Homo sapiens
agcgggcggagagggcgacgtccgcggatcgcggagtcccgggggcgcccgcaggcctagcgccctccacctgctgccccgtgccacctaggagtttccttgccgggcgaggaggcgccgct

SEQ ID NO: 52206 - DNA, 122 bp, Homo sapiens
tgcgcgccagacgatgcatcttctggaacggcagctgaggcaatgcggggtgtgaagtggcggcgggcagaggggctcgcaggggctgggatccgcgtgcccctctctgcctcggtgcggag

SEQ ID NO: 52207 - DNA, 122 bp, Homo sapiens
ctttctggatgtcagttttgtctgtaaaatgaggctgtataaaataactttcaataagttcgagttactgttgcagagtgttgattgcactttgtaaatgtttgtggaataaatggggcaga

SEQ ID NO: 52208 - DNA, 122 bp, Homo sapiens
tttatgaagcggcctcttcatgcctcagtttttccatctgcactgtgggacagagcaaatcgtgactatcatgagtaatcctgccttctctcctctgatatcttcggaagaaggcagatgtc

SEQ ID NO: 52209 - DNA, 122 bp, Homo sapiens
acacacaaacgcaatccaaggtattcagtgtcctgggttaaaccaacaaggcctctcaggcgaaaggcacccagtcaaccctgggcagcatccagccatcccaagggataggagaccccatc

SEQ ID NO: 52210 - DNA, 122 bp, Homo sapiens
ttaatagtggagacctggtgagaggttcttttccaaacttgttccctggcttccaagtgacgaaaccagctgtaatttgagagcagagagatcctcaggatatctttagccaaaggaaaagc

SEQ ID NO: 52211 - DNA, 122 bp, Homo sapiens
atgtcatggatctgatctgccttctatgaccttaaccccccaccctaactccttctgtctcggatttaaacaaattaactagacatgaaacagaaagaggctgttacttaagggaattggat

SEQ ID NO: 52212 - DNA, 122 bp, Homo sapiens
gcatggggaaaccgagacaacctttaatcaggaaacctcagagagacgcatgacacctggcggtacagtcccagtgagtggaatcccagccggacgcaactcttcctccaggagaacttggc

SEQ ID NO: 52213 - DNA, 122 bp, Homo sapiens
ccacccgttccaaggacgcagccctgtgattggccatgacgcgtgccagagctgcccagtcgcggaagagcagctgttttggcgtctgtttgctgcggtaggaacatggcggatcggctcac

SEQ ID NO: 52214 - DNA, 122 bp, Homo sapiens
ctcacaccgataatgtatagtggagtactgtaacagcctctttccccgggggaggggtaccgcaacagcctcttccctcccgggggaggggtaccgcaacagcctcttctcccccgggggag

SEQ ID NO: 52215 - DNA, 122 bp, Homo sapiens
ggagcttcccgtggaggttaagggcgctgaaactgcacaagctgagagctcacagcagtgcgtggtgcctcttcagctggggtgctcacccgcggggagacgtggctttgtgcgcttggcga

SEQ ID NO: 52216 - DNA, 122 bp, Homo sapiens
cggccgccaccccagggagaaagctccggtgaggggagcagacgctgggacccgtggtctcgccctctgctctttcctggctggggacgggggtagctcccaggcaaaggccctccggggtc

SEQ ID NO: 52217 - DNA, 122 bp, Homo sapiens
gtaatataccaaaccactcctggctttgtttagaccctagacttgggccctcatccttctcgtagacctcttgcgaggattttccccttttacagattcacactcagtcccgaacagaaaca

SEQ ID NO: 52218 - DNA, 122 bp, Homo sapiens
aaagtcacccagctactgagcacagacctgagactgaaaccttatccagaactgctgcatcgtgactcatctttgttgaaggaaaatgctgtgcgattcgaattgagctactgattggcatg

SEQ ID NO: 52219 - DNA, 122 bp, Homo sapiens
gcggtgtggagggagaggcgcgggcgggaactgctgctgtgcatggtgcttgtgggccagcgcgagttccatgtaggcgtggggagccccgcactcacagcggctggccctgggcagtgagg

SEQ ID NO: 52220 - DNA, 122 bp, Homo sapiens
aagatgtaaccattagcctcatctttactcccgaaagctcactttgcttttagtcctggccgtcggctgagcgagctgcgcatgcgccacgtgcccccgtggcgtagggcctcgtccggtca

SEQ ID NO: 52221 - DNA, 122 bp, Homo sapiens
tggatggcggatgtgagcctcagaggcatcaccggctcctgcggcctgatggccaactaccgctacttcctggaggagacgggccccaacagcacctcctacctcggctccaagatcatcaa

SEQ ID NO: 52222 - DNA, 122 bp, Homo sapiens
ctccagggacattctgctgctccccccacacccctcagcttcacctatgaccagccaagccgtataggtgagtccacttgagaaagtactgatctagaagtcaggaaacccagctcttgctc

SEQ ID NO: 52223 - DNA, 122 bp, Homo sapiens
ctcaggagcgctctctgccggcccgctctccccgtgcgtatgcacgtgccgccgcgtcttcgcttcgctttttgtttgtccctgaccgtgcgccgtccaagggtccattggttgccatagag

SEQ ID NO: 52224 - DNA, 122 bp, Homo sapiens
caagttccttcctcctcccaatctccctcttctagttattcctttttttaattcctcttacgattttccttttgtgcacttctcctctgttgtcattccaaccttctgtaattaacatgaga

SEQ ID NO: 52225 - DNA, 122 bp, Homo sapiens
tcacttgcggagggggatgaatgaggaggaggtgagaaatgtgtgcaaaatgaggaggtgcgaacctgtgtgtggcagatgagttccccagagatttgtgtaggtgactgcctaccatcttc

SEQ ID NO: 52226 - DNA, 122 bp, Homo sapiens
atcgagaatggaggaggggatcggcactcacttgcagacatcaacagtttccagaaaattcggttcaattccttcaccacggacccaccaaccaaggagctggcaaaacccactaaccaacc

SEQ ID NO: 52227 - DNA, 122 bp, Homo sapiens
tataagtgtgatattctaatgaggttgctatttgaagtatccacttgaggccaggcacagcggttcacacttgtaatcccagctctttgggaggccaaggagggcagatcacttgaggtcag

SEQ ID NO: 52228 - DNA, 122 bp, Homo sapiens
taggaggcggcgcttgagcggcgagagagatgcagactcgtttcctgagcgcggtggagccgggtcttgacccagcggctctgcacagctcgcctcattcaaggcaggttttggtcccagct

SEQ ID NO: 52229 - DNA, 122 bp, Homo sapiens
tatggcccagctggcacaggagcagccaagttcaggatataaatggggtcacatgggaaccgtggaagctctgtctccactggcagcaggctacagactggggacatgggagcattgtgaga

SEQ ID NO: 52230 - DNA, 122 bp, Homo sapiens
accggcgcgcgcgcgtacacacacggcacacacagacacgcgcttccacacatgcacacgcgtgcgcacacacgaatgtggatccgctcgatgggaacctgaccccctttggtgcaactagg

SEQ ID NO: 52231 - DNA, 122 bp, Homo sapiens
gcgcacagccaatggagagacccagtcgaaaccgcgaagctctcttgcaccgggctttttcgcctggtgattgatgtcccagagtcaacagcgagcgagcagccggagcggggaagcagaag

SEQ ID NO: 52232 - DNA, 122 bp, Homo sapiens
gggagttccggatgtttagcgttaccatggatcctggaggtgcccgcgaacactgcttgtcgcctgggcaaccggagaggacgaagcaggacctaggtggcggcggtggtaccggctgcaat

SEQ ID NO: 52233 - DNA, 122 bp, Homo sapiens
ggctctcctttaagatccaggatctgcatcaggcttggctgtgtgtgcctgtcacccctgcgcagtaccactgcgctccccccgggcaaaaaaatgagacccccatctccaaaacacacaga

SEQ ID NO: 52234 - DNA, 122 bp, Homo sapiens
gggggtggccgccggaagtgctctgggggaggccgcctaaaatgctctggaggtggtctccggaaatgctctgggggtggccgacggaaatgctcctgaggtggcctccggaaatgctcctg

SEQ ID NO: 52235 - DNA, 122 bp, Homo sapiens
aacttcagaagtcaagaatgaagctcgggcagaaaacaagtagagggcacagttctgtcccgatttacagaggatgggtttgcgacctttctgatgcattaacttagtaatgctaaggtgtg

SEQ ID NO: 52236 - DNA, 122 bp, Homo sapiens
tgagttctggctcatttgattttagcctgctttctttgcgggagcactcttgcctggcaccgtggtgtttgtgtaagcaagtttcaagttctaattgtcttttcaatgtttgtgttaccctg

SEQ ID NO: 52237 - DNA, 122 bp, Homo sapiens
tcctagatgggatggcggccgggaagaggcgcctcctcacttccttgatgggatggcggccgggaagaggcgctcctcacttcctagatgggatggcggccgggcagagacgctcctcactt

SEQ ID NO: 52238 - DNA, 122 bp, Homo sapiens
gaacacaaacgatttaaaccagattagaaagtgtctacatacagagctcaataacacactcggaatcttcttgggaggacccacagactgtacctatattacttttgacccaggtggatgca

SEQ ID NO: 52239 - DNA, 122 bp, Homo sapiens
cacacagacttttgataaacttgccactgggcaactcttagcccaagcactgataatgggcgttctgtgttaactagtgatgcccttccctagcttgacccaggaaggcctctccttggccc

SEQ ID NO: 52240 - DNA, 122 bp, Homo sapiens
gcctggaacatgtcaggggccaggaggagcagccaacacaccaggcccctgcagaagctgcgccggagtcagtcggggaagccgagacggctgaggccatgggcagtgccagaggaggtgct

SEQ ID NO: 52241 - DNA, 122 bp, Homo sapiens
tcatatcctccatagtgacggagctgtcggcaggggggtgctggcgcgcagtccgggtcgcggcagcagcggcggcggagcgttgtatggagctggatttaaaatggcggcggaagagatcc

SEQ ID NO: 52242 - DNA, 122 bp, Homo sapiens
cgtcacatcatgagagcactgtgtcacttcatggagcaccgtgccacatcattagagcaccgcgttacgtcatgagaatgccacaccacatcatgagtgtgtcgcatcatgtcatgagagca

SEQ ID NO: 52243 - DNA, 122 bp, Homo sapiens
ctgcaatagggctggagattgcagacaagctgactgagctcaaggcagagatcgaggaaccgcagaagcaagagcaaaaaccggaccagcacaaggtgtgggggaagcagaacatctggaac

SEQ ID NO: 52244 - DNA, 122 bp, Homo sapiens
tcgaaagtgccggcccccgcgccggcgcctgcagcagccgggtgggaaggctcaagatggcgtgcttgttggagaccccaatccgcatgagcgtcctttcggtgagtgacccgccgcggccg

SEQ ID NO: 52245 - DNA, 122 bp, Homo sapiens
gcaggacgccaggccgagcccgagagggggagcaggtgcagcctcgcctccccagccccgcggctcctggaacaccgctgtggctgcgcattcgcgcccatctctgccgggagccccctccc

SEQ ID NO: 52246 - DNA, 122 bp, Homo sapiens
gcgtggagggcgccagcatgcagcctcccggtttccccgtgcagccctaggtgcaggacccggggtaggtaccccctagacgccgaatcctgcaaaggtaaaaacttggcactttctcagtc

SEQ ID NO: 52247 - DNA, 122 bp, Homo sapiens
cacagcctctggagccttcagaggcagagaatgtttcatgtggcacaaacgtatcaccaccgattacatttcagtccctcaattgctggcctcaatgctttggaaatcagccaaactgagca

SEQ ID NO: 52248 - DNA, 122 bp, Homo sapiens
tgagatgggctttgccacttgccagttgtgccatcttggatttgtggcttacaaccccctcgcccccagagcctcggtttcgtcattttaaaaccatggaaaagtctccctgatgtacagcg

SEQ ID NO: 52249 - DNA, 122 bp, Homo sapiens
ggttggcaagctcagcttcgacagcagccccaccagctccacggacggccactccagctacggtgagggcctgggccatcttggcccacttttcagaggctgaggctgaggcccagaggggt

SEQ ID NO: 52250 - DNA, 122 bp, Homo sapiens
tcctcccacccacacccggccgagactcgggcttcccccgcgagcgccgactgcagcccgcgcgacgcgcgccccattcatgcaggccccgcctcccgcccagaggcctcacaggcggcccg

SEQ ID NO: 52251 - DNA, 122 bp, Homo sapiens
ccttgaaaagtaaagacaattctgaatatcaaattccacttccagtggggctcagtggcacgtgcctgtagtcccagccactcaggtggcgagaggggaggatcacttgagcccaggaggtc

SEQ ID NO: 52252 - DNA, 122 bp, Homo sapiens
cgagccctcagagcacgctggcctattcccccccagatctgaaagatgacagcatggccacgggctgggccacagaggactgcagcctcctgtcccggctcttcccacggcagagctgggga

SEQ ID NO: 52253 - DNA, 122 bp, Homo sapiens
ccccgcccctgcggggctcccgcgcccagctcggccctgggggtccgagaaccctggcttcggggactggcattttcaccccattaaaaaatcctcatggttggggggaggccatctgctta

SEQ ID NO: 52254 - DNA, 122 bp, Homo sapiens
atgcgccgtgatgacgtcagtgggagcggaggcgatttggcctagagctggggctgagcacgtgggatggtcggggcctgtttgcccaatgtacacgaggctggagaatagggaaagaaccg

SEQ ID NO: 52255 - DNA, 122 bp, Homo sapiens
ggtatgcaattcaccagaagtggcctgccctgctccttacataaggcctacttgccccttcggagtgaccaaggtgctctggccatgaggctggggctgcagtactcctctggcagtgttct

SEQ ID NO: 52256 - DNA, 122 bp, Homo sapiens
tgggaacagccccctccagccccctccctctcatggaggccttcagacaagcgcctcagtcggccccctggcttcaagatacatcaaggtccctgctacccgagccaaggacacctctccca

SEQ ID NO: 52257 - DNA, 122 bp, Homo sapiens
ccctagagtcccgctgtgcagctgacaccccctgccccagccccacggctctcagctgtccggttccagcgtccactccgacagccactgcaggcaggggccccgctgtgcctcagtctcag

SEQ ID NO: 52258 - DNA, 122 bp, Homo sapiens
tctccatgtctgcgtgggttttctctgggtccttcagtttcctcccatgtcccaaagctgcgcacatgaggtgaacaggcgtgcctacatggtccctgtgtgagtgagtgtgggtgtacatg

SEQ ID NO: 52259 - DNA, 122 bp, Homo sapiens
cccctccatggagggtcaaggaagcagtctggctttggcgggaactgcagaacaaacagacggatccagagccgatgttagaattctcctcccggccgggcgcggtggctcacccctgtaat

SEQ ID NO: 52260 - DNA, 122 bp, Homo sapiens
gacaaggcccctggggtaaaaagtagccctgaaggtggataccatgagctcttcacctggcggggactggcaggcttcacaatgtgtgaatttcaaaagtttttccttaatggtggctgcta

SEQ ID NO: 52261 - DNA, 122 bp, Homo sapiens
tgcagtgcagaccagcttcagaaggtatcttcaagctcctctgctaaacgtctgggtcatcgatgaccttatgcacatttgctccctctaatggaaggacaaggaaatgacatgtctacttc

SEQ ID NO: 52262 - DNA, 122 bp, Homo sapiens
gaattggtggtactcaacctttctccctgataggggagtcaggccgggggaggtgggtggcggcagagatttagcgtaaacaaacatttccttgtctggtaggtcattttgtaattatatgc

SEQ ID NO: 52263 - DNA, 122 bp, Homo sapiens
gcccggggacacttgcgtcccagattcactcccccagagcagctgaacacagcagggggccgcccaacgaggcaggcaggcttgaaatgggaggtcgaggcactggtggaaggaaaaaaacc

SEQ ID NO: 52264 - DNA, 122 bp, Homo sapiens
agctcagtcccaggagagactgtcaagtacacgctggagccaggccgcaattccagcccccgcaaccccccacttgctagacatctgatggtgacgtcgcacaacgagccccgcacctcaga

SEQ ID NO: 52265 - DNA, 122 bp, Homo sapiens
ggaacctgcaggcacgggccattcttcccgcgacccagggctctgccggaccgcttcccccgtcgctccagtcagacgccaaagctggagaacttccggtgcgtttccgctgtaccggaacg

SEQ ID NO: 52266 - DNA, 122 bp, Homo sapiens
gctgccctccatgcccttgaattggccctacctgaaggtccttggccagaccttcatcaccgtgcctgtcggccacctggtcgtcctcaacgtcagcgtcccgtgcctgctctatgtctacc

SEQ ID NO: 52267 - DNA, 122 bp, Homo sapiens
gagggaagcgtctggggcggcctaagtggcggagcagggcggacttgggccctcactctccgcgcggcggtaaatatttgtgctgggcgttcccggccgcccgcgccgccgattcgctgccg

SEQ ID NO: 52268 - DNA, 122 bp, Homo sapiens
ctcccgcttaccccaaggtgctgatgaagccgttgaccgagccctccgcgtacagggacacgatgtcccctatgtagaggaagctggacattttctcagtcatgctgcttcatgttccacag

SEQ ID NO: 52269 - DNA, 122 bp, Homo sapiens
ttgactcagtctagcttttcctcgtggactgccagggctgcctcctgtcctcctgcttaccgcccttgcccgcccagcaggtcgggcaagtgagtgactcacacacctgggctctgtgtggg

SEQ ID NO: 52270 - DNA, 122 bp, Homo sapiens
gattttatataaactggccatatttttgaccagccaacaagagacgggggtgggcccaggcgcccaggagccagtaggatcgcagcagaggcattggctgggttccgctcacagtttcctct

SEQ ID NO: 52271 - DNA, 122 bp, Homo sapiens
tgagccgatgaggagatgcctcctgtctacttggaggaaagggaccgggacacacagaggcgcagggggctgaaccctcggttccagccccgataactcatccggagtcacgcggttccggg

SEQ ID NO: 52272 - DNA, 122 bp, Homo sapiens
tcatatttatgctaaacacaatgactgatgactacaatgatgacgatgatggcagccgggcgcagcgggtggggcttaaatggcaagtatagcaataccaggaatggatgccccggggagat

SEQ ID NO: 52273 - DNA, 122 bp, Homo sapiens
tgtgcctattgggcaagggaatcttttggaacctttcccagggcctcttcagaggctcctcgagagggacgggcaggaggaatccagcacacgtgttgtctttatacaaacaggtgcgcttc

SEQ ID NO: 52274 - DNA, 122 bp, Homo sapiens
tcggaggacaggctggctgcctgtgcccgcgagtgtgtggagtccctgcaccagaactcacggacgcggctgctctatggcaagaaccacgtgctggtgcagccggtaggaaagcttcatcc

SEQ ID NO: 52275 - DNA, 122 bp, Homo sapiens
gaatttgcagccgcttgcagaggcggccccttagcagctgcgcatccgggtggatagcggcgcttctgcccgcccagtgcctacccgcctctccgagagaaaaacagcccctggttttctct

SEQ ID NO: 52276 - DNA, 122 bp, Homo sapiens
gagagtttgtggtctttgtttccacgaggtgaattcagatcctgcctcgagattcctaaacgcccaaggggcgtcggtggctggaccttgttaacccccacgcagccgccgagcctggagga

SEQ ID NO: 52277 - DNA, 122 bp, Homo sapiens
ggccagaggaaaaggggaggggggtcgggtgccgcgaacttgctctgagggggttagctgcgcctcggattgatctgcgtcgtgcctcgataggcagtaaccttcatcgctgcggttgcgta

SEQ ID NO: 52278 - DNA, 122 bp, Homo sapiens
ggtgggggtgtctggatttccagggtgaagggaggagggctggaagctttctcttctcctcggatgttcctggctttcagctcattagtagccggctgagaaagttgctggaagttgtgcaa

SEQ ID NO: 52279 - DNA, 122 bp, Homo sapiens
aagtattttccccaatctaaatcacttcagatacttacttctatacttaccaggctgtgacggctcataattgttgtactattcctccgagttctaagtgtgtaaggttggaaaacctgtga

SEQ ID NO: 52280 - DNA, 122 bp, Homo sapiens
cccacagggaaaacaaaacaagaaacagagaacttggaaacggacgctgattactttgaacgtttgctcaaccgaggaagcaggaactgttcggccccatctcaagtccgcagggcggactg

SEQ ID NO: 52281 - DNA, 122 bp, Homo sapiens
tcacagattaaggaaaatgacattgattacaaatgtcctcagcctgagttggctgtgttgcgtttgtacacttcagccctctgagctgaagtgggagtggtttctctcctgaaaatgtttct

SEQ ID NO: 52282 - DNA, 122 bp, Homo sapiens
ctctactcattcaaccgtttgctacaccatccctcaacaagccctgtactttccaattttcgagccttgctcatcctataccaaactgactgcatctgaccaagtcctagctggttcagata

SEQ ID NO: 52283 - DNA, 122 bp, Homo sapiens
aaggtggtacgcttgctcttagaacattaccgggtgcagactcagcagactggcaccgtccgcttcgacgggtaggtacatcccaagccagcctctctccgacgcgcgcggactcgttaatt

SEQ ID NO: 52284 - DNA, 122 bp, Homo sapiens
attgcgagcaatcatatggtagctctactctaattgttgaggagacttcatattgctttccgtcatggctgtactgatccacgttcccaccaacagtcatgcctgcactgatccacgttccc

SEQ ID NO: 52285 - DNA, 122 bp, Homo sapiens
gagagtgaaagggaagttgctgctccgaggaatctgccaagagctgtgtgtcctgactgccgtggaaaaaaggaaagcgaaccaccaacttgggctgcgctcctgctgcatctcccctcggg

SEQ ID NO: 52286 - DNA, 122 bp, Homo sapiens
gctcatcgggaggtcctgatgggagaacccatgcaacttgccaccatagagccaggcccgcggcggttggcgcctggtgggtattaaagacgagtcgggaaagaagagcaggtaagagggtg

SEQ ID NO: 52287 - DNA, 122 bp, Homo sapiens
gaggtcgaggaaggaaaggggggcgctgaggcccgcccatccccctctaatcccttgagccgccagaaataaccgcagattatccggggggaactgcagcccccttcttggagtgaggcagg

SEQ ID NO: 52288 - DNA, 122 bp, Homo sapiens
cgagcatgtcgtggtgacatatttggttggcgtggctgtgtggctgagaagatccatcagcgggcgtcgtcgacgctcgccggccctgaaccacgttttaatttgccagtctgtgggtttcc

SEQ ID NO: 52289 - DNA, 122 bp, Homo sapiens
acagctaaagtgatggactgctgagagtttctagctgctgctggattccataagttccatcggattaaggatgagcttaatgtataatgtataaacccatggacagagacactgccttgttt

SEQ ID NO: 52290 - DNA, 122 bp, Homo sapiens
ctggtcactgcgccttgaggagcctctcccctatgcccttgatgggtggcccgcaggggacgcggccgcactcggtcacctgtggtcctggagcagccgcgcccggcgggcggcacttaacg

SEQ ID NO: 52291 - DNA, 122 bp, Homo sapiens
gaggaagacctttccgagttacctgtctcacgtcagcagccacaccgaggcggtccccctcgcaccactccccaagtgcagagcccctgaaagtccgaggctcctgtgccacgcaccctccc

SEQ ID NO: 52292 - DNA, 122 bp, Homo sapiens
ctgagcgaccctgcagcacgaaatgtgaattgtaaaacagtgaaaacaaaacattaacagcgggggacattcctctgctgaccccaaagttcagcaggtgcgggagagggaggggcggactc

SEQ ID NO: 52293 - DNA, 122 bp, Homo sapiens
cactgcggttccgcttgaaactcatggacaccatcgtaacaggcgggcctccttcttggccgggcccctgacaaacgttctccacccgcagccaaactcaaacggctgtttcacggcctcca

SEQ ID NO: 52294 - DNA, 122 bp, Homo sapiens
cggggcggcggggggaggggtgggtgggcggggaaaggaggggcggggattccgtccaggcggccaatctaaggcgcccgtacaaccttccggccaatggggcctccgctcttatcgcgaag

SEQ ID NO: 52295 - DNA, 122 bp, Homo sapiens
tgcgatgcccgcggattggacggctgagtctggctacgcgggcctccgcgggagcgcgaccgggccaatcaagagcttggcgtattttacaaactgagaaagtagctccagcagcacccgag

SEQ ID NO: 52296 - DNA, 122 bp, Homo sapiens
cggtaggttaccgctgcatctcccagagcagaattggtaagagtgcgtccattcaccaggcgtagacgctgcattcgaggaggcccccgggtcaccccatgtgcacacatgctgcgagatga

SEQ ID NO: 52297 - DNA, 122 bp, Homo sapiens
gtcctaaaaggtggggaggtgagattcactgggaatcgtgaacctgcccccggcttctcccggggcagcctcccccggtcaggggaggagggagcccttcccttcaaccccgaaaggttcct

SEQ ID NO: 52298 - DNA, 122 bp, Homo sapiens
gacgatcccgtccgggatcccatccggctcccatccggaggcgatcccgtgaaaggatcgcgtccaaaataaaagggcccgagacctatgcttatgtaattcctaatccgtgatcttttcta

SEQ ID NO: 52299 - DNA, 122 bp, Homo sapiens
accctgtgcggctggtccagcacccgttggctcttctcttgggtttgtgctctgccacagcgtccccatctgttccatctgtttcctcgacactgcacaacctccggtagctcttgatccag

SEQ ID NO: 52300 - DNA, 122 bp, Homo sapiens
tccttgggggacaggctaggctgaaggtggtggctggggctgtccacctgcccagcctcccggggtcagtatgcagggctgtggcagaacaatgctccacgacgcttaggtgtgcctggggg

SEQ ID NO: 52301 - DNA, 122 bp, Homo sapiens
catgtggtggttacaggcaaacccacaatgccacacaggacaccgaccaacaactgaaaacggtgacagctgcccttacccgcagctccccagcgtagccctcccccatcgcagccagaccg

SEQ ID NO: 52302 - DNA, 122 bp, Homo sapiens
ccaggtagcctcggaagggatcacctgctggatgggtgtgagctcctcagggtggggcgccgaaaccctcatggctcctgaggtagagccggcctccttggtaacacatgggactgggactt

SEQ ID NO: 52303 - DNA, 122 bp, Homo sapiens
aatggcctttcaacttctccagaaaggaggtgacataaatttgaacaactgttcaaatttcgcatcctgcataggaggtttagggcagacaacatggtctgtcctctgtaataaactaaggc

SEQ ID NO: 52304 - DNA, 122 bp, Homo sapiens
ctgaggccatcagccctgatgggtataacttcaaacaaagataattgcgtaaccttggctcgtgtctttttccccactctatggcaatggggcttctgtggcaataattccacctctagaca

SEQ ID NO: 52305 - DNA, 122 bp, Homo sapiens
tggttgaactcaggtctggcacagagaagtaagctaggtcttcaggaacttcaacaacatcgcctcaacctttgttttctcttatctcccgcctccttttcaggaattcttcactccagtga

SEQ ID NO: 52306 - DNA, 122 bp, Homo sapiens
tgggtcaccaggggctgggccagtgggcaatgcatggttgaccctgggtagcagccagctcggagtcttagctacgcatcgtggaatgcaaacttcctcaccagactcctcctggagcctgg

SEQ ID NO: 52307 - DNA, 122 bp, Homo sapiens
ctgttgtcaaagctgcactttaatgtgacagctattggccatgtatggctactgggtgtccggaatgtggctggtcagaactgcgatgtgctagaaaggtaaaatacagagttaaagattta

SEQ ID NO: 52308 - DNA, 122 bp, Homo sapiens
gccctgagcccttctggggcaacttcctgccgtctcagggcacttggcgccacctagtgacgggcgggggcaccagagggcctggtaggggcagggtggggtgagctgggggccctggggca

SEQ ID NO: 52309 - DNA, 122 bp, Homo sapiens
gcgtgaatatgacctcagcggcggccgcgcgctccctcccgccctctcagctccgggctccggtttctaggactgcctggagaagtgtgtcttgtgcacagctctggaatgcatttggccgg

SEQ ID NO: 52310 - DNA, 122 bp, Homo sapiens
gtctgcagccgggccgctgagcacaatccgctgtggttaatgattaatcgctgaccaccccgcctcccgcagctcgggagagggtgctctgggaatgtggaccggggctctcaagtgccggc

SEQ ID NO: 52311 - DNA, 122 bp, Homo sapiens
ttgaaactggtatttgggttttccacgttggacaagtgcggctcggcggccagcggagcgcgccccttcccgctgcccgctccgctcctctcttctacccagcccagtgggcgagtgggcag

SEQ ID NO: 52312 - DNA, 122 bp, Homo sapiens
tttccttccttccttcccttttctttctttctctcattagattggaattgcgtgcacaaacgtgtttttatgtgttttcaggagaaagaatgattcattaactttaaaaaatcttcatgggt

SEQ ID NO: 52313 - DNA, 122 bp, Homo sapiens
aaagaaagcctaccttccctgaaaccattctgtgaccagaaatgggagtagttaaagctccgtgactacatcattctctgatcggttactttcattcaatgttataacactccttgctgtaa

SEQ ID NO: 52314 - DNA, 122 bp, Homo sapiens
gatgtgagatggacttgataacgcttaataatgttgtatgttgtatacatttgtgactgacgactgactttttaagactactgtttgcgagatattttgagatttttttccattaaagaaaa

SEQ ID NO: 52315 - DNA, 122 bp, Homo sapiens
ttggggtattcctggtcagtctcgtggttgggttggggtattcctggtcagtctcgtggccgggttggggtattcctggtcagtctcgtggccgggttggggtattcctggtcagtctcgcg

SEQ ID NO: 52316 - DNA, 122 bp, Homo sapiens
aggagtgggctaaccgcgtttcccccgcccggcaggtggtgatcgagtcggacctgtacacgcaccagcccctggagctgctgccccaccgcggagaccgcagggaccctggcgaccgccgc

SEQ ID NO: 52317 - DNA, 122 bp, Homo sapiens
gcagaggagccccgcacaccttagacgttctgagctggaacagtgaaagagcctcagcaacgaggaccaagagcctgccacatcagggtaaatgaaaggaatacatgtttcaaaaacaaaaa

SEQ ID NO: 52318 - DNA, 122 bp, Homo sapiens
ttttgtatcagaacatcctgtcccatccctcaagatctgttgcgcaaaatgtaggcccatcgggaggaagaaagttgaggagaggggtgatttgccttgctggcaacttattgacatgtctt

SEQ ID NO: 52319 - DNA, 122 bp, Homo sapiens
ccgagcgggacccgggacaagcgcgggacgccgcggggaacggacgggaacgcgcgtggccgccccacagcgggccttcgacacctcctgacacgtcctgcgggtgcccggtcctcagttgg

SEQ ID NO: 52320 - DNA, 122 bp, Homo sapiens
gatgtgaacttgaagctcatgctgtctgctgtgctgtgagtaataaacagctacatcattcgggtgtgttgtctcctcactgactgaatctatggaagcctggcaagggcaactggcagctg

SEQ ID NO: 52321 - DNA, 122 bp, Homo sapiens
gtggacatacctgcagctgaaagatgtcagctcccctcccaatgcctgagcaagctccagcgtgccctcaggaaaagccctaagtccaggtcacagatcccagcctgcaggtgattcccatg

SEQ ID NO: 52322 - DNA, 122 bp, Homo sapiens
tgcctgcccacaactgctctgaaagacacccatattccagatactagaaacactctgctgcgactggtacccgacaaaccaacaatgagcaatgagaagctgaagtttaacatgttagccaa

SEQ ID NO: 52323 - DNA, 122 bp, Homo sapiens
tgaacctagaggacagagtgatggaaattgatgactgtgaggtggcaaaatcaggactagcgttagtgaacgccccgccccgtgtctgtggccacatgcagttagcgccatttgactcttgt

SEQ ID NO: 52324 - DNA, 122 bp, Homo sapiens
atttccaacattgttttaaaacaagtacttcttttacaggcttgaaaaatctcaaataaacgctaagaaaagggagtaggaagaacaaggagttgagcccttgaaagatgacagtggtcttc

SEQ ID NO: 52325 - DNA, 122 bp, Homo sapiens
agtctgaccagcaggttcctcctgaaactatttataaccagatgtgcctcctccccgctccgttccttcctcctgccccacacaggcttcaacaaatcccttcaaatctgtttgatcaatag

SEQ ID NO: 52326 - DNA, 122 bp, Homo sapiens
ttattgactgaacttggccaagtcgcttaacctctccaaacctgagtttcatcatcgtgccgggaggcagcagcttgcagtaatatcttaggctatggagtatgcatggtagcaggatgaca

SEQ ID NO: 52327 - DNA, 122 bp, Homo sapiens
actttcaaattcaaggatcccaagctagaccagcagaacaggaattctgggagtggagcccggcaatttgtgttttagcaagcccccaggctgattctgatgcatcttaaggttggagaagc

SEQ ID NO: 52328 - DNA, 122 bp, Homo sapiens
cgctgcaagtctaatgatccagaggctgaggtttcggccgctgtacactcagcagccccgcgctcttgccggccgacaccacagtgtgggaatcgagaatatcggcttcggcttggaattta

SEQ ID NO: 52329 - DNA, 122 bp, Homo sapiens
tttggatgactaggagttaaaataatgacaggtgaaaaatccaagatggcgtttgtataccgcttttaagagcaatccacagcagattcaagttttgtgaggcctgaaactcatgcaatttg

SEQ ID NO: 52330 - DNA, 122 bp, Homo sapiens
aatgccagatactgagaaaatggagtgcatgggaggtgtgggatttgcagtttaggctctcgtcatcaaagcgatgtgatccctgggatgaggcatggggttaacaacaaggcacaggagat

SEQ ID NO: 52331 - DNA, 122 bp, Homo sapiens
cctcaccctgtgaaggcatcccttcccgtcactgtgtcggtccctgtggttttcgctgcccgtgtcccctgtgctgctgctccttgctgctggcctctggctgtgtcaccagctctggagtg

SEQ ID NO: 52332 - DNA, 122 bp, Homo sapiens
ttgcttcagagtaattcattgattgggttgtggggggtgggtgcatagatgaaacaaggccggctttaagttggcaactgttgaagctggatgatgggtgcataggggtttactgacaactg

SEQ ID NO: 52333 - DNA, 122 bp, Homo sapiens
gttagggtttggtgacaggggctttcacctgcggcacgatgggttttatcagtccacttgcgggatatgcacgccgtccctcttactgggttggtaagtgtccaggtcgacgggcgttcctg

SEQ ID NO: 52334 - DNA, 122 bp, Homo sapiens
tctggttgggggtgtggtctgtggctacagaaactttcaatagctccattcagtgggggccgggcaggaatgctgagctggccggcagggcctgagtcagcagctgggggagcttggcgctg

SEQ ID NO: 52335 - DNA, 122 bp, Homo sapiens
gtccaggagaggcccacggagttctgggtcacggtggtcacctgcagctcctcccccagacggggttttgggggacgctttgttccagtatcatccatagcactccgggcttctgagatgga

SEQ ID NO: 52336 - DNA, 122 bp, Homo sapiens
ttcaaaagacacaaaaggaaacaacgggagacattcaacgaggacagtggtttcctccgacgaggggaatggaaagcctggcgctgggagagctgcgctcttgaccctcctttccctctaac

SEQ ID NO: 52337 - DNA, 122 bp, Homo sapiens
gcccaacggcattaaatgaacaagagaaaaatgaagtcacacctacagagctagtgcaaacgctatcaggagcggaaatgtcacatgtatcagctgaggaaaatcccctctgaaaataacca

SEQ ID NO: 52338 - DNA, 122 bp, Homo sapiens
ggctccggcggcgaggggcgggcacacctgtctcggagcttcgggagagggggcgggagtcgggtgacaaagctattgccgagaggtttcaggaactgtcagtcctaatccaacgttcctat

SEQ ID NO: 52339 - DNA, 122 bp, Homo sapiens
tgccagcgcgctgctccttccagccgctacagttcagcaccaagccgtcccccatccccccgccacacctcaataaaaccctgagaggatgggcatgttgtaaggaattggtggtgggggaa

SEQ ID NO: 52340 - DNA, 122 bp, Homo sapiens
gcggggtggggggctgttggtgcgggagcgcctgcgccgctgtcgctgtagaaggtcgagcggtcacttgttccttcgttcattcattcactcatccatccatttgtttgttcactcattcc

SEQ ID NO: 52341 - DNA, 122 bp, Homo sapiens
ctggtcgggcaaaagaaggccagggcctccctccctccccacgtcgggtctcctctggtccggtccctgaacacacacacgtgcgcacccacagctgcccaatgcggaagagcccttgggtc

SEQ ID NO: 52342 - DNA, 122 bp, Homo sapiens
aaaaatgcttatgtctaaaagagctcgctggcaagctgcctcttgagtttgttataaaagcgaactgttcacaaaatgatcccatcaaggccctcccataattaacactcaaaactattttt

SEQ ID NO: 52343 - DNA, 122 bp, Homo sapiens
gtaagtgggagtagagtcggtgccacagctaagcttgtgaggcgtgagctgttgaggtgtcggagtgctctccttgtaaagtcattcaatgttccggcctcaggtccaagtccgcgaggatg

SEQ ID NO: 52344 - DNA, 122 bp, Homo sapiens
gaggcctaaaagccagggtgctctgagcagaggtggctctaggacaaggatgacagcctacgggggtgggtggggggagctctgagaggtctgccaagcccccctccccttgggccacacca

SEQ ID NO: 52345 - DNA, 122 bp, Homo sapiens
caggaagcgagagggcacaagccctgagacccggcccatggccctcggggacaagggcggcggtctctgaggctggaagttcagagacagcgactcctgaagtctccccgcaagccgacaaa

SEQ ID NO: 52346 - DNA, 122 bp, Homo sapiens
gcagaagggcgcggcggtgccaggaagccgccttggaggctccaagattagctcactcagcgcggccaagcgcaggtgcgggggccctcgccgccaccctgcttatctggggacagtcccgg

SEQ ID NO: 52347 - DNA, 122 bp, Homo sapiens
accagccgtttggtaaaagttaaataacgaactttcgttaaaggagctagtcatccaggtcgggtcttgaaggatggtcgatttctccaggaatgaggatctttgaaagcaactcggcgcct

SEQ ID NO: 52348 - DNA, 122 bp, Homo sapiens
ggtgcaaaacaggctgaggatcagggaatattaccccaagggctgattacatgaccatttcggcaacctgcccaatgaaagtaagaatggaatatcctaatagaagaaaatatatattaaat

SEQ ID NO: 52349 - DNA, 122 bp, Homo sapiens
atcaagctttgtcccacgtggtaaataaacttgtttagaaacacctgtaaagcttaaacgcgtgctttcttcaacgcgtttggaaactctaacccccttctcttttgtacttttgcttgctg

SEQ ID NO: 52350 - DNA, 122 bp, Homo sapiens
tgggtggagagttctgcagatgtctgtcctcccgggcacgtgaaaagaacctgcatcctgcgattgctgggtggcatgttctgcagatgcctgtcctcccgggcacgtgagaagaacgtgcg

SEQ ID NO: 52351 - DNA, 122 bp, Homo sapiens
cagccaagccggagaggaggcgagcagcagggcctggtggcgagagcgcggctgtcactgcgcccgagcatcccagagctttccgagcggacgagccggccgtgccgggcatccccagcctc

SEQ ID NO: 52352 - DNA, 122 bp, Homo sapiens
cgttaagggagcgcggaagggcgggacaggccgtggggcggggcctgggtggggcggagccggtgggggtggggaaaggggcgtaaccgggagggaccctccgaggcggagcggcgcagggg

SEQ ID NO: 52353 - DNA, 122 bp, Homo sapiens
ggggccccgcccgcggctagggaggcggccgccctggcccgagcctgctgcccacggccgcggcactcagctcgcactccttcagcccgggaggccgggccagcactgccacatgccggtga

SEQ ID NO: 52354 - DNA, 122 bp, Homo sapiens
ccctcgctcctcactttaaggagggtctgagttttacttaggacttccctccaggggcagcgtgcgagaggctttgtcagaaatcgaacgcgttgtcatcagaaagcacagttccgaagtgc

SEQ ID NO: 52355 - DNA, 122 bp, Homo sapiens
cgcactgccagcgagacacggagcgagggttcagagtatgaggaaatccccaagcggcgccggcagcggggctcagaaacaggcagcgagacccatgagagtgatctggctccttcagacaa

SEQ ID NO: 52356 - DNA, 122 bp, Homo sapiens
aggtctagggccaagcagcaacctggggcaccggtattcacagctcctccccagcctctgcgcctaaaaagaggacagaggcctcagagtcagcttctgcccagaggatccccagccactac

SEQ ID NO: 52357 - DNA, 122 bp, Homo sapiens
ggaggaaaagttaaatattaaatttgaactcaattgaacgtggacacaatggtcaagtcccgtaacaggttgcatgagccccttgaggcattcattcatccagcactgttacagataactct

SEQ ID NO: 52358 - DNA, 122 bp, Homo sapiens
caacagttaatattctgacataccctgtatatccaataatcctctgtccatctgatagcccgcttcatattataagaagagagaaattgcaaatatttgctcctaagctcttgtgataggca

SEQ ID NO: 52359 - DNA, 122 bp, Homo sapiens
cggcggcggcggcggaggcggccgggtcctgccgcgggcagcgcgcgctgagcctgcgagcgcccgtcggctcctcttggcagccgctgaatgtggtgcagaaggagcccagctcgcgcccg

SEQ ID NO: 52360 - DNA, 122 bp, Homo sapiens
tcgcggtcgtccttggttatcgtgagcgtccgcgagtctctgggaggccaagcctaggggcgccacagcgcctgcgcgcgtacggcggccggaaggggctagaggcggctccctgggtgaca

SEQ ID NO: 52361 - DNA, 122 bp, Homo sapiens
caagaaaagaagttttactgccacatacctcagctgtcctagaactcaatgcagaggcttcgcttcctttctttccttggattctgagccgggggagcacaatgggggtcttgtgctctggg

SEQ ID NO: 52362 - DNA, 122 bp, Homo sapiens
gcacggggcatggagtacaccctggacctgctgttggaatgtgtgacacagcgtgggcaccggcgggccctggctcgcagggtcagcctgctgcggccactgagccgggtggaaatcctacc

SEQ ID NO: 52363 - DNA, 122 bp, Homo sapiens
gagctctgtgctatctcagccaatcacaagccgggctgtgctcctacaccatccgaagagcgaatcgtgcagagaccgtgtctacgattggcctctccctgacaaggatttaattttgaatt

SEQ ID NO: 52364 - DNA, 122 bp, Homo sapiens
ccttgggaataatgtgtagcataaactgaggcagctgttaagcagttcgaaagctgaaagcgatttaagtctgcccccgcccccccccgccctccgccccgcccccgccctccgccccgcgt

SEQ ID NO: 52365 - DNA, 122 bp, Homo sapiens
ttgctctttttccagcagccttcaggggactcctggctgggcggagtctgtagaggcgcgcggagtcctgggagagcgtcagatgtatttcctttcccttttttcgctcgtgtcccgccggg

SEQ ID NO: 52366 - DNA, 122 bp, Homo sapiens
cgtggcggctgcccggcctcctggaacactgtggcagccgccccgcacatgtcccgtgtacgtcacccagggcctcgctgtccggcttccaggatgagatcagaactccctgggggtctcga

SEQ ID NO: 52367 - DNA, 122 bp, Homo sapiens
gtttaagttgagaatctgatagatacaaaggtgaataccagagattataaactaagtcaccgagtcaggtgtctgagagcacacacagctattacttaaaataacataaaattggaatttga

SEQ ID NO: 52368 - DNA, 122 bp, Homo sapiens
ttcgatttatcacaacagaaatctaatctcttcctcttgatttcctcatttctgcttatgcgaaaaaaaaaagcctcctatttacttgaatttaaagcttagtgtcatcattcgttagttat

SEQ ID NO: 52369 - DNA, 122 bp, Homo sapiens
tggaacgagtgtttcctctggctgagggttggagaggaggtgtggtctcagcaggcggcccgtagcctcacagccaggcctggtggtgaggtcaccatgtccaccaaggtgcccatctatct

SEQ ID NO: 52370 - DNA, 122 bp, Homo sapiens
tcggtttgggggccagaggggcacgaggcgagacccgggaccttccaggccccgagcagccgccttccccagtaatcctgcgcgaaaagcacacggccggcttggtgtggacgcccccctgg

SEQ ID NO: 52371 - DNA, 122 bp, Homo sapiens
aaatttccattgctgaacaaaactttcaaaagttttactgcaatatccttgtccgttgtccgttttcattttctgtggcacactcatgactgcaaaacaagataataaatgtcgttttacat

SEQ ID NO: 52372 - DNA, 122 bp, Homo sapiens
gccatctggggttgtaatcatctggatgcatttcaacacccaagcaaaaccgagcagtgacgccagccctgccagggaattgcaaggtagcacagaacatgaattggttaaacttcacacaa

SEQ ID NO: 52373 - DNA, 122 bp, Homo sapiens
ggcctctcacctcactctgcctctctcttgttccccagctgccgcccaggctggcagggccggctgtgtaacgaatgcatcccccacaatggctgtcgccacggcacctgcagcactccctg

SEQ ID NO: 52374 - DNA, 122 bp, Homo sapiens
tttaataaaatcacaagaaaaacaaatgtaattctgtaagccatttcttcgagccgcctgcgctcgcccactccccgctcgctccccgcccggctcctacgtcccaatccttttcttttcgg

SEQ ID NO: 52375 - DNA, 122 bp, Homo sapiens
tttttagtttttgagcaaggggccccttattttcactttgcactaggccaaatatgtagccggtcttgctgctaagagtctaagatcgattgcattccaaattctggaattataagaccctg

SEQ ID NO: 52376 - DNA, 122 bp, Homo sapiens
agatgaaccagacgctgcctgtgcaggtctgacaccggctcccacggggaccctgaggaccgtgcagggatgccaagcagccggctggactttcggactcttggacttttggatgcctggcc

SEQ ID NO: 52377 - DNA, 122 bp, Homo sapiens
cgagtgaagaactccccgtttcctagatgccagctcctgagctcacgagcacgtccagagcggaggacactcgggacaccggggtccagctccggaaacggaaaattccacaagcccgtcac

SEQ ID NO: 52378 - DNA, 122 bp, Homo sapiens
agactcacaggtcataaggttgtttgtctccaaagcttgtttatgttgggccctggtctccggccactcgcatccgcccacacacactctaaccgctcctcccagcagagaagcacagggtc

SEQ ID NO: 52379 - DNA, 122 bp, Homo sapiens
ggaggctgaggcacaagaatcgctttaactcagaaggtggagattgcagtgagctaagatcgtgccatggagccaagatctccagcctgggtgacagaacgagactccttctcaaaaaaaaa

SEQ ID NO: 52380 - DNA, 122 bp, Homo sapiens
ataatcaccatatggaacagaatcggagcctcgcgtccacttcgatgctagaattctgttcgagtgctgatgaccaggggcggctaaacaccatgccctgccatctctgggtcttagagtca

SEQ ID NO: 52381 - DNA, 122 bp, Homo sapiens
cgccgggggcatcggcccgggcggcggcggctcgttggcggggtcggcgtcgggaggcggcggcttctttttggggagtatagtcatggctgcactgccgagtaccccccaacaaacccggc

SEQ ID NO: 52382 - DNA, 122 bp, Homo sapiens
gcctgcacctgtgcctggagagcatcgaccccgcctcccaggccttgagcccctttgcggcgcagccccagccttgcgcggcctgggctttgcggccaccacaatggaaatctacggggaaa

SEQ ID NO: 52383 - DNA, 122 bp, Homo sapiens
aaaccaggactatacctggtgctcatccttgactgctggttgacaatggtgaagacaaaacgcagggtacattaatctgtgaattgcttcccctaaaccatgctgatgctgtggtgtttgga

SEQ ID NO: 52384 - DNA, 122 bp, Homo sapiens
ttcagggacaaaaccacacactgacctctattttctccagatacacaagaagggcctcaacgttacacttccgtaaactgctcctacttctggagtcctcgcacgggtttatggtccaccta

SEQ ID NO: 52385 - DNA, 122 bp, Homo sapiens
gctgctccccgaccaggccgagtactctattgcccgcatggtgccctaccagggccctgacgccgtgcccggtgtcctcgactacaagtcttcctccacagccctgtatggcgagagcgacc

SEQ ID NO: 52386 - DNA, 122 bp, Homo sapiens
cctccagtcccgcagagtttccgggtgtcctcagccacaggaggtgaggctggagtgggccggcccattgcccggtccccagagagagccagactccccaggaactaatttcttaagagacc

SEQ ID NO: 52387 - DNA, 122 bp, Homo sapiens
ccacctggcaggtgtaccaaaagcccacccgactgtccctgcacggtagagaggcaggagcgcctctccctgcacggatggtgccccggaggctaccaggggcggccgaggacactgatgct

SEQ ID NO: 52388 - DNA, 122 bp, Homo sapiens
accttgccctgccttccaggccccactggaattacactattttcaagtgaagaatttccccgggctgaagtgaactgcctgcttcctgagctctcatgcccctgtcctaggattctgtgtgc

SEQ ID NO: 52389 - DNA, 122 bp, Homo sapiens
aatatgctctaattttggtaaagaagtcaatattcactttatcgcttttggcaacacaggcgaaggaggggcaaaagtctgggtgggccaatattaaataggaacaaatagcagatctgcct

SEQ ID NO: 52390 - DNA, 122 bp, Homo sapiens
aaaagaatgctgcattataaccaccagggaaatgataaaaagttcatgttcacgatcgcccggccacatgaccggcgccggccaatcgctggattcaaccactcataaacttctatcacaaa

SEQ ID NO: 52391 - DNA, 122 bp, Homo sapiens
cacacacggagccagtccctgtcccagctctgccccagctctgccgccgccgctctgctgcgtgactccaggaacccccagcctcgctgaatccatgtccgcagaagagaaaagcctgccag

SEQ ID NO: 52392 - DNA, 122 bp, Homo sapiens
cctgtgctttgcttacacttagatccgtccattacgctcgtttcctggagctttgggtgccgagctgggcacccagcatttcctgagggcctcccacgtgccagcacccgggtggcaggaac

SEQ ID NO: 52393 - DNA, 122 bp, Homo sapiens
tatgccacatcacctactatttcagcaagggcccttgctctcaatgagcttgcaatctagcgaggcaacagacatgtaaacaatcaaatttcaatgcagtgcggtctttggagtaatagagc

SEQ ID NO: 52394 - DNA, 122 bp, Homo sapiens
attttttgctttggagataatgttgataagagtggcagacacgtggtctcgtctgttttgcgtctttgcttctgatgaatcatattctggagctccatctaagaatccccatgcccagatta

SEQ ID NO: 52395 - DNA, 122 bp, Homo sapiens
aagagggtgagggcaggccgcgggccgcagggacccggccgtgtcccccgagagcctccccgacccccctggtaggagcgagcccccacgtgctctgctctccggaagtcattggcggctgg

SEQ ID NO: 52396 - DNA, 122 bp, Homo sapiens
caatttgaaaatatttagcgtaatttaaagtgtcaagcttgaaaacaatctaaatacccacgatgaaataaagtcaactataatagaacccttcatcgactggccattgaaaccactacaga

SEQ ID NO: 52397 - DNA, 122 bp, Homo sapiens
aaaacatcagaaatgtattgtctcatggttctggaggctagaagttcaagatcaagttgccggcagggttgggcccttctaaagactgggagcgacactgtttcatgcctctcccctagctt

SEQ ID NO: 52398 - DNA, 122 bp, Homo sapiens
catcagacggagggagggctctgccggctccagagccgggctcagggggaggggtcccggcgggagaaacccagatgttgcagcgccgcacagctgggaacaatcagccgcggaaacttgct

SEQ ID NO: 52399 - DNA, 122 bp, Homo sapiens
tcggctgtccgggagctgggtgcttatgccgctgggccaccaacagagagaggacataggcgcgatgtccacaaagctctggctttaccccaaacccttcctagctggaggaatcttccaat

SEQ ID NO: 52400 - DNA, 122 bp, Homo sapiens
cccgccggcttctgagagccgagcttttgtcagcagcacccatgcagctcagatgagtgccgtctcttttgttcccctcaaggccttaacaggccgggtggacagtggaacggagaagcctg

SEQ ID NO: 52401 - DNA, 122 bp, Homo sapiens
cgcgcccgcgccacccgcgccctctgcgcccgcccccgggaccctggccaaggaggccgccgcctccaacaccaacacgctcaacaggaaaaccacgcctgtgtaggggcgcggcgggggag

SEQ ID NO: 52402 - DNA, 122 bp, Homo sapiens
cccgggagactccctaggcccggacctggggccgaggagggccgggatggcctgagtgcccgcggcgcggcggcgcagcagcgggattgcaccatggggaaccaggatgggaagctgaagag

SEQ ID NO: 52403 - DNA, 122 bp, Homo sapiens
acagtcggtaattgggtaactggaggcggcttctccggccgggcggccccgccaccgcgacgccgagcccctgacgtcacccgattcgccaggaaatgaactttttaataatccgaggaggg

SEQ ID NO: 52404 - DNA, 122 bp, Homo sapiens
gcgcctgaagcacacgaaaagcttagcagctgttaaccactgccattatcatcatgcctacgtggggcccaggtagaatcaagccgacccacatgagtagcggagggggaggcttccaggtc

SEQ ID NO: 52405 - DNA, 122 bp, Homo sapiens
agcattttttcttcagtgaagtgacttggcagccaaaatcgccaacgcccgtctctgtggcgcaatcggttagcgcgttcggctgttaaccgaaaggttggtggttcgatcccacccaggga

SEQ ID NO: 52406 - DNA, 122 bp, Homo sapiens
gtcaaccactccctccaatagcctttaatgtctaaataattactccctgtggccacaatccgacatgatgtcactcccctcctgatttgcatttcatagataacagacagcttgggaattac

SEQ ID NO: 52407 - DNA, 122 bp, Homo sapiens
cctgggcatttttccactaaagctttggctaatcttctcaaaacactctcgtaataagtacgttattattctttagccctccagaaagcaaaatgcctagaacaacccacaaaatggttgcc

SEQ ID NO: 52408 - DNA, 122 bp, Homo sapiens
acgcaaacgcccccatcagtgagcgcagaacgagtcgccatgcataggtgcagtggacgccgctcagcagggagacgggcagggcaggccgtgggtgcgcacagccgcccgggcgactctcc

SEQ ID NO: 52409 - DNA, 122 bp, Homo sapiens
ggctgtgtgtatttaaaggggcaaggaacgcagtcttctgattggtgtgcgtccgctcgccgtgtccatggtaaccagctagcgccctgacccggcccggacctcagctgcggggagactac

SEQ ID NO: 52410 - DNA, 122 bp, Homo sapiens
accacctgggacacctgcttgcgaaagcagaagcctctcatgggcggacgctactcacgccgcccagcaccgcgtggcactgccttgctcagaaccctggcgggagccaggtgcccggtgcc

SEQ ID NO: 52411 - DNA, 122 bp, Homo sapiens
gcaactccaggctgacatttctgcagggcagccatggacgagaacagagcagtggcagcacgcttagaacaggcctcgctcatgcccagcctgcttcacctgttcacacgtcttgcctggct

SEQ ID NO: 52412 - DNA, 122 bp, Homo sapiens
actgcgtgcatgcatgcctccggggtggatggcattccgccaacagggtcactccgatagcgcccggcagcccaagcacccttcctacccttcctgcctccctgaagtccagcattaatccc

SEQ ID NO: 52413 - DNA, 122 bp, Homo sapiens
cactccagcccaggcgacagagcgagactccgtctcaaaaaaagagagaaagtctttaagcgttcttactaggaaagtaaaataatagtatagctgtagctgctgattggttttgaaacttt

SEQ ID NO: 52414 - DNA, 122 bp, Homo sapiens
ccaggccgggaaaaagcccaccatttggcatccctgggccttgggctccgtgtgggagaccggcctgccaggaggacccagggctctgtaagtagatgcatttgggtccaggaggaagcgtg

SEQ ID NO: 52415 - DNA, 122 bp, Homo sapiens
taaggcggcagctccgtgcggcacccaccttggagccccgctcgttaaaaatgatctccacgtctaaaatttttccgaattgctgcagagacagagacaaagagggagtggggcagacagga

SEQ ID NO: 52416 - DNA, 122 bp, Homo sapiens
ctgtggactggagaaaaccgcaaggccacctgcagaaagaaaagaaggccatcgcgcctacgcagctgagcacccatactccgcccgcgcctgcgcaactgggtcccccgacccccacctcc

SEQ ID NO: 52417 - DNA, 122 bp, Homo sapiens
agtactctgagggggctggggagttcagggtggagagctggggcctggtggtggcctccccgtagccagtcatagtccgaggctgcccagggcaggctcagagtggggcctgcgttggggac

SEQ ID NO: 52418 - DNA, 122 bp, Homo sapiens
taaattagaacagggggtgcagtttttcacctggagaactcgcagaggtttaaataagatcgtacattttacgaagaaggcatctgtagcacccttatgaatgctttcccttctgggtgcat

SEQ ID NO: 52419 - DNA, 122 bp, Homo sapiens
ccttccctaggcctcacctgccctttggagtctgtgagctgagttatggtgtagggactccgtccttgatattctcatagagatgccctcgtcctcctggatttcagggtggaaggaatggg

SEQ ID NO: 52420 - DNA, 122 bp, Homo sapiens
ctaactagctccttatttggagctgatttagtcaccattactgcagttctgcagcagaggcgccgggtgccgctcttggctagtgctgtgcaaaatattggctcctcccgctgcagccagct

SEQ ID NO: 52421 - DNA, 122 bp, Homo sapiens
tttcattccacctgctgacataacagtggaggaatcattttgttgcataagactctgtcacgtcagaggctgaagtgacagcaactaagggaagcaaatcttcccaaagcaggatgtggaga

SEQ ID NO: 52422 - DNA, 122 bp, Homo sapiens
cccatccccattctcatgcatccccttgcatgtgtgaatcctggttggagtctctcagctcgttgctgtcctcatcttcatcacaagtgtcatcacatgtggttctcagcatgggaattatt

SEQ ID NO: 52423 - DNA, 122 bp, Homo sapiens
ctcctagcaacgaggctgcggaacctctgcagactccaagggttttatagcgtccggtagcgacacggagccggctcccccttttccagccttcctccccatctcccattctccatccccca

SEQ ID NO: 52424 - DNA, 122 bp, Homo sapiens
agtgagaagacatcgcagcaagagcggaagattgagatcatcagagagaagagctcaccccggagatggagcagagaactcagggcaccgcacagaaatggtgatgaaacaagacagtgtgg

SEQ ID NO: 52425 - DNA, 122 bp, Homo sapiens
cagtcccgggggtgggcgggcggcacagacggctgagccggggcaaggactcgcgggaatcgcgccgcccgggtcgctgccggagctcgccggtcgcccctgcgctgcgcggaccgcagcca

SEQ ID NO: 52426 - DNA, 122 bp, Homo sapiens
cggacgcccggtctgtctgaggtcgccgggtctgtggacgcggatccgaatcggagcttccgagggtgatctgagatccaaagtcaggagtcttctgcatcctgccctttgtcagcgctggt

SEQ ID NO: 52427 - DNA, 122 bp, Homo sapiens
tgcccattgtaccaaaaggcacaaatatttatatcagaacagtgcctattagccctgacacgattcttaaccagagactgtgatctgaaaggtgttcattttcatgaatggggtatgttcgt

SEQ ID NO: 52428 - DNA, 122 bp, Homo sapiens
ctctcacatgctttgcatttttgtttagattgaaggacagcaaaataagtgccaataaagcgttcttgagaaaactaatgagaaatttggtcattaatagcagaagctaagcatgagatggg

SEQ ID NO: 52429 - DNA, 122 bp, Homo sapiens
tcctaagggcgatttcctccctcccctttttccgcccttcctcctcccatatttgctgagcgcctcttgtgtgccttattctgtgctaggtgctgggaatacaaagatgagctacacaacat

SEQ ID NO: 52430 - DNA, 122 bp, Homo sapiens
agagtgctgggatctcaggcctgagtcgctgcgcccagcctactttttctatgtactgttcgtttgctggcaactactatgtttctgaggctgacctcgaaatcctagcctcaagcgctcct

SEQ ID NO: 52431 - DNA, 122 bp, Homo sapiens
cgagctcctccatggcgctgctgttctcgaccgccgccccagaggaggaggccgaggcctcggccgttactcgaagtcccctacccagcagcagcggcagcagcagcagcagccgccgcggc

SEQ ID NO: 52432 - DNA, 122 bp, Homo sapiens
cccaaggcccaaaaagagaaaggacaggaaaatataagcaggtggagtttcagggattgacgacaaggcttttcagctgatgacccaggtcccacaaagataaagctcctaagggggcgtgg

SEQ ID NO: 52433 - DNA, 122 bp, Homo sapiens
cctcctccgtgtggggcagctgctggctgggctgcctgttgagtcagccttcttccctcacggctcttctcccggtccctgaaactcggctgccaggggagctggagccacctgcgaaggtg

SEQ ID NO: 52434 - DNA, 122 bp, Homo sapiens
agtgttgtggggctgaaacagtgccggtttttctggttaaatcatgcggtggggaggggacgccaacagggtgagttggaggctcttccctcggcaggcagactcggacagcaccggggggt

SEQ ID NO: 52435 - DNA, 122 bp, Homo sapiens
cctaatccgcagggcggcctgggggtcaggcggacccctcccgtgcccggccaaccttggcgcttgggagagcagggctatgccggcccgggcattcctccattcaacccagctgcctcgga

SEQ ID NO: 52436 - DNA, 122 bp, Homo sapiens
ctaagcccctcactgccccaggcgggtggggctggccggccaatccgagtgcggggtccgcgagccctcgcccacgcggaactcccgctggcccgcaagcaccgtccgcaggcccggttccc

SEQ ID NO: 52437 - DNA, 122 bp, Homo sapiens
ggaaacagtgttggttatcaggggacaggggtaaccggggtaaccatcaggcatcctctgcggacacagtttgggaaacattgcctgctacttagtgagatgggacaagtgtggtcattatg

SEQ ID NO: 52438 - DNA, 122 bp, Homo sapiens
gtatccatgtttatcttttctttttttccctttgggtaattgttgtttacaatttcttctcgcaggatgatgagctccttgaggtcaggaattttgtttagtttgccttgggcctgccactt

SEQ ID NO: 52439 - DNA, 122 bp, Homo sapiens
acatcccgaactgcaggtctccaagactcttcctacgcggatgggtggggcggccaggcccggcggccgaagcgtcagtgacaacaccaggcggtccggaatgcacccgagaagcctcgcgc

SEQ ID NO: 52440 - DNA, 122 bp, Homo sapiens
cgcaggcgcagtagcaaagggctgtgggatgggctggctggcttgagtattgagcatgcgcgctagcccttcccaattttttttttaagattgtgtacgtggaacaagaaatcgtttgttta

SEQ ID NO: 52441 - DNA, 122 bp, Homo sapiens
ttcctctgtgtagatgcagacccatgtcagaatgcactgcttgattagaggggcatgggccggatctgagctcggatccactttctcagtcagatgcctttgcacgggcacagcctgctcca

SEQ ID NO: 52442 - DNA, 122 bp, Homo sapiens
accctgagcacacacttagccagtgtacacacagatccccgtgtgcatacaccgtaccatcgcagtgtattcagatcttgtctatacacacatctctccagtgtacactagcacccttgcac

SEQ ID NO: 52443 - DNA, 122 bp, Homo sapiens
agttacatagccagggagttctctgcagggccaaggttagaatcaggcctcctcactccccgcaaggcctgtccaccacactggctgcttcaaatccaacgttgcctccagggggcgctata

SEQ ID NO: 52444 - DNA, 122 bp, Homo sapiens
cctttgctaaagtgatcagatagtcctgtgaagcagctgccagccaggtggacagggcagcggtgctgggatgccgcccgtgggctcctcggacatcctgaggccccgccctacttctgtat

SEQ ID NO: 52445 - DNA, 122 bp, Homo sapiens
tcgcgcggaggagctgcccaggaggcggcggcctgagcggcaagagtcagtcgatcaatccgaggaggctgcgcggaggcggcggccggagcggcaggagtcagcggagcacgaggcggcac

SEQ ID NO: 52446 - DNA, 122 bp, Homo sapiens
cgcggcctcggtggtctcgctggcgctgttgtggctgctggggctgccgtggacctggagcgcggcagcggcgctcggcgtgtacgtgggcagcggcggctggcgcttcctgcgcatcgtct

SEQ ID NO: 52447 - DNA, 122 bp, Homo sapiens
gcgtgtcctttctgggaggggccttgggccatgcacctgaggccaccagctcgcccacgccgcccgctcacctgcacgcggaggttcatttaatccgtgcgtctatgcagcgcctaggccta

SEQ ID NO: 52448 - DNA, 122 bp, Homo sapiens
ctcagggcagagctctgagcgcagacagcagacagcagacagcagacagcaaggcacatgcgcaataatggacatgcccagcaacggacatgcatagggatgcagcttgtgttacgtaggct

SEQ ID NO: 52449 - DNA, 122 bp, Homo sapiens
ggcgtgaaaccggatgatgggagccgcttgttggcttagatattccttcaactagaatgacgtatcttgcagcactcggctgaatttttttctttttcttttttttttttgagacggagtct

SEQ ID NO: 52450 - DNA, 122 bp, Homo sapiens
cctcctgtgagtgccagaccagcccctggatttggcttgtgctgtgtgcttttataccctcgagcacagattctgtcactcttcttggtatccctggcatgcaaacactggaagaaagtaag

SEQ ID NO: 52451 - DNA, 122 bp, Homo sapiens
ggaaggcggccatgactacgccaggctccaacccgcgcaaatttgactgtccgcggggcccgccctcttccagaagaggttgctttccattggattttttgatacgtcagtcataagcaatg

SEQ ID NO: 52452 - DNA, 122 bp, Homo sapiens
catcaccacggtgctgaccatgaccaccctgagcaccatcgccaggaagtccttgccacgcgtgtcctacgtgaccgccatggacctttttgtgaccgtgtgcttcctgtttgtcttcgccg

SEQ ID NO: 52453 - DNA, 122 bp, Homo sapiens
cacccgcctccccagacagcagcctgggcgcttcttctctgcaggactgtgtgtgctgtgcggtcctggaggcctggccgggtttgctccctggcagtgaaaggcagaagcaggtagatgct

SEQ ID NO: 52454 - DNA, 122 bp, Homo sapiens
tttctctccggggaggccggccacccctgggtcaccctgcagagagaaccacgggtcagacgcgcggtggcggcggggacgcagagcagggttgggggtcgctgggaacaggggtgctggaa

SEQ ID NO: 52455 - DNA, 122 bp, Homo sapiens
aagagtacaataaaagaagcatctgcaacttaagcctcccacagtcctaagcctgatatgcgcaaagcaaagcctctttcccgcaaactaaattccatccatttgagctttcagagatcgat

SEQ ID NO: 52456 - DNA, 122 bp, Homo sapiens
gaagagctggaacgtgtgtacaaagaagggtcccacgctgcggggtcgcaggaaagtgcccgggagaacagtctgtggtagggagggacgcttagtgcaagggggaagctgcgcaggcggcg

SEQ ID NO: 52457 - DNA, 122 bp, Homo sapiens
gcctgctctgctgctggtctgggcgtggcccggggaccctcgggagctggcctggaaagtcgtggctgccttgggtgtggtccctcgggtccagtctcgcaggcgggctccaggtggactgt

SEQ ID NO: 52458 - DNA, 122 bp, Homo sapiens
gagttaagtagtgctacctcttcagaggggtcaccatctcaggctaggtgcggtggctcacgcctgtaatcccagcactttgggaggctgaggcaggaggatcacctgagatcaggagttcg

SEQ ID NO: 52459 - DNA, 122 bp, Homo sapiens
caagcttggctattccgagcacagaaatatcacattatagtaactaccctgtggcaaaggcgatttgagagcagtgcaaactcttccctttttctctccactagcatccagactgctaaata

SEQ ID NO: 52460 - DNA, 122 bp, Homo sapiens
aacgctaaaatcctccgaatgaaataaaacgaaaacatactgctaaagaatagccccaaccgttctgagtcccagcgcagaggaggccccgcggcttggccctggcggtctcctccgccccg

SEQ ID NO: 52461 - DNA, 122 bp, Homo sapiens
actttccctgtgtcctcagccagttatgtcactctacaccctgcttatttcgccccccaccgccccgcccagtcctccgtgatgatttccggcagtctcctggaaacgtggtggtggcagtg

SEQ ID NO: 52462 - DNA, 122 bp, Homo sapiens
cgcaccctccctggccatttccgtaccaatgctgcagactgtgaattcccgaaagtgcctcggcctttcgcgctcagctccgcttagctccacgaagctccgttccagggctcccgccgccg

SEQ ID NO: 52463 - DNA, 122 bp, Homo sapiens
atatttagatcataaccaatttttacctgattcccacataaagcttttagggtgtgggttcgcctagctttatgaaaacagagagacaattatggttccttactagagtcttcatccttaaa

SEQ ID NO: 52464 - DNA, 122 bp, Homo sapiens
cgcgggatgtagaaggagttgcactggccgtagcagaagcggttgaggatggtgcggctccggcagccctcctcgctcaccgtctgccgcagcggctgcgtcttgcaccagtcactcttgag

SEQ ID NO: 52465 - DNA, 122 bp, Homo sapiens
tcagcgcccaggctccgccgcgaccggcgaccggcgactcgcgacccgcgacccgcgacccgcagctgccaccgcgcctgcggattggctacgaacatcagcagggcccccctgggggcggg

SEQ ID NO: 52466 - DNA, 122 bp, Homo sapiens
taatgcgattcaaatttctcattttccaagaacgctcccttgctgaagcttgcaagggcacggtactcccctctccttgaccctgaaacgtgcagcaagtagataacctcctgatccctgac

SEQ ID NO: 52467 - DNA, 122 bp, Homo sapiens
acgcggggcaccgcagcacccgcctgagcggggcgcgcagctgctcctggtgttgtgccgcgcgtctgcgctcctcacgcagctgctgcggctgcagctgctcctgcaacagcagcacgccc

SEQ ID NO: 52468 - DNA, 122 bp, Homo sapiens
gcccctcccctgacctccactcagatagctgatttaagcctcaatgcagaagtgtctgtccgtccctgatagatggtatctttcggaattttgtgttgcagcccgtagggattgttccaaac

SEQ ID NO: 52469 - DNA, 122 bp, Homo sapiens
ttcctatcagggctgttttgcaaggcatgcaaaagcacggtggaaacacagaagctgcagcgaatataaacttgtgtgagtctcctctcctgtttcagaaaacttcccaaccttgcaacacc

SEQ ID NO: 52470 - DNA, 122 bp, Homo sapiens
tcgaccaggccgaccagagtcccaaggcctgccgggtgggtccaggcccggaaggccaggcggggccctgtcggggcctgggcggggctggcggaggggccgggccgccccttccagcgagg

SEQ ID NO: 52471 - DNA, 122 bp, Homo sapiens
gtttcccttccaagaggatcccggcgaagccgagcccgggaaccaggaagttccccggcgcgacacctcctgccgccgctatggaaacggcccccgcctcccagggcggctcgcccgggacc

SEQ ID NO: 52472 - DNA, 122 bp, Homo sapiens
tggctgggaggttcttccgggatcaatttgctccatgctacagaggggacttgctcagggcgacgtggctaattggaggcacggacaatctccgaactcagacctctgacggatgccgtcct

SEQ ID NO: 52473 - DNA, 122 bp, Homo sapiens
gggcccaaggtcaccgcgcgaccggcagatgcgtgctgcaggccccggccacatgagcagcgctacggacgcgactgccccggccttggatatgccagatcgagtgtccacccgtccgtggg

SEQ ID NO: 52474 - DNA, 122 bp, Homo sapiens
gccctctggccagatgctgcaccctccacccagcctccaggtgagttctcgtcatacccacggtgccccaccctccttggcatccaggtgatgcatctacctgaggttccgaatccaggggg

SEQ ID NO: 52475 - DNA, 122 bp, Homo sapiens
ggaagaaggaagggctagaggttaaaggttttgtcatcagtgtaaacctatggtcctagtcgcctttatatagagcagttgtgattacggagtccagaacataaagctcactggagtgatat

SEQ ID NO: 52476 - DNA, 122 bp, Homo sapiens
agaacacatttcaagttattttttcttcctcttgctcctctgaataagctgagattcctgcggccatgcctggaggaaggtggcaagtgttaaaaatgggatgacttgttgcccttagttcc

SEQ ID NO: 52477 - DNA, 122 bp, Homo sapiens
gagggcgggggtctaagggcctgcaacaatgagatctgtcgccttggctaggactggcgccgagaggcgataggtctcgggagagcctggcgcagggtgtgggagattaggaatcccaggtc

SEQ ID NO: 52478 - DNA, 122 bp, Homo sapiens
aagacaagaggagcaggaagggcagcaaagttttgttgaagtagccctagatctcactaccggcccccagccaacttgaattgcagcaggagaaaattttggcagcttttcctcggaggcag

SEQ ID NO: 52479 - DNA, 122 bp, Homo sapiens
attttgcaattttaatgtaatagttgtcaatttctttaacttcttgtccagcaagcgttgcgagtacagctcagtataagacatttgatttagaaaaacttaagtcagggtaggaggttttt

SEQ ID NO: 52480 - DNA, 122 bp, Homo sapiens
tcctgtaggggagcacgggtcccgtctttcttgtccaatttctcagccggggcactgagacgtctttgttccctcaccctaagcctggtctgaagtctgcctcctgcaatgcaagctctgtt

SEQ ID NO: 52481 - DNA, 122 bp, Homo sapiens
agggccagggctcagtgtgcaccctgagaccagctcagccagcttctaatcttagcccagcgggagaggagccagcgggagccacggctcccagcccacggcacctgccgtctagagagcca

SEQ ID NO: 52482 - DNA, 122 bp, Homo sapiens
ccatcccaccttctacacagaataagaagcccactggagcccctatgcgggccctgctcccgctccccaccccgcttcccccccacttcccccctccccccgcttccccccctcccgcaccc

SEQ ID NO: 52483 - DNA, 122 bp, Homo sapiens
tctggcctcagcagccggcccacagcgtgttacaaacacgtgtactttcccagtccctgccgctcgtcttcctggcactgtggagcctcgagtcctcagcccgccaggccacctgctggatt

SEQ ID NO: 52484 - DNA, 122 bp, Homo sapiens
gtgatcggtctttttacaaacacaaacgctgctgatttcttatcaaatgtaaaaccggcccggctctttcttaaatggttaccacgagcatgaaattgacattgtgaatcacatgtgacacc

SEQ ID NO: 52485 - DNA, 122 bp, Homo sapiens
ccagcagccactagctctcccacaaggccgagcgcggccaaagggcagccccgcccgctccgcctcccccagctctattggctagtgcacctgccactcagccgcgcgccggactccggctt

SEQ ID NO: 52486 - DNA, 122 bp, Homo sapiens
agtctcgctctgtcacccaggctggagtgtagtggcgcaatctcggctcactgcaagctccgaaagggccttttatctaatggaacggtattcttgggtatggcctgagatcattctgaagt

SEQ ID NO: 52487 - DNA, 122 bp, Homo sapiens
aagccacgtccccaatccttaccagggggctgatcagtgccgtcgctgttactggtggggcgattaaccgtgtagcggccagagaatgaggtttgcgtattacctgcccatgtatttatacc

SEQ ID NO: 52488 - DNA, 122 bp, Homo sapiens
ccggccaccacaccctcactgactcaccagtggttcacagatgactcaccgtgcccgccccgtggcagccgctgcacttgtaccgcccacgcccatggcatttgtggcattcctgaaagtgc

SEQ ID NO: 52489 - DNA, 122 bp, Homo sapiens
ctgaggaagggtcacaaggatgggaactgtgggagaggagtcccaaataaagagcatctccgaagaactcagaaaattgactgtgaaagaaggaggtttaaccatctgtcaggcctatagag

SEQ ID NO: 52490 - DNA, 122 bp, Homo sapiens
tcaatttcttagtggagcagttacaacagacaaagtgtccctcgtttcttttggagacagcgtctcactccattacccaggctggagtgcagtggcgcgatcttggctcactgcaacctctg

SEQ ID NO: 52491 - DNA, 122 bp, Homo sapiens
ctcactgtaacatggagtgctatcattatcttcatttttcagtagaggaaactgaagcagcgaaggcatcacttgctcaggtcatacagtcagtaagtggcagagccataatttgaatccag

SEQ ID NO: 52492 - DNA, 122 bp, Homo sapiens
ggctgggaggggctgtgggggcctgagctggaaagagtcagcccgactgggggtgtcctgcggtacgtgctgtggagaggggcttcgcggaatcgggcccctaacgggtgggaccccgaggc

SEQ ID NO: 52493 - DNA, 122 bp, Homo sapiens
cctggctgggggccagggaagatctgccgggacctcaggggctgcaggctgccaactgcccgccccagctctggatgccctactcgaacctcagtttcctcacctgccaggaaggacccgta

SEQ ID NO: 52494 - DNA, 122 bp, Homo sapiens
gcacagtctctacaaactccctggtttcttttctgtcagtgaagtcaaatatctacacaacggccctggacaatgctacagggaggacacattaccttaatcatctttctgtcccacttctc

SEQ ID NO: 52495 - DNA, 122 bp, Homo sapiens
acggagggcgacagtaccaggcctgtagcggtggggcttcttcacgccaccggtggctggcgcgcttttgcgagccgccttagtggccagctgcttgcgcggggctttgccgccagtggact

SEQ ID NO: 52496 - DNA, 122 bp, Homo sapiens
tcaaacaagtagaacaagagcatgaataagaggccaagagagagcaggggtcagaaggcacgcaggaacggtcacctggcccggacaggaccaaagaagtgccctgccctcgcccgactccc

SEQ ID NO: 52497 - DNA, 122 bp, Homo sapiens
acaacccatttacaaagtgggcaatggatggggcagacacttctccagagaagacagatgcgtggctgataagcacagggtgaagttcaggaccactggcctcagggtaacgcaaacaaagc

SEQ ID NO: 52498 - DNA, 122 bp, Homo sapiens
ttcaaaagcagctgcactatcttgcattcccaccagcaacacatgagggttccactcctccgtgttcttgccaacattggtctttttgattctggccatccctgcaggtgtgaagtggcatc

SEQ ID NO: 52499 - DNA, 122 bp, Homo sapiens
cagttagagagaggggcgcctcagcctgggctctctaccttaaaaggtgggaagaggccgcgctgggactacaagcgtgcaccagcacagcaagctaatttttgtatttttagtagagacag

SEQ ID NO: 52500 - DNA, 122 bp, Homo sapiens
caaactggggccattatgcattcttagtctttagtatctgagtgtctcattcttgcagtgcggtgtggtgtccagcacataatcctggaaaaatataattacgatacaaataagtcaaacaa

SEQ ID NO: 52501 - DNA, 122 bp, Homo sapiens
tcgcgggcctccctgacgggtctcacacatatgggtggggaagcccgcggggacacaccccgagggggcaggaaaggctctcactcacatgccgtccactttaaccggggagatggggttac

SEQ ID NO: 52502 - DNA, 122 bp, Homo sapiens
ctgaggcccctggaggaaccctgcagagctgcactcactactcagcaatcccaatccacacgtgaagggttaagcaggagtacatttgggtgcagggggcagggcattgttttgggactcag

SEQ ID NO: 52503 - DNA, 122 bp, Homo sapiens
gggcgggctggagtggggctcccctcagtgctgccaggctggggtgcggatggggacaggcggaggcgttcggctaagcctccaggctcggagggccctgtcgccccacccctgactcccgt

SEQ ID NO: 52504 - DNA, 122 bp, Homo sapiens
gccctcaaaagacatggcggcgccttgcgtcacgtccgcgcagttgccccgcctcctctccgcacactccgcctcccttatcggggccgcccgagatcaagatggcggccacaggggcttca

SEQ ID NO: 52505 - DNA, 122 bp, Homo sapiens
cccccacccccgtgggaggccctggtccagctgcagtggagtttcccccgctgtgggaggcgctggtccggctgcagcacagccttgttatcggggtgtttatttttagggaaccaaattta

SEQ ID NO: 52506 - DNA, 122 bp, Homo sapiens
cacacgcgaactgacggctcgctggcgatgctggaggctttcacagcccccctccggacgcgttaagctctcccaggtcccacccctgacaccgtggcacccccagacccactgcgccctcg

SEQ ID NO: 52507 - DNA, 122 bp, Homo sapiens
ctcgctgacttcaagagtgaagccgcggagcctcgcggtgagtgttacagttcttaaaggcggcgtgtccggagtttgttccttctgatgttcagatgtgtccagagtttcttccttccggt

SEQ ID NO: 52508 - DNA, 122 bp, Homo sapiens
gtttcttttttaaccagtcatcaagcgaggctcgcgcgcaggccccgcgttggaaaatggcggggaagctgaaacctctgaatgtggaggcgccagaagctactgaggaggctgaaggtagt

SEQ ID NO: 52509 - DNA, 122 bp, Homo sapiens
gcatgttgacactattcctttattttactttagggtttttaaggtgtgtagatcttaggtcgtaaaacagtggtatattgcattcaaaagcatgttgaggtgagggcaaattggctgtgttt

SEQ ID NO: 52510 - DNA, 122 bp, Homo sapiens
tttctcattttgtaaatctggccaccgtaggaaagacagcagccattcactttacagaaacgtctattttaagaactagctgcttgggggaaggctggatactttaatccttcatcttttct

SEQ ID NO: 52511 - DNA, 122 bp, Homo sapiens
cgctctttacccctttagtcgctctgggtcgcgagggcggctcccaagattccgcaactacgccttcgcgtcctcctggtcgacctcgtatagtggatatcgctaccatcgtcactgctatg

SEQ ID NO: 52512 - DNA, 122 bp, Homo sapiens
ccctgagagttgacaagtgggtcttccctgacatctctcttcctccccgcttgcgcttctcgtacctccctggcttcagccgagctgccccctccgcctggaatacccttcccacactattc

SEQ ID NO: 52513 - DNA, 122 bp, Homo sapiens
tctctggcggtaacaccgtggggagtttctgtgtgagcgttttctctgtagtctctgtgccggtcatagctgtgttcgtgggaagtgtgtggtgctgttggctccacgggccttgcgtcgtg

SEQ ID NO: 52514 - DNA, 122 bp, Homo sapiens
ctgggttttccagacttgccaactcacgatctgttcaactcccagctccaccagcagacacgcagcatcactgtgtgtggttgcagggcacagacacctgcaagtggtcagcatcacccaac

SEQ ID NO: 52515 - DNA, 122 bp, Homo sapiens
gcgtggacgcggggtccctactcacagccacttgatgccatagcacacgccggtctggagcgccagggcgaagagcagcgcctcgcagacctgcggccgcgccctcatcgtcgcgcggcggg

SEQ ID NO: 52516 - DNA, 122 bp, Homo sapiens
accgcgtggagtttggggtgtctgacatcgttctccacgtggctattttcagcgttctcccggggaagtacttggaagagatcgccacacagatgcgcacgcacagcatcaacgcgctgctg

SEQ ID NO: 52517 - DNA, 122 bp, Homo sapiens
cgcagaggcagggccgctctgtgtggatggggctcggggaagctggggatacgcccactacgggcctttctgcagggtccgggtgctgatgacagactcactcctaggggactgacaggcag

SEQ ID NO: 52518 - DNA, 122 bp, Homo sapiens
cgccacgccaccgtcaccttccagccagaaggggacacgtggcgggagcagaaggagcagcgggccgccctcatggtgggcatcctcattggcgtgttcgtgctctgctggatccccttctt

SEQ ID NO: 52519 - DNA, 122 bp, Homo sapiens
ctgagaagtatagatttcaaagcatggaagtcactgtatggagtgtagaagtttggggatcgtttatagagaaatagtttagggaagcttaacagaatttcaacatctttctatagcaggct

SEQ ID NO: 52520 - DNA, 122 bp, Homo sapiens
gagccccgtggcacttgggtccactcagacaaggccctgcctgggggtgatgctgggggccggggcggtggccgtgctgaccactggctgctagggtggggggccccatactccccactcaa

SEQ ID NO: 52521 - DNA, 122 bp, Homo sapiens
ccccagtggacacagctaaagcctcggtgagaacacacgggcccatgccaggctcacacccgtctacccagccgtctaccgacacttccgtgctgaaactacaagctcctactgccgcctcc

SEQ ID NO: 52522 - DNA, 122 bp, Homo sapiens
gaaagagaaagctccctgccctcaagaccccaaaacacattataagtaagtgatggaggccgggctgggatgttgtgagccttcaggaagcaccaggcaaggttttctggagctgagagaca

SEQ ID NO: 52523 - DNA, 122 bp, Homo sapiens
agtgatatggaactcaggagtcaaccaggcaaaggggccagtgaagagtgttccaggcatcgcctatatttatgtcatattttcactaccttttcaaaagttttatcttttccctcattccc

SEQ ID NO: 52524 - DNA, 122 bp, Homo sapiens
gctaagtaggcgggctaccattcagttagagaccaggatgcaagctagaacccaggggagcgcggggtgtgccaagtacttcatcagcaggctgtgggacccctggggaaagccaccctcag

SEQ ID NO: 52525 - DNA, 122 bp, Homo sapiens
taggccataccttttaggagaaatgaagggaatgcagagaagcaacacaacaaagacctccgcatagaggaaggtggcaactgcagtccactgcagactcatcctgttgctagaaggtttcc

SEQ ID NO: 52526 - DNA, 122 bp, Homo sapiens
tcttagtggagatctcaaaactaattctagattccttggctgccaaggtcagtgactcatcgtactactgaaacccagctggaggccccttggtgtttggtatcaccaacagaatatccttt

SEQ ID NO: 52527 - DNA, 122 bp, Homo sapiens
ttagcaaacatttcccctttctccttagtttgtaggggatgatattgaagacgaatgaggcgatgtctacaaaatgctttaataagcaagttggagaaagagattatgtaagtttgaggcat

SEQ ID NO: 52528 - DNA, 122 bp, Homo sapiens
gggcttttctggaagccagatggtatcgcacgtgttaaaggcgggtgcctggaagccggacgtgctgacaagacttagtttttccatctgcaagatggctgataatggttatccgtattaac

SEQ ID NO: 52529 - DNA, 122 bp, Homo sapiens
gattcgctgccagtacagactgaaaaacaaaataaactcccaattcacagtcctccgttgcgtaacagtgagcagacgttctgagaaatgcatcgtcaggcaattgcatcattgtgcaaaca

SEQ ID NO: 52530 - DNA, 122 bp, Homo sapiens
ggatccctcaacgtattgcgagacgccggtgtatagcccggacctgtgccccaacatgatcgccgctcaggccaagctggtttaccagctcaataagtactacactgagcgctgtcaggcgc

SEQ ID NO: 52531 - DNA, 122 bp, Homo sapiens
acccccaaggagggcctcccaggatgggcaaaggatagaggtcccactcaccggtggtctcgtggtgcaccacaggcacctccaggccagccagcttggccaccagcgccgtcttgcccaca

SEQ ID NO: 52532 - DNA, 122 bp, Homo sapiens
ggatggaagtgacgcatgtgcacttgcctatttctttgtgagtagatccgcatacgtgcccggcagatcatgcttgcggtctgaaggacccacagatgctgctggagtttatgtgctacttc

SEQ ID NO: 52533 - DNA, 122 bp, Homo sapiens
ccggggctagcgggagccgagagcagggtgctgaattctggagatgggactggggtcgcgcggccttctccttccccacgcccccagacccaaaagacgaggccgccggctcggagcgggaa

SEQ ID NO: 52534 - DNA, 122 bp, Homo sapiens
gtatcagtttaaaattcagacaaggcccacagaataagattttccatgcatttgcaaatacgtatattctttttccatccacttgcacaatatcattaccatcactttttcatcattcctca

SEQ ID NO: 52535 - DNA, 122 bp, Homo sapiens
ggggaagcacggaaaggtggcttcgcgaggctgttgtggggggcgggacgggcagcctggcgatgcctggacatggttggtggccaaaaacatttatcgaaagatagcatacccacttagat

SEQ ID NO: 52536 - DNA, 122 bp, Homo sapiens
ttcatgatacatgggtgacgatttgaaagtacacatatttcctcatctgtttacatttgccgggggcggggggcataaaactgtagggcacagggagttgggaggggggcatttgcctgaga

SEQ ID NO: 52537 - DNA, 122 bp, Homo sapiens
aacttgaactcggtttgactccaccgtgtaaacgttttcttcatgcattgctaacacaggcgtctcacacaagaaggtccctaaaatgaaagacgaacatcaggatggcggccgctcatccg

SEQ ID NO: 52538 - DNA, 122 bp, Homo sapiens
gtgggtctccgctctctgcacctctttcctcattggtgaaattggggtgataacagcacccgggttaggaggaggatcaagtaggtcgaccgggaggcagttggagcaaagcctctggagac

SEQ ID NO: 52539 - DNA, 122 bp, Homo sapiens
gacctcaggtgatctacctgccgtggcctcccaaagtgctgggattacaggggtgagccacgaggcccagcccataatttctaatctcgtggctaatgttagtcctccaaaggcaacctagt

SEQ ID NO: 52540 - DNA, 122 bp, Homo sapiens
cagatctgcaagggtaggaaacctgggctggccgagaggggcgggacccgggcggccggacgggggccgcgtttggggagcgcccactgtgcgcctgtcggctgacgggcggggccgccggg

SEQ ID NO: 52541 - DNA, 122 bp, Homo sapiens
cttttatctaatgagagtttttacagctcatcattcaaataacgcacaaaaaacaaaagccgctatgaccggcgttgcctctcactttgaaagaaagactccgtaatcttaaacagatgcaa

SEQ ID NO: 52542 - DNA, 122 bp, Homo sapiens
caggaagccgccaagcgccaccagccggtctctcagaagccgcacaggcgccacacagctcgttgatcccaaaagggagcgctacagagaggcggaaatcactgagggacaggcgctgctga

SEQ ID NO: 52543 - DNA, 122 bp, Homo sapiens
agggttttggcgccttccttgtctctcctttctagtgtcatttgtcttctaactcttcctcgctttgtcctgggttgcagagataaaccgtaagcctaactgtgggcagctgttcctccttt

SEQ ID NO: 52544 - DNA, 122 bp, Homo sapiens
aacctaaattttgggagcacctactctgcatgaagcactgtgctccatgcctgtgcacagcgtgactctgtcattggtgatgggtcctgcttgctgagcctccactgtgcaccaggcacagt

SEQ ID NO: 52545 - DNA, 122 bp, Homo sapiens
gagctgaaaatggaactgagtaatcaggtgagctggaagggatgtggggggcggggcagacgggagacatgggttttgaaggcagtgaacaataaaaccttagggaggtggcaccgaggcct

SEQ ID NO: 52546 - DNA, 122 bp, Homo sapiens
catacagagataatcagctcttttccaaccaaccaaagtaagagttcttttttaactgcgcggttacaactaaccaaaactcaggaaataactcctggaagcaaacaaacttagcagtgaaa

SEQ ID NO: 52547 - DNA, 122 bp, Homo sapiens
aaattttaaaaatacggcatagcagctatttacacagcgttgacactgtgtcgggtatggcgggcaagctagcgagggtttgaggtgtgccggaggatgtgttctgcttgtacgcagatgcc

SEQ ID NO: 52548 - DNA, 122 bp, Homo sapiens
cgtcgaagaccatggccagccccctctgtcagccaccttcacggtcaccgttgccgtggccgacaggatccctgacatcctggctgacctaggcagtatcaagacccccattgaccctgagg

SEQ ID NO: 52549 - DNA, 122 bp, Homo sapiens
aggcggagggaagggagacagcagagggtagaggctgactgtccgaaacctcccatgacccgtgacccgtgacccaagaagtgcggctccggcgtcgcggggattcactcacaagcagccca

SEQ ID NO: 52550 - DNA, 122 bp, Homo sapiens
tcgtggtctactccgtcattgggttccgcgccacacagcgctacgacgactgcttcagcacgtgagtggctgtcccaccatcctggtgccttgggctgcgcctccaggaagcctcccagcct

SEQ ID NO: 52551 - DNA, 122 bp, Homo sapiens
cctttattattttttccactaatgtctttttctgtttcaggatccaaaccaggatactggcgctatagttttataaggctcaaaattaacagaagagaaaaaaagtaaagcaggtggagagg

SEQ ID NO: 52552 - DNA, 122 bp, Homo sapiens
tgtttcagagatactccagggacggcatcaccttctcctaccaagcacaactccctgcgccggctgaacgctagggtttcagctgatcggagggaaactgaatttccccaagagagggcttg

SEQ ID NO: 52553 - DNA, 122 bp, Homo sapiens
tgctaaggatagcaatgtcaggatttgtgaagaagggctgggaatgcagatcttgtccttcgaaaggggagagtagagaactccttgcaactctggcagccaggttggtcatcacgtgctgg

SEQ ID NO: 52554 - DNA, 122 bp, Homo sapiens
agtcctccgtgtgggaatgggcgatcaaattacagtttctaaattaagacttcggtgagacgtgctgttcgtgttaattttttacgtggcactacatatttctatctttgttacagatttta

SEQ ID NO: 52555 - DNA, 122 bp, Homo sapiens
ctggccttgaacgcccagcctcgcctccttatgcaccaggacaacaggcctgagccaccacggctcctagcataatttttttaaacagatctcttggtggatattaacttttgtcattttaa

SEQ ID NO: 52556 - DNA, 122 bp, Homo sapiens
ctgctgctcgtgcttcagccttgctggaagacattacgtcgagaaattctagtttcctcccgcgtgggtgcagctgagacttgctgtggactcacagaggaagctggagtccccaggttcag

SEQ ID NO: 52557 - DNA, 122 bp, Homo sapiens
tgcatgcagacccccaggctcagatcatcatctttccctggggacccagaagacctggagcggtcacattcagcatgaccttcctagcagagatgatttgggggtaaggatttataagggag

SEQ ID NO: 52558 - DNA, 122 bp, Homo sapiens
gcggccgggacatagcagcaggtctagcgggccggagtgggttcctaccgcctgggtgggcggggcctgctgcgcgtcggggcaggaaggggcggggagagtcgggaagggcggggaggggc

SEQ ID NO: 52559 - DNA, 122 bp, Homo sapiens
taagacacggatcgcaaagacccagcaaggccactcagttgttcccgttatgcttttccgcgtctgaggggggattatatcccgtcgtgctgttcctgaattgggagcatcacaggggtgtc

SEQ ID NO: 52560 - DNA, 122 bp, Homo sapiens
ggagattggtgaagaaggaaggaaaagggaagcgagtgcagggactgttttatgtgaggtcgatctaaaaatcacagcgctatgaattttctgctgaattatagtagaatcaaagtccgatt

SEQ ID NO: 52561 - DNA, 122 bp, Homo sapiens
cgaaacagccgcaccgccccgggattgggcccaccgaacccgccgcagcgccgccgccgccgcctcagcctccaagatggccgctcgcggggcggaaccagcctagcttctgcttccggtgc

SEQ ID NO: 52562 - DNA, 122 bp, Homo sapiens
gaggacggcgcggaggagctggaggatctggtgcacttctccgtgtctgagttgcctagtcgcggctacggcgtcatggaggagatccggcggcagggcaagctgtgcgacgtgaccctcaa

SEQ ID NO: 52563 - DNA, 122 bp, Homo sapiens
cagatctggcacttgagtcagtagaaaatggggagcctctgtgggctcctggtcctgcaccgtgataaatagcctgtcctgcaacctggcttaaaacagggaaagccggagttaggcaacag

SEQ ID NO: 52564 - DNA, 122 bp, Homo sapiens
gcgtgagccactgggcccggcctggtaaagctttaaaaataaaaatttatgtcacctttacgaagggaaatttatgtcctgcttttaggcagaaagggggaggtcaaagttgttcctgagtc

SEQ ID NO: 52565 - DNA, 122 bp, Homo sapiens
acctcaggcaatccacctgtcttggcctcctgaagtgctaggattataggtgtgagccagcgtgcccagcccatgagatgttttaatacaggcatgcaatgtaatgtcacggagaatggggt

SEQ ID NO: 52566 - DNA, 122 bp, Homo sapiens
aacttgtcttcaacaccttgtctagtgaataaatctagttcaggaagagaaacaacagcccgcaggcctcggtgggtctctggaggtggaaacctcttttgcattgggttttgatggtacaa

SEQ ID NO: 52567 - DNA, 122 bp, Homo sapiens
tgaccccagactgcaagacacaggcctatcgaattagggagtccttcaaaagggagcacacgcacccctgaatttaggggactcgggcccttcgtgaccccggatagccctccccgtcctac

SEQ ID NO: 52568 - DNA, 122 bp, Homo sapiens
taaagctaggggagtccatttctctatagataaaccttagtaccataagtaattccacctcgcacagcctaacctttacgaaactgcgttactgcctcagacatggacgctaatagtacttt

SEQ ID NO: 52569 - DNA, 122 bp, Homo sapiens
atttgtcagcttaggaccaacgttagggctgcgtttcccgaacgacaccattgtatcaagcggccattggatcaggtctagccacaattcgcagctgaccaatcagaaaagaaaatttggct

SEQ ID NO: 52570 - DNA, 122 bp, Homo sapiens
ttctctcagtgggtgaaatcgaagagactgaggacaataaagaacaaggaaccgaactgccggacgtggtggcatgcacctgtaatcctaccactttgcaaggccaaggtgagaggatcgct

SEQ ID NO: 52571 - DNA, 122 bp, Homo sapiens
gttattattgaataaagcacttaacacgaagctggcccccagcgggcccttaatagtttccgcggtggctgtcgtagctggactacagaccccgcctcctgagcggcccgaagccccgcccc

SEQ ID NO: 52572 - DNA, 122 bp, Homo sapiens
tctgctccaatcaggaggcgcggtccttccagcctcttgctcctgtgaatcacaggtcggcgggagccttttttcctttttttttttttcccggggagtcggcctcggggctctgctctcct

SEQ ID NO: 52573 - DNA, 122 bp, Homo sapiens
aagacgactttttaggcgttttctgtttccccaggcagctgggccgttggcgttcccaggcggaagcggggcctctgggctgggcctctgccctgccaggaagcggtctgggggctgcccct

SEQ ID NO: 52574 - DNA, 122 bp, Homo sapiens
ctcggccgccacctgtgagccgttgatgtgcgggaagggcgctctctacggcgggatcctcgctggtaggaggcaggtcccaggcctggcaagggttgaccccggagggctgggccggggcg

SEQ ID NO: 52575 - DNA, 122 bp, Homo sapiens
ggcggccggcgcaattctgcctctcagagagagcttagtgccgcgggtttcgcccgttcccgccgccggcggaagccgagtcagcccgaggccgagccgagacgagccgaatgtccccgagg

SEQ ID NO: 52576 - DNA, 122 bp, Homo sapiens
tgtgggaacccaagatcatccactggggcggcatggccattccctgccttaaaatgccagcgtgcagttcagagtttaggatcaatttcacaagcatttactactcactccagtcaccgcct

SEQ ID NO: 52577 - DNA, 122 bp, Homo sapiens
ctatggaataattcattctccaacagtggtgtttaaatgaagcaccactgtatttaatgacggtattttaccactgctatcatttgagtaagctaaagaactttggtaaagtaagatataaa

SEQ ID NO: 52578 - DNA, 122 bp, Homo sapiens
ttttcggggagggcctgaatttcccccgtatcacaaccaccgttcttccaacaaactaaacgcccaccgtcattaacctgtccgctggttgaacacccggactctaccctctccagaattag

SEQ ID NO: 52579 - DNA, 122 bp, Homo sapiens
gcggtgagctcaagtgtgtcggtatccgcttaaaacaccgtgtgacactaatcgtctccgcgtgagcagctggtctctccagaaattgtgtatcacagtaaacaaattatctcaagccttaa

SEQ ID NO: 52580 - DNA, 122 bp, Homo sapiens
tcactgaacagcatttcccaggattcacaaattagttgccatctaaggtatcattttctacgttataattgtaacttaccagaggaaactttgtcacaaaagacagtaccctgtgcttccat

SEQ ID NO: 52581 - DNA, 122 bp, Homo sapiens
gatgtggtcccgctgactaatcaccagtatagaaagtttacaatctctccaccatgccaacgtctttaataacttgaaaagcacaagaggtggctgttaatttcaaagacagttatatgaag

SEQ ID NO: 52582 - DNA, 122 bp, Homo sapiens
gcaagatctgggctcgctgcgggcctggcgggggcactaagatgaagctgacgctggggccgcacggcatccgcatgcagccgtgcgagcgcagcgccgccgggggttcggggggccgcagg

SEQ ID NO: 52583 - DNA, 122 bp, Homo sapiens
actcgtcgcgctcaccctgcaggcggatgagctgctcctgggagcgcccgtggctgttgacgagctcgttgagctgagccttcaggcggtcgatctcacgcagcacctcggggctcctctca

SEQ ID NO: 52584 - DNA, 122 bp, Homo sapiens
cagccagctcgacgcaacccaacgtactctggaagccggccaggggcgcagggcctccagcgcggccactctaggttgtccgcccagggccaagaagaaagcagactgcctcaccacccctg

SEQ ID NO: 52585 - DNA, 122 bp, Homo sapiens
agtgggccgggcaggggtctctttcctgtctctgtgtcttctcacctttgatgtcccatccgtcctcaggactgcttcccgggggcagcgctggcaccacgggacgcggcagccacgttctt

SEQ ID NO: 52586 - DNA, 122 bp, Homo sapiens
aggcccagggcgcgagacggctgccccggcggacactgaccaggccggttccgtccccagcggccccgaggtggagcagcagcagcagcagcaggaccagccaacggctccggagggctgga

SEQ ID NO: 52587 - DNA, 122 bp, Homo sapiens
tttaaacaaatgatttgcctgcagtaggactgaggtacaactgtacactttcccaggagccgaacaagcagacccttcaatttaggctcaataatgagatacctgagccacctcttctcaca

SEQ ID NO: 52588 - DNA, 122 bp, Homo sapiens
agcgaaaagaaccgcttacacctttccgaattactcaagtgtctcctggaaacagagggtcgttgtccccggaggagcagccgaagggcccgtgggctggtgttgaccgggagggaggagga

SEQ ID NO: 52589 - DNA, 122 bp, Homo sapiens
tgagaagaattcatgacggaaccacaccactgttgcagctgccacacagccgtgtggaaccgtggggttagggagccaggagctggctgtgagcttgggggtttatgcgtaagtgactggca

SEQ ID NO: 52590 - DNA, 122 bp, Homo sapiens
gggcatcggcggcgccttgggccccgtcatcttgagaacagtgtaagaactccgcgagcccgtgctcactattcacagaactcagcagaactcagcagcgtgtttgtcaagggcacttactc

SEQ ID NO: 52591 - DNA, 122 bp, Homo sapiens
ccagtccacacatcaatggcttgcctggcttacgtagtctgagcaggtgcccagctttgtcgcagatattgaagccgtgtaaaataaatgccttttgattgttcacactttaagcaatattg

SEQ ID NO: 52592 - DNA, 122 bp, Homo sapiens
cactggaactaattggatgttaaatcaaccctaactggccagaagaaaccagaccatggacggtcagatccctcccatccgccctctcgcccctttcacctttgccccccttctcctcttcc

SEQ ID NO: 52593 - DNA, 122 bp, Homo sapiens
tggagaagtattctctgctgagaagagattttccatcaggctttacgggaacgcaggtgacgtataccctacagccatggtgctttcctttccggtttcatgcttagcaaagagccctctga

SEQ ID NO: 52594 - DNA, 122 bp, Homo sapiens
tgcttcctgttatactcagcccggcattagggagtcttcatcacctgaggtggcaatgcccggggctctcactctgggcccaaggaacgtatttttttaacttatttttactttttactttt

SEQ ID NO: 52595 - DNA, 122 bp, Homo sapiens
tgcgtgaccgtggcctgctccgacgtcttctgcacctggcagtagagcgtcttgaagtagcggctgctgcccagcaggacgttcttgtgcgccttgaagaccttgccctccacgaccacgca

SEQ ID NO: 52596 - DNA, 122 bp, Homo sapiens
cccatgaagccgcttcctccccactagcaaacaggaggccaaacacacagtctgattgcacggtgccctttggaaggtgcggttactttcaagttgccctgggaggatttggagtgttgcgt

SEQ ID NO: 52597 - DNA, 122 bp, Homo sapiens
ctataccctgttcctcctcccccttctctttcccattaattcctctccagaaccaagaaccgcccacctttgtgacagcctgtctgttgcttagcaacagacaggaagtggggctccactca

SEQ ID NO: 52598 - DNA, 122 bp, Homo sapiens
tcctctgcgcggaaaatttcgacccggggcgccggcatcgcgacgctcagccagtgcccgcgaggctcccaggagatgcggggtagtaaggccctaaaaagaggagcctggacacggcctgg

SEQ ID NO: 52599 - DNA, 122 bp, Homo sapiens
ggggaggagagtgaggtcgataacgacgtggatagcccagggtctctgcggagaggcttgcggtccacgtcttatcgcagggcagtggtcagtggctttgattttgacagtcctaccagctc

SEQ ID NO: 52600 - DNA, 122 bp, Homo sapiens
ccgccaacgcgcggccgccacctggagaccgcgcggaatgaatgagaagcccggggctgccggtcgtggagtctggcctgaaagtgggtcctttaccggagcaaccttctgcgttccctttt

SEQ ID NO: 52601 - DNA, 122 bp, Homo sapiens
gcgtggagatgtggaggaggcaacgtctgcagaggagcctgcaggcaccagcagagaatccgacggccaccgcagcggaggctcagaccggccacgaccgagggcggagaggcacagtggga

SEQ ID NO: 52602 - DNA, 122 bp, Homo sapiens
caagccttgggccccacccgcgctccacacaaaccccagatcccccagcccttccggggtcgccccctgggctcacctgggctcagtctcctgggctcagggttcagcagctccgggctctc

SEQ ID NO: 52603 - DNA, 122 bp, Homo sapiens
ctccgacctcccgcccggtggatgctgctagttgccggggaacttggtttctgttctccccgcagcggccttaaagcgcgcagcgtccccggcacgctgattggctgccggcggcgcctatc

SEQ ID NO: 52604 - DNA, 122 bp, Homo sapiens
ctgagtccaaggtgcctcagggtctgaagacaaagctgcgtcctcccgctcaggagggcccgaggagcggacggcagaatcttggggcccagcccgtctgtccctcatgggtctgtgacctt

SEQ ID NO: 52605 - DNA, 122 bp, Homo sapiens
caggctggttttgaattctgacctcaggtgatccagccgccttggcctcccaaagtgctgcgattacagacaggagccaccgcacacggcctccaatcagcttttaaatacttcacttataa

SEQ ID NO: 52606 - DNA, 122 bp, Homo sapiens
aagctgtagtcctgttaaactttagcataacatctcacactattcatattcaaatgagctcgagggagttatgacagaggtatggaccagccaagccaacttgaggccactgaatgcaaact

SEQ ID NO: 52607 - DNA, 122 bp, Homo sapiens
tgggagatgccgtgcgccgtgaggttgaggtcatggaagacgatctcctcgccctggatgcgcagctcccggacacagcctgggaggtgagtgggcaggatgagcacagggcagggtgtccc

SEQ ID NO: 52608 - DNA, 122 bp, Homo sapiens
aaagagagaggcgagaggccacccaggacccatattgggcagaagttctttgcctggcagcgctggcttccttatttagagggcaataggtagaggcagggatgggaaaaggcttgtggtag

SEQ ID NO: 52609 - DNA, 122 bp, Homo sapiens
gtgggggaaggggtgggggaggtccgggccagttaccgggggtccagagagccggcagggcgggcggggcgaagagaaggtcggagacgcagctacagtccatggcggagccggccctgcag

SEQ ID NO: 52610 - DNA, 122 bp, Homo sapiens
cggcgtctcaggagcgctctctgccggcccgctctccccgtgcgtatgcacgtgccgccgcgtcttcgcttcgctttttgtttgtccctgaccgtgcgccgtccaagggtccattggttgcc

SEQ ID NO: 52611 - DNA, 122 bp, Homo sapiens
tttggagcacgcaggaaggtagcagtcttacaggcttagaaaaccagggaggagtgaagccgctcagtggtctccctgccggtgcaaggaggctgccacctgcagaaggtgctaacgccaag

SEQ ID NO: 52612 - DNA, 122 bp, Homo sapiens
ctgggcctttgttacgcgtgttagagtctctgtctttgcagctaaagacctcctccctcacgccccttttcttttgtgaattcaatggatgagacaggcccactctcccttaacaaagatgg

SEQ ID NO: 52613 - DNA, 122 bp, Homo sapiens
ggaccacggggcagctggctggaagtaaaccacacgatcctccgattgcctgggggaagacgggagccaacagggattataaactaagtttcttttcaaggtgtgtttgctgtgttgtgtag

SEQ ID NO: 52614 - DNA, 122 bp, Homo sapiens
aacctggccgacagcctgcagctcgagaaggaggtggtgcgggtctggttctgcaatcggcgccaaaaggagaagcgcatgacgccgcccgggatccaacagcagacgcccgacgacgtcta

SEQ ID NO: 52615 - DNA, 122 bp, Homo sapiens
tgtccgcccgggcggctccagcctctggtttataaaaggtgcagatggttaaaacacaaacgtgtgacgtcagggtcggtttttaaaagtctcttctacccactacatcagttgtgtctctt

SEQ ID NO: 52616 - DNA, 122 bp, Homo sapiens
tctttccttttggactgcacctcagaggcttgtagagcttggattttctccaccagattccgcaacagcgagttgaacctgattgcgttcttccttacggaagttttgcagaggggacattt

SEQ ID NO: 52617 - DNA, 122 bp, Homo sapiens
tggctatggcgggagtggcagctatgacagctataacaacggaggcggaggcggctttggcggtggtagtggtaggtatccagtgatccaagtacttggtgtgacagctagattagcctttt

SEQ ID NO: 52618 - DNA, 122 bp, Homo sapiens
aacttggtccagttctttagtcctctagtctcctggtgagactccacagctccgctaacacgaccgggccttcgtgggcctgacaacagacctgacatcccacgggcgggagaggcgtcagc

SEQ ID NO: 52619 - DNA, 122 bp, Homo sapiens
caaggctggcggggacattgagcaaacggcggcttctgagttggcaccagtccttcaccacgttgtgtgggaagtgtggggagtcaggattcccactcctccccagccttccggaaaaatgc

SEQ ID NO: 52620 - DNA, 122 bp, Homo sapiens
cgtcgcgaggggagctcaggcgccttcttcctggtgctgcagacttgggctggaagctcccggcccgaggggagggggcgagggtgcccggtggtggccgccgttgcctcttggccccctcc

SEQ ID NO: 52621 - DNA, 122 bp, Homo sapiens
tttaacgtaccttgtcatgcatcacattgcttccggagttggttcctgccggtgggttagcggtcttggctgacttcaagaatgaagccgcggaccttcgtggtgagtttaacagctctcaa

SEQ ID NO: 52622 - DNA, 122 bp, Homo sapiens
gtggggtggttgagggacgccctcaagccggtccatttgtgcggctgggctgccctctggcggctttatccgggtgccatccagagtcaaaccctcgaaatcgcttttcgtactgagttggt

SEQ ID NO: 52623 - DNA, 122 bp, Homo sapiens
gcttcccggctttgctcctctctgttctctgggtcccctcgctttcttggtgaatcccaacgtggtctcctagaggatccacttgaagagctaatattttgtcgccactttgtttccactcc

SEQ ID NO: 52624 - DNA, 122 bp, Homo sapiens
ccgccttctcatccgatcgcgttacccttaataaccatcgccctggcaggagaggggtgccgaattccgtctcctgcgtgcctgcgtgtgtaatgtgccgagcaagtgatcctaatgatgca

SEQ ID NO: 52625 - DNA, 122 bp, Homo sapiens
tctgggcctcgttgcccacttcctccttgaatggtaagtgcagggtttcagcctgtgccccgtggcttggaattgttttttcttctttcttttcatgatggtctttgggcagagctcctggt

SEQ ID NO: 52626 - DNA, 122 bp, Homo sapiens
aaggtcttcggccaccccgcccgggaggctcgaaactggctttggggtacctgaatgcctcgactcccagggagacatcgggagctcggagccactctccctgtggcgatggcacctgcctc

SEQ ID NO: 52627 - DNA, 122 bp, Homo sapiens
cgttccctccgtattgacgttagtgcatgctcagttgctaattttgaaggcgggtccgcccggtatctagaaattgccgggctggtttgttttgggcggacgtgacgtaacgtcttggcttg

SEQ ID NO: 52628 - DNA, 122 bp, Homo sapiens
ggagagcgagggaccggcatctcctccacgcgctgcttcaagaaaaacaaacggcggccacgagggcagccactgagcctccagcgcctgccgagaagccgccccaccggccgggccccgcc

SEQ ID NO: 52629 - DNA, 122 bp, Homo sapiens
acaaacatcacacacataaccgtaatattttcattgactgcctgatattcttctacagggcgtctgagagcccagaaacctatttttttctaaaagattgaagtcgcccccgacattatgta

SEQ ID NO: 52630 - DNA, 122 bp, Homo sapiens
gtgcagagttcttactagaacaaggtcccaattcaagccccacaagagggttcttgatttcgctcaagaaaatattcagggtgagtccacacagtaaagtaaaaggaagtttattaagaaag

SEQ ID NO: 52631 - DNA, 122 bp, Homo sapiens
agtggtacccactagcatctcctcaccgaagtaggacgggaaagcagcgcacactctaaccgatttaacttgctgcacatccaaaaaaactcatggcgagctgcaaagaaagtagaacacac

SEQ ID NO: 52632 - DNA, 122 bp, Homo sapiens
cggtgtgagcgtgcagctagagatgaaggcgctgtgggacgagttcaaccagctgggcaccgagatgatcgtcaccaaggccggcaggtcagggcgcccctccccacgccgcgaccctcccc

SEQ ID NO: 52633 - DNA, 122 bp, Homo sapiens
ttagatgctattttcctaagaaatctcttagctgccctaatagtcagaacgtcccctatccgagcccttacacatcatgttgtcatggatgtttatttgcctctgtgttctttcttatcact

SEQ ID NO: 52634 - DNA, 122 bp, Homo sapiens
gcaggagcagccacggccgggccgccggggatcctcgcggactaagggctgggtcagagccgcgcaaacatgggctcgctcgtagtcctggcgagcagcactcccaggcaagtcgcccgagg

SEQ ID NO: 52635 - DNA, 122 bp, Homo sapiens
aatacaaagcgcccagagaggacaataagcctaagcagcggctccaagagaccggactttcgtacttcccgggggcaggcggaaggttacggagcgctggaaggatcttactgctccttgaa

SEQ ID NO: 52636 - DNA, 122 bp, Homo sapiens
acttcagcgaacaaaaaacgtcctgccccgaaggagaacacaagagtggggcacgtgatccgaggccctcatgggggccggtggctgcagcctttactgtgctattgaaatgaaatagttaa

SEQ ID NO: 52637 - DNA, 122 bp, Homo sapiens
caaatacgcttttgattttctcacacaccgacttaaaaggcaggcggttcagggcaaagccggcacccagtaggcctttctgcttctcgaatctttgactgtgcaggttgttcccccacccc

SEQ ID NO: 52638 - DNA, 122 bp, Homo sapiens
ggaccaaaacctgtaattagccctttgtgctccctttaaggggcagtcgtgactggaaaccgaggagtcagaccctctcgaaaacaccaacaaagaactatatttagttctgagctctcagc

SEQ ID NO: 52639 - DNA, 122 bp, Homo sapiens
ctagggcctggctctcaggagaggcctctgccgggcacctctctgcccagcacgggtcagcgtgagtctctgggtgactggccaccttcatgatttctaagcctacatctggggcacccacc

SEQ ID NO: 52640 - DNA, 122 bp, Homo sapiens
tcatactctgataccaggctctgggcactagagtctgcactagagtcatgtgccaccacccgaggaggaggaccctgaagagattaggaggactgaagagggcttgaaggaggagagtttag

SEQ ID NO: 52641 - DNA, 122 bp, Homo sapiens
ccagagcgcgcagaccacccccatgccccgcccgccctcctgccacacccgcccccagcccggccccgccgcctcctcacctcgccgggaccactgcagccctggcggtagcgcgcggacat

SEQ ID NO: 52642 - DNA, 122 bp, Homo sapiens
tctccacctcctgggattttggttggggctgtgttcctcggtggagacagctcctgtcagcgccctctttcctacctccagctcactcagctctgatgatactgttccctccctccagctgc

SEQ ID NO: 52643 - DNA, 122 bp, Homo sapiens
ggccggcagagcctgtagtgacggaggggagcagccttatctccgggaacccgagcgccccgtgcgcggcggggagggggcagttcggggcgccccggcgggtcccaggggctgactcccgc

SEQ ID NO: 52644 - DNA, 122 bp, Homo sapiens
ataacttgatatatgtgttcctaaaaattattgcaccatgcaagattgggcaataaaaaccgcagggtttatgacgaatacaggcttagggcaacagctctcaaaaacttcatcaatgacac

SEQ ID NO: 52645 - DNA, 122 bp, Homo sapiens
ggggtctcccggacgcccccgatgagggtatttaccttcttgccggggacactttgcagacggctccaacattggcaaacactacagagaactgaccccgctcggccgccgccggcttccac

SEQ ID NO: 52646 - DNA, 122 bp, Homo sapiens
gtatgagcaagggggaaagtgttttattttactaggaagattttactgaaagaccaatcccgaaacggcccttgcttcggccacagctgctgggatgtcctcgggcctcccctgtttgtctg

SEQ ID NO: 52647 - DNA, 122 bp, Homo sapiens
ggccctgcaccctctgtgctttgggacggcgtccaacccgcattcatgtcaggagtgagtcgcacgtggctttgtggtcatggcgacttaatccgcctggacggtggctccgtctccctggg

SEQ ID NO: 52648 - DNA, 122 bp, Homo sapiens
cgactggaggatagagaagacgtacctctacctgtgctatgtgtgaagggaggcccgcggcggtggagccgagcggggagccaggaaagaagagttggagtgagatgaaggaaggactatga

SEQ ID NO: 52649 - DNA, 122 bp, Homo sapiens
tctctgttacgtgacctagagctatgtgtgccagcgagtgtgtcacaggccatgtgtgtgcgccgctggtccggcggaggcggcggctcctgcctggtcctgccccgtccgggccccggggc

SEQ ID NO: 52650 - DNA, 122 bp, Homo sapiens
tcatcctgagaggtcttccaagttcgaagactttttctgccgatatgtgtgaccatcgatcgggatgactgcgactggggaagggagcaggaggccaggcctgttccctttgggggaaaggg

SEQ ID NO: 52651 - DNA, 122 bp, Homo sapiens
tggtcacaacccgctgtctggacctgccgcttacgggatgaggtgggcctgcagggaacgcggggcttctggttgctgttagtggtggcttttcttctcactttgtgtagcccccagaaccg

SEQ ID NO: 52652 - DNA, 122 bp, Homo sapiens
aggtggaatttgagactcaggggtaaacccagtcatcacactccaaggcctaaggtttggcgattggctcagggatgagtccataacccaacttgcccagtgagtgtctggcttaggactta

SEQ ID NO: 52653 - DNA, 122 bp, Homo sapiens
tgcatccacccctggggatgcccgactgggcacccccaggcctgtttcttactgcaatcccgggataacaatactgccttcccaggactccaaacccatccctcccctccctgctggcttag

SEQ ID NO: 52654 - DNA, 122 bp, Homo sapiens
tgaccacttcctcaaggtcagccttggcacaggccaggtggttcctgtcaggcatgcccccgagacccatcttggcccgcttgaggtcatgcaggtaggctctgatgtggatctgccaacag

SEQ ID NO: 52655 - DNA, 122 bp, Homo sapiens
cccgccgggggcccccgaccggctcggcccagcgcactcgcttgccccccagaggccgcgcgctcccacccctccagatggtgctgccctcggcgcccgctcacaccgcccgcccgccccgg

SEQ ID NO: 52656 - DNA, 122 bp, Homo sapiens
gctaagctcatgcaggcatagtgcacacaggagccccctgccagccgggccgggccgggccgcccacctggggctgagcctggctcctggctccggatgcagcgccccagcttctccctcgc

SEQ ID NO: 52657 - DNA, 122 bp, Homo sapiens
gcagatccctcagcaaattgtgacagtattatggcactttggcctaagctgttaaagagacgatgtaatgaacagctgcggatttctgaggcacaattgtgtgacacaggaagcccaagtgt

SEQ ID NO: 52658 - DNA, 122 bp, Homo sapiens
gggcggggccggcgctggagcctcttaagtagcggctgcggaggggcgggcgggcacaggcggtgccgcggtcgctggcccctcctccggccccgcgcgcccactccgcgcccggcctggcc

SEQ ID NO: 52659 - DNA, 122 bp, Homo sapiens
acagagagactaagtcatatgcccaaggtcatccagctaggaagtggcagagctaggattcgaacccactccagccccaaagcctggaaccatgccaaattcagggaggtgattgtgtggca

SEQ ID NO: 52660 - DNA, 122 bp, Homo sapiens
tggctctagttcacatttgccacaaccagaccttctccagagagaggacatgagcagcagcgtcacaaattgaacacacttgccaactcctgctgagcaaggtcagcttggctttgaatttg

SEQ ID NO: 52661 - DNA, 122 bp, Homo sapiens
cccaggggggctagacaagaggggggaagctgaagcccgatgcccacgacgcccccagtgcggatcctcagcccctgtggctgatagcgggagctccactccagggtgcacaggagaatggg

SEQ ID NO: 52662 - DNA, 122 bp, Homo sapiens
gaaccggtgcaggcccacgagcaccgcgaccagccccacgtctccctccacacctgtccgcgagcaaagggagctggctccagcctcggccagccccaaagaggggcccccacagcgcagcg

SEQ ID NO: 52663 - DNA, 122 bp, Homo sapiens
ccccgttcaagtcagagagcaggactcactgggtggcaggtcagaagttgaattttaacccgacctgcgctttgtccccgcgccttccgcagcctgggcgccgcggtggcaccgagctggga

SEQ ID NO: 52664 - DNA, 122 bp, Homo sapiens
cttcaactcctctccctacattcttctctaaagttatgtgggtagaacttaatgttccaacgctttgatttcttggtgtttctggtgaccacccccatcctgatgctatctggggaccccat

SEQ ID NO: 52665 - DNA, 122 bp, Homo sapiens
cccgcgcagagcccagccggcgaccgcccccgcgtccccgcggagctccctgccttctgccgcagtcctccgagggctgggcttctggggcaggtcatggctattgcaaccaaagggaggcc

SEQ ID NO: 52666 - DNA, 122 bp, Homo sapiens
gccgtctcacggccccggccctagcttcaccccgactacccggcgtgcgcgtcctcctgccggcctgcaggcccggggcctccgcctgcttccccacagctgctccttgcggccccgcttgc

SEQ ID NO: 52667 - DNA, 122 bp, Homo sapiens
ccctaccctggtaaggtccttgggaactctaggggcctagctgggtacctggagacaggacgcccagggcaatggtccactcctaccacttgctgcccagaaccatctggaattgactctgg

SEQ ID NO: 52668 - DNA, 122 bp, Homo sapiens
cctgggtcaggacgaagccacatagttcctcgtgatgagaaactcacttctggcacctgtcgagatgccagattccatgccaagcccccgaagattctgactagtttggcaaaaaatgggat

SEQ ID NO: 52669 - DNA, 122 bp, Homo sapiens
atcattacttattctacattttctgaggagttattattatcaaacccatatgtgattacccgtgacagacacctgaattatactcacttttggcaaaagttctgtcatgtttggcactgttg

SEQ ID NO: 52670 - DNA, 122 bp, Homo sapiens
ttgactactgacacaggacaatgcctgaagtatgaagcacagacacggaaacaccggatgcgaaagactggagaccgagacagcaaagggaggtggagcggagtgctgatctcggttcctcc

SEQ ID NO: 52671 - DNA, 122 bp, Homo sapiens
cgcgctcagcctcgtggtcttgtcaatcacagacgcacaatagcaagcctgcaaagggaacggggacgggcgtgaaccatttcctccaccagcagggtcctccgatgccgcagcatccaccc

SEQ ID NO: 52672 - DNA, 122 bp, Homo sapiens
tggggctataagtcttttctttagcctgggacagcaattaggctttgtcttgcttatcagcgcaagtgagaaagaccgtgaaggcacactggggggccctggggacgggtgttgtgtttgat

SEQ ID NO: 52673 - DNA, 122 bp, Homo sapiens
aattgagattattaattgcagtaagtcgcattgcgccattccactcctccctcaacagctcgtttacaacccaaaacggggacacaaatgcccctgagagagcagcgatatactgggttaga

SEQ ID NO: 52674 - DNA, 122 bp, Homo sapiens
acaattaaaagtttttgtgcatcaaaggacactatgaagaaagtgagtcctgcaaatcaccgcatacctctaagtgatggaaacagcattcccatcatcagacttggtacctactcagagcc

SEQ ID NO: 52675 - DNA, 122 bp, Homo sapiens
cgcagttccggagcccaaaccagtccacagaagtgtggcgctggcaccatgtcgaggattcggagttctcagtggaaagacagaattaccgtctaggtcctcagaggagacaacacgggggc

SEQ ID NO: 52676 - DNA, 122 bp, Homo sapiens
ctgaggcgaaagactgagcctgcccagtaatcgcctgtggaaaggcgacgacggcgccctcgtgactccgcgccgaccaaccaaagctcgcggccgtccccatgagccaatcgcgagcctct

SEQ ID NO: 52677 - DNA, 122 bp, Homo sapiens
ttccatttcttttcttttctcctctctctctctctttctctctgtctctcctccactccccgacccccaactaggatgcatcctgtaaagctccatctggtttgggggtgggaagtgggttt

SEQ ID NO: 52678 - DNA, 122 bp, Homo sapiens
ctgtctcggctggaagcgtgggaggccggaggatcagtgactggctgtcgtggacatgctcgctacacctcccggggcttcgcttcgtttactattaactgtcgttactcctctgtatctcg

SEQ ID NO: 52679 - DNA, 122 bp, Homo sapiens
tcctctcctaaccctaaaccccacccaggcacccaccccttccctaggcgggcgggaggacgggcagttggtggttctcaccccgcctgccccggctcttcctgtagctctgagtcaagcgg

SEQ ID NO: 52680 - DNA, 122 bp, Homo sapiens
tgctcacacagtgacactcagcgatgactttggctctgctctcccctcctccatctcccacgagcttccagcccagaacacctggccagacccaggtcgggggagttagatcccggggtcaa

SEQ ID NO: 52681 - DNA, 122 bp, Homo sapiens
caatatactttcctgaggtttctatatttttgccctggtaccactataatatattcattccgcaaagccaggaaaagttatttccttcttttctttctttattttacttttccttcctacct

SEQ ID NO: 52682 - DNA, 122 bp, Homo sapiens
aaatagtcacaatgggcctgtaaatagtccagccccattaccacgttctggtccagacagcgggctgcaggtgagttgtttctagaaccagagcttatatgaagagaaaaatagaagggaca

SEQ ID NO: 52683 - DNA, 122 bp, Homo sapiens
cacttctggcacctgcggcttgccccgccctcccactccttccccgcgagggaaggcgaccgtggcctccccaggaaagttgggaaactgtggttgcttttgagctccctgtggccgtcttc

SEQ ID NO: 52684 - DNA, 122 bp, Homo sapiens
aaaggtacatgccgagggctgccgggagggccaggggcagagggtgggcgcctggccagacgccttgccacggatacgggttaagggtgctgtagccaagagctcgtggcgtctagattcct

SEQ ID NO: 52685 - DNA, 122 bp, Homo sapiens
ctttaaacagcaagtgcctgtctgcattctactatataaagcagcagagacgttgactagcgcatatttgctaagagcaccatgcgcgcagcagccatctccactccaaagttagacaaaat

SEQ ID NO: 52686 - DNA, 122 bp, Homo sapiens
ttaacacattaccaacgccttttgagtattcctcccagtgcagggtgccgggaacccagacggaacaactcagcctctttcctcagggagtaagtctaagacctggcttcgagtacattcgg

SEQ ID NO: 52687 - DNA, 122 bp, Homo sapiens
ctaattttttaaaaaatgattttcaaagggaattataacacagtgatgttcaaagggaatcgtaatgcataatgagcgcccctagtggcctgcagtgttggttgaggaatcattggacttgg

SEQ ID NO: 52688 - DNA, 122 bp, Homo sapiens
ggcggaagtgcattcatggtgttgtgcgttgagcggcggaagcgcattcacggtgttgtgcgttcagtggcagaagtgcattcacagtgttgtgcatagttcagtggtgcaagtgcattcat

SEQ ID NO: 52689 - DNA, 122 bp, Homo sapiens
caggacaggagtcagtgtctggggccgcctagactcgcatgactttccaaacacaagtgccgatggcctgtggtgggttctttgagtgaaaattttttaagtgcagtctctcttgcccatta

SEQ ID NO: 52690 - DNA, 122 bp, Homo sapiens
ggcggggcccggggtggggcctgcggggcggggccgggcctgccagctcctacttgggtgcggagaccctggagcagccgcctttccgcggggaccgccccgcctagggttctctccatgac

SEQ ID NO: 52691 - DNA, 122 bp, Homo sapiens
aaggtaggatcgtggtgaggtctagacacaggcaagcttccaaaccctcagtcccaattccgttggccgggaaggagtgcatgccagggtagcccgccctcccggctcctgctgctctcacc

SEQ ID NO: 52692 - DNA, 122 bp, Homo sapiens
ccgcagctccgattggccgacaggctgacgggaacgtttacggtcagcgtgtgtcagcgacgtgcaacccggaagggaagaaggggcgtgtcaggctgcgcaggcggccagtccattggctg

SEQ ID NO: 52693 - DNA, 122 bp, Homo sapiens
acagagtgagaccctgtctctaaataaataaagaaaaaataaactcaaatggggattttgcggagttgacctctaacagctcgtgctggtgttatttgagggcctgtttcctctcctctctt

SEQ ID NO: 52694 - DNA, 122 bp, Homo sapiens
gaggcgcaggggagcatcctggggctgcgagatggtggacacgggtcaggggcctctgcccgcggcacctcaactccctgtaccgggagcccgagcccagcccccgccactgcccgctcagg

SEQ ID NO: 52695 - DNA, 122 bp, Homo sapiens
cgctcgcctgctccccactcaccctctgaccggctcctagcagcctccactataagcggacgactcctgctcagtcggcctccctaccccagcctcgctctgggcgccgtgacgtcacctct

SEQ ID NO: 52696 - DNA, 122 bp, Homo sapiens
cagcagccctgaagtggtgggacagggagagaagagcagggcctcggggtgcatgccaagcgcgtttctaaggggtgtgagcagctgggaaatacttagcaaaactctactgggggatcagg

SEQ ID NO: 52697 - DNA, 122 bp, Homo sapiens
aggctttctttctccacaagatggccacaccggcggtaccagcaagtgctcctccagccacgccagccccagccccggcagcggtcccagcctcagttccagcaccaatgccagcaccggct

SEQ ID NO: 52698 - DNA, 122 bp, Homo sapiens
atgcgcattcaggtaccttcacatttcttccatcttgaaggttcccccttttgtccctggcgatttataataaccacagttatagacactcaccctcctaatcgcaaacgtgagcttttttt

SEQ ID NO: 52699 - DNA, 122 bp, Homo sapiens
acagcacgattccagaccctgctctattgtgctcagaggaagcagctgctggctccagcccgaatttgggagtgctttgatatgcagccctctctggggccctgccagtactgactctagat

SEQ ID NO: 52700 - DNA, 122 bp, Homo sapiens
gaggtggaggttgcagtgagctgagattgcaccactgcactccagcctgggcaacaagagcgaaacgctgtcaaaagaagaaaaaaaaaagccactggcttggaaagtatctgagaaagtcc

SEQ ID NO: 52701 - DNA, 122 bp, Homo sapiens
tatttcctctgacataatactgttagacttaattcacttaagaaatatttacaggccaggcgtggtggctcacgcctgtaatctcagcactttgggaggctgaggagggcggatcacaagat

SEQ ID NO: 52702 - DNA, 122 bp, Homo sapiens
tccatcatctcccttgggctctggctccttctcacagatggacacgcaggaggtggaaggcgtgaaaggcgtggagcagcccggcttccctcttgccagtcctgcgcactccctggcagcca

SEQ ID NO: 52703 - DNA, 122 bp, Homo sapiens
ccttcagggcctctctagtaagtcggctgccaatacccaacatggcgggaggccctgcgccggctcagtctgcctataggtgcaggacttggaggggcgggcccctcccaaagggcgggagt

SEQ ID NO: 52704 - DNA, 122 bp, Homo sapiens
tttcacccttttactgccttacagattgctaatatacattctccattggtcttttaatgtcgtttacagaagctgactctctaccgcctccttctctccgtctcaccctctctgcctcgcct

SEQ ID NO: 52705 - DNA, 122 bp, Homo sapiens
gatattccatttagaattttatcttataactctgtaaaatttctagtgatgattttaagtcgttttttagcatatacgttgttgttcacctacattttgctggtgttttatagctttgtgtt

SEQ ID NO: 52706 - DNA, 122 bp, Homo sapiens
ggaggctctcctagagagcagcgcgaagccatggcttttgggcccggggacggaccgtagcgcgtagccggaagcggaggcgtggaggcgggtctgaggtttggtgactgcggggcaggccg

SEQ ID NO: 52707 - DNA, 122 bp, Homo sapiens
gggtgctgaggaggccaaggagggcactgggagctccgttccgggagagctgtctaaggacgcggaaccgggtggggaggccagggaggtaaccaagagtccgagccgggcctggaaattct

SEQ ID NO: 52708 - DNA, 122 bp, Homo sapiens
atgttactgtcaagaactgtgaagagtttatgctactttcaaggtaataagttagcccaccgccatttcctagatgctgccagaagatatgagactcctgggtcagagacgatagactattg

SEQ ID NO: 52709 - DNA, 122 bp, Homo sapiens
tttccaaacgtgtgattcacttgtgaacaaaagtcattctaacaattgccttcagcgtcacgtgcattgccactgcgctttcggcacgagggatgctgagccctggtgtcagagtcgtaatt

SEQ ID NO: 52710 - DNA, 122 bp, Homo sapiens
ctctcccgccgcctgcattgcttccctctggctaggtccaaggccatggtatgtactaaccgcactgccagcctgccttctgccacacacgcccctgtgcttctgacaggaagagaaaagga

SEQ ID NO: 52711 - DNA, 122 bp, Homo sapiens
agaaatctatgctgactgtgacacaagagcctcacatgagaaattaccagtatccaacttcgatactgatagacttgttgatattattattatatgtaatccaattatgaactgtgtgtgta

SEQ ID NO: 52712 - DNA, 122 bp, Homo sapiens
ccagaggcgcttctggagggcgctgcgcctggtcccagggatggtggcattcagcttccacgcgtgccacccgctccccaactcagggtgaggggcttcatgttgcacgacacgtttacgtg

SEQ ID NO: 52713 - DNA, 122 bp, Homo sapiens
cttcacagtctcatttcctgttctgagaggacgtgcaaagtataggctttcctcctccaccgcggagatctgggacggcaaggctatccgtggcatcgggacggcggaggcgggggcgaggg

SEQ ID NO: 52714 - DNA, 122 bp, Homo sapiens
gagcagtggggacaggtcaggtaattctgccggcggtcagggatgggagagtggggaggacgggaccagcctagctcagaatgggtgtttcttggagcctctgggactgttttctttccagg

SEQ ID NO: 52715 - DNA, 122 bp, Homo sapiens
ctctagggttggagatagatctcctcctccccagccgtgccgccaccctgtgatgacctccgttttagagcgtgagctcactctgacctttctgcgtacctgatacatgctgggtgtggcgt

SEQ ID NO: 52716 - DNA, 122 bp, Homo sapiens
ctgatcccacttgttccatgcggacccaccgattaccaggtgggagcagcagggggcgtccgagggccctgaccccaggcgggaggacagatgcgcgtcctgtgttggggccacggagttgt

SEQ ID NO: 52717 - DNA, 122 bp, Homo sapiens
gcagcatatcacagggcaccgccgcagcacgtgctacgcacagatgcagcctgcggacggcggggctggggtagctgaatgtcccctggactctggtccctccagggccccaggtgtggaaa

SEQ ID NO: 52718 - DNA, 122 bp, Homo sapiens
gcgctgtgggaagaggggctatgcgcgtcgggccgtcgacgagacccgcgcggggggcgccgtgctttgcccctcgctgcctgggtttacttggtacagcccgcggcccaaaggaacaagaa

SEQ ID NO: 52719 - DNA, 122 bp, Homo sapiens
gtgagctggggagaccctggaacccaaggctgaggacccagagccaggagatgcaggagacgccccagggatgctgaacaaagcgctgtcccctgttgcagctctcctgggtctccccatag

SEQ ID NO: 52720 - DNA, 122 bp, Homo sapiens
ctcggtgacgatgtcttggtgatggacagaggtggcggcgaggagaacttgcgggtggcgcgcggggacttggggggttcaccgtacaggagcttattgttctggccactggcaaacaggag

SEQ ID NO: 52721 - DNA, 122 bp, Homo sapiens
tgcttgaataagaatccaaggacacaagctaagacatttgcactgggtttagatctactgcgattcacaaaacacaaaagaactttcagtcagagggtgacacataatgattttagacaaaa

SEQ ID NO: 52722 - DNA, 122 bp, Homo sapiens
aaaagaaagccttcctttttctgtcctcagccgtaagaaagaatggtttcttcacagtgccgattggtaaaaccaagttctttgtaaattatggaacccaagctggaacttggagagcattc

SEQ ID NO: 52723 - DNA, 122 bp, Homo sapiens
cggcgcccggtctccccttctgctgcggaggatccctgctggcggttgtggtgctgcttgcgctgccggtggcctggggtgagaggcgggcgggcgtggggaggcgcccgggcggacgagga

SEQ ID NO: 52724 - DNA, 122 bp, Homo sapiens
ctggaaacaccaagagtggtgacatatgatttcaattagtttcacagttccacaaaaatacgctctctacaaaatggaaaaagaactagaataagtaccaatgtcattaaagatcctttggt

SEQ ID NO: 52725 - DNA, 122 bp, Homo sapiens
ctcgaggcggccgggcggggaggctagtcagggaggctcgaggctgaactgcaggcttcacgttaaagttacaagtgagttggacccagaaggcagaattacagccagaacgtagctgtgca

SEQ ID NO: 52726 - DNA, 122 bp, Homo sapiens
tctgcaactcttcagggaggacagctgggccatgcccctttgggcctcccatcctcccctcgtcttgtcagccagtcgtgctgggatctgccggcagccttgtgagaaccgggcaggaactg

SEQ ID NO: 52727 - DNA, 122 bp, Homo sapiens
agagttttggaaagccagcctctgcagcctcctctgccgggaggtagaggtttgcaactgcgctgcccacggccgagaaggaacagcagggtgtgcccagcttctgcaggcctccttcatcc

SEQ ID NO: 52728 - DNA, 122 bp, Homo sapiens
ggggctggggactggcgaactccgcctctctggggctgtcgctttaagggcaaggcggggcgtgcgggccctttaaggccacgtgggggcgtgtcaggaagtgagtccagggcccgcctccc

SEQ ID NO: 52729 - DNA, 122 bp, Homo sapiens
gtcgctgctttcctgctacaacgggcctactttagctaaaacagaaacgtaaggccaggacgggtcaccctttgtgggcccctgaaaaatacaaaacgaagtttggagagagttgaaaggcg

SEQ ID NO: 52730 - DNA, 122 bp, Homo sapiens
cgccccatgctggcagtggtaatgccgccggctggcatccggttggctgcgcgctgggaacgccagcgaggcagcgccaccggcttgaggagggtgaaagttcaattcttggcccctgaagt

SEQ ID NO: 52731 - DNA, 122 bp, Homo sapiens
gctgggcacagccgaggaccagcacatgtggcctctgtgcctttccactcagaggcagcacgtgtttttgtggctctcagagatgcggaagtctgcaggtgcaacatcatcttaccacgcct

SEQ ID NO: 52732 - DNA, 122 bp, Homo sapiens
ttccagggatgtgtccagagctccctgcctcacgaagaccccaccccaggctcagttgaccgctaggaattccttggttctagtgctagcggcaaaaaaaattatagtgcaaatgttgctgg

SEQ ID NO: 52733 - DNA, 122 bp, Homo sapiens
gaatgatccatatgccatttgggtctttctataggatgataatggcctctgatttgaacccgtgttagaaaataagaaagggcttttatgaacttcctctttcatatgcaaatggacagcac

SEQ ID NO: 52734 - DNA, 122 bp, Homo sapiens
tggctactaaaaaagtgtgaaggctggggacagtttgagtcgtcctgcttgcaccttaagcgcctacaagagtgcccggctataacaaccacaataccaataataaaatttaaaaacagatg

SEQ ID NO: 52735 - DNA, 122 bp, Homo sapiens
tgggcctgccgaagcggcggagaggccggagctttggacttgggaggccgcaggcgagagcgagctgggcgtggagagtccgctgtgaggcagaggctgggcctgtgcaagctttcgggagg

SEQ ID NO: 52736 - DNA, 122 bp, Homo sapiens
gggttctagaggtgcgcgtcatcctgcagcaataggcgtggccgagagacaggcgcagagcgggggcgggccagttgccttgcaagcttcgcagacccagcggcccgcaggcccctaggtgt

SEQ ID NO: 52737 - DNA, 122 bp, Homo sapiens
aggggatgcatgagatggcaaaacactgccagcagcacttccagagacagcaccacccagcgctgattgcctggaacactggtcttaacattttttgctcatgtaaccccctaagaaaactc

SEQ ID NO: 52738 - DNA, 122 bp, Homo sapiens
ggtggcggctgtgggagcggagcgagcaggttcccgggaggctgcagcacagaggccccacgcaggcgggctccccgcgctcggctcccgcctcctcccggccgttctctgttcttgcactt

SEQ ID NO: 52739 - DNA, 122 bp, Homo sapiens
tctcaggaaaaagccagcaagggctccagctccccctcttctagggatctgtttgaaaaccgtagtgggggccctcatcttgatcactctagttttccttaattctcagcttcaccctccca

SEQ ID NO: 52740 - DNA, 122 bp, Homo sapiens
agctgcagccaggagacagccaggcgaaggcggggctctgcctctgggctccccgaggggcggaggccggcgcgcgggtcacgtgggggcgcgggaggcggggcttgcacacgctggtcacg

SEQ ID NO: 52741 - DNA, 122 bp, Homo sapiens
agaaggcatcacctcttcacaagcagcccctccacaggaataagaggaaatctgactcctcgcagagaaaggaaaaaaagagaaaacagaaaggctctaggatccactccccgtatggaact

SEQ ID NO: 52742 - DNA, 122 bp, Homo sapiens
gaaagaattctgcttaggtaaggcccaaatcccttggctaaggttaatcctcggtgggaccggcaatagggacgcgtcccctttaaggcgccagctctccggcggcggcggccggaagtgtt

SEQ ID NO: 52743 - DNA, 122 bp, Homo sapiens
aaggaaggtacaggaagacaaatcatgatgtgcccacagggcagaggctgttagagttggcgaaataaaaagaaaatgagcagttggaaaaattatttataaaacataaaccagcaaaattc

SEQ ID NO: 52744 - DNA, 122 bp, Homo sapiens
tagccttcctaaccctaggatgggtggggctgacaattgttacccaaagccccaggggagcggccagaactagtgacttgagaacttgaggagctcctacctgagccccaggagaagcttgt

SEQ ID NO: 52745 - DNA, 122 bp, Homo sapiens
tgatattgttttgttgtttttctattttgctcatggtattttttcccatgtatacataaacgttttcggtcattcagtcatttgaaaagaatcccagtctccgtggcctgcatgtgactttc

SEQ ID NO: 52746 - DNA, 122 bp, Homo sapiens
tcccagcccgggatggtttccactgcgtgcctgggcctccagggcacctccatgctgatgcgtgcttgctgtgggcgtggagcttaccattctcacctggcagccccagttatggctcccag

SEQ ID NO: 52747 - DNA, 122 bp, Homo sapiens
agcaatgcggaagccacaggctgcagttaatctcgccagcagcgccccgcctgctgacagcggtacggtcagtcctgggggggcgcagggaataatccttttattcagacatttggcttaaa

SEQ ID NO: 52748 - DNA, 122 bp, Homo sapiens
gcctggacgaggaactggaagactgcttcttcactgctaagactacctttttcagaaatgcgcagagcaaacatctttcaaaggtaaacataataatggaatgcaggagcctttcgtggggg

SEQ ID NO: 52749 - DNA, 122 bp, Homo sapiens
atgctccacttgacatcggctttctgtgcaccgatctgggcctcgacccagggttagagccgtggcgtccctggcctgggcgaccccgggggctggcactccggctgctgctgcggttgccg

SEQ ID NO: 52750 - DNA, 122 bp, Homo sapiens
tacagttttctcaacagtgtatcttttttccacttaactgggactttgggctacggaaaacgttaaccagtactagtaaggaagctcaatttgcctctacactaattgggagcgctgaaaac

SEQ ID NO: 52751 - DNA, 122 bp, Homo sapiens
gtgataggaccaagacaccctatccgggctctggtcggggatgaagtggaattgccatgtcgcatatctcctgggaagaacgctacaggcatggaggtggggtggtaccgcccccccttctc

SEQ ID NO: 52752 - DNA, 122 bp, Homo sapiens
gcaatcggtgagtgagtgggactgagaggcccacgaggagtccgaaggccaaagcgtacacgatagagaggaatagtacgtaggagctggagcagtccaccaggcagccccagggcgtgcgc

SEQ ID NO: 52753 - DNA, 122 bp, Homo sapiens
tttttttttgagtcagggtctccttctgtggcccagtctggaatgttagtggtgcaatctcgactcactgcaacctccgcctcccggattcaagtgattctcctgcctcagcctcccaagta

SEQ ID NO: 52754 - DNA, 122 bp, Homo sapiens
tgccacttccctctctcccctggcccgcaaagttttggcggagccatcgctggggctgagcgcgcccccggggggagatcggggagcgcccgatgccgggcggccggagccattgacccggg

SEQ ID NO: 52755 - DNA, 122 bp, Homo sapiens
aagccctggtattcaggcttcaaaatcctgggaaacaaaagtagtccggaggcagcttcccgaaaaacagggcttttgagaggtacagaaggatgctgggatttttgaccaggagtaaaaca

SEQ ID NO: 52756 - DNA, 122 bp, Homo sapiens
ctgggattaaggttttctctcctcaccagaaatcattcagcaaaatgagttattaaaagccggttaaccactcctgcctccgggtagctcccgtttaacaacctctcctggggagcagctgt

SEQ ID NO: 52757 - DNA, 122 bp, Homo sapiens
caatcagcattttctacttgtcaaaatgcattcacattcattcacccagccttgggaattcggctgggtgaagcctgggaaaagaaaatggagaggcttgcctgaggtcacatagttggtta

SEQ ID NO: 52758 - DNA, 122 bp, Homo sapiens
agcccccgaggcctccgcggagcattcagccaatcacaaagctgcagctcctcccgcccccgccctgatgtacagcctcctgattggcgggctgcgtgtccccatgtgaccggatcttggtt

SEQ ID NO: 52759 - DNA, 122 bp, Homo sapiens
tggggctcctcggccgagaggagcaggtacccggactgcagagttcgagcgcagcacgaacggagcaaagcagtgcaagaaaagacagctggagccagcggccagacccagggcgcgcggga

SEQ ID NO: 52760 - DNA, 122 bp, Homo sapiens
agctcactctctctgctctgtctgggctctggagccagagctgagtctctcttgagcatgcgcagcccggcaccctccccgcctctcccctcctccgccccctccgcgccagccttttgctc

SEQ ID NO: 52761 - DNA, 122 bp, Homo sapiens
ggcccatttgtccaggtcctcctttgcataaatctctccagggtctccccacagcctagccgggtaccccactacaggatggcagtttggaaagtgtggcaagtccctagaagagggatcat

SEQ ID NO: 52762 - DNA, 122 bp, Homo sapiens
tcagacaccagtgattcagactcaggctaaggggtcaggccagatggggcaggaaggctccgcaggaccggacccctagaccaccctgccccacctgccccttccccctttgctgtgacact

SEQ ID NO: 52763 - DNA, 122 bp, Homo sapiens
cagggaaacggagtcatcgacccaagaaggtcgtgggagatgaggtcccagggtaaacagcgggtcccgccactatgtcaccctttcctgccgcctccccggatgaactgcatgcagggcgg

SEQ ID NO: 52764 - DNA, 122 bp, Homo sapiens
tgggctgggccccgtgggcccgaggtgctccatggttgcgaatttttgaggcccacagtccgctgggccccacgtatgcgcggtggggaggcactttcacctgtggaagggggacctctgcg

SEQ ID NO: 52765 - DNA, 122 bp, Homo sapiens
aaataatcctaattctttctgctctcacttcccatgtataatcgtgtgtctctccatccccgttaccagtatcctaatttaaatactcttactgacaacagctgatttctcctctcaaatcc

SEQ ID NO: 52766 - DNA, 122 bp, Homo sapiens
aggaaggtaggggagggatcaaccggggatacctcacagactgccagcccctacccccctcggttttaggggacctttgtggggtctgcctgataatcccggcctggctctcctcacccaac

SEQ ID NO: 52767 - DNA, 122 bp, Homo sapiens
cagcctcccaagcagctgggattatcaacatgtgccactactcctggccaatttttccttcgcatacttcttgtacttgcacagtggagacacagacaccaatacatcacaatacactgtga

SEQ ID NO: 52768 - DNA, 122 bp, Homo sapiens
gctgatcggggatgacaactacctggctctgaagaacagccaaggcaagtacctgctcaacgggcatttcgtggtgtcggcggtggagcgggacctggtggtgaagggcagtctgctgcggt

SEQ ID NO: 52769 - DNA, 122 bp, Homo sapiens
caatctccgttccttttagcttcctccctgagaagacactgtgacctcgctgtccttgttcgtgttaccatggagaggtaggaggataaatatcgcttccagttgtcagcttttttgttttc

SEQ ID NO: 52770 - DNA, 122 bp, Homo sapiens
cgccagcagcacagtcacagaaccgcaggagtaacgaggctgaagctgaggcggcaacggcggcgacacacggaagactcagtcagtcccacctcccagcctgcccccgctgcgcatgcgta

SEQ ID NO: 52771 - DNA, 122 bp, Homo sapiens
aagttttcttctttcaccactgagggcttttgtgcaaggccagacaactgcccgcctgcccgcccttcacaaggctcacctccccaccaccgggcacactctgccaacactccacccctctc

SEQ ID NO: 52772 - DNA, 122 bp, Homo sapiens
ttgcaggattttgtgatatatgtgaaataatccggacatgcttctgctatggttgtttgtcgccatagtttgcgaatctgggtaaacctggatgagagagacgccttacaattgcaaacatt

SEQ ID NO: 52773 - DNA, 122 bp, Homo sapiens
gggcgagccagtgacaggaggggccgggctggtacttcaggcgcccaggccggcggggcgcgctccggcggctcctgtcagcggcgggtgcggcggatcccagggcagccttcgggcggcgg

SEQ ID NO: 52774 - DNA, 122 bp, Homo sapiens
ccttcagggagggcaggcagggacgcttcaagagcctggggtctagaggtctcatggtgccggccctcaccacagctcctgcagctctgtgcctctacaagggccggccactaaggagtcct

SEQ ID NO: 52775 - DNA, 122 bp, Homo sapiens
gagaaggcagggtgtgtctgagcaatcctgtttagaaagatcaactccaagtaatttagacgaagaaacttctggagctggacggatcccccagggtgcgccgcgcctggactgggaagggc

SEQ ID NO: 52776 - DNA, 122 bp, Homo sapiens
tgagctttccacatttgtaggggagtgtggccagaagacctgctacgtcccttaatgctacgctgaggctttcttattagtaggaccatttaattcctcttttctcatgttgggttggccaa

SEQ ID NO: 52777 - DNA, 122 bp, Homo sapiens
aacagctttttcagccaacaaaaccttcaaaatgtccttctcagcagcaagttttctccacgtcctcaggaaggatccaaagtcttaccattacagcatctctgggtctcgctgggatcatg

SEQ ID NO: 52778 - DNA, 122 bp, Homo sapiens
ggggacgctggttttgggtcactgtagcccgcatgatttggggatggcactaggctgtggcgggcgggaggcaggttcccgacaccattcatcatggatgaacaatgtcttggggtggttcc

SEQ ID NO: 52779 - DNA, 122 bp, Homo sapiens
tgcttctctctgtcgctcattttgctagtgtccgaggtatagactccatcctgccggagacgggggtgtgtgtgacgcacgttactcgcactcgaactgagatccagccggttggcagggag

SEQ ID NO: 52780 - DNA, 122 bp, Homo sapiens
ccctctgcgctggccgcaagcagccccactcctcccggcagaagtacacggccacgtccgcgaagctcacagcccccggctccctccactcgggtccggccccgtttgggtcccggggaggg

SEQ ID NO: 52781 - DNA, 122 bp, Homo sapiens
catgcgctcccatggctaaacgtgtttattaatttagaatcaaaatccgtgggagaaacacgtagcatatccaagacttgggcctatatgtactcaatggcatctgctaaccttggacgttt

SEQ ID NO: 52782 - DNA, 122 bp, Homo sapiens
ccctgcttcccgcgtctctccgcgcccgcccgcccgggaacctcagcccaagatctctgccgctgtctgtgacgcccccgcagcccgccgctcattggcctaggccgccctgactgacggct

SEQ ID NO: 52783 - DNA, 122 bp, Homo sapiens
ctcacccctcagacaacatcttctttagccgctcgcgctctgtggggccgggggcatcagcgctctggctgcggaacagtttttcctcgccggggccgttggcactgacgagagggctcggg

SEQ ID NO: 52784 - DNA, 122 bp, Homo sapiens
ttgccggtggtcgcgcgggtgaacggcagttttgtcagctccttcaaggaccaggtcctgcgcatcagtactagggccatcccccaggagcaaaggtcctggctccatgtctcaatgtttgg

SEQ ID NO: 52785 - DNA, 122 bp, Homo sapiens
caaaccactgttcatgaaatctgtgggtgcaaacaaattgagctgtcaggctgcaggacgcgagcaaacactggccaggcaaatggcatttcctccctccagcacatttctgctgctgaccc

SEQ ID NO: 52786 - DNA, 122 bp, Homo sapiens
tgtctgtgtctacagttgccctcttctttttcggataaggacctcagtcatgggatttaacgccaccttaaatccaggatgatctcatctcgagatgcccctcctaattacagctacaaaga

SEQ ID NO: 52787 - DNA, 122 bp, Homo sapiens
cgttgctcactgggacttgtagtatgacgcccgcgagctgtgatgcgttactaactggcgcgatccacagcgcctcctctcccggcgtcttcctctctttcattctaaacaacgatttaatt

SEQ ID NO: 52788 - DNA, 122 bp, Homo sapiens
aggtcaagacagctgcaggtgaagagagtcatgctgcctgacccaacactggggtggtcccgagtgtctcctcacaggagacttcacccatcacagacagaagaaagtagctagtgtgtggg

SEQ ID NO: 52789 - DNA, 122 bp, Homo sapiens
cgccgcccgggggcccaggcggctgatgcgtgtgggcctcgcgctgatcttggtgggccacgtgaacctgctgctgggggccgtgctgcatggcaccgtcctgcggcacgtggccaatcccc

SEQ ID NO: 52790 - DNA, 122 bp, Homo sapiens
tccagaccctttgattcacagtggcatagatgctggcaacctgcttgctaatcgcccaagcgattccagcctggtgtcagggaggaagatgccctccgtcctctttcatctggaaaaagcag

SEQ ID NO: 52791 - DNA, 122 bp, Homo sapiens
ctggtcctctttctggccaaaccatgtcaatcaacttgccaggagccttgtactccacagcgctgtcatttctctgcaaactccccaggtgagctcatccactcctgccactcccgcaactt

SEQ ID NO: 52792 - DNA, 122 bp, Homo sapiens
ccacgccgcaggaaccccctccgcaggtggtgttcaattggccgcagggcgcacacaggccggtgctcaccgccacgttcccgttgcacggagcgctgcagacactgccagtcactggccgg

SEQ ID NO: 52793 - DNA, 122 bp, Homo sapiens
atctgtactcaccaggcaggcagatgcactggaagccgttgagcaggtcatggcaatccgcgtggttcaggcagggagctgaggcacactcgttggtctccacctcacagagctgcccttct

SEQ ID NO: 52794 - DNA, 122 bp, Homo sapiens
ggctgcaatgagtgtgggaagaacttcggtcgccattcgcatctgatcgaacacctaaaacgccacttcagggagaaatcccagagatgtacgtgtgaggagtttatatccgggggataaat

SEQ ID NO: 52795 - DNA, 122 bp, Homo sapiens
agagggtgtggggctctggagatggcggggggctccctgaggagcttccgaaggatgcagcgtcgttcctcggtcactcctcgctagggctcctctgggccagtgactgagggtcttatttc

SEQ ID NO: 52796 - DNA, 122 bp, Homo sapiens
gcagggaatgcattccgccatgcggacagagccaacatgctagcgtcatgtgaagtgtcccgtcactgctgtctgagggcacttaggagacatgagctgcctgagtggatctcttcacacca

SEQ ID NO: 52797 - DNA, 122 bp, Homo sapiens
acaaggggcccacttcggtcttgaccaagcccttcatcttcctgaatttctcagctaaatcgtttctaacgcttccctttttccaacataaatagttctttctcgctcattgtcccaccctg

SEQ ID NO: 52798 - DNA, 122 bp, Homo sapiens
aattggaagacttggtggcgaacgagggtcaggacctgcatcctgcctcagagttatcgacgtatccggaatgtgggatcagaggctggtgaagttggccctgttgcagcatctgcgggcct

SEQ ID NO: 52799 - DNA, 122 bp, Homo sapiens
gccctgcctcccccgcgccgcccggcccgcgttcctcccgccggccccaaagacgctaaacgtgccctactctgccccgggggagaggtaaagcccgcgcccgtccttcccgccccgggccc

SEQ ID NO: 52800 - DNA, 122 bp, Homo sapiens
ggggcggggcctatggtttgttcgaatgacgtcacacttgccgcagcgtataaggcgctacgcagttctggagtgaaataggttcgaatcccaccactgtcaattccagactgtgaccctct

SEQ ID NO: 52801 - DNA, 122 bp, Homo sapiens
attgctaacagtattgttgttcatggcatttgaattaacacaaacttcagcattagcctgcgtttaaatctattactgtcaccctggcctttccatagttgctggtgtcttgtccactatta

SEQ ID NO: 52802 - DNA, 122 bp, Homo sapiens
cccagtggagggagaaccaagcaagactcatttcgcgttttcaggcaggactggcagcaccgctcccacgctcagcctcccccagctatgatcctcccagtctcacagagtcatccctgaga

SEQ ID NO: 52803 - DNA, 122 bp, Homo sapiens
cgacagcgccacatgccggctctggaggccgcactggatatcctgggcgcgcgtgcctggcggcacctgaacttcaatgaacacctcctccaaggtctggtaccactggccccacggggtcc

SEQ ID NO: 52804 - DNA, 122 bp, Homo sapiens
ggaggctgaggtggggagattgcttgagcctgggaggtggaggttgcagtgagctgagatcgcaccactgagctccaacctgggtgacggagtggtgactgaaactaattatagctcccaga

SEQ ID NO: 52805 - DNA, 122 bp, Homo sapiens
gatcgaaccggggacctttcgcgtgtgaggcgaatgtgataaccgctacactacggaaaccggtaggcgtcagggttctttaaattctcctatagagataatgttgcagtgatagttgcgtt

SEQ ID NO: 52806 - DNA, 122 bp, Homo sapiens
ccctggttaccagcctcccccgttgttaggagccagaccggaagtggcgcgcatcttcggcgccgccgagaaatttctcacggtctctcgctgccccagggcgccaaaaggagaccaagaat

SEQ ID NO: 52807 - DNA, 122 bp, Homo sapiens
tgatccttctctccgcagagcccatgccaagcagcgaccctgagccgacagccggagcgccgggcaaaggccgcctcaacagcctcgcaccggcccatcaaggggatcctgaagaacaggac

SEQ ID NO: 52808 - DNA, 122 bp, Homo sapiens
gcactcgcagcctgtctgaagtgcagaggttcaggcggccaagggacccgcgccggtttccgcgggcgacctgcaaatcctgcccggggcccggcaggcgctgcgtcccggcgcgttggcag

SEQ ID NO: 52809 - DNA, 122 bp, Homo sapiens
agggttggggatggaaggttgggactgggggctaccctgtgcacttcttccctggacacacgctttcaccgggacgtggtcagatcacgacaacaggtaacctttagtcagaactcaccacc

SEQ ID NO: 52810 - DNA, 122 bp, Homo sapiens
ggggcccgtgggatgcgcgtggcccctctgggactctccttcctcctgcccagctggacccggggagcgagcccctgcaccctgagtcaggagccttcctgagccacttggttctgtcccat

SEQ ID NO: 52811 - DNA, 122 bp, Homo sapiens
tggaactgcttacctctcaaacaaaaatgatgctactggaggtataatatcttgagtaaacgaactcaccttttagatagtagccctttgtatcttttaagatacactcttttaagtcagta

SEQ ID NO: 52812 - DNA, 122 bp, Homo sapiens
gaagcccctttggctctctcctccctttgtccgactcgcgctcccgccctcccggatccgcgccctcaccttgaagccctccaccgcctcctcgagcggcagcacgctgtggccgcggtgct

SEQ ID NO: 52813 - DNA, 122 bp, Homo sapiens
cctcctagtcccacttcctgcctctgccaagtggcctctagaaggaaccaccctcaaatacgtgtcgggggtgatgtggtcctgggtaagggttaagggctttgtggaggtgctggaagctg

SEQ ID NO: 52814 - DNA, 122 bp, Homo sapiens
aggccgggatgtgaacccccatcagcatcaagagcccgtatttctaaccactgtactagtcgcaagtaaaccctagaaagtgttttaatcgctgacagtctaggaactgggaaaatgggctc

SEQ ID NO: 52815 - DNA, 122 bp, Homo sapiens
cctgctgagtgaccttggccaactcgctgatgacttttcttattaattattattatttatcgatttttgagactgggtcttgctcggttgcccagggctagagtgcagtggtgtgatcatag

SEQ ID NO: 52816 - DNA, 122 bp, Homo sapiens
ctgtagtttgactccatgatgtatgaaaataaacgcgctttgaccaaggaaaggcgcctacgttgaacgattccagcctcagctttaaatatcaccttaggtgttcagagctctgcttcatg

SEQ ID NO: 52817 - DNA, 122 bp, Homo sapiens
tcctgtaacgggccccaggggcgcaacttgaaccatcgcaagcatcgaaaagtctcggtgcggtccttcaaagggacatagtgggatgtacagagcagaggattaaaaagcgtttcattcat

SEQ ID NO: 52818 - DNA, 122 bp, Homo sapiens
ttgacaagtctaattcctatccctgtttcgctgctctcatcttctataagttaccacttacgtaaattttgtatctttccattcttttacacaaatgtgaatacattttccccccatttaca

SEQ ID NO: 52819 - DNA, 122 bp, Homo sapiens
agcagagcgagactctgtctcaaactacaaacaacaacaaaaattttattgataaaattgcgggctctgaaaagaaaagatcttgaacacccaaccaatgagaataaacagacggttgagaa

SEQ ID NO: 52820 - DNA, 122 bp, Homo sapiens
ttctgtcttttaaaagtttgttaacttaggtcaacactaaatccgcgagaatgctcctttcgtatctaggttatgtggttgttgatataaaaccagaaataagaaagtggttttatataaat

SEQ ID NO: 52821 - DNA, 122 bp, Homo sapiens
cacagcatagttcatatataggtgcttcccacagagtaaactctgcctgtgatgttgtcccgttcttccaggtccgtgggctgctggacaccctggtgactgacctgatggtcctggctgat

SEQ ID NO: 52822 - DNA, 122 bp, Homo sapiens
gacttcacaaccacagttgcgtaaatgtccccatagcgtctggctgaggagccatttcatcgtggcctcctccactcacctgctcttccttcacgccccaaggcgctggcctctctttccag

SEQ ID NO: 52823 - DNA, 122 bp, Homo sapiens
ggagagacacactctggattgggccctgttgtgggttgaattgtcacccagaaagggaagcgcagaagtcctgacctccagggcctcagaatgggaccttatttgggaattgggtttttgcc

SEQ ID NO: 52824 - DNA, 122 bp, Homo sapiens
ctcttctgagaaattatagatccacggggagaaagtccacacccagaaagacccacgatccgtttactcagcagaaaacgcagactcagcaggggcctggggcctgaggccagcagacccgg

SEQ ID NO: 52825 - DNA, 122 bp, Homo sapiens
accgccccagcccggggaggagcgggagcagggagggaggagggctgggggtgctggttacgtaaatgatactagcccagtgagaggcctccaggctggggctacgagaggaggagggacca

SEQ ID NO: 52826 - DNA, 122 bp, Homo sapiens
gcaacaaactgtcacatgagtgatttatcctgggagatgctcccagcacagcacctaacccgaaaatccagagacaggtcctctgcctctaacctcacacacacccagccctcgagcctgtc

SEQ ID NO: 52827 - DNA, 122 bp, Homo sapiens
ggggcattagagatgagaatcagggttatttcctcacttttgccaattggaactcaggagcgactgcagagcacctactgtgtacctggcactgttctaagctcttaggtatgtcagcttat

SEQ ID NO: 52828 - DNA, 122 bp, Homo sapiens
gactttgctgccattaccatcccacggtctaggggagaagcccgggttggggctggtttccggcctatgctgccctcccagggggctccacagcggcctctcagcaccttctcccctgcccc

SEQ ID NO: 52829 - DNA, 122 bp, Homo sapiens
cctgacaccctgctgagagcttgaaagctcattcctcctgggcagaaagctcagcatcaccgccctcaccacatggccaccacaaatacaagactgcaagtggtaaaactgcattctaagat

SEQ ID NO: 52830 - DNA, 122 bp, Homo sapiens
tgcgggccgtggagggcagtgcaggcaccaggcctcgtggggagagcgtgggccatgggtcgggggtcctcttgccgccccaccctcccttactgaggctcggaggggaagccgctggagga

SEQ ID NO: 52831 - DNA, 122 bp, Homo sapiens
ggacgggtcgcctagcggtgggcgagtagggctgtgcgtaaaaggatctagacagacagtcgtgcgcccgcagggttgcaggacaggggcaggccgagttgtggcgcgtgtgtgtttgtgtg

SEQ ID NO: 52832 - DNA, 122 bp, Homo sapiens
ctgcactccaacctgggcaacagagtgagactccgtctcagaaaaaaagaaaaaagaaaacgaaaggaacctatctaatgtgtcaaagctttagtgcaaatacttgggtccaaactcagtag

SEQ ID NO: 52833 - DNA, 122 bp, Homo sapiens
accgcctcgcgcccccggatcccggattccgcgccccggcacatggcacagctccagtggcgaaggaataccttagtgtttgacgtttttgttggaaagtaaggagcaggcagattgttaat

SEQ ID NO: 52834 - DNA, 122 bp, Homo sapiens
ctcacctttgacctgctccataggtaagtgggcagcagcctggcaggtgggcattgtaggcgggcgggccagtggacaacttccctaagcccagtcaccaccctctctctccacaggcccgc

SEQ ID NO: 52835 - DNA, 122 bp, Homo sapiens
gggaaggtggaactcggggtgctggggaaggctgaggcctggaagtgctgctggtctgggcgatgtctcatctgactactgcaaagggaagcaggaacaccgcagctacgggggaagatgcg

SEQ ID NO: 52836 - DNA, 122 bp, Homo sapiens
tttggctgtaagcaagaggaaacttaatgaacagtgacttaggacatttagatttcacttcgcaagaaatccagataggtagtgctgggatagattcagcagtttatcggtataggaaggga

SEQ ID NO: 52837 - DNA, 122 bp, Homo sapiens
aacctacacaaagcagtgtgccggcccccaagaagtctgaacacctgtggcagacagcagcgtcaagcagctgtggttaaagccctcgtttccttaaatgactcccacggtcaggacgagca

SEQ ID NO: 52838 - DNA, 122 bp, Homo sapiens
gacgtgagtctatctctgccttcaagctttcctgggctctcgtcgctcctcctcccgacccgcccatcccatctggggatgagaagattgagggtgcagagccctgtcctgcagcggggatt

SEQ ID NO: 52839 - DNA, 122 bp, Homo sapiens
cccccagccccccaccgacctactttactgtctccaaactcgggcagcccacctggcccccgacgaccccagcccctgcaccgggtaccccgacgttccatccagacccgcgtttcaccagg

SEQ ID NO: 52840 - DNA, 122 bp, Homo sapiens
attcaccttcctcactgactaaaattaggggtttatataacagggaagaaatgttaactacgtatgagaaaacaggaactaaggaagggtaaggaaacaataacgaagaatgaggggtctgg

SEQ ID NO: 52841 - DNA, 122 bp, Homo sapiens
ccatcaggcaccacgatttcatgatccccaaaggagtagggcaggttcctgaagatctcccggggtcggtccactggcgctgggccactgactccatggaagtggttggtgcagctggcctt

SEQ ID NO: 52842 - DNA, 122 bp, Homo sapiens
acacacacacacacacacacacacacacacacataaagttgatcattcccactgcagccacgttagctgtccagtcccataaacgatacattgaaacatgagtcggactgaacgcaggcaag

SEQ ID NO: 52843 - DNA, 122 bp, Homo sapiens
tgtgtgtgtcactaatgagaactgttggtagaatcaggaacagtattaaaccctagaagccgcctccccctctccagcctcttcagatccagcattttcatcagggaaagcccctttcaata

SEQ ID NO: 52844 - DNA, 122 bp, Homo sapiens
cctccgcccagctccttggcctcccccggctgtgggctccgacccttccgtcccctgcagcgcctgcttcctggaccagagaccgaaagcctctcgctccgctgggcctcagcaagcccagc

SEQ ID NO: 52845 - DNA, 122 bp, Homo sapiens
ccccccggacgcagagctctggaggccaacgaggcgtgtcttcctttcatctgggagtggcgtggggaagaagagacttaagctaaaattggtgggctaaatagttggaaaggggcctggtt

SEQ ID NO: 52846 - DNA, 122 bp, Homo sapiens
gggtgtcaagtattttcttgaagcaaggcatccccgcccttagcatagtggggaacttagcgaccataattgtgaatggcagtattagagtctggagtcccactggccctccatgggcagac

SEQ ID NO: 52847 - DNA, 122 bp, Homo sapiens
gcagcctcccgggcctcgtgctgatcatgtctcactcccgcctggctggggatctgaggtcgcgggttcaaatcccacccgagcacccaagtccctcagtgcccccggccccgggccttttg

SEQ ID NO: 52848 - DNA, 122 bp, Homo sapiens
gacttgctcatgggatgagcaatgctgtgggtattggatggaccactcaggcagcctggccgcacacacacacatgcatgctacatatgtgtacgctcagaccacatgcctgcacatatgtc

SEQ ID NO: 52849 - DNA, 122 bp, Homo sapiens
tgaaaatcctaaaattttacacaaatacataatagtacagttattgtatccagctgtaagcgcagccatctgcacaaactcaaggctgagttgtaaagtaacctaagagtggggtcagctca

SEQ ID NO: 52850 - DNA, 122 bp, Homo sapiens
gaacttcctcgtcgatgaaatcagtgtctatgacattgggcggcagcattgcagcggggacgtgggccacggaggcgggcatgttgccgctgccgctgccgccgccgctgttgctgctgccc

SEQ ID NO: 52851 - DNA, 122 bp, Homo sapiens
gtgcaagtgcatgtgtgtatgtgcacgcaggttgctcctaggggtgcaaaggcgcgcgcacgggtgcggggtgcgcgccccctcgcggcgccttcacggccctcccgcccctcgccctgcag

SEQ ID NO: 52852 - DNA, 122 bp, Homo sapiens
gaatgaatgaatctgtgaaccaataaaccaataaagaccatgtaagagacaatgtcttgtcgaaattgtcattgttttttgattccagacaaatggggtgtggggaacagaaaggcgatttg

SEQ ID NO: 52853 - DNA, 122 bp, Homo sapiens
cccgcaaagcggggggatgtgacctgtgggcccccagcaggggtaggaggcagttcagcccgagagggggcgctctagggcctggatcctgcatccctatttcctggaacacacccaacgcc

SEQ ID NO: 52854 - DNA, 122 bp, Homo sapiens
ccgcgttactccgagcgctcccattggtgcattccttggagccagggttgctattggtggcgagctggccgcggcgaaagaaccccggccgcttgggctagtgcggcggcggccaggcggag

SEQ ID NO: 52855 - DNA, 122 bp, Homo sapiens
cctgcagcacttcgtcgggcagcacggggttggccaggtgggcgtccgtctcccgggcggcgctggcctcccgcagcccctccaccagacgccggtactcgtcccgcaggcgctgctcgtct

SEQ ID NO: 52856 - DNA, 122 bp, Homo sapiens
cggccgccactgtgctgtcccgggagccctacatgtgtgcacagtgcaagacggacttcacgtgccgctggcgggaggagaagagcggcgccatcatgtgtgagaactgcatgacaaccaac

SEQ ID NO: 52857 - DNA, 122 bp, Homo sapiens
taggacctgagtggtttggttgggggagggggaaaaagacatctcagcaggtgtcttccccggaatgagcactgaggccagaggggaatctgaaatctaattagcaggagggagccgggtgc

SEQ ID NO: 52858 - DNA, 122 bp, Homo sapiens
tatcctagaccttacttcaagaaaatctggttatgtcgcctttaagagcaacccaagccccgtcctgtccgtggagtccggcactctgtttaccagctcccctgacggtgccactgagcctc

SEQ ID NO: 52859 - DNA, 122 bp, Homo sapiens
tggctggtgaaacagaggcagatgtcctcctccccaggcagctgtttaggggctgtcacccgttttgtcagctcttcccaggacaaccctaaaaggcaaatgtctgaccatttcatctgcct

SEQ ID NO: 52860 - DNA, 122 bp, Homo sapiens
cgcggccccgagctacggggctcccggcccgctcctcggcgccccgggcggcctggcgggcgccgacctcgcctggctgagcctctccggccagcaggagctgctgaggctggtgcggccgc

SEQ ID NO: 52861 - DNA, 122 bp, Homo sapiens
cagatccctgaaagcggagctccagataggaatgtctgcatcatcttggcagggcccagacgggagaagatgctctgctgccacggacgatccctcccgctctcctaactcttctctgaaca

SEQ ID NO: 52862 - DNA, 122 bp, Homo sapiens
ttaattttttttgagatggggtctcactctgcctcctaggctggagtgcagtggtaccatcgtagctcactgccaccttgatctgcagggctcaaatgatcctcctgcctcagccttccaag

SEQ ID NO: 52863 - DNA, 122 bp, Homo sapiens
tccagggtagagccaggacatggttttggtttgcaggaagcttgccttgaaatatcaccccgacaagaaccccgacaacccggaggccgcggacaagtttaaggagatcaacaacgcgcacg

SEQ ID NO: 52864 - DNA, 122 bp, Homo sapiens
acctcaggtgatccgcccgcctcggcctcccaaggtgctgggattacaagtgtgagccaccgcccacggccggtagaacatctgaagcttctaaagcgaactctaaggtttcattggcacga

SEQ ID NO: 52865 - DNA, 122 bp, Homo sapiens
gggattacaggtgtgagccactgagcctcacccaaagtgtgcttttgctaattggagaatcggggtcccaggactggaaatgcagctgcccagggtcttcagacattgtgtgtctcggcccc

SEQ ID NO: 52866 - DNA, 122 bp, Homo sapiens
ttgtttgtttaaactgttggtggtaattgtcacatctcccctgcctttctccagcatactcggagacgggttctccctcgttccattccctagcaatcccggggctcgggtcctttcctcct

SEQ ID NO: 52867 - DNA, 122 bp, Homo sapiens
cgcccgccctgccgtagaccaggcagcgaggaagcccacagtctccgggggcgctgcgcgcgaagtagcacgtgcttctcgaaacaccgcagcccccgggtcccgccccgcccggcgcgcgc

SEQ ID NO: 52868 - DNA, 122 bp, Homo sapiens
caacatggtgacacctcgtctctactaaacaaacaaaaattagctgggcgtggtggcgcgcgtctgtaatcccaactactcaggaggcgagggcggaggcggaggcggagttggagtttgca

SEQ ID NO: 52869 - DNA, 122 bp, Homo sapiens
tgtcagcatccaaatgcccaagtgcctgcctggctgccaagagcctgcaacgcacaccgccgattgcatgtgaatgcaactccaagataagatgccaaacttccaccaccttgtcactcttg

SEQ ID NO: 52870 - DNA, 122 bp, Homo sapiens
tgaccttgtgatctgcccgcctcggcctcccaaagtgttgggattacaggcgtgagccaccgtgtccagcctgtaacacttcttatagcactgagttgaaaccttgctcctcctggttcctc

SEQ ID NO: 52871 - DNA, 122 bp, Homo sapiens
gcagccaaacgaaacccttagtgtcctctgctaactccagggatttcccccccctcttttcgctgccttttagaagtatctctgggggccagatctgggcttcatcagcttttctcccgacc

SEQ ID NO: 52872 - DNA, 122 bp, Homo sapiens
ctcgggggggagtggaaacctggtgccaagccccaaagactcattgcagtaaagccactccgtcctctctgagtccacaggggaagctggccaaggtcacagaccctagctgccttgtggac

SEQ ID NO: 52873 - DNA, 122 bp, Homo sapiens
taaagtaaacgtagttttccaagtagagtttacttgttcacagatgtactctctctgtgacgaatgccccatcttttcaattcttagagtggccctgcttggggtggaaaatgttcagtcac

SEQ ID NO: 52874 - DNA, 122 bp, Homo sapiens
aactgagatacaactggatttttccctaaatttgttagataattccacaattgccaatttcgctctgtttgttgagatctgatcttggtttcaaattttaaaatttcactgtataataaaat

SEQ ID NO: 52875 - DNA, 122 bp, Homo sapiens
cctgcatctgaagatgttctaaaccttcatttaagcaagaagcaagatcaagatccgttccgtcagttacctggagtctgtcatctttctgaataggggacagaatcacctcaaatttaact

SEQ ID NO: 52876 - DNA, 122 bp, Homo sapiens
ctgaaattgcgtttaccccttgggtcctaacccagctttgtgacgactgtggtgcgatcccggttccctggcagtacttgtcaacagggtcaaatgcctgttccttgccggtctcttctgtg

SEQ ID NO: 52877 - DNA, 122 bp, Homo sapiens
caacacccgtcacgctgtcaattgaaaatgtgtctgtgtctgtaacaattgagtacgtcacgtgtccgttgggccccaggtctttatctgtggcttcaacctggatgatttcactatgtacc

SEQ ID NO: 52878 - DNA, 122 bp, Homo sapiens
acccttgtggcatctattaacttttctttaatcatgttttgtctctccaattagactgtacgttaattaagggtaaagagtttcagacatttcttctgtagccatcacatctaatactatac

SEQ ID NO: 52879 - DNA, 122 bp, Homo sapiens
cacatgagttagtttccaatacccttctacagaaacacctaaaacaagctttctcaaagacggggcttttgtttggggtgacaggcaagcaacaagtagctgaagcacacgaacaccgtgga

SEQ ID NO: 52880 - DNA, 122 bp, Homo sapiens
ttcaaagcatgtggggaaccacaccacaacgttcagactgggaagcccaactgcagttcacgacttttgggtggtgaggtaggaaaatggatgaaagcaggagggtgtttaaataaaaaagt

SEQ ID NO: 52881 - DNA, 122 bp, Homo sapiens
agagcctccacctgagccacagtggttacaggcctcaggggccatgtccagcagagattccggaagtgacttgcagttgttgaagaaggattccagcccggagggaggggcgtaaggagccg

SEQ ID NO: 52882 - DNA, 122 bp, Homo sapiens
cagcgctctgctatattccccaggagcagaggatgccacagggggcgtgagagaagaacacgtgttctccaggaagcagaggaggggtggaaagccaaggccattccagctggagggaaggg

SEQ ID NO: 52883 - DNA, 122 bp, Homo sapiens
taaggcatttataacagggattagaccccgttccatgtaggagctggtggaggcatctgtcgaaggctggtacctctgcatctaggagtgggtggattgtatgtcagcagggccagtggtca

SEQ ID NO: 52884 - DNA, 122 bp, Homo sapiens
tgatccagccgcagcctcattgaacaggatggtgttgccaggcccagagaggggcagtgacgtccactagtcagtgggaggcagagtcagggccagaagccaagggcaagcttttccaggac

SEQ ID NO: 52885 - DNA, 122 bp, Homo sapiens
gactcttctatgattggccagaaaagtcaagcgggaacccggaggttggcaggtggggggcgggaacaaaacaaagttgttaccctagcaacggagagacgccacgctctgcacagtctatt

SEQ ID NO: 52886 - DNA, 122 bp, Homo sapiens
gtgtgcgctggcgggcgtgctcaccatcgccatgcccgtgcccgtcatcgtgaacaatttcgggatgtattactccttagccatggctaagcagaaactaccaaagaaaaaaaagaagcata

SEQ ID NO: 52887 - DNA, 122 bp, Homo sapiens
gatgagcgacgggcggatgacttccttccggacgcagatgaggaagggattccttccggacgcagatgagggacgggcggatgattccttccggacacacctctcaatgtgcacgtgctgct

SEQ ID NO: 52888 - DNA, 122 bp, Homo sapiens
ctgaaggaaatccggaacggctgccagcagccgtgcgaccggaagcccactttacctctgcgccttctgcaccccagcccggacctggtgtctcaggaagccacgctgtctgaggcccggct

SEQ ID NO: 52889 - DNA, 122 bp, Homo sapiens
agagggacgccgcgaggagccaataaagctccgcaaccggaagtgtcttctgggaggggtcgtacccggaagtgtggcacctcccgggccgcacccggaagtgtgatgccaccgccgctacg

SEQ ID NO: 52890 - DNA, 122 bp, Homo sapiens
ctgcaaggaaaaaaatcttctgtggagatcagagcgctggcctcggaccgttggattgggcgagcatcttgggtaaagagaacagagctttatggctctgggccggcctgagggggttaggg

SEQ ID NO: 52891 - DNA, 122 bp, Homo sapiens
tgggccttctgcaggcatgtggtccagcattccccaggcccttccagctgaggccatcaccgctggtccccaaagggcagctctgggggccatgttcaggcctagtcctctgtaggggaggg

SEQ ID NO: 52892 - DNA, 122 bp, Homo sapiens
ccaggaccacgatggcggtggtgaagacgcggtaggagtgcaggaaggtgttgaggaagtcgatgctcaggaagcgcaggtccgtcagcctctccagcagccgctccacactggcgtagcgg

SEQ ID NO: 52893 - DNA, 122 bp, Homo sapiens
ggcgacggtgaaagtaagaagcaccaacattttcatagggcagggcgaggcgaggggtcacgtttaaagcccagagcgggatgtgccggcgctggccgctacgcaggctgctggaccgatgg

SEQ ID NO: 52894 - DNA, 122 bp, Homo sapiens
cacgtggatgtcaaaggttcccgtgtgtgagcacgtgcatacttgtatgtgcatggggtgcgggcatgtatgcctgtgtggctggagcgtgggctcgtggagaacgtgtgtgagttgggtgt

SEQ ID NO: 52895 - DNA, 122 bp, Homo sapiens
agggcaggccttctgggaacatgaccccaaaaaccaaaatttccacgggcggccaatgggcgcagggcgcggtgtatgcccgctcctcctcctgttttcttcgaattcgttcttcgaggtca

SEQ ID NO: 52896 - DNA, 122 bp, Homo sapiens
tgttcttccccaggcctggtgactcacgtatcggaaaggcagcagcaaggctgtgacagccgccaggtcagccagagtgggggcctccccggccaagtaggtgtgcagccgaagccactcct

SEQ ID NO: 52897 - DNA, 122 bp, Homo sapiens
catgcccctaccccctggctcccacagccacctaccggaggcatggcacagggagggcctcgcctcactgtcacagcagcatggcacagcaagatcaacttcatgctcggtgccaaagctga

SEQ ID NO: 52898 - DNA, 122 bp, Homo sapiens
aagagggactcaaaattcagaaacttcagggcctatcaaattcttaccagtatgatttcacggttaagagcttaaagcctggagacaaaagaagcctgctttccctttcgctgtttagtaac

SEQ ID NO: 52899 - DNA, 122 bp, Homo sapiens
aagtcagccctctggtcccagctctcccattgactggctggtgggtgtcagcctaagagccgtatggacttcgtcagtgccggagtgtgaggccctttgtattttggagccattaccagaaa

SEQ ID NO: 52900 - DNA, 122 bp, Homo sapiens
gggtccaccgaccccaagaagcccaatcagacggggtcctcaacccaaaactcactctgacgccgcccgcggaggcccgaggtggtctgcgcaggcgcgctgctggcccggcccgccggcga

SEQ ID NO: 52901 - DNA, 122 bp, Homo sapiens
attcagtccctgagagggtgggtcggccattattagggcatggagcacactggcaaggatcgaacttggctgcatactcttgcaaagctttcctgaggttgttccgttttgtcactgcacag

SEQ ID NO: 52902 - DNA, 122 bp, Homo sapiens
ttcaattcaggaagcattagagtcacatcttatcaaaaggggaaaactcaccattttgggcgtatttggtacgtagacaaaattttgagcctaaaagtcatgactgcgatatgccaagtgct

SEQ ID NO: 52903 - DNA, 122 bp, Homo sapiens
gaaggcggagagctttgccagctggggatagacatctggcaaaggatcagaggggtgccacgtcaacgaatccaccccagagctggatttaaacacatttcctcttggtgctatgcaagagc

SEQ ID NO: 52904 - DNA, 122 bp, Homo sapiens
aattgccacttaattcacagactacatattttttttacctactgaatgcattttgtttttcgtctgatgtgttagaatttcttttgaaatgctgaagctctgtaggctgttgctcaggcatt

SEQ ID NO: 52905 - DNA, 122 bp, Homo sapiens
gggggccaaggctgtcaccacataaaagctccggcagagaagtgctcgctgtgtccccgccgcggggggtacaagcagccgctccgcgccgcgactacccggcccgccgcccccggacgtca

SEQ ID NO: 52906 - DNA, 122 bp, Homo sapiens
ttttccaaaaatcagtcatcttgccctcttggctcagcctcatacagcacatctgggatgcgtttactagaaacttcccccggaggcctgagcctggtgcagaaattgagaagactggaaat

SEQ ID NO: 52907 - DNA, 122 bp, Homo sapiens
ggtcccctgcgtccactgcccaggcgacgcaagctacagcggcgtcaacgcctgggtcggcgctaggggcctgggcctgctccccacccgcctccagagggagggcagcccttcgcctacct

SEQ ID NO: 52908 - DNA, 122 bp, Homo sapiens
gatttaatttaatttttcactccccagagtctaatatggattctgactcttaagtgcttccgccccctcactacctcctttaatacaaattcaataaaaaaggtgaaatatattgatgggat

SEQ ID NO: 52909 - DNA, 122 bp, Homo sapiens
gtgccacagtgtgcgctgcacttgggagggtcaccgtgctggaggtcttgatagaaggcccggcccccctgcagttccctgggcagtgccagagtccggggagcccctccatggtggagccc

SEQ ID NO: 52910 - DNA, 122 bp, Homo sapiens
gagggtgctgtcaataatgcattagcccaaatctgtttgaaatacagcaaggaaattacacgatattcatgggaacctgaaagaattatcagtaaacaaatttaatcaacttgatgttatgc

SEQ ID NO: 52911 - DNA, 122 bp, Homo sapiens
ttcctagatgtgatggcggccgggaagaggcactcttcacttcccagatgggatggcggccgggcagagacgctcctcactttccagactgggcagccaggcagaggggctcctcacatccc

SEQ ID NO: 52912 - DNA, 122 bp, Homo sapiens
ggtccagcgaggttgaataactcacctaggtcgcacagctcagaaagcccactgcaattccgggattctggttttgttttgaggttgccccgggcttctgaggaggggtcagtgggctcagc

SEQ ID NO: 52913 - DNA, 122 bp, Homo sapiens
cctgacctcgcagagcctcagcttcatctgtagaaccatgggaacaataatgcagtcatgcgccagagaaggacgcttcggtcatcaagggactgcatgtacgacagtggtcccataagatc

SEQ ID NO: 52914 - DNA, 122 bp, Homo sapiens
ggctggtggtgggaatctgccaggcagtgccagtcccatcccatgacctcccaatagatgcgccacatgaggcaggtggcaccagcacgacgcgcgcagctcgaacactctgggcttcatgc

SEQ ID NO: 52915 - DNA, 122 bp, Homo sapiens
cctcccccgtgtccactgcaaagtgctggagcctcagaatataatcagggcggcctcccccgtgtccactgcaaagtgctcgagcctcagaatattaacaggcattttccaccattttctca

SEQ ID NO: 52916 - DNA, 122 bp, Homo sapiens
cggcttcagaggtactccttgtcgctccagagagagaacttcaagaagtgaggctgccaccgccctgggatctctgaaaaggaggtttcagccacgaggcagctgctcccaggacactgagg

SEQ ID NO: 52917 - DNA, 122 bp, Homo sapiens
cacatccggcgaggctggttcctgggactcaggcaatattcccgatgaagctgatcaaatcggatttcaatctccctctgacggttctctccatggccctgtcgtattgttggtctggaaac

SEQ ID NO: 52918 - DNA, 122 bp, Homo sapiens
acttggtaagcacccttggctttggttctccccgctcccccaggtgacctttgggatggccgttgtgaagacaccatggtgcgccttctcgggatgcccaggagaggctgtcacaggggctg

SEQ ID NO: 52919 - DNA, 122 bp, Homo sapiens
ggtcaggaggaggccaagccagacgtccagctcaggggcacttggccatgctgaggactgcgcacctgggccacgtggtccgtgggacaccctggagctcgggatccctttgcaagggttgg

SEQ ID NO: 52920 - DNA, 122 bp, Homo sapiens
tgccggaagtcgctcgacttctacttccggtccgttcaaaaagcccgcgaggctgaggggcggttgttgttggcagctgtggctaaggaggggagaacctctgctccccgcccgtcttctct

SEQ ID NO: 52921 - DNA, 122 bp, Homo sapiens
taatttattctataatttaaagaattccatgttaatgaaagagaagtggaatcctgagagcgagctaaaaatggaattaaaaagggcccattcttcaggcaatattaatgagagctttgtat

SEQ ID NO: 52922 - DNA, 122 bp, Homo sapiens
tgcgcctgcactccttagcccttgggtggtcgatgggactgggcgcagtggagcagggggcggcgtgtcggggaggctccgggctgcacaggagcccacggaggcgagggggaggctcaggc

SEQ ID NO: 52923 - DNA, 122 bp, Homo sapiens
ttcgcagccgagtggtggaaatgtattggctcttcagggcgggtctggtagtgtctcgtccgtttgggagtgtttttttttttttctggattctttttcggttccatgggccgggctgctgc

SEQ ID NO: 52924 - DNA, 122 bp, Homo sapiens
atcttggctcactgcaacctccgcctcccgggttcaagtgattctcctgcctcagcctcccgagtagctgggactacatgtgcccgccaccacggccagctaatttttctatttttatagag

SEQ ID NO: 52925 - DNA, 122 bp, Homo sapiens
ctgcgcgcaggctgcctccgggctccccgggctcttcgggtgcctgctgcagaaggaaggcgctaaagccaaaaagcttctgcttgaatttctgggttacaaggcagacagtcagtcttaga

SEQ ID NO: 52926 - DNA, 122 bp, Homo sapiens
tcgacggtgtcctgaagcgcgctcccggggaggtgttgcagccatggctacggcagccggcgcgacctactttcagcgaggcagtctgttctggttcacagtcatcaccctcagctttggct

SEQ ID NO: 52927 - DNA, 122 bp, Homo sapiens
ggcgagccgaggagactggaagacaaccaaggccaccgctaccgccgccgccgccacctccgctcccctatctgggcaccacacaaagaggccgctgaacgcgcgcgcaccctccccgaggc

SEQ ID NO: 52928 - DNA, 122 bp, Homo sapiens
aaccagcagagcacaaaaacgccaatgaccacagccagcacgaaggtgaagcgcttctcccgggtcagctgcgcccgtcgacgccaccactgcccacctatagcacccacgcccctgcccag

SEQ ID NO: 52929 - DNA, 122 bp, Homo sapiens
ccgcacgacgccgcgagaccgcgaacccccccgggccgggacgggctcggcccggagggtcgccctttggccaccggcccctcctgcaaccacgacagatctttgcccctttacaagccatc

SEQ ID NO: 52930 - DNA, 122 bp, Homo sapiens
accttcaacgttggcagcatgccctcgccacagcagcaggtcatggttgggcagatgcaccgaggccacatgccgccactggtgaggcttcctgtgctcgtcccccactcgttagtctgctg

SEQ ID NO: 52931 - DNA, 122 bp, Homo sapiens
gtctgtgtgagcgcacgtggaaccgcattcgttctggttctgctgtatgatgacaatgaccgtggcgctcaccctgcgtttgccaaccttcaccgtgcgtttgatgttcaaaagctccctgt

SEQ ID NO: 52932 - DNA, 122 bp, Homo sapiens
ttctcccttcatccacttcttacagtctaattgactccctcctccttcttctttgaacaacgagaagactctccagttgtccaacttccacccctccagctgcaacatcgtcatcctttagc

SEQ ID NO: 52933 - DNA, 122 bp, Homo sapiens
aagaaagctgccatcacaggcagcagacctttgttctctgaccacttgataatgtcaggacgcggcaaaggaggtaagggcctggggaaagggggtgccaagcgccaccgcaaggtgctgcg

SEQ ID NO: 52934 - DNA, 122 bp, Homo sapiens
gtggcttctataacaaagtaccgtggaccgagcagcttgaacaacagaaactcccttccccgcagtcctgaggtccggaaatctgagatcacggcgtgggcagggctggttcctcctcaggc

SEQ ID NO: 52935 - DNA, 122 bp, Homo sapiens
gccgaggctcggcgtctttgggtgtccacggaagagactggaagctcttctccccgggaacgtgcggggagccgcggagggaaagaggagaatatggtggcggtgtggtcgggcggcttcta

SEQ ID NO: 52936 - DNA, 122 bp, Homo sapiens
tctatcttagatgttttataatgcaggagtcaacatcagtcactgaatggcaggggatatcgcttctgaacaagatatggaccacatttacaggaccagggagggaaaggtgccatattcat

SEQ ID NO: 52937 - DNA, 122 bp, Homo sapiens
ctttttttctatccatgagtttttaatgtttgctctcctttctccactgtttaggattcccgttaggtgttcagatcactgctttccttctgccggctgctgtctcttatcatccaccttcc

SEQ ID NO: 52938 - DNA, 122 bp, Homo sapiens
ggaagccctcccacacccacaggctggcggggagcctctaagccgatcatagaggacgggcgtgttattagaaactctgacgctgcaaagagcagctctggtgagcaggggaccctgcaggg

SEQ ID NO: 52939 - DNA, 122 bp, Homo sapiens
ccacgcttgaggagctcttcagcccgctgctgcactgtgggaagcccttcctgggacgggcgaggccggaacctgctccctcagcctgtggggaggtgtggagggagaggcacgggcgggaa

SEQ ID NO: 52940 - DNA, 122 bp, Homo sapiens
atatcatcctctcgccctctggatattaggaacagtatcacggggtggggggtgtacatccgtgcgatattgaaagtaatatcctctcctccacggtttttagaaatgaaatcacagtgggt

SEQ ID NO: 52941 - DNA, 122 bp, Homo sapiens
atgtttgatggctttgaaaccagctgatccaaacccatctaattctggctctgagttcagcgctcagagcccaaggatggggggcccaaggagctgtgagggagagggcagggaacacacca

SEQ ID NO: 52942 - DNA, 122 bp, Homo sapiens
aagccctgcccctttcagggacccagaaattgatttctgccccctctagaactacccacccgctctcattgaatcaagagtaggtggaccccatctttagggatcttgtggtccaagctacc

SEQ ID NO: 52943 - DNA, 122 bp, Homo sapiens
gatgtggaaagttcaagggccatatgccagtgcttggagctctgagatggaagcaattgtcgcaggggtcaggcacgactttgccttgatgacggcaagggcgcaaccgggagaggagagga

SEQ ID NO: 52944 - DNA, 122 bp, Homo sapiens
gctgttctgcctgccattaggcagtgtgcgtggcaactgcatgggaagggccaatgcttgcggggagctgtgctgcgctcacccctgtgggataggaaccatcgataacgtatatgttgctg

SEQ ID NO: 52945 - DNA, 122 bp, Homo sapiens
cgtctgcataagaacaatccgaaattctgggccaggtgtggtggttcatgccagtaatcccggcactttgggaggccgaagtgggaggatcgcttgagcccgggagttcgagactagtctgg

SEQ ID NO: 52946 - DNA, 122 bp, Homo sapiens
ccccatggtgctgctaggttggaggggcaaggtgaccatctctgggtcggcaggggcggccgccccttcagcctcctgttcctgctgatggtggtaaaaaacgtagctgcggaaaacccctc

SEQ ID NO: 52947 - DNA, 122 bp, Homo sapiens
caaactttctgagtctgcatccaaatgtctcaccttgcccataaactttatggctgatgacgcccctaaaaatgtaggttttttaaaaaatgtaaccttttatttgtcgccgtgaggtgggg

SEQ ID NO: 52948 - DNA, 122 bp, Homo sapiens
ttctaggacatggaagtctcccctcttttaatgcagggtggtgtagttggaagagaactgcgcttggagtcaaagacccctgggtcctgcccctcactggatgccctgatacacccactagg

SEQ ID NO: 52949 - DNA, 122 bp, Homo sapiens
gaggaaaggatcatggtagccccttctgcggggagcacacaacagtcttcagttcttctgcggtgctctactcacaaaaacacatctttcaactgaaatcatagttcgctcaagatgtttct

SEQ ID NO: 52950 - DNA, 122 bp, Homo sapiens
gttagagggttttttaagcatctcaatctttgggaacacccacttttatgttcagactcacgcccactgtcttacctgaaggcagtaagatcaccaggaaaaagagtaatgcagaaagacag

SEQ ID NO: 52951 - DNA, 122 bp, Homo sapiens
aaaattagccgggcatggtggcccgcgtctgtagtcccaggcaggagaattgcttgaacccggggagggggtggggcggaggttgcagtgagccgagatctcgccattgtactccagcctgg

SEQ ID NO: 52952 - DNA, 122 bp, Homo sapiens
gaccctcactggggggactttattccctctgcccgccttcaaaaacatgtatgtattgggcgctctttaacttcttttgtcctggcctcttaactctgcttattcctgttcccactctatcc

SEQ ID NO: 52953 - DNA, 122 bp, Homo sapiens
gtcttccttcacggcccctagtcaactccacagagaaagcacactaccaggaatcagggacgcagaaaaattctcttcaacagatttcaaaagagggtccaattcctttgtcgtgaagaact

SEQ ID NO: 52954 - DNA, 122 bp, Homo sapiens
ggcctgcatggggtcctgagaggagtgagtgccgtcaccgagggccgcgccagactgcgacggatacagggagggcaagggtttccttttggcgctcccctttggaccccggagtgaaaaac

SEQ ID NO: 52955 - DNA, 122 bp, Homo sapiens
tagggatgtagttgtcgattttggcgcggtggcgctgggcgatacattcagcgatccacacgatgttgcgacactcctgctccttgagcttcacgaaggcatagaagacaccaaagtggaac

SEQ ID NO: 52956 - DNA, 122 bp, Homo sapiens
ccttcccaccttctcagctttaattggcttaagattgccctcccctgtcacggattggtccgctctccactaaccatcctccctctaactgccgtctacaattgggtgctcgccgccatcgc

SEQ ID NO: 52957 - DNA, 122 bp, Homo sapiens
cttccctccaaatccgatgggttactcaggcctaggatcctcaggcctagggggtcaaaacgccccgcgtccccaaccaagacccctgaagtctagcggggttccactggcctccggagcct

SEQ ID NO: 52958 - DNA, 122 bp, Homo sapiens
aggcaggactgagaaagcagcagagaatgaattcacctgactttactgccatcgtgtggtcgtctcatgcatagacaactggctcacaattctgcattcatttttccagtcattgagcctac

SEQ ID NO: 52959 - DNA, 122 bp, Homo sapiens
gtgaggtggagccagcatccagctggggggccctgtggagctgggtgctcaggtggaccccgtgttctactttatgccacaagttaacttgttaacttgctgtgtgaccttgagggggtcac

SEQ ID NO: 52960 - DNA, 122 bp, Homo sapiens
tccaatcagctgaaggcaggggagtgtcgcctaagggcccggaggaggaattcccaggaccgccacagagaagcccggcctgagcgcacagcctggactcgagactgcaacagcggctcttg

SEQ ID NO: 52961 - DNA, 122 bp, Homo sapiens
tgcggaggtttagcggaggcccggtaggcttgggccgggggggttcgggctgggagaggccgcccccgccatcagtcaccgaggtgggagggggggaagagaggttcgctgtggcttcaagg

SEQ ID NO: 52962 - DNA, 122 bp, Homo sapiens
tctgaggccatcatttcctgcactgtattctcaggtgcatgagcaatctcagggataagtcggcagcagcttgagttctgcacagcaggaatacttattattatactttaagttctagggta

SEQ ID NO: 52963 - DNA, 122 bp, Homo sapiens
gcacgcactatcgcgccggctcccacacgctcgcgcgcctcccgccccgcgcctccgtgtcggccggcggcgtccagggcccgcagagccaccatgtccactgcctcctcctcctcctcctc

SEQ ID NO: 52964 - DNA, 122 bp, Homo sapiens
ccaacgccgccagggccagggccagggccaggaccagcgacagggcagggccggcagtttcgctttggtgggcgcggagcagccgcctgggccgggcaggagtaggagcgggaggaggagga

SEQ ID NO: 52965 - DNA, 122 bp, Homo sapiens
gtggaaggaggcgtccgaggtgcagctcagcgcgctgtagtcgtagtcagaattgtctcccggtaagagggtcattttgggccttcacatccctctcgggcctgtggggagaagggagggaa

SEQ ID NO: 52966 - DNA, 122 bp, Homo sapiens
ttacagcagggcaaagttgtgtggatcctccacgttggcaaaggtggaaacacaggtatgcgagaaaaccccgagcatccacgagaacgggatgcagccgcgctctggacgcgcggcgggag

SEQ ID NO: 52967 - DNA, 122 bp, Homo sapiens
ccttcttaaaaggcttcttgcagagtgggcagacggggcggctccctgagatggggcggacgtctgtggtgcagctgcggcagaagacgtggccacagtcaatggtcacagggtcccgcagg

SEQ ID NO: 52968 - DNA, 122 bp, Homo sapiens
cgctccgctgcgcttggctccagatagccggcgtgggggtgtgggccaggggctgccaagcggggcgagggcagaggctggggctggggagcgcgcggtgggagctcgggcctggaggcgga

SEQ ID NO: 52969 - DNA, 122 bp, Homo sapiens
ttgagaagacgccctctggagacggggtgacagtgacagtggtagagcatcgactttgggcgaggggaggccatagtctgtggaatattaccctggggacaagcaagcaaacttctccacgg

SEQ ID NO: 52970 - DNA, 122 bp, Homo sapiens
aaatattaccagtttggtggtcttctaatgagaaatctaaagcacacctccccacccactcggatatctgtttctgatgatcacgtgacatctagcatatacgtctgtaggaaaagggaaaa

SEQ ID NO: 52971 - DNA, 122 bp, Homo sapiens
tgagccctatctctcatgtgtcagtggtcaccgccgaatccagacactccggccctgttccggaagagccctgatatccgtggctccatggcgctgtctgtcgataccatgcactctagctc

SEQ ID NO: 52972 - DNA, 122 bp, Homo sapiens
cgtcctctctgcctgcgccacaccccctccccttgggcaagccccgcccaggcttaccctcggtcagccccaggtggatgctccagtagatctgcagacactgcagctccttcttcatgccc

SEQ ID NO: 52973 - DNA, 122 bp, Homo sapiens
tcagtgaaaagaagatggattttgaatgtgaggactggtgttaaaatctaattcagttaccgcctagctgtgttatcttgggccagtcacttaacctctgtcagtctttctccatatctaca

SEQ ID NO: 52974 - DNA, 122 bp, Homo sapiens
cggcatccacactcctggtgagctctgtttgttttcataaccaattcaatatttaagacccggccagccgcggccgcaagctctccagctcccccttcctttgtctctgccgctccctgcac

SEQ ID NO: 52975 - DNA, 122 bp, Homo sapiens
ttaaatgaagctgcttggacaagtgcccacagccagttggttccctgtaatgtttgtgggcgtaccttcctgccagacagactgattgttcaccaacgatcttgtaaacccaaagccgccaa

SEQ ID NO: 52976 - DNA, 122 bp, Homo sapiens
tatcgtggtctcggtaatctcaagtctcttgagatgccaaaagtctgaaacccctacctccgtgggcagttcggtagaccgcagaaccgtagtcattttagactgcattaataacacttcag

SEQ ID NO: 52977 - DNA, 122 bp, Homo sapiens
cctagacttctaaagagttttgaatccaggtatggcacagctcctgagtctgcttctaaccgctacaccacactgtctctccttagactgcaggactgtgctggtcacttcctatggctggt

SEQ ID NO: 52978 - DNA, 122 bp, Homo sapiens
ctatagagcctactcgggtaatgatgcttctgctttagtttaacacatatttagtctgggcgtggtggctcatgcatgtaatccctgcacgttgggaggctgaggcgggaggattgcttaag

SEQ ID NO: 52979 - DNA, 122 bp, Homo sapiens
cagatccgaggggagacggtgacacgagtgagcccacagtctcctgccatgtacccacaccgtccctccagcacagcacgactctcacgttctacctgcgaactccctgaaacccccaccca

SEQ ID NO: 52980 - DNA, 122 bp, Homo sapiens
ctgcatcaaatgtctcctttccgaaatactctccctaaaatgacagagaacctggccaggcggacagaacggcccctgcgcatttgcaggggtcctggtgggcttgccgggcagagggcgtg

SEQ ID NO: 52981 - DNA, 122 bp, Homo sapiens
ccacctcagatcatcaggcattagattcccataaggagcacagaatctagacccctctcacgcacagttctcagtagggtgtgtgcgcctctgagcaccgcatgccactgctgatctgagag

SEQ ID NO: 52982 - DNA, 122 bp, Homo sapiens
gggcccagggccggcctcagctcagggcccctaggagtcccacttccctgggagttcccccggtgtagtcactgggatggaatgcacacaggtccctggtagaggcccagaccagcaagctg

SEQ ID NO: 52983 - DNA, 122 bp, Homo sapiens
tatgaaaaaaaatccctacaattcacaaagcttgctactgaaattaatttcaggtttccacgtccacggggacacgtacaggatttaaaatgacgatcacgtggcatctctcagggccaaat

SEQ ID NO: 52984 - DNA, 122 bp, Homo sapiens
cacggttgctgccaggcgctgacaggaagaggagccgcctcagcaggacaaggcaggacccgtgggaagaaagaagctggagcaaccagagatggagcagagctacccctggccctcgaggg

SEQ ID NO: 52985 - DNA, 122 bp, Homo sapiens
gtgttattattgtcaagtctcttcgcaccactgtttctaaaaagaaaacccgtgggtctgcgcggccctcagccgcctgctcggcttttattgtgcacgcagcctggtctgcgtggatccag

SEQ ID NO: 52986 - DNA, 122 bp, Homo sapiens
tcctgcccagctgttcaacgtctacccatggctcggggccctgctccagctgcaccggcccgtcctgcgcaagatcgaggaggtccgtgccattctgaggaccctcctggaggcgcggaggc

SEQ ID NO: 52987 - DNA, 122 bp, Homo sapiens
ctcactaaaaggggaaatgatgaggttgagggcattggattccaaagcccttcagctttccgtgttgatttccagaaaaatccagccagtttatgccattatcagcagcatgtgggagtatc

SEQ ID NO: 52988 - DNA, 122 bp, Homo sapiens
tgctcccttcgggcgccttcttttcctttgcccctgtctgccagctgaaaacacccaggacgccaccgaccatacagccccctgggctctgacagacttgtccactccctccaagatggcca

SEQ ID NO: 52989 - DNA, 122 bp, Homo sapiens
ggctgttctgggcgggaggttgtgcctgccccacggagcgacagaagcggggagaccagacgtcgaccctgaggcgtgcctcctggggggctccagtggccggcatggggtgggtgtggact

SEQ ID NO: 52990 - DNA, 122 bp, Homo sapiens
cttcttaaacctcctgcccagccttttaatttcatcattgtcaaagtgggagcacatctccgccgggtaactggcctcgtttcccattgtggacatctggcaacggccacggctcaaagggt

SEQ ID NO: 52991 - DNA, 122 bp, Homo sapiens
ggagggaaggtcttcctggacccgccccgaggcattcgcagggttggaacccctcagccccgtgcagctgagggcctggagccgagaagtttccattcgacggtaaccacaacggggagtgt

SEQ ID NO: 52992 - DNA, 122 bp, Homo sapiens
gctgagggttgcggccacatgagggaaagctgtggtgtgggacatgagggcgctcgggtccggcgatgtcacgaaagctgcgtttgagagcatggctgatgtcattatgtaagaagaggtga

SEQ ID NO: 52993 - DNA, 122 bp, Homo sapiens
gcgcggcggccgccttaatagactgcgggatgttctccgggagaaggctgcgccggtccccgaggacagatcatcaggcagagtggtccccggagcaggatttattagcagacaggatgggg

SEQ ID NO: 52994 - DNA, 122 bp, Homo sapiens
gaagctctaaagccaatgaagaagagtagcattcaagtccacatgagtataaggggaaggcggagtctcaggttttcccacatggggctagggctctctcagcatggggaggggactcaaag

SEQ ID NO: 52995 - DNA, 122 bp, Homo sapiens
tggacggcttcataagccagaggatccagtggcagtaccaagcagggcaccactctgggtcgtgagcacctaagaggtggagcaaaggtcagaccccagggtggcccaggcctccctccccc

SEQ ID NO: 52996 - DNA, 122 bp, Homo sapiens
gctatcttgctgagggctggtgggaacccatgccctggctaacagatgagcaggccagcccggtgaggagctgaaattcacctaagcccacatagccacccaaggcagagcttggctctggg

SEQ ID NO: 52997 - DNA, 122 bp, Homo sapiens
cctgcgatggggcgccccgggggctgtgcgccaggctgggagtatccttggggggcggggcgagggggcttccggggcggcagcacctggcccggctccggccccgcccgcgtcagctctgc

SEQ ID NO: 52998 - DNA, 122 bp, Homo sapiens
ggctgagaaagagtttaattcacgcagacccagctgtacaggagactggagttttattatcgctcaaatcagtctcctagaaaactccaagatagggattttaaaggataatttagtgggta

SEQ ID NO: 52999 - DNA, 122 bp, Homo sapiens
ccccttcatctccgcacgctcccacccggccccctccacaggctgtccagccccgcccctcggaacccacccctggtagtgaagccctgcccccagggtccctgcccgaaggtgcgctcctc

SEQ ID NO: 53000 - DNA, 122 bp, Homo sapiens
caaatcagtgatggaatcagacctttggatccctgtatcagctcctcattggttgtgagccgctccaagaaggagctgtaaccttggtgagacagctccctgtgtcccagggcaacaggcag

SEQ ID NO: 53001 - DNA, 122 bp, Homo sapiens
ccacatgctgcgaatctacccaacgctctgtctcagatgtggcatcaggctccaccccagcgcccgctctctgctgcgcaccctacgatagtcgactgctgggcagtgcgcgaccggagctg

SEQ ID NO: 53002 - DNA, 122 bp, Homo sapiens
gcccccttcgcggcgcacgagtctctgatcccgattggctgggcagggcaggcggcgggacgcagggcgcgcccgggcggtgctgattggccggaggaggccagccgggggaaacttccggg

SEQ ID NO: 53003 - DNA, 122 bp, Homo sapiens
gctccacggcgggcccagagccgtcgtcccgagcagtgaggcgcctgggacggatggaagcgcttccccgacgcctccgcccgactccgggaagcggctttgggagggctggaagccaaccc

SEQ ID NO: 53004 - DNA, 122 bp, Homo sapiens
tttggagcttttagctgccagccctggcccatcatgtagctgcagcacagccttccctaacgttgcaactgggggaaaaatcactttccagtctgttttgcaaggtgtgcatttccatcttg

SEQ ID NO: 53005 - DNA, 122 bp, Homo sapiens
gctatgctaaatacccatctttcgttagtgaaactctgggcactctcctgggaagcatcccggcgaccaagacgaatttcaacatcactttctcgaagatctcagcattttggagtgacgat

SEQ ID NO: 53006 - DNA, 122 bp, Homo sapiens
gagtccaggagctcctgttccgccagtttccgggccctctccgtctgctccagagtagcccgcagctcctccacctcggcctgcagcaggttggctctgcgctccacaatcgccagctgctc

SEQ ID NO: 53007 - DNA, 122 bp, Homo sapiens
gaacctgtctgggcctgggggtttagcacagaaggctttggttagctgcactgtgctgagcgcagctctgcagcgaggtttagggagctgcggtgcgttaggcacaaggcacgtggcgcgcc

SEQ ID NO: 53008 - DNA, 122 bp, Homo sapiens
aatcgaaatctggctttctagcagtcccccaatcccctccgggagtgggttccttgttctcgcatgcccaccgcaaaggccccccgccctgctcccggcgtgtgccccgcgccctcgcccgg

SEQ ID NO: 53009 - DNA, 122 bp, Homo sapiens
taataaggccgtaatgtttctttcacatgtagaattaaaattgctgagctttggttatggcgttagtggtataacaattggtataattttgccattagtgagacatgttagtgttctgtttg

SEQ ID NO: 53010 - DNA, 122 bp, Homo sapiens
aggcgcggcctgggtctccgcccctccccagaacgcggagacgccgggcctggaggagcgcgcgctacggccccagcagcgccctcacgtcccaggccttcccggcccttcttcctgcgccg

SEQ ID NO: 53011 - DNA, 122 bp, Homo sapiens
ggctatgaagagctgctggaagtgagggaccagtggaacaggagcagagacagcgtctctcggttgggctttccactgcacctggagtcccaaatgagggctggaagctgtggcttgtacat

SEQ ID NO: 53012 - DNA, 122 bp, Homo sapiens
ccccacccaaatctcatgctcacttgtaatccctaatgttggaggtggtgcttggtgggacgtgattggctcatgaggatggatcattcatgaatggtttagaatcatctctttcatgctgt

SEQ ID NO: 53013 - DNA, 122 bp, Homo sapiens
tatcagcactttgtttttaatgtctttggttttccatttggtcttgaaatgcttgaaaagcgacaatgctttcacaaatctgtggaaacagatggtagcatacactgatcacacctaccaag

SEQ ID NO: 53014 - DNA, 122 bp, Homo sapiens
ccccgcgccccagggccagcaggctggggtccgagaacctccttgccggaagcggaagtgcgtcacggcgacggccggcaagcacgcaccgcgcagactcgctgtggtggcgtgacccggaa

SEQ ID NO: 53015 - DNA, 122 bp, Homo sapiens
gcccctagcccaaaaccacggcggatggcagcggattatccagccccgaacgccgcaaagcgagctcaccatgatggcgcctcctgctcggccaggtccggaaagagagaacgggctggggt

SEQ ID NO: 53016 - DNA, 122 bp, Homo sapiens
gctcccctggtcctctcccgggtgccccggacccttcccaagggctgctctccctctcaccgagagcccccttgcctccgaccgcacccctgtggcacctggtcagctgcgttcacgtctgc

SEQ ID NO: 53017 - DNA, 122 bp, Homo sapiens
cgtgaagctccagcagccgccgcaggaacacctgcacgcgtgagaggacgtccgagaagccggctgccagctccagcagccgctcagccaccaggccccacttggctgcccctgtgatggtg

SEQ ID NO: 53018 - DNA, 122 bp, Homo sapiens
tcggccgcccttcccgacggcccccgcgacgctcgctcctcattggacagaccgagcttacgcctcaaggaagccgggccaaccgaagctcagcgcatggcttgaaatcgaggtcaaaggag

SEQ ID NO: 53019 - DNA, 122 bp, Homo sapiens
cagaggccgtctggaacccagagtcagctggccttcagcaacccagcagagacccaggagcgacagggaaccaagagggggccattctgcagccagaagtgctgagtgccccgcctgctgtg

SEQ ID NO: 53020 - DNA, 122 bp, Homo sapiens
ttaccttatcaaaagaacgaaggtcataaagcttgaccatttcagagttgacacctgcagcgaaaattaacccttctggatcaaaagaacaaactggcttcccctgcagatgcatgaggccc

SEQ ID NO: 53021 - DNA, 122 bp, Homo sapiens
ggaggaacctgtagggggtgctgggctccaggcctgagatgaggatcttgctctggtcgccgtccacgagcaaggcctggggctgcccgttcgtgtcctcatactggaccacgaaggaatca

SEQ ID NO: 53022 - DNA, 122 bp, Homo sapiens
gctgggcgcggtggctcatgcctgtaaccctggagctttgggaggccttggcgggcggatcgcttgagtccaggagttcgagatcagcctgggcaacaaagcgagacaccaccccccacccc

SEQ ID NO: 53023 - DNA, 122 bp, Homo sapiens
ctcacacccagctctacttgtcaataaacatttcccaaagcctgcagattggaatccaggcgagggccctaagggctgtgtgaactggggcctgttacttgaggtcactgtgtttcaggtta

SEQ ID NO: 53024 - DNA, 122 bp, Homo sapiens
agatgggaccaaggagattccatgtatctaaggaggtaaataaggccatatgtgtgagcacgtagggggaccttggcatcaggcatgcaaggggaagacagacacacccccaagcctcatgg

SEQ ID NO: 53025 - DNA, 122 bp, Homo sapiens
ctgttgcccagatcgaaccaagcccggtcccagtgacgagcagcgcctgcggggccagagcgtctgggagcctttcatgaccccaaagcccagggaggtccccgcaccatcggccccgcgcc

SEQ ID NO: 53026 - DNA, 122 bp, Homo sapiens
cggtgtgggcacaggcggtgtgggcacaggcggtgtgggcacaggcggcgtgggcacaggcggcaagggcatgggtggcatgggtgcgagcagcatgggcggcgtgggtacaagtgaggagg

SEQ ID NO: 53027 - DNA, 122 bp, Homo sapiens
gcccgcggtggcccccgggtctgcaaaccccggagttgactgcaaggaggtccccggcctcggccacagacggttccaaccagaaacctcccctcggacactggccccgcacactcaccatt

SEQ ID NO: 53028 - DNA, 122 bp, Homo sapiens
ccttgttcactatcaattttctaacccctagcccaacacctaacatactataaacattcacggggaggagatatcctattccataaccaatatttgtgctactaaactaaagctatgtaaac

SEQ ID NO: 53029 - DNA, 122 bp, Homo sapiens
cattgaggatatacttgatgccatacttgccgagcacgtccaggttggtggagtccttggcgcagccgaggtagaggtagggcaggatctggacagggaaggctggttggctggatggcaca

SEQ ID NO: 53030 - DNA, 122 bp, Homo sapiens
agtgttcagggagcagctgctgcgccctccctcggcccgccgctcggagacgccccgccccgccccaccccgcccccgcgcccacgtgactagcataggcccgcccccgctccgccccccgc

SEQ ID NO: 53031 - DNA, 122 bp, Homo sapiens
cctatgcccagggaccatgcatttatggagacagagcatgccctgggtggccaatgagcacgcagaggagggcggagtggcccccggctggccagactccgagggacgcgggacccagggga

SEQ ID NO: 53032 - DNA, 122 bp, Homo sapiens
acttcaagaggaagtagctcttttcttggcaggggttaatacttagttagggccattagtcgtgtggtagtccgtctgtccacaagagcctctatggctgtttggatatttttgacaatgag

SEQ ID NO: 53033 - DNA, 122 bp, Homo sapiens
gcgctccgcagtcgtctccagctcttgcctgtgcgcgcggccgtggctcccctgcctgcgcgcttcttcgtatctttgccattacggcgctaatgcagtgcacgactgaaggtccagtggcg

SEQ ID NO: 53034 - DNA, 122 bp, Homo sapiens
tgaacagggtgaaaatcattttcaaatagactggagagtggccatgccagaggcacagggcgcagggcaaggataagtgtcgctgctccgttcaggctgatgaagaaacgggaaagaatctg

SEQ ID NO: 53035 - DNA, 122 bp, Homo sapiens
gtaagaacgaccttaggtccggcgagagtcgctgccgtggactgtgggctcccgtgcgcccggcacgttgcctgtgttgtctggtttaattctcacaacagcccacgggggagggcccgtta

SEQ ID NO: 53036 - DNA, 122 bp, Homo sapiens
ccacggacggggactcagataccgatgaagaggcgcgcctggcgctgcgcgccgagccgccggagctcaccttccgccagttccacgcgcgcctctgtggctacttcggcacccgtgcgggg

SEQ ID NO: 53037 - DNA, 122 bp, Homo sapiens
ctggatttcccatagggccaaattctggtaccactctgtggtgaaactcaacgtggatcacgccccaaattgcactgatgatctgaggaaacaaaagtgcctgcaggagtggtcttgggcca

SEQ ID NO: 53038 - DNA, 122 bp, Homo sapiens
tgggcgcattactcagagccctctaagcgcgattgtttctccctttctaatgacatttaccggatcaaaacatgctgttaattcgatcagaaggcttcaccctccctgacaaagccacaata

SEQ ID NO: 53039 - DNA, 122 bp, Homo sapiens
accaggacacgcaggaccctgagatcaggcctcctgagatgttgcacccatcctggggtgcggtcccaacacctgagctgagcttcccagggctcaaggacctggtctcgctgcccgcgcct

SEQ ID NO: 53040 - DNA, 122 bp, Homo sapiens
acactgacccggagctcacgagataaaggccgtcttgcgggtttatgatatcctgggtaacggcagccttggggctgtttttcaagaggcttgctcttttagaacagcatatggaacatgtg

SEQ ID NO: 53041 - DNA, 122 bp, Homo sapiens
tagctacatgcaaaacacataggtgcatcaatgtgagcttctcaaagctatactgttccccgagtcttttaccctacaatcttaggactttctaagatagttagtgatgaaaagaagggtgg

SEQ ID NO: 53042 - DNA, 122 bp, Homo sapiens
ttagttctctccttcagagaccgctgagacactgggggaatgcggtggtagaacatacgccgacctagcggctgtaaagctcaggctctgccttggagttggagtgcttctggcctatctta

SEQ ID NO: 53043 - DNA, 122 bp, Homo sapiens
taatttagcaaacatttctgaggacccacttattgggcacttaaagaagtgagtatgacacggccctgccctagaagaccttgcagtctaggaaggaggttcatgctgtgacttctgagctt

SEQ ID NO: 53044 - DNA, 122 bp, Homo sapiens
cagtgcagtgtcccgctggtgtgcacggacccactggtctgcacggaccacttccctccccgacacaatgagggctcctcgcagcacctgtcacttctctgccggccagggtttccctagaa

SEQ ID NO: 53045 - DNA, 122 bp, Homo sapiens
cgacgacgcgctggctgaactatgcacccacaatgccctgcgcgcgccccagccccgcgtcgggaacaagtgcacggtggttaactccgaagcgtccctcagtggagcaccaaggcaggact

SEQ ID NO: 53046 - DNA, 122 bp, Homo sapiens
gcccagagctcgttggcagtctgtttgtatttcagtgtctaaccagaagtcctttctttgcggaccgcactctcgttcccactttcaagctaattaccaccaaggctgggagaggcaaggac

SEQ ID NO: 53047 - DNA, 122 bp, Homo sapiens
ttgaggtcacgtgtttccgttttgctcctcatatacaggtggaatgtaatagtggccgaccgacggatgttctgaaaaaatgcacgtctgagcgtacgttcctggcagcatccctgtacttc

SEQ ID NO: 53048 - DNA, 122 bp, Homo sapiens
tgtccctggtgtttgtggggacgcgtccggcgattgtgaggacattagagccaacgcgggcggctttggggtctgcgggagagtccccaccagagccgtgcgggcgccccagacccgccccg

SEQ ID NO: 53049 - DNA, 122 bp, Homo sapiens
cgcccgcagcctcgcgcgcccagttgccacctcggtgagcgcgcgcccgggctgagtgggcgatttgcttcacattgtggttctcaaacaggggcaagggctcttcattccccttcccccag

SEQ ID NO: 53050 - DNA, 122 bp, Homo sapiens
gggacttaaggaaaaattcaggagaccctgctatgagaataacaggaattttaggccgggcgcggtggctcacgcctgtaatcccagaactttgggaggccaaggcgggcggatcacgaggt

SEQ ID NO: 53051 - DNA, 122 bp, Homo sapiens
ctactctcccagaggagtaggaaggtggaggggaggacagcagggattgagaagagacctcgaagcttctacacagtggagccgagagaggagagaacatttcaccattaggttttagtatt

SEQ ID NO: 53052 - DNA, 122 bp, Homo sapiens
gtttgcagctgtgagcgcatcatgtgctgtgtggcccagcaggccagtgagaagattgaccgtttccgtgctcacgccgccagcgtgttcctgacgctcctgcactttgacagccctcccat

SEQ ID NO: 53053 - DNA, 122 bp, Homo sapiens
ctctgagttgaccagataagggggcagccaggaggcacccaggttcccacagctaacccccgctggaccctgttctggctggggggctccaagcaggtgtcagcagctttccagggctcaga

SEQ ID NO: 53054 - DNA, 122 bp, Homo sapiens
gtcattgttttgggcactttctagacttctgaggaaaaccccagaaccaaatttaccaagcgtcctattgcattcaaaatggatttaagttcagaagcaagggagggagtccaaagttgcta

SEQ ID NO: 53055 - DNA, 122 bp, Homo sapiens
cagggcctcggctcctgcccccaccaccttgaccaaggcacgcaaaccccacccccacctcgtccagcaaggactgtgctctgaggcttgccgtgaaggcgctcacacactctggccgctgg

SEQ ID NO: 53056 - DNA, 122 bp, Homo sapiens
ccaggttgggtccgcgccgtcgggtttctgagaaaagggaggaaagaggcggggcctgcacggtgtgtccccgccctccaggccggcgtcaactctcattggctcagcgccacgcgggactt

SEQ ID NO: 53057 - DNA, 122 bp, Homo sapiens
acttaaaaaaccaaatatgaccaaaacagctgcctgcttgtgtgactacaaattgctatacgccagctctgagaaaagtgtccataaattcagagtaagtcagtgggcccctctctgtcccc

SEQ ID NO: 53058 - DNA, 122 bp, Homo sapiens
ttcacattagttctttggagtctggtacgtctgtggtgcctggccaggattctggatttacgagtcctatgtgggagctgaaaggggtcttaccatctggtccaactttttcatatctgcct

SEQ ID NO: 53059 - DNA, 122 bp, Homo sapiens
ggaagggaagcaaagcgaggtaacgggcagcggactatagcaagaatatggaatgcatcgcgaatctgtgtgtcatccttgcgctggggccatgctaatctctgtatcgttccaattttagt

SEQ ID NO: 53060 - DNA, 122 bp, Homo sapiens
cgtgggtgtgcagagctgatgtgcagagacgtattgatcctccgtgctctgtctcaccggcgaggcagtcacggtctgcatattaacacacagcctcagctgcctccagtggacggcaacat

SEQ ID NO: 53061 - DNA, 122 bp, Homo sapiens
cttggccagtagaggcagtgaggagctaaagatcattccttctttccttccttcactctccgtagacagctctgcagggaagtctgtgacaacctggccagacatagggctcacgatctgat

SEQ ID NO: 53062 - DNA, 122 bp, Homo sapiens
ggtgccacgcgcccccggtgctggatgagctcggggtccgggatctggggtccttgccggcgctgggggtgttggtctttcaagctcggggtccgggatctggggtccgtgctggtgctggg

SEQ ID NO: 53063 - DNA, 122 bp, Homo sapiens
agccgaagatagtttcttctttccctcaaaatcagatgtgaggccgggcgcagtggctaacgtctgtaatcccagcactttggtaggcgaaggtgggtggctcacttgaggtcaggagttcg

SEQ ID NO: 53064 - DNA, 122 bp, Homo sapiens
tatatatatataatttttttttgacacagagtctcactctgtcgcgcagtgtcgcaatcgcggcacactgcaacctccgcctcccgggttcaagcaattctcctgcctcagcctcccgagta

SEQ ID NO: 53065 - DNA, 122 bp, Homo sapiens
atttactcctctttcctgaagctttgcctctagacttacttaactctttcctccagcctacgttcatcgaaactatcacttattgtcatatagacctttatttctgaagggagatctgggag

SEQ ID NO: 53066 - DNA, 122 bp, Homo sapiens
agaccccgccccccgcggcagaccacgcccacctgcccccccccacccccccacccgggtcgggccaggccccgccccatcagccccagtcccgcccactccatggccctgtccgccgccgc

SEQ ID NO: 53067 - DNA, 122 bp, Homo sapiens
tcaagaggctgaggcaggagaattgcttgaatccgggaggcagagtttgcaaaaagagggcggggggggtgggcaaagaacctgaacagagatttctcaaaagaagacagacgaggcaccaa

SEQ ID NO: 53068 - DNA, 122 bp, Homo sapiens
atcgccccggcgctgctctatgggcgacggggcagcctcccgggctgcgagtttcctgaacgtcacccgtgggcccgctgctccataaggtgggaagtggcagctctgcccgcggcgcatgc

SEQ ID NO: 53069 - DNA, 122 bp, Homo sapiens
gggggcgggggtttgggtggctgccctcagtattgcctgcacaaatatctaccaagtctgcgacgaatagctccagcaactttgcaccgtgttttccagtaagcctaccgacaggcactgtg

SEQ ID NO: 53070 - DNA, 122 bp, Homo sapiens
ttgcgccttcccgacctcagagacgtccgtctctctccaggccggagctattgggagtggcggatcctcccaccccagccggatctgggccatggccgagcctggagagggactgccagagg

SEQ ID NO: 53071 - DNA, 122 bp, Homo sapiens
actcccaccgcaacccaccccgaggacgcttgcagccccggtggggttccgggcggcgggcgcagccgtgtgccctggggccaggcgtgagaacgccccctccaccactctcctctttctcg

SEQ ID NO: 53072 - DNA, 122 bp, Homo sapiens
actgatcctgctttccagactggccattctcacaatgttccattaggcaatagggctcttcggggaaattaatagaatgtaggcttcaggaatcatcagaaagctgcagcttccctcgtcag

SEQ ID NO: 53073 - DNA, 122 bp, Homo sapiens
cccgtttcctccgaagtggttggtgccttagcaactaaagctggcaactgggacatcgtccggtgctgcaggtctcagccgaagggcgtcggaaactgcgctcgcatcgagcagtttccagc

SEQ ID NO: 53074 - DNA, 122 bp, Homo sapiens
cccttagggatccccccggcaaccgcacagctgcctcggactctgacttaattccctccgcgtgctctgaatcgcagagaggcaaacccccaaacaaagagccggcagctcgcgtgcggggc

SEQ ID NO: 53075 - DNA, 122 bp, Homo sapiens
ctggcagctctgtggcagcccagcagctgcttcttcctgtgacttccacagtcctgaagacgaaccctcaggggaggcccttgaagctggtctcctctccccaccccttcacctgcttccta

SEQ ID NO: 53076 - DNA, 122 bp, Homo sapiens
gcccgtgtcgctgacttttgtgaaccagagaaggatcttgtaaaacctccttttctccttcgtacgcccccactcccacccctcctcccctgcctctttgattagatgttccctcatcgtca

SEQ ID NO: 53077 - DNA, 122 bp, Homo sapiens
gcccagggagccggctgcaacacagggcccactgtctgtttacaatacagggcccactgccggcgcatggggcagagtcgtgggcgtgtgaggtggccagggctgagaaaacgcgcaatatg

SEQ ID NO: 53078 - DNA, 122 bp, Homo sapiens
atagagacggagtcctgagacaactggacaacctcaaacattattttccgcagggggccccgggggggatggagaatgcagcagacaaggaatggccactgagtttggggaagaaatctaca

SEQ ID NO: 53079 - DNA, 122 bp, Homo sapiens
tcctgttttaggggcatatgattagctcaagcccacagatatattttaaggttgattgtgcgatagaacataattgcaggagtactgtctcatctcatcatattcacgggttctggagatta

SEQ ID NO: 53080 - DNA, 122 bp, Homo sapiens
gagactcgaccagcgagaggggccagcgagggtgaccaggtgcccgcttggggaccccgccggcggtggccaggctagcccaggtcctccccgatcccaggatgcactgcgccccgccccct

SEQ ID NO: 53081 - DNA, 122 bp, Homo sapiens
agccaggcatggtggcatgcacctgtggtttcagctacttaggagcagaggtgggaggatcgcttgattctgggagttcaaggttgcattgagctgtgatcgcgccagtgcactctcgcttg

SEQ ID NO: 53082 - DNA, 122 bp, Homo sapiens
tccaattagcatgggagtgagataatgtaaacgctcctcttggccaggtgtggtggctcacgcctgtaatcccagcactttaggaggccgaggccaggagttggagaccagcctggccaaca

SEQ ID NO: 53083 - DNA, 122 bp, Homo sapiens
ctacctgcactttggggagcctaagtcctggtgagtgtctgcactggccctgccgccggccggaccgagagcccctcgggagggagtcaatcccgggtacacggctgggcgccgtggcaggg

SEQ ID NO: 53084 - DNA, 122 bp, Homo sapiens
tggccgggagccttcgtgcccacagtgaccccgtctgcaaatgtagttccttgccctactcgcactggggagcaggacgcagagccgtgcaactcacaggtgccaagctcaggactccctcc

SEQ ID NO: 53085 - DNA, 122 bp, Homo sapiens
gtcgcaccgcttccttgacagcaagttctacttgctggtggtcgtcggcgagatcgtgaccgaggagcacctgcggcgtgccatcggcaacatcgagctcggtaagtggccccgcgccccca

SEQ ID NO: 53086 - DNA, 122 bp, Homo sapiens
caaacaccaggtgaacaacagaaaattgtacccagctgaattgagttcagaaaattaaaccgaaccatgtagaaatactgcatacaaaatgcacgcacctcaaaatacctaccagctgtctc

SEQ ID NO: 53087 - DNA, 122 bp, Homo sapiens
gagaaacccttggtgatgccgagcagcagacgtttggggcatctttttgaagagcagaagcgagttcagagcggaagaggtttttcagtgaataaagctatttttaagggagtgtgattgct

SEQ ID NO: 53088 - DNA, 122 bp, Homo sapiens
ggagcgtgaaattgaggggtttggggatcacagagggacccgggggatcaaaagcctctgcggccgtatagggacagcatagatgggccccaggaagaactttagagtggggggcacgtagg

SEQ ID NO: 53089 - DNA, 122 bp, Homo sapiens
catgggaaaggaaggcccagggaagcggccgatccaaaatgtgtcgttgccagggcaacccggccgcagcgcttgcaagcctgggaaaaagttgttgttcatcacgggggtggacgtttgtc

SEQ ID NO: 53090 - DNA, 122 bp, Homo sapiens
tggccgtacacccaggacgatttcttctcctgatgtgggtagcagtggacagtcctgcctcgggaacacacatttttgctggtttttctcatgggcaccgctctgttcttccctcacccttc

SEQ ID NO: 53091 - DNA, 122 bp, Homo sapiens
tgaccgtgcggggctcctgctgtgttgcccccagaccctgcagatgagcatctaccacttcgcgggcctcttcgtgttgctgtgcctgggcctgggcagcgctctgctcagctcgctgggcg

SEQ ID NO: 53092 - DNA, 122 bp, Homo sapiens
gagtagctggattacagctgtgagcctctgcgcccggccaagacagcacctcttaaactccggcctggagaggcagtggccctgggcacctccccgctgcacacaagccccatccactcatg

SEQ ID NO: 53093 - DNA, 122 bp, Homo sapiens
ggggaccactgcgtggacggggcaggctggggcacaaagggcactgcttcctctggatagcgctaactccgagagctcgggctcctatccctagccggggcgcctggcctcctgcagtcggg

SEQ ID NO: 53094 - DNA, 122 bp, Homo sapiens
gttcattgttgggagaagttgaagatgaactcaatacctggagtcatacatggcagtcaacgcatggacaccggagactgttgagacgccgactggagtcacacacggcagtcaacgcgtgg

SEQ ID NO: 53095 - DNA, 122 bp, Homo sapiens
acccgtgtggacagggctgctgcagcggggtccccacgaccgaggtgcatgcggcaataccgcgcggcgcctgcttcctggaggcggccggctcaggagcccccgagaccccgcgtgggaga

SEQ ID NO: 53096 - DNA, 122 bp, Homo sapiens
ccatggagcatctcacgccggcgagcaggtcccccctgaccacggagcatctcacgccggcgagcaggtccccccgaccacagagcatctcacacgggcaagcaggtccaccctgaccacag

SEQ ID NO: 53097 - DNA, 122 bp, Homo sapiens
ccgctcagtaacatggggccagccagactgagcgaggggagcgcagcggcgggtggggggcgggggcgggggtggggaggggggcggggctccgccgggcggggagggggcggggcgcttca

SEQ ID NO: 53098 - DNA, 122 bp, Homo sapiens
ggaaatgggccccgcctgtgtcttgggaactcagaggctgaggtcaggcatgatggctcacgcctgtaattccagcactttgggaggcagaggcgggtggatcacgacgtcaggagttcaag

SEQ ID NO: 53099 - DNA, 122 bp, Homo sapiens
acaaacgcgcaccaccacggcggattcttacgattcatgggaatcgatgattgatgatttcgatagttcggtaatcgctaatgggcaggcgccgggcgaccctgcaggggcggcagccgtcg

SEQ ID NO: 53100 - DNA, 122 bp, Homo sapiens
cccgagatacccccctgtgctgctcccagtcccggagatttcctacagctctgctcagcacgggtaagagaataataaatcggtcacttcactatccaattagcagctgttgctccccgctg

SEQ ID NO: 53101 - DNA, 122 bp, Homo sapiens
tagattccctaacaggtcagcattccttgtggaaggtgggcaacagcttcttatgaactccggctccccctttgccctgtccagcagctcagccctcctcccactctccctgtcaccagccc

SEQ ID NO: 53102 - DNA, 122 bp, Homo sapiens
tcaggaagggggatgcaaactcactgacacgaagctgccatctatttctgcagcgctgttcgctcctaatgcaatctttgctctttattttgggaggttgcatttttttctctcgcgatcgc

SEQ ID NO: 53103 - DNA, 122 bp, Homo sapiens
aaagtgtgctgttgttaggagatgcgccatagctttcaccctccatgctgtctgccgcagcgcctcacaccgtaggtaaatggagcccagcactgtgaagcattaggtttttagaagtgaag

SEQ ID NO: 53104 - DNA, 122 bp, Homo sapiens
cggggcacagcccagagcgcgcggtgcagagctgggccagggctctcgggtgcattccctcggggtgcctagaagtggggatgctcaccttatacctgagaagccagtgtattcagtgtgga

SEQ ID NO: 53105 - DNA, 122 bp, Homo sapiens
ccaggaattgagcaaatcagtctggccttaagaaaagtcgtccacttgtttatcaggctgcgttgtcctcctacatcattctgacatgaaaaaaaaaataaagataaatatttatcaacaca

SEQ ID NO: 53106 - DNA, 122 bp, Homo sapiens
acagtgcaaggcaaatggttttattccatatgagcagtcacttacatgtgagtgtctgttcgctggtgagtcagatgctgtgctgaacatgatctaatagtatgttcaggcattttctttct

SEQ ID NO: 53107 - DNA, 122 bp, Homo sapiens
ctttcctgttcattttatatgagtatttcaaaattgttagttaccacgaatgactaagtgcggggatagggtatttttgctggaattgttgcactgcacagcctgtaacaacacagggggtc

SEQ ID NO: 53108 - DNA, 122 bp, Homo sapiens
ctcatgggcgcggtcagcagggcgggccagggcggcggggcgcgacactgggaggaagtgcgggccgcctgcccgggcgcgttaaggaagttgcccaaaatgaggaagagccgcgggcccgg

SEQ ID NO: 53109 - DNA, 122 bp, Homo sapiens
cagccatactgcagcaggaccacggtgaggtggaaggagcaggtggagaaggcccggcggcggccctcggcagaacggatgctcaggatggcacaggtgatgaacacgtaggagacgcagat

SEQ ID NO: 53110 - DNA, 122 bp, Homo sapiens
acacagggtggtgctgggtataaagggctgctccaagactggattgtgagtcagacctgccggactcaaattcatactatgtaatacataacccctgggacaaataattccctttcgttgtg

SEQ ID NO: 53111 - DNA, 122 bp, Homo sapiens
aaaccaggacaccgaatcctaaacccatattcccaggccccgtcccggaagtgccctgcgcgttactattgacggatagtggcgtgcgtttttgagttctcctatcttgtacatcgatgtaa

SEQ ID NO: 53112 - DNA, 122 bp, Homo sapiens
caacttgacgcccgaccccgccacccaaacccgctcgctctgcgaccccagagcagccggcgccaacccgtccccttcgcgactccgccggaagtcccgcctgcaccgccgccgcgccccat

SEQ ID NO: 53113 - DNA, 122 bp, Homo sapiens
cccaacccctccccgtgaagtcgttgtgaattttcaagttattttcccctcactctcattcgccgcagctagtctcggctgcctgaattcggtcccgccgccttaggtcactcagtcccgcc

SEQ ID NO: 53114 - DNA, 122 bp, Homo sapiens
tgcttggaagactaaggatattttcagtccaactttgcattttctgtttttaaatcagcacgccccatgctctctcttctcagggattcaacattgctctccagagcttggctggtcgagat

SEQ ID NO: 53115 - DNA, 122 bp, Homo sapiens
aacatatatatattcctccaggctcaaccacacatgtgacaatgtctcttggggacgcagcggtgaattcctctcacagtatgtctaaggagcattggctcagtgagatttcacattcagtg

SEQ ID NO: 53116 - DNA, 122 bp, Homo sapiens
ccctggaaggtagatgtgggccgtacctggatgtgggccatctcaccctgcagcctgacgcgggcctcctgtgccagggcgagctgctgctggtaccactgccggacactctgcagggacga

SEQ ID NO: 53117 - DNA, 122 bp, Homo sapiens
cccgtcacgcctcagtttcccgaatgttcccagagggctgagttcccgatctctctcccgcgtgggcatccccgaggcctcagtttctccgcccaccccagcgcgccgagcccttcccccga

SEQ ID NO: 53118 - DNA, 122 bp, Homo sapiens
caggttacggctcaggaacgtcacacggggaacctggccccggagcctccggtctgtgtccgcatctaacacatagtccagggctgtggcatgttgggaaaggaggagctgctgagctgcag

SEQ ID NO: 53119 - DNA, 122 bp, Homo sapiens
ccaagattcatgagggtgaatttttcttcccagaaaagctgccatccagattatcctgggcgcacaaagccctgtcgtatccgcacttgccagcagagggcgacacacagccgcctgcaggg

SEQ ID NO: 53120 - DNA, 122 bp, Homo sapiens
cccccacccgtccggcatgacgcaggggctcggggttccttgggatctagcgcgtgccggcgcccagccttacccagggtgaagaagggcagctcggtgttgtccaggtcgtcctgcaccgc

SEQ ID NO: 53121 - DNA, 122 bp, Homo sapiens
atggatctgtaatgacaaggctatttgggttgactcactccaaaacccacagtttccattcgacttgaagattacaagtagagcctgaaatacccctgaattgactcttgggaaaaaaagaa

SEQ ID NO: 53122 - DNA, 122 bp, Homo sapiens
aggcgagcttcagcgccccgcggctgtcggagaagggcatgtgcgggcgctcggtgggtccgcagctctgagcgtggccactttttaactgttataaataattctgctatcaacattcatat

SEQ ID NO: 53123 - DNA, 122 bp, Homo sapiens
cctccagcgtcccgcgggagccgggacccggcggccaggcccggctggtgcttctctgggcgccgctgaaagcccagctccgcaggagctacaggcgtgagacccaccgggacccgcgagcg

SEQ ID NO: 53124 - DNA, 122 bp, Homo sapiens
gcggcaggcgcacgggacgctggcggcggcggcggcttccgacttgggctcagaccccgccgctccagacaagtccccgcgactgcgacagtgtctcgggcagttcagctccccagacggga

SEQ ID NO: 53125 - DNA, 122 bp, Homo sapiens
atctaaatttaaggcttaggggaaaggtcagggctgaatatctaactctctttcagctctcgttgtctgcttttagagccaggagaagggataatttcgccttcgccaaccaccaaaatgca

SEQ ID NO: 53126 - DNA, 122 bp, Homo sapiens
cccggggccggcacggctggccggcagctctgagtgcggggccgccaagcccacgctcaccgggaactctagctggcctgcaagcaccacgtgcagccccagttcccgcccatgcctctccc

SEQ ID NO: 53127 - DNA, 122 bp, Homo sapiens
tattcatgccataagcagaagtgagcctgcctgtttatctagaatgcccagggtgagagacgttaggcatgagataccccttttagtcaagcaagttgactgcagagccagcaccaagagag

SEQ ID NO: 53128 - DNA, 122 bp, Homo sapiens
aaaagacttcatctgacaggaagaatagcacagaaaccctcaactcttaaccactgctgtcgaaatggccccaatttgttcaggccacctgcacgcacactctgcagtgtggctttgcctcc

SEQ ID NO: 53129 - DNA, 122 bp, Homo sapiens
ggaaaagttgggtttttttttttaatttagttggttattgctttaatgctgaactctcaacgtcaaaatgtgatcacaaattgattcgcagaaggaaacaaatagaaaaagcctcgggaagg

SEQ ID NO: 53130 - DNA, 122 bp, Homo sapiens
ctttccgacgatcataaatagcttggtgtttgtaaacaggcgctgggggcacattccccgcgctcagctcattgttccctcccttcctctctacttcgcgcaggacgcctgggctggggctg

SEQ ID NO: 53131 - DNA, 122 bp, Homo sapiens
ggtgggggaggatggacttggcgctgggaagagaaaggggagctgccggatttgaccccacgtcagaggtgcctgccaacaaaaagtgaaggttccgggcccttggtctgctgggtcggagg

SEQ ID NO: 53132 - DNA, 122 bp, Homo sapiens
agccccgcggcggtgatttgtgtgcgggggtctgtgaccctgcaagcatcaaacggcccgcgggaaccggccgagttcagagggacagtgggccgaagggcggcctaagacaacgcagatgg

SEQ ID NO: 53133 - DNA, 122 bp, Homo sapiens
gatatcttaaagtaagcagggttgggacaggtcacagcttggatgattgacctcaggtgccgtagacagccccagattcaagaattgtatctgctttcttggcagtcgtcactgaactaatg

SEQ ID NO: 53134 - DNA, 122 bp, Homo sapiens
tcagctctgaaggttcaggggatggatgtaaagcacacacacagttgttccccccacagccgcccagatgtggaagtactccactctcctcccgagtctgcctttccctcatggcctctgac

SEQ ID NO: 53135 - DNA, 122 bp, Homo sapiens
cccccggagcgggagcccgggttgcgcggtggcagatgtcccggccgtggggcctggaagcgatttttgccgagtcactcactgcacttttacttgggcaccttgtgaccgcgaatcaatta

SEQ ID NO: 53136 - DNA, 122 bp, Homo sapiens
ttcctaagacgactgcaaacagcatcacaaatgagcaggtatgtggccttctctgcatgccgtcccctgtggcaaccggattaaatctaccatctctgcccagaaaaatgcacgaacgcacg

SEQ ID NO: 53137 - DNA, 122 bp, Homo sapiens
caagtccctggccctgtcctgggaacctgagtgaagaccccagacccacgtcctccaaaccgggacaggcacccatgggagaccctgaccacccacaacgccacagagcacttactcctcgg

SEQ ID NO: 53138 - DNA, 122 bp, Homo sapiens
taatttttccggcggagtcatagtggcgctatactctcggacaggttatcctgtctctcccgctagattgatgagatcaggcatcactcgaaaatggcgccgaaagcgctgaggctcctcat

SEQ ID NO: 53139 - DNA, 122 bp, Homo sapiens
aaatgcagagaccgcacttcctcagaaacggactgaggtttgcaattccccaggagacagcgtcctgaggggcatttattcctcagagcctgcatgcttgtctgtttgcctcttctttcccc

SEQ ID NO: 53140 - DNA, 122 bp, Homo sapiens
cggggtggggagagctgtcccacggtgaggagagctgtcctggggtgcggggagctgtcccggagtgaggagagctgttccggggtggagaaagctgtcctggggtgtgggaaattgtcccg

SEQ ID NO: 53141 - DNA, 122 bp, Homo sapiens
aaaggagagggaagcagaggccctggagctgggggaaaggagggtcattggtattctgggcgctgaggagttcctggctgggcagcactcaaggcccaccccctggcatcaggctgcacatt

SEQ ID NO: 53142 - DNA, 122 bp, Homo sapiens
ttgatttaaaaggccacagtgataaaatgcataccttcttttagacatgagtaagaattacggcatcacaccagggctcatcctctggcctggcttgtgagggatggggggaagcctgttag

SEQ ID NO: 53143 - DNA, 122 bp, Homo sapiens
aagggagctggggtctctggcgtgggagggggtgatgggcaggccggccgtgcaacgaagcgggtggccaggccccaacgccgcagcccccgccccgcccgcctgttttgctcccggctcca

SEQ ID NO: 53144 - DNA, 122 bp, Homo sapiens
atcagtcacctgcatgggagccctaactcacaggctggacagaagaggcccagtgccctccgggtgtgaaccctcgcacacatgcgttctcacaggctctcctccgcagggctgcaccggcc

SEQ ID NO: 53145 - DNA, 122 bp, Homo sapiens
tttagtagagacggggtttcaccatgagccaggatggtctcatatcttgaccttgtgatccgctcgcctcggcctcgcaaagtgctgggattagagacgtgagccacggcgcccggcccaga

SEQ ID NO: 53146 - DNA, 122 bp, Homo sapiens
ggggtggctggccctaacagctctctgtccccccaaggggtcaggctgagaagctggaggcggtcctggcttccatccccccaggatctggagggttccccgccttcccctgctcaaaactc

SEQ ID NO: 53147 - DNA, 122 bp, Homo sapiens
gtgacgaggttaaaacctgtacgtgccctgctgtgaagcaatctgagaaaccatttcacacggaggtgtggcccactgccggacacgccacatctgtgtgcatgtgccggtgcacgcttgct

SEQ ID NO: 53148 - DNA, 122 bp, Homo sapiens
tcccagaccccggcgggctcctgacatcttttccgctacccgctcccggcacatatgggtcgggtgtgcagtgggaagcccagagcctgctgtgtagcagagaacccaaagcgtagagccca

SEQ ID NO: 53149 - DNA, 122 bp, Homo sapiens
acttctcggagggtcccggcagccgggaccagtgagtgcctctacggaccagcgccccggcgggcgggaagatgatgatgatgtccctgaacagcaagcaggcgtttagcatgccgcacggc

SEQ ID NO: 53150 - DNA, 122 bp, Homo sapiens
tattttgttcactgtctcccccactcaactgtgagtcccccaaggtggggatcttgatctcgttcacagctgagtccccagccccttgcacagggttagagtaggcacttgataaaaacctg

SEQ ID NO: 53151 - DNA, 122 bp, Homo sapiens
tgagaaccactggcccagagagggtagcatcctgtgccgtttgtcccggaacgcagcttacggcacactctgggtgccctgcgatgtctgggctgtgtccataggaaccttgcggcctggcg

SEQ ID NO: 53152 - DNA, 122 bp, Homo sapiens
gtattttttggtggagatggggtttcaccgtgttggccgggctggtctccagctcctgaccgcgagtgatctgcctgcctgggcctcccgaggtgcctggattgcagacagagtctcactca

SEQ ID NO: 53153 - DNA, 122 bp, Homo sapiens
aaactcccctcctcttgaaccttagaatccttctgcttcactcttggcaaatctttgggtcggatttcagaactgaataaagccaggatttccccccaacctccaagatgtctggactcttt

SEQ ID NO: 53154 - DNA, 122 bp, Homo sapiens
tggtttgaactcttggacatactttctctgcattcagagtcaggaagaccagccaagatacggggctggtccccgccccttaacgggatgcggcacagaggccttgcctgaggggcctgcca

SEQ ID NO: 53155 - DNA, 122 bp, Homo sapiens
tctatgatgttcatgacaaaatcacctaatgattcatttctgaggatatagtaaccccatcgttaagcaatgcatgacagtatatgtaacctgtccaggggaatctttgcttccttttcaag

SEQ ID NO: 53156 - DNA, 122 bp, Homo sapiens
aggagggagagcatctggaaaaacaactaacgagtactagacagattacacagtcggaatcggctttaccacttactctcaagaagcactcagcctctttaggcctcagtgttcttatcttc

SEQ ID NO: 53157 - DNA, 122 bp, Homo sapiens
ctgcctccccacagagctctgccagctgcagagagacctgaggcttgcgggtggggtgggcggtggtgctcagtgggttggatggaggcagataagctgtagctgaatcccaaggctgagaa

SEQ ID NO: 53158 - DNA, 122 bp, Homo sapiens
cgtcctccgccgccgccgccggcccagtgcgcggcggccgcgcgtcctcccgtcaccaagcgcaaccccccgcctccggctccgcccccgcggcggtcactacccgccgccagggggcactg

SEQ ID NO: 53159 - DNA, 122 bp, Homo sapiens
attaggaggcgggctctgagtgtgatggttgaaatcccctgtgggaaactaacccctccccgctcgcagaggtagaaggcaacacccactgcccggccctcgcctccccgcccggaccgccg

SEQ ID NO: 53160 - DNA, 122 bp, Homo sapiens
ggacagcgtggagtgctgggggcccgagatggaggtgcaggggtcaggccctgcggggaccgacccagagactcaggtgcccgcccatcctagactccgtggccgcacctgtgtcttccgga

SEQ ID NO: 53161 - DNA, 122 bp, Homo sapiens
ggctcaagttcgggaggcgttacctgtggagggtttgaggcaggcccagcagcgaggccacggtctgccgacgcggggccaggggcgggccccaggatccggagcttagggcggggccgagt

SEQ ID NO: 53162 - DNA, 122 bp, Homo sapiens
cagggtcggggaagggtaggggtgccaggccgtgcagcaccaagccacccgggtgtgcttcgcgaaaggggcaccactgcccggcaagcagggaacacagatgccaggactggggacccctg

SEQ ID NO: 53163 - DNA, 122 bp, Homo sapiens
cgtgccttgtgtgtgctgccgcggtctccctgcaccttcagagcaatcttgtgaggcaaacgacgttaaacgtgtttagagtatggaaagcaaatgcaaaaaaaaaaaaaaaagaataagga

SEQ ID NO: 53164 - DNA, 122 bp, Homo sapiens
aaaagaactctttagggtccatctaaagcacaaaaaagttaggtttccaagacctcgtggcgcaacggcagcgcgtctgactccagatcagaaggttgcgtgttcaaatcacgtcggggtca

SEQ ID NO: 53165 - DNA, 122 bp, Homo sapiens
gatgttacctcctaacacttcgggaggtgggcagcatggcaattcctagtaacctcaacgcgattcactcagacttcctttttcccatcctgagccgcaaaaccaggaactggtgaaataaa

SEQ ID NO: 53166 - DNA, 122 bp, Homo sapiens
gggcccaaagtcactggcgagggcaggggctgaattgctggggtcctaggtccttggagacgccagcccaaagagcccagggaggtcggacttcggggggcaggaggtgagggccgagtctg

SEQ ID NO: 53167 - DNA, 122 bp, Homo sapiens
ctccctcagcttcgcggactgtctgggccgggggtctcaaccttgacttcagggccgggccgctggggcagacccttagtgatgttcaggtcctctgggcccctgccagtcaagggacgctc

SEQ ID NO: 53168 - DNA, 122 bp, Homo sapiens
ttctccccctccttcgtcaagacaaataattaacttcagactcccagatgccagggcagccgcactctctcccgccgccggctgcaggaaccgcccccctctcctgaaccccctgctttggc

SEQ ID NO: 53169 - DNA, 122 bp, Homo sapiens
tggacctggccccgggagacgccgggcggggggcgctgacctggtgcagggcgctgataccgtcggcgttggtggagtccagcacggcgcgggcgggcggcggcgcggcggggtcgagctcg

SEQ ID NO: 53170 - DNA, 122 bp, Homo sapiens
gagtgttctgcagaggctgcgtattgaaggctgctctctgaagctccctgccccaggtcacgccgccggttccagatgaatccagagtgggggcaggccttcgtgcacgtggccgtggccgg

SEQ ID NO: 53171 - DNA, 122 bp, Homo sapiens
agccctgtgatgttcaactcttctgccgcgggactcccatgtggctttgtgtggtgtgtgcggtcctcctgctccaggctgtgagtatatgtgactcataaactgctgctgatctcatctgt

SEQ ID NO: 53172 - DNA, 122 bp, Homo sapiens
aatgaccgcttgcctaggcgtgttacgcagtttcattgcagcctgcgtgggtctgacttgcgggtcactcatattctgcgaggtcgattgacccacgctgaaacatcaagtgaatactggcc

SEQ ID NO: 53173 - DNA, 122 bp, Homo sapiens
gtttgtcttatttttgatctgatgaatccaaggagtggagcaagaggcagattttggacacggttatgagaatgacagaaactgcctaaagcatttatgctctggcattcgtccctgtttct

SEQ ID NO: 53174 - DNA, 122 bp, Homo sapiens
ggagtttctcccttctggtgggctggtggtctcgctggcttcagtgaatctgcataccttcgcggttgagtgttacagctcttaaggcagcacgtctggagttgttcgatcctccggtgggt

SEQ ID NO: 53175 - DNA, 122 bp, Homo sapiens
ggtaggagatagtagagaccaactttattgtcttggggcccctgcctaagttcttggactcgggggctatctccaaggacttgctgtctgtcaatctcaagaccaccttgggtctcccacac

SEQ ID NO: 53176 - DNA, 122 bp, Homo sapiens
tcgggcgtgtggcttccgggcacacagaaaaccgtgtggttctaggatacatggggatctcgggcactgctctgtcaatctgcatctggttcacaggaagggcttcgccagggcctgcgttc

SEQ ID NO: 53177 - DNA, 122 bp, Homo sapiens
gcacataatagggccttatactaaaggagctccacggtttacgagacctagagctaccggcgagatactttacttcattccctgtggtgaaccgtggggactttcgctccaaattttcatgt

SEQ ID NO: 53178 - DNA, 122 bp, Homo sapiens
aatcttttccccggccccgccccttagctcccttcagcccctccccctcccagatagccccgccccctcggggggccttccgatttccagctggccccgcccacacagttttcccccccccg

SEQ ID NO: 53179 - DNA, 122 bp, Homo sapiens
cacttctcaggacgcctgtcctgctgtcttctcaaagaggtggatgaagccaccaccacccggtttacagatgaggaaactgaggctcagggagatctggaaaccattcccggcagctgggc

SEQ ID NO: 53180 - DNA, 122 bp, Homo sapiens
gggaagggaccgaggcgtccggcttttaattatccccggtgggcgggcgtggggaggccgcgctctgctggataattgaaccctgggactattccctcgtcagcccaagctctttatcttaa

SEQ ID NO: 53181 - DNA, 122 bp, Homo sapiens
atcgtaaagacttacaacaggattgaaattggtaaagagaaaaaggcaatcccctacccccgtccctcagagatagctgctgttgtcagatcagttggatattcttgaagacagcttccttc

SEQ ID NO: 53182 - DNA, 122 bp, Homo sapiens
gtgaggcgaagcctggtgggtccctggtgccgtgggaaatcttcctcatcaccctggtctcggttgtggcggccgtggggctctttgctgggctcttcttctgtgtggtgagtgcctaatat

SEQ ID NO: 53183 - DNA, 122 bp, Homo sapiens
agcctgcgaagtggtgccggctgctctcgggctgccctccctccccgaggcgtggagaaccgtacctgtcttcggaagacggaggccccctcacctggtcctcccggctctcagcgtgcgcc

SEQ ID NO: 53184 - DNA, 122 bp, Homo sapiens
gcctgggggcgtggcttagagtggggcaccctgggactggaccccgcaggtgcttgggggcgtagcctggagtgagggtttggctggtgtagcttggagtgaggccccctggcgtggagtct

SEQ ID NO: 53185 - DNA, 122 bp, Homo sapiens
atcggcctgcgcacccatctccagctctaaaagcaatgacctatccaaggacatggacaccgggctgggtgactccatatgcttcagccccagtatctccagcaccaccggccccaagctca

SEQ ID NO: 53186 - DNA, 122 bp, Homo sapiens
gcgggccaatttcgttgtccgtgtgttgggctttccggaggtctgtgcgcccaacagcgccgctcccgcggctccacccgacccagaccctagctggaaagcgccggaggcggaggaagctg

SEQ ID NO: 53187 - DNA, 122 bp, Homo sapiens
ctgtgacattgtgggcatgaagctgtgggtggagcagctcaaagtgggcgtcctagtggacgaggtgatctgtaaggcgcccaaaaaattcgctgagaccgacatgcgctccattaagtcgg

SEQ ID NO: 53188 - DNA, 122 bp, Homo sapiens
aatgccccccccattcccccggccccactcagctggaattgtctaagaactcattcttggcgttcactgcaagctataaactctgcaagtggtgcacccgacgtgatcgccttgaagttatg

SEQ ID NO: 53189 - DNA, 122 bp, Homo sapiens
tgggaaggggagaagtgaaattagttctagactagtttgtgaaggtggcttagttatctacgctttgtgtgttctgagcttccgtatccagaggcacagagtagtaagaaaatctcttaaga

SEQ ID NO: 53190 - DNA, 122 bp, Homo sapiens
aaattcttgtgttgaagtcctagcccccagcacctcagaatgtgactgcatttggagatacggttttaaaagaggtagtttagacaaaatgaggccattaggatattcattagagttggtcc

SEQ ID NO: 53191 - DNA, 122 bp, Homo sapiens
cgccagtatttatattagggggcgtggcctggtgacatcacagctggccgggcagccgcgcgagcggggcggaacccggttgcagcccggagaaaagggagggggacggaagaggaaggagg

SEQ ID NO: 53192 - DNA, 122 bp, Homo sapiens
tatggcatggaatcgctttagcgaacacccgactaagaggtgtttgggattctttggctccgctgaggggtttgaagccacagggaaggctaggctcccgcacaacgcctcctcgaggggcg

SEQ ID NO: 53193 - DNA, 122 bp, Homo sapiens
acgtgtttcacctgggcagaggcctgttcttcactagcttgcttgcttggttggttgtcccggggttaaaatcagtcctgttcttgcccctagagtggtctgccttcaaatgctctcctccg

SEQ ID NO: 53194 - DNA, 122 bp, Homo sapiens
actccccaatagctggaggccacatgccaccgcctctgaagatagaaacccatcaacagtcgctacaggacgaaagccatgccttcccactgaaagaaaatgtatttattgagcttctacca

SEQ ID NO: 53195 - DNA, 122 bp, Homo sapiens
caggactccaatgtgacaatgtggaactggaaagacgagcaagaaaagcccctccgttcccgccagcgttgggcattccttctgcagtccaggctgtccccgtcactcgggatcacagccaa

SEQ ID NO: 53196 - DNA, 122 bp, Homo sapiens
tggggtttcaccaagttggccaggtttgtcaagaattaacctcatgtgatcctcccacatcggcctcccaaagtgctgggattacaggagtgagccaaggcacctggtccataataaggtgt

SEQ ID NO: 53197 - DNA, 122 bp, Homo sapiens
ggcaatggaaaagtgcaccctttggttatggatttgttgtttcagcaaacaggtcatgagcgccaggtctgtgcctgttgacacgcagccccgagctgtcctgggatttgctgaaaccgcgg

SEQ ID NO: 53198 - DNA, 122 bp, Homo sapiens
ttgagacttcaggagcccccaagacttggtcaccgaggtgccacaggcgccggccttgaccgcactctcccgcgggccccggggctgctttccccggctttacctttgttttcctagtctgt

SEQ ID NO: 53199 - DNA, 122 bp, Homo sapiens
ccccactgaccacaaggaggtgaggaatcacaatgctaccttgtgtttgcaactggagaccgataggaatgattagggaaccataccaccataatcctagtaaccagaaagccagccagcta

SEQ ID NO: 53200 - DNA, 122 bp, Homo sapiens
ggattctctcctgacgaccctcctgtggcccctgcacaatttgggagagacgccgcgttgcggctgcagagctgcccacagagggctgcaggccgggacacagtcactgcgcagagaagaga

SEQ ID NO: 53201 - DNA, 122 bp, Homo sapiens
agtaaagaaaaaggttgcaagtccgaagttgcagtgaagtgcaagatgtccaggcccctccggtatgtgagttcatcactaatgacttagccgtctccaagaagcgcagcggccttctctgt

SEQ ID NO: 53202 - DNA, 122 bp, Homo sapiens
cagaaagggaactccctgaccctttgtgcttcccaagtgaggcaatgcctcgccctgcttcggctcgcacacggtacgcgcacccagtgacctgcgcccactgtctggcactccctagtgag

SEQ ID NO: 53203 - DNA, 122 bp, Homo sapiens
atggcggcgacgacggcggaagagaacgctgacgtcaacactcagctttttataggcggacgccggttgggcgggtcatgtgactgcgctgcgaaggcggggcgaagggacgccgcgcaagc

SEQ ID NO: 53204 - DNA, 122 bp, Homo sapiens
gcccaccgtgattttctgcaagcacaaagacagcagcggtcaggcggtttcagtgttggacggccccaaggagttgtcctttaaaatccttcttgctggtgtgatccagccacgaatgagaa

SEQ ID NO: 53205 - DNA, 122 bp, Homo sapiens
gggctcctggggaggctgctggagagagcacaagaggaaagacccgagcaggctgagcctcgctgcttccagcccaggctttattgagctgcagatgaaggcagtgctgtgggcagcaggcc

SEQ ID NO: 53206 - DNA, 122 bp, Homo sapiens
gcccactagccgcttcccagtgaccatgcgcaacaggcaggtgggagcctatggaaagcgcggactttcggaaagctgcacgagcgcgttcggggagtccggttcagcgcctctgcgcaggc

SEQ ID NO: 53207 - DNA, 122 bp, Homo sapiens
gcctcagctggttgtggggttggggcttgttttctttctttctttgtctttgagccattacgctggaaatgagacccagaaccggagtggatgccagctctgaggaggaagaagcaggcctt

SEQ ID NO: 53208 - DNA, 122 bp, Homo sapiens
gcagtgtgctttctggtgaccatgaatggatgctgtcagtagatgccttggtgctctttacggtgctggtgcaactacccccaactgtcaggaagatgtcccctagtggcttatagctgtct

SEQ ID NO: 53209 - DNA, 122 bp, Homo sapiens
tctctggatggtgccgctgctccttaggccaagcagagatcatggagccggctgacatggcgacagcaaaggtaggatggaaatgctgccggccgcactgtgcgtaagtggcttcgcttggc

SEQ ID NO: 53210 - DNA, 122 bp, Homo sapiens
agcaattagctatcttgcttctcgcagcacatacaggagacagctgagtgcgctaaaccacgcactgactggtgagcgctttgcaccaattagtagcaggtgctacagcccaaaagacaaat

SEQ ID NO: 53211 - DNA, 122 bp, Homo sapiens
gccgggcgtggtggtgggtacctgtagtcccagctactccttcaccgcagaatggggctgcgacagagtgaatatcctgtttgccgtgtagcctatatttaaaatcagactgtcctcctcaa

SEQ ID NO: 53212 - DNA, 122 bp, Homo sapiens
cggtcgccctcgccaatcgttggcaggttagagccggctgcgcggcttacggggctcaatcggcggcgagagcggcaggcggggcgggccgaacgcgggtttccggcggggcccggcaggcg

SEQ ID NO: 53213 - DNA, 122 bp, Homo sapiens
tatgttcccgcatgcgcacagaggtggcctcttattctttattcccttgcttctcatctacggatttatcctaactggaaacctaataatgttcattgtcatccaggtgggcatggccctgc

SEQ ID NO: 53214 - DNA, 122 bp, Homo sapiens
cagttcgccctctgtgatggccagtttccgagctacctcctcttatttgcggtcagcctccggccgcagtgtgcttggcctctttgagctgcatctcccgaatccatcttctcctcatccct

SEQ ID NO: 53215 - DNA, 122 bp, Homo sapiens
cccggagaagggtgggtgtcagtgtgacgcagctgcagctgcagcaactccagggcgccccgtccggcccccacagatggccctggggtggggatgaagggctgcctgctgaaggccgattt

SEQ ID NO: 53216 - DNA, 122 bp, Homo sapiens
catcctataaaattttcagcaaggctttgtatctttgcagtcagcttctgctgagtagctcgttgtctccctggcaacgtattttcctactttctctaattagtctgtcttcctttacctac

SEQ ID NO: 53217 - DNA, 122 bp, Homo sapiens
ggcaccgggcccatcctgctggacgacgtgcgctgcaccggccacgagaacgcgctggagcgctgcacccactcgggctgggcccggcacaactgccagcaccgcgaggacgcgggcgtggt

SEQ ID NO: 53218 - DNA, 122 bp, Homo sapiens
gcctccacccagcgtgcgccgtgagttcccgctgaaggtgcgcctgtccacgggcaaggacgtgaggctcagcgccagcctgcccgacacagtggggcagctcaagaggcagctgcacgccc

SEQ ID NO: 53219 - DNA, 122 bp, Homo sapiens
cccacccttcagccctccggggccgccgcgcccggctctccaaactttgagatgcttccccggagccaggcaggagggcagccagggcacactctcttggcgctgattcccttccccagccg

SEQ ID NO: 53220 - DNA, 122 bp, Homo sapiens
ttgtcgcggcgaggaggtgggcgcgctggagcaggagcggggccggaactggagccgaggcgcaggtggcgctgggtgagtggtggggcggcggaggtgcaggaactcccgcctcccgctca

SEQ ID NO: 53221 - DNA, 122 bp, Homo sapiens
aatttagaataaagaataagacagcagtaccgtacttaacttggagtccctggacctcctcggagcataaaaatcacctgggtgagtgttaaaatgaaggtccctcctcctgaaattgtgat

SEQ ID NO: 53222 - DNA, 122 bp, Homo sapiens
accgtggagcagggggcggcattcgtccggaggcttgggctgcacaggaacccacggaggcgggggaaggctcaggcatggcgggctgcagtcccaaggcctgccctgcgggaaggcagcta

SEQ ID NO: 53223 - DNA, 122 bp, Homo sapiens
tccttggcgagcacgtgaccccggcgggcacgcaggagggcaggcaggcccctgcgcaggcgctgggtggactgcttccaggtgtcatattggaagaacttgcccacggggtatctggggaa

SEQ ID NO: 53224 - DNA, 122 bp, Homo sapiens
gctatggattactttcaaaggcacatcatattactatagttactggtaatgaaaaccacccgttatcctcacctctgttttgcctgaaagattatggatgggtagtaatactttgccctaaa

SEQ ID NO: 53225 - DNA, 122 bp, Homo sapiens
tgcggtgggatccaatcgccatagccggggtctcctgtcagcagcttccactcacccacgcggatggcagcctgcacggcggtgttccagatgccaaagccgccctccagggagccatgctg

SEQ ID NO: 53226 - DNA, 122 bp, Homo sapiens
cggcgcacaaactttctggacatggggcagtttttcagctggacccgtgctcgagcagagcgcccactgccagactggagcacttgaccactcagggtgccactgtgccgagccgggcagga

SEQ ID NO: 53227 - DNA, 122 bp, Homo sapiens
cctcagcaccgcccagggagaacccgcggccgcctggttgtgaaaccccacagccttctccgccctccgctgtgggctggatttccatgtgaatcttaagtcagttctcaagtcccgtctcc

SEQ ID NO: 53228 - DNA, 122 bp, Homo sapiens
gctgtagacttgcttggtgggtgcctggggttttctgcctccctggtgcactgggcacagcggcttgcctgccttttgggtcgtctccacctcccagggatgtttttgttccctgatcgaat

SEQ ID NO: 53229 - DNA, 122 bp, Homo sapiens
aaagaatgttagaagacaaggaaacaaaacagcaaacaaaatgccattgtattgtagtagcgattcatgggaaaatgcttgtcagcctcctaatgcctcactcctaggaggctgttttgagg

SEQ ID NO: 53230 - DNA, 122 bp, Homo sapiens
gagggaggaagtaggtttgtttacgggctgtttggggcggagcagctttggtcgggggtccggtgctggggcgggggccaggactgcaggccgcgcctgacgctctcttttcttttcttgca

SEQ ID NO: 53231 - DNA, 122 bp, Homo sapiens
atgcactttcgcagtgttaaataacaccctgcaaggtagttgttattttgtagacgtagacgcaaaggctgaggaaggttacatctcctagccataagggctgtacctaaagccataacaag

SEQ ID NO: 53232 - DNA, 122 bp, Homo sapiens
caaggtcacggtgtcagcaaggtgtcagcgaggttccttgggtatgggacccaaagcctccggatcccagcctggagcaattagagtagtagtagtggtggagatttatggagttctgttct

SEQ ID NO: 53233 - DNA, 122 bp, Homo sapiens
gtaccggtcagccagcctcctgctgcagagccagtgaactcaggtcgggcttctcagctgcgcacagtgagtggggtcggagggggtgggcacgaacgtcgagggagaaaaaggggctctcc

SEQ ID NO: 53234 - DNA, 122 bp, Homo sapiens
gggccatgactcaatgcacccaaattctctagattgctatgtctctactcgctaagccttcgggaacaacaagcacagaacttttagggtgctgtctcactgatgtcggcgttagctctggt

SEQ ID NO: 53235 - DNA, 122 bp, Homo sapiens
aatacctaccagaggcaagggtggcatccgcattccttgtgttatctggtcggacgcccccgcaggccgtctaacttattcaaaggcgcggctgagcgtttgcagcgcggtctgcagtgaga

SEQ ID NO: 53236 - DNA, 122 bp, Homo sapiens
aagggactcactgctgctctgggtgacagggtccgccttgggggcctctgcttgtaaagacgtacttttcctctccctgattctgttgtctaaatgccaggtgcctttgggatggtgttgaa

SEQ ID NO: 53237 - DNA, 122 bp, Homo sapiens
ttgttttcataatagaagtctgttttctctaacaccttttcttctgttttttttttcattcgttataacttatttttatgtattcacttacaagtttcgtttgtctgtattactcttttcta

SEQ ID NO: 53238 - DNA, 122 bp, Homo sapiens
gcccgactccctggagcagggagctttggaacaaaacacttcccttaccccctactttaacggtaaaacctcaaaccacaaaggtggaagaaaagagggaagctagcaggagtgccccctct

SEQ ID NO: 53239 - DNA, 122 bp, Homo sapiens
ctttccactgcatcccacaccagacacgcccacgccctcctctgccccgcaagtcctccccggatgcgcttccaggtctagctctccagctagtcctgctgccaacaaagtcacccctgcac

SEQ ID NO: 53240 - DNA, 122 bp, Homo sapiens
acccactgattctgagcacaagccctgtcctctctccagctggatttggtaggaaaatcacgatccagcttgcctcactcctgagcctttgctctgaacggagcgcactcacagtgcggggt

SEQ ID NO: 53241 - DNA, 122 bp, Homo sapiens
tcttataagaatgaccactgcactatcctgttaacatctcctctaaatcagaaacagtgccgtgacttatcaactggctagatgcactgctgatgctgcccaatacttgatggaaaactctt

SEQ ID NO: 53242 - DNA, 122 bp, Homo sapiens
caacgtacgaatttaggaaatggatcacgctaaagcctctcccagcacaaattcaccctgcgtttttgcacttgaaggatttcattttatttttgaaaaagtgttgcgttggcccacgctta

SEQ ID NO: 53243 - DNA, 122 bp, Homo sapiens
tctcaggaggtgagactgagatgctcagagatgccagtgcccaagtgtggaaacatggcccgggggtctgccgaagccaggctgcccggccaggaagagggggtgtcggacagaaaactccc

SEQ ID NO: 53244 - DNA, 122 bp, Homo sapiens
tgtcttaccagcagtttggtgtctttgatgacgcagagcaacttggtccactggccgaaccgcttcttccgcagcaggaaggcgcagattttggcgtccttgaccaggtccatggaggcctc

SEQ ID NO: 53245 - DNA, 122 bp, Homo sapiens
cttcgaagtcaggctcctgcccgcccaccgcctctgtgccagggtccaacccccgccccacggtgcaccccccagggcctggggtcccagtccccaagtaccccttgctatcaggtgggctt

SEQ ID NO: 53246 - DNA, 122 bp, Homo sapiens
cgtccgcatcgaggacttcatccagtttgctacggtctacggggcagagcaggtacggagcggcccgggccggggcgtgggaactgggcaggtgcgcgctggccggcggggttgatgtggga

SEQ ID NO: 53247 - DNA, 122 bp, Homo sapiens
gctgccggcttctttcaggaggctgaggtttggaggcaaaatcaacctgggagaccaccccggccgcggcgcctcagtggacaggtgggaggaaaagaaaacttcttaccttggaggaggga

SEQ ID NO: 53248 - DNA, 122 bp, Homo sapiens
cctggagagaagagcctgcccagcgtggggaacatgggaatgtggagatggagggcatcccggaacctcagggctgacgggcccctgccccagccctggaaacacctcagggacaagagagt

SEQ ID NO: 53249 - DNA, 122 bp, Homo sapiens
gccattgccatcgactacgacccgctagagggctatgtctactggacagatgacgaggtgcgggccatccgcagggcgtacctggacgggtctggggcgcagacgctggtcaacaccgagat

SEQ ID NO: 53250 - DNA, 122 bp, Homo sapiens
ggggtcacggccaggcagaggcgctccccaaatctcagacgatgggcggccgggcagagacgctcctcacttcctagacgggatggcggccgggaagaggtgctcctcacttcccagactgg

SEQ ID NO: 53251 - DNA, 122 bp, Homo sapiens
cactgcacgcgactgtagatttgtaaacaccgtacttgtaagctaagacatcaccgcacgcggctgtagacttcataaacactgtactcgtgagccaagacatcaccacacgtggcggtaga

SEQ ID NO: 53252 - DNA, 122 bp, Homo sapiens
ggacagtactatacaaatagaatgcaagctgtaatgtaattttatattttcttatagccacgttgaagtaaaaacaaacaggtacagtgttttttaccagctttatagaagtacagttgtta

SEQ ID NO: 53253 - DNA, 122 bp, Homo sapiens
cggagagcgccatctccgggggcggggctggcggggtgggggcggggcctgggcggggcgcgcgagaccccggccgggtcccgggggcgcgcgcggggcgctctcgccagtcccgcgggccg

SEQ ID NO: 53254 - DNA, 122 bp, Homo sapiens
gtgggcaccgaggtgtgcagctgggttcacgtggatgtgggtgggaacagcatgtgtgcccgtggacccgtgtgagcttgggctcgcacccccagcgctggccactcccggcgggacccacg

SEQ ID NO: 53255 - DNA, 122 bp, Homo sapiens
gcctccccggcccggcccggcccggccgggcgccgtccacccgagggagcccgcgccctgcgactgcccgaccctccacccgccccacgagccgggcaccggtgccaggtagggctgtcgag

SEQ ID NO: 53256 - DNA, 122 bp, Homo sapiens
taaactttatgcttgcccccacttttctaccttgctcatacactttccttccctagctcccggtaaaatgagagagttcttatctttggggcttatgttcatactaaggggcaggcacaaat

SEQ ID NO: 53257 - DNA, 122 bp, Homo sapiens
cacccctactgtgtacacctaatgctgagtctgcgacatcgcccgtgacattctgccagacgatggcccctgtgcttaggcccgatttaagggttagccacaatgataatattgccagtaac

SEQ ID NO: 53258 - DNA, 122 bp, Homo sapiens
gctgaaagttggggcaggtggtccctcctgcggtggaaactgccatcagacctgaagcctcgggtcacaaccagggaggtagggaagggggccccgagtgctccctgaaaaagacggtgtgt

SEQ ID NO: 53259 - DNA, 122 bp, Homo sapiens
cttctgtgtctgaagtcactgagtccaggaaacagagctaggcctccctgcacgcctttacgccaggcctggggaagagagaggaaaccacgtgagtgcctgcatggctcccagccttgcag

SEQ ID NO: 53260 - DNA, 122 bp, Homo sapiens
acatgacatggcaggagccatggtccagggaaccaggtggctgccaacttgcagaacaggcgacaaaaccccagcctggacccccagaccatgcacttctccctttgccctgcttctcctct

SEQ ID NO: 53261 - DNA, 122 bp, Homo sapiens
cacgagtcggtcgccgtccccatcccccgcccaggctggcgcccccgatggctttgctggcgggccacgctgctagttcctttcacaccaaggtcaggaggagacggtgacgaaatgtttgg

SEQ ID NO: 53262 - DNA, 122 bp, Homo sapiens
ctgctcagcattgggtcagttcttaattatccacgaatgggtcagaaactccgtacacagcgttttcctgataccttgaatgtcattggaacttcacagaggagccaacggaagagcgtggg

SEQ ID NO: 53263 - DNA, 122 bp, Homo sapiens
gattctctagtcttcaggttctcccaagtcattggggattgtgtgagttgagctcctatccgtaactcctccacctttgcaccttctcccagcaaactttggtctctgtaaccccttttcag

SEQ ID NO: 53264 - DNA, 122 bp, Homo sapiens
aaaattgctagtaggtccaaaatggggcaggggcaacccctagggaacctgatgttggggcggactctacatttttcaatcaagcccctggaaataagggcgggacttcatttagatcagga

SEQ ID NO: 53265 - DNA, 122 bp, Homo sapiens
gagcacctggcaaaagccaggcccacttcctgctcggctccgcccagagcagggggcgggcggataggcgattccctccaatcacagttccaaaaggagggggctgacaacatatcctccaa

SEQ ID NO: 53266 - DNA, 122 bp, Homo sapiens
acctgtgggcagagttcatttcttcccctaagaggagctgaaccagagtgactaaaggaccgctgagctcccttccaggattcccagtccccagccccccaaacaccaggtgaagtctccac

SEQ ID NO: 53267 - DNA, 122 bp, Homo sapiens
agaggcaacaccagctcagggtggaaatcagtgccagaccagccagaggggcagaatgttcgcacccacagccactctggggcataacatcctgcttgagggcaggggaccagcaatagggg

SEQ ID NO: 53268 - DNA, 122 bp, Homo sapiens
aatgattgctcagtggaggtggagatggtgccaaagtctgctggccacatagctgcaggccgcagagggtgcccacctgtgtgccagcgcctgtccggcgcctgcctgccgcctccgtggcg

SEQ ID NO: 53269 - DNA, 122 bp, Homo sapiens
gctccacccgcttccttgctgccgctccgcactcatatcctctgtcgtggttctgggatgcgctgggggatctgaagtccagggaccctccagctggtccttctgggtctttgaccccgagc

SEQ ID NO: 53270 - DNA, 122 bp, Homo sapiens
ctctacaaaaatttaaaaattagtcagatgtggtggcgtgcacctgtgctcccagcttctcgggaggctgaagtgggaggatggcttgagcctgggaggtagaggctgaagctaaatgtgtt

SEQ ID NO: 53271 - DNA, 122 bp, Homo sapiens
agcggtggctgaaggtcttcccacactcactgcactcatagggcttctccccggtgtgcacgttgtggtgctgaatgaggactgagcggtcgctgaaggccttcccacactcgctgcacgtg

SEQ ID NO: 53272 - DNA, 122 bp, Homo sapiens
atgaagcttacagacatccgcttggaggccctcaactctgcccaccaactggatcagcttcgggagaccatgcacaacatgcaggtcagtgtctgggcggacagctgcaggaaagggaagac

SEQ ID NO: 53273 - DNA, 122 bp, Homo sapiens
cgtgatctgcccgcctcggcctcccaaagtgctgggattacaggcgtgagccaccgcgcccggccagcttatgtatttttaagacagggtctcactctgtcacttggctggaatgcagtggt

SEQ ID NO: 53274 - DNA, 122 bp, Homo sapiens
tgtcctcactctagagtggccggactttgtcaacagctacgcctcgtggtggtcctcgcacgtcctggactggctcaagtacgggaagcggctgctggtggtgcactacgaggagctgcggc

SEQ ID NO: 53275 - DNA, 122 bp, Homo sapiens
atggcggctgctaggcgcctgctgctggggagtattgagagtgttgtcgggaggcggagccgccatcttgaaggcggtatctggaaaaaaaattcggttatgatccttgaggcggggatggg

SEQ ID NO: 53276 - DNA, 122 bp, Homo sapiens
gtgttacagctcttaaggtagagcgtctggagtctgccccttctgatgttcagatgtgttcggagtttcttccttctggtgggttcatggtctcgctggctcaggagtgaagctgcagacct

SEQ ID NO: 53277 - DNA, 122 bp, Homo sapiens
tgtctggccttgcactgtgaggtgggggaggtgggagaggcataatctgggtcttgaggacgtttcagccctcagcccggggtggctgagatatggccctgggtaggctctgtcctccagag

SEQ ID NO: 53278 - DNA, 122 bp, Homo sapiens
ttctccagcctgagcatagaaggcaggatcgagccaggttatggggtgaaaagccaagcccgggctctcagacagaagctgctttgccgtttggcctcatccaactcaggcaacgactccca

SEQ ID NO: 53279 - DNA, 122 bp, Homo sapiens
agttgtctgcgggctgcggggagctaagtccccagattggaggaggctggctctggtcttcgatgcacaggagtggccgttatggaacgcaggtaaggacgcttctcaatgtgggataattc

SEQ ID NO: 53280 - DNA, 122 bp, Homo sapiens
taactgcttggtaactgtgtggtaactgcgtacactcgttgtccgaggcacaatgaggcccgggcaggagcctggaccacgtctccgcggctgcgcagtagcgcttggcatgcgtgcgtgac

SEQ ID NO: 53281 - DNA, 122 bp, Homo sapiens
attaaaaaaggcaagcataaatatttctagaagcatcatgtgggtctcagtgacaatggccgggttataattttaccaataaaaggagacaagggagactggggctttgcacagactgtctc

SEQ ID NO: 53282 - DNA, 122 bp, Homo sapiens
agatataagaggtcagggcgcagaaataagggatcggggtacagagataagaggttggggcgtggaaataaggcaggcgtccctgagtggtcagacacctctgaaacgtgggtgaacaatca

SEQ ID NO: 53283 - DNA, 122 bp, Homo sapiens
ggaaagtgacttacagaaaagaaaagggaggtacagaaacagctggattggttacagctccgtgtgtgcctttaacacaatttgaatagttggtcgcctatgattgaccaaaattaggtgat

SEQ ID NO: 53284 - DNA, 122 bp, Homo sapiens
gagcggaggagcggcgcggcccagcccctgttacggtggttatcggatggaggccagcgtcgcctgggtcccctctgtacacccagcgcctattattatggtgattattagaacgcagggcc

SEQ ID NO: 53285 - DNA, 122 bp, Homo sapiens
agtcaccaggcaatcattgtgcaaatgagcccagttaacccacagctccataggaggagacgcattattttaagctactagttttagggttgtttgttatgtaaagtacttattgttaacct

SEQ ID NO: 53286 - DNA, 122 bp, Homo sapiens
tcacgagacccccgctatctcgttggtggctatttcctctcccgctgtggtccctggagacgccggaggagatttccgtgacaacggcaagctggctgcaacgaagccgcccacgtaggcct

SEQ ID NO: 53287 - DNA, 122 bp, Homo sapiens
agggactgagggcacttctctggtgtaagcactggcgtccaacgccggacgcagcaaaatcgctgcaaactctgggtccagagaggtccaggtcctcccgggtttctttttattttaaattt

SEQ ID NO: 53288 - DNA, 122 bp, Homo sapiens
actgccgtctatgcagtgggagaaggagggcaatcatgctaaggctgaccaggaagaagtcgctgtagccaggtgagggaggatttgaatgagagggaaatactcgctatgtttcttcttct

SEQ ID NO: 53289 - DNA, 122 bp, Homo sapiens
ggaagtcggtcatggggccggcagagggcgctgggatggagtcagtcttgagtgtcacttcggtgggcaggagagctcgcccaggtgttagtgggttggtttccaccctgggatttttctgg

SEQ ID NO: 53290 - DNA, 122 bp, Homo sapiens
aatgggggtggggcacaggagactccagcagcggtcactgctggaggctccaggagacgacgtgacttgaccaaggtcacagagctggaaggtgaagtcgcctggaccctacccccggtctc

SEQ ID NO: 53291 - DNA, 122 bp, Homo sapiens
agaacagagactgtgtcccccttatagtatccccagcacctaaaatagtaactggcctggcgtggacactaaataaatatttgttgattgcatgaatctacacatcacaatactaggaactg

SEQ ID NO: 53292 - DNA, 122 bp, Homo sapiens
cctcatcagtttggatcttgcagccattgttcgtctacctgctgtttacatccttgtggccgctaccagtgctttactttgcctggttgttcctggactggaagaccccagagcgaggtaag

SEQ ID NO: 53293 - DNA, 122 bp, Homo sapiens
cccaggcccagattacctgcggcgcggctggatgcggctgctagcggagggcgagggctgcgctccctgccggccagaagagtgcgccgcgccgcggggctgcctggcgggcagggtgcgcg

SEQ ID NO: 53294 - DNA, 122 bp, Homo sapiens
ctccacccacctcggcggcaggagcaggctcgggagacgatgccaccggttcctctccgccgccaccagcagcaccgacaccgcagaggccgccgccatgtccctggagcccggccactccg

SEQ ID NO: 53295 - DNA, 122 bp, Homo sapiens
gagggctgggcggaggggcgggcgaggcgggagcgcttcctctgcccgcgggaggggatccgcggccggctcggagggggcgggggcagcggcgggcggcggcgaggggctgcggagctccg

SEQ ID NO: 53296 - DNA, 122 bp, Homo sapiens
tggccggcgggcggggcgcaccgctggacccgcggaaaacttcggagaaacttgagggagcgccggcggggagaacggagaggaggggcggggccgtggcgaaaggggcggggcgttgatgg

SEQ ID NO: 53297 - DNA, 122 bp, Homo sapiens
aggaggccgttttcctgtcatttgcacctggccggagccattctggatgttttaaggaaacgagaaaaccattctttcctcttaccggatgatgtgcgatgtcatttggaaacaaagaaggg

SEQ ID NO: 53298 - DNA, 122 bp, Homo sapiens
gagttccaggcccgccttttcaagagcctggtgacccagctcaccttccggcttcaggtgcggctcagcccccagaccgtgttctgcccccggctaccatgactgtcccctccagacacagg

SEQ ID NO: 53299 - DNA, 122 bp, Homo sapiens
tgattaaggggaaaggaaaaaaaaaaaaaaggaaaggggggaaaaaagctcttcctcacacggagagaaaggttctgctgatagagctgcagcactcgccatgggaaggttagagactgtgg

SEQ ID NO: 53300 - DNA, 122 bp, Homo sapiens
ggcgacagatgggaagacgcgtgggagcctgggggatctcgggagagccgcgcaaactcgcggcggacgcagccagcacccgcagccagcacccgcacactcccacccataccccggcagcc

SEQ ID NO: 53301 - DNA, 122 bp, Homo sapiens
tccaggcctctcatagctttctcagctgaacacctagcagaagagactggccccaaaagacgtgccttggcttcctgagccttccctagagtctccggccagcacaaagcctgagggcaccc

SEQ ID NO: 53302 - DNA, 122 bp, Homo sapiens
agggaaataactcctaaaaacaactgtccactcaccatggaaggcagaaacacccttcagcgatatggtgatcccagcatctaaaatacccaagagagatggcaaatcataaggttgatttc

SEQ ID NO: 53303 - DNA, 122 bp, Homo sapiens
gaacaccccccggcagacacagcgcttacatgggagtgcacgaaggacacccttccctcacgctgagctcagcacagagcctgcaggagttgcccgcagcccggcggctgccatggagatac

SEQ ID NO: 53304 - DNA, 122 bp, Homo sapiens
gccttgggacaaggcagggacagaccggcggggggcggcctggtacttcaggtcctggcacgctggggactggcgctcaccttaaaggagtccacaaactcgtcactcatcctccggagctc

SEQ ID NO: 53305 - DNA, 122 bp, Homo sapiens
tccttcctccttctttttagaattctcagtgtttattgttttcatctttgtttccatgtgcgcccaatttttagcatccatgtatgagtgagaacatgtggcatttgtttttctgatgcaat

SEQ ID NO: 53306 - DNA, 122 bp, Homo sapiens
atggagtctgttgtgaagatctcacaggtaacacctgtaaaatgtgtctccccacaaacccggcacatgctcagggctctgtaactgctggagtggggagacttgttcaaggccacccacga

SEQ ID NO: 53307 - DNA, 122 bp, Homo sapiens
taagtaggcccttcactaaagactattaacttacatcagtggttctcaacccttgctgcacgtgaccaccaagggagcttttgaaaactaccggtgcctgggctggcattcccagagattat

SEQ ID NO: 53308 - DNA, 122 bp, Homo sapiens
aagcgccacccttccccagcgggcttcgggtcacacgcatgaggctatttatagcgtgggcgcgcggagggcgtgggaggcgcgccggcggacaggggggcggggatgaggggggtgcccac

SEQ ID NO: 53309 - DNA, 122 bp, Homo sapiens
acagggtttcaccatgttggtcaggctggtctcgaactcctaacctcaagcgatcgagttcgaactccaaaaaagaactatcatatggcatatgaggggatgacctcctctgcaaggtgccg

SEQ ID NO: 53310 - DNA, 122 bp, Homo sapiens
gcccagctgtgagtttcttattctttggcagaaaaagccaagccctggggctgtggggcccgggaacctgatttctgggcagcatggagccacgggtcataggttttgtccttggacaggca

SEQ ID NO: 53311 - DNA, 122 bp, Homo sapiens
ggaatggggtctaggacgagattcctcaccctccgagcctcagtttcctcatccgtaaaacgagccatctcgtggaggccgtgcgcataaaatcgcttagctccgtgcctggctgatcctcg

SEQ ID NO: 53312 - DNA, 122 bp, Homo sapiens
ccctgccaaccctgtcgcgtcctgcttaggacgaaccaatcaggccttgagttccctccacgcgccgcctttccatttgtaatgtgcgagtccaggcactggcagacaaggctccgccccca

SEQ ID NO: 53313 - DNA, 122 bp, Homo sapiens
cacagccggctggggactgctgggagggccggaccctgcgagaacgggtgggcgtgtgcccggtgggcgcgggaggggcccgggctgcacgagcgcgcgtgcgcgtcggaactggagccgcg

SEQ ID NO: 53314 - DNA, 122 bp, Homo sapiens
agaacaaaccactctcagtgtggaagaattattttaagttcttagtccaactccttgattcgcatttcttttttttttttgagacagagttctctctgtcacacagcctggagtgcaatagc

SEQ ID NO: 53315 - DNA, 122 bp, Homo sapiens
gactagacggcagtacaagggggcttgggcggctgtaagatttctccggagaagcactgacggaaagagtagaaccatgaggtctcctggaaggattcagttgagtcccagggctaaactgt

SEQ ID NO: 53316 - DNA, 122 bp, Homo sapiens
tggccactcttctgatcagtcctgatccggctgaagaagaaaggggaccgctgtgccacacgctcgcagttcgtgcagcccatctgcctgcccgagcccggcagcaccttccccgcaggaca

SEQ ID NO: 53317 - DNA, 122 bp, Homo sapiens
ctcgagtgatctgcctgccttggcctcatgaagtgctgggattacaggcatgagccaccgcgcctggctggtttgttgttgtttctgccattggcatccaaagataaagttcctttcctaaa

SEQ ID NO: 53318 - DNA, 122 bp, Homo sapiens
atctgtgtccaggggttcaagtactggggatcagcatcagtggggatcacagcctgcagccgggagggagaagtagctcttgcttgggggatgtaggcatcctcaccggcccttggagctcc

SEQ ID NO: 53319 - DNA, 122 bp, Homo sapiens
gtttttacaaggccacttttgttcagtgtgacttaccaaaaagctaaaatgaatgactttcgggagaccaagatatcaatatcaaaaaaagcccatagaattagtgaaaaatggttcagcct

SEQ ID NO: 53320 - DNA, 122 bp, Homo sapiens
tgcacccagtggtccttccagaggcaacatgtggccccatgtggccatctgcagcttcctcgcacagatggaaaagcagaaactctccctttttaactgtaaaaggggagaagaaagtacca

SEQ ID NO: 53321 - DNA, 122 bp, Homo sapiens
tgagacttagtttcaacacctgaaagttggttaaataatatcttctttacagagttactacgaagatagccgggcgtggcgggtgcctgtaatcccagctactcagaacgctgaggcagaaa

SEQ ID NO: 53322 - DNA, 122 bp, Homo sapiens
gatgcagctctgccgcggagctgaggagacgtagccttctggggtagggatggagggggtcgtctcaggggacatacccctgcccaggggtctgaggaaacacgaccctgaattaagaggga

SEQ ID NO: 53323 - DNA, 122 bp, Homo sapiens
gtggcggcttcgggtttgcagcccatggcttgccctaagttccgacaagtgcgcctaacgcggggccggctcctgggggcgggaggggctggaccaggccgggcagctaggcaagcaggggc

SEQ ID NO: 53324 - DNA, 122 bp, Homo sapiens
aggccacagaatgcactatgggcaggagagcgggctggggccctggccggagtctcgctgcgcaagacagggacaggacgggcactcacgtggctgcgagtctccctgttgccacaggaaca

SEQ ID NO: 53325 - DNA, 122 bp, Homo sapiens
ggaagccgcccaacaccaccactgagagccccgtcatgggctattttgtggaccggtgagcgtcttgcattctcccggggatgggaacgttccgcatggaatcttaccatggacaatatatt

SEQ ID NO: 53326 - DNA, 122 bp, Homo sapiens
caggcaccagtgccctgccagctcctgggatcaagcagggtcccagggaacagacaggcacggggcccctgtcccaaaagtgctgggagcctgagcctgatgctcccagccagcctggccca

SEQ ID NO: 53327 - DNA, 122 bp, Homo sapiens
cccagtagaggaggctgaggtgcggtcttagcggctggtgcgttcgagggtcggtcatggcgtgtggggggctggtccagggcccgggaactcccttccctggagcttctggcgtctgctgg

SEQ ID NO: 53328 - DNA, 122 bp, Homo sapiens
aaatctgtcacagaccagaggagactaaggagacatgatgactggatgaaatgtggtgtccggaactggatcctggaaaaggaggaggccattcctcaaaaacctggtaaaaccaaataaaa

SEQ ID NO: 53329 - DNA, 122 bp, Homo sapiens
gacagtgtgtctcgctcaaccgctgtccgcgcagctgggcccagatattgtgccccaccccggaattgcgtgaggggcccacaagtcaggctttccctaaaacactcacttgtggggttctg

SEQ ID NO: 53330 - DNA, 122 bp, Homo sapiens
cagggtcaccacctggtggtacttcttgaccagggccacgatcagggccttctgcttgggcgtcacgcggcagcagatgaccgcctggcacttggacgccaggtccacgaaggcgcgctcct

SEQ ID NO: 53331 - DNA, 122 bp, Homo sapiens
gggcattgcagtggccttggcccggcagaaggacacagtgagccggtctgaggcagcctacggcaccaacactgcgcggcagggccgggccgcccccgccttcaaaggtacaggccctgcac

SEQ ID NO: 53332 - DNA, 122 bp, Homo sapiens
ctcccctccttgcctcctgtgtaatcatttcttgggccctcctgaaacttacacacaaaacgttaagtgatgaacattaaatagcaaagaaagaaaaatagtacaaagagattttctggaaa

SEQ ID NO: 53333 - DNA, 122 bp, Homo sapiens
caccgcccccgccactcccagctccgaggcctccacctggcagggaccccccgcccctcccggccccgccacccccgcgcgctcaccctcacggcaacgcctcctccagatggtgtcggtgt

SEQ ID NO: 53334 - DNA, 122 bp, Homo sapiens
acttcctgtgtactgcttgccaatctgtactcatcccccataccgtctctcaggggtagacgctatgtgagtttgttccttatcattctcttctccctcaacctgtgggatctgacactgtc

SEQ ID NO: 53335 - DNA, 122 bp, Homo sapiens
agccgccttagatagaagcatcgtcagcactttattaatgatggatagtgagaataaacccgaaaatgatgaggatgaaaagataaacaaagaagcacaagacttgacaaagctttcatccc

SEQ ID NO: 53336 - DNA, 122 bp, Homo sapiens
tggcagcacactggccaggaggaggttaagtctggaaggtcaaggagggggagggtgaagcgctgtggtgtccagacttcccccagagcctggtaaaagcccagggtgtgggcatccccaga

SEQ ID NO: 53337 - DNA, 122 bp, Homo sapiens
agtgcctgcaagaggagatagctggacccagagcggcaaagcacggctgggagcacaaagcgttaggtcgtctcgccggcctctcagggttcactacactccgcgtagcctcaagcatcggc

SEQ ID NO: 53338 - DNA, 122 bp, Homo sapiens
atggggacacgggcaggcactgctggcatctgctaaccccggaggcccatacttcagaaccggtcagctgggccaaggcctctctaaggcccagcggctctcatgggcaaatgtcaggtgac

SEQ ID NO: 53339 - DNA, 122 bp, Homo sapiens
taaggcgcgagtcccgcgcggccggccggggctccgcgactgggcgggcggaggcggcgccgccctgcaggatccgggctggaagcctctcggagtgctgcctccagccaaggtgtgtgttt

SEQ ID NO: 53340 - DNA, 122 bp, Homo sapiens
cctgccagcctggctccctcccaaagcttgcgtgcaggttggcggcgggagatcgggtctcgcgatgcgagtgagcgtgtgcgtgcgcggccctcgcgagctcgcgcacgccgcctctaaca

SEQ ID NO: 53341 - DNA, 122 bp, Homo sapiens
ctcttagaccctgagacctcccctcctcagtcctggtccttggctgtggtcccaagaccccgaggagactgacagctggacatcccactctggccctgatcccaggctccttccccagaaaa

SEQ ID NO: 53342 - DNA, 122 bp, Homo sapiens
cacagcccagagctcccagcctctgcaccctcagtacccactgtctgccaccccagcccccgaacatgcccacgggggcctgcctctttgggctgtggctagtgcagctgcttgatggagct

SEQ ID NO: 53343 - DNA, 122 bp, Homo sapiens
aggcatgaagaaggtgagggaagagagccagacctgggccctaccacggagtacaacttgcgggtcctggcttcctgggtcttcatagcctcgctgagctccgccctcacctgcctgtggtc

SEQ ID NO: 53344 - DNA, 122 bp, Homo sapiens
gctgcagtcgtccagtcccagagccccgagatggcctgtggctgagggagcaggtgggcccgggggaggtggcgggccgagagcggagctgcggcctcgggatcacagcccagtcccagtcc

SEQ ID NO: 53345 - DNA, 122 bp, Homo sapiens
ttgggtggtctacaggactgggcgccgaggagcagggggcggcgctcatcggggaggctccggccgcacaggagcccacagtgggggtgggaggctcgggcatggcgggctgcaggtccgga

SEQ ID NO: 53346 - DNA, 122 bp, Homo sapiens
tccaatgccccgaatccttcagtgctacttggtactccacaaagtcaagtgcgcacatggcgttcgggattgccctcacctacctgtatactgtgatccctttgctaagaggaagcctaggt

SEQ ID NO: 53347 - DNA, 122 bp, Homo sapiens
gagctgactaggctggcacagtgaggccaaaagatgattttctaaccaggccgacgagggcgtgcctgctgagggagaggcaccgcagtgggtggtccagccctccccgtggcagcgccgcg

SEQ ID NO: 53348 - DNA, 122 bp, Homo sapiens
gcgaacagagcttgcgatattttctttccgtgccacctgcccgcttggtgtctggccctgcgtcctcagaggaccatggtgggctggtgttcttggagaggaggcctctccagggccaccaa

SEQ ID NO: 53349 - DNA, 122 bp, Homo sapiens
gctgactttaatcactttttttcctttaaacttgattctgccgcagtggagccagcacagcggatgttttcacacccagcaagacaaaggccgtcgtctccgccatgacactgttccgttcc

SEQ ID NO: 53350 - DNA, 122 bp, Homo sapiens
aaaagttgcctttcatctgatccagtgctcccgaagaggaatcacttcctcctgcctgggcgtttatgaaagccgacagcagaggcgagaaaacagccagctctttctgcgcgtgataaaac

SEQ ID NO: 53351 - DNA, 122 bp, Homo sapiens
tgcagctcgcatgcgtcccggcagttcccggcgggaggctgacgagacgcaacgcgtctgcgcacatccccgcgttgttctcactgcgcatgtgcagttgcaaccgggatactagaacctac

SEQ ID NO: 53352 - DNA, 122 bp, Homo sapiens
caaaaaccttagtggtgaagatagacatttatgtaagtaacagactccaacacaaacctgcgagctatactatagcaacaattcaaaggaagtacaggtgggcacagagaagggaaatatct

SEQ ID NO: 53353 - DNA, 122 bp, Homo sapiens
tgcgcggcgcttgccggccagctggagttctgggtggggtggcttggcgggccccgcactcggagcggccggccggccctgcggccccgggctgtgaggggcttagcacccgggccagtggc

SEQ ID NO: 53354 - DNA, 122 bp, Homo sapiens
gaatgcttccatctggtttttatatgaagttatttcctttactaccgtaggtctcaaagccgtccaaatatccaacggcagattctacaaaaagagtgttgacaaactgttctatccatagg

SEQ ID NO: 53355 - DNA, 122 bp, Homo sapiens
ggatggaggatgaagattctcagagctgtgctaagaagggcgggctttgtcctgagagtacgagaacctttgctgagctttcaggcactgagtgacatggtcagatctgtgcttaccttaat

SEQ ID NO: 53356 - DNA, 122 bp, Homo sapiens
gtcgtcggggtgagcggcaacgtggtgaccgtgatgctgatcgggcgctaccgggacatgcggaccaccaccaacttgtacctgggcagcatggccgtgtccgacctactcatcctgctcgg

SEQ ID NO: 53357 - DNA, 122 bp, Homo sapiens
gccacagttatcagctgccattgctccctgtctgtttccccactctcttatttgtgcattcggtttggtttctgtagttttaatttttaataaagttgaataaaatataaacgctggtatct

SEQ ID NO: 53358 - DNA, 122 bp, Homo sapiens
cgtagccggctgagccagggcctgctgggagcccgggtgtcgtgcctcagcccagggccacgggctcctgctcttagtccaggatgcttcgcttttgcttccggtctcagagcccagagcct

SEQ ID NO: 53359 - DNA, 122 bp, Homo sapiens
cctcaattccctgcacttctagtactttatcatcaaatatgtgtataatgtctgtgcttccgaaatcccatccatcagagggatatacactgttttgttttgtattcattaacctgatgctg

SEQ ID NO: 53360 - DNA, 122 bp, Homo sapiens
taccaatcagacggctgaaaccgcgttgggttgcatcatgtgcccctggcttggtgacagcggggaggggcggggaaacagggagggaggggacgaggctatgttagccacgccccagtctc

SEQ ID NO: 53361 - DNA, 122 bp, Homo sapiens
ggcggccgctgacacccggcgctccagccaggcccagcacacgggcaggtggccccagctcgtccgggtctgggtttcttctagaaggaaggcacagctgcctgccctgagctccctctctg

SEQ ID NO: 53362 - DNA, 122 bp, Homo sapiens
acacacacaaacactggagaaagggagatacaaaagcccggacacccgtgcacatacacacggagaaatacacccggtcacctgggaacacacgtacacgccagcctttcccccaaccactc

SEQ ID NO: 53363 - DNA, 122 bp, Homo sapiens
aaatgaatatgtacgcaggtggaacgtagactgcagattttgagccagcggcgtttctgccgaaatcctggcaaattccggtagaagtcggctgcaggaggcggaggaggagactaaaaaac

SEQ ID NO: 53364 - DNA, 122 bp, Homo sapiens
gtgttacagtgcaggagcgtagtatgtcaaccctgaagcttcctgatgcaagccactgaacgctcaactcaaaagggcttaagcaataatgaaaagtatcctttcacataagaagaattctg

SEQ ID NO: 53365 - DNA, 122 bp, Homo sapiens
acgggtactggggcgcctggaggagagttgaggggcctgaaagactctgggggcccagctcggtcggtgggtttattccaagtgccccgtcccaggcttgcactccccaaaaaggagccgag

SEQ ID NO: 53366 - DNA, 122 bp, Homo sapiens
ccccttcccagtctggagccacccattccaggcggggcgggaggctgatcacgtgaccagcgagcggtctcaccctcctcatatgccagtaccacctcctccagtcccagaggggggatgtc

SEQ ID NO: 53367 - DNA, 122 bp, Homo sapiens
tggaaaggtaaatagtgaacaaatgaactgctataaaacattacctacttttaaagaactcgcaatctaatagagagataaggttgaaaaacattattgaaatgttaagtaatctatagaag

SEQ ID NO: 53368 - DNA, 122 bp, Homo sapiens
agcgcgcctgcctgggaaaacactgcagcggtgctcggactcctcctgtccagcaggaggcgcggcccggcagctcccgcatgcgcagtgcgctcggtgtcagacggcccggatcccggtta

SEQ ID NO: 53369 - DNA, 122 bp, Homo sapiens
acacacctcattttaactcaagtaggactccaggtatagacctgggagggatctaagtcacgtgctccagcccagctttgccagacacaaaagatatatttttatctctgtttggctcctgt

SEQ ID NO: 53370 - DNA, 122 bp, Homo sapiens
ccgccaccacgcccggctaatttggctaattttgtatttttggtagacacggggtttcaccgtgttggccaggctggtcttaaaactactgaactcaagcgatcctctggcgtcagcctcct

SEQ ID NO: 53371 - DNA, 122 bp, Homo sapiens
gtgctgcgaaacgacgcgtttgacagctgctctggagccgaggatcacaataagagaaggcgcgtgaggctccggcagcaaacaccagccaggcaggcagcggtaatcacagtgagcaaagt

SEQ ID NO: 53372 - DNA, 122 bp, Homo sapiens
accaggggcacttctggaagtcccctttctagggacatttttcttctaagctctgtaacgcgggccgaggcagaccgaggcttctttcccggatccaatcccctgcccccatgcctaagaaa

SEQ ID NO: 53373 - DNA, 122 bp, Homo sapiens
tggtgcccaaggtgaacccaactttcagccagtcaggtttggcattcggcggctctcgcacgtagaactttgatcgcactgaagctgaaaggggaagagggtctgtaaatttgtaacttact

SEQ ID NO: 53374 - DNA, 122 bp, Homo sapiens
cgcccgcgcggcaaaagtgcgtgccagagttgtcagctttcaccctgcaggaattccacccgaaggcgtgcgagggaggcccttggggatcgctagggagtccgccgccgactcactcgctg

SEQ ID NO: 53375 - DNA, 122 bp, Homo sapiens
agggggcggagctagagaggccacggccaatgaacgccgggggtaagcgggttagtacgacgagaagagtgacagacaggctccataaccagtagacgtagaaggcagaactgagtggcggg

SEQ ID NO: 53376 - DNA, 122 bp, Homo sapiens
aaggcccgggtgccccggccacccaggggcaggacgagtttggggcttgcaagtccacagcgaatctgaagcaggcgccatcaataacaaagtgcctttacgatatttataagaactaggct

SEQ ID NO: 53377 - DNA, 122 bp, Homo sapiens
ctagaacccgcttcactgccgggaccccacgcctgtcctcccagcccccgccagggtccgcggcctgcacctgcacttcaggccctgcccgcccgcgatgcgcccacgcgtctgctcccaca

SEQ ID NO: 53378 - DNA, 122 bp, Homo sapiens
tacagcatctaacattgttgcctgttccttgcttgaaatgatatctctttccttgtttctcgcaaaacctgttctcttgggtgtcctcccacctccctggacactctgtctctggcttcttt

SEQ ID NO: 53379 - DNA, 122 bp, Homo sapiens
ggacggtgatgaacccggagacccggcagccaggctgggctgcagcagcctttgcctggacgtcagggtggagcccgggaatcgcccctgcgccgggtgacggaggagaaaggggcccgcag

SEQ ID NO: 53380 - DNA, 122 bp, Homo sapiens
ggctcacggtgtcctggggttatcagtgctcacaacatcacactcaggttatctggaagacgccagcgtgggcagagtgtgaagtgaggaagtgctgtttgctggtggtgtacagcagcctc

SEQ ID NO: 53381 - DNA, 122 bp, Homo sapiens
aaccctataccacatttgcaaggtttaaaatctgaattgactccagggtcaaagcttctacgtgcagcacctatggaatgcaaccctgggccacaggtgcagtatgtgaattcttctgagtt

SEQ ID NO: 53382 - DNA, 122 bp, Homo sapiens
gccatgaccctgccccgcggtgggtgtgtgaaagtcagggtggcagtgacgcggcgcctgcggcgagaggaagactaggccagggggagaaggaagaaagccgaccgctgggctgctgggat

SEQ ID NO: 53383 - DNA, 122 bp, Homo sapiens
tgtgcataccaagcaggcagcacaggcaacagagggttaacagggagagggcagccccctcgaagccacgctgtggccacagtggggccagctgagtttaggtcacaggcctcctgccatga

SEQ ID NO: 53384 - DNA, 122 bp, Homo sapiens
tctttggccactacttttactttgaaagctatagtcacaagaagccatctctttttccgccggttttaaaattgtcttgttctaggtttcacttcactgacagagacatagccaaagagatc

SEQ ID NO: 53385 - DNA, 122 bp, Homo sapiens
cagctttgcattttacagctttctgctgggatcagagaagcacctgcacaacctcccctgcgttttctaaacattcagctgggaacctggactgcaaagcccggcctcagttaccgccactt

SEQ ID NO: 53386 - DNA, 122 bp, Homo sapiens
aaaaaagcagccttggagaaatcttcaacccagaaggagttaagctgtgtgtctgcacagcgcagctttgttctggcaaggtcccatcagtttaggtcatttctgatgacttcactctcctg

SEQ ID NO: 53387 - DNA, 122 bp, Homo sapiens
attaggagacaattctgacaacacaaaaacaagtgaacaaaaatcaaatgactgacctgacgtgtccactaggcttgatatgagcttggtcaactaaaacatgagacagaatgaatgaccat

SEQ ID NO: 53388 - DNA, 122 bp, Homo sapiens
tgcctgatgcaccagtcctcgccaggggtagctcctcccgggacaaggaccgaagtgcgacggtcagtagttcagtgcccatgcctgctggagggaaaggaagccatccttcatctacaccc

SEQ ID NO: 53389 - DNA, 122 bp, Homo sapiens
ccaaggctcaggagctgaaaggtccgggctcagaacttgggactgccttgggtcaggcctcggctcccccacttgccccgtaccttgggccagcgagcccctcgcccaccccgacccggctt

SEQ ID NO: 53390 - DNA, 122 bp, Homo sapiens
tcctgtggcaccaaccagtggtgctcattctattgtttaaaaatggccttcttggctgggcgcggtggctcactcctgtaatcccagcactttggtaggccgaggtggacggatcacccgag

SEQ ID NO: 53391 - DNA, 122 bp, Homo sapiens
cgggctggctctcgccgagccccgggcctcttttagcctcgtccccagagagggaggagccggtgcccggcacagccccgccggccctagaagctccccacgcgccaccatgcctctgctgg

SEQ ID NO: 53392 - DNA, 122 bp, Homo sapiens
atgacgggctgcaggtgcaggggcccgcagtgtccgtcagaagaggctcgggaaagtaagcgagaatggtgttcacgttgtgactttgtttggaatcataagaccgaaaagccaggaagaag

SEQ ID NO: 53393 - DNA, 122 bp, Homo sapiens
ccatcaaaaggtcagtgcatgaactcattgtgtatattcatacaatggagtaccatgatacgccaataaaaatgagtcaactacagataagcagaatatagaagaatctcacaaacacaacg

SEQ ID NO: 53394 - DNA, 122 bp, Homo sapiens
ctctgaggtaggcccaacaacctgttttagcaaggcctccaggtgcttctgatacacgttcgcttcagaagctctgttaagacattcttacatgggaaatacttgtttggaagagatgtaag

SEQ ID NO: 53395 - DNA, 122 bp, Homo sapiens
ggcgggaaattgtttcccagagcccggattcgtgaagcagttgagtgctgcagcggcagtcgtcgcccctgccgccgctgccaccgaaggaagcatcccagacaccgggaaggtaaaggggc

SEQ ID NO: 53396 - DNA, 122 bp, Homo sapiens
ctgccacgcgcccgcctcgcgcgctgtcaggaggcgctgtccccgtgggtaagcccgtgccgtgggtgccctccagtccctgcagccccaaacacacctaccccagaggacaccacagaatg

SEQ ID NO: 53397 - DNA, 122 bp, Homo sapiens
aacaaagacataaaaattttcaacatttcaacagccatgttggaatcatctgcagaataccgaaaaagtgcccagttggagatttcataaaaataacaggcaatcacacacgttgcaggaac

SEQ ID NO: 53398 - DNA, 122 bp, Homo sapiens
gccatttttggcaattctgtttttgttgggggggtgggttattttgtgtgaatttcttttcgaggctagggcggaggagacagtgcttgggcctttcataccagtgataatgtcatccctcc

SEQ ID NO: 53399 - DNA, 122 bp, Homo sapiens
ccagcacactgacccagacagtctcgcggatcagcctggctatcttgagcaggagctgcccgaatgtgcccggctggaagtgggtggccgagtgctggatgcagaggcacaggaggaaggcg

SEQ ID NO: 53400 - DNA, 122 bp, Homo sapiens
acgccggcggagttgctgcgttctagactcgtgcgcaagaccggaacatgggcagggtcccgacccggaaggggaagtgggaagaaacggaaacctactctgggtaggcgcaaggtggaaga

SEQ ID NO: 53401 - DNA, 122 bp, Homo sapiens
ctgccccaataaccgccctaaaaggccgggcttctgctgtcaagtagccagggtgggctccgccgaggcgaggaggggcgccggtggggagatgcgctcccaggtgtttgcagcggaagtgg

SEQ ID NO: 53402 - DNA, 122 bp, Homo sapiens
tccttaatccgtgtctccccctcttttcttagcggcggcttcgcttgagcttctaataaccgcgctgggcagcgttcctggagcctcctaatagcagatattcatgactattaatattacac

SEQ ID NO: 53403 - DNA, 122 bp, Homo sapiens
tgaccgggaatgtgcctggcggtcaggtggaaggccacagacccccgaggaagcagacgtcgtgtgtggcctgccttggcgtccaggagaccatctcctccggtggggtcagaccacagagg

SEQ ID NO: 53404 - DNA, 122 bp, Homo sapiens
tctggctggacatgaagaaggtcaatgttaatcacagacctcagagcaagaggcaggagccgcagatgtcatctgctccaaactcactttcattgtcctcttttatttaccttcaccattac

SEQ ID NO: 53405 - DNA, 122 bp, Homo sapiens
cgctatccgcttcaggcgcgacatgttcaaagtcctaggtccagaagctgcagccccacccgtgacgcttaaaggtggcgccgttgggatgccccgctcctttcgtgagcgcgcgctctggg

SEQ ID NO: 53406 - DNA, 122 bp, Homo sapiens
atcccgagtgcatgtccctgttgcccactgcactgatcatgaagccaccggccactgccacgcatgttgcacctgtgccatcgtgctccctcctgatgggcaccgtggtggaggaagtcacc

SEQ ID NO: 53407 - DNA, 122 bp, Homo sapiens
agagatgcaggttgtcttatgcatcaggaaaacaggaagggtaggtatgctattattagtcggcacaagataatcaaggcacaagccttgctggcctctacctcagctccaaaagctgagtc

SEQ ID NO: 53408 - DNA, 122 bp, Homo sapiens
gccagggcctgaggggcccagcagctggaatacagcaatctcccgcccacctgctcgcagcgtacagagcacaacatcgctcacctgcggcccccagggccagaagagaactccctcctacg

SEQ ID NO: 53409 - DNA, 122 bp, Homo sapiens
cgcagttgctgggcctccgtggggtcctgggaaatttcaacagcagtccagtgtgcgggccgcgcctttgttctgtccagccagcggcccaggctgcgcctttgttgtatctggccgccggc

SEQ ID NO: 53410 - DNA, 122 bp, Homo sapiens
taaatattctatgcagttctattatgtcacaaatgtaaatatacaaagaaaaagatccaacggataagccaaaactataagtgcctttttctgggatgtgggtaatttctgctttattttaa

SEQ ID NO: 53411 - DNA, 122 bp, Homo sapiens
ttgagaaatggaggctctcagagggggcgaatggggacagcgacctggcaaagggcgaaacgccctggagcacagcagacttgcttggtgtttgaaaacacacggaaaggagtgtcgtcact

SEQ ID NO: 53412 - DNA, 122 bp, Homo sapiens
atattatgccagggacggaaagcagccaggctggggaattcgccggcgcttaattaggaccggcagtgcggaagatagatggtcatcctttttgctcccttcattaggagggagggtcaggt

SEQ ID NO: 53413 - DNA, 122 bp, Homo sapiens
ggagcctccccatggttcacaggtctcagtcttcggagccttcggccctgcgagcccgaacggtccacagggcggcgccagaccctctttcgaacgccatcctcttaaagcctcggctccaa

SEQ ID NO: 53414 - DNA, 122 bp, Homo sapiens
tggaaattcaatatcaagatttcagcagggttctttcttctaaggcttctctccttggctcgtaagtgtccatcttctccctctgtcctcaagtggctgtccctcagtctgtgtgttgtctg

SEQ ID NO: 53415 - DNA, 122 bp, Homo sapiens
gggtgtggagctctggcttgcttggtagtgggagaatccttgaggggctctggggcaccccggctacatgtccctgacgtctgggagcaaggaaccggcaggccaagggctgtggctgcatc

SEQ ID NO: 53416 - DNA, 122 bp, Homo sapiens
tagttatttcggttttgttcagagcaacagttcttaagtctttctgcagcatgacctcatcgtgcttttaaaatcttttttctgcagcctcatgtttgactgttggagatttatcctgtgca

SEQ ID NO: 53417 - DNA, 122 bp, Homo sapiens
ccaggtctaacagtcaggttcctcctccgtgcattaacaatggcgttgatgcctgctttgcggcacgctgggaggggagagggaggtgtatgctggagagctccccaggggcaaggcctggc

SEQ ID NO: 53418 - DNA, 122 bp, Homo sapiens
atcctactggacaactgcaatgctgcaatgcataggcaagcacactcttatacacacacacgtccctggtctcacagagcaaacaccctccccaaccccagccacactcccacactaatgcc

SEQ ID NO: 53419 - DNA, 122 bp, Homo sapiens
agctcaagcacagagctgcctcctgagcctggctgtttggctgctgtgcctctgatggctcggtgatgctgacctctggtggagatgagctgctactcagctttgacctccctctgagcacc

SEQ ID NO: 53420 - DNA, 122 bp, Homo sapiens
taagagggagccgttattcctttttcctctgccttaggaaagcgcgcgagagggaggggccggaacaacgaacgctggttacctaacggtccggcccagccagtcaggttcccaaagcccac

SEQ ID NO: 53421 - DNA, 122 bp, Homo sapiens
tcccttccagacccgggaagcgggtgtccctcaaagggcagccggcacacggagaggtcccgactagtcggcccaggggcggccataagtccaaccaggaaggccctggccagcccgggcca

SEQ ID NO: 53422 - DNA, 122 bp, Homo sapiens
cttgccggcttttttccgggcgacgtggtgtaaacaaccacaacctcgttggtgctgcaacgagctggtggagcccagaaacctttcacatgccagtgtgtcatcctcgtagtaacgtacat

SEQ ID NO: 53423 - DNA, 122 bp, Homo sapiens
ccctgcgcccccagaggcggccaaacaagcggcctttgtggtctgtgcgttggcggccctcggggagcgtcacaaagggtgggaagaaaggccgccaatcctcttagggccagccgcccgct

SEQ ID NO: 53424 - DNA, 122 bp, Homo sapiens
gaaaatgtaggagaccccaatgcggggcccgtcgtcccggtccacgccagtcgggtcggccgtgggaacttccttgtaacttaggtgggtcaatttctccacctggttgcccatcacgctgc

SEQ ID NO: 53425 - DNA, 122 bp, Homo sapiens
tccatgcatggtctctgagcctggcatgagattcagggtgaccctcttgctctgcctgtccggcccagcagcctccagaacctcaggagtcaccagaagcccccaaatcaaaatctgacccc

SEQ ID NO: 53426 - DNA, 122 bp, Homo sapiens
gaagagagggcgagccttaaggcgtcgcctaggagggtctggccgggcctctggcattgccgggggcagggagggcttaaagggctcaaggctcacctgattgaactgtgcagctatgagcg

SEQ ID NO: 53427 - DNA, 122 bp, Homo sapiens
accggagggcagccatggtcccggtttttgtggagaaccagcagaggtggtccgtgtggccgtctgcttggtagcaggtgcgggtgtgctgcagggtaaacgtgcttcggggcacgtgtgag

SEQ ID NO: 53428 - DNA, 122 bp, Homo sapiens
aaagcggctgcacttgctgggctgggctgagtcccatgagccagggaggggggtctctggcgccgcgcccggacaaaacacaaacgtcacagaggcagcggcggccaatcagtggagggcgc

SEQ ID NO: 53429 - DNA, 122 bp, Homo sapiens
tgggcagggggtggcggcggcgacggtggcggagccgcagagcgagctagagagcgagagcggtgagactctgcggacgtcttcccgcccgccgcgctccgccccacccagcctccgcagcc

SEQ ID NO: 53430 - DNA, 122 bp, Homo sapiens
gggaatgagggcactctctgaacaaaggaaggcaagtaaaaatcatcacagccgtccatgcgtgattggacagaagcctagactgagatggaaatagtggaactggaaaggaagggatcaat

SEQ ID NO: 53431 - DNA, 122 bp, Homo sapiens
gtggctgggtgatccagctgctggtgtgatcatgggcttccctcctctcagcagggcaggcgctcctgccccagagactgggcaactggctgtttctatgacgtatttatttttacttgtgt

SEQ ID NO: 53432 - DNA, 122 bp, Homo sapiens
tcctgcggccaatcgtggcattacagccccgtgtgggaacgcccgctgggcccagagcagcgcggtcggccttggccttgggactccaacaccccagtctaaaggtcctgctcaaaatactt

SEQ ID NO: 53433 - DNA, 122 bp, Homo sapiens
ggtcgggcgcgctagagagccggcgcctgagggcgcctgggctggggttaggccggggggcggggcgaggctgcagtatcgggggcggggccgcgttctggaggcggggctccgggcgaggg

SEQ ID NO: 53434 - DNA, 122 bp, Homo sapiens
ctggccggcccgccggagagcctgggggttggggacgatgggctagttcctggtgcgtcacgggggagttccttaaaggggaagcgagccgggctacggggcgagcgcggggtgcggtggtc

SEQ ID NO: 53435 - DNA, 122 bp, Homo sapiens
attaatctagaaagtggaactttgagctcctttttcacatgagcaaaactgtatagctttcgaataaatggtttaactgaactctgcagttctcctggaaagtaaggcggctgggcagatga

SEQ ID NO: 53436 - DNA, 122 bp, Homo sapiens
tgccggtcttgagtatgtgtggattttgatgtatgggaggatcctgcaagcaatcccctgcggataccaaggaacaacgatatatttcttaatttaaagaaatggaaacgctgacattcgat

SEQ ID NO: 53437 - DNA, 122 bp, Homo sapiens
gtgtctgtccaaagaggcagtgcctttttctactttgcatgagggtattgcatggactaacgcagtcctgttgacaatgccaaatgggaagccaatggcagagttccctcttctcctgataa

SEQ ID NO: 53438 - DNA, 122 bp, Homo sapiens
ggcctcgtatggacaaggagggctgatttcaatcgcgatgcaagccagctgtccggatgccgccgacgccagcagcgcggtacctgcgcgggcagcaggtgggagccgcgaccggggtgggg

SEQ ID NO: 53439 - DNA, 122 bp, Homo sapiens
aggtgagcctgggactccacatcccctctcccagccccaggacccgttggaatggtagtgcgggcagtggtatattgggcccaggaactccctggggcttcaggcccctcacagcccccata

SEQ ID NO: 53440 - DNA, 122 bp, Homo sapiens
tgctaactcagaaaggcagcattccaaagtgaggcagacactaaaacactggctcttccacgctgcaagaaatacgcacgcgcatgtcagccgcttgggagccctgccttcgcccccgcggt

SEQ ID NO: 53441 - DNA, 122 bp, Homo sapiens
agatcacagttacattttttttcctttcgcgaaacctcattcggttctctttttcttaaacgttccacagggagtccaggtccccacccacgcccaagggaaaggccttgccgcgccgcggg

SEQ ID NO: 53442 - DNA, 122 bp, Homo sapiens
ggctgtaatgaagaagcctcgttgatttcccagctgggaaacgtagctcattatattccacggttttgcacaagcctggaatgcttcacgggccgggcttgaggtctgcggtgactttttag

SEQ ID NO: 53443 - DNA, 122 bp, Homo sapiens
cttacacacgcagcgggcagcggccggcgaagactgggtcacacgccgccgggaaccgcgcgcccacactcagccccgacctgaagtggactcatcgcggtcctctccgggagcctcggccc

SEQ ID NO: 53444 - DNA, 122 bp, Homo sapiens
ggcctgtggccagggtcccctgtagcaactggtgagcgcgcaccgtagttctctgtcggccggccctgggtccatcttccagtacagtgttggatggtctaattgtgaagctcctaacactg

SEQ ID NO: 53445 - DNA, 122 bp, Homo sapiens
gatcaaacggaagccgagttggtgagtaacagacagacaacgggaggtggctgagggaaccgcagccagccttggcagccaggccaggggcagtccaagagcagagacagacaccctgggtg

SEQ ID NO: 53446 - DNA, 122 bp, Homo sapiens
tcagtttcagtttcctggtacatcacagtgttggtgtctgaagcaggagagaaaagcagccgtgagacctcaggtcacacccaggaccaggcccttcccgctcaggatgagggtctctggct

SEQ ID NO: 53447 - DNA, 122 bp, Homo sapiens
ggtgtcggccatgggtgaacaagacacagccagacaatgtggaccaatttcttcaaactacggcttttctgctgtctgcttgcagtgttgatggtggtggtgctggtcatcaatgttactca

SEQ ID NO: 53448 - DNA, 122 bp, Homo sapiens
ctccctgcctggctggcgcccccacccctccaggattcaggggagccatcctctcttcaccgcccacttgtgctggcagatgccccatactgagctgcatgtttctgtcccaggctggcctc

SEQ ID NO: 53449 - DNA, 122 bp, Homo sapiens
tccattccccagagcttggttttcttgactaggtcccaaaccttttattgagccgcaaggcgaccggaggaaacaatcggcttcttgcacagacattcacgtgtctggtggcactcaagaga

SEQ ID NO: 53450 - DNA, 122 bp, Homo sapiens
aaagggctggggggcagcaggcagagacagaagcaccagccgaggaagcgtcgaggacggcgtctctgggcttctgccccgaagcgcgccgagcctcgggatcacccacgccgggggtggag

SEQ ID NO: 53451 - DNA, 122 bp, Homo sapiens
ggcaacggcagcaccttgggctttttcagcctccgacgacgacgtctcgccgcaagcccacgccgtgcgcctccgccgccacggcgaggaaaaagagtcccaccccacccccatcgacccac

SEQ ID NO: 53452 - DNA, 122 bp, Homo sapiens
cagggcggccgaacttgagggccaggcggggacagagcgcccgagtagccgcgccacggccggccgcatttggccccagcacctgaagcagctgcgcggcgaattctagaactcggcggggc

SEQ ID NO: 53453 - DNA, 122 bp, Homo sapiens
gatttcacattgatcaggcccctggctgctccgactttcaggtccctgttgtggaggtttcgggcggcccagttctcaggggcagccctgtgcccttcctgggtcagctggtgtgtgggtgg

SEQ ID NO: 53454 - DNA, 122 bp, Homo sapiens
cgggggctgcggctggggccgggactgcctccggggctggagccggggcctgggctggagcgggagctgcgggcgtgggggctgcgggatccgccataactgctctgcgcgagtctcgggcg

SEQ ID NO: 53455 - DNA, 122 bp, Homo sapiens
ccccagccctgacttggttctccagccacatggggcttctccctacactgggcttatagacgggcaagtctgtttcctcccatcaactgtgagtaccagggtgggattcatatattgttaac

SEQ ID NO: 53456 - DNA, 122 bp, Homo sapiens
ccgaagctgcctgggggggtcaggagggggatgggagcgaggtgaggaccggccccgctccgccccagcgccacccggaaccaggcatccgggtccctcaccgtagacgtagaaaacagagc

SEQ ID NO: 53457 - DNA, 122 bp, Homo sapiens
cccgcggcccggcccccagcggccggcctcccgcggccccgcccccgccgccccagtccccgcccctcgcgccttcgtttattcctccgcgcgctgggacaggctgcttcttcgccagaacc

SEQ ID NO: 53458 - DNA, 122 bp, Homo sapiens
ctgccccgccagcaccggagccgatcttgatgaggccgttgtgctgaatgaagatggtgtcgctggtcaggttcccgtggatgattggggggctgcaggcgtgcaggaagctgcagacgttg

SEQ ID NO: 53459 - DNA, 122 bp, Homo sapiens
tgcccagaaagcggatccggttggactccagatgtaggtagagcaggttgcccaagggagcgaagaccgcgtccggcagcgcccccagggcgttcccgtccagccgcagcttgactagactc

SEQ ID NO: 53460 - DNA, 122 bp, Homo sapiens
ccatcctgccccaaaccgatcagccctggcgcagcggacccctcctctccccacccctcccgctggaaggaggctggaagaggagtttactggtaaacaaaatggacgcccccttcccttct

SEQ ID NO: 53461 - DNA, 122 bp, Homo sapiens
ttctctcatgacctcagccatgctggtataatctcaccgggtctgctcccacagctgctgcgtgaaggtgaggagagaattctcttcccactggctttattctttattgttaaagcacaaat

SEQ ID NO: 53462 - DNA, 122 bp, Homo sapiens
cctccccgccttgtctagccccaccccgtaagaacccgtgtagacatccgtttgcccggccgtgcctcccctaggcgtggcatctatggtgagcgtccacgtggagcacccgcaggaggcgt

SEQ ID NO: 53463 - DNA, 122 bp, Homo sapiens
cccacagagggtgaaggggtagcttatgctgagtgggggtgtccacctggacagaccaggcgagcctcgctcctggtgcgggagctagttttccctggatcttccgcggcagagaagcctgc

SEQ ID NO: 53464 - DNA, 122 bp, Homo sapiens
cgacccccaagcggtcagcatcccccaacttcttagagggataagtggcatttagccacccgagattgagaaataacacgtctgtgatgcccttagatgtctggggctgcacgcacgctaca

SEQ ID NO: 53465 - DNA, 122 bp, Homo sapiens
attctccaggggttggccacccaccacagccggtaaataaactttccatggtgttgccaccgagcaggctgaatatttccaccttccttagagatgctgagtctaggggtctgaatatccac

SEQ ID NO: 53466 - DNA, 122 bp, Homo sapiens
cggatctgggccggatccacgagaggcgcttggagggcctcttcctgccagcaaggctggcgttccggcccattggagtcggccgtgctgcagctcggggctgtttttccactttcctgcca

SEQ ID NO: 53467 - DNA, 122 bp, Homo sapiens
tttttagaaaaggggaatttcatagtaactaactgtaaaggacacacctcaccaagtcgacggatttcctgagggtaattgattcccagtgttttacaagtccatgttcttcaggatgatct

SEQ ID NO: 53468 - DNA, 122 bp, Homo sapiens
gaagggaaggggccagattctgccaggagttgctgttgcctggcttgtgacctggagggtcgcctaggcatcacgccccaccccccagcactggccgggaactgctcctccatgggtaggaa

SEQ ID NO: 53469 - DNA, 122 bp, Homo sapiens
tatttatttatcttgctcttttgaagtctaggccaatcatcctatttattctgaatggcccgttaacgtttatccatttagggacagcaggtttggcacaaatggattggttttctgaggtc

SEQ ID NO: 53470 - DNA, 122 bp, Homo sapiens
cccatagtccatttcatgatgacctcagggtgctgggatgggaatgtaattgtaggtccacgtgctcctgcatctctgcagactgacttggtttggaaggtctgtgttgaggaacctctgtg

SEQ ID NO: 53471 - DNA, 122 bp, Homo sapiens
tttaatcaatcaagctaaaagaatcgaagacatccctagtgcatgtacacgaatgccctacgtcatccttccagcaccactgctgcatgggtcactctcggcctctcaattcttcaggctca

SEQ ID NO: 53472 - DNA, 122 bp, Homo sapiens
ctgggccattctccagatgcgtggagtccagcaaaatggtggcatttttgcatctcaattcgctcatctgtaatacgggagtgataatgtctactctgttgctgcaagaattaaaggaagac

SEQ ID NO: 53473 - DNA, 122 bp, Homo sapiens
ggtcaggaaagatctcactgatgagagaagagctatcacaagagggctgtggtgaggaaacgggttatactaaggtaaggaaggaaggaaaagcagccagcaatggaagagtaggggtccta

SEQ ID NO: 53474 - DNA, 122 bp, Homo sapiens
taagcttctcaggaatccaaggctctggcccaagccgtcaactctgcacatgaggtgacccgggaagccagccaggcatctcccactccccacggtcttggtacccctcccccacaacctgc

SEQ ID NO: 53475 - DNA, 122 bp, Homo sapiens
atacaaggctccatgaaggaggtggaagcttgcaagacgatgatagtcttgtaatcagtccgatggagatggatgtaaataataatattaataaacaccatcaaatgtgttcagagtgcttt

SEQ ID NO: 53476 - DNA, 122 bp, Homo sapiens
gttataaagtttaaaaggtggttttaatatgaatagcaaattctggtatattgtgactaacgcttaagaatgcctgtctttgagaggaaggtgttataatattaatcaacagtgccaaatac

SEQ ID NO: 53477 - DNA, 122 bp, Homo sapiens
ctccactcatccctgctgggtccctgtgcctgaaaatggagccgaatcctctttcaggaacgctttagattttcgtgaaaacacagtccggcttcccaagagcagccgccttttgcaggggc

SEQ ID NO: 53478 - DNA, 122 bp, Homo sapiens
gaccggcgcgccgggtaaagaacaatacacgagcccagctgcaaacaacacaacttcccacgagtctgcgcggcgggtctcggcggcggagaggacttcggaatccgccaccgggcaggggc

SEQ ID NO: 53479 - DNA, 122 bp, Homo sapiens
ctgcctgctgtgtagccaaggccggagagctggacctctctgagccgcaggattttatcccggctttccacctagaattaatcccacctcaaggtgtcgtcgggagcactgctgatctatgt

SEQ ID NO: 53480 - DNA, 122 bp, Homo sapiens
agtgcaatctatgtgatgtcttccaacgttaataaatcacacagcctcccaggagggagacgctggggtgcactgggtgcctgatttcctgcagggggacacaggggcacccagtgagggtg

SEQ ID NO: 53481 - DNA, 122 bp, Homo sapiens
ggaggttgaatacaactggaattttttatgggattctaacagacctgtccctgataatggcgtgcccctaatttccgttctttactgactactcattggctgtatcactctagttgcacaaa

SEQ ID NO: 53482 - DNA, 122 bp, Homo sapiens
gccgcttggcatggaactccaaaggctccttgactgcggccatggcgggcaaagcatacgcgcgtgaaactcagcctatttccgctctgccagtggcgtaattcctgtcggggcgtgtcttc

SEQ ID NO: 53483 - DNA, 122 bp, Homo sapiens
tattgcatgcaatttagatccaagcgtaaaacactagactactaaagtactggaagcaagcgtgaagaccatttttatcactgtagcaggacaaagtcgtttcaacaagacataaaatccac

SEQ ID NO: 53484 - DNA, 122 bp, Homo sapiens
gggactgtgatcttaacagatgttaggatcttacctcattagggcacctcagaggcttgccgcggaggtgagaaacaatagatgaggtgatggctttatggaattgtcagtgttatcagttc

SEQ ID NO: 53485 - DNA, 122 bp, Homo sapiens
cggtgccccgcggctgcagtggccacggcagccggactccagcctctgcgctggtcgccgcgtcctctccgggtgcttcctcggccgagtcctcctcgggctcagaaactctgtcggaggaa

SEQ ID NO: 53486 - DNA, 122 bp, Homo sapiens
gaccagccctggtcccgggctcagggctgcagggaggcacctggtcttccctcgtcctcacgatcctgcaccctcaagatgccacgttgttgaggctgtttagggaacttgacaagctgatt

SEQ ID NO: 53487 - DNA, 122 bp, Homo sapiens
aaagcagaatgaggtcaagagaagggaagcaaaggggccaaagcgcgctccgctctccaccgggaggcgggctttgcagagccctaaagagtgagattaccgtcccttccccacgcccccaa

SEQ ID NO: 53488 - DNA, 122 bp, Homo sapiens
tgcctgacgcacaaggcacggggcctctggacgcgtgttctgagcccttcgcaggagactcgtcctacagagccgaagaaaacagaaaatcatgaacacaaagaagagcacgaagccgacct

SEQ ID NO: 53489 - DNA, 122 bp, Homo sapiens
tgtcccggctcagtggggtgtgggacaggggctgtacagggccccagccgcaccagtgcacgtagtccttaggggcgagcttgctgatggaggggaccacagtgtggagccaccagacggca

SEQ ID NO: 53490 - DNA, 122 bp, Homo sapiens
tgtagtgcagatagaggtcaagaggagcattttcatctcttcttttgctggtcagagaaacggttctgagatcacagaagctatgatgcatacctacagcttacaaaagggagaggaaaaat

SEQ ID NO: 53491 - DNA, 122 bp, Homo sapiens
gcactcctcagcccttgggtggtcgatggcactgggcaccgtggcgcagggggtggtgctcgttggggaggcttgggccgcacaggagcccacggagtgggtgggaggctcaggcatggcgg

SEQ ID NO: 53492 - DNA, 122 bp, Homo sapiens
tcaggtgccggctgggggctgtaggcaccggacggaagcaggcggtgtgaggaccgacgacgcgggcatggcgggggcggcctgcgagccggtggccaggccgagcctgacctccatctcgt

SEQ ID NO: 53493 - DNA, 122 bp, Homo sapiens
gcccaagggcggagtctgtgttcgccccgccccggccctcaactcctagcaggtgtaatccgaggtgactcaggacctccaggtcccccatgtctgggtgactctcgtgatttatcttaatt

SEQ ID NO: 53494 - DNA, 122 bp, Homo sapiens
ggatgcggtgggaggaatggcatgggcaaaggccttcagtgagaaagctgggcacacagccgtaaaatggctgtgaataggctgctttcctagagcaaagggtaagtgcggtaaaacggaaa

SEQ ID NO: 53495 - DNA, 122 bp, Homo sapiens
tgtggggctggggccctcgctgaagcccatgctgtcccaccttcaggccccagtacccgccgcatccttaccacatcctgcaggttcgggggtagtcctcattcctggagctcacgcccacg

SEQ ID NO: 53496 - DNA, 122 bp, Homo sapiens
gctttgtgttctggcctaaaatagacaaaaacacaagtcaacagcccaggactgccccatcgtacacaagctatttatttccccgtctttgaaaaataagaatgcaggtttcatggtatatc

SEQ ID NO: 53497 - DNA, 122 bp, Homo sapiens
cctctttcccggtgtgcctgtctttcccgctccatcctccagcctccaccgggaggaacgcggctgcattgttcctcaggaggaggccctgcctcggggcctggcccagtgcccaggtgggt

SEQ ID NO: 53498 - DNA, 122 bp, Homo sapiens
cctccatgcacgtacaagcatgtggttataccatctatctttaaaaacccacaggactctcgccagctactctcccattcttcccgttttagcaacacaaaactcctcaagcaagtctcccc

SEQ ID NO: 53499 - DNA, 122 bp, Homo sapiens
agatgctgggacgggccctggtggcctggcgactgttacagagaatggggtgggcacaatcggaagggagcccaaagacggggaagaagtggcgcagatagcagaggctgggcctggaaggg

SEQ ID NO: 53500 - DNA, 122 bp, Homo sapiens
tccccgccattggcagagccggagggggtcaccccccggggggcgaatggtacagtcctccgcccgcgcctcggccgggcccgcagcctgcgagccagccccaagcccagcgccgccgccgc

SEQ ID NO: 53501 - DNA, 122 bp, Homo sapiens
gagagaggtgtttctctttttcttctcttctccctattaaacctccgcctctgaactcctcgtgtgtgtccgtgttctaaattttcctagtgcatgccaatgaaccccagggtatatactcc

SEQ ID NO: 53502 - DNA, 122 bp, Homo sapiens
ctcgcctgggttaaacgcacggcagcgagctgcgcaatagagttggtacccagaggaggacggagaacgacggtcagggctttaagtacctttgcccacgtcagctcctggtcacgtgaggg

SEQ ID NO: 53503 - DNA, 122 bp, Homo sapiens
agacaatggaataccattcagtgttaaaaaataagtgagctggccatgcaaggtggctcacgtctgtaatcccagcactgtgggaggcagaggcaggcggatcacttgagcccaagtgtttg

SEQ ID NO: 53504 - DNA, 122 bp, Homo sapiens
gcttgcaaccgctcgctgcggtagaatcccttggagggcaccagcctaagaggggttaatcgtgactcattcttaccctcccttcattcccctacatccctttaagcgcttccctccctccc

SEQ ID NO: 53505 - DNA, 122 bp, Homo sapiens
catgccaccatctcatattataggtcctgctattattgttaaattggtttctacctttatcgatttttagtcatatatctttcctcttttcctcagagtgctatcctacttcattagtgccg

SEQ ID NO: 53506 - DNA, 122 bp, Homo sapiens
agtcccttcccctggaacgctgagagacagcggcgctggccaatcgtgcgggggggatggcgagggggagggagggggcgctcggaggagccccacccacttccggtgtgcgcgggaaatct

SEQ ID NO: 53507 - DNA, 122 bp, Homo sapiens
tcaaaccctgagctgacaagcttactctttcctcttagatcgtggccagtctgtatcacacggggcttggaaagtagtcataagagaacacactttcattactgtggcctgaaaagtgcagg

SEQ ID NO: 53508 - DNA, 122 bp, Homo sapiens
gactgcaccgggtctggccctgacccagagctcccggcaggaaagggctgggctcaaacacggccaccctgcaccgccttaagaagggcagggctgagcctgctcctccccttcctgggggg

SEQ ID NO: 53509 - DNA, 122 bp, Homo sapiens
actggcgggaggagggcgccctcccagccaatcaacgtcccacagggcccgcctcccgcgcgtctttcaaaggtcttctaggaaccagtcagcgattagaggccgagtcttcggccacccaa

SEQ ID NO: 53510 - DNA, 122 bp, Homo sapiens
acgctgacactgtcacacaccgagaattcgcccctgtggaagatgggatgggatgatgaccgcttgctcctgtgagtcctgttgaagggggcagcaccaccgacctcgaagtccagatcctg

SEQ ID NO: 53511 - DNA, 122 bp, Homo sapiens
gagccagcgcacgcgcatgcgtagcactcgtgcggccgtgccttggaatagcacgtcctgcggcctcagccgcctcttccgccatcctccgtaggctgcattctgccctagtgagcgccggt

SEQ ID NO: 53512 - DNA, 122 bp, Homo sapiens
aatgggcctgagaggcaaacatccaagaaggaggaagaggctcggcggcacctccctccccgggagttctgctgattccatcttggggaagcagggtggaccagggcccaaatgcgccctgg

SEQ ID NO: 53513 - DNA, 122 bp, Homo sapiens
atgctctctgagcctccgggtctgtatctgctaatggaggtgaaattccctgcctcccaccgtgctgtaacaattacacacaggaaggcagagaaacagcacaacagctgcaggaagaaccc

SEQ ID NO: 53514 - DNA, 122 bp, Homo sapiens
atcagcagtccttggtattcagaaagtagattgtaagcaaatatttttttctagtgaggccggaagatttactgtgtagtattttacagaaaatataaagtctttgataaaatgtaaaagtc

SEQ ID NO: 53515 - DNA, 122 bp, Homo sapiens
aggcagcatttcctggaacgactttgtccacgagatgctggccaagggcgaggtgcagcgcgtccaggtggtgcctgagagcgacgtggtggaagtctacctgcaccctggagccgtggtgt

SEQ ID NO: 53516 - DNA, 122 bp, Homo sapiens
cgcccttctgctaggggatgaccaagcagagtccacaatggcaccttaaggtcacaacagcgcagggcctttaaaacaagccatgacaccagggatggcaaactccaacacctattggggcc

SEQ ID NO: 53517 - DNA, 122 bp, Homo sapiens
gccagggccaggagacagatggcccaatcccctgcccaccacagcagcttttctgagaggcgggcaggggcagggtttgctccccctggtgctgggatgtggtagagacattgcagccaggg

SEQ ID NO: 53518 - DNA, 122 bp, Homo sapiens
gctacctgcctgacagggccattgtggctagaggagaaaagggctttgtcaggaagcagccgagaagactgcagttcaatggggccctttatgtctacactggcaagatgctctgatgccag

SEQ ID NO: 53519 - DNA, 122 bp, Homo sapiens
ggaaataccttaaaataaattccatcctcctggtatagcctcgacttccatcggctagctcgcccagaaccgctccatgagtgctgaaaactgcaatcggctcagagagcgctctccggaga

SEQ ID NO: 53520 - DNA, 122 bp, Homo sapiens
acaatctatttccagatagctgagttcttccagtctccacggcaggtctagcctccaaaacgagacgagctgggagcgaggcggagggaagcgcaggctccgcccaatcccacccgggcctg

SEQ ID NO: 53521 - DNA, 122 bp, Homo sapiens
ctttcctaggttaggagacggagacccagaggggtgacacgaggggctgaggtccatacgcggatggctagtgacaaggtaaatagacaaagaggcggctcctctctgcgtatccaaggctt

SEQ ID NO: 53522 - DNA, 122 bp, Homo sapiens
ctcatccgagcgggcagcctggggtaacttcgtctccaaaaacgagctaatttgtgtaaacggcctgccacctgctacctcctgtgtaacagcggccgaaaccatagttcttcaccttcgtc

SEQ ID NO: 53523 - DNA, 122 bp, Homo sapiens
ccaccctgctcccttccggacaatgaagaagcctttgcaccctgggaggaaggaccaccccgggccctctatgcctggccagcctccagctcctcagacctcctgggtggggtttggcttca

SEQ ID NO: 53524 - DNA, 122 bp, Homo sapiens
gaatacttcctatttctcccgaatcatcctcatggctcatcctcattgctaaatttctcccgcgggcactagtgaagtcaagtgcagccttggacattagtgtctgtgtttctccaggagtc

SEQ ID NO: 53525 - DNA, 122 bp, Homo sapiens
ttgttggcaccgggggaggcccaccttatcgtctagcagacgcggggctgggcacgtgggcggtaggccctctggctctgatgcatgggaagctctagccccaacatctacccctccctccc

SEQ ID NO: 53526 - DNA, 122 bp, Homo sapiens
ggacttgggaggccgcgggaaacttcaccgaaggctctgcggactgctctaggactcgtccgccctggagaagacaaagccacgctttctggagacccctgggaggactgtaggatggaact

SEQ ID NO: 53527 - DNA, 122 bp, Homo sapiens
tcccctttaaataccaaagccctcagaatcgtctttggagcaaggcacagacctcccttgcgggcatttccttaaccttggcaaaattaacttctgaattgatggagacctttctcagatac

SEQ ID NO: 53528 - DNA, 122 bp, Homo sapiens
ctttctggctgtctgagcggcttcctcatttatctctcaacatcttgcagcaggtgccatcgttccttctgttcttggaaactcagacaggctgggaccaagcagagatccgtggggattgt

SEQ ID NO: 53529 - DNA, 122 bp, Homo sapiens
cgaacaatcaactctgctccttggcaccttcgaagaggagtgggcggtggggtcctgggccggcacctcgctcacaccctttctgccgcccgtggctacgtggacatgctgggcgtgagggt

SEQ ID NO: 53530 - DNA, 122 bp, Homo sapiens
tatcatgataaattatcgtgtgtgcattgttttgcatttcaaggtggaagaatcaacagccgtgatgtctggatttataactcacagttaaatatttggatcagagttgcctctctcaataa

SEQ ID NO: 53531 - DNA, 122 bp, Homo sapiens
ccccgcgagccccggggcccttagctgacgaccgccctcacctcttctctcttcgcctgccgcggccttttacaaacggggccaaactgttcgctgtaacgacaatcgttattggtcagagc

SEQ ID NO: 53532 - DNA, 122 bp, Homo sapiens
tgccagtgcttggaaatccactgcttaggagacaacagctgggtgacaactctagcccaccgttctctgctatctttttaaaaaagctgcaaattcaaaaattcaaaaaattagtttattag

SEQ ID NO: 53533 - DNA, 122 bp, Homo sapiens
aggggcagtagttgcgcactgaagtgaggtggggaatccgaggtacttgaggtctgggggcgcggtgattccagaagcatctaccgaaagatcataccagctcttggagcaaacctgtccgc

SEQ ID NO: 53534 - DNA, 122 bp, Homo sapiens
caggagccacggcgaaacaagaagagggggatcttccccaaggtggccaccaacatcatgcgagcctggttgttccagcacctctcacacccgtacccctcggaggagcagaagaaacagct

SEQ ID NO: 53535 - DNA, 122 bp, Homo sapiens
tgaaattaactttagcaatatactttgtatataaaaatcattatcattccaacatgtaatcgtataaaatttgtaagatttttatagtctctttttctagtaccaagggcttgaaattcagt

SEQ ID NO: 53536 - DNA, 122 bp, Homo sapiens
gaagtcggtggctttccttctctctagctctcgctcgctggtggtgcttcagatgccacacgcgtcccgggggcccggttctccgctcccctcccctccccttctcgccggaccccgcgccg

SEQ ID NO: 53537 - DNA, 122 bp, Homo sapiens
tctgcgggggctaaatccgtcttcaacaaacctcgcgaaaaagccgagggggggacgcgccgttgctggagaataggtcagaagtgacagcagaatgggccgctgagacccccgtccccgcc

SEQ ID NO: 53538 - DNA, 122 bp, Homo sapiens
aagtgatgacctaacccagccccgctgctctagttttgttaaacacctcatctgctatcacggtctggcgaaaccctggagaaactattatttccacgacggaaacatgtaatatcgaagca

SEQ ID NO: 53539 - DNA, 122 bp, Homo sapiens
cgcgggtgggaactggggctgtgccgcggtgtttgcgggccagcgcgagttccaggtgggcgtgggctcagtgggccccgcactcgtagtggccggccggccccgccagcccagggcaccga

SEQ ID NO: 53540 - DNA, 122 bp, Homo sapiens
tacttcacgccccccaacctcgagaggctcagagacgtcatgtgcaggtgccttgtggggcggggctcagggtgggaggcgggaccctgccgccagttactctgtgaagatgaggtccggaa

SEQ ID NO: 53541 - DNA, 122 bp, Homo sapiens
gcatttgcagggctcagcaggcaagctaagcctcgccccgctgagacccgcccacgtaagcgagggttggggacaccacctccaaacagtctcagttatcctggggcctgggctcaacgctc

SEQ ID NO: 53542 - DNA, 122 bp, Homo sapiens
gacgcatccgccgagacctccgagcatcctagagaggacacggaagcgagtctttccttacgcacctgtctaacagcgtccgcagctcacttccggaccgcggatagcactggcgaccctag

SEQ ID NO: 53543 - DNA, 122 bp, Homo sapiens
ccagtcaaggctaggaggcggtcggggactccgcctcctcccgacccgtaggtctgggagcgcaagtcctgttgcagtcttgcaaagtgtaaagctgtcagccgcagagcacggaggaaaga

SEQ ID NO: 53544 - DNA, 122 bp, Homo sapiens
gcttgtggagctagcgaggggcggggtcagctgtgacgtggcagttgcggaagtcaaccccgggcaagggcgtggccaagtggggcagggagccaggttagcacagcaagtaaaaggcgtgg

SEQ ID NO: 53545 - DNA, 122 bp, Homo sapiens
agaccatagagcaggaacctgtatttcctactgggctccaggccctggactgtgacctcccgctggttggctgccaccggcaccacctggagccgaccatccttatccttgtactggaccac

SEQ ID NO: 53546 - DNA, 122 bp, Homo sapiens
aaagagttctgtttgggcatgaaagtgtttaatgtttattggacatttgggtggagatgtcgagtaggcagttggaaattcaagtctgtagcttagggatgagagcaggtggtctctcagca

SEQ ID NO: 53547 - DNA, 122 bp, Homo sapiens
tctgctaagtagtgagtgttgttccttgacaccttttgctaccactgggccacgatccgccgggtaacgggcgtcttcccagacgctggcgtcaccgctagaccaaggagccctcttgtggc

SEQ ID NO: 53548 - DNA, 122 bp, Homo sapiens
cgcggctctcccgcggcttctcgggaattcgcctccagggcaatcagctcttcgcacaaacgttcaaaccaaggtaagagctatcagatccagccagatctgcttcctaagcctggccaggg

SEQ ID NO: 53549 - DNA, 122 bp, Homo sapiens
tctcctccccagagcgccgccgacactcgccgggccgcggctcaggttttctgctgctcgcgcgaaagtggctcggggagctcctggccacaagctcagcacaccgatcctcctagggctgc

SEQ ID NO: 53550 - DNA, 122 bp, Homo sapiens
cttttgcttcctgctctagggttcagcgcgtgctataaaccgctggccagggctactggtcgttaaaaacgataaactagggaaagcgccccattgcctggcacgtggtgggtgcgcaataa

SEQ ID NO: 53551 - DNA, 122 bp, Homo sapiens
cctgctggggtttgagccacgttccccggaagcagctggggcctgctggggtttgagccacgttccccggaagcagtcggggcctgctggggtttgaaccacgttccccggaagcagtcagg

SEQ ID NO: 53552 - DNA, 122 bp, Homo sapiens
acaggaggcatgggggtcagggacccacttgaggcagtctgttccttagctgagctccagcgctgtgctgggaaatccactgctctcttcagagctggcaggaaggaacaacatttaagtct

SEQ ID NO: 53553 - DNA, 122 bp, Homo sapiens
ggaaacactccatacgccagtaatcgatttcagtcaatttcagtaataaatccaggaggacgcagcccgacccctcccgcccgggggccaagccatggtgggggatctgggtggacctccgg

SEQ ID NO: 53554 - DNA, 122 bp, Homo sapiens
tctggctttccgcgctggcacaggggtgggacaagccaagtttccaggagactcgcccagcgcgggcccggccctcgcagcgtgggggtggccgggcgtccccgcggcgctcctcgtggggc

SEQ ID NO: 53555 - DNA, 122 bp, Homo sapiens
tgatttggagaacgctgataaattacaaatgcaaatgggtaaccaggcaacagccccccccgcctgatgccaggctgggtatcagggctgggaaatagagcagaggtcacttcctcccacct

SEQ ID NO: 53556 - DNA, 122 bp, Homo sapiens
ccccgccggtctctgcggccccgccgggcaccctcggccaggccggctcgctcttgcaggcgcaccttccctgggggatggccgtcaaacagggcctcgtagaagcccctctcggctgcatc

SEQ ID NO: 53557 - DNA, 122 bp, Homo sapiens
taagagaacaaaaccaaaatctcacatctctcgactcccaacagagttcttttcacagtacgtagagtactctcccgtgggctggagaatttaaatacctgcgctcaaaacctaaaacgcaa

SEQ ID NO: 53558 - DNA, 122 bp, Homo sapiens
gctggctttgctccctgcccccacagaaaaccaaaaacaaatacacagcaccaagattatcgccagcaatatcccagaatgcaaatattatgtagggagagacagttcccagggacacagag

SEQ ID NO: 53559 - DNA, 122 bp, Homo sapiens
agagaatggggcgagggaacgagggtgcggcggtgagacccggagccaggcctaccggggcggtgggcgagccggcgtgtgggcggcgtggagaccgcctggctcctgggcctgcctgaagc

SEQ ID NO: 53560 - DNA, 122 bp, Homo sapiens
tcatgcctcaaactattttttatttgcaactacatgatttcacacaattctcttaaacaacgacataaaatagatttccttgtatataaataacttacatacgctccataaagtaaattctc

SEQ ID NO: 53561 - DNA, 122 bp, Homo sapiens
tagggtagaagtgtgaaaagaaatcccagctctcccagggagactgcgtgtgaaagagcccggctcccccaaaagctccaggccgcgttttgcaggcttccgcatctgcctccctgtctctc

SEQ ID NO: 53562 - DNA, 122 bp, Homo sapiens
cactcaccgccgtgcagaagtagccgcagcccgggcagcagtggtgtttgaccatgcgggcgcggtgggtctcacagagcaccatcagggccacacggctggatggcctcatggtctcccgc

SEQ ID NO: 53563 - DNA, 122 bp, Homo sapiens
gcagtgtggcatcatctatgcggacaacctggtggtggtggacaaggagagcaccatgagcgccgaggaggactacatggcggacgccaagaccatcgtcaacgtgcagaccatgttccggt

SEQ ID NO: 53564 - DNA, 122 bp, Homo sapiens
gcctcggacgtccgagctgcccggacgaagcgctggccccactcccgcccttggtcgccgcggtgaccccacccgagccgtgacctcccccaagatctcagggcccgggcctccccgctgcg

SEQ ID NO: 53565 - DNA, 122 bp, Homo sapiens
gcgagcggaggcggggccggggccggaagtcacgtgctgtgacagtagctggggtgaggccgtcgtcgccgcacgggctggttggggctgtgtctgtgggaggcgccggggtgatggcggtg

SEQ ID NO: 53566 - DNA, 122 bp, Homo sapiens
ctgcacgactggattccttctccatccgcgcctccggcccggtccctgccccgccaaatccgcgcatcggtttcccatcccatagcgcagataggtagggcaggtacacagggaggtgttcg

SEQ ID NO: 53567 - DNA, 122 bp, Homo sapiens
ttagggagactagcaggggcttggtaagtcatacacatgctaactctattggtcccaggacgcatattatttaggtaatcgcgtattgccaaaggtgtgctgtcatcatgacattaaaagag

SEQ ID NO: 53568 - DNA, 122 bp, Homo sapiens
ggcctgccctggctcccattcctagcccatttgttcactgtgtctcagggggcgaggctccgcctgtgtggctgggtagcctatcagcacctggctggtggacagcactatagctgtcctat

SEQ ID NO: 53569 - DNA, 122 bp, Homo sapiens
cctgctcctccggtatcacatacctacagccaaccatgccaagagcttccccattatctccgcatcggagagctacaagataaagcgcaagaacacgacacgcatctcagtaaatcatatat

SEQ ID NO: 53570 - DNA, 122 bp, Homo sapiens
gcggggcccggggccgccccagcatggtgaaggcaggcaggcgctggcggtaggtgtttgcgtccgggctgtcgtactggcccgggcctggtatctcagcaggatcctgcggggggcgggcg

SEQ ID NO: 53571 - DNA, 122 bp, Homo sapiens
cttcaatgactgatgcatgctgaatcgtcagtcaatgcatgtttggttgttgaagctaggcgctgagttaacaaaagctgctttctctgagtaactggacctcttgcaggggggcgggtctc

SEQ ID NO: 53572 - DNA, 122 bp, Homo sapiens
cctcagcaggctgggatgtgctgggctgtcagaaagtgctcataaatagcatgccccttgcgaagacaggcgagtctgcagacggccgtggctcctctgttcttcccgaggctacagcaaca

SEQ ID NO: 53573 - DNA, 122 bp, Homo sapiens
cacgtgtacagggatcttcagaggaggggtgccctcacatcctccaggccatttccaccccgtgggagggtgtagactggcccagaattaacacacagcctgataaggaagcaggaggtaat

SEQ ID NO: 53574 - DNA, 122 bp, Homo sapiens
ggcacagcgggcaattctgagccaaagccaaaatgccagctcccagcctcctaggaaggacgggtctgtgcggaaggctctgcggccggctctgcccccagggctcccagcagcgggctccc

SEQ ID NO: 53575 - DNA, 122 bp, Homo sapiens
gcctcacaaaagcagacaaacacacaatctttttgcacctgtttcttccactccggttgccgtgaatagtgaggtgttctcacagattcagcttcacagacagcattttgcaaacactcccc

SEQ ID NO: 53576 - DNA, 122 bp, Homo sapiens
agtgacaaggggacatcagcctttgttctcctggggcttggcgaggctgcgctgccaaagcgcagcgcgggcggcgccagggcaccagggttgctcacctttgcacgcggcgtgtcgaaggg

SEQ ID NO: 53577 - DNA, 122 bp, Homo sapiens
atatattctgagaggcacaaatatgcctaacacatttaaaaccctgatccagaattaacccgcaacaatcggccagggcgttcggaatagaagttcaagactccttttagaaattactcaag

SEQ ID NO: 53578 - DNA, 122 bp, Homo sapiens
tactgttagtgccattggtgtttatttcttatttcaatgtagaaatgaatgaatgagttccgctctagcaaaaagtgcctgtgatctgaaataattagtcatcacaatcagagagaatgcta

SEQ ID NO: 53579 - DNA, 122 bp, Homo sapiens
gaactggtgtcactaacccaaggcgacagttctaccaagctgggggccaggattcacatccggatcttcctattccagctagcgtttttgctgtcactgtctcatacagtcctttggaagaa

SEQ ID NO: 53580 - DNA, 122 bp, Homo sapiens
caaaggaccccgttgctgcctccagagccgccactcacggacccttctccaaagctgctgcggtttgctgatgccgagaccccgaacagaagctgctggccccacgtttgtccccatttatg

SEQ ID NO: 53581 - DNA, 122 bp, Homo sapiens
ttgcaataatgaaacaagtaagacaacactgggttccagtgtacagcacaaggatcaaggcgaaacataatgctttcattacgtaagaataggactgacattattctggctttcccctaccc

SEQ ID NO: 53582 - DNA, 122 bp, Homo sapiens
ccccttgggaccccagtgacttctctctctgactcctatgatcccaaagacaccaatgcacgaattcactcttgactcaaaagatttatcctaactcctgtgatcctcaaatacatcaaccc

SEQ ID NO: 53583 - DNA, 122 bp, Homo sapiens
cagagactagtggaaagtcgccgacagcagatcttgagggagtttgaagagcttcataggcggctggatgaagagcagcaggtgttgctttcacgactggaagaagaggaacaggacattct

SEQ ID NO: 53584 - DNA, 122 bp, Homo sapiens
cccctgtccgtctgtgtgtccctccgctagacagtgggggctgaggtccttctgtctgcccgctcccggcccctccacccgcccgtgtgtctcccgctcctccgaggggcccgtccgtccct

SEQ ID NO: 53585 - DNA, 122 bp, Homo sapiens
tcgaggttctcactcatcgcccaggcggttctccgcctagaccagggacgccatgggggccgcctggccacctcgtcctgggcctgtcacaagggaagtggcctgtcacaagggaagtgctc

SEQ ID NO: 53586 - DNA, 122 bp, Homo sapiens
tcggctgctttgtcactgcgaagtctccagcggagtctgtcagccaatctgcatcatccccgggaaggatctgacccaacaagacaagggaaaaggagcagggctgctacttcttcagcagc

SEQ ID NO: 53587 - DNA, 122 bp, Homo sapiens
tggaaggggagggctgtctgctcagctgtcatctgagaagcctggacagagtggggcacacgatcctctgatggacgagcccctgcaggcagaggaaacaaccctgcaaaggcccccaggca

SEQ ID NO: 53588 - DNA, 122 bp, Homo sapiens
cgctgtggagctgggagcagtgctctcgtcggggaggctcggccaggcaggagcccatggcggaggtggggcgggggaggctcaggcacggcgggctgcaggtcccaagccctgccccgtgg

SEQ ID NO: 53589 - DNA, 122 bp, Homo sapiens
acttctataattaaaaattctgaaagctaattacaattatccatcagtatttcaacatgccggggctgaagatcttaaccttccttgaagcattgtgcttctctctcttctcattctaatct

SEQ ID NO: 53590 - DNA, 122 bp, Homo sapiens
taaaggtgaactaatatactgcaaagtcttttgacataagtcctgccctggaggaatttacgaccaagagtaggaaccagatacagccagaggaaacagacacccaagcaaaacagtctagc

SEQ ID NO: 53591 - DNA, 122 bp, Homo sapiens
tggaaaaaagccccctcagccgtgaaaacaaaatctttgaacgcgtgatcattgcgagggcggctgatatcctaatacgtgcattgttctcggcctggcccaggcgcgccccggcctcctta

SEQ ID NO: 53592 - DNA, 122 bp, Homo sapiens
cgtggatcaccgaaggagctggcagcccagccgtccccgtgactggatggaatccgcaagcgttcctgggcatccactctgggaagggctcagtgccagggcctagggtagttttcaaattg

SEQ ID NO: 53593 - DNA, 122 bp, Homo sapiens
ctcccaagccccgcatgatcattggaccgattgcctggaaggccacacccggcacacagtcggtgctcatagtgtccttcctcaagctggggcggcaggcacgcagcccggcccctcccagg

SEQ ID NO: 53594 - DNA, 122 bp, Homo sapiens
accatttggagacaggtgcaggggctccaggacaccactgcggcacaggaggccctgccccgtggctcggagggaggagggcgattcggcttaggagaggtccagagtctggagtgaggctt

SEQ ID NO: 53595 - DNA, 122 bp, Homo sapiens
tgtccttcccagaccaggccccgtccccatgcctcggggtgcagtgtgcatttggggcgacgtgtgctgtgaagaacgggcaggcagcgtgtgaatgcctgcaggcgtgctcgagcctctac

SEQ ID NO: 53596 - DNA, 122 bp, Homo sapiens
cgcaggccccaggctgcgcgcaggaagcggctccaaggttgtcctagagcctcaaagcggcggaagggagggagcagccggcacctgcattgtgcgagccccgctccccgctgagcttctgt

SEQ ID NO: 53597 - DNA, 122 bp, Homo sapiens
gcgcgcggagtgcgcgtcgagtgcgcgccgagagagaagcggcgcgcagcggcgtcctcccggatgcggacgcgcaacttgaagcaactttaaggtgagcagctctctgttccgtccctgcc

SEQ ID NO: 53598 - DNA, 122 bp, Homo sapiens
tccctccctgctcccccgcccactgctctccctctcctccagcgacgggctggtttttgccgcagtccctgaccaaggtaaacaggagggaagaggaaagaaggctgtttccatggcaaccc

SEQ ID NO: 53599 - DNA, 122 bp, Homo sapiens
cagggaattggcattaggacatttatgacttgtactattatttcttgtgtccatatttcgcgcctctgctgcccttttagtcctcaaggtcacatgctcagtgtgactcacgtccatcagtt

SEQ ID NO: 53600 - DNA, 122 bp, Homo sapiens
gtacagcgagagtctgcggagcgtgagcagcaggtgccactctgaatgggccctgcaccccgtccgccagacggacacgctggaactgcagcggctgcgggaggtgcgggcggctgcccagg

SEQ ID NO: 53601 - DNA, 122 bp, Homo sapiens
ggggcagctttgattcagccttgaatgtggctgacaatctgagccctttatcaccctggacggtgaatggaaaagtgaatgctatttgggaaacaagggttgaatgggagggatataaagta

SEQ ID NO: 53602 - DNA, 122 bp, Homo sapiens
gaagaatgtacatttaaggagatacttttagacgcagatgcctcgcgcaagcctaaagctcgtgtggtaagcgacacgactaggggttaaaagcggctggttggtaggcccggggccgtggc

SEQ ID NO: 53603 - DNA, 122 bp, Homo sapiens
cgggcaggggcacggcgggcgcggctgggggcaggcggtcctcccgcctgcctctgcccccgactgcaaacccaaacgcatgggggactccggagacccctatatacccctgcgtgcgcctc

SEQ ID NO: 53604 - DNA, 122 bp, Homo sapiens
gagctgtaagataaatgacagcttcgaagatgcttttcagcacttcgtaaatcacccatccgcccgggcagtttgctgctgccacgtctcggttctccctccgcgcgctccctgtcccccca

SEQ ID NO: 53605 - DNA, 122 bp, Homo sapiens
cacatcaaccaaaacataaaccagttctcaaaccaatctaaggttccaccccaccaaggccggccgcgcagtggcctgtggagaggagggcccggctcacgtcggaacccgaaccacgcggg

SEQ ID NO: 53606 - DNA, 122 bp, Homo sapiens
gtggctggtattacaggtacccgctaccacacctcgttaatttttgtatttttaagagaccgggtttcaccacgttgtccagactggtatcaaactcctgacctcaggtgatccgcccacct

SEQ ID NO: 53607 - DNA, 122 bp, Homo sapiens
gtcacccccggaaaaggcatctcccttaaatcaggcaggcataatgaatggtgtgatacccggcggcctgcacagttataaatacacaacctttcattctagagatggcccattaccactca

SEQ ID NO: 53608 - DNA, 122 bp, Homo sapiens
gggtgaataatggaaggttggtgcgggaaagaaccttggtacaaatcccgccattttaagcggaggttcggagagaaaacaaggtcactaacccaggaaaatgtctgcctctttcccataaa

SEQ ID NO: 53609 - DNA, 122 bp, Homo sapiens
atttccagctggaaagtcgtcatccactctggggatttactctgctggagtcggtcaagccgccccagagcctcactcccagggacttcaatctcacggagccggactcagatttactgtgg

SEQ ID NO: 53610 - DNA, 122 bp, Homo sapiens
ggaaggaccctgcctggagtctccagagggagcatggccctgagacaccctgagttccagcgctggactctggaactgagaggagacacctctgctgccgcgagctgcccagcaggtggtac

SEQ ID NO: 53611 - DNA, 122 bp, Homo sapiens
aacaccacagggctctggtactgccaacagttggacacagtgtttccagcgggtatgggccgtgttcacaggcacctgcttcccgtctcccgtgtgcgcttgtgcctgctttgctgtcttct

SEQ ID NO: 53612 - DNA, 122 bp, Homo sapiens
tccagcccccattttcagccctgcttctggggtcacagagcccttctcccatcccctccccggctggcactcacccttggccccccggagcacgaacccaaacccctcactgtccttcttct

SEQ ID NO: 53613 - DNA, 122 bp, Homo sapiens
caagcttggaaaatgctacccaatctgccaattaattaaagcgttaatctgaggagcagccgggcccagggaatgtttacccagggaggagtgggggtggtaggaactgagtaggcagctcc

SEQ ID NO: 53614 - DNA, 122 bp, Homo sapiens
tgaggccaccacccagagcctcttcctagaggagccggaagcatcgggagccgcggtacccgcccatcttccggccaggatgtgtggtcctggtgagcgattgtcctgtggcgtccgggacc

SEQ ID NO: 53615 - DNA, 122 bp, Homo sapiens
ccgggcctcaagccggagacagcgctcgggagcaccgccgggttccagacccactctgagcgccacccacggaaaagtgtttctttgaaaaacatcattctcggagctccggaaaaacatcc

SEQ ID NO: 53616 - DNA, 122 bp, Homo sapiens
gaataattcccaagcaaatcagcagcctctccttccagccaggaggcatcacagctccaacgtagcacaacccagcttgggggcttgggctactggaagggaggccacagggtcaagattag

SEQ ID NO: 53617 - DNA, 122 bp, Homo sapiens
tcgtcatcctggaagagttgcggcagctcgtcctggagcacggcaatgtggggcaggggccgcacgaaaggcagctcgccgtccaggtccaccatcggctcctccagggctgccaggggcac

SEQ ID NO: 53618 - DNA, 122 bp, Homo sapiens
cctctcacacagctacagaggcaggcggtgctgtgatccccatactgcaggtgaggatcccggctcagaaaggccagggactcgcccgaggcctcagggcctcttgacacccggggcctctc

SEQ ID NO: 53619 - DNA, 122 bp, Homo sapiens
gggcggagtccctgatgatgagcaaaaggctgctccccaggcgtgctggcgttcctgccccggcagagggcgccctcttcctcctgagggcttcctggaggaggtgccaatcctggctccca

SEQ ID NO: 53620 - DNA, 122 bp, Homo sapiens
acgcagtgagttggcttgaggcaggaggcaggcggaaaccgaggctgagaggctggctgtcgctgccacccctcagcaaccccagtgcagctggtcatcctgtcagccgatcagtcagtcgc

SEQ ID NO: 53621 - DNA, 122 bp, Homo sapiens
cgcaaagcggatcaggagcgcacgctcattcggcccagtgacctgtgggaattgtagtcccgggccggaaacgcaggagacgccagaaacccaagtttgggacggcgcgtcccaagggtttc

SEQ ID NO: 53622 - DNA, 122 bp, Homo sapiens
agtcccggccggtcatggttccttagcaagcaaggcgcgagcctctctggatcccgtttgcggagggcccagcttagaggaagctttataggattgggctgccggtcgggcgcgggaggcct

SEQ ID NO: 53623 - DNA, 122 bp, Homo sapiens
ggctggggagtcatggtggtcgaagtctttgtccatggcttctatgagactggtgatgtccgagtcctcggaactgtgcctcgcgctgctggcacgttctgggtgggaagggtgtgcgaggg

SEQ ID NO: 53624 - DNA, 122 bp, Homo sapiens
tacccggcaaatgaaccctaggaaatgccaggtttataataagctagagcttccccggcacgccgttcacgcgctctcctctctaacgacataaacaagggaggaggctgcattcttcccac

SEQ ID NO: 53625 - DNA, 122 bp, Homo sapiens
gcaacccggggaaagcaggtgagcgccggccacggacttgggggtcgcagaagcagcccacggagagcggaagggaggaggatccgggtaaggggcctcccctccccgtcgggacccccctc

SEQ ID NO: 53626 - DNA, 122 bp, Homo sapiens
cagaaacttattcgacagcaaattgccttcaagaacctggtgaagagagaaaccagcacgcggagcagcaggccagccggccaacgacgcccagctggctcatccacctgcccttcatcatc

SEQ ID NO: 53627 - DNA, 122 bp, Homo sapiens
catttcatgcagtattgcttatttaaaaggaatccatttagacgtcataccctttaaagtcggcagtttgaaatttggcaaacaacttgaaagcagcctagatgaagcggttagaatatggt

SEQ ID NO: 53628 - DNA, 122 bp, Homo sapiens
cgggtgccagcccggtacttacccccgacgcgcgtgccccggggcacgcgctcctgagcccgccgctccaggccctccactgtcgggccccggtgtcctccaacatctctcctgacccctgc

SEQ ID NO: 53629 - DNA, 122 bp, Homo sapiens
tggtgtatgtgtggttcaagtagtgcgcaaaaaggtcactttgtgcctacagactctcgtcgctgtcacgtaaaatgcccacaaaacataagactgacaccagagagctcaccattgcacag

SEQ ID NO: 53630 - DNA, 122 bp, Homo sapiens
cctacccggcctcggagctccctagggcagactccgtaggtcagtgagggacaggtgaaacgccgagggcagttatctccctgaggataacgctttggtcttctggcccatcctgagtattt

SEQ ID NO: 53631 - DNA, 122 bp, Homo sapiens
cttaggttaatcctagatctctgcggaaaaccaggattctctttacttccaggaccactacgcactgtgccctcaatgcccaaactggagtaagcgtcttagctgctgcccacggaggacca

SEQ ID NO: 53632 - DNA, 122 bp, Homo sapiens
ttataagggtcctccaaaaattagaagtttaaaaaaattatttgtattatagtagttgaacggtaagattaccaattgaaatggtataatagttaagaatgtgagaccagcctggcctggtg

SEQ ID NO: 53633 - DNA, 122 bp, Homo sapiens
tcccaacgggaagcagcagtaataagcagtggctaagagcacaggctctgggttcaatctcgatgtttgctcaatccacctgtataatctcgagaagttattccattatgaatggatcacca

SEQ ID NO: 53634 - DNA, 122 bp, Homo sapiens
gggcggggggcggggggggtgcggcccgggcggggccggtggggcgggaggcgtggccggcggggggagtgggggcggcttttcccggcacatgcgcaccgcagcgggtcgcgcgccctaag

SEQ ID NO: 53635 - DNA, 122 bp, Homo sapiens
tgcccgaggcagaaggatgtttgacctccggataagcgaggcgctgctgtgcattcattccgggctgcatcggtggcgacagcagaggctcgggcggcgactctccggccagcggcggcggt

SEQ ID NO: 53636 - DNA, 122 bp, Homo sapiens
gctgggatatgctagttacctggattagggggaataagggacttgccctgctacctaccccgacctaccccgcaattgcctgtcaaagtgttgtggttgcctggccagtccaggtccattct

SEQ ID NO: 53637 - DNA, 122 bp, Homo sapiens
agggaacccctcagagcgtgccagagcggagactgctctccgtcgcagtcggggcgcttccggcagggcgcccactcccagccgagcgccctccgcctgctcctccaggattcctcttcgcc

SEQ ID NO: 53638 - DNA, 122 bp, Homo sapiens
cgcatgttgccttgagcgccggctgcttgctcctggcgcctttcctgacgtgcagatgcccgggactccactgcaggcttcggccccccagtggaaacacaatttgtgtgtagctgagggtc

SEQ ID NO: 53639 - DNA, 122 bp, Homo sapiens
ggagagccaggatggaggtgcctgtgttgggaaaagacgcttgaggacagcgcttcctggcgggctctgggatcttctgagatcctgatgtctgccaagagcaggaggacagggaggacctc

SEQ ID NO: 53640 - DNA, 122 bp, Homo sapiens
atggaacagatgtaaactcataaatttagtttactgaggttttcggtgagtgtggcttcccgtccgcgtgcttttcctatacaaccagcggcgtcctggcggaggagtcactgtggacttcc

SEQ ID NO: 53641 - DNA, 122 bp, Homo sapiens
tgtggggggggggagggggtggttgtgggggagtgcgtgttttggggggatggaccttctcgttttacagccttgaaggttatgtccagagtcatagcctgggtcccacacccccgcgtcac

SEQ ID NO: 53642 - DNA, 122 bp, Homo sapiens
catgctctttcaactgcaccattctgagtccttataaccccccaaaacaagcagaccctgcgcacatcatcctcttcctcacccattcattccttcactgatgaggcacttgctgtgggcac

SEQ ID NO: 53643 - DNA, 122 bp, Homo sapiens
gatagtcccccgcgtctgtagggctgggcgtggatactcccccgcgtctgtagggccgggcgtggattgtctcccacgtctgtggggtggggccgggcgtggaaagtcccccgcgtctgtgg

SEQ ID NO: 53644 - DNA, 122 bp, Homo sapiens
tccttgtcggtaacactgttactgccccttccgccgggaaatgtatctggtgaccggacgcgtagggttacaaaacaagggatttgtgtggcccggtacaagtggcccgagacaagtggccc

SEQ ID NO: 53645 - DNA, 122 bp, Homo sapiens
ccgtgactctgagttttcagttggaaccccaggggcacagtctgaacacagaccccggaccggctgctcctgcaggacatctgctgagtccagaaggaatcagtgcacgacgcccgcagagc

SEQ ID NO: 53646 - DNA, 122 bp, Homo sapiens
ccgtgcagagaaccgtgggagaaagaggctgtggacacggggcggaagagagggctggggcgcagtcgtcagctgccgtgaccccacagctgggagcaagctgattcctgcctcggagctgc

SEQ ID NO: 53647 - DNA, 122 bp, Homo sapiens
gaaaacccggagcagtgatcagcctcgcgacccaagggggtcagggacgataggaaaacccggagcggattactcgagccagagcgccccatgcctgccgctacctcctccttcctatagcc

SEQ ID NO: 53648 - DNA, 122 bp, Homo sapiens
caagttaccttcaagtattctttctctatcgtcttttgagcttgaaaataaaaagcaatccgacaagttttagctgttaaaatggctcctgtagattggggaagtggtgtctgtgcttcagc

SEQ ID NO: 53649 - DNA, 122 bp, Homo sapiens
accaaacctccaaattgattctaagataaaatacccttaaaaaaaatttcccttcctatccgaaggcagaccaagaggaagtttatcctcccacctacaaattccccagagagctttcatct

SEQ ID NO: 53650 - DNA, 122 bp, Homo sapiens
tgcaggcccagcccctgcctccttcagagcaacagagaggcaggcatgcgggcagacagacgcccaacacagagacctcccacacgctcgtctgtgtcaccgccgccccttcctggttggcc

SEQ ID NO: 53651 - DNA, 122 bp, Homo sapiens
ctctacctcacacctttaagccctgaatttctggcctagggcagtcactcccggcttccccgccctttccctactctgctgacccttggcaggattctgcaccccacaaacagggccagggc

SEQ ID NO: 53652 - DNA, 122 bp, Homo sapiens
atggaagagcccgatccacatttacagagccctgcgtgccagagagaaagcaggctcgcgcgcacatgcaggcctccaaatgcatccagcagccgtctgaagtcaatgtttgtgccatttcc

SEQ ID NO: 53653 - DNA, 122 bp, Homo sapiens
agtcactggctgtgatccgcaggagacaggcgaagtcccgggatataggaaccacactggcggctgcttgttactgagcccctagtacgagtggggttcagagtgtagcagttcctgggctc

SEQ ID NO: 53654 - DNA, 122 bp, Homo sapiens
ccgagttgatccaagcccctccctccctggcgaagttcctccatgggctactctctgcatcggacttgttcaggatataagagaaaggagttaggttcttgtttacttggagttatcaatct

SEQ ID NO: 53655 - DNA, 122 bp, Homo sapiens
cagaacggagcccgccccctgtggccgggcctcctccaatccccaccgtttcttccgggacggatacctgcctccgccaattgtcgcgtaccctggccaggtaactagggccgagttacaac

SEQ ID NO: 53656 - DNA, 122 bp, Homo sapiens
ctgggaacatggcatagtggctatggcagtcatctaagtccctctctccattccccctctcgtccctgcatctcactgaacatgatactgccactggctctttcctgctcagggaaagcaag

SEQ ID NO: 53657 - DNA, 122 bp, Homo sapiens
ccaccggggcaggccaggcctgggcaggggctatggctaccgcgtgcaccacgacgttgtcgccggggacgtccacttcgtaagtgcgcaccgcccacctctgttcccttctctgtcccctt

SEQ ID NO: 53658 - DNA, 122 bp, Homo sapiens
gaggggtcccaaaagatggggtgatggagatttagaagggggaaagggtgggagaaataccgaaattacatgcagtgaaatataaagaaaaaaaatcagaaaaggtgttaagtatagatcca

SEQ ID NO: 53659 - DNA, 122 bp, Homo sapiens
ctggaacaggcaagagtagcgggacagggccgggaatggggcacgccgagaccaagaagccgaccgagagcaagaaggcccagtcatgcgcacccggcgcctacatcctcctgcggtccccc

SEQ ID NO: 53660 - DNA, 122 bp, Homo sapiens
gccgggcgtggctcgcgtggtgcactccaaggccttctgcacagtgcactggcaggagggcggccggtgcaagcagagtgccaaggacgcccacgtgctgcccccagcccagatcctgggca

SEQ ID NO: 53661 - DNA, 122 bp, Homo sapiens
aaggggcagtgagatggagtggagagaatattgcacttgtagccaagactttgtatttctcgttttgacatgcctctgtttaatttttagtggaccatttaatggctgatcgtcatctataa

SEQ ID NO: 53662 - DNA, 122 bp, Homo sapiens
accaccacagaacagccaaggccaccagctctggttatcatctggttataacacaggattcggttgctcaggctttgccaattccaagcttttggtcatctggctcagtccatttgcataac

SEQ ID NO: 53663 - DNA, 122 bp, Homo sapiens
agctcttttgctggtacttaaggagttcttgggtcactctgcaggaacactggagcccggcggccccactctctttattggcagctctggcgtccttccatcacccactgcggcgtcttggc

SEQ ID NO: 53664 - DNA, 122 bp, Homo sapiens
ccgcagacacagcttcagcgacgcccaggctgagacggcagaagaggttcccgccggccgcggcctgccctcaggcagtggctcccagagctcagcggttccccgcactcttctgcgcccga

SEQ ID NO: 53665 - DNA, 122 bp, Homo sapiens
ctagcaggattctgggattccctggatccaaggaagggacctcagggccggttgtggggccggaactgtgtttcaggagggagtgtgcatgcaccctcatgtacaggactgtcgccacctcc

SEQ ID NO: 53666 - DNA, 122 bp, Homo sapiens
aggatcacaataagagaaggcgcgtgaggctccggcagcaaacaccagccaggcaggcagcggtaatcacagtgagcaaagttgaagactataaaagagccaggctaacgtgctgccgagca

SEQ ID NO: 53667 - DNA, 122 bp, Homo sapiens
gagcgggtatcgtcctcactgactctctgtgggtgcgggtggggtgtgtgacgggagctccgggcctggctgacagtgtctctcctctgcagcgggctgacgcacgaggcacacaggaagga

SEQ ID NO: 53668 - DNA, 122 bp, Homo sapiens
ggcaatatccctaacaatcccaaactaaataaagaggattgtgacatggaccctaaatgtcgccacgtttgcgtctccatcccggaatatgacgctggtagctcattagctccattcaagcc

SEQ ID NO: 53669 - DNA, 122 bp, Homo sapiens
ccttggaatgtagccggggagtgtctgtgacgtcaccgaggaactcctcctgcttgagcgcggcccgctgtctgctgtcgcctacagctgaccaatagagggcttgggtccggaagtgatgg

SEQ ID NO: 53670 - DNA, 122 bp, Homo sapiens
cggatggcttgtttggtgacagtccaaaggctgggggacagacagaaagctccctcctatcgggccccagacgggtggcgctgatggagaggaggctaggataacgcctccaggaccgaagc

SEQ ID NO: 53671 - DNA, 122 bp, Homo sapiens
ccaaaggcgaaacatcatagcccctaaccttaaggggttgcaggctggtgggagatagaacgctgaaaatataatattgcagctgaggtgagaaatgctgcagctgaggctttaacatggtc

SEQ ID NO: 53672 - DNA, 122 bp, Homo sapiens
gtccctctgccttctgcacaaagtgaactcttcctaagtctgcaactccaactttgtgatcgcttgctccaattagacaagccccagatcagggacttcccctccaaagagaggtggttccg

SEQ ID NO: 53673 - DNA, 122 bp, Homo sapiens
aggaagccgctttgcaggttgggcagagccagtgggaaagagcctgcaatgtgccggggccgctcatccatcacttccccgtccgtgggggcacccagcccgccctgcccagctgggaaaca

SEQ ID NO: 53674 - DNA, 122 bp, Homo sapiens
cccctgcagggcccaccctcctgagccgcccgggccaggcacgaaacacaggcgtcgccacgaggctgagcgcagtgtcgccagcagcatcacatgccacatgcccctagaagagagttcca

SEQ ID NO: 53675 - DNA, 122 bp, Homo sapiens
ttggcacctggcctctgcccacgtccagaacacagtgtcctcctctgtccccgccacacacgctctcacacgcacacactcaggcgtggaggcgcatacaccagcccccagtccttgcagcc

SEQ ID NO: 53676 - DNA, 122 bp, Homo sapiens
gttaaaacaaattcttccggtataattatttgtgcctctggaggtggtaaacgaggtggccgacagggccgggactgggagtgaaaaggcggggaccctggccgagccagtcccggggctcc

SEQ ID NO: 53677 - DNA, 122 bp, Homo sapiens
cacacgttgttgggggtcggggacgtggtaattcctcaaggccttcatgttctgggggtccggctgcgggctcagaggaggcaatgcatggctgccagccattgtcggtggagacgtggctc

SEQ ID NO: 53678 - DNA, 122 bp, Homo sapiens
gctgtaggagagtgggggctttgtctgttttgtccctgctctatcctcagaacctggagccgtgccgggaatgtagcaggagctcagctaacacgtggagtgaatggaccacctgcaacagc

SEQ ID NO: 53679 - DNA, 122 bp, Homo sapiens
tccacacgcgccagccagccggccgggagctgaagtcccgctctgggcccaggcagggggcgcccgcggtttagaaaccacatttcccatgagcctaagcacgcgcttccgtcactcggcgg

SEQ ID NO: 53680 - DNA, 122 bp, Homo sapiens
gccatcaggggtggctcatcggtcgtcgtggtggtctcacgtgtctcctgtgctttttgacgccagctgggacttcccggtcacggtgagtaggacgggcagcgggcatgactttccttgct

SEQ ID NO: 53681 - DNA, 122 bp, Homo sapiens
gggctccccacctaggttcccttggtcacagaccaggtgagcagtcaagaaggccttacccgctggtcttcccttcggcagtcttttctcagcagtgtccccgagggcttcttggtccctag

SEQ ID NO: 53682 - DNA, 122 bp, Homo sapiens
cgccgccgcccgcttggcgcagcgcgaggccgggccggaggaatgtggccctgaagtgggcggggcagggcgggggcggggccggagggcgagctgggggcggggccggagggcgagctggg

SEQ ID NO: 53683 - DNA, 122 bp, Homo sapiens
gattagtgacatctgtggttcccagacaaaccacacttacaggaatttgtctgtctagcccgaatattttgactttcagggagcatttttctgtgtccctgacataaagcctacctgggagt

SEQ ID NO: 53684 - DNA, 122 bp, Homo sapiens
gggcagggaatctggagttctactttcatcattaaggcttgagatacctcttaggctttgcgtacagataccaagtagtcagttgtatacatgaatctagtgctcaggacagaggtgcaggc

SEQ ID NO: 53685 - DNA, 122 bp, Homo sapiens
tccctgctgttccagccgctccctcatatccacccctgccccatctcctgactttggtcacgctagcatcttctgctgatcctgaaattgtaccagcggcaagatgtggcctggaaggggac

SEQ ID NO: 53686 - DNA, 122 bp, Homo sapiens
aatgagttttaaaatacacatattcgggctctagggctcttcagatttcgaaactacaaacggtggattgtggacttccagtaaaattgagcaaacagaaaatgcaaagtcaatcacggagc

SEQ ID NO: 53687 - DNA, 122 bp, Homo sapiens
cggctagagactcactgactcatgcgtgtgtggtaggaatcttccaggaagtccccgtcccgttcgccctctctgcctgggcggggacggcaactgcctctgtcactgcagactaatgggac

SEQ ID NO: 53688 - DNA, 122 bp, Homo sapiens
cggcggcccccacacgcgctctgcagcctgggggtaaccctcagcccacccagtgcccagcgagggggctctgatccacaggctccgcccagctccctgggtcctcttttcagtgggcctct

SEQ ID NO: 53689 - DNA, 122 bp, Homo sapiens
gtggagggcgtggctggcagaatccccccgccggggtgcggttgggtcacacgcggtgtgcgtggggggctcccaggacgcccggcacatactcaacactcagaacacgccgcgcgactcgg

SEQ ID NO: 53690 - DNA, 122 bp, Homo sapiens
ggaggcttttgacaaaatggaaggtgaattacgggtgtcccggtgacccggcacgggggccgaggcgggctgcctgctgccggccgggactcccccgctcccggtcccgccccgcccgggcc

SEQ ID NO: 53691 - DNA, 122 bp, Homo sapiens
aacacatgcatgccacacatgcaaataaacatgtgaacaatgaaacaaacaaccccaaaacgaatgctcacaaaatagggcaatgcaaacacaaagacaaacactgcatgatctgactcata

SEQ ID NO: 53692 - DNA, 122 bp, Homo sapiens
aaaacacgtgaccctagggaaacttttgaagttagcggtatagagagtaccaccaccagacgccaccatgcctgcggaaggaggaaaaacggacatggaaaggattggcctctttagtgaga

SEQ ID NO: 53693 - DNA, 122 bp, Homo sapiens
tgttcgtggctgcacggttgctcctggtttgtagcccagcagacaggacactcctcaggacgcagcctccagatgaatgtactccccatgcagttcttccagcagagctgtgggccagcagc

SEQ ID NO: 53694 - DNA, 122 bp, Homo sapiens
cgcggctgaggtcgcacgctccagcctcagtccaccctggaaccctgcatttggcagccacgagagcccatctcccgcccaatcaagaggccgtcgccctggagacggaggaccccagctgg

SEQ ID NO: 53695 - DNA, 122 bp, Homo sapiens
gagataaaaaggtatttcccaaaaagtgcaaggttttcatgcttgttggtgtagctgcagcgatggcttcataaacttccttttgtttttataccacagtccttatactggattcatttatc

SEQ ID NO: 53696 - DNA, 122 bp, Homo sapiens
gatgtagtgggaacgctccctcctcgagcattaaccgggttgaccccacccctctgtcctcgctgtcttcagtccaatcaagatcggaaagcaggatcaagagaaagatgatcagaccggaa

SEQ ID NO: 53697 - DNA, 122 bp, Homo sapiens
atcactggtttatttgtggacaagaagcaactgagaaattgagttcaatccactgaaagccggtgtgtttttaatatagcacacacgggaaataaatattattgtctgaggtgggggacggg

SEQ ID NO: 53698 - DNA, 122 bp, Homo sapiens
ctggggaagaagcagttcccgtgtctgcgacctttgtgaatcccggccatccgtctaggccgctgcaagtctcttgcaaaccaagactggacaaaaagctaaagcgaatgaggaaggggatt

SEQ ID NO: 53699 - DNA, 122 bp, Homo sapiens
tagaccctagtattataagattctcattgtacttgcactttgccttcaaagtactaatcacggttttgttagtgatttgtgtgatgatttgttgaatctttttttttttcccactagggtgt

SEQ ID NO: 53700 - DNA, 122 bp, Homo sapiens
ctatgtggacattaatcatcattctaatatcatcttacatttaaatattaaccccttcaacgaggtttcaaagcactgaaaataatttctgtcacttcaggcaaacaactatttttatagag

SEQ ID NO: 53701 - DNA, 122 bp, Homo sapiens
aataaactcaggatattaccgaccccatgcacacattctttccttgactctgcaatgttccgttaaaccagattgtgaatttttttcaggattaacaatttacatttatgattctattttct

SEQ ID NO: 53702 - DNA, 122 bp, Homo sapiens
cagaaaagtcccgatcttcaggaaccccggtggtcctgggaggagaactgggaaagctctcggggtctcagcagagagaagaagccacgctaaagagtctccacaagtaccccgggatttga

SEQ ID NO: 53703 - DNA, 122 bp, Homo sapiens
actaatgaggctttcatctactgccttgagtactgcaaacaaatgtggctgtaagttctacggaaaaagaagtgaaagtgctttattgaaaaccagtctctgtacctgtttggaatttcata

SEQ ID NO: 53704 - DNA, 122 bp, Homo sapiens
tcccaggacctgccccctccccggccgcgctcctttctccccttagtcctctcattgacccgctatcccggtcctctgtaggaagtggagttcttgtccacgtccattgctcagctcaaagt

SEQ ID NO: 53705 - DNA, 122 bp, Homo sapiens
gggccgcgtagccgcgcgcgcgggcgcgcgcgcgcagggcatgctccggctccgcacacacgtgtgtgcccccagcccgccgggtgcctctggcacttatgccttggggacagagctcgcgg

SEQ ID NO: 53706 - DNA, 122 bp, Homo sapiens
gcccttccggctgccggctggggacgcgggcgtggtgcggcaggcctgccttgattgtgtcgatgggagatgattttcaaggtgaaatttctagttcactagagtcactttcgttcaaggcg

SEQ ID NO: 53707 - DNA, 122 bp, Homo sapiens
gcccctgtaagaggtctccccccaagggtggacctcggctgcccccgctaggccccgccccgtagtcctgtgaacttctgggcaccccacagccctgggctaaaccctgctaagcactccat

SEQ ID NO: 53708 - DNA, 122 bp, Homo sapiens
aatggcgaggctctccccattcacagggtgtggggaggaggacttgagctgcggatgtgacgcttctgacacgttgcaggcacacggcacgtgcttgttcctcgccatgtcccctcacacct

SEQ ID NO: 53709 - DNA, 122 bp, Homo sapiens
ttccagggccctgtggcggctgcgcaggctcccttcccctcccttattgatctccacgcccggggcagaaataggatctttgagaagtctcaaatgggatctttgagaagtcagatcccatt

SEQ ID NO: 53710 - DNA, 122 bp, Homo sapiens
atctactttcaagacagctgagttttaaaacttgtagcaggaggccagagcagtggctcacgcctgtaatcccagtgggaggccgaggcaggcggatcacctgaggtcaggagttcaagacc

SEQ ID NO: 53711 - DNA, 122 bp, Homo sapiens
gatagaatagaacccaggatcagatcctcttatataagacaacttggtcacaggaggtatcgtaaaaactggggttggtggagaagagagattatttagcaaacgttattggggagattggc

SEQ ID NO: 53712 - DNA, 122 bp, Homo sapiens
ttcagatacatgtcaccatgcgtggggcagcctatgcccaacttctctccctcctcctcacgctcttggtcagcccgcatatgctcgtgtgtgggtgccgctgtccttctcctggctgacca

SEQ ID NO: 53713 - DNA, 122 bp, Homo sapiens
ttcagattccagcagcaacaaatgactggagcacaaaacgccagccacagttggtgctaacgcagctggctatcagctccacaggatgaagcactgtccaagggtctgatcagtgaagcatc

SEQ ID NO: 53714 - DNA, 122 bp, Homo sapiens
gtgaggactgtcggccacagcaggggggcacaggggagcacaggccatggtgaggactgtcggccacagcaggggggtacaggggagcacaggccatggagaggaccgtcggacacagcagg

SEQ ID NO: 53715 - DNA, 122 bp, Homo sapiens
tgtgcctgcgaacaagcatgttcgcacctgcgagggagtccgtgtgtttgcgtgtgagcccgctccggggccgatggagggagggtgtcgggaaagctgtgagccagcgaagtggacgggaa

SEQ ID NO: 53716 - DNA, 122 bp, Homo sapiens
agtccaacgggtgcagagtgaagaaatggcacagagagagatggaaagtccgaattgccccggctcagccccataaagataaaggagccaagtgagatcaagcgaagagggggacacaaaaa

SEQ ID NO: 53717 - DNA, 122 bp, Homo sapiens
cgagtgagcctgggtggctgggggctttcacctctttgactggagagctgtctacggagtcgctctgatccacataagcgatctgattattgttatcaaatggaccagagagcgggggcagg

SEQ ID NO: 53718 - DNA, 122 bp, Homo sapiens
catcggcctgttccgacagagtggacatcttcctgttccacctgacacagctgtgtctggcgtagaaggagtcctttcccattgcatggggaagaagacatctgtttcttcccatttatttc

SEQ ID NO: 53719 - DNA, 122 bp, Homo sapiens
ccacttctggtccaggccaggcgaggtggaggacaggagcagggcctaccaaaccccgcacgccaatgcagggggttagcatgtgtgccaggtggcacaaggcccctcttgagaagacagcc

SEQ ID NO: 53720 - DNA, 122 bp, Homo sapiens
atggcggcttcagccgccatcatcgctggttgcgcatccacagcgagacccagtcgctatcgctctctgagggcatttatacacagcacctgtcccaggcctgtggtctggcccaggagccc

SEQ ID NO: 53721 - DNA, 122 bp, Homo sapiens
gtgaggacagaggtcagtgtctgagtcatcttgtgcctcactgggcttgggcagaatagacgcttggtcaagcatttgcacactggtcgatggatacactagaaagagcaggagcgcgagag

SEQ ID NO: 53722 - DNA, 122 bp, Homo sapiens
cgctcagcgccgccctcaccccgcccgccgcgccggccccgccgcacgtagcggtgacgccggccccttggtcagcctgccaggggaacagacagacccctcgctggggactaggagacaca

SEQ ID NO: 53723 - DNA, 122 bp, Homo sapiens
gacccgcgccccgatcttctgctttcttctgcacagggagttgtgaggttgctacacccccgggtctggattccgcacccgcagcggcccccgcacggtgaccacataccagggactcgacc

SEQ ID NO: 53724 - DNA, 122 bp, Homo sapiens
gggtctcagggacaatatccaggctctaggtcacctttgactttacctgccttatctgaccggctcatagcaggctggggtaagttcatgttgccacggattctaggagggatctctgaagt

SEQ ID NO: 53725 - DNA, 122 bp, Homo sapiens
tggcccggagggcacccgggcagagacggaagaaattgcacgtgagcgtttgtgtgcatacgtgtgcctgtccatgtgtgcacacacttgtgcttgtgagtctctgtgtgcccatgcatatg

SEQ ID NO: 53726 - DNA, 122 bp, Homo sapiens
agtgcacctggcttgagctcttcactggcccaggcatccatcctctctgccccaaccccacgagtcacagcaggggacggtctgtggcctgtgcacctgctgttccttccccctggagtgcc

SEQ ID NO: 53727 - DNA, 122 bp, Homo sapiens
tcttgaactggactcaagcgagcagcccacctcagccttccaaagtgctgggatcacaagcgtgagccaccatgtccagccaaggatatattttagtagtaatgaacttatggtgacagaat

SEQ ID NO: 53728 - DNA, 122 bp, Homo sapiens
ccccccgagccgcaggctccaccgggggggtcttcccactgcccctggctcagctcaggacggccactgcgtctgaagaccaccagtgtccccgctgccgggtcatggcactggtactccca

SEQ ID NO: 53729 - DNA, 122 bp, Homo sapiens
cttattgagattgatgattgcacagtgtagcttgaaaggtccaaatttaatccgtttcaacgggaggaacaaaattcaaaactgttttcaaagtatttcgagaatgtgtcccttatctggaa

SEQ ID NO: 53730 - DNA, 122 bp, Homo sapiens
gggtcgtggggtcctagcgccaaactgataatggggcggtgaaggtgggcgggactaagtcgccttagtccgtgacgtgcggtgtagttggggaaacgcaccgtggttccccgtcgggtcag

SEQ ID NO: 53731 - DNA, 122 bp, Homo sapiens
cctggctgccgggagccgaaagcttcgcgcctgggttgtgagctccttgaaacagggaatcgtgtcttactcatctttgtatctccagtgtctagcagttcctgatacatagttttagctga

SEQ ID NO: 53732 - DNA, 122 bp, Homo sapiens
gctctaaaaagtacaggaagtcctgcttctctctgacaggtggggaatttaaaaggagcgcgtgcgcagaagaggcaaaattcgggccttaacgagagggtgcccccttcagcgcatgcgca

SEQ ID NO: 53733 - DNA, 122 bp, Homo sapiens
gcacaggtggagagatggtgcgggttctgtggattcggatccttacaacttcctcttccccgccccggtagatgggagctgctctccgcgggctgagcctgtcagcatcctcgacgcaccct

SEQ ID NO: 53734 - DNA, 122 bp, Homo sapiens
attagaatgaaaactcataaaggcagtgattttgtctgttttgctccgtgctctatcccccgggatcttgaacagttcctggcccacggcaagtgctaaaaatatactcctgaggctgggtg

SEQ ID NO: 53735 - DNA, 122 bp, Homo sapiens
tccccaaagcctgcagctgtgatccccaaggcgccgtgcgggatgactgtgagcagatgacggggctgtgctcgtgtaagcccggggtggctggacccaagtgtgggcagtgtccagacggc

SEQ ID NO: 53736 - DNA, 122 bp, Homo sapiens
gatgctgagtaggatattcccagcagagggaacagccccatcaaaggcacagttgcctgacggagccaggctgagaaaggccttcaatccaggagcaaagaggccaagtggaagcaactgca

SEQ ID NO: 53737 - DNA, 122 bp, Homo sapiens
ggaaggaagccgactcgtggggagttagctgagctgccggaggaaactgacaaaatcaaacgcaccctttggcctgcacaaggcgatattgttggttctccctgaagcacatcctggccagg

SEQ ID NO: 53738 - DNA, 122 bp, Homo sapiens
gaagggagggggcttcggtcgttgggggccagacgttgggcgctggacgttgaggttgggcgttgagcgggtacaaggggcctggaagtggagagaggagacttggaaccttgctgcgaggg

SEQ ID NO: 53739 - DNA, 122 bp, Homo sapiens
tagatttgttcgtagactcgtcagactctcacagccctctacacttgacggaacagaccccgaagaagcctcctcctgagataaaccctgtagatggaagagagaatgccttgactgttgtc

SEQ ID NO: 53740 - DNA, 122 bp, Homo sapiens
ccctgaccacagcgcatctcacgccggcgagcaggtccaccctgaccatggcacatctcacgccggtgagcaggtccaccctgacaaaggaaagggagagcccaggagtgtccacttccagc

SEQ ID NO: 53741 - DNA, 122 bp, Homo sapiens
gccatggcgctgagggagctcaaagtgtgtctgctcggggtgagtggcggcgggtccggccgggagggccacgggaggctgggctggcggggaccccggatcccccctgtcccctcatccct

SEQ ID NO: 53742 - DNA, 122 bp, Homo sapiens
cggagctcggagggccccgcccccggtccggcgtgcgctgccaactccgaccccgcccggcggggctccctcccagcggaggctgctcccgtcaccatgagtccctccacgccctccctgcc

SEQ ID NO: 53743 - DNA, 122 bp, Homo sapiens
tgagccagtctccggcaggggcccggcctggctctgcctcccctcggcgtgagttgaggccggtcttggtctacccctcctagtgaggcctgcccaggccaccgcccatcccttcttcatcg

SEQ ID NO: 53744 - DNA, 122 bp, Homo sapiens
gtcacataaacagcagcaggagtaggcctcctgcttttcaaaagcagagtactgcagggtcgcgaaatgcaagacactcagatgtttgaaaatctcccgagttgagaatggctactgtaaaa

SEQ ID NO: 53745 - DNA, 122 bp, Homo sapiens
tccagcgcctcctgcagccgctgcgccagatccaccttgaggccgcgcgagtccaggccccgccgctgcagctccgaccgcagctcggtcactttcagccgcttcacctccatcgccgccgc

SEQ ID NO: 53746 - DNA, 122 bp, Homo sapiens
tcccttctctcagcctttcgcggtcgggtgatgggggggctccctgacgggcttggatgacgagcttcccagccccgcgacccttgtgtgcgtgggctcgggttctggcgggagcccctggg

SEQ ID NO: 53747 - DNA, 122 bp, Homo sapiens
ccctctagcctacaagagattaaaaggcctaaatctatcaacacctcatatccttgtttacgtaagtctccaccagaaatactgttaactctcatgcccctactactctacacatccctctc

SEQ ID NO: 53748 - DNA, 122 bp, Homo sapiens
gggagaggggactgtgcccgatgctcaggcgccgcgcccccatcctccaatcccccagaacgcaccacaggccaagcccctcctgcgccagccaagactccgcgccagcccacaccagcccc

SEQ ID NO: 53749 - DNA, 122 bp, Homo sapiens
ccgcgctcgcctggcgggccggactgcggatcccgcagacgctcgtccctctctgggggacggaggggatgtgtgcccctaccacaagaaaaataataaattacacaataaataatcaaaat

SEQ ID NO: 53750 - DNA, 122 bp, Homo sapiens
gcgacggccacggttctggtgtcgctggtggagagtggccaggctccaaaggcgtcatcacgggcgtcggtgggcgccgcgggcccagaggcggcgctggtggatgtcaacgtgtacctgat

SEQ ID NO: 53751 - DNA, 122 bp, Homo sapiens
tctgagcccagtacagcaccagtagaaacttccaggagttgcaaactagtttatgacacacgattttggaattttaatcccccaaaattgatatactggttgctcaggtgcctatatgtaat

SEQ ID NO: 53752 - DNA, 122 bp, Homo sapiens
ccctagggatgtgcggccccggagctgtgccgccgcctcgccagaagctggttgggcagccgcgttcttggatgacttctccttagtactgttcattgcctggtcccatagaactttctgtc

SEQ ID NO: 53753 - DNA, 122 bp, Homo sapiens
cgggcttctcgcggtccccgccgcagaggtcacacccggcgggtaacggcgtggatacaccgaagggtgactttggacaccttccccacaccacagactaacgcttctgcccctactccgcc

SEQ ID NO: 53754 - DNA, 122 bp, Homo sapiens
aggccccagttttctcatcagtagaataagaaggatatgatgtactcaagcctcccagctcggcattctgcaatttgtcatgtcctgagagctggactcatctggctttctgattcactcct

SEQ ID NO: 53755 - DNA, 122 bp, Homo sapiens
taccatcagaagttcctaggcagcaagtgcagcttcggggatgaccggcacctcaccaaccgagtcctgagccttggctaccgaactaagtataccgcgcgctccaagtgcctcacagagac

SEQ ID NO: 53756 - DNA, 122 bp, Homo sapiens
gttcagttttttgatgacatactaaaaacaaaccatgtatttttacaatgtgcaaataaacgtaagatttgtggcctcagagttatctaagggctctcaagaataccctcaaaaccaacctt

SEQ ID NO: 53757 - DNA, 122 bp, Homo sapiens
ttcggaagaggacgtcaacgggaaggaattccccctctgggtgcgggctccgagagggggcgacttgcaggaggctccccccgggggcggaggcgaaggtaattaagcggcggggagtggcg

SEQ ID NO: 53758 - DNA, 122 bp, Homo sapiens
acattattttttgttcaacagagatgtgaaatcatttcataaatactttttgagtgtccacgatatgccatgtaggatgctgtttctttatggaactgttattttgtcatttaatcattaag

SEQ ID NO: 53759 - DNA, 122 bp, Homo sapiens
acttcgagaaaaaagccaaggctgggcggtcgcagtcacgctgcatccggcgacagggggcggtgtgtcctgcgaaaagtcaaaacgccggaagctgcccttagtgtttttcagcctcttgg

SEQ ID NO: 53760 - DNA, 122 bp, Homo sapiens
gtgcaagacatggagcctccttggctcctctcccccaatcatttgacaacaaaattgccccgaacatttccaaattgctccttagggagggtgccattctggttggggaaccactgtggtgg

SEQ ID NO: 53761 - DNA, 122 bp, Homo sapiens
ccaaattcggaagcgggggatgacctgtgtgattgatcgctagttcttctagggccattgcgtggttcaattagaaatattctggatttatacatctttgaagtttaatctgaaggtttctt

SEQ ID NO: 53762 - DNA, 122 bp, Homo sapiens
cgtgttctgcccgcggattggccggaagcaggcgccgcttcgaggcccgcggaaaacgcgcgccgagacccgctcctgcagtattagttcttgcagctggtggtggcggctgaggcggcatg

SEQ ID NO: 53763 - DNA, 122 bp, Homo sapiens
acctcatgatctgcccgcctcggcctcccagagtgctgggattacaggcgtgagccaccgcgcccagccggctctaagattcttaatgttagagaaccgaatgtgttaggaaacagttggaa

SEQ ID NO: 53764 - DNA, 122 bp, Homo sapiens
gcagggagcacacggccatgaccactgtcatgagggccagcaggatcaggtggtccacctcgtcctctccggtgcgcggccgtggacccagagagccctggtggcgcttctgctggcggtac

SEQ ID NO: 53765 - DNA, 122 bp, Homo sapiens
tcatggagcaggcaaaaccagacgtctgggaagaccgtgaacttaaggagtctgattctccgacacaggctggtggaccacctaccccactgagaccacctctcagggtgcctgccctggtt

SEQ ID NO: 53766 - DNA, 122 bp, Homo sapiens
agaatagctacaggctggggggcattgcggtctgagccttccctcggcgcttcttcccgccgcctcagtacatacaactggaggcaagaatcttgcacggtaattgggacagaaagatccct

SEQ ID NO: 53767 - DNA, 122 bp, Homo sapiens
caatgatcagccccctaaacatgtcctttgggagcttaacctaatgattccatccacattcgttgtgactattccatttgcttaagtcccaggagactacagcaaacgagtgtatcaaggag

SEQ ID NO: 53768 - DNA, 122 bp, Homo sapiens
gtcttatttcctgaagttgtcagggccctaactctagctctctagccacaccctaagtgacgaactctggtcctgagttccccatcaccacccagactgatgtcagatggggccaggttctt

SEQ ID NO: 53769 - DNA, 122 bp, Homo sapiens
aaatgaaataaaatagaatatacactggttcttagtatagtcacagaattgtgcaatcatcggcaccatctaatttgagaacattttctatatatatgtagagaaaggggtcttgctatgtt

SEQ ID NO: 53770 - DNA, 122 bp, Homo sapiens
gtccgggggccgcagcgagtgccactgggcaatgggccgccgcgggttggccagcatgtccgcccagtgccgcaggccagccccgccggcggccgcccccacggccaccctcccgatggcct

SEQ ID NO: 53771 - DNA, 122 bp, Homo sapiens
aggatgtggatgagtgtgcccaggagccgccgccctgtgggcccggccgctgtgacaacacggcaggctcctttcactgtgcctgccctgctggcttccgctcccgagggcccggggccccc

SEQ ID NO: 53772 - DNA, 122 bp, Homo sapiens
tgccgccaggagccctgtaacatcagccatcgtcaaccccaccgtgttcttcaacatcaccgttgacggcaagcctttagacctgcgtctccttcaagctgtttgcagacaaggttccaaag

SEQ ID NO: 53773 - DNA, 122 bp, Homo sapiens
atctaggggagggtgataaagcaatgccccttgaaagcagaacgatccagctcaggacagcgggttggagcgccagcagggactttctggacatttgagtctgggtcactttgttgttcagg

SEQ ID NO: 53774 - DNA, 122 bp, Homo sapiens
tgcacttgctcctgtgggcgtgtctcccggcagtgctgatgcaggtcagacagcccttcccggagttctcagggttacctctcagggttactggcagcgctgtccttaacatccacccccca

SEQ ID NO: 53775 - DNA, 122 bp, Homo sapiens
agcctgcgcgcagcggagcggttggcgttgccggagcggttgccggagccctgcagccgccgtagcctgggccagccccggccctaagtaccctcccggccccgccccacgtgaccaccgcg

SEQ ID NO: 53776 - DNA, 122 bp, Homo sapiens
cgggaggacccgagctacggtggccgcggggcggcggtggcgattggacttggtgggtcccgggccaggggcgggcgccgccatgggtaacctgttcggccgcaagaagcagagccgcgtca

SEQ ID NO: 53777 - DNA, 122 bp, Homo sapiens
ggtatcttcggaagacacgggcagagctggttttgacagtgatgcagttgctggcaaatccgtttgcatccaacattgtcttgaaatttgggtcacctcttcacaaatcctgtttggaaaag

SEQ ID NO: 53778 - DNA, 122 bp, Homo sapiens
taagtatagagtgggctctgggtttcatataatggatatttgtgaattatgataagacaacgttctggttttgggggataagagagtattttgaacatgtagtcagtgtgctctctttctca

SEQ ID NO: 53779 - DNA, 122 bp, Homo sapiens
ctttacagaaaaagtttgccaaaccctgctcttggtggtggggtcactgagagaaaacgacgtggagggtagccatgcagaatgtgatggacatgtataagaatgaaataaacctttattgt

SEQ ID NO: 53780 - DNA, 122 bp, Homo sapiens
cacagacgacgcttttgcgtctgcgcagcgcgccgccttgtgggtaatctcagggtgagacgaggctagcgcgaggtacggctagagcgtcatttccggctcgaatgcccggcagccgtggc

SEQ ID NO: 53781 - DNA, 122 bp, Homo sapiens
ggaaatccaggcgatcctggccaaggactcaggcacaggacgctgggatggcctgcccggcggaccggccttaccctttcgggccacggcgcgtgcgtaccccaaggctcgcgctgggcgca

SEQ ID NO: 53782 - DNA, 122 bp, Homo sapiens
tatcggcagaagccttcgccggtccgtcactgggtgcagcagacaccccacctgcccctccgtattctggcccctcatcatggatacccttggcagggaggaacccggggaagttgccatcc

SEQ ID NO: 53783 - DNA, 122 bp, Homo sapiens
ccatgaacgtgcggggagcggcccccggcgtccgcgcgtccccgcgtccctggcaattcccgacttcccaacggcttcccgctggcagccccgaagccgcaccatgttccgcctctggttgc

SEQ ID NO: 53784 - DNA, 122 bp, Homo sapiens
tggtgacgttcctggtgctgcttattttctcctacaacgtcgtcttcctgttcgtggggacggcaagcctgggcctgtttctcagcagcaccttccccagcatgctggcctacacggaggac

SEQ ID NO: 53785 - DNA, 122 bp, Homo sapiens
gggtctagagaggtattttgagggatgtccattgaacatattctttttggagcctgcctccgtcctgctgaattcctgccttgtgatttgtcgtgtcagaacacttagaaataatgctctac

SEQ ID NO: 53786 - DNA, 122 bp, Homo sapiens
ctgccttcttccgtgcaggatttcagacagcttttagaaagaatgcatacattataacaacggaaaaatacaaacaatggtaaagaatccttgccaagcaaaatataattatgaatagacag

SEQ ID NO: 53787 - DNA, 122 bp, Homo sapiens
aggccctgaagggtttctgtagcctcccagccacagcccagaaaccataagctgtttccacgtgaaacatccaaacacggtctcccaagcctaagtctgctaccatcaaggcttctgtataa

SEQ ID NO: 53788 - DNA, 122 bp, Homo sapiens
caaagtgatgtcacctgatgtcaatgtgactttaggtgtcttgttaagatttctgcaaaccggatgaaaagctggaattctacgtgtaattcaggcaactgtgcgtgataatacactgacct

SEQ ID NO: 53789 - DNA, 122 bp, Homo sapiens
gagggtgggagagggctcgggaacaccttcccccgggtgtaacgggagtgaaaggcggggcgaccgaggaggggccgccttccctggccggccggggccgggtgccagggcgcgccagagcc

SEQ ID NO: 53790 - DNA, 122 bp, Homo sapiens
tggggtgagaaccaaagaatcggaaaaacagacattccagctcctccaagttcttccaatcgtcagaactgtggaactagcccaccaggctttctccagtcacgtgagccgggagccaccag

SEQ ID NO: 53791 - DNA, 122 bp, Homo sapiens
cctagacaagagacgttccacaaagagcaaggccgctggcgctctagaagacctcacagccgtgaagcgtcccggacagcagaggaaccatgatgcccctcgcgtggccgccctgggcgtgt

SEQ ID NO: 53792 - DNA, 122 bp, Homo sapiens
ttatcaatccttcagggccttaatcacctttaaaaataaactctgagaacacagtcacctcgaaatcacctttattctcataggcgttctgaaatcaagattccagaggctacaggtatctg

SEQ ID NO: 53793 - DNA, 122 bp, Homo sapiens
agtcaaaagtacttaccagagcatgcttaggatgcccaaaggtactgtcagttcatctcccggaggtggggttagtttagtcaccaccaaaataaaactgtggtcaaaccatgaattttgga

SEQ ID NO: 53794 - DNA, 122 bp, Homo sapiens
agggggaagcctcctcctggacgaggactcggaagtcttcaagatgctgcaggaaaatcgcgagggacgggcggccccccgacagtccagctcctttcggctcttgcaggaagccctggagg

SEQ ID NO: 53795 - DNA, 122 bp, Homo sapiens
cagcatggaccagcagattcagaacggctcctcgtccaccagtccctataacacagaccacgcgcagaacagcgtcacggcgccctcgccctacgcacagcccagctccaccttcgatgctc

SEQ ID NO: 53796 - DNA, 122 bp, Homo sapiens
actgccacagtaatagcagaggaaaaccacacaaattcactattttacagttctggaggtcggaagtttgaaatgggtcatactaggctgagatcatggtgttggccaccttgaaggctgtg

SEQ ID NO: 53797 - DNA, 122 bp, Homo sapiens
cggggccgaatcctgggtctcagcttcagcttgtagatggacgggaccctcttgggcttccggagagttctcctgcccttgctcagacatgccttggctttgtcagagttggggtccaaggg

SEQ ID NO: 53798 - DNA, 122 bp, Homo sapiens
caaatatatcagtttgatgattttcgggcgcggtcttgtggatgcgagtcctctcagggtcgttcgtgaggccccagggcgtgggtgcgccccccgccccgcggccttggtgcggcctcccc

SEQ ID NO: 53799 - DNA, 122 bp, Homo sapiens
cagaggctgcaatctcggctctccgggaggccaaggcaggtggctgggaggtggttgcagcgagccaagatcacgccactgcactccagcctgggcaccattgagcactgagtgaacgagac

SEQ ID NO: 53800 - DNA, 122 bp, Homo sapiens
gttaatccacccgcctcagcctgccaaagtgcggggatcacaggtgtgagccaccgcacccggccgcatcagcatttttgaaacacctgcttatgactttggaggaaccagatgggatgtat

SEQ ID NO: 53801 - DNA, 122 bp, Homo sapiens
tggttaaacgtcaacctggatgttgaagcactgatctcatggacttttcttggttagaatcgacccataagcttaagatcaaaagccaaagctcccaatgggaagttgtgctctatttggtg

SEQ ID NO: 53802 - DNA, 122 bp, Homo sapiens
cgcccacgtggctgtacagcctgacagcctggaccctctcacatcccagaccaaaaatcgcgtgagaccattatcctggcagaaaattagtgacaggttttccaagagaatgcagttttcaa

SEQ ID NO: 53803 - DNA, 122 bp, Homo sapiens
cgctgcctgggagagcgcacgagttaccccaggcgaggtgatccacaggaagtttggtgacgtcggatggcccaggccccagagtgctgtgtgtgctgggggtggagggtggtccccgacag

SEQ ID NO: 53804 - DNA, 122 bp, Homo sapiens
aaccggaaggctcctggcggtggactgcgccctcacagccctacgctgagagagaatcggcgtgagtctccgccctcagagcctacgacaactctccagactccgccggagcaggcgcaggg

SEQ ID NO: 53805 - DNA, 122 bp, Homo sapiens
aaactccccctgggcccctcctgttagtgttattattaccaaaaacatgtatagtgcctacgtgggccaacagtgtggaaccacctgggaacttgttagatatacgctctcagaatctgcat

SEQ ID NO: 53806 - DNA, 122 bp, Homo sapiens
aatacatacacacatggaaaaagatctactcagatacatatcaaatggtagtaaaatttccgagtagtagaattatgtgcttcgtaatttgctggagtttttttctgcttatatgtacattt

SEQ ID NO: 53807 - DNA, 122 bp, Homo sapiens
aacattgagcaattctcctagaagagtcacaaagaatggcagcgtgggcgcccacagccccgggtctggcagtggttgaggctggtggggggttagcgtggagcattctgaagacgggatag

SEQ ID NO: 53808 - DNA, 122 bp, Homo sapiens
tcactgcacatgcagcccactagatgatctttttttcatgtctgcctctccccttgactacggttccttgagggtaggtaggcttggtatccggtgctcacaaaatgcctgttaagtgcatg

SEQ ID NO: 53809 - DNA, 122 bp, Homo sapiens
caaaagatccgttaggaacgcctccgactgagctagggggatctaagaagaaagacagggcgaggaaacttgtcttaatgttaatgttacttcaaagaccttccggcgagtccacatggaaa

SEQ ID NO: 53810 - DNA, 122 bp, Homo sapiens
ctttagggcaacctaattgcatttctttgtttacaagcacttaacttcatccctctcaggcgcacaccagcactgtctatcactaatactggcagttctagggtgaggtggacagttgctct

SEQ ID NO: 53811 - DNA, 122 bp, Homo sapiens
atatttgatatggttgcagtaggatgactgaccttaatctgtccttcctctctttatcttcgagttcttacctaatagtgccacttggctttaactgtcgtcagctgttaggtgcaaaagtt

SEQ ID NO: 53812 - DNA, 122 bp, Homo sapiens
cttgctaggtcctgggacctcctcctccagggagaaccccagattgtctaactgcgggaacgctccttaggaatgcctgctctcgccactgttattcaaccttgtcctggaggttccagcca

SEQ ID NO: 53813 - DNA, 122 bp, Homo sapiens
agtaggcagatcctatctggcgcatgcgaacgcttctgtgccagttccttgaagagcaggcgcagactcaaggctgttgcttccgcccttactccccgccgctcgtccctgggcggggcgaa

SEQ ID NO: 53814 - DNA, 122 bp, Homo sapiens
gctggccctcttcggcgtggtgctcggcctgatggagactgtgtgcagccccttcacggccgccagacgtctgcgggaccaggaggcagccgtggcggagctgcaggccgccctggagcgac

SEQ ID NO: 53815 - DNA, 122 bp, Homo sapiens
cactgacatgcaactagcgattagcaggatgagcatccaaggacaccgtggtaaggacagcgtctgctaacgtttttattagttcaccgtcagatttcgtacaggtccgtatgactagaaag

SEQ ID NO: 53816 - DNA, 122 bp, Homo sapiens
ctctgggcaacatggcaaaaccttgtctttactaaaaatattaacataaaaattagcagccgggtgcggtggctcactcctgtaatcctagcactttgggaggccaaggcaggaggattgcc

SEQ ID NO: 53817 - DNA, 122 bp, Homo sapiens
agttattcaacggacaatatacgtctacttgtacttttataagtaaatatttatatataccggaggtcaatttctgtttctgtggtaactgccctacaggtaagcttagcagcttttaatga

SEQ ID NO: 53818 - DNA, 122 bp, Homo sapiens
ttccaaaatacaaacaagacaccgtccccagaaagagaggttacataccagacgcacgcacgctccttgcaacccgcacacggaaaacttaagtgaccgcagttctggccgcgctcgccacc

SEQ ID NO: 53819 - DNA, 122 bp, Homo sapiens
tgggagagctgctcatttggagctggtggtgggcagaatgaactggggctagagatgagccggacccagctatctggaaggttccaggatcttagtggtatctgcacatatgtaaacattct

SEQ ID NO: 53820 - DNA, 122 bp, Homo sapiens
aagctgggcgggcagagcagtgtactagtgtaccagctctgttctacttttggggaactgcggtttccaccctataatccttctttaacacctgagattgattttaccctatggcttcagct

SEQ ID NO: 53821 - DNA, 122 bp, Homo sapiens
gacagtgtattctccccatagcatcctgtattttgtaactccaaacataggtgtataattcgtgcttgaactataaactccatgggggtaggatgctatctgtcctcttcaagactgtatcc

SEQ ID NO: 53822 - DNA, 122 bp, Homo sapiens
gcagcagctccggcctggcgggttctgacggaattctgcagcggctccagccagggtcgtcggggcggggtgggtgctcaggggcggcctttgtgttcggattagaagctggtgattgtcac

SEQ ID NO: 53823 - DNA, 122 bp, Homo sapiens
ttatccgtggaaaatttgtcttcctcaaaaatggtttctgatgccaaaaaggttgggaaccgctggtttaatggattcagagtttctgtttgggatgacaaaaaaaattctaaaatggatag

SEQ ID NO: 53824 - DNA, 122 bp, Homo sapiens
gaactgccctgaaatactgtggtattaattaactcgtttaacactaacaatctcatgaggcgggtgctgttactattcccgtaatgtagacgaggaaaccgaggcgtgtgctggagcaggat

SEQ ID NO: 53825 - DNA, 122 bp, Homo sapiens
atatcttcagaagaaactgcacatacataagaaatgaaagcccgctcagcagccttcttccggatccaggagcgagacctctgcctttcgcggggcctgtagttcacactccttccaggtct

SEQ ID NO: 53826 - DNA, 122 bp, Homo sapiens
ggtcgtttccgcagtaacctcttatcagagcgggcagctgtgagtggcgctcacatccgccgctgccctgtcgaatgggggaaagagttcttgtgttctgaggagggtttggctatggtcct

SEQ ID NO: 53827 - DNA, 122 bp, Homo sapiens
agcccagcccccattccatacccacccccaccccgggccctcggcctctcggaccagccccgctttgtttcccacgtctcggcgccccgccccgccccgtctggggtctccgccgccctttg

SEQ ID NO: 53828 - DNA, 122 bp, Homo sapiens
ccctttctgagcgcatttccctctctgagcctcagtttgcccagtctgtgaagtgggtatcggcctacctcaggatggcaagatgttgaatgcctgggccagggttggtgctcagttatttc

SEQ ID NO: 53829 - DNA, 122 bp, Homo sapiens
ctttacctacataatgaacttagtcgtagagtgtttcatctttttagtgcgtagaaaattcgagttgccatttgagtttggaaacttggcacgtttgtttacttagcacttgtttgcatagc

SEQ ID NO: 53830 - DNA, 122 bp, Homo sapiens
ataaatgctcatattttagttctcttttaaacttgctattaactgtgaggacaaataatacgcatcactctctgccctaaaaaattacctaacacagtggggagcatagattaggttctcaa

SEQ ID NO: 53831 - DNA, 122 bp, Homo sapiens
aaggtgattccagaacaatgccgaatcctagaacgcggctctcctccggggaggtgtgctcggctgcctggagagcagatagctcagaggccaccaccgactttttctccatctctgaccca

SEQ ID NO: 53832 - DNA, 122 bp, Homo sapiens
gtttcactccatatctgggtctctcagaggcctcgggaggtcttccgttctctctgtcgccgtgtccacggaaggagcctccccaaccctctgtggctccgcgcctcttgggccggagcatc

SEQ ID NO: 53833 - DNA, 122 bp, Homo sapiens
agaataaggcagaactcccacctgctgagctggtgcagagggacgtggacgcctctccctcgcctctgtcagttcaggaccgcaaggggttcggctataagaaggggaagcccgtgggtcta

SEQ ID NO: 53834 - DNA, 122 bp, Homo sapiens
gccttagcggcaatggttagagcttttcagtgcatcccacctccctgtcgcccccatgctcggcttcctcacattcaggagcctgacttggatcagacttggggctgcacagtggagcaggt

SEQ ID NO: 53835 - DNA, 122 bp, Homo sapiens
acctccctgaaagatctcacacacctggaagactgggttactcacctgactgatgaagtccgacgaggcctcatgttcatcccaagtctggttcctccccctggctttccccattccgatga

SEQ ID NO: 53836 - DNA, 122 bp, Homo sapiens
tttttcagcttccaacccttgcagctttccaaaaataaatcaaaccagccatcagggcaccgaaataatactactgctaataagcagcttcgcctagacttagataaacaacacttctgagg

SEQ ID NO: 53837 - DNA, 122 bp, Homo sapiens
agcctcgggtttccagtctccgcccagagcctcttgagactcgcgtatctcatctccgcccggagcctcctgagactggagtgtcccatctccacccagagcttcccaagcctcgggtatcc

SEQ ID NO: 53838 - DNA, 122 bp, Homo sapiens
cccatccggtagccaagcccagggaagaagacgccaccgctgggcagagctcgcctatgccggtgagtaccgtggtctccactacgccccacacccagcctccccaggacaccagcctctcc

SEQ ID NO: 53839 - DNA, 122 bp, Homo sapiens
ctctctgcctctagcctagctgtgctccccgctaaggtaaagaggtggggtagccttgctcggccaatgagctgccgtcgctctcttaaaggcacccagcgtctggaaggaaaactagcctg

SEQ ID NO: 53840 - DNA, 122 bp, Homo sapiens
cattatcccccaacagcctaaattccttgaaggcaaggttctctctggcttcctctgcaacgttcgcagcatgcctcagagactcggtgagctgggccggccaatgcatttcctcttccgtc

SEQ ID NO: 53841 - DNA, 122 bp, Homo sapiens
acggctggacaagcggactacggcttcattcaccacggcacaaccagagacattctgagacgccagaagcgtgaccggggtagaggatacctaggttgcaggaaagcgcagttaccaaatcg

SEQ ID NO: 53842 - DNA, 122 bp, Homo sapiens
aggctggggagggaggggaagagaggggaagggaggaagaagtgccggcttcctcggctccgccctcgcggaccgattcctagactcgcccactccttgtaaactacgcggacttggtcttt

SEQ ID NO: 53843 - DNA, 122 bp, Homo sapiens
actagaactccctgatccccagaattgcagctgcggatggaggtccggttcctgaagcctcgggtttggccgccgagtcgctgcctggtgggaggaaactggggttggcgcgggtaccagcc

SEQ ID NO: 53844 - DNA, 122 bp, Homo sapiens
gcgccagccctctcagcgcgcctgcgcaccagcccagccgccccggcgccctctgatggccggagtctgcgttgcactgacattgtccgcacagttgttgattgatttttccttccttcttg

SEQ ID NO: 53845 - DNA, 122 bp, Homo sapiens
tccttggtctgcggtgagtgcctgagtctccagccctcagctgggaggggccttcagcagcgacagacgaacggggcggggggggtggggggtggggggagcgccttgttgaaggtcacgtg

SEQ ID NO: 53846 - DNA, 122 bp, Homo sapiens
gtctggttcactcagtgctcaatggtgcccaggctggagtgcagtggcgtgatctcggctcgctacaacctccgcctgccttggccacccaaagtgccgagattgcagtctctgcccggccg

SEQ ID NO: 53847 - DNA, 122 bp, Homo sapiens
ccgttcgcgagtggcaccccctaaaaccttggccccatctcccaagatgcctctttactgcgcaatccagaaagcacccggaccgccgccacccaccagcggcggcgaataacttggtgaga

SEQ ID NO: 53848 - DNA, 122 bp, Homo sapiens
tcatttccctcgctccgtccccaggtttccggcaggcttccgcactcacagccttggcaccgcccccaagccgaagtgttggaagcactcacagccttggcaccgcccccaagccgaagtgt

SEQ ID NO: 53849 - DNA, 122 bp, Homo sapiens
agcggccccaaatcgcacaattgagcggctgggggagttatgcgccagtgccccagtgaccgcgggacacggagaggggaagtctgcgttgtacataaggacctagggactccgagcttggc

SEQ ID NO: 53850 - DNA, 122 bp, Homo sapiens
ggaagcgatgagaaaagcagccagctgttgtctgcataactgtggttaacctctcagccacgcctctttgggcattcctctccagagaagcagaaaaacatgagacacaacagattcaactg

SEQ ID NO: 53851 - DNA, 122 bp, Homo sapiens
cctccatgccagccaacccacccacccccgcacacacataccacctctggctggaactgacgaccatgggttttagaaatgagataaatctgggagatgaatgtattcatgagcccataaag

SEQ ID NO: 53852 - DNA, 122 bp, Homo sapiens
ggcatgaataatgcaggctgcatcttgacggagcttgtccggcccccgcagaccgcgcagcgcgcacctgagcaagcactttgaatgcctctggcttctgaacttgagaaggaagctcccgg

SEQ ID NO: 53853 - DNA, 122 bp, Homo sapiens
aacgttcatctctaaaacctcaactcaacaaaagcttgcttgaaatattttccggccggacgcggtggctcacgcctgtaatcccagcactttgggaggctgaggcgggtagatcatgaggt

SEQ ID NO: 53854 - DNA, 122 bp, Homo sapiens
ccgagtcagcttgggcaccagccgagagccggctccgcaccgctcccgcaccccagccgccggggtggtgacacacaccggagtcgaattacagccctgcaattaacatatgaatctgacga

SEQ ID NO: 53855 - DNA, 122 bp, Homo sapiens
gccagcaattgctcttaagctctgctccgcttgctttcgtttgggatgctgactggatcacgctggtctaccctgcactacagatcttggctaccttctctaatgtcaagatgttgttttct

SEQ ID NO: 53856 - DNA, 122 bp, Homo sapiens
gtggcagaggagagggcggcagagggtcccgtgtggcagagagggcggcagagggtcccacgtggcagagaagagggcagcagagggtcccacgtggcagagaagagggcggcagagggtcc

SEQ ID NO: 53857 - DNA, 122 bp, Homo sapiens
gagcccactgcttcataaatgcgagaacccagagcccctagtacccaactaggctagcctcggagttggcacggcgtgcagaaagtggctactgagcagccgggcctggctcacccgcttca

SEQ ID NO: 53858 - DNA, 122 bp, Homo sapiens
acctgaattcactgcctaaggtcagggcctttcttttgtgtgtcgctttaagcatcggcgcgtgggctgggggcagaccgcgcgtacccgccctctttctggggcgtcggcggagcgtggcc

SEQ ID NO: 53859 - DNA, 122 bp, Homo sapiens
aaacgatagatagaaaggagctgagcaagctgttgttgctaccattatttctttcccctgcggaaagttgatctgaagcctgggtcctgggctaggaggtggggacctgaagttcttgtcct

SEQ ID NO: 53860 - DNA, 122 bp, Homo sapiens
cgggtgcaggactttcctgccttctgttttctaaatggcagcggtgaggaagcagctgcccgcggggtgtgcttgggtacggaggctcaggagctctgctcagcactgcggctgccgacacg

SEQ ID NO: 53861 - DNA, 122 bp, Homo sapiens
ccgctgatgtagcctcgggcggccgcttgtcccatcttgtccgagtctacagtttcagtccgctgcctgcaaaggatttctcaaggcagtgcagatacagatctctgcaacgatttcacaca

SEQ ID NO: 53862 - DNA, 122 bp, Homo sapiens
gctcggaggggtgtagacagagccgggcggcagcctccgagagcagccacccggacccggcgttttctgctgcacctggtcaggtgcctggccgtcagtgccaagttccctcccgaagggtt

SEQ ID NO: 53863 - DNA, 122 bp, Homo sapiens
ccctttccttcccacaggtccctggccaaagatttatttctcttgacaaccaagggcctccgtctggatttccaaggaagaatttcctctgaagcaccggtgagtgggcaggggctccctcc

SEQ ID NO: 53864 - DNA, 122 bp, Homo sapiens
cacagccttggaccctgggttagggccaggagggctgggtgttgggtgagaacagggcctcgggctccttcactggctggggcagggcttctgagttccccatcagagcccctcctctgact

SEQ ID NO: 53865 - DNA, 122 bp, Homo sapiens
tctacgccttcctggacgccagcttccgcaggaacctccgccagctgataacttgccgcgcggcagcctgactcccccagcgtccggctccgcaactgcccgccactcctggccagcgaggg

SEQ ID NO: 53866 - DNA, 122 bp, Homo sapiens
ttcctcccggtgcgcccactcaacacaggggctccggtcgtgcggggggcgcttgctgggcggaggcactgagtggagaaacacctaacaggtgtgactgcaagttgatgggcattccctgc

SEQ ID NO: 53867 - DNA, 122 bp, Homo sapiens
aagagacagaatgagaaccaagcaaaaggggttactcgggagcctgcggcaggagaatggcgtgaacccgggaggtggagcttgcagtgagcagagatcgcgccactgcactccagcctggg

SEQ ID NO: 53868 - DNA, 122 bp, Homo sapiens
aggtccccagacatttctttgtcttgttctgaattaacccttcctctttcgagggaagctcggggaggggaagtgccagctttctcttggctggctagcaaagcttagatgaaaggccagaa

SEQ ID NO: 53869 - DNA, 122 bp, Homo sapiens
cagaaagtaaaaatggccttgctgaagaaattaaatttatgttcaagtgctatttctttacggcactggggaacaagcatttctaacactggggattcatgggaagggagggagtggggcaa

SEQ ID NO: 53870 - DNA, 122 bp, Homo sapiens
aaaaacatgacttgggagtaaggagtcaatgtcacctactattcccagcatgtggaaaaacgtacaagttaaattcaatgcccaaaacacgacccatgaattcatgttgacagaaaacaaat

SEQ ID NO: 53871 - DNA, 122 bp, Homo sapiens
caccctatcagtagtactcagcatggaagcaaactgagacattcattgccttcctccagacgcttcctgccagctcaagctaggatgcgatcccgagctcattcccggggaacccagagtat

SEQ ID NO: 53872 - DNA, 122 bp, Homo sapiens
ccgcgattcctttaacttcgcattccggaggctcgagggggctctgggaccgagcggcctcgcagcggcgacagaaatacatattttacgaaaaagaaaaaaaaaaaaacgagtcgcgcgaa

SEQ ID NO: 53873 - DNA, 122 bp, Homo sapiens
ctcgtctgtgaaatgggccttggactcttccccctacaccccaggatttgggggaagtgtcgacaagcccccgcgcgggagggcacccagggaataccgggtgcatctgacttttcttggct

SEQ ID NO: 53874 - DNA, 122 bp, Homo sapiens
cgcccccgccgcgtacctgaggctcccgccgagacgcgctcctgggccgtcgcagccgcgcggtgacatcagagccccgggctctgactccgaccccacctccaggctccggccgcggcctc

SEQ ID NO: 53875 - DNA, 122 bp, Homo sapiens
accgcactatccctagcatctagatctgtgtggtccaatgtggacagtcactaagttacacgtggctatttaagttaaattaaaaattcagttgcagctgggtgtggtagctcatgcctgta

SEQ ID NO: 53876 - DNA, 122 bp, Homo sapiens
gtttttctttctgtttttctccttgaagacatgacaatggatgaagtccgagaatttgaacgagccactcaggaagccaccaacaagaaaatcggcattttcccacctgcaatttctatctc

SEQ ID NO: 53877 - DNA, 122 bp, Homo sapiens
tgactaccaggcttgggcccgggccagtgtattgaggccacagatggaagaagggttccacgtcccaccgtgggcttcttggacgacagggggaggcagccctgagccccatgccttgtctg

SEQ ID NO: 53878 - DNA, 122 bp, Homo sapiens
ccctgcctaaatggctcttccagaaacaccagtgacttcccactcaccaaagtctggggccgtttcctcaagatcctgcccactccctgacccttccctcccttggggccaccatggctgct

SEQ ID NO: 53879 - DNA, 122 bp, Homo sapiens
gaggggatgggaggggaggggaaggagtgggtaaggggaagagggttgtacccgccagggcgggacccagcctgtgccgtcccacaccttgtgctagctccagctcagctacctgcggccgc

SEQ ID NO: 53880 - DNA, 122 bp, Homo sapiens
atcgttccgggccaggtctcgaaccggagacctcatgacgcctacgtgagcaggtgtactcgccacctggcagagaagggagcgccggcccgacagcccgaagcccccgggccgagctggct

SEQ ID NO: 53881 - DNA, 122 bp, Homo sapiens
gatgacaagcggtggtcaattttagaatcacctagacgtgacatcaggaacccaaaatcacgacacagattttaaagcttatgatacagtgacctagtccctagaaaaagtagttctcggct

SEQ ID NO: 53882 - DNA, 122 bp, Homo sapiens
attaaactttctggtggaaaactacaggtttctgggtcctcacaaccccagattttatttcgcagccaggaaacagggaaactaaaggaatttgtctgtgggtcctagtgtacggataagat

SEQ ID NO: 53883 - DNA, 122 bp, Homo sapiens
ccaagtggcacagtctacagactccaaacctgcagccctcctagtgtttcccctgtgctacggggtgagcttcctatgatggtaaggtacagatcagttgcttcccagtcctggtttgaatg

SEQ ID NO: 53884 - DNA, 122 bp, Homo sapiens
ctttacggctgctcagaatgggtggctcagggccttcaagacccctcagaactggagttccggaacattctcttgcccctctggtgcctccaggccacaccctcagcttcaaggtgcagaca

SEQ ID NO: 53885 - DNA, 122 bp, Homo sapiens
ccctagtgggtgccctttctgaagccttttctcattttaaggcatatggatttgtgctaacggaaattccacgtaaaaatttcaacctaccaaaatgagtgcattctttccacagaagaatg

SEQ ID NO: 53886 - DNA, 122 bp, Homo sapiens
tccatttcctcctccaaatctcaggagtcaaagatcagacatcaccatccactcctctcacgtaaacagaaagtcaaagaaacatttatgaagtgccttgctaacgtcaggcaatgactgta

SEQ ID NO: 53887 - DNA, 122 bp, Homo sapiens
ggggagggcgccatcttggccccgcggagcgtgactgtctcggctggaagcgtgggaggccggaggatcagtgactggctgtcgtggacatgctcgctacacctcccggggcttcgcttcgt

SEQ ID NO: 53888 - DNA, 122 bp, Homo sapiens
tgggctctgaagagtctaggctgggaattggtttcttccgtagggctttgctcacaaccgcgagtggggcggtgacgctcaagaccggtatctaggctatgttttctgttttctttatatat

SEQ ID NO: 53889 - DNA, 122 bp, Homo sapiens
ttttgtagagatgtggtctcactctgtcacccaggctggtctggaacttctggacacaagcgatcctcccacctaggcctcccaacttgctgggactgcaggtgtgggcagcacacctggcc

SEQ ID NO: 53890 - DNA, 122 bp, Homo sapiens
agagaatctaaggagggaaacatatggaatagtttccaaatcagtataaaacccaagctacgggaaaagtgttgcaagagaaggccttggcatactgtcatgttcttggaatgccttccctg

SEQ ID NO: 53891 - DNA, 122 bp, Homo sapiens
ccccacttccaggcctttgtccctctcctttctccagcaacctgccggttcccgctaacccggcagcctcgccgagcccagagcctagaaaagccaagaagatcccagagccgccccgtggc

SEQ ID NO: 53892 - DNA, 122 bp, Homo sapiens
gagtgaacattgacggtcaggctccgcacacgtgctgccattgaagacatcagagctgaccgacggtacgctgagtgggaagggaaaagggaagccacggatctcttcaagattagattctt

SEQ ID NO: 53893 - DNA, 122 bp, Homo sapiens
tccacaggggtctggacgctgatgcgcttctccttggtcagcgcagccaccgggaaggagcggaccaccacctgctccccaacttaggacaggccaggcagagtcagaagcaaggaaggtaa

SEQ ID NO: 53894 - DNA, 122 bp, Homo sapiens
gctgcaggtggaggtgaaggaccagctgcggtgcggaaaggcctgacccgggcggcagatcgcctgcggagagaatgaccggctggggtggaggcggggctggggtggtgtgggcgtggctg

SEQ ID NO: 53895 - DNA, 122 bp, Homo sapiens
ttcactgtattgtcagccctttcctggatctccagctgcaggaccttttggatactttaccgtagtctggttgtagcacctcttaacagcaactgggactatgtcacctatcggggcctctc

SEQ ID NO: 53896 - DNA, 122 bp, Homo sapiens
ggaggctgaggcgggggaatcactagatcccaggaggcggaggttgcattgggccgcgatcgcgccactgcactccagcctgggtgacagagcaaggctgcgtctcgaaaaacaaaaaactc

SEQ ID NO: 53897 - DNA, 122 bp, Homo sapiens
atggctgggaccaccgttctgacggggcttgtgtgtttcaggaatctggccaactgtgagcgcctcatcgaagtggaggacatgatggtgatgggccgcaagccggaccccatgtgtgtctt

SEQ ID NO: 53898 - DNA, 122 bp, Homo sapiens
accgcgcccggccccggacccttctttattggcctcaaaacgggtcattttgggaagcggcgcggggctggccgcgcttccctgggccccggccctccccatggtgtttacggggaggcgaa

SEQ ID NO: 53899 - DNA, 122 bp, Homo sapiens
gccgagccagcgcggagcgccttccgggtcggtgggctggggcgggctgggggctggggccgggccgacccccgcggtggggcccaccccgcaggacaaagcagcggccccgcccctcggcg

SEQ ID NO: 53900 - DNA, 122 bp, Homo sapiens
ggttccggatgcagcgggcgtagatgcccagggtggggtggtagggctccggggagcccccgcccgggcccgccggctccacgccgccgcggctcctcgctttcccgatcagccagtctgca

SEQ ID NO: 53901 - DNA, 122 bp, Homo sapiens
aacagtattaggtataatacttttatgtataatctaccaacactactattgaggtaacagcgagctagagatttaaagaattagcatgctaagtacttccatcactgattactcttgggcat

SEQ ID NO: 53902 - DNA, 122 bp, Homo sapiens
atgcataataaaaacgagtgatagagcccatgctgaggacacagccccggcctcccaactcgcccagtgatctcgccaggactctgaactacctcccaggcagaacgctgctcaagagcttg

SEQ ID NO: 53903 - DNA, 122 bp, Homo sapiens
catttttgttggcttttctctgtactattttaaagccagtgaccatgcttgacacgcaatcgaattcttttcatcagagtcccatagtttaactactgttcttgattgcatcatgtgagact

SEQ ID NO: 53904 - DNA, 122 bp, Homo sapiens
ggaggcaaaagcagcgctgtgctccccatcccagagaagcctgatgaagccaaagataaccggagggacctctttttatgggcttcaaagatcggaaagccagagatcaccccagggcaagg

SEQ ID NO: 53905 - DNA, 122 bp, Homo sapiens
attcattcagcataggaggaagcctaactcagctcagggggcctgtgcccgtgccgtcttcgtagaatcaaaagacacgcgtgtttcacggtttctgggatggaaacctgccctcacacatg

SEQ ID NO: 53906 - DNA, 122 bp, Homo sapiens
gaccagcctggccaacaaggagaaaccctgtctccactaaaaatacaaaaattagccatgcgtggtaatttttgtaattaacaggcatgggcccttgtaatcccagctactagggaggctga

SEQ ID NO: 53907 - DNA, 122 bp, Homo sapiens
gagaccgtaatcagcactgcgcctggcctcagcagatatttttctaatgaatgattaattcgccctgggatttagtgctcttctttctgctctgaccccctggtcctctgtttccaccagtt

SEQ ID NO: 53908 - DNA, 122 bp, Homo sapiens
gagaggaggatgaagggccctgcaaggcgatttttgcaggaaagttggagctgtgcctgacgcaggctgggtctgcaggcgttttggaaagacactcgccctggaaagtgcagtacgtcctg

SEQ ID NO: 53909 - DNA, 122 bp, Homo sapiens
ctcgggccgccgaaagaacgggcagccgggaaatcccgtgtccccactcgtggcagaggacgctgtggggcgggcgggctgcgggctcccggcgccttcccgcagaggcggcgacagcggcc

SEQ ID NO: 53910 - DNA, 122 bp, Homo sapiens
ctcagcgctgacagatctgggaggccttgaccccgtgtggctgtttgtggtagttggaggcgtcatgtcggtgctgggctttgctggctgcattggggccctccgggagaacaccttcctgc

SEQ ID NO: 53911 - DNA, 122 bp, Homo sapiens
ctttcatagttctcattaaatgctggaggagtctgactactgctgagctgagcacttcagcggctttggaaaaggaagtgtggttacttatttcaccaccttcattgtgctggaggaaataa

SEQ ID NO: 53912 - DNA, 122 bp, Homo sapiens
cctttcacaggtgtgatatgcggctggaaataacaagcaggcctgcagtggagctgatggcgtcactccccagcacctgggcctcctgagctatactcattttcagagtcagaaatgacccc

SEQ ID NO: 53913 - DNA, 122 bp, Homo sapiens
ggcctgaactgaccacaggggcctaagtgagttgtggagagatctgtggccatccaggtacgaaatgatgtggctggaacagtggcactcttagctgaaaagaaacaaatggattccagatt

SEQ ID NO: 53914 - DNA, 122 bp, Homo sapiens
gaggcagccacagctcaaggccagggctggaaattagaacggggaggggtaaaagggcatcgactccagtcccattcctgggcctggccacgttggggaagtttatttctcacccgttgggg

SEQ ID NO: 53915 - DNA, 122 bp, Homo sapiens
aatcagtgatcgggaaccacctgccacaatcactagggaagtgacacagccgggaaactccgcccctcacacccccgcgcgctcgcgccggccgcagccccacagctcgccccggccgcagc

SEQ ID NO: 53916 - DNA, 122 bp, Homo sapiens
ggcgtggggggcgggcaggggtaacgggcgtggggggcgggcaggggccggcgaggcccgcgccgctcaccttcctgtgcttctccttgtagggcagcgccagccacggcatgtcccgcacg

SEQ ID NO: 53917 - DNA, 122 bp, Homo sapiens
ttgccatatccccagaaaccccagtttgccttttcaccgtcgcaagtgagaaccagagcgcgttaaaggcctcggagtaaaaaacgcagcgtctgggactgcggcacccgggttgagtcggg

SEQ ID NO: 53918 - DNA, 122 bp, Homo sapiens
tctggaacgcacaagccaggtccaaaagttccttcagggcctccaggaaccactaaccaacgtccctgttgacctcagtttctcgcctgtgaaataaattggaactggaagttctggaggct

SEQ ID NO: 53919 - DNA, 122 bp, Homo sapiens
ccccattgaaacatttaattttgggcaggctccatgttttttccttgtgtagtatcatcccgtgctctgtttttccaacttaaagcctacttacaaacttgtcaagtctcacatctctctgg

SEQ ID NO: 53920 - DNA, 122 bp, Homo sapiens
agcccgccctgaggccgtgccactacctccaggtaagcaggctcacggccctgtggaggccgtctcggcacagcaggtggtattgtcgttattccttttttaattgacagataacaactgca

SEQ ID NO: 53921 - DNA, 122 bp, Homo sapiens
ggctgtgtgagtcatgccagagccacatggtgaaccattgtgtagcagctacagcttgcccgtgaaaattctgtaaaaacttggagaaacatctgttgccagtgaaacaatcaggatacata

SEQ ID NO: 53922 - DNA, 122 bp, Homo sapiens
aaatgaacaagagccagctacaaccctgatgttcccctagtctagcgagagggactgacgcggaacagagacactttccattgaacgcggttgtgtcaagacggagctcgaggcgggacact

SEQ ID NO: 53923 - DNA, 122 bp, Homo sapiens
cagtgagtgcggaggctgcttttcctcctgagatgcgaggaggcgcagaggcagctggaacgcgagcggaccagggcaggccctccctctgccccaagggagcagctgaacttctctgagcc

SEQ ID NO: 53924 - DNA, 122 bp, Homo sapiens
gacacaggcgcagtgtcacgtacagaccacggggagacatggcactaggggacaaatggacgtgacaccacaatgcacagggcaggccacagagctcgagggacgtgggcaggggccttttg

SEQ ID NO: 53925 - DNA, 122 bp, Homo sapiens
agggatgagaggccgcccgagccccggattttatagggcaggctctgtttgcttaaagagcgttagataacatttgcctaaggaggcccggggatcctctgagacaataatctccactgatt

SEQ ID NO: 53926 - DNA, 122 bp, Homo sapiens
cttccccagacagcagccagcacgttcctgatatggcagacaatgctgtgtgcaacacatcgtctcctcatctggacacgcgacaatggtgctcccagccgccctcacagtgagcctgggca

SEQ ID NO: 53927 - DNA, 122 bp, Homo sapiens
tgtacttttctcagatgtagaatacaattccatgtgtaatcaagaaatgggagggctaaacgacttaaagtcttacccagtaatcatggttatagaaattgtttgaatcaatctagtaatgg

SEQ ID NO: 53928 - DNA, 122 bp, Homo sapiens
taatttgtctgtaactccttcaagcactccagttcctggcattaaggtcaggtgtgcctgcgatgctttaaacatttgttcttttaattttaattccttatgttaagctcctagagcgggct

SEQ ID NO: 53929 - DNA, 122 bp, Homo sapiens
tttgaaatcgcagggatccctccagagtagtgccatttaacggatttagaaagcgagactcggagatgggtggtgcatggaacccagtcctcgggattcccaacgccatctaaggggagggc

SEQ ID NO: 53930 - DNA, 122 bp, Homo sapiens
tgcccccacacgtgccctccttcttgtctcctgcgcagacagctgcagctttggcctgcacgcccgcggtgtggagctgatgcgcttcaccacgcccggcttccctgacagcccctaccccg

SEQ ID NO: 53931 - DNA, 122 bp, Homo sapiens
cagacctgggggcagggcagcagtctccagaagaactatcctcctgtctgcgaaatcttccggctacacttcaggcaattgtgttaccacgagatgtctgggccgcaggaagcattgagccg

SEQ ID NO: 53932 - DNA, 122 bp, Homo sapiens
ttgggtttagagcccgatggatacaccctgggagaggcgacggggtggcccctgtgacttcgggctgcgacgcggtgtcgtccccacccccacccccctcactctagaagtcacagcgccat

SEQ ID NO: 53933 - DNA, 122 bp, Homo sapiens
tggaaatgataaaaatctcaccaaagctcaccttggtgctaatcaagactgctcgatgcacgttataaatctgatacaatatttattgcttatctgtattcgaggggttagtctccatccta

SEQ ID NO: 53934 - DNA, 122 bp, Homo sapiens
ccatccggccagagcagcaggctgtgttcttcaccctgttcctgggcatgtacctgaccacggtgctggggaacctgctcatcatgctgctcatccagctggactctcaccttcacaccccc

SEQ ID NO: 53935 - DNA, 122 bp, Homo sapiens
gcagagccgcgtttagtctatcgctgcggttgcgagcgctgtagggagcctgtgctgtgccgcgcagttaggcagcagcagccgcggagcagtagccgccgtgggagggagccatgaagcat

SEQ ID NO: 53936 - DNA, 122 bp, Homo sapiens
aggcccagactgaccctcgcccagcagggcaccaggtctcctcccctgcggagccacccccgagctggcccagcctggagacccccgctccccagctcacaagctcacgggcctgagctcca

SEQ ID NO: 53937 - DNA, 122 bp, Homo sapiens
gcccgctccgcaccgcccagcgctccggacttcacttctggtcccgctcctgggcggccacgaagttcagcaagtcaatggcggtgaccaccccgaacaccatctgccgctgactggacttc

SEQ ID NO: 53938 - DNA, 122 bp, Homo sapiens
ctgccggggctatcaccaggcccatgagcccaggacatctaagatgaagcgagttttaaacgctggcattcagccacaacctcagagaccctgcagctgcatgcggggctgcaagacacctg

SEQ ID NO: 53939 - DNA, 122 bp, Homo sapiens
ccccattctcaacacatgccaggcaagctacccgggtccctccgccccactctaactttccgcgaaaatcagttccgcctctgccccaagagccaagaggggtggaaaggaagagagcttgg

SEQ ID NO: 53940 - DNA, 122 bp, Homo sapiens
ggatctctggaagcatctgcagccagccaccctcccacccgggagtccgagacccggccacgcgcccccacggagaccctgcccagaggccccaggatggcccaggagctgaggccagcaca

SEQ ID NO: 53941 - DNA, 122 bp, Homo sapiens
ctcgtctttgtgtggaaagtaagtgcgggaggcgaacctacctcggcgcgcgcacaaaggcgcgcggctccctcccagctcgctcccggcgcccgcggcggcgcccagcggcccgactgctc

SEQ ID NO: 53942 - DNA, 122 bp, Homo sapiens
gctgggcccaaggagtggcaccgagaaggcttttttgggcagccctgccgccaagcgccccgcagctcctgcctgagggctcgggtcccctcggccacaggtgagcttggcctacgcctatg

SEQ ID NO: 53943 - DNA, 122 bp, Homo sapiens
ggatgcagccagtggccagaggtcacctccctcatgggttgggggacagcgtcccagccccgagggcaagcactgatccctcacaggacggggaagcctgtccttgtgcgccttcagacact

SEQ ID NO: 53944 - DNA, 122 bp, Homo sapiens
cttgccgagcatgcgccttagttctctcttctggggctgtgaccgtggggtcgaagcgcgcgtgcgcggcggcggctggcggcggcggtggggcggggcctgggctgtcagccggcctagga

SEQ ID NO: 53945 - DNA, 122 bp, Homo sapiens
aggctgctggccagctaggtgtcctccactcaccagactctcggaatttgcgaggtcctccgttgctaataacaataggcctgatttgttgagagcccgcctgtgccagcctgcgcctcaca

SEQ ID NO: 53946 - DNA, 122 bp, Homo sapiens
gaggcgagggggagggatgcctgccgccggctgccctcgcccgagggcgaccagcctgtgcgcccttccaggctcttctgggagaaggaagcagctagtgcacgcgctgctgccaggtccct

SEQ ID NO: 53947 - DNA, 122 bp, Homo sapiens
tgtcctgggcctctgtttagacagctctagaactgaggcgagtggagcagcaccaaggcccggagatcggggcagggcagctgctgtcgccgccgccgcaggcctgagttacctgagtaact

SEQ ID NO: 53948 - DNA, 122 bp, Homo sapiens
tggagcaggtcttctcaaagtacggacagatctctgaaggtgaggctgctgctgggcccgcggccctgggcgggggggcttgtgctcctcctacctggaagtacagctgggtgctgactgca

SEQ ID NO: 53949 - DNA, 122 bp, Homo sapiens
gtttttactccaacactctaccttgtatggctcccaaccataagagaacggaagtgcttacgagtcaattggtgagcaagagagaaaaaggaaagaaagacatttcatagaatggctatttg

SEQ ID NO: 53950 - DNA, 122 bp, Homo sapiens
aggaaggaactccccagagcaggaaaagaaattccttttaaaacatcttttttgcttccccgtccctggaatctccatcattcattgagagatactatagccattgatattcatgtgactcc

SEQ ID NO: 53951 - DNA, 122 bp, Homo sapiens
ggcgaaaaatcgagcgcagcagctgctggcccaggtgctaagctcttcacagcccagggacggaggggccagccggctgctccgagtgcagggcccccgagcccacgcccagccggaactcg

SEQ ID NO: 53952 - DNA, 122 bp, Homo sapiens
tttgccatgtcctaggtccttctcttacaaaggcaagaagggccaggcgaagggagtgttcgccgaaaaccaaacgtgacacaaccttaaatataggcaggtgctctgatctgatagcacgg

SEQ ID NO: 53953 - DNA, 122 bp, Homo sapiens
catggactcgtgaggttgtgctgaaccagccccaccacctggaaaactccgtggagctggcggcgtgagaagggcaataagccttgggacacagttggagtctaagaaactaactaggcatg

SEQ ID NO: 53954 - DNA, 122 bp, Homo sapiens
agctttcatggaatggagttggagctggggtaggaggggctacggaggaggaggtaggaacgaagtgctcattttcagcttttagaggcattggagagcagcccccactctccttggtggcc

SEQ ID NO: 53955 - DNA, 122 bp, Homo sapiens
cctcgtttctcccgccgtgtggctggaagggaggcagctggttagcacgcggagacctgacgagagtgtggctgtgcctagaaccagctccgatgctcctcgttcgaaacacccacccctgt

SEQ ID NO: 53956 - DNA, 122 bp, Homo sapiens
ggaactggactgaagtgcctcaggaagtacctgtctctgtatctcagtaaagcggttgtccgcctctggcgctgggaataggcgtggggtctgttggaaaaggcgcgcacgtaaaacaccgt

SEQ ID NO: 53957 - DNA, 122 bp, Homo sapiens
gctctcagttaccttagctactgttactgtttcattggaaattccagcgaagcaacgacacggagggggacgtgccaagtgcgaacccacaggggcagagctttttagggatccgctctacc

SEQ ID NO: 53958 - DNA, 122 bp, Homo sapiens
ctaggcctcccaaagtgccaggattacagtcgtgggccaccgtgcctggcctgaatgatacgtacttaacttatgaatgttaggtttgaatgttatgtcaagttcttacaagtaatgaggac

SEQ ID NO: 53959 - DNA, 122 bp, Homo sapiens
ttaaccagggcccgcagccccgcccctcccccagacatcgaggagccggggaggtgtgaacggcctcctttgtgcctctgaatcgaaggcaattaggcgctgcttatctgggcattagccgt

SEQ ID NO: 53960 - DNA, 122 bp, Homo sapiens
ggtgctgaggggatggaccacagggctctacaaacaccggcaatcacctcctgcggaggacggcgcatcccctgaactccctgccaagtaaacacctcatcactctccggtcaccatgacaa

SEQ ID NO: 53961 - DNA, 122 bp, Homo sapiens
tattctagcatccaacttctctgttgacacacaagtcgcgtacatcctaagtctgggcgtcgtgaaagagttcaggaagcacggcataggtaagggcagccgggcccgcggcttggcgccca

SEQ ID NO: 53962 - DNA, 122 bp, Homo sapiens
aagggcagccgacttcacctaagcttccacctactgcatctaacccttaactgtatctcccgcccccaccacccctgacgggttcccattataagagggtttcagataactcacctcccacc

SEQ ID NO: 53963 - DNA, 122 bp, Homo sapiens
cgttcgtttcaatttagaatcgagattgtttgtccttctagagcacctgtagggaaaaaccggtgtctcttccttgtgattggctgttgccatggatacgctttgtgtagcggctatgggcg

SEQ ID NO: 53964 - DNA, 122 bp, Homo sapiens
aaggcagtgtgggtcgtcatggaaaaattggtcccattggctctaaaggtatttgcaatgcgattcttgcctcatttcccccctgcccctagggtcagcgtctggataccctgagaataatt

SEQ ID NO: 53965 - DNA, 122 bp, Homo sapiens
ccccctccccggaacagggcacaccttcccctcagggtccacgtgtggattcactgcagccggggccacagagatgaggacggcccgtcgtccctcctgccgggccgtgggactcccccacc

SEQ ID NO: 53966 - DNA, 122 bp, Homo sapiens
gtctgcggtgaagcccctgggctctgggagggtcttaggctcctgaaacatggaattctacggcccagtcttggaacagctgggagaacatgaagaacgcccctcacagtgaagaatcagga

SEQ ID NO: 53967 - DNA, 122 bp, Homo sapiens
caaccctgagctgctgggctcagccgtaccttgagagcagaatgagtcttgaatcctgagcgcttcacacacagggcgcgcccacccctcgcatgcaccatgattttcacacgcagggtgcg

SEQ ID NO: 53968 - DNA, 122 bp, Homo sapiens
gccccgagggggcggaaatgctgaggtggcgagagcgtgggttgcacagaaccctagtagcgagtccggctgagcctctgcggcctagcccagcagcgtcgtcttcccggctccgaagacgt

SEQ ID NO: 53969 - DNA, 122 bp, Homo sapiens
gaacgatgcggctgttggtacgacacagagggattctgggattaaatagtgcgcgcggggcggggccaggtcgcccgccggccgcacatgcgccgcctcgcctccagcagcgccgcctcgcc

SEQ ID NO: 53970 - DNA, 122 bp, Homo sapiens
caagacggtggcagaaaagagtctaggttcatctgctgcttggtctgcagggttccttctcgccttactagggatgacagctgtggtctatgtcatgcattcttggctgtttgaaactaaag

SEQ ID NO: 53971 - DNA, 122 bp, Homo sapiens
tccgggacgtcacaggtgaggctgaataccaggttcgcacaaaggcaaaccaaactcagccgggatgccgagtgatggggttggcaagatagtgtggcctctggttccctccacgcgtgata

SEQ ID NO: 53972 - DNA, 122 bp, Homo sapiens
tcacagacaagacaccacagcaattccaattttgcaacagagtttattgaggtgcccccccgtgggcctggccctgcccctcattcctctttctcgtctccatgggtgatgatgtagcacag

SEQ ID NO: 53973 - DNA, 122 bp, Homo sapiens
gagggatgagccttttggcgctgatgcttatggaaggaaaccagtccttaagaccctgcccgcgtcaggagctggaacccagctccggtccctagactggccacaggggggcacttgatctc

SEQ ID NO: 53974 - DNA, 122 bp, Homo sapiens
gcacttggttctgtaatactgtaaagcaggtctccacctgcatttcaggctctttagtctcgacccgtaacatttctccacttacactttatttacctgtactgagctacaggcaattccat

SEQ ID NO: 53975 - DNA, 122 bp, Homo sapiens
gctgagcacttcctctgagccaaggatgaaggtccaagcactcacaccctcgccatcccccgacgggcagggtttgctgccacagcctcagtgacccactcaggaactgatggaagcggtca

SEQ ID NO: 53976 - DNA, 122 bp, Homo sapiens
ctggctctgaagccttggcacagagagcgtgcgggacattgtccatccccgcccctctgccggagagcctgtgactcgaaggctgccatgtccgcagcagtctctccgctcctctggctgct

SEQ ID NO: 53977 - DNA, 122 bp, Homo sapiens
cggctaaggtgcgcgtgctcgctggtcctaacggttctgttgggcgtttctgctgagaggcgggaggggctgagagtctgtgcgaaggtaggtggacagactgcattgcttgttgttgcgct

SEQ ID NO: 53978 - DNA, 122 bp, Homo sapiens
ggggggtcaggccctctatcctcatgtcctggtgaagaattgcgcagtggagttcaacttcggacagagagcagagccctactgttctgtcctcccggggtttaccttcatccagcaccttc

SEQ ID NO: 53979 - DNA, 122 bp, Homo sapiens
ttgcattttatttacaacaactttatttcccccgttttgcagcccctcttatttttgtgtcgaggttggggtcggtactgaccgtcctgccagcagctctgaattttgaaaatacagatatc

SEQ ID NO: 53980 - DNA, 122 bp, Homo sapiens
ttttttttttttttttttgactctatcaattacagcctgagaagtgttttaaacagtacacgatggataagaaattcctcattgccaaaggagaggccatttgcccagcactcttcatccac

SEQ ID NO: 53981 - DNA, 122 bp, Homo sapiens
ctgcggtcacccttgtcgtcttctgaaccttgtttcttagacgaagaaactgaatccaagcgagtttggattacttgaggtaagaggtggtttacaacacagaccttggaaccagactgcct

SEQ ID NO: 53982 - DNA, 122 bp, Homo sapiens
ccacagaccctgtgacccctcataccaaatatccagaccccagatatccagatccaaattcgcagacccttagctttgaactccaactccaaatccagacttctggccccctcaagtccaaa

SEQ ID NO: 53983 - DNA, 122 bp, Homo sapiens
ggatttgccatatggttgcgcggagccaggaagaatgggcccctgtgtgtgcgaccgggacgcagcggcgcgggccgtgccagccgggcggagccgggtgcccgacggcgcaggacgagcgg

SEQ ID NO: 53984 - DNA, 122 bp, Homo sapiens
atcacagggaaggaaactccacccctttttactgatgtgtacaaaatgtgcaggacacttcgtggctaatatttttaacttttctttggtaaagcgttcatagactgcatggaatttgcaaa

SEQ ID NO: 53985 - DNA, 122 bp, Homo sapiens
gttttgatcatcattccagaccctaggggacctcaactgggtgtcttgccccctaggctccggaaggggacctcccgtggatctcaggaagccctctggtgctcagaggctcctgggaaagt

SEQ ID NO: 53986 - DNA, 122 bp, Homo sapiens
ctgtgtgatctagaaaagctacagagtctcgctccgtcgccaggctggagtccaggggcgcgatctcggctcactgcaacctccacctcccgagttcaaactattctcctgcctcagccccc

SEQ ID NO: 53987 - DNA, 122 bp, Homo sapiens
gactacacaaccaaaatttgaagtcaaggccacggccaaggtcatgggctctgggtaagacgaacccgggctcaggttcttgctttcatactaaactgtggcaagatactgaattccttcta

SEQ ID NO: 53988 - DNA, 122 bp, Homo sapiens
ggctctgaactgcagctgatgttatcagcaggccatgcatcctgctgccaagggtggacacggctgcagacttctgggggaattgtcgcctcctgctcttttgttactgagtgagataaggt

SEQ ID NO: 53989 - DNA, 122 bp, Homo sapiens
gacacctgttgccaagcccaccgtggtctagcggtagcgttagtgtcaaggaaaaacacccgctacttagcagaccgggaaagggagtctccctttccccgggggagtttagagaagactct

SEQ ID NO: 53990 - DNA, 122 bp, Homo sapiens
atggtgaacaagtgagctgatgtctctgagcctcagttcttacatctgtgaaatgggcatcgtaataaatagtacccacataggatattatgaggatatatgaaataatataggcacaatag

SEQ ID NO: 53991 - DNA, 122 bp, Homo sapiens
tttgaagcccaggtgccagaggctggcgtatccaggacagaggcccgtgccccttgctctcggggaagatctgcccaggagcaagatgcccagaagtgagattctgagtgctcctccagccg

SEQ ID NO: 53992 - DNA, 122 bp, Homo sapiens
ctgagggacaggttttcttgtgttcccagaggccagcaggggggcttgaccccagagacacgcctatccatgagtacccaaaggggaccctgagttgggggctggaagaaggccagtctctc

SEQ ID NO: 53993 - DNA, 122 bp, Homo sapiens
acccgactgatctgaacggggcgcacttcgacccggaagtttacctagacaaggtgtgtgcgcacggggagtgggggggtgcggggaggggggaagggaaccaggcccctgctatattgctc

SEQ ID NO: 53994 - DNA, 122 bp, Homo sapiens
gttctgggggaaggaaagaatccagtcggatgcaaaccttgcggccagagctggacaactcgcccctaagtttggcgcgtcctcgctctgcgtccttggccctcatctcccccttcccggca

SEQ ID NO: 53995 - DNA, 122 bp, Homo sapiens
tgagcaacagcaaggtttattgagaagagagaaaggacaaagcttccaccgggaggaaggcgacccaggcaggttgctgctgctggctgaagccatgagcttttattcccttatttgtcccc

SEQ ID NO: 53996 - DNA, 122 bp, Homo sapiens
ttccctgggacttttgctgtgctaggctgtccctcctgcccaccctggctgggcatgtgacgggagtgaatcactcacctgctatgggctccgacatcttctgggacttgcgcccacttaac

SEQ ID NO: 53997 - DNA, 122 bp, Homo sapiens
ttacagcgtggtagcttgcattttgttataaaaccgactactgcaacctaagctacagagcgcggttatattttctctctggcagcctaattttccttagtggactagatcgtactgctaaa

SEQ ID NO: 53998 - DNA, 122 bp, Homo sapiens
gacagctcccgcctcacactaccactgcaaatgagtggcctgggctcagatgctcctttccggtgaatacagatctgggtgttcccatgacctgccccttcagccttgataattcactcaca

SEQ ID NO: 53999 - DNA, 122 bp, Homo sapiens
aagaaaccggccaggtgtggcctaggcgcccagtgccagcggggaggagactcgctccgccgccgaccaacaccaacacccagctccgacgcagctcctctgcgcccttgccgccctccgag

SEQ ID NO: 54000 - DNA, 122 bp, Homo sapiens
cttgtcctctgaagggataagcaagtgttctattcacagcccggagtgcccttctgccctcgcccgaggccactgcccgcctggggccagctccagcgctgcgttctccaagcgtggccaca

SEQ ID NO: 54001 - DNA, 122 bp, Homo sapiens
gaggcagtcattattaaaggcattaaaatgagacgtgtgctaatagaataactagattgtcgtggaagtgagggaacagagtaatcaagtagaaataaggacacaggatagaaatcaatgcc

SEQ ID NO: 54002 - DNA, 122 bp, Homo sapiens
gcccatgttttctaaggccactagaagaaaatctgccaaaagatttgtcgtcggtttcttcgtcggttgtcatgagatagcactactgatctcgtgtttccattaaggggtgcccttggcat

SEQ ID NO: 54003 - DNA, 122 bp, Homo sapiens
cacaggtagggtggtttaggtattcctgcctggctctgggcttcttgtcacatgctcacccgcctttgctttcttactggtccacagcctgtcccccatgacgttagccccattaggacagg

SEQ ID NO: 54004 - DNA, 122 bp, Homo sapiens
ggagggagttggaggagggctgtcaccccagctgatcttttctcccttgttaccctttcccgccagggcaccttcctagtcactcaggctgcagcacaagccctggtgtccaatggttgtcg

SEQ ID NO: 54005 - DNA, 122 bp, Homo sapiens
aaaggaaattactgaaggtgtcccgggacaagaggtgaggcacgttgcaggggcggagggcgatgtgcttcctaggaaatctacattcggaccccatccccgagtagggccacaagtgcatg

SEQ ID NO: 54006 - DNA, 122 bp, Homo sapiens
tcccgtgcccacgccccgtcccctgggtcgcgtgtccagaccgagtgcgtcccgtgcccacgcaccatttcccgggtcacctgctcagaccaagtatgtcccaagcccgcgcccattccccg

SEQ ID NO: 54007 - DNA, 122 bp, Homo sapiens
aactgttgttttgtctcacattaagttgtaggtggggtgctgttaaagcttgtccactcacgatggtgttcagctgagacctgtgagttcaagttgtcttgcccagagttaaaggccataaa

SEQ ID NO: 54008 - DNA, 122 bp, Homo sapiens
aagccctgggcttctgaggagtatggagacagttcccaaactgctgaacgttggaatcaacgggagatttaaaaaagtattggcttccaccttgatacattctgctttaactgatattgtgt

SEQ ID NO: 54009 - DNA, 122 bp, Homo sapiens
tcccaaacctcttgacaactgacccagtctttcctatatgtttttgtgcacctcaggcaccgctcttctttcatatctgtggaatgaggatagtacagtcagctctcgctatcaggttccga

SEQ ID NO: 54010 - DNA, 122 bp, Homo sapiens
cactttccaactggaaaatctgctgtcccgcagccgtctccagggcagtggcgggagactcgggctcttgaaagcacgacgtgtttcatggaaaaagagggagtggccggccctcggagccc

SEQ ID NO: 54011 - DNA, 122 bp, Homo sapiens
caacatggcaagacctcatctctacaaaaaataccaaaaaaattatccgggtgtggtggccgcacgcctgtagccccagctactcgggagctgaggtaggaggatgattgagcccaggagga

SEQ ID NO: 54012 - DNA, 122 bp, Homo sapiens
cgcacacggaggactggcagcccacggggatgtaacaggatgcctggcaggggctgggcgcgcagcaggctggctggcagcccgaggagcagctggtgtggcacatggtggcgtgtggctgg

SEQ ID NO: 54013 - DNA, 122 bp, Homo sapiens
agaagaccagggaaaaggggggccagttgaggtgctgcacatagggtgcaggctgtggggcgaggggtgctgacatccagcccacccagccctcccagctgggcctcctggtttaggactgt

SEQ ID NO: 54014 - DNA, 122 bp, Homo sapiens
cggagcggcggccctgcccgggttgtgcggggcgggagatgggagcctcccggcacgccccgcctccgccccctgcacgctggccagcgtcctccccagcagcggcctcgaggtcccggtcg

SEQ ID NO: 54015 - DNA, 122 bp, Homo sapiens
cccctcagaggcacgcacccgggagaactgaaaacgcggttcaggcagacacttgcgcaccggtgtccagtgcagcgctgctcaccgtagccaggacacaggcccagcccggtgtccgtcgc

SEQ ID NO: 54016 - DNA, 122 bp, Homo sapiens
cagcgtcggcagcacgtgacacctcccccctgctcccattcatcaagggggggacggtgtcgtcctttcaattcatttatctgcaggaatgattgctgctatcagtctcgcgctcaccgccc

SEQ ID NO: 54017 - DNA, 122 bp, Homo sapiens
ggccagttttgttgttgttgttgttgttgttgttttttaagagagagggtcttgctccatcgcccaggctggagtgaagtggctcaatccgagctcacttcagcctcgaactcctgggctca

SEQ ID NO: 54018 - DNA, 122 bp, Homo sapiens
ggcgtcgcagccccgcctagtgcagcctgggtggagcctgacctttccctgagatttctgcgaggcctcagacacccctggtttcttggtttctgggtagaaaaagggaaacctcaaaacaa

SEQ ID NO: 54019 - DNA, 122 bp, Homo sapiens
gtgctttagaaaccctttctcactcccagagcctcagactctccagatagctggagacagcgctcttggtgtacaaaacacaaagtgtcccatcacttagggcaaaccttggacctcaaagc

SEQ ID NO: 54020 - DNA, 122 bp, Homo sapiens
agagctcggcagggcgatgcccaagacggggtagtggacggggacgaattggttcagagacgggtagcagatggggcagaaggacgagtaggtgggctggaacaggagcgtagtctgcgggt

SEQ ID NO: 54021 - DNA, 122 bp, Homo sapiens
gacaaataagatgaggagaggctgaaagcagaagttctggaagttctgattctgtggttccgctggattagaaaaacatcgaagatgcagagacagtacctcgggggaaagaatgggatgcc

SEQ ID NO: 54022 - DNA, 122 bp, Homo sapiens
tcttctttttaaaagtcaacttttattttggatacagagggtccatgtgcagatttgttacgtgagaatagtgcataatgctggagtttgcggtatgaatcccatcaccctgatagtgagta

SEQ ID NO: 54023 - DNA, 122 bp, Homo sapiens
gggccatcccgcaggtgctggtgatgatagagatagcagacatgggtgcgtgggccctcccgcaggtgctggtgatgatagagatagcagacatgggtgcgtgggccatcccgcaggtgctg

SEQ ID NO: 54024 - DNA, 122 bp, Homo sapiens
aagagcggaggacggctcctctccatccacggctccgtttcctaggaaacgtggactccgcgttccactctgcgtcgctgcccccttgacgtcacgctccggatgggaaggcggggcgtgtg

SEQ ID NO: 54025 - DNA, 122 bp, Homo sapiens
ccggtgtggccatgagtcccgcagggaggaaccctggctcacgtgctgggagcacagcgtcgtgtcgaaaacagtttgcacagttacgcttttcagtcaccagtttgatgttggattgtttt

SEQ ID NO: 54026 - DNA, 122 bp, Homo sapiens
tgtcgacacctgtggttttgcagggggaggggcggcccagctggcccagctctgaccccccggttctcggtgctccatttcatggggccccaccctgcctggagcgggtgcccccttccagc

SEQ ID NO: 54027 - DNA, 122 bp, Homo sapiens
atctcccatggaaggacccagttcctgaattgccccatgggccgcgccgcaggcctgcaccgaagctcttaatagcctgggcctaatgttttattgttggttttaaaagtgtaattagttca

SEQ ID NO: 54028 - DNA, 122 bp, Homo sapiens
ttctgttctgagtgcaaaagccgtgggctttctctagtggtgcctggggcaggagtagcgcgagggcatgcaggctgcttggtgaggtggttgtagcttgccctacccacactctgtaccac

SEQ ID NO: 54029 - DNA, 122 bp, Homo sapiens
gaccatctctgtttctccaaaacagcctctagctacataaactgtttagaaaacctcatgcgtaaagcagagtatgtcaaacctccatctgtggtcaggagttaggacatccccagctgcaa

SEQ ID NO: 54030 - DNA, 122 bp, Homo sapiens
cacacacatagacaaacacacacacacatatactcttatgtatacatatatactcatatacgtatatatatatatattttttttgagacagtctcgctgcatcacacagactagagggcagt

SEQ ID NO: 54031 - DNA, 122 bp, Homo sapiens
agggcgcgcaggggagccggggtgccagggcgcgcggcgacccgagggacagccctactccgctccttggcaactaacaatgctgccctgcctcctggggctgagcccttgcaggggccggg

SEQ ID NO: 54032 - DNA, 122 bp, Homo sapiens
tgctgtttcctctgccttctccccaaaatatcctcatggttcacaccctcattttattctcgtctctccttaagtagcacctcctgagagaatcttgaccctttcccctctcagtcaccatc

SEQ ID NO: 54033 - DNA, 122 bp, Homo sapiens
tcagccagctctggccccccaagccaggcccttgccacctggccctaggccaggaggctccgggactcacagttgctccccgctgtcagccggggtcctgaggacatccacagctccttccc

SEQ ID NO: 54034 - DNA, 122 bp, Homo sapiens
acacgcgcacgtgcatcaccgcgggcccgcgctgcccaaggtgaagacgcccgcgggccacgtgtatgaatacatcccccacccactgggccacatgtgcaaaaaccccatctaccgctccc

SEQ ID NO: 54035 - DNA, 122 bp, Homo sapiens
aagccgggctttgcctggctcgctcgccacccagtttctgtcacctacacaggaggagggcgcccgggaaatacctgctgcgtgaatgaataaatgaatgaaatgcttgggccctgggaaat

SEQ ID NO: 54036 - DNA, 122 bp, Homo sapiens
cgcagatgcgtagaaaggcaaagacacaaaaggtccggctccgtggcggggcgcgacctccgtacttggaattggacttggagcagctgagcccagccagcctggcccgcgcggagacacag

SEQ ID NO: 54037 - DNA, 122 bp, Homo sapiens
cgcagctcgagctggctcctggaagctgatcttaggcgccgggcgcggacctgacgtgtccgtgcggttccaggccaggccagactcagggcattcccggacacgcccgccaagggctcggg

SEQ ID NO: 54038 - DNA, 122 bp, Homo sapiens
cgtcgagggttgggggaagcaggcagctatggtcatgactcccaaaaataattccttcagcgcttaggaggttgggcggctgggggacgaagggctggcgggcggcgaccgggcggggagaa

SEQ ID NO: 54039 - DNA, 122 bp, Homo sapiens
ctgaggccaggccagttccgcattcccgcctccgggtaaggaggagaattcagccactaccggctggaggaaggagacctgagggtctagtaaaaactagacttggagcccaacctgcctgc

SEQ ID NO: 54040 - DNA, 122 bp, Homo sapiens
aaaacccaaaacccaaatccacgctgtatatcaacctccacagagaacccagtccgaaatcgttttccaataggtttcagaaagtgtgaggacaggacactcctctggcttcctgcctcgca

SEQ ID NO: 54041 - DNA, 122 bp, Homo sapiens
caccctcacccccgagagagacgcctacgtggaagcagtgctgtcggtctccaacgccagcgtggcccagctgcataccgctgggtacaggagagagttcctggaataccaccgccctccag

SEQ ID NO: 54042 - DNA, 122 bp, Homo sapiens
cctcgattctgggtattacatcatttcatttcagctaatgtaaacactcatcaccctgcacgttgcaggatttttcactgtgatttgagattgggcttcattcagtgggtcgtggtgattaa

SEQ ID NO: 54043 - DNA, 122 bp, Homo sapiens
ggctcgggttctgcctctcctccgaggccagcctctatctgagaagacttgggatgctcccgaaagcggaatggggagcggcggcgcgggggagccgggtggcgggcctctgtgtcagggcg

SEQ ID NO: 54044 - DNA, 122 bp, Homo sapiens
aagaaggggcagaatcgctggggagtgcggcttcttcttgttgggggactcccagccttccgcgcgtccggaggaggagaagcggcggcgccgggaagcaggtgaggacccggccccaatca

SEQ ID NO: 54045 - DNA, 122 bp, Homo sapiens
gcgctccaggagacctgccctcgtgtcgctgggggctgcagccctctcctctctgcaattcgtctctctctggatttaggaagacttccatttcaggaagggctgagattcctggaagccgc

SEQ ID NO: 54046 - DNA, 122 bp, Homo sapiens
agggtgtctagaatgggaagcccccaaggggctggagtgggatgggggtgtgatgcaggccgcccaccaggttccctccgggcaaagcggcagggccccgcgcttcctgagccttcacggag

SEQ ID NO: 54047 - DNA, 122 bp, Homo sapiens
agtcagataatgacttaattggattttacagaagattgagttttattgcccagtgctttacgagtttagttaaggaagatcattttatcacacttgtcaggctgctgctactgcagccgtgt

SEQ ID NO: 54048 - DNA, 122 bp, Homo sapiens
aatccaaagaaatcattatttggcaacgtacggttttcagggggatataccccgcgactgcgttcctgtaggatgtgagacaaagagaataaatatcccaggattgggtgctggtgggaaaa

SEQ ID NO: 54049 - DNA, 122 bp, Homo sapiens
ccactggaaccctaggccgtgcagggtaaggccgggccgccccccagcggtcgggctctgcgctcgcgccccggctcgcccagcgccaactttacagatccgcgttctctcccccgaaggcg

SEQ ID NO: 54050 - DNA, 122 bp, Homo sapiens
ccttccccgccccctccgccgttggcccgggtacccccctgcaggcggccagactcagcacgacttcagcacctgttgcaggtggaggcgcacatctgcagccgtttcccagggcaccacgc

SEQ ID NO: 54051 - DNA, 122 bp, Homo sapiens
ctgtcagctcaggcccttccgctgtgcgcccctcacagcctcccctctcaaatcagaacccggtatcactgccctgcttttccatgacaggggtatccgggcaacaggggcgctcccgggat

SEQ ID NO: 54052 - DNA, 122 bp, Homo sapiens
ggcggcagggagggtatgtgtggaatttaaccttgtgtccccagttagactccatcaatccgcaccagcgcccttcaccctcatgggagggggtgttccaacccaggagccagaggtggcag

SEQ ID NO: 54053 - DNA, 122 bp, Homo sapiens
ggagggagaagggggcttcagcacacggcagcgcgtggcccctgggcccgaccccttctccggcagcgcagcagtcctccaccttgtcttgctaattcccagccactgccccgcctcaggtc

SEQ ID NO: 54054 - DNA, 122 bp, Homo sapiens
ttcattcacggcatttcattcgatcaatcagcaagtgtgtgacaagccacagctacaggccggacactgtgataggaactagggacaccataatgaatatgacacttagagtctgtcagaaa

SEQ ID NO: 54055 - DNA, 122 bp, Homo sapiens
ccaagcagtcggcccctgggcagggtcacacgcagcattgaacacacaagaaaccggccacgtggatgcatctggtgcaggcacgagatgcaattcctggtcagggtggggtagaatgagca

SEQ ID NO: 54056 - DNA, 122 bp, Homo sapiens
gcccgagaggatccagggaaagcagaagggggttaaggaccatggacagagcccgtcgcgcgctcgttgctgccgccttccccagcactctggcggctcctgaggacagcggtcccatcttg

SEQ ID NO: 54057 - DNA, 122 bp, Homo sapiens
tcctctgggtggccgtccacaggtggccgtggagagggcccgggccctgtctctggacggcgagcagctcattgggaacaagcactacgcggtagactccatccgcccaaagtgccaggagc

SEQ ID NO: 54058 - DNA, 122 bp, Homo sapiens
gtgccccgcagttctcaaggacacctcggggaggcagcggcggggccggtgtccgggtgacgtcaccgcgcgccccagtgataatcggccggtgccggagcggagcgcggatacgcgcggag

SEQ ID NO: 54059 - DNA, 122 bp, Homo sapiens
acttcttagattccgttcattaaaattagaataataattccttgttaatatactttgtggcgttgcaggatcccaagggccaaagctcccagaaaaatataaagaacaactcaaggtaggga

SEQ ID NO: 54060 - DNA, 122 bp, Homo sapiens
caacacaggaaaagatggtaagagtgctgtgtagccctttgcttgcttgtgactacgagtcgctaggtggcccgcgtttagagtatgcctacggcgcctactaacgtctagacctaggagag

SEQ ID NO: 54061 - DNA, 122 bp, Homo sapiens
gttacagttgtgcttaagccactgctgtggcttaacctcacctatgcataagaatttgctcgtggctggccgggcgcggtggctcgagcctgtaatcccagcactttgggaggctgaggcgg

SEQ ID NO: 54062 - DNA, 122 bp, Homo sapiens
ggattgctgctagggcatcttttaaataactttgtgggggctctctactctgagcaattacgctaaagcagaaagttaggagaaactgtcagttcaaaaagttcatagtgtcctttggcact

SEQ ID NO: 54063 - DNA, 122 bp, Homo sapiens
gggaatatatttgccagtctacaaagtgtttagtgtgcagctttttaattactgcatttacggtactagccataatatattcactatcacaaatgctctacaaagtcattaatcctcaacaa

SEQ ID NO: 54064 - DNA, 122 bp, Homo sapiens
gatgagtgacacccccgcaggtgaaataaataacgatgagtgacacccccgcaggttttccgggactccgtgggatccgcggcttacacggcttgccaggcaccaagggctttccaggatcc

SEQ ID NO: 54065 - DNA, 122 bp, Homo sapiens
aggcgacggagtctgtgatagctagcttatctgctctatgctccagggacctggccggaacgagccgagttgctgtcctcatggaactctcatcctagtggggcagagacaaggacggtgta

SEQ ID NO: 54066 - DNA, 122 bp, Homo sapiens
ccccaacatggccagcacataggacagcaggaggaccacaaagagagggagttccagccacggcctgtcagacacacccagaaggatgaaggctttaggggagtcccctaagaagctatggt

SEQ ID NO: 54067 - DNA, 122 bp, Homo sapiens
agccgcacagagggccccaggtgtctctcagcggtggccataggacacctgaatgagcctcgagccagagagagtgactttttggcggggctctgcaagtggctttctgcccacagctcagg

SEQ ID NO: 54068 - DNA, 122 bp, Homo sapiens
ttgtttttttcagacggagtttcactctgtcacccaggctggagtgcagtggcatgatctcggctcactgccaccttggcctcctgggttcaaggaattctcaggcctcagcctcatgagta

SEQ ID NO: 54069 - DNA, 122 bp, Homo sapiens
gcccgccgcagtgccaaataacagacggcagagggcgctcctacctaacctttcccatgccgcggagggtgcgaggaccggaactttgcgagccgagaaagttctgatttttttccgcagtg

SEQ ID NO: 54070 - DNA, 122 bp, Homo sapiens
ggtggccagggaacctgagacctgcaggcccggggatgcaggtagaaagtggtaagtccccgcggcacacaagcacgtcggcggaggcaggcagacgccacccagccgtaaggatacatcca

SEQ ID NO: 54071 - DNA, 122 bp, Homo sapiens
ccagagtaggacaagagaggcaggcggcggctgctccgtgcggctcccacgcctctcgggcggcaggtcctgcctcggacctgggaccactggctggcgcctgtggctcacatctccacgcc

SEQ ID NO: 54072 - DNA, 122 bp, Homo sapiens
gtcctgaggctcagtttcctcctctgtgccccggcgacgtggtgcaggcctcgcgagtgacgtgagggttcatgacccaggtgtgggcagccagcccttcacgggaggccacccacctggcc

SEQ ID NO: 54073 - DNA, 122 bp, Homo sapiens
tcccaagtcacagactctcaaccttcttccaatttcagtcccagcagtggaggacagcgccgggagcactgcgggaggctaagggcattgctgacagccgggcaatagctgttggcccgcct

SEQ ID NO: 54074 - DNA, 122 bp, Homo sapiens
gctgagggatggtggggacatcctctgctagctgctgaaggtctaggatgggcactgaggcgagcctcagcggtgctccccgggcttgcctcccaggagggaccctgcaggaaggtgtccag

SEQ ID NO: 54075 - DNA, 122 bp, Homo sapiens
cttgagcgcccgcggtcctagcctgcctgtacgcgcaggtcactgtaggtgatctggggacgggggaaggtggagcctgcgccttcccgcctcgcgccatttgcggccttcgccggggtgga

SEQ ID NO: 54076 - DNA, 122 bp, Homo sapiens
cactgcagcgtttgctttgcgttcagatgcggcagctcagcgcagctgtaggtggaggagcgtgccagggaggggggagctgggatgcagctgcaatctacactcgcaggggtctgtcctgc

SEQ ID NO: 54077 - DNA, 122 bp, Homo sapiens
tttacctgttatattagttagagttctccaaagaaaaagaaccaataagatatatgcatacggtgcgtgtgtatgtgtatgtatatgtacatagagagacaggccaaggggccatggctcac

SEQ ID NO: 54078 - DNA, 122 bp, Homo sapiens
cctcctccgagtcgctgcccgcagagaggcacacgctgtcctcgccgtccttgccctcagcgtcttccgggtgcagcagcagctcctccttgggtgacagctccccgccctctgtggccact

SEQ ID NO: 54079 - DNA, 122 bp, Homo sapiens
caagcgagctgcacattgacgtcagctccgagtcatgttgtgatttagtcagttcctttccgctttgtaaaatgctgctgacagatttagagttaactagctcaccactgcctctgcctcca

SEQ ID NO: 54080 - DNA, 122 bp, Homo sapiens
catgtccccagggtgaggctccccacccgggacccaacttggtcagttacaaaacagggacgaaggcgggaggaagcccagtgtcaccaggtgggaccgggtgccgggcctgtgggggtgtc

SEQ ID NO: 54081 - DNA, 122 bp, Homo sapiens
ctttacccatgaccccctcctgcggcccgccgacccgctgtcgccgtcccccggctccgccgccgaccagtcccggactctatatacccgtccggcggaagcttccagagcccgccagcccc

SEQ ID NO: 54082 - DNA, 122 bp, Homo sapiens
cgggttagcccaggaggaattccccctgcaagtccgaagacttttcctcctctgagctcccgccctctctgcagaccgtgctacctcctgttgcgcaatgattgggtcctgaattttatgta

SEQ ID NO: 54083 - DNA, 122 bp, Homo sapiens
cggcatgggcctgctattccccaaactcaccggctcaccatctccccatctctttccctgcggaggcatgtgtccttgtgcttccggtggatcctccgcactgcttctcaaagtgccatgtg

SEQ ID NO: 54084 - DNA, 122 bp, Homo sapiens
caaacctagtgcctaaaacaacagaaattgattgtcttgtggttctggaggccagacgcccgggatcgtggtgttagtgagggtggttcatcccgggagaatcggctgcaggtctctcccta

SEQ ID NO: 54085 - DNA, 122 bp, Homo sapiens
taatatccaccgatacttctatggtcccaagaacctaggcttacttgtcttaagattttccggctatgtaaatgcaaagaggcttctaaaagccagctgataagctactttcaagaagtata

SEQ ID NO: 54086 - DNA, 122 bp, Homo sapiens
taatatactttaaatgagatattatgaatctataaagattctagcatctttcagtatgaccgtaaagaaaggcatacaacttgtacacttaagagacatgtcatctcctcgcaatgaaagaa

SEQ ID NO: 54087 - DNA, 122 bp, Homo sapiens
gaggggcggtgccgggggcggggcttcgccgcgaggccacccccgagccccgggcctagccgcacgggaggcgacacaccctcgccctaccctgagcctggcgcagaccctcgaccgcgacg

SEQ ID NO: 54088 - DNA, 122 bp, Homo sapiens
tgcaaaggtctgcggcttcactcctgaagtcggcgtagaccatgaacccacgaggaggaacgaacaactctgggtgcgccacctttaagagctgtaacactccctgcgaaaaaggtggcacg

SEQ ID NO: 54089 - DNA, 122 bp, Homo sapiens
atctcagcgctttccaacaatggaatagctacctccagagtagtgagtttcccattaccacgaacagtcaaggacagttggacacagaggcagaatgtgataaatgaaaatactttggaggt

SEQ ID NO: 54090 - DNA, 122 bp, Homo sapiens
tagaaaaaccgcagttggagagactgacagaagtgctggagaggaagggaggcagcaggacgtggaaaatctgggattcaagaacagcttctgctattaattagctgtgtgtcatttcaggc

SEQ ID NO: 54091 - DNA, 122 bp, Homo sapiens
ctgtctgccctcctgtctcctaccagcatgaggttcttatccctctctagctcctgcaagcgccgggccagtcgctgcccctcctccttccgggcctcctcctgcagacgcctgagttcctg

SEQ ID NO: 54092 - DNA, 122 bp, Homo sapiens
gggctgggatccccgactctactgaaggggcacgtcctttggcggtggtagaggggcgggcggataaacaggaggtagaaggtgggagctctggggctttagcctaagctgcgttaaagcgc

SEQ ID NO: 54093 - DNA, 122 bp, Homo sapiens
tttaatttcagccgttccagcggatgtgtactgatgtgtcctggcttggatttgctttcacggtgaccagtgctgctcctcgtttgttcatgtgcttattggccatttgtatgttttccttg

SEQ ID NO: 54094 - DNA, 122 bp, Homo sapiens
cacccaatatttcccctcccttcaaggtctgaggtcattggtctggtggtggggatgcctcggagtttcccaggctgacgtcagggttatacctctcggaggttctagggcagggaagtggg

SEQ ID NO: 54095 - DNA, 122 bp, Homo sapiens
tgaccgtggcactcatagggtgtttgttgagtgaatgaatgatgccttttcagctgaactcgagctagaagactccagggctcactccactgtgcccattccacagatccggccccgaggtg

SEQ ID NO: 54096 - DNA, 122 bp, Homo sapiens
aggtggggtcggtaggctgggtgtcttcaaaggagaatgggccacactggttgcctctcccgtggactgtggagaggccagtggacctagagacttctgcatttttcttaagttttccaact

SEQ ID NO: 54097 - DNA, 122 bp, Homo sapiens
gtaacagggggcgtggttccggggcgctggcactactcccggctccaggacccggttccccgtctatgtcccaaagtccaccccgcctagctccgcgcccaaataccggctccccatactct

SEQ ID NO: 54098 - DNA, 122 bp, Homo sapiens
gggcactgggttccctcttgggtcttgtccttttgtcttggggccctttcactccctgcacggtgagtggtgggcacaggacaggggctgatgttgatggagtgatgggagagaactgacag

SEQ ID NO: 54099 - DNA, 122 bp, Homo sapiens
ttaatcccagccaaattccttctcagagttatggataaaatctgtgtatgtagctgtcttcgtccatttttgtgttgctataacagaatagctcagactgggtaatttatttttaaaaagaa

SEQ ID NO: 54100 - DNA, 122 bp, Homo sapiens
cctcaccttcagcagcatctatgccctcatccagcactaccgcgagacgcacctgcgctgcgccgagttcgagctgcggctcacggaccctgtgcccaaccccaacccccacgagtccaagc

SEQ ID NO: 54101 - DNA, 122 bp, Homo sapiens
agtcatgtccattataacacagaggctgccacggtcagcctcaccatgccttctaatgctcgtgaaagttgagaaactcccagtcacccaaatgaatggtggaaagacaggagcctgcctgc

SEQ ID NO: 54102 - DNA, 122 bp, Homo sapiens
ggaccctggtgggggggcgggggggttctttcgcccccgtggcggagggcccctgagaggcggatacgggtgtgcctttgggggtgatgtggcgtgtggggggaaaggtccgagctcgcctg

SEQ ID NO: 54103 - DNA, 122 bp, Homo sapiens
gcggccgcccggcgcccggcgccgcagtcccccctgccgtccccccatcgctccttccctcgctgaagcaccaccagcaccaaatggcaaagcgccgctccccgcgcagggagagatgcgcc

SEQ ID NO: 54104 - DNA, 122 bp, Homo sapiens
tggccgcgcttctggccgctagagcggatagtggatcctagggtatggagcggctcgctccgcccatggacgcctctccatgtggggcggagctagggccgtggcttggcctagtagtggag

SEQ ID NO: 54105 - DNA, 122 bp, Homo sapiens
ctcgaattcctgacctcgtgatccgcccgcctcggcctcccaaagtgctgagattacaggcgtgagccactgtgcccggcctcaatagcgactctttaagccccctactctaatgtctgata

SEQ ID NO: 54106 - DNA, 122 bp, Homo sapiens
cagcagctgctattattactatcaatttaagagttattgttaaagaagtgaaactgaacgcgcttaggtgtgcgctcaaagccagcaacctggctgggtccgcacggagacaggcggggcag

SEQ ID NO: 54107 - DNA, 122 bp, Homo sapiens
gctgagagccccaggcacagaaggggtagggaatgttgccaccacccccaccacggaccccgctgcagcttccaggtgatgccacaggccctgaaatcaggacacccttgctgtacatgggg

SEQ ID NO: 54108 - DNA, 122 bp, Homo sapiens
tataaaaaggataatcgtttccgcttcgtggggttaccatgacgattaaaggagctaacacgtgacaaaagctttaaaaaatgggtggtagtgagccctgtttaagtctttttttttttttt

SEQ ID NO: 54109 - DNA, 122 bp, Homo sapiens
ccttccctcagccctggggaccagcggggactacagaacccagaaggttttgtctccagccgcagggatgctgagccaatccgcgctgagaaaagggtcgtttccgctttgggaccaatggg

SEQ ID NO: 54110 - DNA, 122 bp, Homo sapiens
gtttgtttgtttgtttttgtttgttgtttcccccaccccccaccgctaatgaatcaggaccgcgaaccgaaagaacgcacaaaattctgtcctgaaaacacgaaaacctgagccagccgtgg

SEQ ID NO: 54111 - DNA, 122 bp, Homo sapiens
gccgcttagcttcgcttctttactgtcattggctgtcgctgttccaggtcccgcccacagcgacctcaatcctgattggatgtcagtgtccttttgttatggcaaaggtggatcccggtgct

SEQ ID NO: 54112 - DNA, 122 bp, Homo sapiens
ggcggccgcgggcgtggacagacccggttacctggggttcaatctctgggagccgaggcacgggagggagagaggcgcaggccccggcggccgcagggggcggcagagacacgcggagcggc

SEQ ID NO: 54113 - DNA, 122 bp, Homo sapiens
agggtagagagcctcttgcgcgtccagaccgtcccgaaatctgtgcttcacggtcacggccgggttttgccctccatggggctagttttgacccctgtcatgctgtgttttctccaggctgt

SEQ ID NO: 54114 - DNA, 122 bp, Homo sapiens
ggtaacctccgagggcgcagccccagcagcgagcgcaggggctggcaacgcttgcctctgcgccagcagagccatttcctgctgggtttctcctgctcagttgggactggtagtgtgtgagc

SEQ ID NO: 54115 - DNA, 122 bp, Homo sapiens
aagggctgggtgtaactgagtgatggatggatgggtgagtgaacaggagccaccagctcccgaagagcctccaattaacccctgaaggtgatgggggtaaaagaagcagaatcaggcttgga

SEQ ID NO: 54116 - DNA, 122 bp, Homo sapiens
aactatttgagagcaaaggatttgactatgtattacctcaatgtgtaaaaacatccaccccgtttgtcatagaggatataacactatttgtaccaaccatccgctaccctttgtcaaaatga

SEQ ID NO: 54117 - DNA, 122 bp, Homo sapiens
gcctcgaagagcattatggccgtagatctgggtgctgaggactgagccacccccagactgcgacatgggcggcggtgcctccttccccaagccccagggagtgtttttttgtttgttttgtt

SEQ ID NO: 54118 - DNA, 122 bp, Homo sapiens
ggaagacgttccttctcgcccttcctcacagcccccagcactctatttcattagaagcggcgccacaagttccctggctctcacccttagggaggcaagttcagcaccatggaaagggctca

SEQ ID NO: 54119 - DNA, 122 bp, Homo sapiens
gaacctgcacgcctggggtcccaggatggctggcttgcccctcccgtccgaagatgacctcgtccttctctttcagtcccggtgggtcttcggactgccgccgccgcgctttcctcggcctg

SEQ ID NO: 54120 - DNA, 122 bp, Homo sapiens
ccagtctcccagcccacagccagcaccagccgcgtcgggtgccagcacagggaagcaacccggaacggcctctcgacgtgtgtatctggcacgcactccccctgcattggatgagaggcaaa

SEQ ID NO: 54121 - DNA, 122 bp, Homo sapiens
cattcttctgagagattgaacatacaaacagccaatgggctgcagccaatggccagaccacgtataaaagcagaactccaacccaaaatctacatcaacctgcccagaaagccagcccacca

SEQ ID NO: 54122 - DNA, 122 bp, Homo sapiens
aaaaaaataaagattagccaggtgtggtgggctgtgcctgtggggacacactgtgggctgcgcagaagaggcagcatgggtgggctttctacaagcagatgtagtagtggggtagggctggg

SEQ ID NO: 54123 - DNA, 122 bp, Homo sapiens
gctgggcttgcctggctgccggcacttccacacggccagcacacatgaggccctcgaaggcggggcctaggcgtcacagctgcaccttgcacagcaaccccactcccactcatagctggccc

SEQ ID NO: 54124 - DNA, 122 bp, Homo sapiens
tgcaatggagcaagacaaaagccacgcggcacctgcatccgcatatgcagagagtacttccgactacagataccagagagccgcgtgcagcctccgccagccgaactacaagtctcagaggc

SEQ ID NO: 54125 - DNA, 122 bp, Homo sapiens
taccgccagctctctgctctccacagggctccccgccccacccggcctgataaagcgcgccgactgggctacaaggccaagcaaggttacgttatatataggattcgtgttcgccgtggtgg

SEQ ID NO: 54126 - DNA, 122 bp, Homo sapiens
gtatttgaggagcacagtttgcatgcacagtgtatggaggagacaggcttgaggcccaagcgggcttattacaaagtgagggattggggttaggccctaaatgtagttcctccaagacaggc

SEQ ID NO: 54127 - DNA, 122 bp, Homo sapiens
gtggtggtttctcagtggtagtggtgatgtatataaagttaatgtttagcttctaaagggcggcttacggggcatttaccaaactatttttaaacagtgttggagaacaggaagtacttgca

SEQ ID NO: 54128 - DNA, 122 bp, Homo sapiens
gaacacacccctgtgtgggtatccgtgacctggcggcctgcagaactcctgggccagagacgtcctcatcctgttggaatatccaggtatctccactccgaatatcctcatcttcctggaac

SEQ ID NO: 54129 - DNA, 122 bp, Homo sapiens
gtaacgttcccacaccgtgcagcaagcggagggaagagaacttccggcgcccccacctaccgctccccagccgtgtcccgctgctctaaatctgcagacttgatcgattgcttctgcctggg

SEQ ID NO: 54130 - DNA, 122 bp, Homo sapiens
aagcacaggaaattccccagggaccggggaccaacccggggcccagtaacaggaaacatccgtgtcccaagtgttgaggcctgatgcctgctgacttgtgcaactgcagcagcaagccagct

SEQ ID NO: 54131 - DNA, 122 bp, Homo sapiens
tctgaaaggctcatgggagaagagacagtcagggtcagcttgttctgtgcacacagctcacgggagctccaggagcagggatagatgttttgatcagccattactgaatgctaaagtcatag

SEQ ID NO: 54132 - DNA, 122 bp, Homo sapiens
tgttttgtcaaagtgtacttttcaaaaagttaaaacctacgtctaaatatagaatgaacacgtaacaaagatttattaggccgggtgcggtggctcatgcctgtaatcccagcactttggga

SEQ ID NO: 54133 - DNA, 122 bp, Homo sapiens
aagctaccattaagaaaagcattctacctttaatacttacaagcattatagcactagttccgctgtagaatttctaactcagagatttcccctgcccaccttgtctaaaagaacagtctcca

SEQ ID NO: 54134 - DNA, 122 bp, Homo sapiens
agctctgctagcttccccagtgaggcctcagaaatggggtcccagtggctgattcctcagcgccgcgacgcggacactgcggacgcgctgcggtgggtgcggagactcgcaaggagccgagg

SEQ ID NO: 54135 - DNA, 122 bp, Homo sapiens
gtggggtcagataagggaataaacaggctgcccagtttgccgccgcgatctgcttgggttcgtttccacagcgtggagtaaattttgctgcggctcacgctttgggtctgccacgtctttaa

SEQ ID NO: 54136 - DNA, 122 bp, Homo sapiens
gggctacagggccgaggacccaggccacacgggcaccccgggaggcggggcacagggtcacgtgacacagaacatgaaacacaggcacagggtcataggccagatgcacatccagccatggc

SEQ ID NO: 54137 - DNA, 122 bp, Homo sapiens
gggggtggccgctgggagatgcctgcctctaaccgacgtccaggcgtgactaaacctcgacgccacccccattcacaagctcaactcagggattcccaagcaaccgcagaccggaggtggcg

SEQ ID NO: 54138 - DNA, 122 bp, Homo sapiens
gcggagccggggcaattggaaggccgcgcctcaggaaaacaggatggtagtgaatggcaccgagccgccccagggctgccgccgtcacctcctcggcggctccgagtcgtgcgaggcagggg

SEQ ID NO: 54139 - DNA, 122 bp, Homo sapiens
tctgcattagagccaggcttcaaagaaatccctcagacacagctccaaggagcgcaagctcgcaatcactgtgcgcaaaatccacaagaccgctgaagtcaggagcacagcccgaaagccag

SEQ ID NO: 54140 - DNA, 122 bp, Homo sapiens
cgacacacccattttcccctccctccgccagggccggctcgggcgccggttccagcctcgcgcgccagcccctgtcggccccggcctgcaccttcatccccaggacgtcccgatagaaacgc

SEQ ID NO: 54141 - DNA, 122 bp, Homo sapiens
taaggcatgactttgcttccaattggccatttgaacaaagcaattaaatcatctgaattacgcacctaccaaactgccacagttactagaaatcagacaactgccaggcacagtggcccatg

SEQ ID NO: 54142 - DNA, 122 bp, Homo sapiens
cagttcgctcgtgctcctccacggctggccaggctcaaatctgggggataaagccttccccggactgattggagagtggttggagtgcgcttggttttcggtgccagatgctggaaaattgg

SEQ ID NO: 54143 - DNA, 122 bp, Homo sapiens
cgggtttgggaggagcacacgcagggcagcccaccgagcccctctgtggcatgggggtgacgcgttccatctgcgcccagccctgaccggaggtggcttttgtgtgggtgtgaagtgtagag

SEQ ID NO: 54144 - DNA, 122 bp, Homo sapiens
cagaggagcagccgcagccgcgctgtgcacccaggaacctgtccttcaggaaggaggcggcggtagaaattaatctgctcagattttccaactaatgaagtattcccaggaccgaaggggcc

SEQ ID NO: 54145 - DNA, 122 bp, Homo sapiens
tgtaccctttgttaactctgggctaccctggcggctcttgggggaaggaggctgcagggccggggctggcaggtcacagctgcttgctttcacatggggcagcacaaaagtgggtagagcga

SEQ ID NO: 54146 - DNA, 122 bp, Homo sapiens
caaaagggatgaatttctaagccagaagttgcaaactgaagttgcaatctaaactaaatgcggctcattagatatattttatttgctttgcatggtgtttgccaacacttaaaaattaggat

SEQ ID NO: 54147 - DNA, 122 bp, Homo sapiens
cctctgcagccgctggcctgggtgctaagctcctcatttcctggggctggcagggctggccggctgctcccagtgcggggcccgccaagcccacgcccacgcggaactctagctggcccgca

SEQ ID NO: 54148 - DNA, 122 bp, Homo sapiens
gcgggcctagcgcaataactggtatgggtctgtgtttccgctgtcttcttttttctttttcggggaggagcggggtggagggtggacgagttgatttgaacgtcttcgggtcgctcggcctc

SEQ ID NO: 54149 - DNA, 122 bp, Homo sapiens
gcgtcgacctcccctccattctcctgggcgtcgcgcttccctctttgtttcccgcccttgcggttctgtcggaacctaacgagcttccttccaccgcaaaagagctggagaacaatgctagg

SEQ ID NO: 54150 - DNA, 122 bp, Homo sapiens
gctgggggccagagaagggcattgcacatccagaaccctgatggcaggagagtcagagaacgggcacaccaccaagtgtgatgaaacttgtgggggattgacgatgagtcattcttcagact

SEQ ID NO: 54151 - DNA, 122 bp, Homo sapiens
cttaggaatcaaacacacccaggttcaaatcccagctctaattcttcttggcttgtgtgacgtttcactcctctgggcctcagtctctccatctgtaaaatgggactaatcttgtctgcctc

SEQ ID NO: 54152 - DNA, 122 bp, Homo sapiens
taaagtcagagcattcgttagcagtaataagtaggaaaggaacacaaaagcatcttgcatcggttgaagcttcagtgagaaacgaatttaaagtagggttgccattttggacagaaaaacat

SEQ ID NO: 54153 - DNA, 122 bp, Homo sapiens
cttgcagagatgactccatggagagcggactctgccggcgggaactggagtcgttggtgacgtcatcccagtctgatctgtgaagggtagggccagcaggcagcaccaaagttcccgtatgc

SEQ ID NO: 54154 - DNA, 122 bp, Homo sapiens
gaagaatctaaacaagtccgccgtttgctgtttgggagtgcgatacaaaatgaatatgtacgcaggtggaacgtagactgcagattttgagccagcggcgtttctgccgaaatcctggcaaa

SEQ ID NO: 54155 - DNA, 122 bp, Homo sapiens
ctcatacataataaataaatagagcacggccatgaaccaatgacttcagatgaaaatgctcgcatgtaaacatacacgtattttataatttatttgtaacaaaggccttaggaaggtatagg

SEQ ID NO: 54156 - DNA, 122 bp, Homo sapiens
gggccccatccgagcgccgatccggcccggtgttcagcgccgccacccccgcggcgtccgcgctcccccgcccggtccccggggcccacccaggacccgcccggcaccccgcgcccaccccg

SEQ ID NO: 54157 - DNA, 122 bp, Homo sapiens
tttacaggatgaaatgagatgaaacatgggtcaaattacatgtgaagccacacctacctccgcagattttttttttttttccagagtgatagggtctcactatgttgcacaggctggccttg

SEQ ID NO: 54158 - DNA, 122 bp, Homo sapiens
aggttcagggcgggcggcacgcaggcccaggtgctgggagaaggacgccgctgttcacggcgcagccgggccacaagggccagttgtctgcacgccttcgccagtcgccccagcaacacaaa

SEQ ID NO: 54159 - DNA, 122 bp, Homo sapiens
actcgggaagtgcaaggggtcagggaattccctttcctagtcaaagaaaggggtgacagacggcacctgaaaaatcgggtcactcccacccgcatactgcgcttttccaacgggcttaaaaa

SEQ ID NO: 54160 - DNA, 122 bp, Homo sapiens
ccccacccaccccaccggcgggtcttgggctccgaacccagggcgccccgcgcaccgagccgttgcgtttgaaacccacagaaagaattcccccgctcgacgacggcgagggtgtgggagct

SEQ ID NO: 54161 - DNA, 122 bp, Homo sapiens
agtgagtgttacagctcttaaggcggcgcctctggagtcattcgttcctcccggtgggctcgtggtctcgctggcttcaggagtgaagctgcggaccttcgcggtgagtgttacagctcata

SEQ ID NO: 54162 - DNA, 122 bp, Homo sapiens
cagcctattcacgaaaaagcttgaccagtctttgccaaccaggacaccaaccttagctggcgtgatgttcacgaaggtttttccctgggacggcggcccagatggagggtgagtccttgttg

SEQ ID NO: 54163 - DNA, 122 bp, Homo sapiens
aagaggagacatccgcagctgaaaagtgcgctgcaaaaggcagtgggccgtttggtgtgccggaaacataagaaaccacagtacaaaacaccaattttattataaatatcaagaacctacag

SEQ ID NO: 54164 - DNA, 122 bp, Homo sapiens
ctttctgcgggttcgtgagaattaggtgtgaacgtggtgtccgcggatttcagcagctagcgggcaagctccagcgcccagaaactttgagtcgcttgtctaggagtcctgtgttgaattgc

SEQ ID NO: 54165 - DNA, 122 bp, Homo sapiens
ggaaaactagactgaacttcatttaatatagatgtgtcagtatcacagctcaaaatctgccggtgagaagctgctgttgtatttccagctaggaaaagtcaggaatctttcaagtttccact

SEQ ID NO: 54166 - DNA, 122 bp, Homo sapiens
gtgtaacttccttctctgtcagtgcgacctttccccgtcgtggagactcctcatcccgggcggggaagtggaagcaagtagtttgtgagggagatcttacaacctgcacggaaattattttc

SEQ ID NO: 54167 - DNA, 122 bp, Homo sapiens
tgccaatgtgactgtagcccactgacagaaggagatttggattctactacacctcagactcgtaactcgttgtgtgaccttggaaaaatcacctaaatctcaatctcttcattatttatttt

SEQ ID NO: 54168 - DNA, 122 bp, Homo sapiens
cagcccggggatgggcctgggcctggcgaggggtgggcctgcgggaggccgggcgaggggcggccccggcgcgtggaagcagggtacggcgcctgcggatcccctggacgtggactcaggcg

SEQ ID NO: 54169 - DNA, 122 bp, Homo sapiens
ggcacggggaacacctgtgggcaaattcacctctccacgtgccaactaccgccggccggacgtgatgatccctgagcgtggagcacacccgagccatcgaacatcctaaccccatcaggatc

SEQ ID NO: 54170 - DNA, 122 bp, Homo sapiens
ctttccgagtttatgatttcccaagaataaattaccatgtgccattcatccttcatcccacgcaggctccatcgaagactggtgcccacctacgagagcgcgtccatccgccgattccagga

SEQ ID NO: 54171 - DNA, 122 bp, Homo sapiens
gacacagatgctcagtgctagctagtacggggcaactgtagcttgccagctcaaggcccacgtggtggtcagtgggcactactaggctatcagcccagctgacatccctctcaggggatgtt

SEQ ID NO: 54172 - DNA, 122 bp, Homo sapiens
aaccgtccaatcaggcatgcagctggagcggaaaaggcggcatccgagatgtggcggggccgttgtttctggttgcagccgcagttcccggtctcgccttcactgctgtgtgtcctcagcct

SEQ ID NO: 54173 - DNA, 122 bp, Homo sapiens
ctgttctaggtgtcttgccaagggcagtactcagaatgtagacagatcagcctctcttgccgttggttaatctgccaggcagaaatctgtttaacaaacaaacaaacaaaaaattaaaaagg

SEQ ID NO: 54174 - DNA, 122 bp, Homo sapiens
gcccttccccacaccccagggttttgggggctggctgttcttctcctggtagaaggcagacgggagcttgggacaatgacatccaaagaaagagacaaacatctacagaggtacacacaggg

SEQ ID NO: 54175 - DNA, 122 bp, Homo sapiens
tgggtctaatggtagttccactcttagttctctgagaaatctccaaactgactgtgcctacgctaaattaatttacaccttcaccaacagtgtacaagtgtctgctttcctctgcagcctca

SEQ ID NO: 54176 - DNA, 122 bp, Homo sapiens
cttctgccaattattccagtctctcttggagctgacttttttagactaatcctgctatggcgcttaaatatccctgttacagaccacatggtctactcattggcctcttattcatattctcc

SEQ ID NO: 54177 - DNA, 122 bp, Homo sapiens
tgctcactgaaaaaatgctgtcttcaggtcaacccaagtgacctgtaaataaacaaaaagcggcaaccagctctccccaaatagctgctttcaaaatagccctacactgctctggctcaaga

SEQ ID NO: 54178 - DNA, 122 bp, Homo sapiens
ttctctgtgcccacggtcctgcacctgtggtttcaatgccacagagcaagtttacaaaggcggggtgaaagtagggagcgtgccaagcgggcagcagaccagccccccgccgctccttgtgg

SEQ ID NO: 54179 - DNA, 122 bp, Homo sapiens
tccaatactgtactatggaagaaagcagagctaaaactcaattcttctttttttctccttcgtagtctaatatactgttgttgttgctgttgttgttgttgtttgtttgttttggtctctga

SEQ ID NO: 54180 - DNA, 122 bp, Homo sapiens
gaaatgatacaaatctacatgtgcatgtttctagaattaatacccatatgttcactgtagcggtgggattttctactaggggaatccgcattgggagaagtatccccgccttgggagcattt

SEQ ID NO: 54181 - DNA, 122 bp, Homo sapiens
ctcgggaggtgaagcacacaagcagcccataaggttgggatcctccgtctccaagtagcgcgactacagctcttgcccgcacggagcagcctcggacagcgcggccgctttaagagaggggc

SEQ ID NO: 54182 - DNA, 122 bp, Homo sapiens
aggaggggagatccccatctggaacgggctccttgggcccaggagcgggcaagccgggagcgcgctccgaaaagtttaggcgccccggcgcatggccgccccagccctggaccagtccccac

SEQ ID NO: 54183 - DNA, 122 bp, Homo sapiens
ctctctgcagcgctccgagcccttcgtggtgttccagaccaaggagctgccggtcctcaacgtctctctggggcccttcagcaccagccaggtggtggcgcgggagctcctgcagccgtcca

SEQ ID NO: 54184 - DNA, 122 bp, Homo sapiens
aattgtatacttcagccactagagggaagagactctagtatttattctggggaaagaaaacgtgcttcatctctctgattctgtcactgacctttaatctgaagggggttatccttagcatt

SEQ ID NO: 54185 - DNA, 122 bp, Homo sapiens
agccgggcagctgcagctcttcctgtctcacccttaccgatgtttggagtttgtaaaacccgctaatccccgaccctgtgtcatccgcagcaagctaatgggcctctcttcagagctcaggg

SEQ ID NO: 54186 - DNA, 122 bp, Homo sapiens
aagcctggggaattacagactgccagaagtagatcacgaagtccaccacctgaatctcggcgtttggcaccgtgcctggtacacagtggacgcccaacaaacggcttgcttgcagaacagaa

SEQ ID NO: 54187 - DNA, 122 bp, Homo sapiens
gccggatgatttccgcccacatagagggcgccagtgacgcccacacacgtgctggtgtcccgggaagagttcctggcaaagagctcaggaacgttggatcttaatcaaggctttctccgtcg

SEQ ID NO: 54188 - DNA, 122 bp, Homo sapiens
tgaccttgtgatccggccgcctcggcctcccaaagtgctgggattacaggcgtgagccaccgcgcccggcccaatttctaaattttaaagctactttaagaggaagggtcttgaatatactg

SEQ ID NO: 54189 - DNA, 122 bp, Homo sapiens
aatttatcttttgctgacggatccagcctccggaatgcccgattgtcttgatccgcggtgcggtgcgggttttaggggcgcacaatacagggtgtccagacagagtccaacaggtggcctgc

SEQ ID NO: 54190 - DNA, 122 bp, Homo sapiens
tattgtttccctgacttgtgaaaataaaatccaaacatatatttgtgatttcatacagcccggaagaccatgaaagaaacatgagcccgaggaatttgtcaacccactctctctctgtggtc

SEQ ID NO: 54191 - DNA, 122 bp, Homo sapiens
gggaccgtctctgggaccccaagtccccaccctgctccagtcccaccatttctatcttctcggcttatcccgtccccgagccactcctgctgtctgttctgttcagtccctctcctgtcact

SEQ ID NO: 54192 - DNA, 122 bp, Homo sapiens
ctcagtacagccctagccagtcctgacggcagcgacccacctgcgaccccaactctacctcgcctccatgggggggtgttctccacagaggatattgtcccactttgaggtcctcgcactta

SEQ ID NO: 54193 - DNA, 122 bp, Homo sapiens
gattcgccctattcctggcgactctacaaggttggagacccccgtagacttcgcagccatcgccccttgctgcagacccccaaagtcaccgacagccttacctagacctgaccttcctcacc

SEQ ID NO: 54194 - DNA, 122 bp, Homo sapiens
agccccagagctggggttccctacagggcagcctcctgcatgctgaggaggcagtggccccggccaggcagcctgggtaggaactcagggcggagaatggaggatatgggaaggggttctgg

SEQ ID NO: 54195 - DNA, 122 bp, Homo sapiens
gatcaaccagctgtttggccagcaggttcccgaagccagagtcacagcctgtgatgaagacgtacttctctgagaggttgccaaccagattgcagttcttgaaccagcgatacataaatgag

SEQ ID NO: 54196 - DNA, 122 bp, Homo sapiens
ggaactgcaatggcgccgataggttctccccatcgttgttgcccaggtggttgtaactcacgatggacatggtctgtgggtacaagggaagccccagcagctgcaggccctgcggccccaca

SEQ ID NO: 54197 - DNA, 122 bp, Homo sapiens
gcctcgccgagtatgctctccagcagcgtgaagacaaggggccctatcaacagctcaagccgaattccatcttcattccaaagtgctatcccttcctctcagggcattaatgtaacatgacg

SEQ ID NO: 54198 - DNA, 122 bp, Homo sapiens
gcatgcccagggagctggtgcaagggaagagcagggagcggaccctgtgtgatgaggtgccgggagtggccccagttctgctgttccagctgcccatccccaggtaggcacgtgggccccct

SEQ ID NO: 54199 - DNA, 122 bp, Homo sapiens
caccctcaccccaactgagcgagcccagggttgggggaggtgcatagttcccttcctagccggtgcgagaaattgcggagaacagggaagagggtggcaggaagggtctggtgcacgatacc

SEQ ID NO: 54200 - DNA, 122 bp, Homo sapiens
cggccagggccttggggcggggaccccggggctgccctaatggggcggggctggatggggcggggtcgcggctcctcccccggccgaggcggcgaggggaggggaactggcctgaggggctg

SEQ ID NO: 54201 - DNA, 122 bp, Homo sapiens
gtctgtgctcagggtccagacacagctcagaaccgaccttccttggggagtgacagtccccggaggttaggggctgctgtggccaaagagccacagatcggaggtgaggaaggtctgcccga

SEQ ID NO: 54202 - DNA, 122 bp, Homo sapiens
ggatggcctggattctaggcccatgggtgccaacttggagcctggggttgctggggctaacgtggaggctagatagagtcttgggggccaggctagagctggagcaggcctgaagtctaggt

SEQ ID NO: 54203 - DNA, 122 bp, Homo sapiens
cctgcggccacgtatcatcggcggctcctcctcgctgcccggctcgcacccctggctggccgccatctacatcggggacagcttctgcgccgggagcctggtccacacctgctgggtggtgt

SEQ ID NO: 54204 - DNA, 122 bp, Homo sapiens
cccaggcagtccctgacgtgtcggggaggagccgggcgcggaggtacgctgagtggagctcggggctgcgtaggggagctgagccgagcggctgggcgggcctggccgggccggcggagggg

SEQ ID NO: 54205 - DNA, 122 bp, Homo sapiens
gtatttcattgcaaagacatctgagaaactcatttatcctaataggttcatggaagatcacggttgaatgtgctatctctttcaggtgatagttattttaaaagaagattcctagaagtatt

SEQ ID NO: 54206 - DNA, 122 bp, Homo sapiens
ccctgcttgctgaggtggccagtggcttgtctgaggattacgccgtgctgaaaacagatgcgggcattgcctacaggggccgctttatcagtgatggcaagggtgtcctttccagatcactg

SEQ ID NO: 54207 - DNA, 122 bp, Homo sapiens
caaagtcagatactttggggggtggaatccattagatggcaaaaacgaagtgatatctcacgcatgttcccctttgaataatagctagaccaagcaaggctggccgatgggagggaggagtc

SEQ ID NO: 54208 - DNA, 122 bp, Homo sapiens
ttgtatcttgatctagggttttggggttcccgacgcactcattctgcccctaaatccagtcgcgcagacctcagctccgggggaccgagttctgggggtgatggccggggggagggggttgg

SEQ ID NO: 54209 - DNA, 122 bp, Homo sapiens
gcccatcctccagggggagaaggtatctgagatgtagctcagcttagagcggtcccagagcgacaagagggagagcttcacaggcctctaagtttatttgatttttctcctgcagtttccat

SEQ ID NO: 54210 - DNA, 122 bp, Homo sapiens
tagagatgggttgggttggagaaaactgcgtggcactaggacccagggggctcccgtgagcggatcttggggccagattgcaaattcgcggtgactcagtctggtcggctccttgcgctcgg

SEQ ID NO: 54211 - DNA, 122 bp, Homo sapiens
tggcgaatacagctcctattgatagaacgtaatggaagtgagctacgacgtagtatgtatcgtgtagtatgatatctaatgatgagtttgctaatacaatgccggttaggccacctacagtg

SEQ ID NO: 54212 - DNA, 122 bp, Homo sapiens
cagggctggtcctatccagccccacgcgaggcccagcttaaatgccccattctgcgtaggcgcaccctgcagtgtgtggctaagaacagggctctggagtcaaatgcttggctccaaaggga

SEQ ID NO: 54213 - DNA, 122 bp, Homo sapiens
ttccatgcttctttcattaatgcattctatttttactggtgtatatactacctttatctacgttagtagactaagagcttttggagggtgaggactgtgttctcattgtattccgggtacag

SEQ ID NO: 54214 - DNA, 122 bp, Homo sapiens
tctccttggagcagaggcggggccaacaagcctgttttagaaaccctccagtccttagctcgtttagaacacaagactccaagcttattggagggctatcttgccttacggctccaagccgc

SEQ ID NO: 54215 - DNA, 122 bp, Homo sapiens
cggatcagctcagacactggcctcattaactcaatataagttggagacagggagcgccgtcgtctcagtagtctagacgcagatgaggatgattctctttgagcatgttttgagatttcgta

SEQ ID NO: 54216 - DNA, 122 bp, Homo sapiens
tcactcactgtggccacagtggccactcagatcacaccccgtcactcggtatggccacggcggcgaccactcggattgcatcccgtcactcaatagggccacggcagccactgtgatcgcaa

SEQ ID NO: 54217 - DNA, 122 bp, Homo sapiens
tgtacacgtaggttctcatctgcaatgtggttcgcccgggttgaggcctaggctcgggtccgcacgccccaattcacaatggggcagagaagtctgtcagtccccgccaactcgcgcgccac

SEQ ID NO: 54218 - DNA, 122 bp, Homo sapiens
ctgccctgtgaagcgggtgtgcaagctccgggatcgcagcggtcttagggaatttccccccgcgatgtcccggcgcgccagttcgctgcgcacacttcgctgcggtcctcttcctgctgtct

SEQ ID NO: 54219 - DNA, 122 bp, Homo sapiens
tagcttgtcttctgggttccttaacaacaacaacaaaaaattaaagtctttattttaagccgcctactccagccatcccaggacgcggcgaggagggggcgcggacaggtggcgcgcgagcc

SEQ ID NO: 54220 - DNA, 122 bp, Homo sapiens
agaagaactaacataaatagaaagcctactacctgtgaaattcagtatttaatgagcacccgtcttgagtttgcacagtgctggcacattaaacaatgaattatatatacatatatacacgt

SEQ ID NO: 54221 - DNA, 122 bp, Homo sapiens
tgagctcggaatccagcccggggaagtccttaaagggcgacagcccctccttgttggagtcgtgagtgcttcttttagacattccccaaactgactcgccggcctctgcgggacgctatagc

SEQ ID NO: 54222 - DNA, 122 bp, Homo sapiens
ggagatcttcagtctgaagacacaacttcggggcagccgggcacaagcccaggctcaggacgcagagctggtccggctgcgcgaggctgtgcgcagcctgcaggagcaggcccctcgggagg

SEQ ID NO: 54223 - DNA, 122 bp, Homo sapiens
ccagaaagtaccaggcacaaaagaaaaatacatggtcttaagcgaggtctcatttccatacggcaatgctttcctgaaaagaccaaagtatgtgaaagagggcaaaaagaagacaacagaca

SEQ ID NO: 54224 - DNA, 122 bp, Homo sapiens
gggattaccggtgggagccactgtgcctcgctctctaaataaacaatttaaaaaattagccgggcacagtggtgcacgcctatagtctcaactactcaggaggaggcggcgggaggatcacg

SEQ ID NO: 54225 - DNA, 122 bp, Homo sapiens
ctgcatcaagaggatgcccgcctactcgggcccaggcagtgtgcctggtgcactggattacgctgcgttctcttccgcactctacggggagagcgatctgtgatgctgagcttctgtaatca

SEQ ID NO: 54226 - DNA, 122 bp, Homo sapiens
cagagctggggcgcccgctgaaggagatccaatggtgggtgacatcctggtcacagcgggcgggcgtcggggccagctctggggccccgccccgggtccgctttgggccggtggtcagggcc

SEQ ID NO: 54227 - DNA, 122 bp, Homo sapiens
ggggctctggaaagccctgcacgtgtttgctgcagccccgcaggccagccgtgggatccccgggagaggccagcctcctgggcccagccgctctgtgcccaaggtggtcctggggtccgggg

SEQ ID NO: 54228 - DNA, 122 bp, Homo sapiens
ggtatgctgggcatcaaacagaccatcctctgtaggtgagagcatgcacactcttggaggcgtttatcaacttcaccctgagatctcttcagctccagcattggcttctcagcctgtggggc

SEQ ID NO: 54229 - DNA, 122 bp, Homo sapiens
gacaaagtgtttcctaggatcacacctggggatggagcagctggtgtcagcctgctcctgcgtgcagaccccaggggtctcagccagcatgaatcactctgggagaggctgctggggacgac

SEQ ID NO: 54230 - DNA, 122 bp, Homo sapiens
ctttttttgtagcttctgtgttcgccatatttgaaaggggcagacggccatgttcgtgaacggcgcttcccttggtgcacctgtggccgccatgtttgagcgaggtgggcaactatgttctt

SEQ ID NO: 54231 - DNA, 122 bp, Homo sapiens
gagagaaggctctggagacctctgtaacagtcgtgcggagaagacaaagtcagctgcgtgcgtctcctccggcgccggctctgcaaggagggaggagggggcggggccccacaaccaccgca

SEQ ID NO: 54232 - DNA, 122 bp, Homo sapiens
gaagaaaaataggagaaacaatttacatccccaaaataattttccagaaatatgacaaaacgtataactccctagaaatgttattagtgaatcaaagtgcaagtaatgacaacattcacgtc

SEQ ID NO: 54233 - DNA, 122 bp, Homo sapiens
ccctccagcttcctgcctctattctgtctgcacactaaactggatctgctttttctctcccgttctcaagggcggcaccatgtacttaaccaccttttcttcctgactgtgtgaaaacatgc

SEQ ID NO: 54234 - DNA, 122 bp, Homo sapiens
ccaaggtgggtgacatcctggccccagcgcggccctccatcagcctgcgccgcgggcctgcggacatcctgggtcccagctcagccagccccacaggcgtggcctgtgcacgtggaatgtgt

SEQ ID NO: 54235 - DNA, 122 bp, Homo sapiens
cggcgggcctgagtcgcgcgccccctcagagctcatgcagcacatggacgaggtcaacgacgagctcatccggaaaatcagcaacatcagggcgcagccacagaggcacttccgcgtggagc

SEQ ID NO: 54236 - DNA, 122 bp, Homo sapiens
ccccctgcccatccagggaccccagattctaggccctgcagtctttcccagcccctcccccgggctccctcctgtgtttcagtacctgtctcggaaactgggcctggattccattgccttcg

SEQ ID NO: 54237 - DNA, 122 bp, Homo sapiens
accccaaggtgtgacagagtaaggcctgtgcagctgcagcgtggcgctgagcaggaaggacgcgtggagatgccggctgtggcgaccgcgtgatttgaaggcacctgtgacttctgctcctg

SEQ ID NO: 54238 - DNA, 122 bp, Homo sapiens
agtaacttaaaaataatcctgctggccaggcacggtagctcacgcctcactttgggaggccgaagcaggcaggtcacaaggtcaggagttcaagacctgcctggacaacatggtgaaacccc

SEQ ID NO: 54239 - DNA, 122 bp, Homo sapiens
agcccgcgtcgcaggcagtctctggcccgccttgtgcccggcgtgctgaccgggcatccccgtgcccgctcgcaggccatgacgctgatggagtacctcatcaagaccggctcggagcgcgt

SEQ ID NO: 54240 - DNA, 122 bp, Homo sapiens
ctgtaactgctggaaatatagggcaatgatgacatgagttgggggtgtgtgcttgttttccgttgctgccctaacagattaccataaacttagcagctgtgaaacagcacacatttattatc

SEQ ID NO: 54241 - DNA, 122 bp, Homo sapiens
ccgggacttgcttgctgggacacagtcccaccccttggtacaatatgacaaagaaaaccacgagtttagagcttaggtcactgtaaagctgcttttgaaaaaggtgcaagacgtaagggcta

SEQ ID NO: 54242 - DNA, 122 bp, Homo sapiens
tgagggcagccccacgcacagccccccacaccctccccagcgcctgcagcctccggtgcgcgcaggccccaagcccacatgcgcagtcctcaccttgcgcgcagccccatgtacagccccgg

SEQ ID NO: 54243 - DNA, 122 bp, Homo sapiens
tttgggcgagaacttgcgcgggagccggactgagcggtgcgagcgcgcaggcgcggccgacggggcgggctgctactccggaatctgctaatcccagtcggtgccgcatccccagcccgccg

SEQ ID NO: 54244 - DNA, 122 bp, Homo sapiens
ggggccggctatccatcctgcagaaccccccaggcagacgctggggccaccaggccaggccgtgcctcagcacctctgagcagccaaggaaaccaccactcttcccgagacgatccgctctg

SEQ ID NO: 54245 - DNA, 122 bp, Homo sapiens
gaggacaggaaatgaacagaacggagctgaacaagttcagccacgtggattctccaaattcggaatgcaagggtgaggacgcgaccgatgaccagtttgaaagccccaagaaaaagtttaaa

SEQ ID NO: 54246 - DNA, 122 bp, Homo sapiens
ccatgctggttccttctctttcacctgctagtggcctcagggcccctggctgaggggaggcgggggccggtggacaagacgctctggtcccttggtaacaggtgtgcatgtgccagccctct

SEQ ID NO: 54247 - DNA, 122 bp, Homo sapiens
cggaacacttccgctcccttcacaaagcaggtggccgcaccacgcgcggctaggcgcgggcgtttctgggagttgcagtttcccagccaaatggtacctgctgccctctgatggcagctctg

SEQ ID NO: 54248 - DNA, 122 bp, Homo sapiens
ctgcggtattttaagcactgtggggtttgagaatgaccactcgtggcctcagagccgacccgccagcctacgcaggctttgccacagctcacatgagagtcagctcaccctctgtctctctg

SEQ ID NO: 54249 - DNA, 122 bp, Homo sapiens
cgcgcatgcgcagaagcacacttctgattcctctttcggcgctgcaaatggcgtatggggcggggcctgggaagcgggacttgaggtgaagggggtggagcaggtaggagcgggatgcaaag

SEQ ID NO: 54250 - DNA, 122 bp, Homo sapiens
tagatcctgcaccccagcattccagctctgcccccgcgggttctagacgcccctcccaagcgttcctggccttctgaactccatacagcctctacagccgtcccgcgttcaagacttgagcg

SEQ ID NO: 54251 - DNA, 122 bp, Homo sapiens
gtctttccctctcccttatttgtctccgtatgagtctctccttgtaccctccccctgcctcgatgatattactcccccagacttggaagccgctgccagagtgacgctttgatggtatctgc

SEQ ID NO: 54252 - DNA, 122 bp, Homo sapiens
ctcctaaaaaagaattcacagaacacaattttatctctttttgatagtgtgcgccaaactcgcccttccttgaatatctctcaaccttttccgattgttggtgctttttccttccaaaccac

SEQ ID NO: 54253 - DNA, 122 bp, Homo sapiens
ctttctaagcttgtgttgattgtatctgtcaaaattccacactaattctccaccaacagacgcttctaaaggtacaccacgacaatggtaacgtcataaatttgtgcacacagcctctggga

SEQ ID NO: 54254 - DNA, 122 bp, Homo sapiens
caggccagcgccccgctggctcatttagggcacaggaaacataggacctggggtgaccaacggctgcaggcaggtctggaagaaccagtcatgcatcttcccaacgtcaaagagggtgaaat

SEQ ID NO: 54255 - DNA, 122 bp, Homo sapiens
cccgggcctttgtgtggcggctccaggccttaaaggcccgtgtccaacacatgtctcgggcggcggcggcccagagaggcctcgccagctccggcctccgcttccccatgctgataacgctg

SEQ ID NO: 54256 - DNA, 122 bp, Homo sapiens
ccacactcgaacacgcacctgtgaacacggcagggggctccgagcctccgggcttgctcacgaagtaacaaatgtgtcctgaagtgtggcacggggtcgccaggcacttgacgttcagagac

SEQ ID NO: 54257 - DNA, 122 bp, Homo sapiens
aggcaagcgagggaggcaagggaggcaggcagccagcaggcaggctgctggctgctcccacgtgggaggtgggaactgagccctccccagcccagtccacaggacagagaggaggaggccgc

SEQ ID NO: 54258 - DNA, 122 bp, Homo sapiens
acgcagccgcgcttcacagctgaggaaaacccgctgcggcgtagggcaacgctcagaagccgagagtggcaccgcgacgcgccggaacgcgtcagcatccttcacacctaagaccagacttc

SEQ ID NO: 54259 - DNA, 122 bp, Homo sapiens
taagttgttgactgaccagaaaattctggaactccctagcactatatttttaccttgacacgaaatgaaattatgacatcatcatgggaacacaggacttctttctttttattttcagaact

SEQ ID NO: 54260 - DNA, 122 bp, Homo sapiens
gcgtcgggtttaggccagggacagatgcaggagacgctccaacagctgcggcttcacccacgccgccacggtccgccatcttgccgctatcgcaggcgccaggagctgggaggggagaagga

SEQ ID NO: 54261 - DNA, 122 bp, Homo sapiens
tatgctcttcctgttggattcaaatcaggcctcacagaagagccagtcacaaagggaactcggagatgtgcaggacagagagaagagctgacgggacatctggtaccttcggttggagggag

SEQ ID NO: 54262 - DNA, 122 bp, Homo sapiens
tcccgccccctccccgccctccgtcccgccccgccctccatccccgcccctcaccgtccgcgcccagcccgccggccccgccctgcccgccggccccgccctgccccacgggcttgaacccc

SEQ ID NO: 54263 - DNA, 122 bp, Homo sapiens
aaaaaaaaaaaaaaaaaaaatttcaattgtaagataatctaaatcttctgatctcaaaaacgctgaaatggaggaattgtgtatatctttagccaattgcttttggtaaatatattctggca

SEQ ID NO: 54264 - DNA, 122 bp, Homo sapiens
ttctggaataaactttgggtgtgagacgggattcaggctgtggctaatgtgctggaagcacgcacagttgtgaccatcaagtatgcaggaagcaatcattctcctggctctcctgggtgcca

SEQ ID NO: 54265 - DNA, 122 bp, Homo sapiens
ttgcaaatttgcctttggaatttctctttcttttctgttaggaaagtactattgtttgaccgtagggccaatctcatgtagtttagattccccatacttgcagaattagagtttttttcttc

SEQ ID NO: 54266 - DNA, 122 bp, Homo sapiens
ccacgttcactccatcatccatctcactccgttttctattgaaagcaccctgtcacctttcgcgtttccaactcaggaaacagcaaccacggaacagaagaaaaatcaagatcccatttgcc

SEQ ID NO: 54267 - DNA, 122 bp, Homo sapiens
gggcgccgtgcccgtccccaaggcggctcgtcaccgctgcgaggccaatgggctgggccgcgcggccgcgcgcactcgcacccgctgcccccgaggccctcctgcactctccccggcgccgc

SEQ ID NO: 54268 - DNA, 122 bp, Homo sapiens
agccccggcgcgagagaagttggagaggagagcagcgcagcgcagcgagtcccgtggtcgcgccccaacagcgcccgacagcccccgatagcccaaaccgcggccctagccccggccgcacc

SEQ ID NO: 54269 - DNA, 122 bp, Homo sapiens
cagggcgcccttcattttcatttcttgaaacaacagccttgcaggccgagccgctgttcccgagaactcggcagccacagggagcaggttgcatggacccaggagcgcgagaggccctgctc

SEQ ID NO: 54270 - DNA, 122 bp, Homo sapiens
ctcgcattcgataggctctatggcagcattcctgcataagaaaattcaaatgtataccagcgataaggcagcctgcattagctacaactttcccctcagccctcgatcctgtgaaacccatc

SEQ ID NO: 54271 - DNA, 122 bp, Homo sapiens
aagcactgaagagcgccagtcgacgtgggtgcgacaactcgcggagtcttaggagcaaaacgtctggggcctgcgagccaggacccttctgaagccttaggtgtctatcggcgacgtgtacg

SEQ ID NO: 54272 - DNA, 122 bp, Homo sapiens
aagatcctagagctgagctatcaaggatcacggaggatggagccctcgcgttgtgaagaccggggcaggagcagctcctgttgggtattggatgacgagttcttctcataaggattccgtga

SEQ ID NO: 54273 - DNA, 122 bp, Homo sapiens
tagattgagcccgggaggctgacgttgcggtgaggttgagtcgccccactgcactcaagccgggggaacagagactccgtctcaaaaaaaattattaagcaacttatacacatgtgttcata

SEQ ID NO: 54274 - DNA, 122 bp, Homo sapiens
cacgttccccgagagcagcgtcccctccccgccgggagcgcgcgcctcccatcctcgcgccgggtcctgctcggtctctcagagccgcacactccgcggagctcctgccacagccgtcgcct

SEQ ID NO: 54275 - DNA, 122 bp, Homo sapiens
cggcaggaatgctatgcgttcaatgggactcagcgcgttgtggacgggctcatctacaaccgggaggaatacgtgcattttgacagcgcagtgggggagttcctagcagtgatggagctggg

SEQ ID NO: 54276 - DNA, 122 bp, Homo sapiens
ctcttatcccctcctgaacctcacttgtctgatcctcccgttagaacatatggcctaggccggcagggactgttttccacgggtgtggacccatcgtctagagccgtacatggcatttcaca

SEQ ID NO: 54277 - DNA, 122 bp, Homo sapiens
ggtatacatgctccctgcccagagtacacagagcgcttccctgcttagcctcttcctgctcggaacccacagctttgcccaggccagcattagcacttgaaaggaggagatgactgatggga

SEQ ID NO: 54278 - DNA, 122 bp, Homo sapiens
ttcccccaatgggcgtaactcctcccaaccgcacatatgtgggaccccgaggatcctggccgtccctagttggtgcccacagagcatcttgggcccacgggtggcagcccaaagcggcagga

SEQ ID NO: 54279 - DNA, 122 bp, Homo sapiens
tgcttttaggcttaattgagcataagtttgattggcagcgtctgcccggccctgccctcacgccctgaccctcagtgtcccttcacgcccaggtgtgcctctggcagggaggacgtgctcat

SEQ ID NO: 54280 - DNA, 122 bp, Homo sapiens
attgtctgtaacaaacactgaatttgggtagttttcacttcctccatctctgcctccctccgctgtcaaggtccttgggatgcagggaatgccagtcagaatgcaaaattggagtcaataaa

SEQ ID NO: 54281 - DNA, 122 bp, Homo sapiens
agacgcacaggtgtcaacatgcaggccaggcggagggacagcagtggggctcggcgtggccggagcctggggagggacatggacaagtcctctatggacaagaggggctggagagtttaatc

SEQ ID NO: 54282 - DNA, 122 bp, Homo sapiens
accgtgtataaagaatcacctggggagctgattgaaaatgcagatgcttgtctccactcccggatattctactttgggtcagaagtgagacccagggatctgcatttataattaaggactgc

SEQ ID NO: 54283 - DNA, 122 bp, Homo sapiens
ctttataattaagagtccttcagcggaggctcaggcaggtgagggtctgaggcaggactccggaactcccagtcagcgggtgggcagctttctccatccctccctccatcctggccccggct

SEQ ID NO: 54284 - DNA, 122 bp, Homo sapiens
ggagcagggcagcccccagaacggcgccccgcggcccatgcgcttcccgcgcaccgtcgccgtgtactcgcccctggccttgcgccgtctcaccgccttcctggaggggcccgggcccgcgg

SEQ ID NO: 54285 - DNA, 122 bp, Homo sapiens
cccctcccgcctccgagcgaggcagctgctttcggggagagtttaggtataaactctgggcgaaaggaggagcagctgagagccagcgagggaagttaagcggagatgagagcggggaggga

SEQ ID NO: 54286 - DNA, 122 bp, Homo sapiens
gttggcaggacaagcgtccttctacccctggttcacctgttcggtgcaactagtatattccgcaggtctacagagttacggaaaaactctcttaatccctggctgtgttccaggcttcccct

SEQ ID NO: 54287 - DNA, 122 bp, Homo sapiens
agaaagctaagtggacagagagacatgggcctccctgcctcctggacccatgcttgctcccggacataacattccagagacctaggagataccgggggagtgagagttctggctttcgggct

SEQ ID NO: 54288 - DNA, 122 bp, Homo sapiens
agtacttacaggtgacactgcatgatgtctggggttggctttaaaatactacagcagaaacgaagagagggcaagaggagagaaggacggggatacaagattcgcaaagcataggtaattgt

SEQ ID NO: 54289 - DNA, 122 bp, Homo sapiens
gatgagaagggccggggcaccccatggccacgccgggcgcaccatgtcccacacgtagttcgccagccagtagatgatggggttgcagccgctgacaaactgcaggtgcttggccttggtgg

SEQ ID NO: 54290 - DNA, 122 bp, Homo sapiens
actggaactgggtctgtgaggcccgggaaaagcttagccccgccccctcgccacgagaggcgcctgcgcactgggatccagtaagatttttctcacgctgtctgtccagcttgagtggcgcg

SEQ ID NO: 54291 - DNA, 122 bp, Homo sapiens
tttgttggtcataaaccaggtatttaattagattacttagcgacacctagtgaccgagatcggaaccaagtgctattttaatacagtggagtgtgtgcctctgttattgtcatgctttagcc

SEQ ID NO: 54292 - DNA, 122 bp, Homo sapiens
tgtcgggccccggggccgcctggctcccatcccggcggcctctcagccgcctctgcagcccgagatgcctgacctcagccacctcacggaggaggagaggaaaatcatcctggccgtcatgg

SEQ ID NO: 54293 - DNA, 122 bp, Homo sapiens
gtttttttagcctagatctcactctgttacccaggctggagtccagtggctatgcataggcgccaccatagtgcaccacagccttgaactcccaggctcagatgaccctcctgtctcagcct

SEQ ID NO: 54294 - DNA, 122 bp, Homo sapiens
ccaccacaggcctcatgtttggtctaccccaaacagtgagctcacccatctgtttgtttgcggctttggtggctgcctgctgtgaccgctggggacatctggctaaagacagggttactaga

SEQ ID NO: 54295 - DNA, 122 bp, Homo sapiens
cagggccgggcgtgcctgtgtgacgtgggtgcagctgtgggactgtgaggggtgcgtggtcgaccttgcgtaacctggatgtgcagtgcgtgtcctttgcaaagcgtgcgttgctgtggctc

SEQ ID NO: 54296 - DNA, 122 bp, Homo sapiens
ggggcaggaggccaggggttttctgggggctggggtcctgccggccaagggtcgtcaggccggggaggttgaggaggatccgttctaggcggttcagggagccagactccagtttcaggcag

SEQ ID NO: 54297 - DNA, 122 bp, Homo sapiens
cctcagcgctgcgcctaagcactgaggtgcgcctggggactctaggacaactaccctgtccgcatagggccatcgcttccttcagagcacacccatgtgttcctctgaccagccatcggcgc

SEQ ID NO: 54298 - DNA, 122 bp, Homo sapiens
cagttgtctgtccttcacccgggggcggtcctagagatatggctgccgctgggtcatttccggctttccctgttgaggggtctccattcagctgcccctgaaaggtgctctcttctctaggg

SEQ ID NO: 54299 - DNA, 122 bp, Homo sapiens
actagggcggtgggtgtggggagccggggccggcccgggacgcgggctggggagccggggcgaggggcgacgccccgccgcccgaggttagtgaatgagcgggcggctggcggccggcgggc

SEQ ID NO: 54300 - DNA, 122 bp, Homo sapiens
accaccttcacggcaacactccgggaggagaggggagagagcatctccctcggccttctccgtgaagtctgggacctggagactgtccccccggccaaatgaaggaaaacggtgtttttggg

SEQ ID NO: 54301 - DNA, 122 bp, Homo sapiens
cctggacgggggaggagtcctcgggcacccgagcgccctccccggtggagacaggggggccgcgcttgtcttagagcctccccttgggtgccttttagctgcttatcctcgagtcctgggtc

SEQ ID NO: 54302 - DNA, 122 bp, Homo sapiens
tgcgaggagggagttgtttttttttttttccttccatcatttgaatcattgcacaagcaccgtatcacctagaaacagagggtgatttcaggacagtgctgtggccacaaagcatggttagg

SEQ ID NO: 54303 - DNA, 122 bp, Homo sapiens
gggcgcggggcaggcagcggggtaggctgcgcccaggagagtggggcggggctccgggcgcgggcggggccgggggcggggcgaagagcggctttccagggtgacttcgtgacgtcaggaag

SEQ ID NO: 54304 - DNA, 122 bp, Homo sapiens
gcgcacctcgtgcagtgcccacaacacgcggcagtccacaccgctgcgtggtcttagggacgtatagctgtaagagctaggacagggtgcggagagtgataaatacaagctgtcacatgtct

SEQ ID NO: 54305 - DNA, 122 bp, Homo sapiens
ctctggagtcgttcccaaagcaggctctgcatcctcggcaaaaaagcacctgtgaccacccggacagaaatccagtctgctgagacctctgcacttccatcccacggggcgaccctccatct

SEQ ID NO: 54306 - DNA, 122 bp, Homo sapiens
actattgtagcttcaacaccaaagataaaccccaacaactacagggatgcttaatcctagcgcctaggctcttagggatacataaatactttctttctcaaagaaacaatattagtatttga

SEQ ID NO: 54307 - DNA, 122 bp, Homo sapiens
gcggcggtggggaggaggaggaggaggaggagcaggcgccgccatggccgccgctatcaccgacatggccgacctggaggagctctcccgcctgagccctctgccccccggcagcccgggtt

SEQ ID NO: 54308 - DNA, 122 bp, Homo sapiens
taggattaataactgtttacctttgataatcaggaagaatgactccagctagtacagttacgtgatgcctatacattcctttttttctgggaaaaatgtaatgtgaaattaagtgcaaaaac

SEQ ID NO: 54309 - DNA, 122 bp, Homo sapiens
gggaaaagccactaggtatctcctcacacctgctaggatgactgttataaaaaagataagcgataataagtgtcggtgatgtgcggagcaaagggaaccttgtacactggtggtgggaatgc

SEQ ID NO: 54310 - DNA, 122 bp, Homo sapiens
gcgggcactcctgccccactggctcccgcagccccgcggctctgcgtggttctgtcattccggtggtgcaccctggcatccagtccacccggccgggccctgagcttgcccaaacccaggga

SEQ ID NO: 54311 - DNA, 122 bp, Homo sapiens
gccgggtcagccacgggcccagctgaccagatttggttcatggcctcgttcataactgaacgaacgacacctttctgctagaggtcggtataaaggagatgatgggccgggcacggtggctc

SEQ ID NO: 54312 - DNA, 122 bp, Homo sapiens
gtttgtcttaacacttgatcctgcttaaagtaaaaggtttattggacctaaaataagaagcgaaggaaagcaaacaaaaaaacaggaaatcctgaaagggcctattctgtacctggaattct

SEQ ID NO: 54313 - DNA, 122 bp, Homo sapiens
gctgctgccgctgctgttgctcctgaggctgctggctgaggccggaggatcgagcggcggcggcggcggcggctgagagggcggcggcgggagcggagcgggacgagggaacgggaggaagc

SEQ ID NO: 54314 - DNA, 122 bp, Homo sapiens
ccagcctccccctttctttggtctcggatttgtctctttctgctctaaaccccagagctccgcttcccttgggcccctcgggaggccctctccgctcccctggcagaagcctccccgttgta

SEQ ID NO: 54315 - DNA, 122 bp, Homo sapiens
gctgccgctggggctgccgcgggcgccgctcagccggagcgcgcctccgcccggcccgcccgcgccccgcagcagcgcgctcgctccttaaccacttcgccgctgcctttcgtcggggccgc

SEQ ID NO: 54316 - DNA, 122 bp, Homo sapiens
actcgggaacgggggccagactggcggggtccagcgcggtcagaccgagacgcagatgtccgcaccagcccagctctttctcctcgatctcgaccaggaagacctggcccggggccagcggc

SEQ ID NO: 54317 - DNA, 122 bp, Homo sapiens
tccgttggggctcctggctggccatcaggagcagggcgatgcggaaggcttcagggcggtcgatcttgctgatgatttggaacagtgtgtatttcaaggcctcgctggtggaggccacctgg

SEQ ID NO: 54318 - DNA, 122 bp, Homo sapiens
tcaagctccagagcacaggcgagtcagagttccccactgcctgcctaggcttccaggttccggaaatcagggcagaatgtgcaggcagaaggcagggcctggaggctggaacagatcccaaa

SEQ ID NO: 54319 - DNA, 122 bp, Homo sapiens
cacagcacagtttgagccaatgcagttaatccaccctccttcagtgctagtgtcgaatggcgcttttgctgcagtattcaccttgaaactaagtaggcaggattcattatttgttgaagtca

SEQ ID NO: 54320 - DNA, 122 bp, Homo sapiens
ttccgttccttgtttgccatgatcaccccagtgcgcagggtttcaaacacaggatcattgcgattggcagcagctaatcgaatgggaggagaaagaagacattattgggaaggcagagaaag

SEQ ID NO: 54321 - DNA, 122 bp, Homo sapiens
cctcgcctctccccatccttccctcctcctcgcaggagagcacattagctgaggtgctggcggggccgggccggggaccccatccctcgccccggacgcagcgcccgcagggactgcccggg

SEQ ID NO: 54322 - DNA, 122 bp, Homo sapiens
ctgccgttgggttttttcatatctgtacataatgccgagtgcgtaaggaaaccgtggcgtcgcgcacagtgggtctgcttgtcaaggccagttctgcagtgacaggcccaggggctgcccac

SEQ ID NO: 54323 - DNA, 122 bp, Homo sapiens
gccgccaacgcgcaggcgcacaccgaagccgtcacgctcgcttttttttcctttgccgtccgcagttctcaataatctagctttatttgaacacaagagagtgaacaacggacacacaggaa

SEQ ID NO: 54324 - DNA, 122 bp, Homo sapiens
gtcacccagccaaccttctagttctttcttttgtcctactccaaagtcttcttaaccttccgccccacctctttcctcagatttcactctgtccttggcccctcaccattgtctcagagttt

SEQ ID NO: 54325 - DNA, 122 bp, Homo sapiens
aaaagcatccagcagcgacccgtggattttgaacaatgggccgtcccctggttcaggcgtcggcggggaggaggcgcggggctctgatgagccaggaaaagttcccaggcccaagggcagct

SEQ ID NO: 54326 - DNA, 122 bp, Homo sapiens
gggatagactagccctcccgcccgggatcccgcgtctcggggaacggagacccgggcacacgccacttgcttgctgggaggttccttacaagttacatagagggggagcttttcctggccaa

SEQ ID NO: 54327 - DNA, 122 bp, Homo sapiens
ctcctggagcttttgcaccaatgagctcgaagttttgtgagtgacgacatatctggccaacgcaaagaagagtaagggcctgggagggagggagcgccgtaggcgacgccatgaagctctgg

SEQ ID NO: 54328 - DNA, 122 bp, Homo sapiens
tgcattacagtctgggtgacagagtgagactctgactcgggcaggggcccggggggcgggcggggggagttggtgcaaaattgctgtttttgccattgaaagtaatggtaaaaaccacaatt

SEQ ID NO: 54329 - DNA, 122 bp, Homo sapiens
ggcagggaggcatagcgcctctctgatcttcctgcatggctcaggtggatttcaattttacgtcctggttttctacagctcgggaaacatcctcccctcggttaccccagtattgcccaagt

SEQ ID NO: 54330 - DNA, 122 bp, Homo sapiens
aggaagcagcccggcggtcagtccagcacagccagcgctgggcccccgtcctgacctgagcggttaccaccagccccaggcctgcggaggcgctagtccaccagagcccctccccgcccctc

SEQ ID NO: 54331 - DNA, 122 bp, Homo sapiens
ctcgaactcctgacctcaggtgatctgcccaccttggcctcccaaggtgccgggattatacgcatgagccacctcacctggcctgagttcctctactttaagctgtgtgaccttgggcaagt

SEQ ID NO: 54332 - DNA, 122 bp, Homo sapiens
ataacactttggcctttatggaaatgtatcagatgttccaggagtgggtctccctgctcgcgcttgctcactggtgctcttacttttgcttcatgttcactcactctgtcctgacttgtgtc

SEQ ID NO: 54333 - DNA, 122 bp, Homo sapiens
cacccccaccccaccgctctcgcttggggccgcagtggccacaggtatcagacgggaggacgggtatccacgccacaggtgtgcagggactaacggaccacacgtcataacatggggcccag

SEQ ID NO: 54334 - DNA, 122 bp, Homo sapiens
ggccgtaggtgtctgcgcatccggcggggctcctacgggacccccacgccgcctggacgccgcctagcagatttggggccaggctaattggggcccatcgtggcccacagatgccagctccg

SEQ ID NO: 54335 - DNA, 122 bp, Homo sapiens
agacgagatttctcgaagggtctccgcggggtcacataagttttgtgacaaacccagctccgggccactggcatgttggctccgcttccccgtctgcgcctgagtgcaggacccgttcactg

SEQ ID NO: 54336 - DNA, 122 bp, Homo sapiens
gactgggaagaccccaaggggctctggcgggcctgactgctgggtaggagacacaccagccgtccgtttccttgttcacggattgcgaccgtgtctgttaatttatatagatctgacacatt

SEQ ID NO: 54337 - DNA, 122 bp, Homo sapiens
agccaaaatgcagagtctgtgacattatcgaaaagacaatatattacctgtacattaaaccgtgtggccagattctggcctgttttttagttgcgatgcagggaaaaaaaaaaaaaaaaaaa

SEQ ID NO: 54338 - DNA, 122 bp, Homo sapiens
tttgaggcctgcggtgaaaatggtatatcttcacataaaaactggacagaagtattctcacgaactagtttctgatgtgtgtgctcaactaacagagttgaacctttcttttgacagagcag

SEQ ID NO: 54339 - DNA, 122 bp, Homo sapiens
gtttaaaaacacctcacaccctctactatagattggatcttgggaaatagggttgaggaccggatcaatacaagaatcctcataacctccgccccggcgcgaacctgggagggctgcagaca

SEQ ID NO: 54340 - DNA, 122 bp, Homo sapiens
gtcacaccgccatgaagcggtgcacctgggagtggaccgagattgtgtgacccagagaaccggctctccgcgctcagctggagcaagcgcaccggcctacggatgtgtgactctcctcacag

SEQ ID NO: 54341 - DNA, 122 bp, Homo sapiens
aaatagtgccctcgggagggacatataaactgtaaagggcagtgctgagctcaccaccatcgccatgctagcaggagccgtggcctctgggctcacccggccgaggctcagcaaacaggcct

SEQ ID NO: 54342 - DNA, 122 bp, Homo sapiens
gttgccaaaatggggtcagagtctattctgttttccttttctcacttagcaatgggtggccggcttttttttttcaggggtgggggtgtcaatgaatattatttacttcatattacgtggct

SEQ ID NO: 54343 - DNA, 122 bp, Homo sapiens
caggccgctccctggagggatgaactgtcgaggggcccagggcagcccccgctagaggcccggtcgggtgtggggtcccctgtcccctgtcccgagcccggggagggggacactatttctgg

SEQ ID NO: 54344 - DNA, 122 bp, Homo sapiens
cggagtggaaatcctccaatcgggagtagccggagagcaggggcggcttccgggatttggcggtggcctttgttggctgcagtaagagctcagtctcttcaccaggggctcccagtccttcc

SEQ ID NO: 54345 - DNA, 122 bp, Homo sapiens
aactgcaactcctctacaatctcagtttatcatctcgtccatggcacacgaaagtgagagcggctggaggctgctaaatgcccaggaggatggggtgaaaccccaccttccagccaaaaaca

SEQ ID NO: 54346 - DNA, 122 bp, Homo sapiens
cagcggctcagtccagaagccccaccacccccgccccccgcgcccctctctgcgcctgcgcgcagcacggtcagccagtcaaccgctgcagagcccgcctccccgacagaggaccaatcgag

SEQ ID NO: 54347 - DNA, 122 bp, Homo sapiens
ctcctctctgaggacagtggccaggcccccagagcctgttagtagcccccgacacagggccggtgcttagtaaatatctgttagttggctaatgggatgtattgtattttgcttttcttcta

SEQ ID NO: 54348 - DNA, 122 bp, Homo sapiens
aatatgagtgggaggacccaacaacctcttttggagggtcttgccctgactggcacttcacgtgtctgaggttcctctttcgtcctttggctggctgagtcatcaacattgagatctacagg

SEQ ID NO: 54349 - DNA, 122 bp, Homo sapiens
aaacttctttgtgatgtaagggggcttcttggggttcagctgcatcccacatactctcaccgccaagcacaaaagatgcctctgtctgtcctgccctttctgatgcaagcctaatgctttca

SEQ ID NO: 54350 - DNA, 122 bp, Homo sapiens
catggggaggcatggtcgcccacgtggggcactgggctgtggacatggacaggggttcctcggggcagcaggagcaccgtggccctcccgagcggtctgtgcacgcgtgcacacacccccgc

SEQ ID NO: 54351 - DNA, 122 bp, Homo sapiens
ttatttctccctgtgccttccggagggagcagcccaaggctcctgggaggacaagcagcacgtgcccgccggcagagctcagctccagctggaggacccctttgtggtccttgcgcacactg

SEQ ID NO: 54352 - DNA, 122 bp, Homo sapiens
tctttctgaggtacagcgtagttttgtcctccgcgaagtccctcaggctcagagcacagccgtgtaattgtctgcgtctctcccgcgctcaatcaggggcttgctttggaaccccggtgcct

SEQ ID NO: 54353 - DNA, 122 bp, Homo sapiens
tccacaggcttgtcggtgctccacgccagcagcacaaacaacccgccctctgtgtcccaccgcagggaatctgagtgctggcccatatcacagcccagtaatcttcccgtagtgccccgagc

SEQ ID NO: 54354 - DNA, 122 bp, Homo sapiens
aagggggcagttaattaaacacttagattccttccggcgcgccttgccgagctggggacccgtttggactcgatcctgtctcgtgtaatcccacaggctggtctgagtctctgccccggaac

SEQ ID NO: 54355 - DNA, 122 bp, Homo sapiens
caatgaagctgtgacccaaaaaatcaaactgagaagagggtcagagagtgaaaggaactgcgttttcagataggtggtcagaaagggcctctctgttaaggtggcccttgtgcagggaattg

SEQ ID NO: 54356 - DNA, 122 bp, Homo sapiens
gaaattcaccatgtggaccccaggacgccaccgcgtgatgcttctccacctgcgctctgtcgttcgccgcctgagttaccagccgagcgttgccgcctagcttgatgacagaggcttaaaca

SEQ ID NO: 54357 - DNA, 122 bp, Homo sapiens
ctaagagccaggggggcaagaggggctggctctttagtccccgcatcgtgtgggggggcgcggcgcccccctgcgatgggggtcctaagagccaggggggcaagaggggctggagaggcggg

SEQ ID NO: 54358 - DNA, 122 bp, Homo sapiens
cccggcctgagccaccattccccgcctgcgccaccattccccgcctgagccaccattccccgcctgagccaccacgcccggcctgagccaccattccccgcctgagccaccactccccaccg

SEQ ID NO: 54359 - DNA, 122 bp, Homo sapiens
gatcctcatcctgctgcccggaagcagcccctctgggcctcgctttcctgaccataaagtcgggatgatttcaaaatgtagaatcagggtttgcaccgtcagaggatggatgtacaaacata

SEQ ID NO: 54360 - DNA, 122 bp, Homo sapiens
atgtcctctgacattcgagagatggattttttggccctgagatcacgtctcctactgtgtcgtcattctagcacctgtgggtgacttcctcatgtgagtgaggcataagcacccggaatccg

SEQ ID NO: 54361 - DNA, 122 bp, Homo sapiens
aacaccggggcctcactttgtctcttgtgtggggaatgcacacacctcacatctgtctcacggaccataaacgctctcccgagaatcatgttgactctgctcaccgagcccaggcccagcac

SEQ ID NO: 54362 - DNA, 122 bp, Homo sapiens
ctccttccttccctctttgtctcgggtgacaaatactgggaggtaaacaagggcaccctccgggtcccgaaggggcggaggcggcgccttctcccccggccccgccccctcctaccgggtcc

SEQ ID NO: 54363 - DNA, 122 bp, Homo sapiens
acaaggtgcacctgaaccagtgcctgcttctccgtcttcacagaaacctgcgcagggcgtcgggatgtgtgggtgaagggaactagccacctgtactaccccctcacttttcctgtgtttgc

SEQ ID NO: 54364 - DNA, 122 bp, Homo sapiens
tacccacattcacatgtggcttgtcgcgcacgtaagtcttcttggcctccacggccaggccgcggcacaagagaggcaatgccggggctttcagcagccgcaacagaccctgcagcaggaag

SEQ ID NO: 54365 - DNA, 122 bp, Homo sapiens
atggtgcgaataggaaccacccttccagccccactagagtatcagcaatagaggcggcggcggcggcagcagcagcagcagcagcatcaccagttgggcctcctccctctcggaggatgggg

SEQ ID NO: 54366 - DNA, 122 bp, Homo sapiens
aggattgcgggaccactgggagccataaccgtagtctctgacaagcttctccctttctgtcgggcgcacctctcgcccgcagagaatttgggtctccagctgggttcagccccttgattccg

SEQ ID NO: 54367 - DNA, 122 bp, Homo sapiens
ctcagcctcctgggtgctgggatccggggctctggggcctctggtgtgacctgagggtgccgaggagacaagggctcaggctgaggacagcaggtggcttccactgggcctctgtgctctga

SEQ ID NO: 54368 - DNA, 122 bp, Homo sapiens
taagatttggcaagtatgaatttagagttttttctcatcttttaaagaaagaaaattatacgttagtgtgagtacagtaatatgttcagtaagtagaaataacatgctgtcatgacataatt

SEQ ID NO: 54369 - DNA, 122 bp, Homo sapiens
caccaaattcattaaaagtgataaaaacccagcctccccctcctcacttgagcttcagaccgggccagaaaagctcaacgatgaagaaacaggaacatgcccaggtcaggtctccccaccca

SEQ ID NO: 54370 - DNA, 122 bp, Homo sapiens
agagccccgctaatctggggatgactcctaggagtagaagacggtccatcttagttgtcacgaggtagtgcacgtggggaccctttcgggtacagttgcacacagtggatcacacagatccg

SEQ ID NO: 54371 - DNA, 122 bp, Homo sapiens
ccccgccacccgcctcctcccatccctgggccgtgcagggctccgtcccacttcggggggcggggggctctgtcttcagcgctctctgcccggagctcttctcagtcacaggtaaaggttag

SEQ ID NO: 54372 - DNA, 122 bp, Homo sapiens
agccccccaggactgccgggggctcccccggtcggtatggcctcatcttcctgcatcagacggcttccatccaccgagcgccgagtcttcttgggcatctgaatgggcagtggctggatcac

SEQ ID NO: 54373 - DNA, 122 bp, Homo sapiens
ggggtgccctctaggtgccgcagtgcggggccgcgcccgagcctggccgcaccggggtgacggagtggggtcgcctctcaaagggtaaatatgaatcttgccttatctggctccagcgggct

SEQ ID NO: 54374 - DNA, 122 bp, Homo sapiens
ggccccccgtccgaataacttgcacactctgtgcggtgccccggtgcatgttcgggagcgcggcacaggctccgaaaccaaccaggagacgctgcgggctacagcgcctgcactccccatgg

SEQ ID NO: 54375 - DNA, 122 bp, Homo sapiens
gaggacgaggccagcgccctgcgcctggatgaggacagcgagcacccgcccatgattcttcggactgactgaacttgacctgtgacctctgacccggggagcagagaacactggcttcacag

SEQ ID NO: 54376 - DNA, 122 bp, Homo sapiens
tggtttgccaccaccacgcccatcattggcaaaggcatcatgtttgccatcaaagaagggcgggtgaccacgggcgtgtccagcatcgccagcgaagatagccgcaaggtggcatctgtgct

SEQ ID NO: 54377 - DNA, 122 bp, Homo sapiens
cgacgctcggctaggttcggtgcggtctgggcgcggggctcggagggagtcggcggtgttcggagccgagtcggtgctccggcggagagagccgagccgcttcggagggggtcgaaagcatt

SEQ ID NO: 54378 - DNA, 122 bp, Homo sapiens
ttatttctgataacgtttgagcgaaatacagaaactatctgtagactagcatagtcggtacgtgagtaaggaaaagcaataacctgctgtccggtgagcacaaaattcctgctacgaacagt

SEQ ID NO: 54379 - DNA, 122 bp, Homo sapiens
ctcctcccgcgacctttgtgcccgcgtctctccctccagtacctattgcacgacaccccacgtccgcctcctgccattgccagcaagtgccttgtgcgagtacctggctgtgcttattaatc

SEQ ID NO: 54380 - DNA, 122 bp, Homo sapiens
accaggaaccatttagaagtggagaaaaacacagcaaagacacctgcatgccacgctcagcgcctttctcccagggagtaacagaaggttaacagggaacatcacattgcccatgagcccat

SEQ ID NO: 54381 - DNA, 122 bp, Homo sapiens
aggatgaagaggtcaagaaccttgcagggaagttggccaggttcgtagtagactggcatccggaggtggaaaccatcgccctccagaacaactgtgagaaccaggcattcagctttctgtac

SEQ ID NO: 54382 - DNA, 122 bp, Homo sapiens
tccaaggccccatgcatggttcttcgcctgggttttcccattggcacaccagcaccggcccggcacaaggtaagctgggccctgactgactctgaccaaggagccctagggtgtaggatagc

SEQ ID NO: 54383 - DNA, 122 bp, Homo sapiens
cccgccacctgccctgtcaccgtggggcctcccacggtgtcccaggccccagcagcctcgcgcccggttcccactgctgtgttagggaagcgcccgctgttggaaatgtaattcggaacgtt

SEQ ID NO: 54384 - DNA, 122 bp, Homo sapiens
ggacctgcaggtgtgtgtgctgggggcagaggccccatctctcagcctgctgagcatattcgtgaagggcctatccagcgccagacgtgtcactaaacctccccagcattgcaagggaggca

SEQ ID NO: 54385 - DNA, 122 bp, Homo sapiens
tgctccaggtggctggacatctaagaaaactaataacagaaattatgtccttgtagcccacgggtagttgtttgagtataagctgggcagatagaaaccaaaaacagaaagtaagaatgcca

SEQ ID NO: 54386 - DNA, 122 bp, Homo sapiens
tgggcagagggagcagcatatggaggagccctgaggtgggtgcacctggggtcgctagggcgcggcagggcagagctggtggagtgggaagggcgcagtgtggagggcctgggaatgctggg

SEQ ID NO: 54387 - DNA, 122 bp, Homo sapiens
tccacccaggaagctctagtagcagtgaatttcacattgccctgactaatagcagctctgcgccagaaaccatattcagtcccattaccttgttgaatcctcaagtttgatgactttgtcta

SEQ ID NO: 54388 - DNA, 122 bp, Homo sapiens
ctagactaaactctgtgaggacagggctgctttgctctatcctccctgcaacttcagtgccgggcacaggactggctcttaatggatactgaatgaaccctgttatggactgaatgttcgca

SEQ ID NO: 54389 - DNA, 122 bp, Homo sapiens
ctcacgcgccactaccgaaagcacacgggccaccggccattccagtgccatctgtgcgatcgtgccttctcgcgctccgatcacctggcgctgcacatgaaacggcacatgtagccgggacg

SEQ ID NO: 54390 - DNA, 122 bp, Homo sapiens
tcttataatcaataaacctacgctgacacacgttgccaccccggtctgcagtttacattgcggttcactctcgtacatcctgtgagttgaagcaaacgcagaatgagatgcgcccaccatga

SEQ ID NO: 54391 - DNA, 122 bp, Homo sapiens
agcctccctgtgacgctctggccttctctgtacctcagagtgcagaaccacagacggcttcggctgtgcctagggcaacagccaacctaggagccagcgggctttcggggaaaaaaaagaaa

SEQ ID NO: 54392 - DNA, 122 bp, Homo sapiens
cccaggccgcacacagccatgagccaggctgcttgacgggacctgaccccgccaggttcccgtccagtccgcggggtgactccacccacagctggccgcgccaccgctcaggtttcaatttt

SEQ ID NO: 54393 - DNA, 122 bp, Homo sapiens
ggctttttttcccctcttttaattccccgagcgcaatttggggcgcatgcgtccacgagacgccccgctaccgccctctaagggtgaagcagggactccagccagtcctcaaaatcccaggg

SEQ ID NO: 54394 - DNA, 122 bp, Homo sapiens
tttgtatttttagtagagatgttggccaggctggtctcgaactcgtgatcccaggtcattcgcccaccttggcctcccaaaatgctgggattacaggcatgagccactgcatccagctatgt

SEQ ID NO: 54395 - DNA, 122 bp, Homo sapiens
ggggtagatgagtcaaccctctttcaagattccaagggtggtgtgttacctgatccttttcgtgtgtggagttcagggggtcgggaggtttggcctttattcccacattcaaagttggaacc

SEQ ID NO: 54396 - DNA, 122 bp, Homo sapiens
gcagggcggccgcatggtgctggggcgcgcggctgggggcgctggcaaggcggctgagggcgtggttcacgcgtcgccggctggggtcgccctgcaggtgaaggggctctcgggcgcggccg

SEQ ID NO: 54397 - DNA, 122 bp, Homo sapiens
atcaggggcgaggtgactcggcgtcctgcccaatgggctgtgtgcctaacgggagtggggcgggcgccccggccggcgagctgccggctcccgcgcgcgggcctcgtggccgggcggcgctg

SEQ ID NO: 54398 - DNA, 122 bp, Homo sapiens
tgatggtgcggtatttgtcctgctccgggcaagtcacccccacgtcctggtaggcgcagccgcttgacttggacaacacattcagctgggcgggcgtcagcacatctgccgggggaaagaac

SEQ ID NO: 54399 - DNA, 122 bp, Homo sapiens
ctctcactggtggtgatggtcttggaggcaggaaggccccagctggtccctcgaagggctcggacagtgacctggtactcctgtccaggggccagtcctctctggtcataggctgaggcaga

SEQ ID NO: 54400 - DNA, 122 bp, Homo sapiens
ccacactggggccctgggtccttgcagggaggagggagacgctgggaacctgagctggtgcgcctcctgctgcctcggtgggcggtggctgtgatgaatatttgatgccacacctggccacg

SEQ ID NO: 54401 - DNA, 122 bp, Homo sapiens
gccgagcgccccacccttcccgggatggttggaatagttggagcgggagactagggcctccgctggcggcgggagcgggacgggcggaggaatgcgagctgaggaacggaatcaggttctaa

SEQ ID NO: 54402 - DNA, 122 bp, Homo sapiens
gccaccaccttggattgtaattagaattaaatgagaccacatgtaaagcatgacactccacgcctgacacatagaaaatgctcagtaatgccagatactgttattattggtgacaagagcaa

SEQ ID NO: 54403 - DNA, 122 bp, Homo sapiens
aaggctttatgttcggtcagatgagctgtataataaaatgaaagtgttaactggcatggacgatagctgctgcctccaccgccactagtagtgatggtttttactctggatgtttttcagtt

SEQ ID NO: 54404 - DNA, 122 bp, Homo sapiens
ccctagtttacttgtgttcttgatgttcctttgggccaggggctggacctcattcatcttcgtacctggaacctctaggattagcagggccagggcagcagtacaaacagaggatcccagcc

SEQ ID NO: 54405 - DNA, 122 bp, Homo sapiens
atcagtttccattagggagcctctccctgttaatctgcttaacacaggcatggtcagttacggggcccaaccttcctggaccggttacatcttattctggttactgcattcagtttccaaca

SEQ ID NO: 54406 - DNA, 122 bp, Homo sapiens
tacgtcaatggctcgcccatcgacagactgtgggagatcctgaagagacggacccagtttcgctctggcagacctcccaacccgccagggccaagtccaaaagccctggccaagatgatgga

SEQ ID NO: 54407 - DNA, 122 bp, Homo sapiens
cctttcacagaaataggcactcctgcttcctggaaacacactgctggcgtcttctcataccgtctaccgctggctgcagcctcagctcctgcggaagacacagccgcagccgagtccgtatc

SEQ ID NO: 54408 - DNA, 122 bp, Homo sapiens
gaggcctgtaaataacttagattcttcaggtgctcagcgtttgaattcctggatcacctgcggcaggctcacctgaagtagacattagaggtggggctgttctgcaccaggaacaaagctac

SEQ ID NO: 54409 - DNA, 122 bp, Homo sapiens
agggcggatgggtctgtgagtccgactgctgtgaatcctcgcttccatccctgcactgggcgctatgaacccgggcccatccacactcctctaaccactctcctcaagccctctccttggga

SEQ ID NO: 54410 - DNA, 122 bp, Homo sapiens
gacgccgccgcgtgtgctctgaggcacgagggcctcaccactgacggaggcggggaagcacgcctgcctctgccctgtgctggccacggttcatcctgggccccgggtgggtggctgcagcc

SEQ ID NO: 54411 - DNA, 122 bp, Homo sapiens
ctgcctcggtacctgttactgctgctacttcctcgtttgacaccttcctgggtcagtgagcgatggctctccccggatggggagtcctggtcaggccgaagcatgagctccggtcgctgcct

SEQ ID NO: 54412 - DNA, 122 bp, Homo sapiens
aggttgcagtgaaccgagatcgcaccactgcactccagcctgggtgacagagctggactccgtctataaaaaaaagaaagaaattgggccgggcgcagtggctcacgcctgtgatcccagca

SEQ ID NO: 54413 - DNA, 122 bp, Homo sapiens
cccagggcgtcggggttgggtgagagaaccgccgcagccttcatctggtctgaccgtcttcggtaaaaacagaaagagtccctggcttttcattttcggggtggactcaactcctccctgat

SEQ ID NO: 54414 - DNA, 122 bp, Homo sapiens
aacggaagtcgtggaggccgccgcggccgccgcctcctccacgcctgtggaagccaccaccgccaccgccacgactccggaaccgatcccgagacatgtctgtggtcaaggggcggtcgagg

SEQ ID NO: 54415 - DNA, 122 bp, Homo sapiens
cctggcacaggctgccttggaatccaggggggcagtggcagaaataggaggggccgctgtcgacacagaggcctccattgtggcaaagggaagagacgtctatgcctggggagagagacaaa

SEQ ID NO: 54416 - DNA, 122 bp, Homo sapiens
tggggccgagaaccaagttctggggacttcgctctccgcggggaaggcctcccccaccagcgagcatccgagggccagcgactccccttagcaagccagaggcgccccccccaactccgcct

SEQ ID NO: 54417 - DNA, 122 bp, Homo sapiens
tacagtctctattgcagtttgtaaccccctccccctcccccctttaatactgaatgagatcgaatgttaggtccatgcagttcttggtcaatgttaacgaaaagtccaacgttccgttcgcg

SEQ ID NO: 54418 - DNA, 122 bp, Homo sapiens
gaacaccagtaagcctctaccgcaggccctacacaagcaggcccttgtactcactggcatcgccctcccggggccgccaggaatgaggcactgagatcccaccccaagccgctgggggcgcc

SEQ ID NO: 54419 - DNA, 122 bp, Homo sapiens
acagctgcgacatcaccgcccgggggccatgcacgcggatcgagtttgataacgatggtgcgttcctttccctcactcagcgttcactccggcagcttgcctgtactgtttccatgagggag

SEQ ID NO: 54420 - DNA, 122 bp, Homo sapiens
caggggagttgtgaaatgggcggctagatctgcccggcgctgtgaattcgccagcgggagcgcgctcgcggccgcgcgttctccgctttcccggctccgtcgctgacgcgtcgtagacgttg

SEQ ID NO: 54421 - DNA, 122 bp, Homo sapiens
actttgaaacatcgttacctaaattcttatatgctttaatcaggcctgagtggctatgaacgaatcccaagcaaccttagattcagaattgcaaaataaagctgtcacttttgatgtaacaa

SEQ ID NO: 54422 - DNA, 122 bp, Homo sapiens
gcccaagtggtcctcatttggtcaacttgggcctcagtttctccatctgtaaaacagagccggccgggtgcggtggctcatgcctataatcccagcactttgggaggtcgaggcgggtggat

SEQ ID NO: 54423 - DNA, 122 bp, Homo sapiens
ttcacaaccccctgcagagtggtgggggcaagcgtgccaggtgaaggcagatttggctgtcggtccatgtaggagaaaaccttctctgcagctcccacgttgctgagcatatccccatatat

SEQ ID NO: 54424 - DNA, 122 bp, Homo sapiens
atttctcatttgtttgagcttaaacgaagctgaaccctgcagggaaatgagcacatgttacgcatctctaaagccaggaggcttcatggccaggaaactatgctggtcggatagtaatgcaa

SEQ ID NO: 54425 - DNA, 122 bp, Homo sapiens
aagggctgtggacatggccttgagatccccgggaaagccccgccccccagaatctggttacgtgaggctcagccttctgatgcccggtggtgaacttgcccagagagcacctaaataccgcg

SEQ ID NO: 54426 - DNA, 122 bp, Homo sapiens
tgccagacttggtcggccatagcttgaagggggtctttaagttaagacacaggtggtccccgccccaccgctcgcctctgagcggaacccgcctctctcgcagcgctgcccactggctgacg

SEQ ID NO: 54427 - DNA, 122 bp, Homo sapiens
ctgacctaacaatttgtgtgcgagaccactgggaagggaacccagagctctgcttgctcccggggaaccctgggtctcgttgatctttgtcacatctctgctccaactggctttcccagaca

SEQ ID NO: 54428 - DNA, 122 bp, Homo sapiens
gggggccgctctcgccggcgtcgagggcgtggcggcgaggctgctgctgcaggcggctcccggctctgccttcggccccgcccgccgcccaccaggctcccagaggccccgcagctcgcgcc

SEQ ID NO: 54429 - DNA, 122 bp, Homo sapiens
gccagaggcggtggtgcatacttgtcagcccagcactttgggaagccaagaggggaggatcgcttgagctcaggaatgcaaaaccatcctgggcaccatagcaagaccccatccctacaaaa

SEQ ID NO: 54430 - DNA, 122 bp, Homo sapiens
tgggtggtgcccgcgcatccgatgacctgggccgacagttaccccgggccaggacaccgccgtccggccaaacccctgccacccaggcccccgagcctcgggggtcctctgcggggccggcc

SEQ ID NO: 54431 - DNA, 122 bp, Homo sapiens
cccggaggtacctcgaggagggcaagggtaatgaaatgaatgaaatgaacccctgcacagcgagggagcacttacaccctgacaccctcctgcagggagaaggaagatgacaaggatctctc

SEQ ID NO: 54432 - DNA, 122 bp, Homo sapiens
cacctgagacggggcttgttgaacgcttgggggaggcggcggctgctggtccctaggccacgcttgagtgatgacacatctctccaaactgatacggggtcagctaaggggacagaatatcg

SEQ ID NO: 54433 - DNA, 122 bp, Homo sapiens
caggttcatcaacaccatgacagaggcgacacgtcacaatatgataaccagaacagaggacgatgacagtgagaaatgggtttcttttatggcccgcttggatccctaatgcccttatttct

SEQ ID NO: 54434 - DNA, 122 bp, Homo sapiens
cgtgggacttggccgccatgggatgtcctgctacgagtcaggcctggatccctcccctaccgcctacagctgggttccataggatggtgagaggaagccactatcagctattaacaacagat

SEQ ID NO: 54435 - DNA, 122 bp, Homo sapiens
agaacatcttctctttcctacctctagaagctggctccagagatttcttcatttctctcccggatgaccttcatttgttcctcagcagcatttacaaaagtcagttatgtctctacactgga

SEQ ID NO: 54436 - DNA, 122 bp, Homo sapiens
tcggcccgccactacaccacgggagcccttctctgggctggctgaggcaggagccggctccgtcggcttgtggggaggtgtgaagggagaggcatgggtggaaaccgggctgtgtgagacac

SEQ ID NO: 54437 - DNA, 122 bp, Homo sapiens
ggactcagaggacgtcggggcagagggcacggaggacgttggggcagagggcacagaggacgtcggggcagaggactcaggatgtcagggcagagggcacagaggatgccagggcagagggc

SEQ ID NO: 54438 - DNA, 122 bp, Homo sapiens
tcagctggcaaagtaactcaagccttgtcctgactgcaagggtgggcggggtggacggctcggtgttctgcccgttgtgtcttacgctccaggtgctggtctacgcgggcctggacagtcag

SEQ ID NO: 54439 - DNA, 122 bp, Homo sapiens
actcaggagggaccatttagtacttctggagtcctgggtgcaaggttgaggcctgagcctcgggagatttgtcaccactaggagccaaggcaagagatgaaaaggttggtactagaacagaa

SEQ ID NO: 54440 - DNA, 122 bp, Homo sapiens
gtggcgctcgcaccggactcggtgggctcaggagttgcttacgcgctggtgggtgtgggccggaggcggggcgggcagaggcggagaatgcttcccagggtcacaccctcccgcggtgtgac

SEQ ID NO: 54441 - DNA, 122 bp, Homo sapiens
cgctccaatcgtcagcggcggcggggcgggcagagggccggggatggcaggttcaaccaacgggtgggcacgtcgtcctcgcgaggaggcgtgccctgcggccgggcgtgcggtgtccgcgg

SEQ ID NO: 54442 - DNA, 122 bp, Homo sapiens
ggacaggaagcacgtggaggtgggcaggaagcactccctgggtcacagtgcacagcagcacgtgctgaacttggtgcagtgcagacgtccatgccacatgcaccactacccatgggctgcgg

SEQ ID NO: 54443 - DNA, 122 bp, Homo sapiens
gaagggatctgttctctggccagtgcaacagccttggagaggacttgtacctcctctgctcgtgcctttcaccatccccaaggatatctagagcaggaccctgaacaccggataatcagttt

SEQ ID NO: 54444 - DNA, 122 bp, Homo sapiens
acctccttcctccaacagccgctcgctccgtcactccgcttcccacagtccccgcgcggccgcccgaccccgcagccaatcgcgcagccgcttactcaaaccgccgcgcaggcgctgcgccc

SEQ ID NO: 54445 - DNA, 122 bp, Homo sapiens
gtccaccccccccccgacaggctgagggctcaggagtggcactatttcgttacctctctgcgcggaggcgagtgaggaggtgatgagccggacggccgccgcgccgcaagtacaagcaccgc

SEQ ID NO: 54446 - DNA, 122 bp, Homo sapiens
cctcttgactccacctcctgggggcccagggttggatgggaagctgaatctggccacactcgttctggaactcccttacctctgtatctttgcccctgctaggcgttgcccacccgtgagtc

SEQ ID NO: 54447 - DNA, 122 bp, Homo sapiens
gtagccattccgatggtccggtttgttcaggacttgctctcttccttccagttctagctccgaaacaccctggattacagtctttgaagaagtaggagagccggtggccgaagtgcccactc

SEQ ID NO: 54448 - DNA, 122 bp, Homo sapiens
tgagcagccgagctccaatccatattaatcaaccgctcgacctacacaagtctaagtttacgggagaaaacctagtccccgaaaaggaagaacagcaatccggacaagcagttggcgccttt

SEQ ID NO: 54449 - DNA, 122 bp, Homo sapiens
gggtgacggacgcaccgggaaaatcgggtcactcccacccgaatattgcacttttcagaccggcttaaaaaacggcgcaccacgagattgtatcccacacctggctgggagggtcctatgcc

SEQ ID NO: 54450 - DNA, 122 bp, Homo sapiens
atgagaggcacatggagcagagccagcctggcacagctgagcccagccaaacccctgactcgggagaaagcacacacctccgcatttggggatggcttgttaggcagcagcagctaactgac

SEQ ID NO: 54451 - DNA, 122 bp, Homo sapiens
ggaagactgtcttcccgagtccatgaccggcgccggagttttgggtccatggataaaacacgtctcctgtctacgagaaaaggaaaggaactgaaattgagagaagggagagattgaagtgt

SEQ ID NO: 54452 - DNA, 122 bp, Homo sapiens
aggggcgtggacccaagaagtccctgtgcgcttgcgcagagaccgaactaccgctttccccgtaaccagggagactgcagtttgcagtgatgtggctaagatacccttgtgctattaaaggc

SEQ ID NO: 54453 - DNA, 122 bp, Homo sapiens
aaaggggaaggacgaagccccagagcaacagaagtcaggcggtgccaggaacactgagagcggagccaggggaaggcggccgagcgcggccccctctcctcccgggccggggcgggcccgag

SEQ ID NO: 54454 - DNA, 122 bp, Homo sapiens
ctcacagtcagaaaaaatattcttaatatctatctcatatcttttgccgcactttaaattcggtaaattttaactgaggatccaccatatgcatgtgcacatacacatgcaatctaggtggg

SEQ ID NO: 54455 - DNA, 122 bp, Homo sapiens
tctgcaacggagtcttctttctccaattgccttctgccccatcaccatgggccccacctgcgccacctgcgcccaccctgtgaccctggctcagcgaccttggcccttaatcgcccaacgcc

SEQ ID NO: 54456 - DNA, 122 bp, Homo sapiens
cctggggataatcagcacccttgtcatgatctgcatggccactcctgtcttcaccatcatcgtcattcctcttggcattatttatgtatctgttcaggtaggtttggaaatggctaagtcat

SEQ ID NO: 54457 - DNA, 122 bp, Homo sapiens
taaagtagtttcttccatctttattctgactagcttccaaaatgtgttccctttttgaatcgaggtttttttgttttgttttgttttctgaaaaaatcatacaactttgtgcttctattgct

SEQ ID NO: 54458 - DNA, 122 bp, Homo sapiens
aactctgaagttatccttgagtcttacctctaccttgtcccttccatccaatcattgtttcgatatgtatttattaaggctccagtaagtgccaatcactgtttctgtatgtggaaggatag

SEQ ID NO: 54459 - DNA, 122 bp, Homo sapiens
gcaaggacggagccccgaaagtgggggcgtgaaatctgccacgtgctttgcctgcagtgacgggcatgtgggctgctgccctgagcccctgggctgcgccccagctccctgtcttgctggcc

SEQ ID NO: 54460 - DNA, 122 bp, Homo sapiens
cactgggccagaggaggtggcagctcgccggcaaagcagggtgggctgcgtccgcgggggcgaacacccgacgctatccgaagacgtcccgcgcgggccggcgggggcgcggtctgaggacg

SEQ ID NO: 54461 - DNA, 122 bp, Homo sapiens
ctctggtgtgtaacaagccagggtatgaagacaggtgctgtacttacataattgtggaaccgtgtatgaatttcaacctttctgagctttagtcttgtcatttatagaatgaagataataat

SEQ ID NO: 54462 - DNA, 122 bp, Homo sapiens
agcaggtgcaggggccgatggatcactcgggctgggctggagcggcccctggtggcagttcggtgaagagcaacgtagcccgcgcggggcgcacgcatttcaggaagacacagaggcctttt

SEQ ID NO: 54463 - DNA, 122 bp, Homo sapiens
gggcctagcaatcatgatgggaaggccccactttaagagaatgctttcagcatttccaggcggtccctgcttgccctcaacactacatgtaggcctcagcttccacacctagcatgtttgtt

SEQ ID NO: 54464 - DNA, 122 bp, Homo sapiens
acttttaagcgcaaacaatgggtggaaatggacagaaactgcctccgtgcccacttgcagcggactacgtagccctggcagacaggcaattgcttcaaacaagcgccctccaagggcgtaag

SEQ ID NO: 54465 - DNA, 122 bp, Homo sapiens
ggggactgtcgcgggtttgtgtgtcggggctccagtctctgggtgtgtgttaggtgtgagcgcgcgtgtgcccgtggatccgtgcgagcggctgctcggtgtgcgcgcgcgtgcgtgtgtgc

SEQ ID NO: 54466 - DNA, 122 bp, Homo sapiens
cttctggcctctgggacaatgccccttctccatctgcccactgcttgccctactggtgttcgcggttgaaatttgtggttcaagaccgtgtgggtacaacttgtgagctggtcccacccagg

SEQ ID NO: 54467 - DNA, 122 bp, Homo sapiens
agttttcaaacccagttttgagtctagagcaattgttctcatagtgtgattccaggacgacgagcaacatcagcatcaccttggaacttttggaaaggcaaaatattgggccccacccccag

SEQ ID NO: 54468 - DNA, 122 bp, Homo sapiens
gggataagcgagcctccagttccccgtcttccagagcaagtggcttcagtgatatccaagcgcccttccagcacccattccctgcctcgccagcaggcaccggggccccacttggcgtttgc

SEQ ID NO: 54469 - DNA, 122 bp, Homo sapiens
cccgcccggctggccccagctgaccctttgcaggaggctggtggtcacagccagagcttgcgcaggccggggagctgccaggagtgccgcagccgtgcccccacctgctgggctcccgggaa

SEQ ID NO: 54470 - DNA, 122 bp, Homo sapiens
acaggaacgggtgtatgggaacccggtggggccagggtcccagggggcacaggggctgggcggtgacttacgtagcggtccctcagcgccttggcagccgccagcgtccggggctccagcga

SEQ ID NO: 54471 - DNA, 122 bp, Homo sapiens
ataaaagcactctttgtttttattagccactccaaggacagcaaaaagtactctgtactccgaaaataatttcagaacctaccggtgttttgaaatctcacctcctttttccgtttctcctc

SEQ ID NO: 54472 - DNA, 122 bp, Homo sapiens
gacggagtcgggggacgggatttttttccagagcaacaggtaggctggtgaggaggcctccggcccagggagaggcgctgagaaggctgcgggtgaacgggagggtcgagggcacacgtgag

SEQ ID NO: 54473 - DNA, 122 bp, Homo sapiens
tactagatggatgttatttcagtaggaacagtattgtgtgttccctgtcagcatttgaggcggaaacccactgcactgtcagaacaaccagggagatgaaagaagatgtcagatactaaaag

SEQ ID NO: 54474 - DNA, 122 bp, Homo sapiens
agagtgagaaggggactgaggcctaagcctagaggaacacccacatggaagcaccaaacacgggagactgagaaggagccaagagcctgggaaaaaaaccaggaaagtgtggttttaccagc

SEQ ID NO: 54475 - DNA, 122 bp, Homo sapiens
cttcccaggcccgcagcccagaatagagccggggcccaagacgcccactggagacagggtcgggtcccactaccgcgcaggcccggctcgcccccgacgtcaggcacggggcgggacccttg

SEQ ID NO: 54476 - DNA, 122 bp, Homo sapiens
ggtctcaagggacaggggctgagatgactcacatcagcgccattgggtccagctggacctcgaggtcctggggggccaggtggtccctgggggaaacagatacaccacagatgaggaaggga

SEQ ID NO: 54477 - DNA, 122 bp, Homo sapiens
ttcacattaaagaatgaggcattaaaaggccgactgcaggctctatgttcagctctctaccgcctctactgagaactagtgcaggtcagcggctaaatgatcagcagtgcactgccacctgg

SEQ ID NO: 54478 - DNA, 122 bp, Homo sapiens
gtgttgcggaacccagctctcaacctgtgggtgctgcactgtctccatgtagatagtgtacgtagacggcgtcagacgcgagttaaattgtaggagctgctggtgtcagagaattgcttggt

SEQ ID NO: 54479 - DNA, 122 bp, Homo sapiens
ggtcgcccccggagcactgcgatttgcatacagtttgcatttggcccacaccctgggccacgtgctccagcatctgagcagcgcccactccctgcctgctctgggccctctccccattcgcc

SEQ ID NO: 54480 - DNA, 122 bp, Homo sapiens
cacggtcccaccacccacaagtaatctacccaactcacatgcatgtaaaaattcacattccgcccaaccctaaaggataccctccctgggcaagtctgttctctacctctctgatatcattt

SEQ ID NO: 54481 - DNA, 122 bp, Homo sapiens
aggggtgaccacctacacatgccaggaattacctcagacaatggtgttacaaatatgtgtcgctacaatcattgagtcaaacagcttataatttagagagattttcaaagaattacagtaag

SEQ ID NO: 54482 - DNA, 122 bp, Homo sapiens
gccatcgcctggtccccacatcagcacgggctgctggcctcggggggcggcacagctgaccgctgtatccgcttctggaacacgctgacaggacaaccactgcagtgtatcgacacgggctc

SEQ ID NO: 54483 - DNA, 122 bp, Homo sapiens
caggttcagccactgtaactctgtaagggtaagaccatgtgcccctgggagagctgaggccggacgcagggcttgagagagtggtggtgcaggaggctgcatggagaaagctctgctgcttc

SEQ ID NO: 54484 - DNA, 122 bp, Homo sapiens
agagaactcccaaaaggctggctccagccaaggccacgggtgagacaagcctgtgttatgcgcttatataatgcacaggcttcacccagagatggaaccagctcgaactaccaactgataat

SEQ ID NO: 54485 - DNA, 122 bp, Homo sapiens
gtccccgagtgcgggcccagaaaagctgccggcgtctgccagggccccggggagcccgggcgcctcccggggagccagatacccccagcctggactgaagtgattttttttttttttttgcc

SEQ ID NO: 54486 - DNA, 122 bp, Homo sapiens
tgtcaagccagcctgccgagccgctcctgctccaaaccagccgcgtccccgccagcgccgcgcggcgccaaatcatggtcagagcccggatctgcagcgagctctactgccggacaccgcgg

SEQ ID NO: 54487 - DNA, 122 bp, Homo sapiens
ggagatccctttcgaactggcccttgagcgcctgcatgttgacttccagccgcagtttggcgtcctccgtggcttgcagctcgtcctccagctcttccagctgcgtcttcatctcctccatc

SEQ ID NO: 54488 - DNA, 122 bp, Homo sapiens
aaaattattcaagggagtctctctcgagcctattctggctgcctataaaaaattaaaggccggacgcggtgtctcacgcctgtattctcagcactttgggagaccgaggcaggtggatcacg

SEQ ID NO: 54489 - DNA, 122 bp, Homo sapiens
gtgcatcatggcaaagtgagattgttgtcttgccacctggttcagcttggccagatcaagcggagaaatgatgtgttgtccttgaatcgagtaggcatctagaggtggtccctccaggtcac

SEQ ID NO: 54490 - DNA, 122 bp, Homo sapiens
aacccatcactgtgggaaactggatgacttggggaacaaagccaaccttttgctgtcttgcggaggcaggcagtggagggttattgccaaaagcctgagctccggagctgtgatctctgagt

SEQ ID NO: 54491 - DNA, 122 bp, Homo sapiens
ccccaccgccaggcatcttgctttagtggaagcacacggggcactcctttatctcacagccggttttaccacccgtctcttgccctccgctattcagttgaatgcactgacttttttttttt

SEQ ID NO: 54492 - DNA, 122 bp, Homo sapiens
ccagtccagtcaggtgatggactcctccctgaaactgcacgaggtcacctctcctatccccgtattccgtttggatccttatgccaacgtgttaggaaggccccctctggtgggttttgtac

SEQ ID NO: 54493 - DNA, 122 bp, Homo sapiens
tgttgttgggcagctctaactaccagaaggcgccctcaccgcatccgggaaggcaaacagcggtctgtgcagaagcgcaggcccaaggccctgggccctcagccgtccttgcagcgcccgca

SEQ ID NO: 54494 - DNA, 122 bp, Homo sapiens
cgccggccttatgggacttgtagttttgacgttgcacaaactcagaagagaagacggggacggggacatcacttctgatctgtgaaaggaatttttttaaaatgaaactttctatggcctac

SEQ ID NO: 54495 - DNA, 122 bp, Homo sapiens
cgtgctcagaacccctgcccccaggccaaggccccacccctccgattctggcctggcacccggattcccgcccggcctccgtccctgaccccggaccctcaccccagcctgacctggcttca

SEQ ID NO: 54496 - DNA, 122 bp, Homo sapiens
gcccttgagctgtggatgggaccgggcgctgcagagcagggggtagcgctcgtggggccgcgcaggagcccacggcggtggggggcgggagggaggctcaggcatggcgggctgcaggtccg

SEQ ID NO: 54497 - DNA, 122 bp, Homo sapiens
ccttacgtcactcggtggtggcgatgatgcgtgtgtgtggggggcggggcatacgctgggcgcgtcccgggggtcacgtggtgcagagcacgcagagtccttctgtcggttggtcctggagc

SEQ ID NO: 54498 - DNA, 122 bp, Homo sapiens
cctcttgcctccaccacagtgatctccctctgccttcagtggtccacagggcccacccttcggccttctcaaggcactacctgcctcaaggaggagctgtgtccatgccaggcaggaaccaa

SEQ ID NO: 54499 - DNA, 122 bp, Homo sapiens
aagggccggacagtaacactgtttcgagttactacactgaagtgatcccagcaggtaggccggccgcacgccgctggacgtgaatggctcgcagtgaccgcgcccctcagcccctccttgtg

SEQ ID NO: 54500 - DNA, 122 bp, Homo sapiens
ggggttgttggtccgggaaggcagcggaggaagctgtgagtccttgggccctggaaggagcgcagcctctgagacactccgctccagcccggcttagcgcgccttcatattcatcatcaaaa

SEQ ID NO: 54501 - DNA, 122 bp, Homo sapiens
ggaggcgcctgcagacacggagctgaccccggaacctgcctagctgcggggccgcctctccgctcaagcacccactcagctctgtgaggtctatgcctaacatgagagcagctcctgttgaa

SEQ ID NO: 54502 - DNA, 122 bp, Homo sapiens
ttgcactagaagatttttgtgagttacctaagaccctgtggctatgtcttggtagaactccgtagaatgccaggtttcctgattttcctaaaagtgtgttcagtctttcaagctgtcatcaa

SEQ ID NO: 54503 - DNA, 122 bp, Homo sapiens
cccggacccagccgcgggaggtgcgccgggcagcctcttctgtgcccaacctcaagaagacgaatgcccaggcggcacccaagccccgcaaagcgcccagcacgtcccactctggcttcccg

SEQ ID NO: 54504 - DNA, 122 bp, Homo sapiens
agggctgaaagggtgcgggtcctgcccgcccctaggtctggaggcggagtcgcggtgacccgggagcccaataaatctgcaacccacaatcacgagctgctcccgtaagccccaaggcgacc

SEQ ID NO: 54505 - DNA, 122 bp, Homo sapiens
catttttgataaggtggtcagggaagcctatgtgagatgacatttgagcagagatacaaacgaaagtgaaggagtgaaccagctaggcaaatattttgggaatgaaccttatttggggagaa

SEQ ID NO: 54506 - DNA, 122 bp, Homo sapiens
cccgaaagacacgccccacacccaaacgcaagagcgatcccgccctcccattggctaaggcgccaccgtgaccccgccccagagtactacagcaggcgctcagggggctgggcccgcctccg

SEQ ID NO: 54507 - DNA, 122 bp, Homo sapiens
gcaggctgcctccctccctccctctcagggtggctgcgggcctctgtctttctcttgtcacgcaatgtgtatttgaatccatctggttgcttctctgagtctctctttgtcttcttgtgttt

SEQ ID NO: 54508 - DNA, 122 bp, Homo sapiens
ggtatccagccagtggctgtgcagggactgagtggggcaggcgcggccatgacctggacccggggggctgccaagggatctgagagcggcttccgcagcactccagggttgggctggttgag

SEQ ID NO: 54509 - DNA, 122 bp, Homo sapiens
ttgagcggactccaaagggacggtccgcggtgtgcagcgagctgcgctcaggggaccttgcgcccggcccttctgctgcacacagcccacccaggacctcccgcagcgctgacaggcggggc

SEQ ID NO: 54510 - DNA, 122 bp, Homo sapiens
gactcccctttataggactcatctcagtctcacataaatgcagagactttctttcaaaaccgttctttctttctcattcactgcacaataaagttaatttctccaaaattttctactttaaa

SEQ ID NO: 54511 - DNA, 122 bp, Homo sapiens
aggcaccccgattgtgactccattacagttcttccgtgactttcacccttggtgacgctgcgcgccccttcccctttccaaatctctagcaagagcatgtagtaaacgctccttaaatgcct

SEQ ID NO: 54512 - DNA, 122 bp, Homo sapiens
ggaagggctgggatgatgcttttgggttctgggagaggcaagaactggtctagtcacccccgctgccttcaggtctgccttgtacctgacatcgctgcaggaacactgctggaggctggggc

SEQ ID NO: 54513 - DNA, 122 bp, Homo sapiens
atattcgtccccggaaatgactccaagcaccgcctcttggccagcccctctgcgccgggccgtgagctctcctggctgggccctaccagatgatgagaacttggggagaggctgttgccacg

SEQ ID NO: 54514 - DNA, 122 bp, Homo sapiens
tatttggtatgctagctctttcatttatacaacagttacttgttgatcatatattatatgcggaactctcctaggcgcttggtattgtgtagtgaacaaagcagacacaaattcctccctta

SEQ ID NO: 54515 - DNA, 122 bp, Homo sapiens
ttagcctctttgattggctgtacgagtccgaggtgctgggtcaggggcggggcgagctgtcgcaagcctgccctgggtctgcggcttctgagaggggtgggccgcgaagcggaggggtgcgg

SEQ ID NO: 54516 - DNA, 122 bp, Homo sapiens
taaaaaagatacagggtatttcattcattttcagagatgattcagattgttttattattgcgttgtgattcagttaagtacctctccattgataaagatttaggctattaattccttgaggg

SEQ ID NO: 54517 - DNA, 122 bp, Homo sapiens
tctgcagggcagcgctcgccattgaatgacttctaggtgctccggggcacagagctacagcgccgctacaagcggtggtgcccgggccttggcaggaggatgtggcagatgctgaagagtgt

SEQ ID NO: 54518 - DNA, 122 bp, Homo sapiens
agaactttaagaggcaagtgtgaagtacactcagaactcatactcactccatgggacacccgaaataaggagcaaaaagtatcactttctacacaaaagaactcattctcctaagattctag

SEQ ID NO: 54519 - DNA, 122 bp, Homo sapiens
agacctggcatccaaggcatgccatgggggagtttcacccggatggagactggctctccccgcatcctgcccagcagtgcaactgaacctgagatggggctgcaggatgacaccagcacttc

SEQ ID NO: 54520 - DNA, 122 bp, Homo sapiens
attggtgaaataagccctctgacagagaaggcaaccgagccctataaatgcacaaggcatcgggctcggtgctggaaacgtgcctgtgtgcggaggccacgggttggggaggtggggagacg

SEQ ID NO: 54521 - DNA, 122 bp, Homo sapiens
ctctttgaccacaacaacgcggtgatgaccgatgggctggaagcgcctggtgctggagaccggccaggtcgggcagcggtggccaggagcgctatgatgcaggtgggctgggctgggctggg

SEQ ID NO: 54522 - DNA, 122 bp, Homo sapiens
ttctagaatcatgccaagaactcacaaatttctgacacattgcttttccgcaggaggttgcgggaagacgtacaaggaagggtcgggatggtgcttgaggtggtcagagccacacccagggc

SEQ ID NO: 54523 - DNA, 122 bp, Homo sapiens
aagactatgcaaaatgcgatacggtttccctcatagcatcgccgctggggcaggggcgggcgccgggcgccctgagtcgcgtaggcgcggcctgaccgggattccatgcttcctttctgttc

SEQ ID NO: 54524 - DNA, 122 bp, Homo sapiens
tccctcctattcttatccacccacccctctgccatgagactcataacagactgaggcaggcgaggctctctctgcaaagagggatctttactgggggtgtccaagctcccctcaagtggcag

SEQ ID NO: 54525 - DNA, 122 bp, Homo sapiens
ttggacacctcggccagcaggtgccggtgcgtccgccgcacgtgctccagcatctcggcccggcacttcccgatctgcaggatcacgttgggcttggccacctgcccgccccgcggcccggg

SEQ ID NO: 54526 - DNA, 122 bp, Homo sapiens
aagcaaaggcaagatgtccttaaaaaaaaaaaaggtcacattcacagaataccgaggagacggaggcagctctgcaacccgtccactgagacgcggacacgctccccacagccccggcccca

SEQ ID NO: 54527 - DNA, 122 bp, Homo sapiens
cagtcctactgtcctttagctggacacggaccgtgcctcgttcatctctctgacaaaggccgggaactcaagaaatcatttcttgagtgaatgaaagagtaacggtaggaggtccgaacaga

SEQ ID NO: 54528 - DNA, 122 bp, Homo sapiens
ccccacttcgtaccacccccctaaatcatctccgaattaacatcacatcggcggctggcgcgtgttcagatttaaatggtggcatattgttcgcggacggtctagctcagaaccgcgagctc

SEQ ID NO: 54529 - DNA, 122 bp, Homo sapiens
cacggagctcccgggggacatcctggatgagctcctgcagcaaaagagcagccggcacagcgacttgcccccctccaagaagggggagcagccagggctgtcgagagggcaggatggctact

SEQ ID NO: 54530 - DNA, 122 bp, Homo sapiens
ggttccatgtttgcatccgcctcgcgggaaggaaactccatgttgtaacaaagtttcctccgcgccccctccctccccctcccccctagaacctggctcccctcccctccggagctcgcggg

SEQ ID NO: 54531 - DNA, 122 bp, Homo sapiens
gcaccagtcaaccctagcaagctcctcgctgagattacaaactgcagttcctgcctgagccggagaggatgctggagcaggctgggggaccagaaccacaaaccagccctggcttagctctg

SEQ ID NO: 54532 - DNA, 122 bp, Homo sapiens
agagcccagcagacgccatcactatggatcttgtatttgaatccgatgtagctggattcccggggccacgtaaattaggcgtggagcctgtgttagagagtgagggtttccttagcgtcgtt

SEQ ID NO: 54533 - DNA, 122 bp, Homo sapiens
aagatagaaaataatgaaaggaacgtgtgatagaaagcatgaaggcaagaatgaactaggcgaggaactgatctggattatgtagtagggaaaaattgaagaatgacaggaaagaaaacatt

SEQ ID NO: 54534 - DNA, 122 bp, Homo sapiens
gggtgctgagcaggtgttttctgttctctcgccagctgcatggctacttggagaatgagccgctgatgctgcagcttttcattgggacggcggacgaccgcctgctgcgcccgcacgccttc

SEQ ID NO: 54535 - DNA, 122 bp, Homo sapiens
agcgcgtgcacctggagaacgtgggttcgcatgacatcgtggatgggaatcaccggctgacgctggggctggtctggaccatcatcctgcgcttccaggtgaccctcgagtggcccctgcca

SEQ ID NO: 54536 - DNA, 122 bp, Homo sapiens
tccccccttctcctcgctcatggggtcttagtcttcagcaatatgacttattgcagcctgcgcaggttataaagaatacaagcaatatcttgagttatctacttatatgagggagtgctttg

SEQ ID NO: 54537 - DNA, 122 bp, Homo sapiens
gatcccctctctgcaggctctgcccagccctgtgtggcaacccagaggaagcctccccttcgtttgagatttaaccccagaccttaggcgatggctgcccagcctgtcccttccgcctgtgt

SEQ ID NO: 54538 - DNA, 122 bp, Homo sapiens
gcccttcctccgggtgtctgagagctgggcgcaggaggcgggctcagcgctgacgggctgcgcctctgcagccagagggaggaggcgggaaggcgggcggaggaggaggcggaggaggaggc

SEQ ID NO: 54539 - DNA, 122 bp, Homo sapiens
cattgtgttcactagaaacacctcaagtttttaaaaggctcctctcctgttggtgtgactcgagggcgctgtgacatcctgagaaagcggggactctgggagtctggatgtcaagctggtcc

SEQ ID NO: 54540 - DNA, 122 bp, Homo sapiens
tggatccttctggaaacagcaaaagcccgtttttgctgagaaagtgactcggcagctatccggagctctctgcctgcaggtggggccattctcctatggagccgacccgacccgctcaaagc

SEQ ID NO: 54541 - DNA, 122 bp, Homo sapiens
ttctctgttggtgacacagatttatcctggggccaagaaaatttactcccatagtgcctacgctccagctggaccacagaactcctgcagcccaccttggggatacacacacaagaggtgga

SEQ ID NO: 54542 - DNA, 122 bp, Homo sapiens
gcatagctttggccatgcacagttttcttcttatacacactctgaggagccccgccgtcacggtaatgcacctgcctcacaagctggtgggcagcttaaatgaaatacacattttgctccag

SEQ ID NO: 54543 - DNA, 122 bp, Homo sapiens
cttctgcaagcagggctgggacagctgcaggacctcgtcagtttggggagctgccagacccgatcagcagcgttgtcggcttccttcctctttatcagatctgtcagggctgctgcgcgctg

SEQ ID NO: 54544 - DNA, 122 bp, Homo sapiens
agcccagaccctcagagactaggaactgaggcctggcagagtggggtgggccagcaatcacgcgccaggccacacgaggagagcccactgccccggggatgtcagacgcggggcggcctcgg

SEQ ID NO: 54545 - DNA, 122 bp, Homo sapiens
gtcaccggctggcctttaagggggcggcctcccagaactgctctccccacctgcactctgcgaccactcaggcagatccggaacctgccaagacgaagtcagtcagcatcctcttccgatct

SEQ ID NO: 54546 - DNA, 122 bp, Homo sapiens
gctgtggggcctcggaaaggggctgggccagcgccggggccaggctcgagaaaggctgcgcgaagtgtgcactgggacgtggagtagaaggcaggcgggagggcgggcagggtgcaaggatg

SEQ ID NO: 54547 - DNA, 122 bp, Homo sapiens
cccacggagcccaggagcagggagggccctgccgtgtctgctgttgggtcttggtgacagcggttaggttgtcagcatggcatggcattaaaatgtgtcattgcccctcgctgccatggctc

SEQ ID NO: 54548 - DNA, 122 bp, Homo sapiens
tttattgaaagccgggagccaatgagaggagagaggcttgttgatcgcagccaatggctgcggcaggagaggaattagcagcggaaactccaggttcggttcaagaaagatgacacagagcc

SEQ ID NO: 54549 - DNA, 122 bp, Homo sapiens
ggggcggagccagggtccgggaggcagtgtgggcggggtctgaccaaggagccggagcggcgaattctaacgccacctttgaggctggcgcagaaccgaagggctgagtctggggagaaaag

SEQ ID NO: 54550 - DNA, 122 bp, Homo sapiens
cccgcacctctgaccctgcgtcgggtgcatcctgaatgcttcacaagcaggagggaagcacgtttctctgtaggaccccctgacccctcaaatacctaagagtcagggtcccccaccccact

SEQ ID NO: 54551 - DNA, 122 bp, Homo sapiens
tgaggctccaggaagatgtagggaccacagtggccacgcccctcggaccaccagcacctgcggaccctccacccaccagggttgtggctttgggaacaacaccagctgggtccaagcctgcc

SEQ ID NO: 54552 - DNA, 122 bp, Homo sapiens
cggtggtgtagcctggcgggtcttctccgtcttctgttgtttctctgagacgctcagcttcgtcatctttctcagctcccgaaaggacaggtcggagggaccagtcttcttcctctttggat

SEQ ID NO: 54553 - DNA, 122 bp, Homo sapiens
gcctgtgaacactgggaactgcaagaggcgaagggttaggacagccgcccagggccaccccgccacccctgctatacccggccgccaaaacattcgccactaatccatgtttcctttttttt

SEQ ID NO: 54554 - DNA, 122 bp, Homo sapiens
tgacctcgtgatccacccgcctcggcctcccaaagtgctgggattacaggcgtgagccaccgcgcccagcctagtccagatttttatatgaaatcacttgattttaatgttgccaacatgtt

SEQ ID NO: 54555 - DNA, 122 bp, Homo sapiens
gaactaagccagatcagaaaacgaattctgtctgtggcccccacagctgtgaaatggagtcgctgactcgccatgctcgtgcacgtgcttagtgcccactgcagaaggctgctttgaatgaa

SEQ ID NO: 54556 - DNA, 122 bp, Homo sapiens
cctgggagaggccttgagggtcggaagataggggacaggatcagccggccggcaggggtccgcacctgcagcctaggaagagatggttggcccagaccatggagagggagagcagctggtcc

SEQ ID NO: 54557 - DNA, 122 bp, Homo sapiens
tgtcattgcgctgccccggccgccagcccctcaagaagctatacatgagacgtaggtagccgtagtcggactgactacactggccagggagcagtcccctccgagcccccggccgtcccccc

SEQ ID NO: 54558 - DNA, 122 bp, Homo sapiens
cctccaggcccgcgcaacgctttctcactttcatggtacaccccgcctgccctggcatttcgccccgggaagaggtctgtcggtcatttttctgggtcttacactcacttccttctttgagg

SEQ ID NO: 54559 - DNA, 122 bp, Homo sapiens
acattagataatctgaactgaacattggaatagcaacaggtagccaggcttggtggctcacgcctgtaatcccagtattacgggaggccgatgtaggcagactgcttgagcccaggagttgg

SEQ ID NO: 54560 - DNA, 122 bp, Homo sapiens
ttcatgtaaaaatgtaaaagttaccccctgacgtgacttaaccatatgacatttgacacacgactatatgacatttactatatggctgagcctagcaaggtcctgggaatatggaaaacctg

SEQ ID NO: 54561 - DNA, 122 bp, Homo sapiens
gggggtcaggttcgtcctcgaaggcaggccctccacaggaagacctggttggggtgggatcggacacgcggcccagacccaggcacctgtggatggacggccgggcatgtggccatcggctg

SEQ ID NO: 54562 - DNA, 122 bp, Homo sapiens
agaagagacaagggacattatggggtgaaggtcgggggttgtttgacatttgccccttcccgatgtaactaattaagcttcaagttgtaatgtgttttatgggctagaaggctttagtgcct

SEQ ID NO: 54563 - DNA, 122 bp, Homo sapiens
gacgatgggaaggtcctcgtcacccctgagccgaacacgacacgacgatgggaaggtcctcgtcaccccggagccgaacacgacacgacgatgggaagctcctcgtcacccctgagccgaac

SEQ ID NO: 54564 - DNA, 122 bp, Homo sapiens
tcactgcggctttgccaattttcctttcttttctgcaggttgcataccctgtcctgagggcgcggcacggagtgcatgcgggccgctgccatgacgaccgccatcttggagcgcctgagcac

SEQ ID NO: 54565 - DNA, 122 bp, Homo sapiens
ttttccttgcagtcgcctgctgctgtcgtcgggaggtgggtgaggtgacgcaaacagccccgttgttgccctccgcgtatcccctcaccacctttgcggccatccacgactttcgcaccttc

SEQ ID NO: 54566 - DNA, 122 bp, Homo sapiens
tccggccaccggtggcgtgaagaaacctcatcgctaccgcccgggcaccgtggccttgcgcgaaatccgtcgctaccagaagtccaccgagctgctgatccggaagctgccgttccagcgcc

SEQ ID NO: 54567 - DNA, 122 bp, Homo sapiens
ttcctactgggggctgtaaagatgataactcagcccttactcttcagtgtttctcattcccgtctcccctacttcggaatgaaacacaatatcttaagcaaacagagcccaaagaggctgat

SEQ ID NO: 54568 - DNA, 122 bp, Homo sapiens
tccccctcctcctgattggccctgcaacttccagttggtaatggagcccctctgagctgtcgatcctgctcgcaccgtgccatagatcaacctattccctcctgtgcggtgcttggatctcc

SEQ ID NO: 54569 - DNA, 122 bp, Homo sapiens
tggggacagtgctgtcccccacccctgcacacagccaggccctcaggctctgcggtcactcgcctccctgctggtcactggtcttggtctggagttatattttgatgccatgaagacactgt

SEQ ID NO: 54570 - DNA, 122 bp, Homo sapiens
gctggggaaaaggggcggcctcaccggaggagctgctgggggctcgccgtgcaggcgcctcgtgggtaccagggctgcctggaaaggaacttccagcgaccaggcacaaataactgcttcga

SEQ ID NO: 54571 - DNA, 122 bp, Homo sapiens
cgtcagcacagctcaggttaagcgaaggcttgcgccccacacgcaggttcagcttttccacgaactgttcctcctcgatggcatagatcttgaagatgctacggcctgccacgaccacctgg

SEQ ID NO: 54572 - DNA, 122 bp, Homo sapiens
agcagagaatttccgggaaaacgggaaaggtatgcaagcatgcccacacacgtgcacacacgggttcccaaaagacctgcgtgtggccgcaggggcctgccccgcccttctcgggccctttc

SEQ ID NO: 54573 - DNA, 122 bp, Homo sapiens
aacgaaaccccccaacccaccgcccaccccaccgcccagaggcttctaggacttgtagtccgcccggtcaccccccccaccacaacccgctctgagaggctggggactacggtgcccggcat

SEQ ID NO: 54574 - DNA, 122 bp, Homo sapiens
cccacaggtatcggccccaccgaccactctagctccaggtgccgctgtcctgggtacaggcgaaccacctgggaacaccaagctgagaagttctggtgcacctcctgcaccaagggtgtctg

SEQ ID NO: 54575 - DNA, 122 bp, Homo sapiens
ttggaggtagtggatatcctaattaccatgatttggccattatgcattgtatgcatgcgtcgaaacatcacatgaaccccataaatatgtacaatcaatatgtatcaattcacaaagacgga

SEQ ID NO: 54576 - DNA, 122 bp, Homo sapiens
tcctgcaccacatctcctgtgggctctgaccaggtcttgtttttgttctaccccagggagcgacagtgcccaggggtctgagtctcacagcttgtaaaggtgagattctgggggtctgaagt

SEQ ID NO: 54577 - DNA, 122 bp, Homo sapiens
gggaaaaaaaaatgtgcaatgcgcagaaactggccctatcagatattaaaatgtattcaacgccacagtgatttaaatattctggtactgggtctctggaacggaatagaaagcccagaggt

SEQ ID NO: 54578 - DNA, 122 bp, Homo sapiens
acccccacaccccacctgctccgggttgctggaggagctgctttaaggccgggcctggcccgagcagggagctgcatctggaagcccccatctcccccactcagcagggccccccaggctgc

SEQ ID NO: 54579 - DNA, 122 bp, Homo sapiens
tgtctgtggtgggacgggggctgggacacccggagaaacccaggcccagcagccagggctcggggggacgcggccaggccatccctccctgggccccggcgttccctctgcagaaggagtgt

SEQ ID NO: 54580 - DNA, 122 bp, Homo sapiens
ctggagtgcagacgtcacagaagtggtaaagcgaggaatcgaacccagggccatctgactcgagaaaccccatgctttctgcaggggcggcctggccggccctcgcctgctcgaatgccacc

SEQ ID NO: 54581 - DNA, 122 bp, Homo sapiens
tttagctatttaagacagaacttattacagtgctcagtccactaatcattcattaccagtcggctaggggctcagagggtgacaccagaaggcgaatacactgagacgctaagttttttcac

SEQ ID NO: 54582 - DNA, 122 bp, Homo sapiens
tggctcctaggtgatgcagcatcctaatgaaggcgcactggtgcttggcctacacagcaacgtgaaggatgtctctgtgcctgtggcagaaataaagatctactccctgtccagccaaccca

SEQ ID NO: 54583 - DNA, 122 bp, Homo sapiens
tgatgggaatgagtggacagaaatgcctcactatactctccttcctttggaacttgggcacggccgaccagcattaacattaaaacagagatcttaagactgacaaaacagattctttgtag

SEQ ID NO: 54584 - DNA, 122 bp, Homo sapiens
atggcagtggctgtgcccccttgattgcagcagtggctatgtatcgagtccccccttgatcgcggcagtggctatgtattgagtccccccttgatcgcggcagtggctgtgtatcgagcgcc

SEQ ID NO: 54585 - DNA, 122 bp, Homo sapiens
cacctagtcacccacaagatgtatgagtacagctaacccccagatgcatttgacagacggcgtgggacgcgccacttgctgattggctctcctttcccagttgaccgcgacatcccccagcc

SEQ ID NO: 54586 - DNA, 122 bp, Homo sapiens
gggtcctgcactctcaaatgtgaatgaatgggacaccacatggcacggggagacagaattcgtttattgggatcactgggtggaggtggaggaagaactgagtggctgctgtcctggtctgg

SEQ ID NO: 54587 - DNA, 122 bp, Homo sapiens
ggggccgggaggcttcggagcccaagaggcggggccagaggcgtagggggctgcgaggggcggaccttgggggcgtgaccggggggggcgcttggggacctaggggcggggcgttagggggc

SEQ ID NO: 54588 - DNA, 122 bp, Homo sapiens
tggttgtgcttcccacgggccatttagcaatgcctgggaacgttcctggctgtcacattgcggggtggagtgttactgacacagtaggtagaagccaggatgctgtccacgttctaccaggc

SEQ ID NO: 54589 - DNA, 122 bp, Homo sapiens
gccatcccggccactttgtaactattgctctaggtgtcccggctccagtctccccaaaatcgtgaactctttggggctgggccccagcacccagggcctcaaagcaggttcttggtctgctg

SEQ ID NO: 54590 - DNA, 122 bp, Homo sapiens
tagctgcctccccgcggcgcagcgctgggaacctgcagcccgctatgcctgagcctcccccgcctccccaccttgggctcctgcgtggcctaagcctccccgatgagcgccgccccctgctc

SEQ ID NO: 54591 - DNA, 122 bp, Homo sapiens
gtgggaagcgcagctcgaaaagcgatgccgattctggtttcctggggctgcggcccacttcggtggacccagcgctgaggcggcggcggcgaggcccaagaaataagaagcggggctggcgg

SEQ ID NO: 54592 - DNA, 122 bp, Homo sapiens
tcattcatttatagtgcctgttatgttgcagctctgttctagggattgaggattgaacaacggatcggacagtgttagttttggtcatcccaggaaaactaagcagaggcttgctcaagaac

SEQ ID NO: 54593 - DNA, 122 bp, Homo sapiens
agcacatagtaggagctcaacacagatgattaagtgaatgaatgaatgaatgcatggatgcgtgcatgagttcattagccaaagagttttggcacatctgcacttgactctctcccagctgt

SEQ ID NO: 54594 - DNA, 122 bp, Homo sapiens
agcacacagctgtgtatcaccacacattccaaacaagccaccacaccaagaaatcttcttcgtgtttattatgcagcaatgtctgggagtactttggaatggactggcttctctaaagaaag

SEQ ID NO: 54595 - DNA, 122 bp, Homo sapiens
gtggcactgtagggacaggtaagtgcacagggagcgccacccggagaggctgataggaggcggagcttcaatgcgacacaacgtggcgggaggagcctaagggacgaggaaaggcgagtgtt

SEQ ID NO: 54596 - DNA, 122 bp, Homo sapiens
cactaaagcaagatgaggctcaagactcacaaatttttgggaaagtcatgacaggagttacgatacagtactgaaaattgggagactaattcaaagtccataaatggttggcagctccctac

SEQ ID NO: 54597 - DNA, 122 bp, Homo sapiens
tcagcctcttcacccaaccacgttgccactctgctgcacgggaccttgtgtggtcccaggcgtggccagacccagacgtcctggagatctcaatgcaggtcaggcttggtttgtttgtttgt

SEQ ID NO: 54598 - DNA, 122 bp, Homo sapiens
cagtacagcttagtagctaagagcacgggctctggagtttactttcttcctgtcctgcagcgattgtggggaagtcaggtcacctgtctgcctctccgtttcctcatctgtcaaatggagtt

SEQ ID NO: 54599 - DNA, 122 bp, Homo sapiens
caggtccgcggcctcctgggcgaggtttcatttcgcaggagcgcgactttcggaggatgccggcaagtggggccgcggccctgagtcccagaccagcgaaagtcggctttctctttctctct

SEQ ID NO: 54600 - DNA, 122 bp, Homo sapiens
cctccctcggcagctcccgggagttggagggacggctcccctggagtctgggaggcggcccgggaccgcaggcgttccgggaactatttccgcttgcgggaggcggcgggacactgggcgcg

SEQ ID NO: 54601 - DNA, 122 bp, Homo sapiens
gctggtcacagcctttcagttcccacagattttcagagccccagaaacagcagcacaaaccgtaagggaagcttccgctggaaccagcccccgcgcaacgcggtcctgcgtgaacatcccag

SEQ ID NO: 54602 - DNA, 122 bp, Homo sapiens
ggagaggctgaggggcggtgccagcgccggaccctgccattggctggagattacaggaggcggggacatagcagggaggagccgctggacaagccccacccggccgccagggagggtctgag

SEQ ID NO: 54603 - DNA, 122 bp, Homo sapiens
atgaagtctcactaaatatgggaaaaaaagataaggcaggggtccccgatctccaggccacggactggtaccagtccatgctacagtaggagttgagcagtgggtgagcaagagaagaagct

SEQ ID NO: 54604 - DNA, 122 bp, Homo sapiens
tccccctactacttccctctagcaggagctttccacattggtggggacctggaccctaagcgcatcaggtggggtcctggccctacctacactgagatactcctcaagctagatgtgcccgc

SEQ ID NO: 54605 - DNA, 122 bp, Homo sapiens
gttcaccgtgtcccagctgttgtggcggctgttcatggagccggagtagcaccaccaggccgccccgcggtgctgctgcgccgaagagttgagcgcctgcgagttggacttggaggacgaga

SEQ ID NO: 54606 - DNA, 122 bp, Homo sapiens
ggaggggcagggctgccaggatggtggtgggcagagagagcccatacttttcacccagcccgcttcacctgccccctccgatgccctaggactggctgactcgctatggttacctgccgcca

SEQ ID NO: 54607 - DNA, 122 bp, Homo sapiens
catcgactaaaagggaatgtgtgaggcaggctgagaccttgggtggggccccccacctctcgagttttccaagactcaggttccatctctgttaaatggacacaatcctgacccctggcagg

SEQ ID NO: 54608 - DNA, 122 bp, Homo sapiens
tcgtgataattcctgcaacaatgatcacaaacattctggcttcaaacaagacccatgtctcgtttcactgctctgcaggttaaaagtcccacgtcggtctcactgggctaaaaccaggtatc

SEQ ID NO: 54609 - DNA, 122 bp, Homo sapiens
cccctcccactccactccgttgggagcccaggggaatcagggcctgggcgtctggacccccgggtcccttagaacgcccttcagagagaggaactgagaggagaaggagaagagagtgggcc

SEQ ID NO: 54610 - DNA, 122 bp, Homo sapiens
aatataaattttttaggctttttgttgaggcataattggcatttgtcagaatgcatggatcgagtgcagctcagtgcattctgacaaatgcctttgccatgggacccaccccttatcaggag

SEQ ID NO: 54611 - DNA, 122 bp, Homo sapiens
gatttccttatatccccaggcctttagaacagaatctagcctctaacccctgggtaacttcgtcttgtttgaggaggagtaagagggggtgcaatctttgctccaacgaacagcttttaccc

SEQ ID NO: 54612 - DNA, 122 bp, Homo sapiens
aggggccggggaagtgtctgtagcgtccctccctctcaaccacaataacaggcggagggtcggcgtaggtgaggcggcggctgagtgggcctggggaccgggagcggggtggcaaagcccgg

SEQ ID NO: 54613 - DNA, 122 bp, Homo sapiens
tgaggaccttgtcagacctggcttcacagccatcaccatcaaacaccctctcctgttccacgaggctgttatgtgctgtgctgctctacttggcagtcgctttaatttcttctcagcagcag

SEQ ID NO: 54614 - DNA, 122 bp, Homo sapiens
gaggcggcgtcggtagtcagcgtcatggaggcagtgttgataatcaacatcagctcagggcgtccttgatccgcgtcccctcagtcttccctcctgcgcaggatcccacgtgacacttagtc

SEQ ID NO: 54615 - DNA, 122 bp, Homo sapiens
catgacgcctggggagcgagggcaccaccacggagcctgccagcccgtccatctctgtcccgcaggcatctgcagcatgtggggcggctcccactattccacctttgacggcacctcttaca

SEQ ID NO: 54616 - DNA, 122 bp, Homo sapiens
gagacgctcaggtctgatggaggtggttgttattatcgtgtataacaatactttccaggacgaattggaactttaggagaagtttatgtaccctcatagcaacactgagtcttgtctaaata

SEQ ID NO: 54617 - DNA, 122 bp, Homo sapiens
attcccaccctaagtgtgaggtctttacacctatagcttctgaggaggacagtcacatttcgctgaaacatggattttgaggagctgggcagattggaagtcaagatgacctcctgaaagcc

SEQ ID NO: 54618 - DNA, 122 bp, Homo sapiens
acgcctggaaaacaccgccaggcccctggccgaaggaggtaactaaccgagtcgaaacggcgatcagaaattaattcagtgccctgctcaggagcaaaaccgtcaaaaccccatcgagatgt

SEQ ID NO: 54619 - DNA, 122 bp, Homo sapiens
ggcatccatggccctgcaggtgccctctgggtgcagcccctggaccacccttcccagcggcgggacctcagccgggtctcagccctctgcacctcaggtcaggcgtgcctaatgcctcccca

SEQ ID NO: 54620 - DNA, 122 bp, Homo sapiens
gaattgaattacacacagtaccaagtggggatctgaatgcaccctctctgtctttcttgacgctccatctgaatttgtcctggagtcttggcctgaattttctcccccaggtgcatgtcagg

SEQ ID NO: 54621 - DNA, 122 bp, Homo sapiens
cggctcccacctcagagatgtccccaggtgccccacgccccccgcgcgagccccgacacgcgagccccaccgcactcctcaagggcttgtgtggatccttttgtccccacccccaaggagct

SEQ ID NO: 54622 - DNA, 122 bp, Homo sapiens
gcctcctaaagtgctgggattacaggtgtgagccaccgcactttcggatttctttgagaacgtaactcactgtggggcataacagacagccctgattgttgggggtagtgttgtgtgctggt

SEQ ID NO: 54623 - DNA, 122 bp, Homo sapiens
ccaagttgtcacactctagccctataatgaacagggttctgttcccagagttgagcaatccggggggggcccacataccagttttctccttgatttcacacaggacgctaaagagagcaggc

SEQ ID NO: 54624 - DNA, 122 bp, Homo sapiens
ggatgcatgtgtgctgagcgtgagtgcacagagcagaggcaaggagcatgtgagccttggcgaaaagaatgagctcccaaaggaagcaaaattcagggggagccacatgtgagaaagtatag

SEQ ID NO: 54625 - DNA, 122 bp, Homo sapiens
tgctcatgtccatggggtgcttgatgatgtcacagtagtcgtgtaggcccagtgcctccacgtccacaggcttgtagaagggccaggcgtaggcggcgtgcttcttggcaaacatctccttg

SEQ ID NO: 54626 - DNA, 122 bp, Homo sapiens
aaaatttttttacagccctagtgtgcgcctgtagctcggaaaattaattgtggctatagccgcctcgatcgctgtctccccagcctcgccgcggccgctccgggacgcgcccgcccgccgcc

SEQ ID NO: 54627 - DNA, 122 bp, Homo sapiens
acccgttcccggggcgctgctcttcccgggctggggtgggctgcagcggcggcaggacctcgccccctcccggccgcccgcacccccgcgcctcctcctagggcccggtgtcccacgggcct

SEQ ID NO: 54628 - DNA, 122 bp, Homo sapiens
gcggcgcccgcatcagcactgcggacagcgccccgggccccagctcgccgccaccgccgccgcccacctgctcccggggtcagcaccgcggagacccccctcgcccggccccgcgacagcct

SEQ ID NO: 54629 - DNA, 122 bp, Homo sapiens
ggcaccctcccagtgtgaggcgaggctgctgaggggagggcgtgtgagggtgaatgcggacggtgcaggcgcagctctcggtccagcgccaggacatgggacagcatttacccaagtcagca

SEQ ID NO: 54630 - DNA, 122 bp, Homo sapiens
cagtacaggttgagaagagaaaatgggacagggagcagagatttcacatttaaaaagtgacggaggagaagacccatgaagtagacatcctcagagaaaatctggacaacagttatgtcaag

SEQ ID NO: 54631 - DNA, 122 bp, Homo sapiens
ttggagcagcaaggagacatgagagagaaagggctggaggatgcatttataaaagacagccgagaaggggaatggctatttattgctgttgcaaaggtctgtctcttaaaacccgagtcgaa

SEQ ID NO: 54632 - DNA, 122 bp, Homo sapiens
gctgcccatccattgctcaatggtacagagtgtggggtcagtccaccacccttgacctcccggcagggcaaggtgaggaggcggacccaaagcagtaccagcaggacttgttgccagtgata

SEQ ID NO: 54633 - DNA, 122 bp, Homo sapiens
ctggacgccgtgggcagcgggaccacgccgggaggatggacgaaggtctcgcgacatttgcggcggcgggggccggtggcagggtggaagcggaggggcgtggccagcgagctgccaggcgg

SEQ ID NO: 54634 - DNA, 122 bp, Homo sapiens
ctgcgtccaccctgaggccgggatctcataggccccgcccctatttcccaatctagactccgcccactactcggagccccgcccagcggcacatcacagagaggctttaatgtcagacatta

SEQ ID NO: 54635 - DNA, 122 bp, Homo sapiens
gtaggcggcgagtcctcctgcatctcgctaccgagccagaccgcaggctgcgcggcgcggcgcaggcacagccaaagtgcccgagcccgcgtccccgcgtcggtacaaaaggagaaatgagg

SEQ ID NO: 54636 - DNA, 122 bp, Homo sapiens
cctcttcctccctcgctgtgccgaggagggatctagaagggactttccagagagggttagcgtgcagggtgtggaaatggaataaaagcatatgcaaataggccttagctgccttcctctac

SEQ ID NO: 54637 - DNA, 122 bp, Homo sapiens
acttagcgctgggcctaaataaactggatccaacttctcaggctggacttcttccagcttcgggacaccttctcccagcatccctccctagggggaactggggaaaatcaaaggctgagaca

SEQ ID NO: 54638 - DNA, 122 bp, Homo sapiens
aaggactgggaccagagccctagaaaactacagcgagtggattccctggcaggggaaacccgcgagagcctgggaaaaaaaaaaaaacgagagggagagaaaaaaactcacccgggcgccct

SEQ ID NO: 54639 - DNA, 122 bp, Homo sapiens
cagttcttggaaccgcacacccgatgccgacatccctctcttgttggctcccctcgttagcgggattcaataactaaacgtccatttctagcattgactgaagagctcaagcttgacactcg

SEQ ID NO: 54640 - DNA, 122 bp, Homo sapiens
gaacttttcccaggaggaatggagtctccttagtgaggctcagagatgcctttatcatgacgtgatgctggagaacctgacacttatatcttctctaggtaaggcactcacactcttctcta

SEQ ID NO: 54641 - DNA, 122 bp, Homo sapiens
cagacctccaaccgacctctgctgtcctgaagagcgcacactggccaggtttccagtctgcgccaggcacggtgctcagagccttctgtgcatcgtctgggtcaaccctccccacagccctg

SEQ ID NO: 54642 - DNA, 122 bp, Homo sapiens
ggtatgtcttacactcatccaacatgaatttacctaactagaactcaaaaaacagcacgtcgttctccagaaagattcaaatatattatctattcaaaaaacaatctgtggctgggcatggt

SEQ ID NO: 54643 - DNA, 122 bp, Homo sapiens
actccgcctcttcaaaaaaaattttttttaattagctgggagtggtggtgcccacctgtacgcctagctacttgggaagctgaagggtgagaattacttgagcccattaggtcgaggttgca

SEQ ID NO: 54644 - DNA, 122 bp, Homo sapiens
ggaaaccgggggtagaaggcggcgggcacgccggggccctgttcaggctttgggaagggccggcggagatgctggtgggcttggacgccctccccggcccgacgccccggccgcagtgccgg

SEQ ID NO: 54645 - DNA, 122 bp, Homo sapiens
tgcgagttatgatgaacatttcaggccagaaaagttaagagaatggccggagcccgagtccgtttctttaatggaggtgagataacgtggcgttttgagacgtcattttggcggggggaccc

SEQ ID NO: 54646 - DNA, 122 bp, Homo sapiens
tttggctgactggataagggctcttaatcccagcactcaggcagtgctccagtactggttcgatttccgcaaagtccttcttgcatccaccttctccgcgtttctggtgagagagcaagtaa

SEQ ID NO: 54647 - DNA, 122 bp, Homo sapiens
tggagccttcttcttcccagacttcaactagaaacctgagctgcctgtcacagcaggggacgtgtcatcccattagacttcaaacgtcctcagcaattccctgcccccttctttctaggagt

SEQ ID NO: 54648 - DNA, 122 bp, Homo sapiens
ccccacgggaacaataaagtttcccttgttgaggccgcttccgccggaagcggggcggggcggggaagaaggaggaaccgcgttccagtcctgcgcacccggcctcccacggcaaggcgcat

SEQ ID NO: 54649 - DNA, 122 bp, Homo sapiens
gacagaaggaaaccgtgggagaagacgagtgtctaccgcctcgatgtgctgatggcgtcccggtgtctgcacaaatccacacttgctgaactgtaaggggccggtgacctctacagtcgcct

SEQ ID NO: 54650 - DNA, 122 bp, Homo sapiens
gcactacagggtcctgtgaggggagggggctgggggcctgtcccccgggctcccagagggcggagggtgctgagggcctggaacactgggtccagctactcccggctccccaacatgcacac

SEQ ID NO: 54651 - DNA, 122 bp, Homo sapiens
atcaggaggaaaacaaagcagcaaagaggcagctggtgcttactacctcttccactactacgcttcagactgacagaaaagcagctagctgctcctttaaattagcaatggttaattctaag

SEQ ID NO: 54652 - DNA, 122 bp, Homo sapiens
ctgggccaggccgtggcaggggccgccccagacctgtgtcccaaggggccaggttgtttgcggctgggctggctccgggaaagtcagagggggcactgccggacaggggatgtccagtgcca

SEQ ID NO: 54653 - DNA, 122 bp, Homo sapiens
tcaatttttcactgttacaaacaaggtggcaacatttatctacaaacctctggatatacacgtaggaagcttttggtatttccactagtgaaactgctcagttgaagggtatgtggatcttc

SEQ ID NO: 54654 - DNA, 122 bp, Homo sapiens
ttcccttatcactgactcactgacacccagggcaactcctagtcctgtaagttccattcacggtaagtgccctatacaggtgcaccatttttatattttatactgtattttctctgtacctt

SEQ ID NO: 54655 - DNA, 122 bp, Homo sapiens
tgacagaactagctgcattgggattgataagcagagaaacaaaaaagaaaatacactccccgtagtaaactgtaaacatgaaacagagcagaacagcaaagaggaagaaaaatagtaagctg

SEQ ID NO: 54656 - DNA, 122 bp, Homo sapiens
cggtccccaccccaccagctcagtcttgactcagaaactcagggtttttacttttaggatcgttgggctgtgcgttaggggaggaggtggtcctcagcgtcctggaacgacaccacctgctc

SEQ ID NO: 54657 - DNA, 122 bp, Homo sapiens
ctttgtcttcctagtattcccttcccgttgtctctgtttaaaatgccaatttccgtgggacgtggaactcctaaagtcccacatccagcagtgaggtgtctccaggagcagtgaagggatgg

SEQ ID NO: 54658 - DNA, 122 bp, Homo sapiens
cacgtagaggaggcttctgtgtgggaagacgcccgtcaggagctccgtctccagatgctgcgccaccacccgccacgagtgcctgcagatggccaccagcatgttgctggccgcgtcctggt

SEQ ID NO: 54659 - DNA, 122 bp, Homo sapiens
ccgggacctcgcatgcatgaagctgcaggcccggggcgccctagtgtttgagaggacgcgcgatccatacctgaacctgggtgcgtagccgccgccatctgcttcagggtgctgggctttga

SEQ ID NO: 54660 - DNA, 122 bp, Homo sapiens
tccaaaacgcagtgggcagagcaggagggcttgtgtctccattttcgccgcagggcggatcgcggacacaagtcctctccagtaattccgaagcctcgaaataagactatgctgggaggagg

SEQ ID NO: 54661 - DNA, 122 bp, Homo sapiens
agctccggggtggcagggaagctgggtagggagttcctacagggagcggcagcccaggctcgggcaggcaagtgctgaagggtggctccgccttccgcagaaagtcagaggccgaggagatg

SEQ ID NO: 54662 - DNA, 122 bp, Homo sapiens
ccatccttggacggaatgtatcttctcttcctacgccttcacctccgaggggtaaggtctcgtgagatacaatatgcagaggccagttttggggcgagccggaggccgggcgcgtctaacct

SEQ ID NO: 54663 - DNA, 122 bp, Homo sapiens
gtgttctcactgattcgtggaatctaaaaatcaaaacaattgaactcatgtactcatgtacgaagagagtagaaggatggctaccagaggctgggaaggctagtggaaggctggggagaagg

SEQ ID NO: 54664 - DNA, 122 bp, Homo sapiens
gagccaccatgcccagctctttcatttttgtattgtctgtgctcacttttgcactgcacccgtggatttgagtagttgtgacacagaccatacaagctgtaaggcctaaaatatttactgtt

SEQ ID NO: 54665 - DNA, 122 bp, Homo sapiens
ggtaattctgcatatttgcggacatcagccccaagaagaactccggagggagtctggggccgccgccgccgccgccgccacaccgatcacctgcctggacgcctggcccggccccggctgcg

SEQ ID NO: 54666 - DNA, 122 bp, Homo sapiens
ggaaatgcgcggggaggcaggcgtcttctccgagacccgcggcgctgggagctccgcgtgcgaacttgcccggggcgaaatctgttgcccaccctggtcccaccgtgcgagcacacctaggc

SEQ ID NO: 54667 - DNA, 122 bp, Homo sapiens
ggtgcctaggtggcaagtgagctaggcagggtcagggaggggacatttacttctctgcctcggctaggcgctccagcttgtagcgctccgcttccgctggcttccgcacccgggcctccagc

SEQ ID NO: 54668 - DNA, 122 bp, Homo sapiens
attaactctttcaatcctcacaactttatgagggaggtgctattttaattctgattttaccgatgatgagagggaggcaggtgaggtgacataacttgccagtaagtgggtggtctgaatgg

SEQ ID NO: 54669 - DNA, 122 bp, Homo sapiens
tgggagaagagatgcccctctagcccctcaggtacccagatgacctggcctctgataccacgctgcccacagcccctgggacccttgggagaactgaggcatgctgccttctcctgggccag

SEQ ID NO: 54670 - DNA, 122 bp, Homo sapiens
aatctctggcagcccccaccccaggcttttattatgcaggcaggttttcagcctgagctgcgccatgttgcccatttctttcttactgtacacatgctaacaaaaaagggaagatggagctc

SEQ ID NO: 54671 - DNA, 122 bp, Homo sapiens
gctttggttccgagggtgcttctgctccgactgcttttcccacgggcgtcatctatagtccggaggacagccccagggcagaggcctctggtgagtgccccgccgccttaccagactacaaa

SEQ ID NO: 54672 - DNA, 122 bp, Homo sapiens
tgggatgctccgcagccaattaagccgactgagttcctttcctcatggggacccagtgtgcgatggctgcacacagcagcttccttggtagtgtacgcagcctgttggttgtatgggttgct

SEQ ID NO: 54673 - DNA, 122 bp, Homo sapiens
tgaaagaggaggcagcgacgggtggcgggtcgacgggggaggcagacggcaagacggcggcggcagcggctgagcactcccagcgagagctggacacagtcaccttggagggtacggcagcc

SEQ ID NO: 54674 - DNA, 122 bp, Homo sapiens
cagggccagtgggggccttggcagaggtgctgcctgctcacgagggggggctttggctcccgcccctggtcccaccccctgcttggccttgtctcttgaaagatttaggactggctgcagag

SEQ ID NO: 54675 - DNA, 122 bp, Homo sapiens
gagggaggggccgcaaccctgaacaattgcattcccgggctggatgccggttgttaagcgcgctgttgctttgtaaaaatgcgtgtgttctggtgttttggctggggcagggaggggacacc

SEQ ID NO: 54676 - DNA, 122 bp, Homo sapiens
cctcaaaccacaagctgatccgcctggaggagggcgtgccccccggcaccgtgctgaccacgttttcagctgtggaccctgaccggttcatgcagcaggctgtgaggtgggtgcacaggaca

SEQ ID NO: 54677 - DNA, 122 bp, Homo sapiens
caggcacatctgcctccatcttctgtagggaggcctcggtgggagcctgtggggcctgaccggaagcttctgcctctggcttccaggacgcctgatcagcctgtgctccaacagggagaccc

SEQ ID NO: 54678 - DNA, 122 bp, Homo sapiens
tgtggatagtcctacctcaccctggtcaacctacatgatccttaagctaatggcgaatcacgatgaccttgtagacatgcacacaactatacctttgtccaacagatcataatatatctgct

SEQ ID NO: 54679 - DNA, 122 bp, Homo sapiens
tggaaaggagtggatattaacaactagctagaacaacagatgcaaatcaatgctctagaacgacctggacacacaggtcatcccatctccaacctacaataatttataattctgcttcaaat

SEQ ID NO: 54680 - DNA, 122 bp, Homo sapiens
ttccctaggagcaggttatgccttccaagaacttccacagagtccccacccctaacccttcgcaggaaagcccaaccttgcaggtgtataaataggcactctcgaagcttcgtgctgtagcc

SEQ ID NO: 54681 - DNA, 122 bp, Homo sapiens
ggcctcagcactgccccctgcgctcgctggtcctggggagccgaggaccaggtcgccctccgtgtcactgtctctggcttcctcagcccgcacggggacctgctctgggctggacgcctctc

SEQ ID NO: 54682 - DNA, 122 bp, Homo sapiens
ccggctgccctcggggtcggccccgccgaggggtgggctctgggccgggtgggggcggggcggggcgggctcggggcctccgggcaggtggcgacagccccgtgcgatcctccgggctcccg

SEQ ID NO: 54683 - DNA, 122 bp, Homo sapiens
cctcggcaacgtgtggcgcttcccctacctgtgtcagagccacggaggaggtaggctggccgggcggggctgcgggcgaggccgtggccagggaagcacagacacacgcagaggccctgggc

SEQ ID NO: 54684 - DNA, 122 bp, Homo sapiens
cctaaccccgcctcatgctggcgcagcccccgccggcctccccagcccggctccaggctgcgtagtcttcccagctgggtctcagcgtcagccgcgttcttcatccggggcctccggcgcct

SEQ ID NO: 54685 - DNA, 122 bp, Homo sapiens
ggctgcaagcatacccaaagcgagtattcctcctcccctttgttttgaagcagaaccaatcgggaagaactgagtttggttttaaacggccaagactgtaggaggggcctggcccctacttc

SEQ ID NO: 54686 - DNA, 122 bp, Homo sapiens
attagcctcagagaagggcagcggagacgggccttggccggagcccgaggccgcagagggcgacgaggacaagccgacccacgctggtggcggcggcgacgaattggggaagccggacgacg

SEQ ID NO: 54687 - DNA, 122 bp, Homo sapiens
cctctagtgtcctgttcgcaaacagactcagaaatgtcagtctcatgaagttcaaaagatcgagaatgtttgctatcttggtggagcagccgcagccaagcaagtaacttgtaaaatgagga

SEQ ID NO: 54688 - DNA, 122 bp, Homo sapiens
tctcaaccacacataggttgtgttctgagtctcaggttcacatgttaatcctaaagtctccgttctccatgaggtcagatgttgcctgtgatgaagggtgtcgttaagtctgcagtgcagat

SEQ ID NO: 54689 - DNA, 122 bp, Homo sapiens
agcattctcttcactttgtagtccctaaaccgccacagttctgggacccgtcaaacctcacggtctcccacattttaggcccatttattacctaggggctccgaaggatccccatcatttct

SEQ ID NO: 54690 - DNA, 122 bp, Homo sapiens
ggagactcggaagtgtctgatcagagccccagaggaggccttgagagcctgttggcgtaccgttccacacttggatccaggaatcgggcgtgttccaggctgctctctatggtagctttggg

SEQ ID NO: 54691 - DNA, 122 bp, Homo sapiens
tgctgtcccatttcacagaagagcacgggggcgccaggagctgggaaccccatgaaatggcgccggggtctgtgcccccaccaggtcgtggggagccctgagctgagggtgcctggggattg

SEQ ID NO: 54692 - DNA, 122 bp, Homo sapiens
cccagccccagcctccgttctacaagagcaggacctggcagccccctgcagcgctcctcgcggccacacgggggcactgttggagctcagggaagggaccctccaccctctggctgggagct

SEQ ID NO: 54693 - DNA, 122 bp, Homo sapiens
ggttgggttgtctctgtaagtgtggacagtgtgttggtgggcacccagttccgattgccccgtctagacaggggtgtgcgggcactcaatgttccacgcgcggccgggagctcgcagtgtgg

SEQ ID NO: 54694 - DNA, 122 bp, Homo sapiens
tagcagcagtcgaagtggagtgacaagcctcatccatgagtaaatgcaacacgtggcagacgctgccgctgccccatacacacacagcgataaacacaggtcactgtggcctaataaacttg

SEQ ID NO: 54695 - DNA, 122 bp, Homo sapiens
ggagtgctcaggacccatggcagccacggcagggaccgtgtggcctaccacactgggtgacgtggcttcattgattctactttttttttttttttcctgagacagagtctcgctctgtaacc

SEQ ID NO: 54696 - DNA, 122 bp, Homo sapiens
cggattttggttcttcgctgtttccctttggggtgcccttcgcggtttctgcgtttcccccgcgttgccagcagccactcgcgccgcgcccctagcccagaaccgcccctcccaagggcgat

SEQ ID NO: 54697 - DNA, 122 bp, Homo sapiens
cgggacctagaagagcgttgtcctgtgacttacaaggaaagccgagaggctcaaagaggccgcgcgtctccctgagagccatcagtgggtgggagctgagctccgggaagtgtcaggggccg

SEQ ID NO: 54698 - DNA, 122 bp, Homo sapiens
ccacgagcctccttggggcggcgacagaaggccacggagtgacagcctgctgcctccacacggcgagggtctgtgctctcgggccaggggacgtgagccccagataccagtggagccgtctc

SEQ ID NO: 54699 - DNA, 122 bp, Homo sapiens
aacactttgaagcttttgctctaactttacagtcaattcagacccctggtgttcttttgccgcatttttggattgattcctttcctcctgtgccaggttagcaccattatctcttctcttaa

SEQ ID NO: 54700 - DNA, 122 bp, Homo sapiens
cagagaaggacaaaggaattaaaactggattcattcgttcacctagtgccaaatgtgggacgcagtgctagagacactgcatgtgcccacagtctagctggacagggggcaagcaaagggac

SEQ ID NO: 54701 - DNA, 122 bp, Homo sapiens
aggcctgcggggcactgcgcccgcccgcggagttggaaaccccaagggacccgccctgcccgagcccgccggctcctactcaacccctagtcctaccctccgggaggtccaactccctttat

SEQ ID NO: 54702 - DNA, 122 bp, Homo sapiens
gagcccactccccttgtagaccacactccagtacccggaattccgggattcatacccaaacggccctcagcccgcttccagaaccgtccggcctctgcccatgggacttctccccgcaggct

SEQ ID NO: 54703 - DNA, 122 bp, Homo sapiens
actacccaccttagcgcagaaccccacaggcaaagttcttcccaagactgcctccacttccgatgccagccccaattctcagggacaacttccatttctgacagaccagctataaatttcag

SEQ ID NO: 54704 - DNA, 122 bp, Homo sapiens
gtgttttccagcgcaggctggcctctgtgtgctgacaagaattcagtgtgctcctcagggcggggagtggggctagggcgctgagtcagccctgcaggagtccagctcccgcctgggcctag

SEQ ID NO: 54705 - DNA, 122 bp, Homo sapiens
tgaggagtggttccctgcctcacaggagcaagaggtcatagctctgcccagtcttcagcccgcccttgctttgtgtcattcaagcttcctttctagcccctgaaaatggaggccccacttcc

SEQ ID NO: 54706 - DNA, 122 bp, Homo sapiens
cgttacaagtgtaatgaatgtggcaaggtttttaatcacaaatcaaaccttgcatgtcatcgtagacttcatactggagagaaaccttacaagtgtaatgaatgtggcaaggtttttaatcg

SEQ ID NO: 54707 - DNA, 122 bp, Homo sapiens
gtgagtctgtgggagtgacagaatgtctcggcttttggctctcgcagacgctcctgaggccgagtcactgggcaaacagggccccagcacctgcaggatcttggctgttttttagtctctgc

SEQ ID NO: 54708 - DNA, 122 bp, Homo sapiens
gggcttcttgctgccagtggcaaatgtccagtcaggaagtcacacgggcagcagcaatgccggcaagggacgcttgtagcaggaacggggcagcctcccttactcaaacaagacgcggactg

SEQ ID NO: 54709 - DNA, 122 bp, Homo sapiens
ctttcgatgacacatttccgtcgcaaagttggagggtgggcataactcgggtcggtacttcgggtcaggcagtgcgctggatgcctaagtcacacactccttcggtggtccccgcccttcgc

SEQ ID NO: 54710 - DNA, 122 bp, Homo sapiens
tgagctggctagagagacgcgagtcgggcccgcctgcgagacagtcgcatagagcgtcagcgactctggaggacctgagggaagggtggttgccgtgaagcctctctcacccagggggaatc

SEQ ID NO: 54711 - DNA, 122 bp, Homo sapiens
caagtcccagtgtcccctgcgaagggctctgccaagctaagggaccacaggagcaagggtcgggcatcaggagagtgtcccttgggtggaagtggctgggcccttgtaccgctgcctggcta

SEQ ID NO: 54712 - DNA, 122 bp, Homo sapiens
gcgtccgtggggctgatgccgtgcatctgcgtgggaccccaggcgtcgtggggctgatgccgtgcgtctgcgtgggaccccaggcgtccgtggggctgatgccctgcgtctgcgtgggaccc

SEQ ID NO: 54713 - DNA, 122 bp, Homo sapiens
cgatgaagagcgtgaagagctcacggtgtctgtgcagcagctggaactcatcgatgagcccggtgatcactgactccataccacccatctgcacacagagcacagggtcgggctgcaggctg

SEQ ID NO: 54714 - DNA, 122 bp, Homo sapiens
tgtttcctttgctgtgcaggtttttagtttgatataatctcagttgtttattttgtctttcgctgcccgtgcttctgatgtcattgccaaaatcaatgtcatgaagcttctcccctttgttt

SEQ ID NO: 54715 - DNA, 122 bp, Homo sapiens
gctagggactaaatgtttgtgtcccctctgcaattcatatgttgagaccctaacccccaacgtgatgttatcaggcatttggcagataattagctacaggtgaggttatgagcataggcccc

SEQ ID NO: 54716 - DNA, 122 bp, Homo sapiens
gtcaggtccttcttcctggatactcataacgcggccccatttctcactcccattgggcgtcgcgtttctagagaagccaatcagtgtcgccgcagttcccaggttctaaagtcccacgcacc

SEQ ID NO: 54717 - DNA, 122 bp, Homo sapiens
agctccgcgcttgccgaggtgctcggcaaaggtacggggcacacaactcgcccaccccggcgaagaaagttgctcgcgagcccaagcctagcagcgctcgccacaaactttcccgcggcagc

SEQ ID NO: 54718 - DNA, 122 bp, Homo sapiens
gtctctgcgccaaggaggcacccaggtgggacatgcgggagcagctgaagtcagcggagccgggcagaggcagagatttccccaaagaccccacttcccgtagaggctgtcatgctgggcac

SEQ ID NO: 54719 - DNA, 122 bp, Homo sapiens
cagctggagcacgcggagctgcaccctccgcccagaggacgccgcgtgtggaaggaaaagcggcaagagaattggcacggggatgagacgtgcacacccagtttcctagggaaaagtacctg

SEQ ID NO: 54720 - DNA, 122 bp, Homo sapiens
ggggcaggcagtggcctgggaactacattacccaaaagacacagcggcggacacaagcagcgagtgtagccaatgaaggcctagcagagcggcgtctacgggggttcgcaatgcgtgtgggc

SEQ ID NO: 54721 - DNA, 122 bp, Homo sapiens
ccacgccgtggctgttccgggggctccgcgtctgtcgtcccacatctgcgctgctcctgccgggaggacacgcccgtgccccacagcgggtccgctcaccactgctctttcaggcattacct

SEQ ID NO: 54722 - DNA, 122 bp, Homo sapiens
agttccccatcttatctgggcatggttcatggtgccccaaaacattattattatttgagacggagtcttgcactgtcgccaggctggagtgcagtggtgtgatcttggctcactgcaacctc

SEQ ID NO: 54723 - DNA, 122 bp, Homo sapiens
tcatgggacagggatctcgggcaaaataccacaggctctgggtgaggccgagggcaaagccgtgtggcccgcaccctgcacagccaggctcctccgccgcccccacggtgctagcaccgtct

SEQ ID NO: 54724 - DNA, 122 bp, Homo sapiens
cttggttcgtgagcagggctcccgctctcaggagagccgccctcatcgacgctgggcagccgcagcagacagtccctgtggacagagaggtgggaggctcgactccttctcttcatccacct

SEQ ID NO: 54725 - DNA, 122 bp, Homo sapiens
ccagacgatcaggcttgccggaggacgccccctggggaccccgagggcggggtcgttgaacggccgccaggttctcacattcagaattctcctgccaccaaagagaacctgaagttcattta

SEQ ID NO: 54726 - DNA, 122 bp, Homo sapiens
tagagagcgcgcgagtgcgcgggcggcaggccgggctccagcgagaatgtcagtgctgaacgctgggccagagcgggaggagagtctggcgttccatgggaaacacagtgagtactcagtgg

SEQ ID NO: 54727 - DNA, 122 bp, Homo sapiens
cccttcccgggctggcctctgtccctgctgctgtgtgggaaggggtcctgccgccatttccgggcagccaggacttcctcccaagccctgtgaactgccctgccaagccccatttgcttatg

SEQ ID NO: 54728 - DNA, 122 bp, Homo sapiens
ccgcctccttctgctttctgtctctgctctctgtcttcacactcaatgaaatccttcatgcgcctctcccgaagcctgccaagcaccacaagggtcgccaccagcacagcgacaagaggcca

SEQ ID NO: 54729 - DNA, 122 bp, Homo sapiens
ctctgctcacaattcattttttctgtcctccactcggaggtcaggtgcgtggccctagaccgccaacttcattaaagtccctgctcctacccacccacaggaagatggctgtagctccccac

SEQ ID NO: 54730 - DNA, 122 bp, Homo sapiens
agccacactccatcccatctcctactggactgccgtgctccacgatacctcccacggatgcgtttctggcctgatgcttggcgctctggcagtctgtgtcattcaccgctctgcctctgccg

SEQ ID NO: 54731 - DNA, 122 bp, Homo sapiens
ggcccctccgagacaatgcggtcccccgggacccgcggtgggttgcgccaggccagtccgcgctccagctgcctcttcagaacaaggcagtgcaaatgtgcccacttgattctaaatcctct

SEQ ID NO: 54732 - DNA, 122 bp, Homo sapiens
ctgaccttcctgtcaccttgccaggagctacctgccgtgcccacattactggttcattggcgccggttaagaagaagagaaatctgaccgaccgggattttctaaaaaaaaaaaaaaaaaag

SEQ ID NO: 54733 - DNA, 122 bp, Homo sapiens
cagggtaaccggaggcttctagtttcttcaggggccgtccctcagccttcactgtctgcccgactgcccgccgggagcccctgcgtgtgtggagatggcaatgtgctttcccgggggctcag

SEQ ID NO: 54734 - DNA, 122 bp, Homo sapiens
tagccagcagtacagctgcattatttcttctttattaagtccagacatgataaagagccccgctcctccctggggtgtggacaagtggatgtctagaacccttgcaggcaactattatcttg

SEQ ID NO: 54735 - DNA, 122 bp, Homo sapiens
cccgacggccggttgccaagggcggcggccggcgcagggaagcgcggtgagggtggcgggcggccgactcacatggcgggggcagcgggtggaggacttggcagcggcagtgatggcggcgg

SEQ ID NO: 54736 - DNA, 122 bp, Homo sapiens
agtcatggataccggccatcatcagcagcttcttagctactggggtcgaggcgatgccagcgccccgggtgcagggatgaggtgcaccagcacagagccgcagcggcctgtcaccttgcaag

SEQ ID NO: 54737 - DNA, 122 bp, Homo sapiens
gaccttctcatatccaactcttccagaagggatccctgaaccatgcctcccagggtatcccgcaccatttttgtttgtttgtttgagacggagtcttgctctgtcacccaggctgagtgcaa

SEQ ID NO: 54738 - DNA, 122 bp, Homo sapiens
aagtgataaaatgctcttaaccaggtcggctcacctggcctttccattcgacctaaataacgtctacttacttgcgtaagggaagagctctggcccaggtcagcaagcatttgtcaggctag

SEQ ID NO: 54739 - DNA, 122 bp, Homo sapiens
cgaaaataaaacaattgctgtccttggcggcaaaggcctctatggacgcctccagggcagcgcagggaaccaaagggcaccccagatctctgcgggttcgcgccttgcctcgtgggggacag

SEQ ID NO: 54740 - DNA, 122 bp, Homo sapiens
accctcctcaccctaagccggttccttcgtcccatccccgccccgcccgtccttcctctgcgaaatgcttcccaaacaagtcctccgcagccgtcgtcctcaagactcgtcgcgcccggccc

SEQ ID NO: 54741 - DNA, 122 bp, Homo sapiens
atacccagcgcagcatctacacattcaaaagataagctgagtgttcccaccaggaagtcacgcgcagagaggagagtcttacggagggctgggagcttaaaaggaaaacaatgtccttactt

SEQ ID NO: 54742 - DNA, 122 bp, Homo sapiens
ggagagcatcacgaaaagagccctggatagtaaagtgggaggctggtgttccaatcccaacgtgaacactaacttgctgtgtgtccctgagcaggttcctgcccctctctgggctacatttg

SEQ ID NO: 54743 - DNA, 122 bp, Homo sapiens
cagagagtagcatgcttaaaatgaaggctcttgaggtggtgtggtcgctggaaatatgaccgtgagagtgagtagcttgaggtaaggatgtcaaggaataactgcagagtagagacagatac

SEQ ID NO: 54744 - DNA, 122 bp, Homo sapiens
gctggtgcgcaggcgtcacccaataaggtttttgtgagcaggccccaatcgcggtgtgggcggagcgagcggctgagaccacgaggacgcaaggccagcgccgccagggagacgagggaggg

SEQ ID NO: 54745 - DNA, 122 bp, Homo sapiens
accgcccccaaccatccttctcacctaactattaccaggtcaggaggacgtcctgctgcacgctcgggcggtcactcctcctttccacaaggcccatgtccgcaccgttcgccccggggctc

SEQ ID NO: 54746 - DNA, 122 bp, Homo sapiens
ctctgcagagccttctcctccttctctggagaaccccagggacttaagcggtagcctcctcgctgacagggtctccactttgtcctggggggcgagggggctggcaatgcgctcacgtgggt

SEQ ID NO: 54747 - DNA, 122 bp, Homo sapiens
cgcccactcgtgctggataaagtgcaggatccccggcaggctcaggggctccgggcccgccgtgggcccggggctgcctccgccgccgcctcccttacctgccgggcccggcccgggggcag

SEQ ID NO: 54748 - DNA, 122 bp, Homo sapiens
gggcgccggcctcgggaggagccgcgggacaagactgcggggtccggcgcccaaaaagggcgtttagtggtggaaatgacccgtgagatgaggggtcccaacagccccccccaccgagacgg

SEQ ID NO: 54749 - DNA, 122 bp, Homo sapiens
gagtgcctgattataagaaatccaagctgttcgttaaatggtagccacacaggaaaaccacgctgggcgcaaggtgggaatccagagccgctgatgcgtctggggagcctgagaggccattg

SEQ ID NO: 54750 - DNA, 122 bp, Homo sapiens
tcagtctggctctgccgggcctgatacccaaggcttccgctgtcactcagaagtgaggggcggggcctagcattccatccaatcagaggtgccggggcagggccctgcccattgtttatcca

SEQ ID NO: 54751 - DNA, 122 bp, Homo sapiens
ctgtcgccattggacacacacagtcaccgaagcgtcaaatgtcaaaggtcctgtttattccggcaaaccggaaagaaaaagtgtaaataaaaaaagaaacagatccatgcactcaactcctg

SEQ ID NO: 54752 - DNA, 122 bp, Homo sapiens
ttgaagagctgaggctgggggctccttttcctcttaaagtcgccagattctgggcagagtcgcatggggggcctatatggcagcggtggctcttctagaagttctgagctggggttgggttc

SEQ ID NO: 54753 - DNA, 122 bp, Homo sapiens
gacacccccatgctcctaaccactgggtcttctttcctctcttccccaactaggggtggccgtcatgctggggctaaaccacacctccatgtctgaattcatcctcgtcggcttctctgcct

SEQ ID NO: 54754 - DNA, 122 bp, Homo sapiens
agccaaagggcgcgcgaggcgatggggttcgcgtgtctgcgcgtttgcagagctgccggacgtcccccgcccgagggttgaagacagcaaaaccccagctgtggggagccggaggtgcggag

SEQ ID NO: 54755 - DNA, 122 bp, Homo sapiens
catcggcttcatcggcctggggctcagcctcatgcttctcaaatggatcgtggtgggctccgtcaaggagtacgtgcccaccgacctagtggactccaaggggatgggccaggaccccttct

SEQ ID NO: 54756 - DNA, 122 bp, Homo sapiens
aggcaggacaagttttacgcctggccaaataagggtcagactaagcaaggcgcctccgtgcgcctagccagagcggtgccggctgcggaacctgccccgccgggagcctagtgccatgcagc

SEQ ID NO: 54757 - DNA, 122 bp, Homo sapiens
attaggttaaattgcttctttccaatgcaagatcgccacctagtggctgaagacaacaaccgcatgcacaaatgatttcacatactgggaaggggctagggaggtggtgatgaaggaatagg

SEQ ID NO: 54758 - DNA, 122 bp, Homo sapiens
ctggaacaaattagccgcaggagaatatctgagtggttttttctgtttggaaagcagcgccgccgatgtgggagcgagtccttggagggccatttctgatgttcggggtcccggatccaccg

SEQ ID NO: 54759 - DNA, 122 bp, Homo sapiens
cccgttgattcggttccactgaccaggctgccctgaccaggaccccactgacaagggcctcgctgatgaggacacgcccaccaggccatgctgactaggtcccttgtggtcaggcctccact

SEQ ID NO: 54760 - DNA, 122 bp, Homo sapiens
gctgtcggaatccacgctgccttctgccagtctgtgtcacacacacacccttcctcttcccggggacccacagaggcttggacaattccagaagctcctagcccagtccatccctgacccgg

SEQ ID NO: 54761 - DNA, 122 bp, Homo sapiens
cggggcaccgagggccccccggagccccgcccagcgcctgcctcgctccgcccccgcccccggagccccgcccagcgcctgccacgctccgcccccgccccgccccagagccccgccccgcc

SEQ ID NO: 54762 - DNA, 122 bp, Homo sapiens
aaatatttgtttgctcatcctaactccaattcccctagcctagaacaaacatagcccttccgcactcaggaaatcccaagaggtcaggttcagtctggtaaacaacactgtccgggcacctt

SEQ ID NO: 54763 - DNA, 122 bp, Homo sapiens
gcttccatcccactcacccccaaactcgctaagtccccactgccccacccccagccccagcgattttcccgagctgaaaatacacggagccgagagcccgtgactcagagaggactcatcaa

SEQ ID NO: 54764 - DNA, 122 bp, Homo sapiens
agggaggcattctcattaacagtcaaggcgaaaggtttatggagcgatacgcccctgtcgcgaaggacctggcgtctagagatgtggtgtctcggtccatgactctggagatccgagaagga

SEQ ID NO: 54765 - DNA, 122 bp, Homo sapiens
ttccttttctcgtagtagttccctggttggcctcaagatgacgccaacacccacggagtccgcccagccgctccaggtgcagcggccacgggccgggaggagcgcagcgcggtgggggcgga

SEQ ID NO: 54766 - DNA, 122 bp, Homo sapiens
ctacacacaatgacaggcaccttctatattgagtgagtgtcgccggccgtcctagtgctccgctccttagcaccccagaaagcaccgtcccctgctccgagcacccaaggcactccctgtgg

SEQ ID NO: 54767 - DNA, 122 bp, Homo sapiens
ccaggcgagtaggcagtgggctccgagggcttggggctgcagcatcctggacagactcaccgaaaacactctctcttcactgtctcactataaataccctaggttatgagactggggaaggt

SEQ ID NO: 54768 - DNA, 122 bp, Homo sapiens
acaaaacacaagggagctgtgggaagcctcaatgtgtagctggctgggcagaagtgtgggcgatttggtaacacccaaaacttatgactggaacctgaagtggaggcaatgaaggactttgt

SEQ ID NO: 54769 - DNA, 122 bp, Homo sapiens
tgcccccgctgcttacaaagccaccaggcccccacccacccccacgacagcccgttaatccgagaatccgtgaatggatgaatccattcatgagggtggggccgtcctgacccagtcacctc

SEQ ID NO: 54770 - DNA, 122 bp, Homo sapiens
gctgctgcccccgctcacccaccgcctgccgcgggtcaacacagtagacagcacggagctcgagtggcacatccgctccaaccagcagctggtgcccagctactctgaggcggtgctcatgg

SEQ ID NO: 54771 - DNA, 122 bp, Homo sapiens
tacaaacattctgacaaggaataagcatatctgtggtggaaacccaatagtagggttcttcgagtctctaaacagactaggggcaacagaattcttctgtatttgggtctccctggattact

SEQ ID NO: 54772 - DNA, 122 bp, Homo sapiens
cctgaggcagaagctcggaaacccgagctgcacaggccaggatcttacttcctgtcgtcgcgcagcgatgacatcacccctaccgctctcctgaggggtcattttgaggcgcgcgtagagga

SEQ ID NO: 54773 - DNA, 122 bp, Homo sapiens
tcaccaatgaatgaaaaccataaaccaaagcttgctgcctaaccactccccaggtccagacgggacaaggaaatgctgagaggggaggggacccatggggcacactcatgagatgcaggagc

SEQ ID NO: 54774 - DNA, 122 bp, Homo sapiens
atcctggactactggaagggcgtgtcggcccagcacaagtcctgagccccccaagaccggcgatgcccactggaccaaaaaggatgcaggatccacccagagactcagcaccaaacccaaca

SEQ ID NO: 54775 - DNA, 122 bp, Homo sapiens
gcaaacccttatgtggtcaaggtttagtgtcctgtggcaagtttagagtcacctgggaggcgaaggcatgtagaggtcagaccagtgctcaggccttggctcattaaacgtggtgatactgt

SEQ ID NO: 54776 - DNA, 122 bp, Homo sapiens
tcttaaggtggttacaaaattaatctgcagcccaccacccaaagctacagtgccgaaggccgtgtgatgagcagagaaactgagccttctactgttaaccaatatggaagagagtaattgcg

SEQ ID NO: 54777 - DNA, 122 bp, Homo sapiens
ctgaaataccatttccttcatgtttttaaatagctctgagaatccattgtatttctgtcccggtagtgacaggatggggtcacctgggctatgtttcataagcgataatgaacgaactggcc

SEQ ID NO: 54778 - DNA, 122 bp, Homo sapiens
gggacaagtctccatggcagcgactaaaggacagcgatgtgaaccactgacaacagttcgcggcgtttgacggcggcgggggcgtggcggggttttatctgtgtattgacgagagccgggcg

SEQ ID NO: 54779 - DNA, 122 bp, Homo sapiens
ttaaaagggctaggagtttctttctcggggagctcggctcttaagacgcgagtctgctgacgctcccggccgaataaaaacctcttccttctttaatctggtgtctgaggagttttgtctgc

SEQ ID NO: 54780 - DNA, 122 bp, Homo sapiens
gcgttatgatttctgacctatgtaacatggtccactaactctcagtatccaatccatcctcggagggcttcctggaggtgttgccaacttcagggaagagaacacgtggtttagcttcagca

SEQ ID NO: 54781 - DNA, 122 bp, Homo sapiens
taagcagatacaaaggctcggcttgttttgttacagttcattctattccgcgccgcggagcgcagcggccggcgacaggagacgcgcgcgcatgcgccccgcggccgccagccggccggccc

SEQ ID NO: 54782 - DNA, 122 bp, Homo sapiens
tccaaatggcccttatcccaataaggtcacattcacagggatcaggggttaggcctggaacgtatctttttcagaacactattcagccagcccacaccagcgcccccaacaggcgctaccgt

SEQ ID NO: 54783 - DNA, 122 bp, Homo sapiens
gcttctcggtcgggagttgacctcagcctttctgtgacccagttcctggcacccagcaggcgctcggtggacggatgggtggcggaatgaaggacacagaggccactgcggggtctggcctc

SEQ ID NO: 54784 - DNA, 122 bp, Homo sapiens
gtacacagtagcccacgtttcccagcctcccctgcaaataggaaggatcatgtgactgaccgagggtacaaatgaaatacaccaccgccacacagggcagataaagacttcccatatatagt

SEQ ID NO: 54785 - DNA, 122 bp, Homo sapiens
aaaggaaattaccatttgtgaggctgtctccctctctgtactcctctcttaaatctgtaacgcagttttaaattggtgccttctttatggataagagtctcaggcaccgatttaaatctgca

SEQ ID NO: 54786 - DNA, 122 bp, Homo sapiens
gtgcttgctctgaaaagtgcctccaggcagaaagcctgagtgatcaaagggttctccacgcgtctctcccatttctgcatatcttacaagccaaggcactaaccacctctgttcctatcttt

SEQ ID NO: 54787 - DNA, 122 bp, Homo sapiens
gagagagggagaaagaggattagatgagagtggcgcctccgctcatgtccgccccctccccgcagagaattaccttttccagggacggcaggaatgctacgcgtttaatgggacacagcgct

SEQ ID NO: 54788 - DNA, 122 bp, Homo sapiens
aacctggaggagcctcagtgtgtccctccgtaagactgagacaggaacatgttaaagactcgcagcagggtcacaggcccaggaggtggaatgccagggctgagctgatcatccggctccca

SEQ ID NO: 54789 - DNA, 122 bp, Homo sapiens
aaccctccctctctgctctgaaggaaagtttcccaacacagccatgttcttggtggtctccggtcccccatccccaagcccccagtcagcctcacactcatccgcttcagtagccgcggagt

SEQ ID NO: 54790 - DNA, 122 bp, Homo sapiens
ctcacaccacatcccacgtgccagccagagtgcaagtgtttgctgaatgtggggatgacacggcagacggccaagactctgtccgaaggggactcccggccttacctggatgccagcgtgac

SEQ ID NO: 54791 - DNA, 122 bp, Homo sapiens
acttacagagaaaatgaagagtttggcgaagggagcccgtactgtctgcctttggatttccgtcttcttgctgtagatgggttctggctgtttctgcgaagcgggggttgccgagtggtaaa

SEQ ID NO: 54792 - DNA, 122 bp, Homo sapiens
gaggcgtcggagacgccggctccgcggctccagtaaacccaagcgaagtcagctcagccacgggctacctactaaagaccctgaaaggaacagggggcaaaacggggttctgggcagggcgt

SEQ ID NO: 54793 - DNA, 122 bp, Homo sapiens
ctttgtagccagctcacacacatccagttggctaagtatttgtctgcagttcttcggcaccggcaccgtcgccaccaaactccatgtgtgtcaggaggaagggaagctgcagtcaagtccgg

SEQ ID NO: 54794 - DNA, 122 bp, Homo sapiens
aagccatcaaggcctgtgcatactccgcattctttgagtaatgcaattctggaccaaaatcgattccagaagtctgatcttccgagaggaggcaatgctctgagctggttgaacagccccct

SEQ ID NO: 54795 - DNA, 122 bp, Homo sapiens
atcaacacacacagctgggcggccacgcaggctccaaggcggccgggcccctcccgagaccgcggtggagcacaggtggcaccaggctgccctgtctactgcacacatggtctgggacgcag

SEQ ID NO: 54796 - DNA, 122 bp, Homo sapiens
gtaaggagagaatttcatgtaggtagaaggacttaggcaaagatgtggggttgtcagaaacgtgacaagttcagggaactgtaattatggagctctaaagtggacaaagcaggagtggttgg

SEQ ID NO: 54797 - DNA, 122 bp, Homo sapiens
gactgtcctcggctccagaaactttgcgcggagagtgggcttgactgggcagagccgagccggctggctgacccgggaaggaacgggggaagggcggggtgagggaagaaagaccctttagc

SEQ ID NO: 54798 - DNA, 122 bp, Homo sapiens
cattttaaatgtaggatttaatgtctcctactgtaaatagacattgttcctacattgtgacgccagaatgcaaggtttctttacccaaggggaaacaggctttgctatcctgctgttcatac

SEQ ID NO: 54799 - DNA, 122 bp, Homo sapiens
gacactgcgcgccgagacgaggctgcttggacggcaaactctggatccagtgggagccttcgccaccttcgctggccgcccgcaggccaagccccagctgcggacgccactgcttccgcctt

SEQ ID NO: 54800 - DNA, 122 bp, Homo sapiens
cttcccgggatggttggaatagttggagcgggagactagggcctccgctggcggcgggagcgggacgggcggaggaatgcgagctgaggaacggaatcaggttctaagagtgttgctctctg

SEQ ID NO: 54801 - DNA, 122 bp, Homo sapiens
gacttcgggcctcagtcctctcgccagcaaagggcggacaatgacccctcccgtcccgcccgggaaggcgatcgaggaaacgcactggccaggcccatttactgatgctcagcagggtttgc

SEQ ID NO: 54802 - DNA, 122 bp, Homo sapiens
cccaggagtctccgagcttaggtcaaagcaaaggcagccgcggccacgcaccgcagagcgcgggctgaccgctgggagaaccataaacctcgcagtgtgatgatcagctgagcagtaaatta

SEQ ID NO: 54803 - DNA, 122 bp, Homo sapiens
tcccgggtccgctccagcagcagcagcctcagctcttccaggctgcggttgatgcggtcccggcgccgcttctccacaagcggcttgagcatctgcgaccagcgagaaaaggagagcgggcc

SEQ ID NO: 54804 - DNA, 122 bp, Homo sapiens
tacacttgtcaagtggcactgacaatttggaaagcatggccaccaaactaactctgctcacgcctccctgctgtccacacaggcattgagggtggcccatctcggggtcttttcttgggatc

SEQ ID NO: 54805 - DNA, 122 bp, Homo sapiens
atctcagtaactttccagtgaccccgcatccccacccactaatcccagcgtctctggttacgcctcccagcaatggcgccaccatcggtcccggagtcccagtgatgctctgtgccatagag

SEQ ID NO: 54806 - DNA, 122 bp, Homo sapiens
tgtgctagagatactgttttgtttcttttttcattcaacaatatactttttagttatggtcgtgtctctatgtgtagaattagtttattgcttctaacagcagcacagtattccatagtagg

SEQ ID NO: 54807 - DNA, 122 bp, Homo sapiens
cgtgggggctgagggtccctgtgagactctggggattctaagggggcgtgttaggggatccggagagcgtgtgggggctgaggaaccctggggagttctgccggccctagggggtctctaaa

SEQ ID NO: 54808 - DNA, 122 bp, Homo sapiens
aagttatttagtgcggatacgcagagaagtgtaataggagctgctgggccaccaagaaaacgctcttgccattgtaaggcttcgatctcaagcggagatttaccacgcatctcactttaaac

SEQ ID NO: 54809 - DNA, 122 bp, Homo sapiens
tatgcaaggcctctaaatagcaggaaaaatagcaggccataacttcgggttcaccatcctcggctctcctagcaatttaggtttttgggaaaatctcaaacctaatttacataggcttctcc

SEQ ID NO: 54810 - DNA, 122 bp, Homo sapiens
gcgtggcagagatgaaactcgggcggtctggcccccgtgctttgggtctcagcagctccacgctccacatagatgttttgtaggatccttaaaacagaagtgcagtaatctcgtataaccac

SEQ ID NO: 54811 - DNA, 122 bp, Homo sapiens
acgcttaggctatagggtcagagaaacctgtgttcaatctaagctccatcactgtgtaaccgtgggtgactcacgtttcctctcagatcataagattcccccaatgtaaacatggagataac

SEQ ID NO: 54812 - DNA, 122 bp, Homo sapiens
ccgcctactcagagtgcgccctctggtggtgataacttgcagtactgcgcgcccacagcacgtgtggggaaggcgaaaagctttgctgattctcccaggggcctcagcccaggagccctggg

SEQ ID NO: 54813 - DNA, 122 bp, Homo sapiens
ctgtagctgcaaattcacctacttgataatgtttacttttagcccctaaatcaatcccagcggggcttttctggatgtgcgccgggtggtgaagaggttgaatggctgataagcacggtccc

SEQ ID NO: 54814 - DNA, 122 bp, Homo sapiens
aatgtctctgtcaaaacctagaggaaaggagtccatgaagagcattccctttacaattgacgtgatatgcactaaaatttctaccaggggccagagcattttcatcactcctagcagttttg

SEQ ID NO: 54815 - DNA, 122 bp, Homo sapiens
gccgccacctttcgcccacgagacttcgggggaccaagaggcgacgagagctgagcggtgcgctgcggcgtccacctgtgcgccgcggtgcccggcgggccgggggcggacccaaggggagc

SEQ ID NO: 54816 - DNA, 122 bp, Homo sapiens
atgagacaaaaagaaagcctaggagagtcgccactgtcctcagtcctgatgtccctggcccgcctgccttcttttctccacctttcagagtcttctcatgtttgtcttgtacgtgatgtccc

SEQ ID NO: 54817 - DNA, 122 bp, Homo sapiens
caggaggagctgctttgtgaggagacagcatggcgtcacaagtgtctgcggtgcggcaaacggagatgtcaagtgtgctgtcagacgcagggctctggagctgaccggagaggtacagattt

SEQ ID NO: 54818 - DNA, 122 bp, Homo sapiens
tggaaatacaaccatggaattccagctcagtcatggagcgggagatctggggacactggccgggcagcctgccccaggcacccctgaactccagtcccctgaagccagagcccgggtcaagc

SEQ ID NO: 54819 - DNA, 122 bp, Homo sapiens
agaccatcgtctatcgctgagcagcaaaacaatcgcctatcgccaagcagtgagtaccatcggacccctttcgcttgctattctgtcctatttttccttagaatttgggggctaaatactgg

SEQ ID NO: 54820 - DNA, 122 bp, Homo sapiens
agcggtggactcccacgaggaggtcccaggctgcttcggggctgcaggtgacggtaaaagcgggagcagaattaggggaaggtcgtgaagcacggcgacaaaaggtggaaagagggagggcg

SEQ ID NO: 54821 - DNA, 122 bp, Homo sapiens
tggaagtggggtcagccatcagcttagtggcaatggtgactgatggtcagtaggtcagctcgtctgaaggtctgctttgttaagctttgatggctgtggttagctgtggcctggtagccaca

SEQ ID NO: 54822 - DNA, 122 bp, Homo sapiens
tgaacatgaattacatgacgaatgtgcgcttgagtttgtcctatctgagacttcggactccgggaagattgccgtacacgtactggctaatgtgacgactgttttctgggagttgcaggatt

SEQ ID NO: 54823 - DNA, 122 bp, Homo sapiens
tggaatttactggcagctacaaatatttgcttaacttgcgtctggagttgggggattttccggggagaaggagaatgagtgagggctgcaagctgattctcaggagccgggatccaaaagga

SEQ ID NO: 54824 - DNA, 122 bp, Homo sapiens
tcctccagcaaacacgcccctagcaggcctgggctgctgtgatgcgtcctctttggccgccgctgagggaggtgtttgtaaagctgaggaccactgttctgttgtgggtttttttgtttgtt

SEQ ID NO: 54825 - DNA, 122 bp, Homo sapiens
atctcgtgtccatagagcaaaacgtctgctcagatggatgcgaggcacagcgtccgcccacgctgctgtttttaatccatctcagtagagttgaacccattcgtggtattacagccatttct

SEQ ID NO: 54826 - DNA, 122 bp, Homo sapiens
cgtgatctgcccgcctcggcctcccaaggtgctgggattacagacgtgagccaccgtgcccggccaaggctgccaggtcttttttaagctcagagctagaaacaagacattgctactcctac

SEQ ID NO: 54827 - DNA, 122 bp, Homo sapiens
cggggcaggtgcgcggccctgggggacaaggagggggagaggggcgagggctaaccacgtcggccccaaactagctgcctgtctttaaatgtttgctttcatatttggaagtgctgagcggg

SEQ ID NO: 54828 - DNA, 122 bp, Homo sapiens
caagcggctgcagcacttttgttacaaagtaactgacacggtgcaacaaacacaggggcccgccccgcccccgggacgccccgcccgcgggaacgcccagcccttggctccgcccctctgga

SEQ ID NO: 54829 - DNA, 122 bp, Homo sapiens
gaaggtgtgaatgaatgaataattgaaagaataaatagtagttctcagcctcacagaacacgggtcacaacctcaaatgacctgctaccctgcccataaataacagagatgcaggagtaagt

SEQ ID NO: 54830 - DNA, 122 bp, Homo sapiens
tcttgatcccttttctccctcaaaacactcaaagcatcagaaactgcatcaggccatgcacggtggctcacacctgtaaccctggcactttgggaggctgaggcaggcagatcacttgaggt

SEQ ID NO: 54831 - DNA, 122 bp, Homo sapiens
cggcgggctgtcgttcatcctggccgaggtgataggcgtgctggccgtcaacatctacatcgagcgcagccgcgaggcgcactgccagtctcgctcggacctgctcaaggccggcgggggcg

SEQ ID NO: 54832 - DNA, 122 bp, Homo sapiens
tctcacaaaaaaaaaccaaaaaacaaaacaaaacaaaaaaaaaccacaagtaaatttaaacgattgcttaaactagcagggaagggcagagatatctgtaaaggaccagacagtaaataact

SEQ ID NO: 54833 - DNA, 122 bp, Homo sapiens
cgggacgcccgggacctgacatttggaggctcccaacgtgggagctaaaaatagcagccccgggttactttggggcattgctcctctcccaacccgcgcgccggctcgcgagccgtctcagg

SEQ ID NO: 54834 - DNA, 122 bp, Homo sapiens
cccagcctcctttgccgtcttactaaaagtgcatgcttgcttctcttcctgtctcctttgcgatctctaccacgctgcgcttcgcccttttcgggctatgagtctaaagcttggacgtgggt

SEQ ID NO: 54835 - DNA, 122 bp, Homo sapiens
tttcatcttatgaatgagatggaaatgccagccattgggaaacaaataccccatagatggcgtgggaaaaaaatactgtaacaaagcaagagcatggtaggatgatgataagaaacataaaa

SEQ ID NO: 54836 - DNA, 122 bp, Homo sapiens
caatcgtctgagcctgtcctcttattcccggttgtaactaaatactgttgcgagcgcagccgaagccctttgttggagatgtgtgagcgcagtctctacagagcgggctatgtgggctcgct

SEQ ID NO: 54837 - DNA, 122 bp, Homo sapiens
cggctgtcctccagcaacaggtgcacattcccgggctcctcgtcacttcccctgtgctggcggtcccagcggctctctgagcgaagtcactgagcgagccgccaggctatgaccccaggggc

SEQ ID NO: 54838 - DNA, 122 bp, Homo sapiens
gcgaggggcacccggtgctcaggagcctccacacacagcagctcgcacttagaacccacacgccaagcagaaacccctcgaagcgggctgggagcacggacccctgatttatagaggaggcc

SEQ ID NO: 54839 - DNA, 122 bp, Homo sapiens
cgactccaagaatgctgccagccggggtgggggctgcacgcacccgtgggcagggccgggcgtggcctgcgtcccatactctggctgccagccgggtgggggctgcacgcacccgtgggcag

SEQ ID NO: 54840 - DNA, 122 bp, Homo sapiens
gacttagactgaaatcctgattctagtttctgtgcttgagaaaagtctgcttaatgcttccgagtgccaagtcacaccagccaggcccagctcccaggattgcacagagaaaaagaactctt

SEQ ID NO: 54841 - DNA, 122 bp, Homo sapiens
cggggcgatttgcatttctatgaaaaccggactacaggggcaactccgccgcagggcaggcgcggcgcctcagggatggcttttgggctctgcccctcgctgctcccggcgtttggcgcccg

SEQ ID NO: 54842 - DNA, 122 bp, Homo sapiens
tcccattcgcggccactttcctgtctgaagaccgcatgttgccgggctgtgcttacggctcgcgggcgcactctactgacaagcggtgggcggcctcacagactctcccaggcccgcgtggg

SEQ ID NO: 54843 - DNA, 122 bp, Homo sapiens
ctgggaccacaggcagccataaccatgcccggccaattttttatttgtagagacaggtctcgctatgttgcccaggctgataaactttatttttatcttttttagagatgagatcttgctgt

SEQ ID NO: 54844 - DNA, 122 bp, Homo sapiens
ccggaggctggggaaactggggcaagttggagacaggcccaaggaagtctctttcctcgtcggaagctgtaacttcaaagcacaccttcctcttgtcgaaggcaaactccctggccttcaac

SEQ ID NO: 54845 - DNA, 122 bp, Homo sapiens
gtccaggacctgcgcgaggggtgcaggggcttccaagtccccaggctggctttttctaagcgcccatccactgtgcgcgggacttggtgcctgaagagtgaaaaaccctatccaaactctct

SEQ ID NO: 54846 - DNA, 122 bp, Homo sapiens
agaaagaagacacattcccggttgacgctctttggcatgagtttccacgtggcctggccacggcagggaaggagactggaggggagatattgacagtgggaagggggttttgtgccatgccc

SEQ ID NO: 54847 - DNA, 122 bp, Homo sapiens
gatcttcattactactttcatatatataggtttctaaaatttgttgaaatcagtcattaacgctggaccagaagagttcaggtggattaatctgtcatcactgtgggctcttgggggtatgg

SEQ ID NO: 54848 - DNA, 122 bp, Homo sapiens
ggagtcggcagcctccgcctcggttcctgtcttctgctcctgtttccgctctgcggtctccgagaccagcctcggggccgagttcatgtcccagtgacccccaagctccatacccgcgccgg

SEQ ID NO: 54849 - DNA, 122 bp, Homo sapiens
ggctagcttaggaagacagaagcccagcgtgttcgaaaatgctagcaaagtgctggacatcgtcagcaccgtcccaccatggaacaaagctgtgtcagccctgatgcgcccagggcattgcg

SEQ ID NO: 54850 - DNA, 122 bp, Homo sapiens
ccggcgaagaaggtgagcgcagtgctgtgtggcagcagagctccttaggacgaggagcagcgggacgaggaagggcagactggtgaaatcgcaaactgggcgtctgttccggcgccggaccc

SEQ ID NO: 54851 - DNA, 122 bp, Homo sapiens
ctctttgctctagttaaaggatctctctcatataacagaccacagagaatgaaaatcttacgaagtttcaaaatatttgtaattgaaagacattttcaattgtaaaatgtctcttgagcatc

SEQ ID NO: 54852 - DNA, 122 bp, Homo sapiens
cacaacacacctgcactagcccaggcactcacacatacatgaacacagcagacccaaacacgttcacacgcacaacacacccacacacacagaggcactccacacacacatgcacacacaca

SEQ ID NO: 54853 - DNA, 122 bp, Homo sapiens
ctttgtcctggcctcatttttggcctcttctggccagtgatcagaccctctggcccactacggccagagctggctgggcctgagggaggcttgccctgaggactcctgagtccccctcccac

SEQ ID NO: 54854 - DNA, 122 bp, Homo sapiens
gttgctgaggtaagtctgttcctcagggttcttctctcaggaactgagaactcaagatttcgaggaagccgcacaggaagttgggggtgggttctgaacggtgacctcacaggaggaacttc

SEQ ID NO: 54855 - DNA, 122 bp, Homo sapiens
ccctttctttcccactccaagctcacatgctggatcccgcaccacagacagccccgaggccgcgctcacaagaccagatggccagctcgccatttctacctttcggtgtccaggagtttttc

SEQ ID NO: 54856 - DNA, 122 bp, Homo sapiens
aagatgagccctgtttatttctggatttaacttattgtcaagacccctaaaaatctatctcgaaagcttgtttctcttttctatctctgctaagcagaaattgaaatacaaaatatgatttc

SEQ ID NO: 54857 - DNA, 122 bp, Homo sapiens
gtcctgggagcgaggaggctgtggtgagagacggaccgagaccggagatgttttcaagcccggctccggcggctttacaggcggctgcagcggcgacgaagacaacgacagcgacggctacg

SEQ ID NO: 54858 - DNA, 122 bp, Homo sapiens
tcagccatttggcctcctgtcctttgtggacatgctggaggcatcaccagaaaggtccagcgttcctagaaatccagtaagaaagttcctgtcttacaaattctgtcttcccattggttcat

SEQ ID NO: 54859 - DNA, 122 bp, Homo sapiens
atgtagtgcataacacacacagcgtcacaaacggccaggctgcggtgagcagtggctctgcgggcaggcggagcagcagcacagccaagaagggcgacagacggctcaccggcaacgtggtg

SEQ ID NO: 54860 - DNA, 122 bp, Homo sapiens
gacactgagcctgctacctggggactgctcagtaaagtggagcaatcattttgattatgacgataagcaggagagcaaagggggccatagcttggtgatgtaagttgaatttactgggtcct

SEQ ID NO: 54861 - DNA, 122 bp, Homo sapiens
gtggagaggtggagggtgctgctgctgggaatcaaccccctcagactttccactgcgaagcgaaaccgtaagccctggggtgcggggggcgggccgggaggaggggaagtggggaaggtgga

SEQ ID NO: 54862 - DNA, 122 bp, Homo sapiens
tgagtcattgggaagctgggatagaagctgactgggtgggagaggtagccaaggtcacggcgcatggagccccagtgcctgcctcctcagcccccagcacacctcagccgcatctctccacc

SEQ ID NO: 54863 - DNA, 122 bp, Homo sapiens
aaggctggcggggatggaagcccctctcgtgcgccgctgcgacccccagccccgggtctgcgcaagcgcagggctcgcccagcccagccctcggcctctgcaggagaccctcggacccctcc

SEQ ID NO: 54864 - DNA, 122 bp, Homo sapiens
ttcctccccacctgaatcacatgcaggctctgcccttccccagggagccgtcacaccgagcgcagggcagtcagccctcactcagccgtgtggacgtggacagggtctgtccgtcccgctag

SEQ ID NO: 54865 - DNA, 122 bp, Homo sapiens
cagaaacactgagcagtaaatgacaaaattagctttgctctcagtggtttctgacaaccccgtggcaggactggggtggaaggaggaaggagataaagcctaaaaccttaatacagcttgga

SEQ ID NO: 54866 - DNA, 122 bp, Homo sapiens
ggggaagggagcctcagaggcatggggcgtgtggcagccccacagaaagtaaagcatctgcgtcagcagcatgcactcagcctctggtggtagaagtaacccttgaggcaggtgctcttctc

SEQ ID NO: 54867 - DNA, 122 bp, Homo sapiens
aactgtgattctcaacatttgactcttctggctgatatggcatatttgtttagcttctctcgaacagagctaccaacagatcagtcactcatggtgactcggggagcatcagttgtccacca

SEQ ID NO: 54868 - DNA, 122 bp, Homo sapiens
agcatttgatgtattttgctcacatctttgcccacaggagtgagccacagggaagggagacggaagcctcctcagaatgttgatgcaccaggcaacgccagctcctggtccccacatcactg

SEQ ID NO: 54869 - DNA, 122 bp, Homo sapiens
cttggctcctcacaagtggttatgtttaagcagcactcctagcaatgggaactgtattcccggaagttctcttttatcaaatgacacacaaagtccaaatcctttcaaggattaaaggatca

SEQ ID NO: 54870 - DNA, 122 bp, Homo sapiens
gagggggtgggcgctgcacgcaacgcctgcatcaactggaaccagtactacaacgtgtgccgctcgggtgactccaacccccacaacggtgccatcaacttcgacaacatcggctacgcctg

SEQ ID NO: 54871 - DNA, 122 bp, Homo sapiens
atagggagttgggggctggtgtctcactaggttgcccagtttggaatttctggattcaagcgatcctcctgcctcagcctcccaaaacctgggaatgcaggcatgaggcttagcgcccggcc

SEQ ID NO: 54872 - DNA, 122 bp, Homo sapiens
tacacaggaggctgaggcaggagaatcgcttaaacccaggaggtggaggttgcggtgagccgagattgcgccattgcactccaacctagatgacaagagcgaaactccatctcaaaaacaaa

SEQ ID NO: 54873 - DNA, 122 bp, Homo sapiens
ggtcgggatgctagtacgtaccgaagaggctgtggtcctgccgggtgccctgcacgctgccgtcgggcaggatctgcaggtggaagccggtgcggcaatagagctgccggcggcgcaggatg

SEQ ID NO: 54874 - DNA, 122 bp, Homo sapiens
ctgcacagaggccaccatgatgagccacttacatgaccttgacccctagtgagaaggacccgtgtgggcaaagacagatctgaagctgcactttactcaacagctggggagggccgtttcca

SEQ ID NO: 54875 - DNA, 122 bp, Homo sapiens
ctagtttggccaagaagtttaggggctgaattcttaaccctcctaatgctgaggactctacggatgagacccaatgcttccgggaagacaccaagggatgagagtatgttaccaacataagg

SEQ ID NO: 54876 - DNA, 122 bp, Homo sapiens
gcgtcccgcgtggcggctgaggcacctgctcctgggccagtggggccctttgaaggcccacgttgcacggggtgtgtgctgagccgggcgtcgagttgagagctgggggttcctgcggtagc

SEQ ID NO: 54877 - DNA, 122 bp, Homo sapiens
ctttcccaagggccagcttcttcctggtagtgcttttgtgtacttgtctggttgggacttcgtgtttctttcttgggattgttgtctgggactgcaagcagggtatgtttttatctactgtg

SEQ ID NO: 54878 - DNA, 122 bp, Homo sapiens
gtgtgcttatcttgagtttattggggtttccaggtaggggtcccctcctcgcctgccttacgccccagccctagagcccttgggtccccgcgggctggggcggggttgcctgtgcccggcag

SEQ ID NO: 54879 - DNA, 122 bp, Homo sapiens
tgttttggaactaaacagcgtgaaaaccgctagaaggacaggcggttccctgacaaacagcgtagcgtgttccatccgtgctggctttgcaggagggcatagagattgctcgggatacgcca

SEQ ID NO: 54880 - DNA, 122 bp, Homo sapiens
catgataattcactgactttaaatgataaagatggaaagaaccagaggagctcattcaggcgggtatagtccaagcctatctggggaaccagaatagtatagtggttgggagcatggcatct

SEQ ID NO: 54881 - DNA, 122 bp, Homo sapiens
cgggcggaggggaggggccagacaggggtagtcggagtccccgctgggccagagcggtctcgcgctgcagcccccggcgcgccccctgcaggtgggcggtcctcacggtggctcgggctgct

SEQ ID NO: 54882 - DNA, 122 bp, Homo sapiens
gtgcgacttacaaatttgagcatgttccagtcgaacacgtagtcataggagaagccctggcgatggaacagattccggaaaagctgccgcaggtacgagtagtcaggcttgtcgtcaaaacg

SEQ ID NO: 54883 - DNA, 122 bp, Homo sapiens
actattcacacgtatgttacagaggaagaggaggcgtccggaagaagctccttggcgtttcgtggagtcacagagcacgacggcattgacaagcatcagaacatcaagcagccttagatttc

SEQ ID NO: 54884 - DNA, 122 bp, Homo sapiens
acctcaggtgatccacctgcctcagcctcccaaagtgctgggattacaggcgtgagccgccgtgtcaggcccacagctggtttttaactgaagaaaactccacttccacaggcctaaaactc

SEQ ID NO: 54885 - DNA, 122 bp, Homo sapiens
tgcaattaacatgtgccaaatcacatacaaatattgtgtacactggcatcttctaggtcacgatgattcttaccccctgcatttgtctctatacatttattctattttttttccttaaagag

SEQ ID NO: 54886 - DNA, 122 bp, Homo sapiens
ctagtcgccacattttatttcttggttcttgatgttattatttcaagggtatcagataaccggtgattagtactatcttttggaaaacccagctcagtggttttccaactgaaactccctct

SEQ ID NO: 54887 - DNA, 122 bp, Homo sapiens
gcacagctgcaggccccagtcgccctctgcctcccacagggagcctacagtccattcctgcggctggcaccttccaggcctgtgtccacctgctctgcccagcccacaccttgcccacacct

SEQ ID NO: 54888 - DNA, 122 bp, Homo sapiens
ggtgcgtggctgcggggttgcacctgtgaagcgaagacaacctgctaggaccctgataggcgtacacctctcactcccactcacgcgccgacgacatgggcttgtctccgttactcatccaa

SEQ ID NO: 54889 - DNA, 122 bp, Homo sapiens
gaaggcctccacagcagcccggactgacagagcctgcggtctctggataagccactgggacgggcttgccatccttcacattggcctgttccacggtgacttttacagaatactatcgctgc

SEQ ID NO: 54890 - DNA, 122 bp, Homo sapiens
gagggggccaggagctcccgcagtgggggcgcacggggctggggctctgaaggtgggggccgggggtcagcgggtagggtgggctcacggcgccttcctgcagatcttccacatgacctatg

SEQ ID NO: 54891 - DNA, 122 bp, Homo sapiens
ctccttctggactgagggggattctggctgagctgaggagctcgcggagccgctgggccccggggctcattgttacgcagttcgaatgaatgggctcccaggcgcctgcgcgctggggctga

SEQ ID NO: 54892 - DNA, 122 bp, Homo sapiens
tcggccgccatcgctgtgaggcggctgcccgcgacagctcctcctccgcctgccaaatctcgcgatggcagccgcacagttgcggaccagtggcctgctgctaccaaatctcgcgaaactcg

SEQ ID NO: 54893 - DNA, 122 bp, Homo sapiens
agcagctctcagtccctgctgttcaaaaccagggtttacttccttgtcacttcttgggagcggccctcggtccctgctgttcagaaccgggatttaccctcttaccacttcctgggagtggc

SEQ ID NO: 54894 - DNA, 122 bp, Homo sapiens
atatgaggaccaggaatctgcatttccttgcaattcagctacagcacctcttagtctactcgggaacaagggactattgttttgtttttttgttttttttttctctagaataaatttcagga

SEQ ID NO: 54895 - DNA, 122 bp, Homo sapiens
cccgcagaccggaggatgctgctgagggcacatgatactcaatccaaactcacaaaatgacgcctatttctcctgcccacgttgccgcagatccttccaatactcagttcccacggtggaaa

SEQ ID NO: 54896 - DNA, 122 bp, Homo sapiens
gaccccctgtccgtgctccctgctgagacgccagccttcttctggaggccccttgtttcgcgtccctaccctaggctggatgggtaaagaagcattctcttaattcttgtagcaacccctca

SEQ ID NO: 54897 - DNA, 122 bp, Homo sapiens
aggaataaaggggccatgtgtgtataaagtatatacccagaacctagtggatgttcagcacgggatttcttaccttctctttagaagtagggacatcgtaagacttgtcatcctattttatt

SEQ ID NO: 54898 - DNA, 122 bp, Homo sapiens
acattctgtccactatttccctctctacatccttgaggctgtgcagtcacccctcaactacgttcaccctccttcaaagcccttcctggtccacccggggaccatctcccggcctcactgcc

SEQ ID NO: 54899 - DNA, 122 bp, Homo sapiens
tttgtcagttcaaccctgatttaaaaatatggctagcaaaaacaaggaagccacagctgtcgacatcctgagcaagcatcggtctcctttgagaagctgcactcccaagcctcttctcaagc

SEQ ID NO: 54900 - DNA, 122 bp, Homo sapiens
tggcgtgcggcgccgttgcgggcgggagcggctgcaacgccggtgcctgaggagcgatgccgagggaaatcatcaccctacagttgggccagtgcggcaatcagagtgagcgaaactccggc

SEQ ID NO: 54901 - DNA, 122 bp, Homo sapiens
atcgggatgagtccagagatggctccaagttgggagtctggaacctgctgagggagcttccgttcttgccttcccaccgcagagtataaccaagattcttcgagtctgtgaacttagttttg

SEQ ID NO: 54902 - DNA, 122 bp, Homo sapiens
catgtcttgcagcggtgggtggagggctgggcagacataggttcatctggagacaaagcacgcctccatagaatcttctgttctctttgtttttgctatcaattctcaaattttacattata

SEQ ID NO: 54903 - DNA, 122 bp, Homo sapiens
agagagggtgtgatcgtgtgtttgcacttactttctctttctccacaaagtccacaaaagcggtcctttcaatctccaccggctgcccctgcctatcgtagagcgccagcacgaagtggaag

SEQ ID NO: 54904 - DNA, 122 bp, Homo sapiens
agcacctttagcttttgggagtccctgtacctccacagagccacttcggaaactttagggcgccccctcctcaagacgattcgggaacaagaggccaggtccagcccagcgcggaggctgtg

SEQ ID NO: 54905 - DNA, 122 bp, Homo sapiens
cagatgcccgcgtccagggaggaaggagggggccggggcgaggggggcgcctaccaccaccgccagccccaccaccatttccaccatggcggccaccgcgggggctccctgctgcagcacgt

SEQ ID NO: 54906 - DNA, 122 bp, Homo sapiens
atcacgtgacgaggctgcgcagaacacgtgtgtcgtgctgagctgggcgtgggaaggtgtcgcgtgacgaggctgcgcagaacacgcatgtcatgctgagctgggtgtgggaaggcgtcacg

SEQ ID NO: 54907 - DNA, 122 bp, Homo sapiens
aggcagtctagtcaaaaatccgtatgctgtcagtgggaaccctgagctactgagaaagtgcgttcttcttttctagcaggggacatcacacaaggggacaacatctaccctctcttggcctg

SEQ ID NO: 54908 - DNA, 122 bp, Homo sapiens
ggatgggatcccacgctgctgctgcttccccaaggttcggtttccccaccagggcctcaacggtatcttagggcgtccaacagtgcctcgcagaggagacactccataaagttgtatgaatt

SEQ ID NO: 54909 - DNA, 122 bp, Homo sapiens
cagtacacacatacacatacatacacagccatgcacacagggacaattcacatatatatacgtatatacacatgcaagcatacatatatctatacatatgtacattacacatgtatacacac

SEQ ID NO: 54910 - DNA, 122 bp, Homo sapiens
gggcggaggacagccctgacctccgagaggggcgcggggagaaagggagcgccgtgggggcggggacccttcccggcccgcgccctgagccctcagcctcgcacaatgagtttagcctggct

SEQ ID NO: 54911 - DNA, 122 bp, Homo sapiens
atgtgttcggtgactcagccaaagcttaaaacacggaagccgggtagcgctgggcggctgcgtgtcagagaatgagtgtttcccgatggaacggcgggatagaaatggccgcagactctccc

SEQ ID NO: 54912 - DNA, 122 bp, Homo sapiens
atgcaaattttcgagcggccgacgcgcggtcttctgggtaaaaccgagccgccgcttttgcgacccttcgggagcctcagaaaacaaagaattggggtgtcgtcgaaagctgtggaggctgg

SEQ ID NO: 54913 - DNA, 122 bp, Homo sapiens
cggaaaggtcagaggaagcccggaacttttacacagcagttagcaggacaatgagggggccggcggcccgcacaggccagcaggtgcccgatcgagacagaggcctcgggaaaggagcctgg

SEQ ID NO: 54914 - DNA, 122 bp, Homo sapiens
ctgaatgaacccaggaacacggtgtgtcatcgggagagggcagcacactccccctggccacgtccagaagctggtttccctttgagtcggctgaagagcttcccgaggcctcactccaccct

SEQ ID NO: 54915 - DNA, 122 bp, Homo sapiens
ccaggaatgcgagattttggacatcatcatgaaaatgtgctgtgagtatctctgagaagccgtcctcgttagggagagcagggccgccagcctggcctgttccactcctagaagggtgtctc

SEQ ID NO: 54916 - DNA, 122 bp, Homo sapiens
atcgtcggcatcaccactggcttctggatctggtcgggcaagaccctgcagtcgtggcgccgcttctaccacagacttagccacagcagcaagggggagactgcggtatgagccccggcccc

SEQ ID NO: 54917 - DNA, 122 bp, Homo sapiens
tggagtctctcaggattggtgacagatgggggctggtgggtcagcaccccagctctctctcgcattgggaggatgccttgggggcgagctctccaccactcccagagctctctggggggact

SEQ ID NO: 54918 - DNA, 122 bp, Homo sapiens
ccttgggacttccttggggggcacatctggtgagtggccaaagcccaacactgaaaacaccgtctcttccacctcccctccccagatgtgagcctgggttccaatcctggctctaccattaa

SEQ ID NO: 54919 - DNA, 122 bp, Homo sapiens
cttgtgatcaaaagcaggacttacggggcagtgtggtgatgtggggactcggaggcaggccggcccagctgccaggtgcacctgctcggagcatcgggccggatccacaggggctccttggc

SEQ ID NO: 54920 - DNA, 122 bp, Homo sapiens
ggtggggggcgtggagggtgctgtgagaaccgaggcgggggtcccggcctagaagtgggacgggggggtggctggcagcggggtggggggaccgaggggaaggggtggaggggggtctggtc

SEQ ID NO: 54921 - DNA, 122 bp, Homo sapiens
taaggtcagccacccacccagacccaggaccaagccctgaatgtctagagcacggttcttcgcagacacaccccagccctgggtatcagcgtggtgactcagcagagggcattccacaggct

SEQ ID NO: 54922 - DNA, 122 bp, Homo sapiens
caggtgcccaggctccaggagggccatctcttcctcaccgacatggaagggccatggcctcgtgcgctttcactctctttccatttccccgcagcctgagtcaccctcaaggaggtaactcc

SEQ ID NO: 54923 - DNA, 122 bp, Homo sapiens
tgaggccaggaggcccagcgtgtgaggcccgggcgtgtgctctctgaagctcagttgcgccgtggagctggggcagctgcagtcccctcactggggtcccctcacagccctgctggagatga

SEQ ID NO: 54924 - DNA, 122 bp, Homo sapiens
acagttacgctgactaagattttcaggcagtggaccaagtagtttacatacattatataacgaagtcctcattacagccatcttatagaaaactgatgttaggatcatgaggtcaagagata

SEQ ID NO: 54925 - DNA, 122 bp, Homo sapiens
ccccaccactcaccaccagcccttgcaaagcctgccctgtctggacactgatataccctgcgggcccaaaacagccaccccagggcatgagagggacagataaccagaagttctgacttggt

SEQ ID NO: 54926 - DNA, 122 bp, Homo sapiens
tgtgccgcggccgcttgcctgggctcggggaagcctccgcgcgcccggtgcgcgcgaccgcggggacagtgttgtcgtctccgcgcgcctccgcccaaccctctgggactctccgagggcgc

SEQ ID NO: 54927 - DNA, 122 bp, Homo sapiens
gaagggagcggggagtgggagtccgccagctccccctgaaatgctggctcactgaggagacgggcttctcacctcccactcttctgtcgaggacagggggaaagacagtcaataaataaacc

SEQ ID NO: 54928 - DNA, 122 bp, Homo sapiens
tctctggtgggcatcgccaaggtcacacgcaggggtccagggacctcatcccaagctgagcggcttcccgagaccgcgtagcctccccaggggattccacgtcttagggcctcggctcccgg

SEQ ID NO: 54929 - DNA, 122 bp, Homo sapiens
gttgggcttggaggcggggccggggctgggcgtggcacggaggcgaggcgcggggagggccggaccttccagttgttaatccctgtgttcctcactccgccacactcacctccactgatcta

SEQ ID NO: 54930 - DNA, 122 bp, Homo sapiens
gtgccacgggcgccactgcagagcgggccgcctggccagcctcgcggggcactccttttacgtttgctttgctgagatccttggtccttggtcctagcccccttgaatagcgacgcttcttt

SEQ ID NO: 54931 - DNA, 122 bp, Homo sapiens
gcctgacggcgtggcctggagggacgcgctgagcccctaatgggtggtgccttcctggtgcggccgcacaggcggggccgggcggaatccaagcacgatgtggacacggagccttgggaatg

SEQ ID NO: 54932 - DNA, 122 bp, Homo sapiens
gttcttaggggcataggacatgaggttcgtctctttgttttgggaaactgaatctcctaacgcgatggactcgctctttatctccagcattgcccgctgccttggtgtctgctttgtttatt

SEQ ID NO: 54933 - DNA, 122 bp, Homo sapiens
gagagaagggccttaccgaagtccccataggcaggaagcagcagggcctggattcaaacccgggcctggattcaaacccaagcctgtctcactccagagcaagcctacactttttccctggc

SEQ ID NO: 54934 - DNA, 122 bp, Homo sapiens
agtgccagggtatgcagctacttactctcatatgagtccagctactgctgctaggtgacccgtcggaaatgtgctcattaattcggtcattaattcaatgccttctctacaaaaaatgcatt

SEQ ID NO: 54935 - DNA, 122 bp, Homo sapiens
ggcggacagggccaggagcttggtgccacctggtgacagacacacatggggcctggtcagcggctgggaggggcaagcagcatgacactcggtggtgtttccctggactccaggaaagaagt

SEQ ID NO: 54936 - DNA, 122 bp, Homo sapiens
ccacacctctcccctgcccagtatctcccccattctaccccagcccatggccttgcgccacgctgcttcatccatcctgatgcccagtatgtaaaaggcgcctaacccgccatcatgtccct

SEQ ID NO: 54937 - DNA, 122 bp, Homo sapiens
accaaacagctctatgaggttctggatgagaagccgcatgcaccaccccctccctgctcccgtgtgggacccagtgaagacctcctgtgcccggctgcagctgctgagtgtgggagtgtgct

SEQ ID NO: 54938 - DNA, 122 bp, Homo sapiens
gcttttgccagagcctccttttctctggtgggaggcggcgctgcgctctggcgtggactccgcgacacgtatctgctctctgcacgaggccggagccggacccgggctgcttttagcagccg

SEQ ID NO: 54939 - DNA, 122 bp, Homo sapiens
cgctcattcagtaaatggacgcctgctgtgtgcaaggccctgtgctagttggggccacggcggtgaaaaggaaaacctacaaaattttgagtgcctaccctgtgccaagctttacgccaggg

SEQ ID NO: 54940 - DNA, 122 bp, Homo sapiens
gaagtagcccatgctctagggtccatccaggaaacacacagcgcacagtcaaaccgcagacggcctgtacccacagtcaaaccacagacggcctgtatgcacaaccaaaccgcagacggcct

SEQ ID NO: 54941 - DNA, 122 bp, Homo sapiens
ggccgcgtagatctctcctgagtgaggaggccgtgtagatctctcctgagtgagggaggccgtgtggacctctcctggggtaaggaaggccgcgtggacctctcctggggtaaggaaggccg

SEQ ID NO: 54942 - DNA, 122 bp, Homo sapiens
tgaatacccaatacccaatccacagctttctctttgtggtgcttatgtggtgtcacaatgcgtcttgtgcctctcatctgattccgctacacggtgcaagttacgccagaccagaaactgaa

SEQ ID NO: 54943 - DNA, 122 bp, Homo sapiens
atttcaattttctagtattgcatttttactgtattttacgacactatgtctgcaaggaatcgagataacaccatgaagataaaaggtgtaattaacactagcaacttcctgcataagagaag

SEQ ID NO: 54944 - DNA, 122 bp, Homo sapiens
tggccttgctcgctgattggtccactctggatgtgcccaagcctttttcccagggtgtggcgcccccccgcccccaacagggttctgacccctggctcctcccttccccccaagcccccctc

SEQ ID NO: 54945 - DNA, 122 bp, Homo sapiens
gtgtgacttcgggctgtgggctcgctcgcggctcttcggccatggtgagtctgggacccgcgtctgcctagctgccccgccctacccctaccgggctgggtccgcacgccgccgcccgctag

SEQ ID NO: 54946 - DNA, 122 bp, Homo sapiens
atatcccgtgaaaacagccagaaagaggggtttgcttttgtcaagccagcgacttgacatcgcggagtctttgtggcttccatctctgggcatgccccgctggctacctccgcctcctcctc

SEQ ID NO: 54947 - DNA, 122 bp, Homo sapiens
cccctctgctgctgaggcggctctcggtggaagagtccggtctgggcctcggcctgggcccgggccgctccccgcacctgaggcgcctgtcgcgcgccggcccgcgtctgctgagccctgac

SEQ ID NO: 54948 - DNA, 122 bp, Homo sapiens
gcccgcacagccggcttggttgccagggttgccagggcttggggcctgggaggcgccgcgcgcacggcgccggcttcgcgggaggagccccaggcccgcgagcgcaggcgccccgcctctcc

SEQ ID NO: 54949 - DNA, 122 bp, Homo sapiens
gctgccggagagggactgcgggaggtggcccgggcagccggggctagcgagcggcgcccgcgcgctggaggaaaccgtgcacttgttccaatccgggggtttatacatcagggcaaagcctc

SEQ ID NO: 54950 - DNA, 122 bp, Homo sapiens
acagggtcttggccactgcccttcgcgggccgggcttcctccttctgtaaccttctgtgccggggaggatatttgcatttaagcagaaagtgtttcaggctctgcagaggtgacactggcgt

SEQ ID NO: 54951 - DNA, 122 bp, Homo sapiens
cgggcaagacaccctcagagcacagggtgctgccaagagcccggccgagtgcagctggagcgccgacgtcgccaaggatacacagtgctgacgcagtacacaagtgcgtcacagtggtcctc

SEQ ID NO: 54952 - DNA, 122 bp, Homo sapiens
cggcagcttcacgacctcaccaagtgcccgccgctctcacgagagaggtggttatggttgcgcattgaatatgcttgggagaggcaaagatggatggcgtagtctctaccctcacacccagt

SEQ ID NO: 54953 - DNA, 122 bp, Homo sapiens
cgcgtgaggggacttagcgggtgggtgtgaaaccgcccacccggggacaccaggctgggccgcaggtctgaggggcactcgcaggcagctatgagacccggggccctgcagttgggttgaag

SEQ ID NO: 54954 - DNA, 122 bp, Homo sapiens
cagcgcctcggggcccttgcgcgcccactgttccggcgagcgcagctctcccacgggccacgtcctcccaaccctgcttgccctgctccgcacctttggggagccgggccgtctccaggccc

SEQ ID NO: 54955 - DNA, 122 bp, Homo sapiens
gtgtggttttgttatgaggacaagaaacaggctactctacctgagaaagaaaatgtcacccgcatgttggaaattcaccctgacccaggcagtgataatagcgtgccaccgctcgctcacac

SEQ ID NO: 54956 - DNA, 122 bp, Homo sapiens
cggcagccgcggggcctgtggggaaacatggtccccgcaagggaccctgggagctggaggcgtcctggcccggcgtccggagcccacggcccaggactaggatgccgggggtctcgggcgtc

SEQ ID NO: 54957 - DNA, 122 bp, Homo sapiens
cttcaggagggcagggagggctttgttcactggaatctgcagccctggacccctggtaggcgcccagtgagcctgtacagctcggccctgcactggacaccgtcccctcgcaggcctgggct

SEQ ID NO: 54958 - DNA, 122 bp, Homo sapiens
ccctgccccagccccgccggacgacgcgggcccgggagcaggaacgcgggacgctgctgacggcccgggtccccagactcacgtttgtactcggccatcagcctcttgagcgcggtccccgc

SEQ ID NO: 54959 - DNA, 122 bp, Homo sapiens
agatcctggttcagccacgtatcagcagcacaaccgggaaagccagtcggccccacggtgcgtcctccaggggccgcatgaggagagacgatacacgccagcactcagggcccagcacgggc

SEQ ID NO: 54960 - DNA, 122 bp, Homo sapiens
cgagggcgccgaggcgcggcccgggccgtcgccggagaacggctggccagcgtcgtggggcgcgctcctcgggtgagagcatggaagagcgtctttgcccctcactcctcggtttctcctcc

SEQ ID NO: 54961 - DNA, 122 bp, Homo sapiens
gacttgcaccagcccacagcggtagtgtgggtttctttacagtttaactggtacacccgccgagccatgctggctgccatctacaacacaacagagctggtgatgatgcaggactcctctcc

SEQ ID NO: 54962 - DNA, 122 bp, Homo sapiens
gcacgaaggcgaagggcacgaggccgtgccggttcttgagctcgatctcgcggatgcggccgtacttgtagaacaggtcctccaagtccttctcgcgcacgtcggtcggaaggttccccacg

SEQ ID NO: 54963 - DNA, 122 bp, Homo sapiens
actcaccctggccgggcacgaggccggggaccccagttggcctccgggttagcctggaagcgcttgagtcctcgctgtcgggagctggggttggcatcttcccggatggtgaagttggcctg

SEQ ID NO: 54964 - DNA, 122 bp, Homo sapiens
aaaaacaagttgtggtggaacacttaggttctgtatgcatgttgttttaccacttccacccgcaaatgtgcagtttagcctctctaagcagccaccagggcttacacaccccactttcttct

SEQ ID NO: 54965 - DNA, 122 bp, Homo sapiens
gtgtacgttaaagaaaaataaagactcaggtagccagtcacattagccatgtttcaagtgcgcggaaggcacgtgtggctgctgacaaccaactcagtgcaggtggaaaacactccgtcacc

SEQ ID NO: 54966 - DNA, 122 bp, Homo sapiens
ccccagaccctgcttacatgccgggacgaaggtgggagagaaccgtgcatctcagcacggcggtggaaacgtggtccacctgcggagggcctgtttgcgtttattacacccgagcaaggccc

SEQ ID NO: 54967 - DNA, 122 bp, Homo sapiens
atatccatagggcaaactccgtacagagagcttgttggaatgaagggtaccagcattttccgtttgatggatagtaccaaattgccctccaggaatgttatacgctcaccagaactgattat

SEQ ID NO: 54968 - DNA, 122 bp, Homo sapiens
gctttctgggctagcacagctctaataacaggcttacgctttctgctccctgtgaaaggccgcgaagaggccgggctctgcctttctgcaggctcccctacggggagcctgccctgtggcct

SEQ ID NO: 54969 - DNA, 122 bp, Homo sapiens
ggaaaatctaagctacattctatgaaaaagagctaattttgaccaaatatcgagcagctacgtcatgagtggagttagcatcgctgatgggtctctacactagggatagttattttggatct

SEQ ID NO: 54970 - DNA, 122 bp, Homo sapiens
agagcaggtcctggaacaccttctgcagctccaggttgaggaggagccgctcccgccgggcggccaccatctgccgcaagaagtcccagagccgtgccacgttgtgctgccgagcggcgatg

SEQ ID NO: 54971 - DNA, 122 bp, Homo sapiens
tcctgctttgtcggctgggcctgggctccgtggaacgggcgccctctggtggcccctgggcggcagatcctcccaggagccctggaccctctgtggcctagtaggcaccattctcagtcccc

SEQ ID NO: 54972 - DNA, 122 bp, Homo sapiens
agggaaggaccgggagcagagcctcagctcgtgctgctgctccatacacagaacgcgctgcgcaggggatcctaggcttcctgggagtcacattaaaaagcaacgtgagacgggcggggtta

SEQ ID NO: 54973 - DNA, 122 bp, Homo sapiens
ccttgatagcagactctatgaatctttaatttaaaatccttcattctttattcaatggaccggtgtggagcccacgccaggttctagcattacaatttttgcctagtaaaaactcctaatct

SEQ ID NO: 54974 - DNA, 122 bp, Homo sapiens
gcccagcccacgcaacaggtaagcggtgccctccctgcaagcgtgtgtggttcctggtcccgggcccaggccggctggtgcgtaagagccttgacttggactcgcgtgagcggctgctcaga

SEQ ID NO: 54975 - DNA, 122 bp, Homo sapiens
gtgtttatccggctgctgggcgacctttcccgggaaggaggctgtgccttcattcggtcacgccccggtctggggaggctcctccctggtgcgcagaaaccgcaggggcggggaggagccgg

SEQ ID NO: 54976 - DNA, 122 bp, Homo sapiens
tgatcccggactccttgtttgccaggggtcagtctggaggtcataactgaaccccagctgcgacttctctgctggaagctcggagcatgccccagcggcaagcctaacggcccagtttactg

SEQ ID NO: 54977 - DNA, 122 bp, Homo sapiens
ttgcagagtgaaattttaatcacaaagaccacagccctacctactgttcaaatactcaaccgcccaccagaacttttccattccaaacgaccaggaggtttaactcttctaaatagtcactg

SEQ ID NO: 54978 - DNA, 122 bp, Homo sapiens
cgccccagcagcctgcccgcccgcccgctggccgggctgtcaccgtctcatctgcataggcgcccgcccattgggccgcccacccgcgccttatctgcatggccacgcccccggcgaccgag

SEQ ID NO: 54979 - DNA, 122 bp, Homo sapiens
tccaagcctgaaagccgagaacaaaggcaatgaccccaatgtctcactagtgccaaaagacggaacaggatgggcaagcaaacaggagcagtccgaccccaagaggtagacagaggcttggg

SEQ ID NO: 54980 - DNA, 122 bp, Homo sapiens
ggctccaaccggagctccccaggcgctgggcggtggggggatccccggggcgaaaggcgtcgccgcggggctgcagcgagcggcgggtgcagagaaccgtggtgcgcgctcccgcctcgcgc

SEQ ID NO: 54981 - DNA, 122 bp, Homo sapiens
cctcaggaccttcatccataaaatggggcctttaagacccctggccatggatgtgtgtggcgtctcacacctttaatcccagaatttagggaggctgaggaaggtggatcccttgagcccag

SEQ ID NO: 54982 - DNA, 122 bp, Homo sapiens
ggagcgggcgctgcgggagcagcgtgtggggaacggctcgggagtcgctgctggtaaccccggcccagccgcccgcagctgggctcgcagccggctcgcagccgacacccagggtgctgcgc

SEQ ID NO: 54983 - DNA, 122 bp, Homo sapiens
tgacctcgtgatccacccgcctcagcctcccaaagtgctgggattacaggcgtgagccaccgcgtccagccttgttattgtttttgagactgagtcttgctctgtggcccaggctggagcgc

SEQ ID NO: 54984 - DNA, 122 bp, Homo sapiens
caccccttgatcatactgaagaacagctgctgttggtgttctcgtgaatgtctttagctccgcttcctctgggaaggaaataagacagttatctcttcatgaagcattttttttttttggtg

SEQ ID NO: 54985 - DNA, 122 bp, Homo sapiens
caatgcagcaaattacagacctagttctgtacccttatgaagaacccctctccctaagggcgccctccactcccaagcgggggcggggatcggcaaaggatccagatcattcggcctgcgga

SEQ ID NO: 54986 - DNA, 122 bp, Homo sapiens
gaggagcgggcaacggactgggaggaggggtgcccagggctccccggccaaggctggacgcgcagctcagcctgatttctaagcagacctaaggctgctgcagggccggccggtcccggtct

SEQ ID NO: 54987 - DNA, 122 bp, Homo sapiens
gcagccgaatcttgaatttcactgaagttcgttttactccacctcccaggacggtttcaccgcccttatctgaccaccccctggttctgccgcagcccgggccggaacaaaactgcaacccc

SEQ ID NO: 54988 - DNA, 122 bp, Homo sapiens
gggtggagcccggcccggaaacttccctcagaaataaacagaaacgcaaagacaacttcccgagggcccgggccgtcgtgtgccgttacctcagccccaggtggttcccaggctcggccagg

SEQ ID NO: 54989 - DNA, 122 bp, Homo sapiens
ggtaaagccggtgaacgcgaggctccgcatcctgccccggccgcggcgctgcgccctgctcgctctgcccggtgcagctgtaagcggggaccttagagctaggaaccctcggggatcgcggc

SEQ ID NO: 54990 - DNA, 122 bp, Homo sapiens
ggtccggggccgggcgagtggcactgcaccctggtgatccgggcctgcccgtctggctggcggctgcccacccgccctccatcccgcgtatctcgccgtatctcgccgggtgccacgcactc

SEQ ID NO: 54991 - DNA, 122 bp, Homo sapiens
gctcagctcccgccgctccgctgctgcgccgggcggccgggggcggggggcggagcagggcgcatgtctccgccggggcctccgcaccgcccctcggcccgccccgcccccgcccgctcaga

SEQ ID NO: 54992 - DNA, 122 bp, Homo sapiens
catccaagagactaagtcaggataaaatcatcaaatgttggttttctcttaccccacccacgccctctagtggcctgttttgcctctaaagctgctttgcctgtcccttcctcctctgcttc

SEQ ID NO: 54993 - DNA, 122 bp, Homo sapiens
ggcgcagatataagcggcggcccatctgaagagggctcggcaggcgcccggggtcctcagcgctgcagactcctgacctgccgactgcggatcccgagtccccggatcccggacccatcctg

SEQ ID NO: 54994 - DNA, 122 bp, Homo sapiens
cagcgttgggaaaggaggtggttcttttcctcctcactacagggtgttcgtgcttgtgtgcgtgtgtgcgcgcgtgattgggatgactcctttcgttctcacctccgcatagggaggctgac

SEQ ID NO: 54995 - DNA, 122 bp, Homo sapiens
gctttcggaaaaaaaaaaaaaaaagacagacagactgttgggcctccatttccacgtttccgattcaacagaactgggtgaagcccagtaatttacattgctaacaagcttcaaggagatga

SEQ ID NO: 54996 - DNA, 122 bp, Homo sapiens
tcagtagccaggaaagacggagaaattgatagagccttcgaggagtcccttcgaagcccacgtaagactttgttttagaaacatggagagaagtagtggcaatgcctgcgagagccacgccg

SEQ ID NO: 54997 - DNA, 122 bp, Homo sapiens
ttggtaacaacacagaagctgacacacacagagtacatcctctcagtttgagaatgttagcgattaaaatataaaaatcggcactaaattcagatcaacctcaaaactaagtagagctcaat

SEQ ID NO: 54998 - DNA, 122 bp, Homo sapiens
ttggtgtggtgctgtctatggtctgtgacctgcatctggagttacccccaggaccagcttcggaagaggagggatcgcttggaggccgtgcagtgtgaggaacggcaggcagggtgtgggac

SEQ ID NO: 54999 - DNA, 122 bp, Homo sapiens
gctggcagcgaagtaagcaccgaccgaggtggcagtgacaatctaaatccgcagctccagcgccggccggaccctaggaggcagcctcaggacggcgcaagtccccgcctccgctcgcccgg

SEQ ID NO: 55000 - DNA, 122 bp, Homo sapiens
caaactcctgacctgaagtgatccacccacctcagcctcccaaagttctgggattacaggcgtgagccaccgcacccagcctggttcctgctgatttaaagatccaggcaggagcagtgaca

SEQ ID NO: 55001 - DNA, 122 bp, Homo sapiens
ggccgggctctgccggtggcaacctggacgcgctgcgggcgccggcgagacctgcgccaacgcctacctccgggccacaggcgggataaagctgccccactttgcccccagcgaagagaacc

SEQ ID NO: 55002 - DNA, 122 bp, Homo sapiens
atttatattggtctatattggaaaaaacatagagatatggccaggacctgaaatctggtgcgcactgaagttgatcagggcagtgtgtgcttaatctgaacatcgacaccatcaggaagcag

SEQ ID NO: 55003 - DNA, 122 bp, Homo sapiens
acgcagggcgccgcagatgcagccggagcccgcttttccctctcaggacgacccctaggccgccagcagttccctaccgacgaaggcgactgtacagcgtccaccgcgttcgtgcccactta

SEQ ID NO: 55004 - DNA, 122 bp, Homo sapiens
cccccgccccccagcccgggccctctccctctctccctttcttcctgcctcgccttcctgcggcgaaggaggctcatctattataaatgcacattcggggctgacatcagcgacgagcggcg

SEQ ID NO: 55005 - DNA, 122 bp, Homo sapiens
tactacctaccacaaggtggttgtgagaaaatagaagatacagaaaagcagctaggtcatcgttgggttccataatcatataattgttacttatgcaaaatgcaaggagggtgtttgaagat

SEQ ID NO: 55006 - DNA, 122 bp, Homo sapiens
aatatctcgcacgtagaatgtctttacccctcctaatgcgcgcatccgctgtataaagtgcgactgcttggagagcactctagcctcgtctaaagcagctctgggatttcgacagagctggg

SEQ ID NO: 55007 - DNA, 122 bp, Homo sapiens
ctctgtcatcagcttttccttttctcccatattttcaacttggttagagggcaggagtcccgctcggtttgccagcaacctcacattgataagaataagtgcacttctagctctccgatcct

SEQ ID NO: 55008 - DNA, 122 bp, Homo sapiens
cctgctcccagggctgaggggtctgcctgctcccctacaagggactgcctggactcccaccggcaggcgcagccctcaaagctcgaggctttcattggaagggctcctgggcagggaaaacg

SEQ ID NO: 55009 - DNA, 122 bp, Homo sapiens
cccacggtcccctagctctgaagtggggatccaacccaggtgtggctgaatagagaccaccgagatttaaaaataggaataataattattatttttatcagtattactatttgtgaggttct

SEQ ID NO: 55010 - DNA, 122 bp, Homo sapiens
ccagcaggtcctccacagacaccagctcgttcagcacggcctccatggccactgcccccgcgagcctcacactacagtctactgtgccacagtctccatggcccagtggcaggggcggagaa

SEQ ID NO: 55011 - DNA, 122 bp, Homo sapiens
gccatgaggcttcctcgaaagaaataaactctgagcctctagctcttaaataacaataatcgtcttccagaaatttaaggactcagccctggccaaggcggcaaagggtctgcacttgtttg

SEQ ID NO: 55012 - DNA, 122 bp, Homo sapiens
cacacagtcctcgcaggtgccgtgcttcccacagaaggccagcggggcctggaccacgcccgagttagagccagcatagacaaacctgttgccctgcgtgtatgagacagagaagaactagc

SEQ ID NO: 55013 - DNA, 122 bp, Homo sapiens
cagagcacatttgcctactaatggaaaaggttaataattcatgccaaaaatagaaattagcgtaatattgagaaaaaaatgatacagccttcttcagccagtttgcttttatttttgattaa

SEQ ID NO: 55014 - DNA, 122 bp, Homo sapiens
gtatccctggtctgcattcccacccccatgcctcagtactgagtcccttgtgtttttgggcgtggttgacagccactttgtgcaggtggggcagaaacagcctgcagacctggaggtgtcag

SEQ ID NO: 55015 - DNA, 122 bp, Homo sapiens
gggcagccgggtcagccgctggtgctggttgtttctctgtcaggcgtgatagccgcagggcgtggagcccgggagatttgcgaggacgtatggaaatgtgtgagaacagactacaaaggaaa

SEQ ID NO: 55016 - DNA, 122 bp, Homo sapiens
gtcctctgcttcattccaggcatgggcaggaggcactggcgggcattgtcagggcagggccgcgtctggtgtgtccacaggaagaagagtctccgtgtggggaggtgacgctgaaacgggac

SEQ ID NO: 55017 - DNA, 122 bp, Homo sapiens
tgcccaggcgacaacccactgggcttggaaccgaaaagacttccccagctctgtgtgtgtcgtttagtgtctcctggccctgactacatgttattaatattagtgttttggaaggaaaagga

SEQ ID NO: 55018 - DNA, 122 bp, Homo sapiens
gagagccaggacgcaggcctgtggctcagcccgcagcgtgcttggtgccacaagcccccccgcagctgcccagagtctcaccccactctgtgcagggggcctggagggcagcggcggcacag

SEQ ID NO: 55019 - DNA, 122 bp, Homo sapiens
ccgggtcagggagctgcgttggcagaggccaggaggggcccgggattggggtctgcgggccgccctgggcgttgccattgcgctgcggtgctgtgcttgtgtgattggtttatttatttatt

SEQ ID NO: 55020 - DNA, 122 bp, Homo sapiens
tccatgcccagctgctcaaacctctaggcggaccatgcagacaggcaggctatggggctccgaccccacggcagtgtctaggggtggatgcttacagctcctgaagccccagtgggcgtgtg

SEQ ID NO: 55021 - DNA, 122 bp, Homo sapiens
gacgcggacccctcctcttacccaaaaccaaatgggcagggggctccgctgcagagggctcgccgaggctctcgccttcacccggcgccgcgcaggtgcccgctctcctgcggggagagccg

SEQ ID NO: 55022 - DNA, 122 bp, Homo sapiens
gctggcagaggtgcttagctggcagcagctcactcaccagggcctgtgtgctggtgtgctcgagctgcagggtggagagggcctgctctttctggaagaacttctcctgccacgccttcaat

SEQ ID NO: 55023 - DNA, 122 bp, Homo sapiens
agttaattagctttgctggaaagggcctgtgaaatgtcgggaactctgtggtctgagaaccgtctaaactcactgtacaattctgcattccagccccagcccgggctcactccaccagatct

SEQ ID NO: 55024 - DNA, 122 bp, Homo sapiens
agactttttaaacagtaagagctgtgtaggaatccttctgtgaaccataaaaataataaacgctgagcctattggaacataatctcaatcagcaagatgccaatgctttccagatttcctca

SEQ ID NO: 55025 - DNA, 122 bp, Homo sapiens
tggtgggggggcgggggggttctttcgcccccgtggcggagggcccctgagaggcggatacgggtgtgcctttgggggtgatgtggcgtgtggggggaaaggtccgagctcgcctggagggg

SEQ ID NO: 55026 - DNA, 122 bp, Homo sapiens
gcgccccttggttctccttcctggcccctggcccccactttacatcctgatttgtaaccccgcagtgactaacatagctcccacctcctggcctgttcacgggggtccccaggggtgcgcgg

SEQ ID NO: 55027 - DNA, 122 bp, Homo sapiens
ttaatgtttcaggcagctcagaaaaaaaattccacccagcacagcaggccatgcatgaagcgggtgtcagcaagccctacagaatcactcactgtgaagacatctaataggaactgctgaat

SEQ ID NO: 55028 - DNA, 122 bp, Homo sapiens
cggcacagtttgcccgggagcacttgtggggtttcatcaagaagcagaagggtttcacctcgtccgagccggctaaggtttgcgctgccatccgcaaaggctttctcgcttgtcaccttgcc

SEQ ID NO: 55029 - DNA, 122 bp, Homo sapiens
aaagcattcccagatggactttatcccattctgcattaatctttctatctactcgacatgcgcagatcaggatgtgagcttcataccacgaatgtagtatgtgtatgtgcttgtcctttctt

SEQ ID NO: 55030 - DNA, 122 bp, Homo sapiens
tgacattcacatggcttctgtgcccacaccatcagccctacagagacagggtggagggcacgcagcacctagaacaggagggcatggcctgctcctcgtcagcacctgcacagcctttcctg

SEQ ID NO: 55031 - DNA, 122 bp, Homo sapiens
agacttcttccttaatccacatgtccagcatctgctcctcctcgaccttctgccggaccacggatcctgtccggaagctccgcctcagggtcccctctaggaagctcgtccgcctcttctcc

SEQ ID NO: 55032 - DNA, 122 bp, Homo sapiens
ggggcggagctcacactaatgctctgatgtggcggagctcacactaatgctctgacggggcggggctcacactaatgctctgacggggcggagctcacactaatgctctgacggggcggggc

SEQ ID NO: 55033 - DNA, 122 bp, Homo sapiens
tatttttgaatccacgcaaaaagcaggcagatgtcagaaaataaaatggcaatccacattcgaaggttaatctttagaatacattttgaaagcaaataagtcttctaaaatccaaacttgaa

SEQ ID NO: 55034 - DNA, 122 bp, Homo sapiens
agtctgccacatggttatggaaatgttcctgaggcatgaaggaggcctttctggaccagccgatggggagtgggtgaggaggtgtggaggaggaaagaaagaaaactctttccccattcttt

SEQ ID NO: 55035 - DNA, 122 bp, Homo sapiens
caaatgggctgggaggcttcaaaggggaggttgagtcaccagtggaaggaaaaaagccggcgaggcagagcacaggtcttgatccctggctcccccaagccccccccgccacgcatgcgcgg

SEQ ID NO: 55036 - DNA, 122 bp, Homo sapiens
ggttcatctcactaggtagtgccagacagtgggcgcaggtcagtgggtgcgcgcaccgagcgcgagccgaagcagggcgaggcattgcctcacttgggaagcgcaaggggtcacggagttcc

SEQ ID NO: 55037 - DNA, 122 bp, Homo sapiens
aacacgttctacctgaagtttgtgctgtggatgcccccggagcactacctggtcctcctgcggctcgtcttcttcgtgaacgtgggtggcgtggccatgcgtgagatctacgacttcatgga

SEQ ID NO: 55038 - DNA, 122 bp, Homo sapiens
atgttttctcaggaactggagttccctttaggaagcaagtaacagaggtgctgggctgcccgggcctctaggtcgtcttctttcccaggctctgtgctctcaccagagtgcgcgttcgggaa

SEQ ID NO: 55039 - DNA, 122 bp, Homo sapiens
aaaggcataagagtgatataatggactctggggacttgcaggggaaggctggtcggggggcgaggtataaaagactacacattgggtacagcatacactgcttcagtaacaggtgcactaat

SEQ ID NO: 55040 - DNA, 122 bp, Homo sapiens
agttagttcatttttatttccctctttttttttctttctttttttgagacggagtctcaccgtgtcacccaggctggagtgcagtggcttgatcttgggtcactgcaaccttcacctcctgg

SEQ ID NO: 55041 - DNA, 122 bp, Homo sapiens
aatatgttaatcaataccccaggtgttctcttataagcacctttacaaagaaattcacttcgctctactcagcttttttgctgctattaaaattaccttctccttgaaaccctctataacta

SEQ ID NO: 55042 - DNA, 122 bp, Homo sapiens
cgggctccgaaagctcagctccccgtcttcgtcccccggattcgaggcactaacccgacccgggaagaccctctgactgccccagaatcgccttggtcaccctggctcgctccggggggctg

SEQ ID NO: 55043 - DNA, 122 bp, Homo sapiens
cggaccggcaccggccctctgccctgctgcagaggctcaggggactcgtccatcctgttgcgtcaggtcccgtggccgacctgcggccgagaagagggcatggtcacaggagcccccggatc

SEQ ID NO: 55044 - DNA, 122 bp, Homo sapiens
aagccgtcggacctgcctcctggagccacttccgggcctctctaggaagcctggaggtctcggagtctctatgacgcgcaggtgtctccttcaccttcaccggcgttgaggtagcaggaggt

SEQ ID NO: 55045 - DNA, 122 bp, Homo sapiens
ataaatatttcccccaagacagccaacagagacccttagagacactaacttaatgctaaccgagcaataaatgcagcgtacccatacccaagcatacagacccacccacccagtcccaaggc

SEQ ID NO: 55046 - DNA, 122 bp, Homo sapiens
ggtggagtggtgacacactgcacacattcacagagagaatcgtgagcgccggggcaggtgcgaggtagggagaggtcacagccagacagcgcttgcctctcaggacctcctaaccctgtgtt

SEQ ID NO: 55047 - DNA, 122 bp, Homo sapiens
caacaatatgcattgttactctgaggtcgtacttgatctcttttgttccgactatgtcaccgtagatgactacagcatcacagccaggagactcaccaagcatgtggctgggcttttttttt

SEQ ID NO: 55048 - DNA, 122 bp, Homo sapiens
cgtggtcagccatggccttggaaccgccgggatcgcctcagcggcactccggccagctcccgacttcccgccctgggcactagggtcacccagctccagaagatagtgcttatcagcacagg

SEQ ID NO: 55049 - DNA, 122 bp, Homo sapiens
aaaaaaaaaaaatcttgttcagggttcttgtcacatactttacagatgtgttccactggccgaaaggtgtactgccctcaaatgtgcagcaacccacctaactcctccactgaaatatcaag

SEQ ID NO: 55050 - DNA, 122 bp, Homo sapiens
tcactccaactcaggtatcttttcccattccctcggggttgtgaggtgggagcgttgtgtcgcagctggatctccagatgcgccgtgtcacatttgtccccccaaaaagcatatcctagaaa

SEQ ID NO: 55051 - DNA, 122 bp, Homo sapiens
aggtggcagctgtgtgtcggggatgttacagaggggatcctcattccggttggaagactgcgctgaatgaactcagtgtggattggggggattatctcgtttgggattttctcagtctcttg

SEQ ID NO: 55052 - DNA, 122 bp, Homo sapiens
ggaaagccccggatgttcgttggggattcaacatggcggcgggagtgtccgcggtggtggcggtgcaagagagctgagggaggcgcgagggcgcggagttccaggtcgagcagttaggccgc

SEQ ID NO: 55053 - DNA, 122 bp, Homo sapiens
tcctccgaggtgtctgtggttaagacctctgagctctgcttaaaacttcttgaagctgggcgcgatggctcacacgtgtaatcccagccctttgggaagctgaggcaggcgaatcacaaggt

SEQ ID NO: 55054 - DNA, 122 bp, Homo sapiens
tcccccttcggttcccttttcccttttgggtctgaggttaaacagagggcagccggggcccgcgacctctgccctctgacatctttgaactcaaaagtctttgatgttttaacatgcctccc

SEQ ID NO: 55055 - DNA, 122 bp, Homo sapiens
gctcagaagggaaaaggcgggtctccgtgacgacttataaaagcccaggggcaagcggtccggataacggctagcctgaggagctgctgcgacagtccactacctttttcgagagtgactcc

SEQ ID NO: 55056 - DNA, 122 bp, Homo sapiens
ctggtagaaactatttctgttccagtcacattgccatcactcttgtactgcctgccaccgcggaggaggctggtgacaggccaaaggccagtggaagaaacaccctttcatctcagagtcca

SEQ ID NO: 55057 - DNA, 122 bp, Homo sapiens
tccagctgtgcaatcggcacacccacgtccacgtggctcctcatggggccaaagagcagccgtggccaggaaagcagtcagagaggcccagggttgaacccaaggtcactgcccttgtggtt

SEQ ID NO: 55058 - DNA, 122 bp, Homo sapiens
ggagaaaatgaaaagatgccacattaattgtagacaaccattttaagatatatttcattccgccccactggctgctctgaaaagccatctttgcattgttcctccttgctcgccgcagccgc

SEQ ID NO: 55059 - DNA, 122 bp, Homo sapiens
gcatggggtgaaaggacactctgtccctaggggacaccaggacaccagacctagaggggccgggtgagggcagggctgtgggaatgtaactggaggacctgggctcctaactggtatgtgtg

SEQ ID NO: 55060 - DNA, 122 bp, Homo sapiens
gccaccgaattggggccagtttgctataaatcattattgtggcaatagataattgatgtgcggctcctacttcgctaaccacttgtttgcacatgagcacatggccacatatttgcacatct

SEQ ID NO: 55061 - DNA, 122 bp, Homo sapiens
gaacccgaggcacagcacacagcaggtgaggggcgtggtactccggtaccctcagtcggccgaccatagagcttgtagacctccaggactcctagagagcttccggaagtgcctttggggca

SEQ ID NO: 55062 - DNA, 122 bp, Homo sapiens
aagagtaactttacccaggtgatgaaagtctagtgactcatttgcattagaatttgattccgatggaaggagaatatgggatgcagaatttcctgaatcccatatttgtaaatccttagtcc

SEQ ID NO: 55063 - DNA, 122 bp, Homo sapiens
ttaccttggtgcccatatttgattagggcacccgggttccgccgtcctgctctccttagtcggatttggggggttaactactgcacggagcccttaccaaggatttagaatggttgcccttt

SEQ ID NO: 55064 - DNA, 122 bp, Homo sapiens
attgagccccaagaaaaatcgctgattctgaggaaccttccaactttaacaatttcaggacgtccctaagctgagctaggaggcaccacgcacaggccggaggcaccacgcacaggccagag

SEQ ID NO: 55065 - DNA, 122 bp, Homo sapiens
aggaatttagcatgaaggagtgaaggtggaggtgactctggaaatgtaggcgggccggatcgtgaagtcttacatgccacgctgaagagtttagctttcatcctctaagttacagagagcca

SEQ ID NO: 55066 - DNA, 122 bp, Homo sapiens
tggagcccctgggcctcagggcatctgacttgttttctacctgcccaggtttgcttagggcgtggcagcttcggataaacgcaggactccgcctggcagcccgatttctcccggaacctctg

SEQ ID NO: 55067 - DNA, 122 bp, Homo sapiens
accttttggtgcctctttctccattctgaagtagaggtgtgatttctgaggaacccagggcggcgttgggatagcaggttgcactagtccctcggtggatcctagtgtgcaccatcctgtaa

SEQ ID NO: 55068 - DNA, 122 bp, Homo sapiens
cctgatcctggaacagctcatggccctgcagcagcagcagatccaccagctgcagctcatcgagcagatccgcagccaggtggccctcatgcagcgcccgccgccgcggccctcactcagcc

SEQ ID NO: 55069 - DNA, 122 bp, Homo sapiens
gggtttcacttgggagctctcggtccccgggcatgttcctggggggggtggtgatggggtcgggccatggaggttcaaggatctcatcccacctgtgaccctgaatggggctgatcctgttg

SEQ ID NO: 55070 - DNA, 122 bp, Homo sapiens
tcgccccagcacagggcagaatcataaaccgcccacttgctctccttcccgtctgtgaagcgctcgttcagagccgcaggactccgcaaacaataaaaccggctgcgtggctattgcctgga

SEQ ID NO: 55071 - DNA, 122 bp, Homo sapiens
gggaccgtctttgagggactcatgtaaagtctctcccttaatgctcagttcttagaagaccgaggtaggtgggcagatggtcctcttccccgccccgctttaagagccgaaaacaaacatta

SEQ ID NO: 55072 - DNA, 122 bp, Homo sapiens
cgatcagatgttacctgcatcctagggtcgcctggcatgcccatgagtgacgcttaggaccgtgcctggtgctggtgtgtggacaatgctgggccagtttgcccagggctatgcctgccacc

SEQ ID NO: 55073 - DNA, 122 bp, Homo sapiens
agcctcttcctctactcaggcagtcgacccgccacgatgagaagtgggaccagcagagggcgccaacttcaggagtccgctttcccaccaggcttcattcacccagtggacctgaactgttt

SEQ ID NO: 55074 - DNA, 122 bp, Homo sapiens
acatttcacgtctcggcttttcggccatcggagtcggtttaagccagcgtttacacacctcgcctcgttctctctgctggtgatgcggttgtaagattttcacgtggcagagcccctgcagc

SEQ ID NO: 55075 - DNA, 122 bp, Homo sapiens
gacgttatccctcagagggggatgagcatggcaaattgggacttgttattctgaaggattcgtgggtcctgtgaactctaattactttgaaatgggtctaggttgtgagatgtctcagagca

SEQ ID NO: 55076 - DNA, 122 bp, Homo sapiens
gggtgtaccccctctgcgagattcttcgtaatatcccaatggggaggagatgatgttactcgtaaaaatatcgtggggtgtaccccctctgcgagattatttgtaatatcccgggggagagg

SEQ ID NO: 55077 - DNA, 122 bp, Homo sapiens
cacgtgctttgcgatttcttacgttcttactccgtttctgtaatttgctatgttgctaagcgagtcaacgtaactacctaggaaaagtctcatgggaaccctgcaaaggggctacaacagag

SEQ ID NO: 55078 - DNA, 122 bp, Homo sapiens
gagttttacacaaattacctcatccaattctttttattttgacacaggattgcgctcagtcgcccaggctggagtgcagtgatgcgatcaaagctcactgcagcctggaactcctgtgctca

SEQ ID NO: 55079 - DNA, 122 bp, Homo sapiens
ctcccgccctgcagggatactcctttgtggcaccctccattctctttgaccacaacaacgcggtgatgaccgatgggctggaagcgcctggtgctggagaccggccaggtcgggcagcggtg

SEQ ID NO: 55080 - DNA, 122 bp, Homo sapiens
gagaaagtcccatggaggcggcttccgttagcactggcatgttctgtttggtgacatcgacgcggccagcctcctatctctagggcttctcactctgggtggtgatgaggccattttctttc

SEQ ID NO: 55081 - DNA, 122 bp, Homo sapiens
tcttgccacagccgtgttcttgagaagaggctgctgtttcagcgagaaatcattctctctcggggggaccattttgcccatctccgcttgtcggtgatggtggctgacatgttggcaaaact

SEQ ID NO: 55082 - DNA, 122 bp, Homo sapiens
ccagtgaatgaaactgtctctgaacctctgattctggatgagttcatgactgatgccagccgccagtctgtgtgacccctatcctgcaatcctgcttttagtatgattcagtagttaggata

SEQ ID NO: 55083 - DNA, 122 bp, Homo sapiens
ccttcccatactgaatgtaacaatggtgaaaggaacagtatgtgacctttagggttaggtcgcagaaggcactgtggttcacaccttggtctcctggattgcttgctctggagtaagccagc

SEQ ID NO: 55084 - DNA, 122 bp, Homo sapiens
gaggcctgcaccgggggatcctgcggcggaggcggctgcgcggtgcttggcaggaagctgcggcgcccggaagagcccgcgccaccgccgccgccaccaccaacacgttgcaaggagtcatt

SEQ ID NO: 55085 - DNA, 122 bp, Homo sapiens
tggctggttctttttttgctttattaacatagctaccagaaaatttaaatttaactatctcgcttgcattccattggacaatgctgtctcagaagaagctaagtgggctttttaaggacttc

SEQ ID NO: 55086 - DNA, 122 bp, Homo sapiens
ccacaaagtctgggggcggagcagattgggtaccaaggaggactgcctggaggtggtggccgcggtgactgctccaaacccgttcggccctgtgcagaagtctgaagaacagaggtgccctc

SEQ ID NO: 55087 - DNA, 122 bp, Homo sapiens
tcgcagttggggggcctaggatcggtgcatcttccgccgcgctgccagcaccccgcagcgcgtggtcgtgcaccccggaatctgcagcagctgcatatctgaggggggtctcctttgcccgc

SEQ ID NO: 55088 - DNA, 122 bp, Homo sapiens
cactatgaagaggttctctggttgttagcagcaaagaattctcacaaatgtgaatatgggcgcacatttgcctcataaagcacagcatcagataatttatgtgagagaaaatggtagtgtca

SEQ ID NO: 55089 - DNA, 122 bp, Homo sapiens
tgacgcacagaggtaacgggaaagcaggaacgagcgagagcgtgcggtcccgtacctgcgcgtgcctgcgtgcgcgtccgtgcggccgcgacgccgccgccggtgcctctctttctagacgt

SEQ ID NO: 55090 - DNA, 122 bp, Homo sapiens
cccgccgcctcctccacccgcgtcccagcagccaccacccccgccacccccacaggcgcccgtccgcctgccccctggtggccccctgttgcccagcgccagcctgactcgtgggccacagc

SEQ ID NO: 55091 - DNA, 122 bp, Homo sapiens
cagatgagatggaactgtcccacgcatggtctctggggcagaaactgctgcggagcctgccgaggccactcctgccgactggccagggcacagcatctgacccaggaggctgtgacctcgct

SEQ ID NO: 55092 - DNA, 122 bp, Homo sapiens
tgtggaagaagagataaaagtaattcttatggccgcttcaccactggcgacggccagccccgtccccctcctgctgcatttccctggtccggccagataaagggttaggcctaagcacatgt

SEQ ID NO: 55093 - DNA, 122 bp, Homo sapiens
atctcggctcactgcaacttctgcctcctgggttcaagcgattctgctgcctcagcctcccgcatagctgggactacaagtgcatgccaccacgtctggcaaatttgttctgtttttgtaga

SEQ ID NO: 55094 - DNA, 122 bp, Homo sapiens
tctcctcaccaacacaagcgcttggcgcttcccttttccgtccaggcgtcctggctggaacgaggaaactcaaaagtgctacgaaagaacaaaagtggcccaaattctgaaaattcttaaaa

SEQ ID NO: 55095 - DNA, 122 bp, Homo sapiens
aaaagagcgggactctgcaggtaacccgattttctccaccaggtgagtcccggatggaggcgtcaactacaagaccaggaacagcactcctggggctttgctggaaccatcggcgtgggaat

SEQ ID NO: 55096 - DNA, 122 bp, Homo sapiens
accaatttgggtttgttttggtgtctattatggtccagatggggaggggtggatgaggaacggagcaggagaagagaagagaaaagcaggtaagggatagaaactggttaagatctctagaa

SEQ ID NO: 55097 - DNA, 122 bp, Homo sapiens
atgagggtttggcatgcagctcgtcatcttaagagttactatcttcttgccctggtgtttcgccgttccagtgccccctgctgcagaccataaaggatgggactttgttgaggtaggtgaac

SEQ ID NO: 55098 - DNA, 122 bp, Homo sapiens
ggactggggccgggactggggccggggctggggctgcgcaaccgcttcgcctccgctgcccgtctgggtctccactttgctggcgcttttgctcaatcgtcccctggtgggctctggcggcc

SEQ ID NO: 55099 - DNA, 122 bp, Homo sapiens
cctcttagaggagctgtttcctgccggaactaattatctcgacttgtagctgattcgctacgactccaaaagagactgcaccaccccccgtttcctccgaagtggttggtgccttagcaact

SEQ ID NO: 55100 - DNA, 122 bp, Homo sapiens
ctccagcctgggtgacagaatgagactcagtctcccaccctgccaaaaagtttgcaatgtcggcagcaaagtgcaaacagagccggctctgggtgaaagctttagttatgaaaaataagaaa

SEQ ID NO: 55101 - DNA, 122 bp, Homo sapiens
tctagctttccctctcatttcccataagattttggtcaagttatttaatctctctgcatccgtttcctcttctatgaaatgggcatgataataatggtatgtacctcctcaaactaaatata

SEQ ID NO: 55102 - DNA, 122 bp, Homo sapiens
gtgtgctcgcgctgcaggcagggcttcgcttgagtacaggagtggttggcgttgatgttgcgttttctcaacggcggcatccgaggagttcgtcctcaccactgcgcgccgacggtgggctg

SEQ ID NO: 55103 - DNA, 122 bp, Homo sapiens
cccggagaaagaatagtttcctacagacgaggctggacgtttggacactgcaattcacctcggtgtttctcccaccccgcgccgggaggacttccctcccagggacttcggtccctgctcct

SEQ ID NO: 55104 - DNA, 122 bp, Homo sapiens
caagggctctcgggattcacgagatccacatttatcccaagttagaacagcacatctgtgcgtgcaaacttcattctgacttcggccggctgtccttcttgcccaaagcaccgtgaggcctc

SEQ ID NO: 55105 - DNA, 122 bp, Homo sapiens
gggacgttgggctgggaactgtccaatcaggcacacagctggactggacaaagcggcttccgggatatggcggggcctttgtctctcgctgtcgccggagtcccaggtctgtcttcactgct

SEQ ID NO: 55106 - DNA, 122 bp, Homo sapiens
ctccagaagagagagtgaattcaccctcctcccacagttttattctctctaggccctcaacggcttgggtgatgcccacacaccttggtgagagcaaattcctctctactcagactactgat

SEQ ID NO: 55107 - DNA, 122 bp, Homo sapiens
ttataaaggttttcgttctccttcattatcttttttccaattcggagacttgagactgagcgcatcttggacagtgctagagggttcaaaagataacacctttaggtaccaaaaaataattt

SEQ ID NO: 55108 - DNA, 122 bp, Homo sapiens
aaaaaggctgtgtaggcaacccatcaaatgactgaaagctggggtagtcccttcagtgggcgaactgcttatgctacctgaatagactttgctcagaaaagacttctattgaaagaaccaca

SEQ ID NO: 55109 - DNA, 122 bp, Homo sapiens
attacaggcatgagccactgcacctggcctatttgggcattttaaaagggctttttcccacgtgtcacctgtgcagccaagtccctgctttctcgggaagtgggggaagggtaagcagctgt

SEQ ID NO: 55110 - DNA, 122 bp, Homo sapiens
ggagggggaattacgagagctccaggaaggagcctgctcagcaaggacagggcccatgagcggtgcaagagatgtttcagcaacgccgtctgggcgtgtcctgggacccgagaggtggagac

SEQ ID NO: 55111 - DNA, 122 bp, Homo sapiens
cacagacaggggcaagcctccgttatcctccagcaaaaccataaccctgcacattactgacgtcaatgacaacgcgccggttttcggacagtcagcctacctggtccacgtgccagaaaaca

SEQ ID NO: 55112 - DNA, 122 bp, Homo sapiens
ggtcctcggagcccgtgcaggcagatgagtcccagagcccgagggatcgtgggagaatctcggctcatcagggggcccaggtgcgtcggacatggggggcaggcctgggaagggtctccgga

SEQ ID NO: 55113 - DNA, 122 bp, Homo sapiens
ctcaaggtcacagctggtgctcagagttagaacacaggtggattgcgtctggccctcgcccgcgggctgcctggggaggggagagctgttggcggggcggtcacttcagcttcatcccgggt

SEQ ID NO: 55114 - DNA, 122 bp, Homo sapiens
tcttcttgttattttatctttatttactttttccacttcatgttttttttcctttagcttcgggcagtacatgaacaactggctgctctgtcccagggtccaatatccaagcccaagaggaa

SEQ ID NO: 55115 - DNA, 122 bp, Homo sapiens
gtttgggtcagttccgcgagacccttctgaatttcctggacctacgcattggatccttaacgaactggtgatcgaattaggggaaaagaaacctcgtcggagagcagaggtttggcggagcg

SEQ ID NO: 55116 - DNA, 122 bp, Homo sapiens
aaggtttcattgagaaggtaacattttagaaaagacttgagtgggtcatgtgggtgtctgcgggagccttccaggcaatgggaatggaaaatgcaaagaccctgagacctagcctggcatgt

SEQ ID NO: 55117 - DNA, 122 bp, Homo sapiens
cttaagtactccaggcccagctgctctttgtagatgtatgcatggtggtgggggtgacagcgacagaaacaattacttttcattcttgccaatgaatctagcagcaaataagcgggacacag

SEQ ID NO: 55118 - DNA, 122 bp, Homo sapiens
ctgttaagaggctgcagcagtgattaggaaagaaatgatgagggtgcagcgttggtggaacgtgtggccaaatggtcatgcattcctagacattatcagctttcttagacatgatttcattt

SEQ ID NO: 55119 - DNA, 122 bp, Homo sapiens
atacacgcactacgcacacacgcacacgcacaacaccagaccggcacacagacccataaacgtccatcacgcactccacgcacgtccgcatgcacgctacccgtcccggaagcgtggtctcc

SEQ ID NO: 55120 - DNA, 122 bp, Homo sapiens
actgggcaggcctcacactctcccctctccctagtgaagtacctggctttcctccgcaagcggatgaacaccaacccttcccgaggcccctaccacttccgggcccccagccgcatcttctg

SEQ ID NO: 55121 - DNA, 122 bp, Homo sapiens
gggcgcgtcttactttgtgcgccggtctttcttctgcgcctgcgcatgagttggactaaccgggcttcttatctttctctgagaattgactcctgaaatatttgggtttcggattccgtgtc

SEQ ID NO: 55122 - DNA, 122 bp, Homo sapiens
ccatgggctcctgtttgcatttgccattaaggacactgtaattggtgtttaatgcagaaacggaagctacctcaaatctgttttagacatagatgggtattatcagtagggtcctgccaaga

SEQ ID NO: 55123 - DNA, 122 bp, Homo sapiens
ccagtgtctgctgtctttgactattaggtggggtctgtttgggggtctgaccagtgaggccgcctggcactcagaagacgtctcccccattccggagaatcctgaccttcctgtatttggga

SEQ ID NO: 55124 - DNA, 122 bp, Homo sapiens
tgatagcaaaggagctaagaagggccccgtgcccaattcacctatccccggccacagaagcgcacaccgcagctagctagcggggaccccaggacgatccgaccgcagcccccggcgcccca

SEQ ID NO: 55125 - DNA, 122 bp, Homo sapiens
gtacatgggtctaaaacggacacgcgacaagggttcctaggaataaaccataaacaggcccgggagctacgctaacgccaaacgccgagcagtgagacgcgcagcacccgccctgcgcctcg

SEQ ID NO: 55126 - DNA, 122 bp, Homo sapiens
agcccgcctccactcccagctcccctgagcaagcctccacagcaagggtgtttccttttacgaagatttagaaatcagcaaggctctctacacagggaggaagaaatggctacacagaaacc

SEQ ID NO: 55127 - DNA, 122 bp, Homo sapiens
agggccatgatggtgaggccgagctgcccaatggttagatctgcagagaagagaacacaacggttagacagagacatcctcaggggacagctctccaggagccagtgatgagttctctgctt

SEQ ID NO: 55128 - DNA, 122 bp, Homo sapiens
tcctctcccagccaggccccgccccccgaccaggctctattcccttaactcccttatgtgcgccctcctgtccacctgctggcgcaacctgctcccccgtctctaggggtggggtggggagc

SEQ ID NO: 55129 - DNA, 122 bp, Homo sapiens
gaccgggagggcttgacggaggctgcggctccgagcccgcgtccctcctcctggccgcggcggctcctgcttggccactccccggcagcctgaagagaacgcctaatctggcaccccagccc

SEQ ID NO: 55130 - DNA, 122 bp, Homo sapiens
tctgagggccacctcagctccagagaaacttgtgagataggctgtggcctctgttgcaaacgcatcacagttcaactctccctctaaccaatcctactacccacccaagagctgctgatcct

SEQ ID NO: 55131 - DNA, 122 bp, Homo sapiens
tgatagcagcataaatcaaaacaacctcagcagagatgtattttctcatgcaactgaaaacgcaagagatttaggtgcagttagatgcaaagagagtcattacagctctgtcttctttgttc

SEQ ID NO: 55132 - DNA, 122 bp, Homo sapiens
aagcactgtgcatgtgcccgaggtaagaaatcagaaaccattttctcacaacaatttaaacgttgctgttttttgttactggaagtacaaacttgaagaagtagcttaatgaagatgtcatt

SEQ ID NO: 55133 - DNA, 122 bp, Homo sapiens
ggctgcagagtccccgcccccggccggcccctgtcgcccgcgcctccctccctcgggcctcggaagtgacgcaagcgcccccccaccgccgctagatccgctgctgctgccgcggcgggcag

SEQ ID NO: 55134 - DNA, 122 bp, Homo sapiens
ccaaatttcaggtagtccccaaagattagcccaactggctccagagacgatgatttttcccgaggaactctgtaatgttcatgtgcccatcgcagtccagcagtggggtgggagaagggtag

SEQ ID NO: 55135 - DNA, 122 bp, Homo sapiens
ggaatctccaccgaatcggggataccagactacaggtcagaaaaagtggggctttatgcccgcactgaccgcaggcccatccagcatggtgattttgtccggagtgccccaatccgccagcg

SEQ ID NO: 55136 - DNA, 122 bp, Homo sapiens
tgaaaaaaatgtaccactactcaactgtggcccggggcgggggaaggggggcgatctgtgcgcccaggtgcccccagttcattcacaccacagattctgcaaactcttggcggctcacgcct

SEQ ID NO: 55137 - DNA, 122 bp, Homo sapiens
ttttcagatctacccatccaggagcaatgtttgttttccttggaatctacccatgcctctcgcctctacgatgacaccatcctccctctacctcacccacttgttcaaccacccagcagctg

SEQ ID NO: 55138 - DNA, 122 bp, Homo sapiens
cgcacggagccacccgctagggttttctccagacgcaggccgcgaaagctgcacacggggcggggccagtcgctagagactacaactcccggaatgcagcggggcctatcgggcttgcgatt

SEQ ID NO: 55139 - DNA, 122 bp, Homo sapiens
taaataatgtatagcatgctcctgtccaatctttcccgctcatttgtagtcttctcagatcgatgcttcattttagtcacacatttctatcctgcaagactgggtacctgggctttttgtct

SEQ ID NO: 55140 - DNA, 122 bp, Homo sapiens
tacagacttgaagtgggaggacaaaggtacaggggacaatgggttttcttgagaactggccgagagggcatatctggttcaaaaccctcattttacaaaagcagagagaagctccagagagg

SEQ ID NO: 55141 - DNA, 122 bp, Homo sapiens
tccacttccgcagattagggggctggcacgagtcacagcacctcgtgcgtcacttggcggcgccggacgttgggctgcgcaggatttgagacgctcccctgaccaccacttgctctgcgctg

SEQ ID NO: 55142 - DNA, 122 bp, Homo sapiens
tgaggtcacatggctggccagtgggagtggagcagatgaagatgactattcccatctggccgctggctcctacagaagccaaggctccttctcttccagcaggatccccatgggaaaaaaga

SEQ ID NO: 55143 - DNA, 122 bp, Homo sapiens
gccactgcgctgcatccaagactgtgcagtggcgatggtgccttcagccaccaggaagggcgactttgccacgctcccctgcatgtggcgtggcacagccgacacgcgcatttctacaaagc

SEQ ID NO: 55144 - DNA, 122 bp, Homo sapiens
ggccccgcaagccgagggccgcccgcgctcatgggggggctcacttacgagagctatggtcgccgtcgccatcttgcgtccgtcgcggcctccgcgcgcgcctcccactcttgctccttccg

SEQ ID NO: 55145 - DNA, 122 bp, Homo sapiens
gggccgcacaggtagaaggaagccagggcggccgcagtagaatgacagaggcgccggtcacgtgatcggaggcacgtgactgctgcggaaggcggaagccgggagactccaaagcagcaaga

SEQ ID NO: 55146 - DNA, 122 bp, Homo sapiens
actgctaggcggtctgtgccagaaatttcacgtactgcccgcgggcttcaaaatggtcagcgggccggttgtacgctgtccacaccggttctcccacaaacagccgcatggccttcgtgtag

SEQ ID NO: 55147 - DNA, 122 bp, Homo sapiens
caggcttcccctccctgcctgaccccccatgcctgaggtaggcctttcagcagaaccacccgaccagaggctccgaataaagatgatttggattccctgagcctcctttccagggcaagggt

SEQ ID NO: 55148 - DNA, 122 bp, Homo sapiens
gaagagggaaggcgttggccccggggaacgaagagctgagtcacatgctcaacgtgaccacggctgttctgacactgcgccagggctggcacccacactgaacgtgcaccacccagatggca

SEQ ID NO: 55149 - DNA, 122 bp, Homo sapiens
gaaagtgcttttcacagccgggctgtgtctgctccagagctgatttatacgcagaatctgcgctcgcttctccgctccctcccccgtcagcccggggacggcgccggaggcgcgggcgcggc

SEQ ID NO: 55150 - DNA, 122 bp, Homo sapiens
gtgctaagacaggaaacccagtccacattttagggcttccttaaacaggcttctgagagtcgtatcttttttcttttttttccagaaaaaaacaaaacaaaacttttttgccaaaacacctc

SEQ ID NO: 55151 - DNA, 122 bp, Homo sapiens
tatttgtagatgaatgaatgaagactagaagattcgaatggaattcttctaaaggtagttcgtttctgctttaagagactatggaatttagaaatccaaagaaactggcaggtttgttacat

SEQ ID NO: 55152 - DNA, 122 bp, Homo sapiens
ttggtgtgaccagagcggtttccatggcgtaacagaactccctgccaaacatcaccgccccgtgcatcacccacaggcgcatggggattcggtctatggacccctcgctgatggtctcgcag

SEQ ID NO: 55153 - DNA, 122 bp, Homo sapiens
taatatatccttggggcttatggggtcatcctttgcatggattcctgctattttgggcagcgtgactggctcagattccaagtcaaatgctcccactgtttgaccagtaggtggcagttcaa

SEQ ID NO: 55154 - DNA, 122 bp, Homo sapiens
gtcaggaaaggttaaggggcttgcagttcccacaatttttttttctttgagacggagtctcgctctgtctcccaggctggagtgcagtggtgcgatctcggctcactgcaagctccgcctcc

SEQ ID NO: 55155 - DNA, 122 bp, Homo sapiens
aggtgagggatgggaagtgtcctgcagacacagaaaggatgtgtttccacctgcagcagccggcagctgctctcgggcaccgtgtctggacatccttggggaaaactgctgctcggtctgtc

SEQ ID NO: 55156 - DNA, 122 bp, Homo sapiens
tgttgttgttaattggatggcttctaaatgatcagagacttgagagccacgataatagggcgtctggaggaggttgctatttccacaacattccaaaatcatgagctacacccaaagcagaa

SEQ ID NO: 55157 - DNA, 122 bp, Homo sapiens
tagtagaggtggtgacaggaggatacctgaaaccttggttatataataaacttccttctacgacagtgagtcatttcagaatagaaatgatggaataattggaaatcaagttgaaggcttaa

SEQ ID NO: 55158 - DNA, 122 bp, Homo sapiens
ttatgagcactcacattgaaaacttaagttcttcaccaaatgcagagactctgaaggccacgccgctgcgggctgcctccacaattcgaccgtctcggcgggccacgagatcctggccacgg

SEQ ID NO: 55159 - DNA, 122 bp, Homo sapiens
cctggttatggccggtagctgtctccagggctaacgtgggcagcgcaggggggcggaaaccgggttttagccaaatgcctcgacatcgccgcgcctccgcctcctcgtcgctgaaagaaatg

SEQ ID NO: 55160 - DNA, 122 bp, Homo sapiens
gcttgttcccctcagcctgtcgcggaggagcggagccaatcgagggtctggtgtccccgtcgcctctccaggggcaacctgcggactaggccaaggtctgtaacaggataacgtaccagcgc

SEQ ID NO: 55161 - DNA, 122 bp, Homo sapiens
cgaaggtgttgctcttgacagctctagggaacgtccgctgtggacatgcctggtgactgccgtctcccttgctgcttttggacgcagggcttgaggaccgacagtgggccgagtcggggctg

SEQ ID NO: 55162 - DNA, 122 bp, Homo sapiens
atgggtgcctgtccccgggcccctctcctcgaccccgccttgcctttcgaatgtcccctgcgtggacacacctaacccagacgccaacctgcacgagtgtctcccggtagccgggagccggg

SEQ ID NO: 55163 - DNA, 122 bp, Homo sapiens
tcacgaagaaggttctgagaatgcttctgtttacgtaggtgagttctctcccgtatccaacgaaatcatcagagcggtccgaatctccacttgcagattctacacaaagtgtgtttggaaac

SEQ ID NO: 55164 - DNA, 122 bp, Homo sapiens
gggtgttcacaaatcgcagctctgagcctaagaggcttaagctatcatcccccttatccccgcccccttacaggtccctcccctaacccacagacactttcatgtggtatcctctggcaaca

SEQ ID NO: 55165 - DNA, 122 bp, Homo sapiens
tttacttatgtatttggaggcagagtctgcctctatcgccaaggctggagtgcagcggcgcgatctcagctcactgcaacctctgcctctcgggttcaggtgattctcctgcctcagcctcc

SEQ ID NO: 55166 - DNA, 122 bp, Homo sapiens
gagctggtggggagacgagagggtgctggcgcctcctcgggacagtgtcagccgcccccgcgggcacccagggcccggtctctcagagccaccttcatccgtcacaccagacagatccaggt

SEQ ID NO: 55167 - DNA, 122 bp, Homo sapiens
actccagcacgcagagcccctcagcacagctcaggctccttcattagcatccctgcctgccgtgcagacccacccagggtcacaggctcctgtccctagtcatctccaggattggcctaatt

SEQ ID NO: 55168 - DNA, 122 bp, Homo sapiens
ccctaggcgaaggcactagaatttcccaaattaagaacgaagaggaagtttggaccttttcggccaccgctcgcttcaatatggctgcccccagggagagacgaggctaccatgaaggagcc

SEQ ID NO: 55169 - DNA, 122 bp, Homo sapiens
gggcgagcagggggaaaagggccctgatgcggaaggagccccggggcgccacagccaggccgctccgccagcgggcgggtggcgcatgcgcggcgtgggccgcggagttgtgaatggtgcgt

SEQ ID NO: 55170 - DNA, 122 bp, Homo sapiens
acaatgctgctggcagatcagtctaaaacactggactcaatgtgccacccctcacttaaacgctttaactggctctcccatggcctctggggcagaactcacctctggagaagatgctcttc

SEQ ID NO: 55171 - DNA, 122 bp, Homo sapiens
cctgagctccatggagttggatgccctaattctgctttagaaagtcctagttccattaaccgtctcctgagaattctcctggcttccctttttgtttcttgagcagagttcagtcaaggaga

SEQ ID NO: 55172 - DNA, 122 bp, Homo sapiens
cagcctgggacttgccttcgtgtgcttctcggtcagccggagaatgcggcgaggcgcatgcgaccaagtagcacaatgaaagcattttcgggaccatgaggtccttggaggagatttgagcg

SEQ ID NO: 55173 - DNA, 122 bp, Homo sapiens
tgatcagcacatccagattctagtcctggctcattgtggctgttttgttctcaaatattacgtaagggaatttggaaccctagatattatcatcatctgagtctacttcaaacactgatatg

SEQ ID NO: 55174 - DNA, 122 bp, Homo sapiens
tcattgcagttgggagacagggtggggtgtgagacacacagccactgaatttcaaagcaacgtgataatgctagattatctgtaccttttcaaacgtgtatgcctagaacccaggactgtgc

SEQ ID NO: 55175 - DNA, 122 bp, Homo sapiens
cacgccgctgcggacgacgacaagcggccaatcgtccccgccccccgcggcccgccgccgcgccgaacctggtcacacccacaaggagaggagaaccctcgcagcccctcgctcggggtgaa

SEQ ID NO: 55176 - DNA, 122 bp, Homo sapiens
ctcgggacgcctgcgcgggcgcccttgcactggcaccagggctccggggtaggggcgcaccgatctgcccaagcctctgcaggcactggaggaaggcgagccctccacccgctcaacaggcc

SEQ ID NO: 55177 - DNA, 122 bp, Homo sapiens
atggatggtgagagtccttgatggaacagcctggcaaccgggcatggcctggccaggctacggtgggaagatcacgtcacacaaagcagtggccaagggaattctgggccacctgcttcttg

SEQ ID NO: 55178 - DNA, 122 bp, Homo sapiens
tgagaagggcggagccgtcttgtttggaatgacgtctgttcagagagccaatcccagtctcgcgactcctgcttgctgggcgcggcttgggcctccaggctgcgcagcgcagccgctatcgg

SEQ ID NO: 55179 - DNA, 122 bp, Homo sapiens
ttatcacctattctgaaatattccccttggaaagtatgtcttgacaacagctccaggagacgctgtaaagtatttggtgctccgttcagtgttgtatcaccagtgtctaaaacagtgtctgt

SEQ ID NO: 55180 - DNA, 122 bp, Homo sapiens
caaatccgccttcagtaagagcagcacagggtcgtggttaagagcatggactgcagagcccgactgcatgagtcctggctctgcctctcctcagctgtgttaccttaggcaagttaccaaaa

SEQ ID NO: 55181 - DNA, 122 bp, Homo sapiens
ggtgcatgggtaaaatgtaggtttgaaaactacaatagagaaagttagactgacttttaacgagaaaagaggcaaatgaataaagacaaaagaattaatcaaatgtgctaacagtggtgttg

SEQ ID NO: 55182 - DNA, 122 bp, Homo sapiens
tcccaagccgggattgtttcctggggtgggggcaacaggtcgttgcaggtgttggctgggcgcctacgtcaggcagggccccgggacgggactgcagggctccgagccctgggatgaacctg

SEQ ID NO: 55183 - DNA, 122 bp, Homo sapiens
ggcggaactcagactacccttgggggatgcccgtttcctatgccccggagacccttgccgcgaaccctccagggttccggtcctacagggggcgctcctcacgggtcctccctcctgctgca

SEQ ID NO: 55184 - DNA, 122 bp, Homo sapiens
ggaagccccagatgcctgtccccaggttccgacgagcttccgaccgtagtcttcctgtcccggatccgctcaccttacagtcctgcagcacttcgtcgcaatacagcgacaccttctcgtcc

SEQ ID NO: 55185 - DNA, 122 bp, Homo sapiens
ctcaagtcgcctacgtgcgcgcccgggagctgcacactcttgaagtgaccggcctggagacggttgcccagagcaaggtaaagataatgatgtatccctgatcatccttaccccagccacta

SEQ ID NO: 55186 - DNA, 122 bp, Homo sapiens
gaggtgaccggaaggagaatgcggccctgggaccgtcaaccttggaccagctgcagccgacgcctggcagggctggtcgctttgcgttgaggaggctgctgtccccgaagctggccttttaa

SEQ ID NO: 55187 - DNA, 122 bp, Homo sapiens
ggagacggaggttgcagtgagccaagattgtgccactgcactccagcctggccgatagagcgagactctgtcaagaaagaaaggaagaaaggaaaaaaggaaggaagaaagaaggaaggaag

SEQ ID NO: 55188 - DNA, 122 bp, Homo sapiens
gtgctactgtgggtggagctgaggctcccagggccctgcagcccagtgtggcctgatccccgcctggcctctccgcttttcctccacatactcacagctggcaaacaccagctatgaggcat

SEQ ID NO: 55189 - DNA, 122 bp, Homo sapiens
accagacgtggacagagaagcctatcgacagggcctgggggagggaggaggcagcagggccggagtccacccaggacatctggcaccagtgaccttgtggggaaaggagccaagaacggggc

SEQ ID NO: 55190 - DNA, 122 bp, Homo sapiens
aggaattcaagcctatggtaactactcaaatgttgcttaaatttcaacccagaagccaggcgtggtggctcacacctgtaatcccagtactttgggaggctgaggtgagtggatcacctgag

SEQ ID NO: 55191 - DNA, 122 bp, Homo sapiens
gcccaattccaagtgagctggacatgaagacggaggtggccgcacagacccaaagatgcacgaccttctgagaagcacagagagccccgtcttgtggccagggaaacccaggcagcgcatgc

SEQ ID NO: 55192 - DNA, 122 bp, Homo sapiens
tccagacagcccctaatctactgcttagtccccaccctgagctcctccgtcctcagggcccgaatccactcacgtcttcctggcagggttgtaaggaaagggtagggctctccttgggaggt

SEQ ID NO: 55193 - DNA, 122 bp, Homo sapiens
gggcagttgtcatggggacgccagggcccgctgagctgcctccttagcaacgggactccccggccagttgccatggaaacagcatcccctggcaagcggtgatggggaacggctgggtttcc

SEQ ID NO: 55194 - DNA, 122 bp, Homo sapiens
gagaccccgtgggctggtcccgctcggccgcagccctggcagtcaggctgtccccgtccccgcaggccagcagcccccaggacctgcgcctgttctacgagaagaacaagacgttggtcccc

SEQ ID NO: 55195 - DNA, 122 bp, Homo sapiens
gaaaccaggcaagctttcagcctgcctgatgccagaaggcttggttgaccctcagagccacggagacaggtctcaggagactcccagaaatgtctggacccatgaaggaggcatgtgccttg

SEQ ID NO: 55196 - DNA, 122 bp, Homo sapiens
tgaaattgcccaggatgggtgacaaacgcttcacaaagggtcccctgtagcatctctcaccgctgtcccctcttgctcaggcccttgctgagttaggccaggggcctcctagctggcctctg

SEQ ID NO: 55197 - DNA, 122 bp, Homo sapiens
tgtctgaatagagaaaaggaaacagcaaaggaactcacacctttcttctaaaggtatggccgggaagtgccccacatcgctttcacccaaacctcattgaccagaacttggttagctactac

SEQ ID NO: 55198 - DNA, 122 bp, Homo sapiens
ggaggtgacatccatcatctccatgtcaacttgtgagctttacaaatctaattttcagtacgtggctacagtatacacaagaaaatatgtgctttgccacttggctctaaaggctcaccgtt

SEQ ID NO: 55199 - DNA, 122 bp, Homo sapiens
cagaccattcttccatgccctgtctgtgaagcatgaggatgtggtgttcctggaggtggacgctgacaactgtgaggaggtggtgagagagtgcgccatcatgtgtgtcccaacctttcagt

SEQ ID NO: 55200 - DNA, 122 bp, Homo sapiens
aaattccctaaatatcttctttttaaaagtctggaaggaaatgcaccaagttcgtgaacccggatgacttttagttctggcactgtggaattttatcattaactgtgatgatgatgaattct

SEQ ID NO: 55201 - DNA, 122 bp, Homo sapiens
cttgtttacatacattatgtacattcctttgatagtcaattgtctaaagttggaacagttcggagggaagagctatataaggtttgcaatgatctttgtccaccagttactggacaactgga

SEQ ID NO: 55202 - DNA, 122 bp, Homo sapiens
gtctcccaggttcaagtgattatcctgcttcagcctcccgagtggctgggattacaggggcgcaccaccatgcccggctaatttttgcatttgtagtacacagggtttcaccatgtcggcca

SEQ ID NO: 55203 - DNA, 122 bp, Homo sapiens
caggccagggctgggaatttcacaaaaaagcagaaggcgctctgtgaacatttcctgccccgccccagcccccttcctggcagcattaccacactgctcacctgtgaagcaatcttccggag

SEQ ID NO: 55204 - DNA, 122 bp, Homo sapiens
agcgaggcggaagtaaggcggaagtactgcccttaactcccggcactctggattggaagacggcgcacagagcctgtgtcaagtgcctatgaaggggactgcccatgaagtgaaagtcaagt

SEQ ID NO: 55205 - DNA, 122 bp, Homo sapiens
gcccgtctgaatgcagccctaaactccagtaagccctaaactctagcactccttctgccccgcccctcggaggaaacacaccccctttgctgagccgctagccaatcaggtgtctctcagcc

SEQ ID NO: 55206 - DNA, 122 bp, Homo sapiens
actgcctcctccccctgcacctgactgtcccccagcttgactaaaaggacgatcaccaggcgcatgggctgctgggaagatacaatgttggcaaacagggagctggttccaggaaagaaggg

SEQ ID NO: 55207 - DNA, 122 bp, Homo sapiens
actgatgactgtacctatttcctaggaaaggttaagcaagatcgtgaatataatgctcttcgtttcatgccggcacataataagttcccactaaatgtttaacttggtccactgggggaagg

SEQ ID NO: 55208 - DNA, 122 bp, Homo sapiens
aattaattattcagactcttgagagaggagacgagttggcggagttgccacccgtgttcacgaacaggaacagaagccaccagcacatgacattgcccaagccacccagagatcagagtgga

SEQ ID NO: 55209 - DNA, 122 bp, Homo sapiens
ctggtttccgaagtgcgagatttaaatcaccggtggaccgccttgcagacctttaacttacgcgttgactttaggaaatggtccccaccccacccccaactgctagaactctctttaggaaa

SEQ ID NO: 55210 - DNA, 122 bp, Homo sapiens
ctcgaaacttataaataggacaggctggaaactctggggctggattccctgtcttcccttcgttctttcaggacgtctattcatccatcccaagttcacaggcttttgccagagcctccttt

SEQ ID NO: 55211 - DNA, 122 bp, Homo sapiens
aaactctacgtccagctgcgtgtccccaatgtccgggctccagatgagttcctcggtcagcgccggcaggaaggcgtcggcccccaggggatctgggaaaaccagaggaaaggtcttgagat

SEQ ID NO: 55212 - DNA, 122 bp, Homo sapiens
aatttacgaccagggcttagagtttcgtaccacctcttggtcctaaacagatattatgaacggggccttcggccccgcattagagagttagggagaatgcagaaaagggtgttactcaccca

SEQ ID NO: 55213 - DNA, 122 bp, Homo sapiens
ttgtagttaaaaactggttgagaaagtttacttgtaattattccgcactttgatatctgtcgattatttctggagcaaaggcaggcttattcattaggtgcctttagctaatttttcctgct

SEQ ID NO: 55214 - DNA, 122 bp, Homo sapiens
aaggccgccgtctcctcggcctgacgctgcttctgcagcgcaatcttctcactaaatttgcgcggattggaagccgaggccgtggccgaaccaggcccgttcgcccccgacgtcgccatctt

SEQ ID NO: 55215 - DNA, 122 bp, Homo sapiens
cagctgctcaagcaacctacaatcccaggaagagaggggcacatgtgccaggcacttctgcgccaggcagagaagcccaggccaatgcaggagcttgccatctggcactggttgcacatggt

SEQ ID NO: 55216 - DNA, 122 bp, Homo sapiens
gtcctccttgaggtgcctcttgtttctgtcgcctccaggtctggagccggccagtgggagcgactcagctgcctggcaggctctgtggtgtccaggtgcctggagcttggggcctaggaggc

SEQ ID NO: 55217 - DNA, 122 bp, Homo sapiens
gaggaaggcgatccagcccaagtggagctgtccagcaatggacagacagggctgtccaggcgggcagagagctctccgccctagggagtctctgtaaaccgagtctgtgatgctccaaaaag

SEQ ID NO: 55218 - DNA, 122 bp, Homo sapiens
cgcagcctcccacgcactcagtggttcagacacacgaagacagcaatacagatgttacctcggctggtctcagcgcagcaccggcgctgggaaacgacgctgcctgggatggcgggcgcgtg

SEQ ID NO: 55219 - DNA, 122 bp, Homo sapiens
cgagtggaagctttgggggcccgcctgcacgcaaatacagcccctactcatgcctcagcccggcagggttggaactaggcttgcacccctttgcaggacttggggagtcagcctccttcagc

SEQ ID NO: 55220 - DNA, 122 bp, Homo sapiens
gggggagaggggcgacggcagggactctaggacggtggtggggcttccccggtgggtggtcggggaggagaacggaggcaagattcccagtcctcccgcttcgccgctggggatcggctcgg

SEQ ID NO: 55221 - DNA, 122 bp, Homo sapiens
actttgagagagagctgagaagcctcggaaccgtcgcccccgtgcccccaacccacctcccggatccgcgaaacctacaaaactggatcaccagccgtctcacgccactactgcctgtgcca

SEQ ID NO: 55222 - DNA, 122 bp, Homo sapiens
tttttatttttttgagatggggtcccactctgcagtgtacaatatcatagttcactgtaacgtgtatctcctgggctcaagcgatcctcccacctcagcctcctgagtagctagtcttcagt

SEQ ID NO: 55223 - DNA, 122 bp, Homo sapiens
tgagctggacaccactgtggggccgcgtcctgaattcttactgggttggtgaagattccacgtacacatttttgaggttttcctcattgatcaattccataaagctatagaagaagtcctga

SEQ ID NO: 55224 - DNA, 122 bp, Homo sapiens
acatgaaaccatcttactaaaagcgtcttaaaatgaccaattccagaatcaagcgtattccgttttcttcctgcatgatccctgggccctcccgcaggctgagcaagtctgtaaactgattc

SEQ ID NO: 55225 - DNA, 122 bp, Homo sapiens
tacctccaattacagctttgagaaacccagaatcctgttcactggaaggttgccgggtggcggctgacagcctcaaagtcgcaattgagtctgcgcaccggccattcaggatgggacgacct

SEQ ID NO: 55226 - DNA, 122 bp, Homo sapiens
attctacagaacccatttccactttcagctgcgtgggcccggcaggaacgcgctcttcctcgcgggccaggcaggcagccccttgggctggacgcaggtacctccccacagggcttctcaga

SEQ ID NO: 55227 - DNA, 122 bp, Homo sapiens
ccactgcctcacctgcaccccagcagcagtcccagcccaggctgcacccccgaggctggccgactggcaaccagagcagcccctggcatgaagccagggtggttgtggctgggccccagggc

SEQ ID NO: 55228 - DNA, 122 bp, Homo sapiens
atttcaagaggcataattgaattttaatccagtcccataggaagagcggtccccctgcgccgggagaaggaataaggaagacaaaaagatgtcagctgcttagatcacatgacttcctgctt

SEQ ID NO: 55229 - DNA, 122 bp, Homo sapiens
atttcttccttctctctatgaaaccaaattgctatcagttccactgtttttcaaaatcaacgacacatatttattatacaaatacagaagaagccccattatccacaggtgtggcaaaatct

SEQ ID NO: 55230 - DNA, 122 bp, Homo sapiens
gaccgctccaccctcgccagttacgagctgccgagccgcttcctaggctctctgcgaatacggacacgcatgccacccacaacaactttttaaaagaatcagacgtgtgaaggattctattc

SEQ ID NO: 55231 - DNA, 122 bp, Homo sapiens
gtctatgcagacagagggtggacttggcatttgaataaatgagatcatcacccaacagcccgattacaaaacgccattctttatcctttccaggatagaaagggcaaacatttcatactaat

SEQ ID NO: 55232 - DNA, 122 bp, Homo sapiens
cctctccgagccggcgctgatcgatgccgacacaccccggggaccctatcgcgactccatcgcgccatatcgcgacaccatcgtgccctgtcgagactccattttgtcacagcccttttcaa

SEQ ID NO: 55233 - DNA, 122 bp, Homo sapiens
caggaaatgggctgggggagaggcgtctactggttttttgtaacagcccttgtaaaacaacgtccacgtataactttggtaaatttggcagggcacgatggctcatacttgtaatcccagaa

SEQ ID NO: 55234 - DNA, 122 bp, Homo sapiens
tggaaggggggtggggggcgttagggaatcacgtgcttttgttgaccagtcgtaaattctcgctgatgacctcaagaggtaattcatgctctatggttacaaataatgacgatccgagaatc

SEQ ID NO: 55235 - DNA, 122 bp, Homo sapiens
cgcctgcccgaggagaacaccgcagctctgctaatcgagggacagccgcaacccaaagttcggcagctttccgcctgagcttcccctccctgagcgaggacactggagggaggcagagacgg

SEQ ID NO: 55236 - DNA, 122 bp, Homo sapiens
cccagagtcgggtttctcaaggtgggttccgctgagcctcagcgcccaaatcgtcggaggcgctggttaaaaacgcaggctctaaggcctccaccgagacctactgaatgataatctcctcg

SEQ ID NO: 55237 - DNA, 122 bp, Homo sapiens
gcattaactttttagctacatcttccatgcagttcctaaaccggacagtagatggctcctcgttccttgtctttcaaagagttggcactttgtagcagtaacagtgctggtttagaaaagca

SEQ ID NO: 55238 - DNA, 122 bp, Homo sapiens
gggcgcccagcataagtggagggcctcctctcactttgctgctgcctctgctcctgtgcacgctaccagtgttgccactctatgtcagagctgtgtctggaatagggttcttggtctcactg

SEQ ID NO: 55239 - DNA, 122 bp, Homo sapiens
ggccatcggcccggcttagccaaattgctttgacggctggggacagtgtggagacatcagcgcgagggcgatctaatggctcctaatttcattaggccggctctgaattaaaagtccggagt

SEQ ID NO: 55240 - DNA, 122 bp, Homo sapiens
cccaaaccccatccactccactgctgcccggaaagctggtcccgcccctagtcctcgggccgctaggtggcagcacagccccgctggaaggaggacaagctcccacccgtcgggcgcggcgc

SEQ ID NO: 55241 - DNA, 122 bp, Homo sapiens
gggacctcatatttctggagcacctaccatgcacacgggctgactgtgggctcccatggccggtgggacaaagggccccagctgctgtgtggtctgatgctgtgcaaatgaacatctgtgcg

SEQ ID NO: 55242 - DNA, 122 bp, Homo sapiens
gctgagtggctgtgctgtccagtgtgtcttccagctctgtctttagggcctccagctcctcgccgaggtctcgcttctgcttttcagccttgttcctggcggcccgctctgagtccaggtcc

SEQ ID NO: 55243 - DNA, 122 bp, Homo sapiens
gctctcacacccagggacacaaatgtccaaaaagctcagaagatgcacacccaggccaggcgtggtggctcatgtctgtaatcccagcactttgggagaccgaggtgggaggatcacttgag

SEQ ID NO: 55244 - DNA, 122 bp, Homo sapiens
gggggtggggaccgcagttcctaggcggttaatagtctgggagtggactctcaagaagtccgattctgagaaaggcagagagcctccaccccgtggttaaaacagacagggggcggggaggg

SEQ ID NO: 55245 - DNA, 122 bp, Homo sapiens
aatctctaacctcaggggcagtcagcagcatcagcacagcttcctggttcagcagctttccggcctgcagcacaggcaatgtggtttttgagttcacagtggaagcagcagatacagcagct

SEQ ID NO: 55246 - DNA, 122 bp, Homo sapiens
ctcctcagtccattcttgctaccatacccagaaggatctttttaaaatgtaaatcagattcgacttctgtttaaacacatcattgtttgcattgctttcacctgagccacaatgaccttgat

SEQ ID NO: 55247 - DNA, 122 bp, Homo sapiens
catcactactttaatccctgccccagtgttctggttccccctttcctgcatgaggcagtacgagtaccctggcctggctttgggttctacacggtctgactttagcctgccttggtctttgt

SEQ ID NO: 55248 - DNA, 122 bp, Homo sapiens
ccacccggctcccctcttaggaggacccaagcgccccatgagcctgtgactaaatatggccggcccttcccatcgtcgaggagttcttggccaaggtgctgggctctggaaatgggcacatt

SEQ ID NO: 55249 - DNA, 122 bp, Homo sapiens
gcagatatccctggcaggagtcctttgagaatgttgctgtgtgcctgccattacgctgcccgaggtgtggagaccataccagatttagaagcttgtcatccttgagggcccatctggagttc

SEQ ID NO: 55250 - DNA, 122 bp, Homo sapiens
gtcagcgaggtgagcgagggcgtccgggcctggggtgaccggggctatgttcgctgggcgcgggaggtggggtgggggcggcagactccaccccggagataacccccaggaagtcatgcgaa

SEQ ID NO: 55251 - DNA, 122 bp, Homo sapiens
aaccaaacaccagtgcctgggcccttccaggccccccacgggccgtagaccctgactccccggcacacactggcctgggccaggccagcactggatgtgggtcttcaaactgcggctcccag

SEQ ID NO: 55252 - DNA, 122 bp, Homo sapiens
tattaaaatggagattatgttttccccagggtctcccagcaagctaaatatatctagagtcgggtgggctgttttctgaattttgtggcagtcaaagctttcttcagtttaagaatttcagg

SEQ ID NO: 55253 - DNA, 122 bp, Homo sapiens
cagagagctgggagggaggcaccccggggggcggggcgtgggagactgtattcgggggcgcgagctgccccaggtgagccgtggctcaggtccggagcgcggtcgggacacagcgcctctag

SEQ ID NO: 55254 - DNA, 122 bp, Homo sapiens
tccaggaagatggctattgaaaggcagggggtggggaggagggacgagggtgtggagacgcgcctgtttcttgcaggaaacctgttgccaacatagtcggaagccaaggtaaacacaactca

SEQ ID NO: 55255 - DNA, 122 bp, Homo sapiens
ttctttattctgcagagtggagactgctgcacggactctggaaccatgaacatatttgatcgaaagatcaactttgatgcgcttttaaaattttctcatatgtaagtgttttgaccttgact

SEQ ID NO: 55256 - DNA, 122 bp, Homo sapiens
ctgccatgaacagatattccttccccatagctgcagagcaggcacagggctgtttttgcccgccagtatgtccccaccgtctagcccagagcggggccagcggccggctcctacccacactt

SEQ ID NO: 55257 - DNA, 122 bp, Homo sapiens
gaccgggggctgccgctggcctgggcgtctagcccttggcctgcagtcctgccttccacacggcatctcctatggctacaggttggcatcctcggggtgccctcgggccgctggtgcccaat

SEQ ID NO: 55258 - DNA, 122 bp, Homo sapiens
tcttttgtgttatgtggagcaatgccatctctcaccccaaatcgtgtatctgtcattctacgtactttttacccccagcatttatgatgtaaatctctttctctatggattatatctgttta

SEQ ID NO: 55259 - DNA, 122 bp, Homo sapiens
gcatagggcttcgtctgcatcaaaagatactctccccatcttctatagccttaagttttgcgaaggtaagtttctccccgcttgaaagcgcccccagggacaagaattcatcttgaccaagc

SEQ ID NO: 55260 - DNA, 122 bp, Homo sapiens
tcctccctgcggctccagtccaggtcttggagccggccctcgaggggaatgtccgggactcgggtcggtacctttttggtctgggaatttccagtgtgcagaaaaaaaatccacaaatctag

SEQ ID NO: 55261 - DNA, 122 bp, Homo sapiens
gtggactggttgtccagctgggggtaacttgaaaccagccccggtggagtattcacaccacgcgcatgtgcaaaacacgcaccccaggcttcccctcactaggtccggctgctaaacactgc

SEQ ID NO: 55262 - DNA, 122 bp, Homo sapiens
tgaccaatatttgtccatgaagatttcagaaatctgctactaaaatccccaccctacacccgtactggccacatggcgtggttggtaagtgtgtgtgctgttcaccacattaggatttgctg

SEQ ID NO: 55263 - DNA, 122 bp, Homo sapiens
cgcttcccacctgcaccctggtgggcggtccctccaagggctgcctggctgtcaaggccacgtgaactgcatctcctattctgaaaccatttccagatcagcacagccctcagcgtgactgg

SEQ ID NO: 55264 - DNA, 122 bp, Homo sapiens
aaggtccaccatctcccccagccactactaagtttagtttagacagcttctatgtgtcctcggagatagataagcccctcaaaaggggcgcactgtgaccactgctacctcccctaggaagc

SEQ ID NO: 55265 - DNA, 122 bp, Homo sapiens
gacatatggacaggggtctcctcccatcttgggagactgaaatgcataaagcaaagcacacgattctcctcccccccccttctcaatatggatgcactacggtgatgaaatgtctcatgttt

SEQ ID NO: 55266 - DNA, 122 bp, Homo sapiens
ttcattaactatgatgtttacaagcaattaacttttgctgaagtacagagaacacatatacgcaagtagtgggaaacaagtctaggaagaaattatggcttagtcatggagaaactgcacta

SEQ ID NO: 55267 - DNA, 122 bp, Homo sapiens
gcctgcccgtctctccacccaggccttgcacctgtgtctgctgtgttggtctggtagcttcggctgctgtaagtgaccagttgtagttgcctgttgagttggtccagccctgggctgacaag

SEQ ID NO: 55268 - DNA, 122 bp, Homo sapiens
cctaacggtcacaggtttcttagcttctcacttgggtggggtttggatgtgcaaggctgccgacccccatcgtggttgagcgcccgtgcaggcgccacccacccacccacagcacctcgctc

SEQ ID NO: 55269 - DNA, 122 bp, Homo sapiens
ttattatttgactcccctagtgaaatgtaagcttcacaaggaagggattctgtcttagaacggtgcctggaatacaacagacgctcaataagtgggtgtcgaataaataaatgtcccacgct

SEQ ID NO: 55270 - DNA, 122 bp, Homo sapiens
gcaagctgcaagcgatctgcgctcggcatcaacttccgggatagaagctgctgggaggagcggcggggcgggcttgtctgctctaggccctcctctcggtggtagggggacgccgcagcagg

SEQ ID NO: 55271 - DNA, 122 bp, Homo sapiens
gcgtggggggcagtgatgaggtgcggaggagaccacgggtggtcctgcgttggcccactccgctgttgctcttcctccaacttcgcttgcttggtggcggcatccggcccctgggcagctcg

SEQ ID NO: 55272 - DNA, 122 bp, Homo sapiens
ctcaaatgatctacccaccttggcctcccaaagtgctgggattacaggcatgagccactgcgtccagctgaaattagttttgatcatggtgaaatacacatgatgtaaaattgatcgtctga

SEQ ID NO: 55273 - DNA, 122 bp, Homo sapiens
atgtggaagaagggggtcgccaggaggttttcttaagaactcaaaacaagcgccccccaccgcacacgcacacacacacacacacacacacacaccccttcccttgggtggtctgaagagtc

SEQ ID NO: 55274 - DNA, 122 bp, Homo sapiens
tcagccaggaagactgcctgtcctgctcctcttcctcctcttccatcgaagtcaccgtgccgctgtgagagccacaagagcgtgtgccccagaagtggtccagacagacgctcgagacccgg

SEQ ID NO: 55275 - DNA, 122 bp, Homo sapiens
tttgcaagcccaaacatcccagcccagaggggaggcaagtccttggagacagtttaaatccgggctctgcagcttgctcactgggtggcctcaggcccacgcatcagttgggttcccaccag

SEQ ID NO: 55276 - DNA, 122 bp, Homo sapiens
cggagcctggccccgcatctccgcggccgccgcctcctcccaccactgggggaccggcgccgccgccgccaagtgctgcaatggctgccgggcctggccccaccactcctctcagctccgtc

SEQ ID NO: 55277 - DNA, 122 bp, Homo sapiens
ttcccatctctgtgctcagcggtgcctcgcacacagctttgtgcctgcaggactcaaacccgccctctggactgaggctaagagctggcattcctagctgtttctagaaagacagtctgggt

SEQ ID NO: 55278 - DNA, 122 bp, Homo sapiens
ctccggcctgccctacgaaggacacaaagttggccccgggaccctggccctggctgtggacgccctggccggggagtttctcggccccggccgcgaatagcagcagcagatgcagcgccgcc

SEQ ID NO: 55279 - DNA, 122 bp, Homo sapiens
ccaggagaggctggacattctgtggcttggatggtgttcatgctgtggtctgtgctcagacgtgattatgaagggggttttgatttgtcctgaccctcacagtcccagagctgatgcagatg

SEQ ID NO: 55280 - DNA, 122 bp, Homo sapiens
agtagggtgtaaacatgcagggagctgaaccctgaaaacatttggcagtgtgtgaggaggcggggcatcgggacgagagcccagggcctggccagggcaggtgctgggggcgttggcaccag

SEQ ID NO: 55281 - DNA, 122 bp, Homo sapiens
gctggatctggatccggatcaggggcataggaattggggcctcctgtgttctgggtgtgtcgtgtaacctggagctgggcgttgcccggtttgtgcctcagtttccctgtattgtaggggac

SEQ ID NO: 55282 - DNA, 122 bp, Homo sapiens
tcacacacgcgcgcacattccacagtcacacttcaacgccgacatacacagtcccctttacgcgtgcatacaagagcacactcctgtgcgcacactctcacaggcacactcacacgtgcaca

SEQ ID NO: 55283 - DNA, 122 bp, Homo sapiens
ggcagaatcttcttcagccaaagtgagcgtggccgtctcttctctgggcgcttccaggtgcgttggggcccctgcaccctccacgtcagtgccctggctccgtggccctgtcggtgctctgg

SEQ ID NO: 55284 - DNA, 122 bp, Homo sapiens
cctcctccattttccccgccttctcaaccgcctcctcaggagaggctcctcccccacctccggagatccagcggaccccagagccggagggcaaagaagtttctcgaacctgggccatcaga

SEQ ID NO: 55285 - DNA, 122 bp, Homo sapiens
tagctggagttatttttaaagaggagaggtgaggcttgccgtgcaaagctggaaagagggcgtttgtttgcagagcagagctgacatcaaagtgtagattactgctcagtggctaggcactt

SEQ ID NO: 55286 - DNA, 122 bp, Homo sapiens
gttgccgattcggcctggccagggtccactgggccttcaagttctttgactcgcagggggcgcggagccggccgtcccgcgtgtctgacttccgcgagctggggtcccgctcgtgggaggac

SEQ ID NO: 55287 - DNA, 122 bp, Homo sapiens
tcgtcccagactgctagatactaaggtgaggacccctagtggggacgtagggaccagcgacgctagaacagttacgtccagaagcgtaccacccctgccgtcagcccggaggccacgggctg

SEQ ID NO: 55288 - DNA, 122 bp, Homo sapiens
ttatatgccttgtccaaaggtgtacacaagtatgtggcagagttgtgattccacgattaacgtgccgtctccaccccacctcatgcactgagaagtcctagttccattatcctgaaattatt

SEQ ID NO: 55289 - DNA, 122 bp, Homo sapiens
tgagtcacctagtaggggcggcggcggccccctcccctcgcgggtagggcgagggccctccgccacaggggcctgggagcactcagcaacctcgagccaatttagagggcaggaccagggag

SEQ ID NO: 55290 - DNA, 122 bp, Homo sapiens
gtcatcgcaaggcggaagagtttaaataccatacctcaagatctccctccagccctgacacgcgactccgcggccctttcagcgtcggtcgcctaggagacaagcgccacttccggcagcga

SEQ ID NO: 55291 - DNA, 122 bp, Homo sapiens
gtggactcaggcggggacagcgttgatggagcgtctgctccgcccaggcaccgttcagggcgaagcctggccttgaggggcttgtatagtgggagtcacaaaggactcgccaacaagacaac

SEQ ID NO: 55292 - DNA, 122 bp, Homo sapiens
atgccatcaactagagtgaacctagtgagtggttacccctggtatttaagagtacacacacgtgttcatgtacacacacccctgcccccatacatactttcttgtcaaagcactagaggaaa

SEQ ID NO: 55293 - DNA, 122 bp, Homo sapiens
taacacagattgataccacaaaggcctttttccattgctgtaaaaaggagaataatttttcgcagtctagtaaggattagagtttgggaaactgattgaggagttgattgaagcaagagggc

SEQ ID NO: 55294 - DNA, 122 bp, Homo sapiens
aggcgggcttcctagactctaaaaggtgcaacaacctccggcttgcaaaaccgcttgcaacgggattgcagaacgtcacgtgctttccttcgctctcttagtaatttaaatggtttcttggc

SEQ ID NO: 55295 - DNA, 122 bp, Homo sapiens
cgcggacacggcggggcgggcgggggtggcagcgtccgaggcggcgcgggccctttaaggcggccggcctcgttagcatacatttgcatggccccgccccgccgcttgaggctgccgcgcgg

SEQ ID NO: 55296 - DNA, 122 bp, Homo sapiens
tgtcccccacagtccttcagggagatccttaaccctgagaagaataggaccatcagtagtcgagctagaagggagaggtaaaggagagacctgaaaaattcagcctagctgaatagaaaaaa

SEQ ID NO: 55297 - DNA, 122 bp, Homo sapiens
agcctaccaggatagaagctgcacccttctatccctgtgttctgagctggctaaggacctcggtcttgggacactcccaaagcatggaggccctatgatcagccaaagaggcagtcaggttc

SEQ ID NO: 55298 - DNA, 122 bp, Homo sapiens
ctctcattgcggactcgcagaagagtcacctgattttcccccagcccaactatggggacacgctcatcagccaggagagctgtgagaaaagcgagccactcttgatagctgaagactcagct

SEQ ID NO: 55299 - DNA, 122 bp, Homo sapiens
gtgctaccaccacgaggaccggcagatgaacaccaactggcccgcctcggtgcaggtcagcgtgaacgccacgcccctcaccattgagcgcggcgacaacaagacctcccacaagcccctgc

SEQ ID NO: 55300 - DNA, 122 bp, Homo sapiens
ttttctctgtgtgtgtgtatgtctctttctctttatccacacccaccccatccccacagccgcaatacacacaccttggatgctccctgatgatgtctggttctttcagtgaggcaagccta

SEQ ID NO: 55301 - DNA, 122 bp, Homo sapiens
gactgcaagaccctgttgtacagacccaggcagcgcgaagcgccacccgctcatgagggacggtcaagcatttgtgatgatgcttaagacattttggatcgtgatgcacaaaatttcaagac

SEQ ID NO: 55302 - DNA, 122 bp, Homo sapiens
ctctcccggccccttccgtttagtaggagccgcacaatgaggggtggggcgggcttccggcgctcccaccgcgagccgacgggaaatggagtccgctggccctgcgccgccgcctcgctcgc

SEQ ID NO: 55303 - DNA, 122 bp, Homo sapiens
actttgccatattgcttatatacatagggttactctccactatgaactctttcatgtattcgaaaggaacgggaacacttgaaggctttaccacattgttgacatgcatagggtttctctcc

SEQ ID NO: 55304 - DNA, 122 bp, Homo sapiens
cctgattgtaaaagctgccatcaggcaaggagaaagcagaaccggagcccagcagggacacgtgggtgctcccctctgaggttggccagagccctgcagacagacccctcctgagggctgtt

SEQ ID NO: 55305 - DNA, 122 bp, Homo sapiens
gaagtctcgcggtatcggaaaatgcgcggcgctcacagccacacctgacgagatggagggcgcaggcgcatccacggctttcagattgggcgactgacttcaaaggggggggcaaacaggga

SEQ ID NO: 55306 - DNA, 122 bp, Homo sapiens
taaaaagaagggtgggggcggggaaccctggccgactcaggacgccacgggaggaagccacgcaaaatagcaaaccgggatcctagaggggcggggcccacctcagcgcgcaggcgcaacca

SEQ ID NO: 55307 - DNA, 122 bp, Homo sapiens
gcccaccccctttagcctccgtgctctgggcaggaaagctcaacctggccccaaagaaatcgggggcaacgacttcatttccaatacagccacttgcccagtgccatggaagtggccctatg

SEQ ID NO: 55308 - DNA, 122 bp, Homo sapiens
actcttcaaaaaggaagcaggttttttggagagggtgtgtgtgtgagggcggggcgggggcgagtccttcaatgtggttttgaaattaaggtccatgttctgtgataataagctatgtatca

SEQ ID NO: 55309 - DNA, 122 bp, Homo sapiens
tgagcgcggtgtaggtgaagctgagcagcagcagcaggggcagctggtactggatggccacgaggaaggggtctgcgatgaacggcgggtacgggaacctcttgatggtcaccgtcagtctc

SEQ ID NO: 55310 - DNA, 122 bp, Homo sapiens
accacagggacggcccaggtggcaggatgtcctggtctggccttctccatggcctcaacacgtccctaacttgtggtaagtgggggacttgggcttcagggacgaggctagagggggagggt

SEQ ID NO: 55311 - DNA, 122 bp, Homo sapiens
catcgacacagtgatggcgtggttcacagaggaggacctggatctggtcacactctacttcggggagccggactccacgggccacaggtacggccccgagtccccggagaggagggagatgg

SEQ ID NO: 55312 - DNA, 122 bp, Homo sapiens
cctgtctgtagaatgcctccacttggtattttaacgacttgactcttcaagaaagagcgacgtagaataaataccagaaaggacggtgggcgggggaggggggagcgtgggtagaagcggtg

SEQ ID NO: 55313 - DNA, 122 bp, Homo sapiens
tatcacagtcctggagacagacacaggaactacaactctctccagctaaaaatttcctcccgcggttggttatcctctgtttatttttgaagcattcaaaggccacgctaacagaacagact

SEQ ID NO: 55314 - DNA, 122 bp, Homo sapiens
gggccagctcccgccgctcacggaggcccacgaaccagcccacgctgaagccggacaccacggctcccaccacgaaggccgccaccgacgacgttaccagcaggttcaccgacaccagcccc

SEQ ID NO: 55315 - DNA, 122 bp, Homo sapiens
gcacctgacactgcctgaaggctttctctgggttcagggctgtgcttggtgaactggccccgggagcagccctcagccaatgataactaggactccttagataaactccgcagctttctcac

SEQ ID NO: 55316 - DNA, 122 bp, Homo sapiens
caggtttatattgtgcacattttaactggaacctgttgtctaacatactagttattctaacggcaatgacttaaccagatagcaaagtatagaagttcctcacaggccagtgggttctataa

SEQ ID NO: 55317 - DNA, 122 bp, Homo sapiens
gggactgtgagaaacaaggttatagcaagctaccagctggaaactaacacaagggtgacacgcggaaatgatcaactgttggggggggaatctggtcccctcagagatgccagccctggctc

SEQ ID NO: 55318 - DNA, 122 bp, Homo sapiens
gacagcctgtgagacccatgagagctcggagaccctgctttcggagcataggtggggacccgaggggtggggccgtgagcagggtctcaggccagccgtggagaaggcggctgcctctgcgg

SEQ ID NO: 55319 - DNA, 122 bp, Homo sapiens
gggcttcaccaagaaggggcggccgcggaagggccccaagacccgggagaaccagcaggacgtgcatttcatgaagcgctaccccaaggggcagccggagcttcagaagcccttcaagtaca

SEQ ID NO: 55320 - DNA, 122 bp, Homo sapiens
cggcggcggcgcgggaggttcggagcgggagctcgggctcgcggacggtatggaggactacgagcaggagctgtgcggcgtcgaggatgatttccacaaccagttcgcggccgagctggagg

SEQ ID NO: 55321 - DNA, 122 bp, Homo sapiens
accaggggggccaggaagggtccccatgcacagttacggccaactgaccttcagcaaaggcgccaaggacacacgacggggaaaggggcatcctcaataggtggtgctgggaaaagtggagg

SEQ ID NO: 55322 - DNA, 122 bp, Homo sapiens
cccacctcacagtcaggaggaagattccaaaaaatcgtgcatgggagtcagtgtccgctccgggaaggtgcccagtgaatgctgaagggtgaggcggcagggagggctgcagagggtaagtc

SEQ ID NO: 55323 - DNA, 122 bp, Homo sapiens
cctctgggaagaggacggaggcctcggggctcctacactaggcaaggctacggaggagggcggcaggaaacggaacacggaggcctttaccggggttcggggcccagaatcagcagagggga

SEQ ID NO: 55324 - DNA, 122 bp, Homo sapiens
gagcagatggtcgtgtgtctggcctgtgggtcagtctctcccctaaagcctggcccaggacgcgactctgaagacgggtttcgtgtggattttcctctctgcgcgggacttttcctctgcag

SEQ ID NO: 55325 - DNA, 122 bp, Homo sapiens
cgagcgccgctgctccctgcgacaccactgcgctgccgacacacctgcatcgtggatgcacgcgcgtcacggcagcagtcgctgcaccgaccccaagatcctcaaggtagggcccccagccc

SEQ ID NO: 55326 - DNA, 122 bp, Homo sapiens
gagagaaaaatgcacccactacaaaacggacgagcggagggttagacctttgccaggtagcgctcaaaatccgctaagactactcccaccgaaactcggtagcgcagttgtctttccgcagc

SEQ ID NO: 55327 - DNA, 122 bp, Homo sapiens
catccatcctgggagacctacaggtgccttaaattctccctaaattgttccagaagacatcgcctgtgtcccttagcccggtcttcttgactactctttaggtttcagcctttttttttttt

SEQ ID NO: 55328 - DNA, 122 bp, Homo sapiens
gaaacaaagttgcccgaggtaacacagcgagtgggccaagtagagactggaacccgagtgcgcacctccgagtcgctgccgggcagggagcgcgcctcgccgtctctcttgtcttctggccc

SEQ ID NO: 55329 - DNA, 122 bp, Homo sapiens
gcatggaaggtcagggcctggctggactcagtcagacaaggtgatgctcagcccagccagcgtgggtcccgctcgcgacctgtccccgcgtccactcagacccgccagcgtgggtcccgctc

SEQ ID NO: 55330 - DNA, 122 bp, Homo sapiens
cggcttctccctcccacccccaggcgaatctccgggctcccacggggtgcccccgatccccggggtctaggtcaaccagacaaaattattttaaatgggaagatttgaattccattgaattc

SEQ ID NO: 55331 - DNA, 122 bp, Homo sapiens
atgtctgctgccctgggggccgaatcctgcctgtgcatgacctgctagggcccatgcctccggtggatggaatgaagcaaggatgggggctgcctgcagagctgtgtcactcacttgtattc

SEQ ID NO: 55332 - DNA, 122 bp, Homo sapiens
tcaaacatctagttgtgaggacaccattgcaggattattgtccaccgagttagacacacacggcctgtagtgaactgctttctgcacggggtgaaacctgccccatccctgccagagaccta

SEQ ID NO: 55333 - DNA, 122 bp, Homo sapiens
agtcatccagagtggagcctctcttctggcgtccctgacgggccttccagagcaacgtgccgccgaagcgtaatagcccgatgggttcatcttgcccgctgcccagaaagccaaaagcgcgg

SEQ ID NO: 55334 - DNA, 122 bp, Homo sapiens
tgctgctcgcacaactgagaaaacactgttgctttaccccctctggctctgtagcagccacgcacaaatcatagaactataaacatatgctaattacacaacctatgtaggcaatcaatatt

SEQ ID NO: 55335 - DNA, 122 bp, Homo sapiens
gtaatttgatgctattctgtgggactttaagacagagagcctctgctagcagaactggggcgggcacacagggaactggagtgggcccgtaggaaactggagtgggcacacggggaactggg

SEQ ID NO: 55336 - DNA, 122 bp, Homo sapiens
tggccccgcgcctccgccgccgacgcagctagctggtttttaaattgctaatctcattaacggcgcgcccgtccgagaggcgaggctggtaaatggatgacggcgagccccaccccgcccga

SEQ ID NO: 55337 - DNA, 122 bp, Homo sapiens
cgccaattcccgcaggccccgccttccccggggcggggcttcatggagccgggggactgtcggctgagctgcagcaagtgtgccatttagacttggggtttaggggagttgattaccttttc

SEQ ID NO: 55338 - DNA, 122 bp, Homo sapiens
aaaagatgagtgctctgggctccttctccttcaacaaatatttaaaataaccccagagggcggagactccacgaagagacaggttaagttctgaattagagggcatggggaccaataggaca

SEQ ID NO: 55339 - DNA, 122 bp, Homo sapiens
gtgagcggagctgagtggaagggtgagctgctttttgtgtctgtctggtgatattcagcacgctgtttaaatttatatctggaaaaaaattctgtttgatgatagttagcaatgttttgtgc

SEQ ID NO: 55340 - DNA, 122 bp, Homo sapiens
agggggaaggcctcggccgactcgtcctcggcgccgttagggtacaccttcactgggcgccgcttcttgcccaccggcttgccccagcggaagtgctccatggagtaggagcgcttgccctc

SEQ ID NO: 55341 - DNA, 122 bp, Homo sapiens
cccgggtcccgcgcgagctttcccgggataagtagctttagcgatcgggagacagccgggcgctgcaaggtaagggctggctgcacggcccggggcgcggggcgtggggcgctgggcgcggg

SEQ ID NO: 55342 - DNA, 122 bp, Homo sapiens
taggcacctgctgtgtgctgagcgccggtggagcatgtggggagacctcagtggagccgacgggtgcttcgggggtgatcagggctggtggggaggagtcgtccggctggaaaggggtggcc

SEQ ID NO: 55343 - DNA, 122 bp, Homo sapiens
tttattcttaatttggggtccgacatgcttagagcacctattttctctttcctgtgggcacgttggtgcaatatctgcaaagactcctttttcagggaggattgctggtcgcggggaggcgg

SEQ ID NO: 55344 - DNA, 122 bp, Homo sapiens
ccccaggaccaatcgtattggccagtggggggcggggcctcgttgccagctccagaccggcgctatgggcactccttttgtcaaatgagagacgcagcagggcggcccctgagccgcggttt

SEQ ID NO: 55345 - DNA, 122 bp, Homo sapiens
ttattcattagaggccagacacccaggacccaaataacctaataatggctcatttgcctccgccccctcccctacatctgggggctgggattctgggaatctggaggggtgtgggaggcagg

SEQ ID NO: 55346 - DNA, 122 bp, Homo sapiens
ggctcctcttcaaggtcacagcacaggtgctccagaggtcctggtactgttctccatggccgctcttcctggcttcccctttccacctggggctctgctccatccagctgtacattcattga

SEQ ID NO: 55347 - DNA, 122 bp, Homo sapiens
gtactttgcaaattcagaatttcaaactgcatgttctttttctaaattgcccacagtactcgaggttcctgaagctaaggcagctgtttcagaggaggggggaggaggtagcagatgtcaag

SEQ ID NO: 55348 - DNA, 122 bp, Homo sapiens
actgcgagtcgggtttgggtttctcctccctgcattccacagctgctctggtcatcgcaacgtgtttattgatcactgaagaatctcaagttttgagacgaggaagaaacacccattaggtc

SEQ ID NO: 55349 - DNA, 122 bp, Homo sapiens
cagcggcccggctgtgctcctcgtggagcagaagggcggcgggcagcagcagcagccagacgctgagccggggccccatggtggcgcgcccgaggcggcgagggacggctgcccggcgtgcg

SEQ ID NO: 55350 - DNA, 122 bp, Homo sapiens
ggcaatagtgaaggtgggttagaaaggaggaaagactggagagagataaggagttagattcggaacccctacaagagaaaattaaggtctgaatttggggatggggtcgcagagggcagagg

SEQ ID NO: 55351 - DNA, 122 bp, Homo sapiens
gtccctgcccctgcccggtcatccatctccctcccggtcggccagccgagacttcaaaggcgcctcctccggccgggcctgccaaaccccgacgcagcctggatgtgggccgggggcgctcc

SEQ ID NO: 55352 - DNA, 122 bp, Homo sapiens
cgtccagcttctcttcttcctcctcctcctgcaggatacccaagatgtaggctccataaacggctcggtccactcccagtgcctccaaccgtccgtccagccaggagccaaagccgccgcct

SEQ ID NO: 55353 - DNA, 122 bp, Homo sapiens
cccttactgtattcctgaagcttcttatcatcttgcagaactcgtccctggtaaatgagccgttgtttttcagatgggatgctgacagaggcagcaatgtgctccttaaactcttttacatt

SEQ ID NO: 55354 - DNA, 122 bp, Homo sapiens
ccccacagtgggcgctgagtttacggaatcggtcttcatgatcaaaacccaccgggaggccgtctgcggaccgcgcaccttcgcagcgtgctcctcagcggaccccagccttctcaattccc

SEQ ID NO: 55355 - DNA, 122 bp, Homo sapiens
ttaccgcaccttctagaatttccacttcctttactctaggccattgtcatgcccaagctccgaggagccatgtcagtagatgattaggacctgttccgggtctccttcctagagcacaatcc

SEQ ID NO: 55356 - DNA, 122 bp, Homo sapiens
tgcaccggaggggactgagggctgagctgcagactcgactcgcagactaggtcccgtcaccgccatgtccagccggttccaaggagccccctccccagtctcggtacgccctgccccccaca

SEQ ID NO: 55357 - DNA, 122 bp, Homo sapiens
actggagaaatgcaagctgcgctggagatggaattgttcgcagcggcacacaagtttttgcggcaaaggagagagctctaaaagaggaaatacaactagttcatgttaccatgaaccagcgc

SEQ ID NO: 55358 - DNA, 122 bp, Homo sapiens
tggtggccagatgcctcgacaccccataggctgggtgaaggtggggcaggagttccaaggcgtggagacggcccctgagtgcccaggggcctcctgctgcaggtgggcagagctggaggctc

SEQ ID NO: 55359 - DNA, 122 bp, Homo sapiens
ggcccaggccgggaggcggcaaggagctgccgggggcggctggccgggggatcggggggccggaagagttttcgcctctccccagctctgaaagcgccgcgctgtctcgtcaactgggtgcc

SEQ ID NO: 55360 - DNA, 122 bp, Homo sapiens
ggcctcagggcctcggctgctctgggtcctgcctggagaccccaaggctgcctctgtggacggagggagagagtattttttaaagagaaaattcatattaggatatataatataaagaattt

SEQ ID NO: 55361 - DNA, 122 bp, Homo sapiens
aacatttctcccaagctctctgggccaaatagcatcagaaaacagtaatacaggtatgtacgagggcctggggtaaagtggcctgggctgaagttcatctgagcattggcctggttctataa

SEQ ID NO: 55362 - DNA, 122 bp, Homo sapiens
acatgcagaaagatcttgggagggactgcacaactctgtacagagacagcatctgctttgcgtcaagatgcttgggctctcaatggtgtacaacctgcctggctctactgggccactggaca

SEQ ID NO: 55363 - DNA, 122 bp, Homo sapiens
gcggccgcggcttttgtgcttgttgaccgggaaagggtgatcccctccggccgggacgggcgggaccacacgtgtttcggactcacctagatgagagtagaggcctctgtgcccctcctccg

SEQ ID NO: 55364 - DNA, 122 bp, Homo sapiens
taataataatttaaaaaaaccctgaaagtgaaatataattaccaggttaaaaaaaaaatgcgcccagtttcgagagcctatcacagctcacgtctgggcgcgcagtacccccccgacactgc

SEQ ID NO: 55365 - DNA, 122 bp, Homo sapiens
acatgctcctctcccttagcggcggcagcagcgacggctcgggctcctcccctcacacttcggcagcccggcctccgcccgcccagtccccgcgggcctcaaacaagcctctggcgggtgcg

SEQ ID NO: 55366 - DNA, 122 bp, Homo sapiens
accctgcagttccacgctgcaactccactcctagctgtacacccaagagactgaaacttacgtccacacgcaggcctgcatacgagcgtccagggcagcacgactcagtggccaaaaggcag

SEQ ID NO: 55367 - DNA, 122 bp, Homo sapiens
cttattctccccagttcactctttctccccgggtgattgagtgtggatcaaggactggaacgtagcccctgtgtgcccccactggaaagtaccccagaccgtcatcctgaccactcccaccg

SEQ ID NO: 55368 - DNA, 122 bp, Homo sapiens
ctgacttcttgggtgggggccaagaattccccaggtagtgggttgtcggctcattcattccgagaggtgggtatgtaaggttcaggtcaggggccgagtagtcaaacacctaggtctgaatc

SEQ ID NO: 55369 - DNA, 122 bp, Homo sapiens
tttcccggcttctgggtgtcccggtgtcctctctagggctcccgtgaatagtgcgggtcacggtgcaggcggcagagcgacagaagttgtggcagagggacccggggcctctcggagtagga

SEQ ID NO: 55370 - DNA, 122 bp, Homo sapiens
tattttgaaaaaagtcagggaaatgtgcttcccagttggcattttagttggccaccctttcggggttgggcggtgtgtgcggctatgggtccatctctcctctcacacattctcgaggtttg

SEQ ID NO: 55371 - DNA, 122 bp, Homo sapiens
tgatggtattccaacacaaagtgtctggggaatcctctgaatggggagaaagggaattaacggttgcacagtggttcaaagcatgagtggcgagcactggaaccaattccaccacttctgag

SEQ ID NO: 55372 - DNA, 122 bp, Homo sapiens
gaagaagccggccacgtcgcagattataagggcggagctgacgtcgcagccagggcagggcgatactcgagctagctctcgagatcagcgagaggttacttccggggcggcaccgagaagct

SEQ ID NO: 55373 - DNA, 122 bp, Homo sapiens
ggtgtgagaccctggccccggccccgcggtcagcccagtcccccgagccccgccccgccccgaccaacccgcggggattttggcctcaactgaaaatgaaaccgggtaaacgcgcctggggc

SEQ ID NO: 55374 - DNA, 122 bp, Homo sapiens
gtggggagttgcatgccaactttactgacactaataagttctgataaccaaggccaggtgcggtggctcacgcctgtaatcccaacacttttggaggattgcttgagcccaggcattgaaga

SEQ ID NO: 55375 - DNA, 122 bp, Homo sapiens
gaacctctattttgcatcatatcatttctgtccataattgtactgaaatagaaaagtgaccgctcttgctcttggtaaaatatagagtggtcagtagccttatgcacctaattcaaaaggtg

SEQ ID NO: 55376 - DNA, 122 bp, Homo sapiens
ttgtccagcgcgttttgcttgatttttaaatctagatgcatttaggcgggcgtacacgttcggatttgtcacaggccacctaactctattggtctcacacacgtgtgccacctgtctgaccc

SEQ ID NO: 55377 - DNA, 122 bp, Homo sapiens
accccgcggggctgggagagccgcggtgagcctagggggctgtgcgggggccgctctggacgctgcagccaagtgtcccaggaaagcagcgcccagggccccacagctccctgtgcccggac

SEQ ID NO: 55378 - DNA, 122 bp, Homo sapiens
caaaaggacggctaggttagcgcacggcagcccacccgcacggctgtattagtgcacggacggctgctaaggatggctatattagtacacggctgtattatgcactcgacggggtcctggat

SEQ ID NO: 55379 - DNA, 122 bp, Homo sapiens
cggctcaggtcaaggggcggggcctaacgcggatgggcggggcaggcgtcagcttgcattcgctcaccgtccagcaccgccctctctgcgcgccacttagactggaaggcggggccacagaa

SEQ ID NO: 55380 - DNA, 122 bp, Homo sapiens
cccagccctcacgccaccggggccggcggctaggcggccccgcccccgggctaggcagggcgcctgggggcttcccagccacaggccattcacgtcaacctccaggcatcctccgcggcggg

SEQ ID NO: 55381 - DNA, 122 bp, Homo sapiens
aacctcttctctcccgcttctctcgctgtgaagatggcgctctccagggtgtgctgggctcggtcggctgtgtggggctcggcagtcacccctggacattttgtcacccggaggctgcaact

SEQ ID NO: 55382 - DNA, 122 bp, Homo sapiens
tcctgtgtgtctttttatgcactgttctccttagtgcaaagccctgcagatatgcttggccgaaaagtctcagtggtttcaacttccagattttgttcccgcgtccggtcggaaaatcacct

SEQ ID NO: 55383 - DNA, 122 bp, Homo sapiens
cagctcataaaggtagtgcggacccaaagagtgagcagtagcaagacttaccgcaaagagcgaaagaacgaagcttccacggtacggaaagggaccctaccaggttgccactgctggctctg

SEQ ID NO: 55384 - DNA, 122 bp, Homo sapiens
gctccatccattccgctcccagggcggttgtcggccaggaccgtgagctgtcaggtcccccgcgggatccttcctggagcttacactatagtaggaggcagccagtacttgcaagcacgggg

SEQ ID NO: 55385 - DNA, 122 bp, Homo sapiens
cccaaatccagaactgctcgcagaggttccaggtcatcaccagagcccaagaccaagtctcgtacaccacctcgacgtcgcagctctcgatcatctccggagctaacaaggaaggccagact

SEQ ID NO: 55386 - DNA, 122 bp, Homo sapiens
cggctccccacctccatcccccgagcccacacacagcggggtgaagctgtcggggagactcgtgggcaaccaaatgcaggcaccctctgaagagacgccgagaaggccctgcattcgatccg

SEQ ID NO: 55387 - DNA, 122 bp, Homo sapiens
tcctgaaatgcgtgaggaagcccagcctgggccaggatacgccgctctcagtgaagaggtcgaagatggccctcctggatgcgccatagtaatacgcggctgccacaaactcctgcagggac

SEQ ID NO: 55388 - DNA, 122 bp, Homo sapiens
tccctctgagcacctccctcccctttttaaagtaccttcccactcgcctgcgtttcctcgcgttagtggtgcaggggcctccgcatttggggaaataacaaacacccacttccgccccccac

SEQ ID NO: 55389 - DNA, 122 bp, Homo sapiens
ctgtaaattttgtgtgcttcccttgctctctgagcccattaaataaagaggttgtcttggcgtagtcagcggctttctagctccgacgtctggttcaaaaacggccgccagctccatcagcc

SEQ ID NO: 55390 - DNA, 122 bp, Homo sapiens
tccaatcagggcgataaatggcggggggcaggacgtggtggtctccaggctggcttcgtgcgttcttgcttttgtcactgcccccctgttacatggggggggggtttaatttggtttctgag

SEQ ID NO: 55391 - DNA, 122 bp, Homo sapiens
gcgggaacagggcgccccgggcagggctgcggggtgggcgccgcgtgcgggagcgcccagcgctgggggcagtcctggagccagaaccccgcccagagtcatcctttctgctgattcttgtc

SEQ ID NO: 55392 - DNA, 122 bp, Homo sapiens
caaactcataggacctagtgattctgttctgactttccccaggaactccagtatcagcctcggctgtcccttcttctccatgaggggcaagcccagagagggtgctcagcacacacccatcc

SEQ ID NO: 55393 - DNA, 122 bp, Homo sapiens
ccagttgggactcatgccacgcttaagctgagtaagttaaggactctgcctctggacccccgtcagcacatcctgtgctccagcttcagtgccagccccgggagaagccatggggagccacc

SEQ ID NO: 55394 - DNA, 122 bp, Homo sapiens
ggagcgtcctcagagcctcagtacttctgaccccaataccttgccaccctcctcccctgccggcttcgtggataatttttttgttgatatctggctctcattgcctcaaccccttttcccct

SEQ ID NO: 55395 - DNA, 122 bp, Homo sapiens
tgtaaatagtaccatggtagcttgtcttcaaagatgacccccctgcatagaatcatgtgtcgtcacacaaatgcacccttgcataaccctttctttttgaatccgactgaccctgaaactca

SEQ ID NO: 55396 - DNA, 122 bp, Homo sapiens
tagatttttatttttggttttcagtcagcactccagtccagtcaggagggcttcagaccacgaagaggggaggtgtccccacggcagagctagacacagatcccaggacattctgtgtgtgg

SEQ ID NO: 55397 - DNA, 122 bp, Homo sapiens
ggtgctaagcccctcactgtccgtggcttgtaggccggtcggccactcggagtgctggcccgctgagtccacgcccacctggaactcggactggcccgcaagctccgcgcacagcccgggtt

SEQ ID NO: 55398 - DNA, 122 bp, Homo sapiens
gcgtgcagtggtagtgggtgaccttgagcgagaactgacaagctgcgtccttgcagtcctcgtaaaggtcgaagcgccggaagccctccagcatcatgccctcgtccagcatcttccgggag

SEQ ID NO: 55399 - DNA, 122 bp, Homo sapiens
cagggaatggtttccaaggcaatagcaaacggggcggggcttggaacggaggacaaggctcgagcctaggcaggaacttcccgggagaggaggcggcgacgcggaggggcgcgggatcaggg

SEQ ID NO: 55400 - DNA, 122 bp, Homo sapiens
ggctctagggagaaatgcacagtttgacatcgttcatgaagagcctctccacggctcctgcgcctgagacagctggcctgacctccaaatcatccatccacccctgctgtcatctgttttca

SEQ ID NO: 55401 - DNA, 122 bp, Homo sapiens
ccgagagggcgggggcggcgatggggcgggtcacgtgatggggtttaaatctcccgcagccggagccgcgggggcgccagtgccgcgcgtcgagcgggagcagaggaggcgagggaggaggg

SEQ ID NO: 55402 - DNA, 122 bp, Homo sapiens
atggaaactgcgatccccccggtgtggatggagctgaatgacacctacaattgcagagcacggttggcgttgccagggctgggaaatgggcgtcgtggctggagagggcactgaagggcaca

SEQ ID NO: 55403 - DNA, 122 bp, Homo sapiens
tgacagcttggacaggatggatgctatagatgtgccagagggatttaaaagtataaccatcgtagtgtgcagatgtttttcagttcatacagtgagaaacctggagagctaatgaaaagaaa

SEQ ID NO: 55404 - DNA, 122 bp, Homo sapiens
tagcttgtagatcctatacccagccccagctgcaggaagctgttaaatcctaggcccagccgcagctgctggaaggtgtctcactgcatttttcaacatttgggctgcgtcagccacctcca

SEQ ID NO: 55405 - DNA, 122 bp, Homo sapiens
tatttcatcagtttgatgtggagaaaacggctcgttggtaggatccttgaggatgtaatgcgtgaacactaaagcgcttaccaataccgcccccgcacgttaagaactgtatattgttggct

SEQ ID NO: 55406 - DNA, 122 bp, Homo sapiens
agtgtgggggcgaggaaccaggtgaggggctgggagaggatgtggagacagccaggtgagcgtgcattgaggggttggcaggaagttttgcagaaacctgtgggtttcacttttgcttctgc

SEQ ID NO: 55407 - DNA, 122 bp, Homo sapiens
tactcagtgatttggaaattttgatgcttgtataaatgtcagataattaatttccaaaggcgtatgtattaagtaaaagtctgtaaatatgttaatgaggccaatttttccagcatttataa

SEQ ID NO: 55408 - DNA, 122 bp, Homo sapiens
acccacttaccgtccgtgcgagaggcagacccgaaagcccgggcttcctaacaaaacacacgttggaaaaccagacaaagcagcagttatttgtgggggaaaacacctccaggcaaataaac

SEQ ID NO: 55409 - DNA, 122 bp, Homo sapiens
gtaccggctccgcctccgggcgagttgcgacattttcagtgcttcctgagaagagtttcgcgcagttggagctacgggtacagcagtggtccgaaactagtggaagaccactagaacgcgga

SEQ ID NO: 55410 - DNA, 122 bp, Homo sapiens
cagataaggaaacagaggcttaaagagattaaacttaagctatttacttgcccaagaccacgtaactattaaactagactatactaacatagtaatataactataaattaatatataaacca

SEQ ID NO: 55411 - DNA, 122 bp, Homo sapiens
acgctgtaggcgccgcgcgtggggatctctgcgcgtgtccgtgtgcggtgtgtgtgtgtccgtggctgagtcgaggaggcccggcccgccggtgtccccgagtcgcctgcgcgtgagtgtgt

SEQ ID NO: 55412 - DNA, 122 bp, Homo sapiens
gacaaggaaaatcgtgggcagaaagcaggcattaaacagacactgtaagttgaggggtatcgaagtcaagcatcagtgtcaagagacattggaaccagagctaccttaccttgaataggggc

SEQ ID NO: 55413 - DNA, 122 bp, Homo sapiens
acagtgaggacgacgcgtgggagcaggggaagtcatcttcctaggacaggtgccttcactcgcatcaaactactcattatctacaagcaacatatcgaaaacaacgccgtccagaaagatta

SEQ ID NO: 55414 - DNA, 122 bp, Homo sapiens
ccgtggagaagatcatgcccgtggtgggctcgtaggtgcccgcgaggtagtacaggccctcgctgtcctggtacttcttggtcttcagcatctgctcatactgctccaggcccaccaccagg

SEQ ID NO: 55415 - DNA, 122 bp, Homo sapiens
ccggtctcccgagcaccgcggcaggaccatttcgttggaatgtagggcgaggccgaagcccgccccggacccaggccgcgaggtgcgcgccggccgccgaggggccgcctgtaaattacagc

SEQ ID NO: 55416 - DNA, 122 bp, Homo sapiens
cctttagtatccctaatgtcatctagttgtaatacagtgcgatgaatgctttactgttggcgctaaaatattgtgggacaatagaggagagagaaggctgttttctggctttggaaggctgg

SEQ ID NO: 55417 - DNA, 122 bp, Homo sapiens
agcttggagtccctgtttcagcacatcatcttcaccgagcatcaggcggaggagagtcgccgtttgatgcgagaaggtcggggtatttctgtcctttgcatggggccttttgtcttctgatg

SEQ ID NO: 55418 - DNA, 122 bp, Homo sapiens
ctacttctggttcagtacgtctgaggtgaagctgagatttcgctcttctaacaagctctccggtgccaccaactcttgtgtggaccaagagtctgaaagatatccttacgatagagggcgca

SEQ ID NO: 55419 - DNA, 122 bp, Homo sapiens
cccggctgttcggcctcagggcagtgggtcggtgggagatgtggctttgccgcaggggcgcggggccgagggatgtccgggggttgtggggacacgatgagggtgggaaaaagagacggggc

SEQ ID NO: 55420 - DNA, 122 bp, Homo sapiens
cggtcgctggggctcgcacttcagcttcccctcccccggcgccctctggggctccgagcccggcgggaccatgttcaccagcaccggctccagtgggctctgtgagtaccggcctccgccat

SEQ ID NO: 55421 - DNA, 122 bp, Homo sapiens
gggggtgtgcaggcgggaatcagagctgatggccaggatgatgagcacatttcccaccaccgtgaccaggtacatggacaggaacatccaaaacaggatccgctgctgctcaggactctctg

SEQ ID NO: 55422 - DNA, 122 bp, Homo sapiens
agagatgagaggcctaattctaatttgagatcagagcctgacagctgggcaggtggcaggcggccgcttcctcccctccgtggagcctgccaggagaggggctgtggtcgtattaagggtgt

SEQ ID NO: 55423 - DNA, 122 bp, Homo sapiens
cgggcacctggggtggtgcaatggcgtcctgatctctgcatcttggtcactgaaggggctcgagaggccgcgaggcgctggggacaggtccgggagtcaggcccaggaaagtctcctcggaa

SEQ ID NO: 55424 - DNA, 122 bp, Homo sapiens
gggctcaggggaggcctggggagcagcggggcccggcacgaggaggagggaggtggggcgcgacagcgccttcagacaggggtggggtctgcaggatcccaggaccaggcagaggacgcaag

SEQ ID NO: 55425 - DNA, 122 bp, Homo sapiens
ttcgaatccctgccggcctctcccctcccgctccctgcctctcgccacagcctcggccttcgccctcgggattgaagacctaccccacgggcaggagccaagtccgtgcctttgggatggga

SEQ ID NO: 55426 - DNA, 122 bp, Homo sapiens
cacttttgtgtgaagggaaagcaggagacaggacagaactgggtggtgtctttaaagatacgagacttaaagagataagagttaaagacaggaaagataatttgtactcaaaggcccgaatg

SEQ ID NO: 55427 - DNA, 122 bp, Homo sapiens
acagagctcgcgggcatggggtgagagcgggaggaagcagaggcagaggcggagcaggggcgcaggtgcctgcaacccaggatcccggggcgctaaaggcttcgggttctaccgcacgctca

SEQ ID NO: 55428 - DNA, 122 bp, Homo sapiens
caatggctctaaccccagccctctgtctcccccaggggaggtttccttagggtcctcatacgtttcagggtgattatgagtcaccttccaggtcatcaggacctaaaaaaatgctccaccta

SEQ ID NO: 55429 - DNA, 122 bp, Homo sapiens
tgtggaaagattctcctggagcccagccaggcctgagctcatatccagaagggagagaggcggtgggagtgaaggcctcctcaagggctggctcaactccagggcaaacctccggaggagga

SEQ ID NO: 55430 - DNA, 122 bp, Homo sapiens
gcactgaggttggtggtgaaacccagctgggagatggaggcgcccttgtcccgcagcactcggtactcctcccagcagtagtagatgccgtatgccagcacgcccagcactcccaggatcag

SEQ ID NO: 55431 - DNA, 122 bp, Homo sapiens
cagcaggggtatctcaagtacaatccaattctaatcagttgcttcaaaaaaaaatccaggcgaggctcggtggctcacgcctgtaacccaacatattgagaggccaaggtgggaggaccact

SEQ ID NO: 55432 - DNA, 122 bp, Homo sapiens
gatctcctaaagcgggctccaccgggtcccagggcgaaaaggtccgaagatctacgctgtcggaaagacctggagaactcgggaagcccagcaacaacaaacaggtttcaacttggaaacaa

SEQ ID NO: 55433 - DNA, 122 bp, Homo sapiens
tggtgtaatgtctgacgaaagttggtctgcaacatgattttcaaccacatcatgtattatcgaatcattagtggtttctgaaattttatgaagaggaagaagcttaataagatctggctgtg

SEQ ID NO: 55434 - DNA, 122 bp, Homo sapiens
taaaatgcgggacacaggctatccatgtccccacaaccccttttacggattagtaaattccgtaaggacagagccggacagcagggaccccagcctaagggttttgaatgccacgcagagtt

SEQ ID NO: 55435 - DNA, 122 bp, Homo sapiens
cacctcggcctcccaaagtgctgggatttacaggcgtaagccaccgcgcccggccaggaacggttcttaaatgccgagagggcgcatgctagctctcctcagcattcccggtgagccgctac

SEQ ID NO: 55436 - DNA, 122 bp, Homo sapiens
ccgggccggggtctgtgccctcgttggtaggcgtaggatgcgcaggatggagcgcgcatgcgcactggccgccagccgaggacggaagtgggcgtccggaagctagacgtgtcccctgggcg

SEQ ID NO: 55437 - DNA, 122 bp, Homo sapiens
aagaatatctctacatactgccaaaaaaaaaaaaaaaaaagattcagatcactcccctcccgcccccgccctatatgttgcctgcctcggcctctggggcatggagcacgcggcccagccct

SEQ ID NO: 55438 - DNA, 122 bp, Homo sapiens
tctgatctcaaacttccagcctccagagctgtgagaaataaatttctgttgtttaagacacgttcaaatagtttgtggtattctgttatggcaaaccgagcagactaatagaagttgagagt

SEQ ID NO: 55439 - DNA, 122 bp, Homo sapiens
gcaggagccaattgcttgctttctcttaaaactagtccacacagccccaaaccaagttcccgggaaatggccagcccaaaaatcctgtttccctggagatgtaccgtgctttacagtgcagg

SEQ ID NO: 55440 - DNA, 122 bp, Homo sapiens
ggttttggcatcgccacacctcaactgtgtggttccacggccccacagagggttcggtgacgcctgggaaggtgccgggttccacggccccacagagggttcggtgacgcctgggaaggtgc

SEQ ID NO: 55441 - DNA, 122 bp, Homo sapiens
cgatttgcatcttaaacgcggacgccacgcggggctgctggctccaccccggctcgcgagcgctgggggcgcccggactcccacccgctccccacccaccagccccgccccgtggtcccgcc

SEQ ID NO: 55442 - DNA, 122 bp, Homo sapiens
tctcagacccctaaaggtctctcgcatggggtcgccattcttcctactttgtgctcaaggcgcaggatctggagttctcggtttccaagcaagactggtcgagtctaggtcggattggctgc

SEQ ID NO: 55443 - DNA, 122 bp, Homo sapiens
cgacgccaccagccccagggtggagagcggctttctgggcgtccgggcaagtccatgctccgggtggggaggccgaggggccgaggaagtcgagggtctggacattcgctgccccggagccg

SEQ ID NO: 55444 - DNA, 122 bp, Homo sapiens
agaatacagctcctggggttcggtttccgttaagcgaggctggggatccagatgtgggcacgaactccctccagagttaccagctcagccccaatcgccacttctccctggctgtgcaaagt

SEQ ID NO: 55445 - DNA, 122 bp, Homo sapiens
aggggaaaaaaatccaactaggcttacagctgctgttattaagccagcttgcagtgtggccgactttcttgtagctggttgctacttactaccccaggagaatgtggcccttgtcacaagac

SEQ ID NO: 55446 - DNA, 122 bp, Homo sapiens
tcacttaacgtctctgggtcgcagtttcttcatctaaaaaatgggactagtagggtcgggcgcggtggctcatgcctgtaatcccagcactttgggaggccgaggcgggcggatcacgaggt

SEQ ID NO: 55447 - DNA, 122 bp, Homo sapiens
ctcaggtgatccacccacctcggcctcccaaagtgctgggattacaggcgtgagccaccgcgcccagccagaaggtggcatatttatagcaaaggaaatagcatgtgttttggttgatgtaa

SEQ ID NO: 55448 - DNA, 122 bp, Homo sapiens
ctctgggcaagagtgtgtgtgtttgcctgtacaattcagtcatcagcttactgcaggtgccgtttcctgttcttgaggcatctttaactgcatgatggtggctatgtggttttagttggttg

SEQ ID NO: 55449 - DNA, 122 bp, Homo sapiens
gcctgctctgccccttggagctgcatttgacctgctctcactggtaaggtgacttggtggcgttcccacttgatttagccattttcttccattgtgagaccactgccatctatccacctgcc

SEQ ID NO: 55450 - DNA, 122 bp, Homo sapiens
cgggggtcgcggaggagccgggcagcggggggccctgctggctgcagctggaggaggtgccggggcccgggcctctcgggggaggggggcccctgcgctccccttcctcctactcatctgac

SEQ ID NO: 55451 - DNA, 122 bp, Homo sapiens
ctctgtctcggacctcatgtctcccttgcctgcgtctcaagagagctggcgacagagcctcggacctcaagtccctgtgctagccacggtagttcttcacaccccgtcactcttacggaatt

SEQ ID NO: 55452 - DNA, 122 bp, Homo sapiens
atgccccatgcagacttgcatctgggattgcagcttccgtgggatttcccactgctctgacgtgagctcgcaggggtgggagcagccaggcaactcgggtggccccattgcctctgtctgcc

SEQ ID NO: 55453 - DNA, 122 bp, Homo sapiens
catcttcccgtatacgttaagtcacttctagattacttataatacctaatacaatgtaagcgctatgtagatagttgttatacagtattgtttagggaatagtgacaagagaaaaatttgta

SEQ ID NO: 55454 - DNA, 122 bp, Homo sapiens
tagtattttgctctcaagagggctttctggcttcgtttctctttggtttcttaagaggggcggcatgagaaaagcaggagcccctcaggtgagcagactcttaaacacaaacaaaagactac

SEQ ID NO: 55455 - DNA, 122 bp, Homo sapiens
atttgactaaattgctgattaacgaatcccacttagacggatttttatatagttcatctacgtaccctgaagggagtgagagaatctatgaccttgtctcattttcctttatcaattttcta

SEQ ID NO: 55456 - DNA, 122 bp, Homo sapiens
cacctcccatcctcgccctggccctttttggggtgggaggtcctcaagatccttttgagacggaggtgctccaccctgttacacaagcgcattcacgtcttttccctgcaacttaagtaaat

SEQ ID NO: 55457 - DNA, 122 bp, Homo sapiens
cccatgcaaatgaggctgggagcgcgcacactatgctaggaggcgaggcctgggcggcctcggggcggagcctccccgccggccacgcccattggctctcgctgcgccgacgtcaggagccc

SEQ ID NO: 55458 - DNA, 122 bp, Homo sapiens
gagacgcaagatttcaaggcccactcggggtaccctggcatggacatcgagtcgttctagcgctgagcttcaaaactattcctttccttccctttcttcttcataccagactctaatctgtt

SEQ ID NO: 55459 - DNA, 122 bp, Homo sapiens
cgggtcccttcccccagccctcccgccgatctccgtctccctgcagggccgactcttcagcgaccgtccctagagccagcggacggaaccattccaaacagcctagtctcgtgctgagagcc

SEQ ID NO: 55460 - DNA, 122 bp, Homo sapiens
acgcagacgggaggacacttcaggagcaatcgacccgaaggaaaagcacgatccaggccccgcctgcctcggctccaccttccccgcgcccgtcccccagggtctcggccgcgggaccccgc

SEQ ID NO: 55461 - DNA, 122 bp, Homo sapiens
cattcccgcccggagcctcggagccggcccatcactggtcttgaaggttgttagggtccccgcctccagcgggaggagtccaccagggcggtcagtagggccgccacacggcctcatccatg

SEQ ID NO: 55462 - DNA, 122 bp, Homo sapiens
ggtggcgcggcgggcggacctttggggcttgggagactgggacgcaagcggagggggatccgggctcatgggtctgattttctaatgtaattacagccaggacagccagcgaccacgctccc

SEQ ID NO: 55463 - DNA, 122 bp, Homo sapiens
agccctgcgcccgactagcgggtgagtgcggacgctggccggatagcggagtgcccagggcgcgtgcggggtcttcgcgactgtccgccaggactcgcctgtgctccctgctcgcctcccag

SEQ ID NO: 55464 - DNA, 122 bp, Homo sapiens
tccgaggccggccacctgcctggtttctggccggacaccggacttcccctggaagttgctcgagactgcgcgcccccagcaaaaaatcaggtcggttctccgagcccagtctagcgcttccc

SEQ ID NO: 55465 - DNA, 122 bp, Homo sapiens
acgtccaaataatacacagtttcatgcttcaggtgagccaagaacaaccttcccattgagcgccttgcaggggctgatatcaaagacaagactgaacttccttcattggcatggtgaccacc

SEQ ID NO: 55466 - DNA, 122 bp, Homo sapiens
ccatcctggctgcggcgtctgtctgaaccacgcgggggccttgagggacgctttgtctgtcgtgatggggcaagggcacaagtcctggatgttgtgtgtatcgagaggccaaaggctggtgg

SEQ ID NO: 55467 - DNA, 122 bp, Homo sapiens
tcaggttgtgcatcctgcacaatgtattttcagccacacaatgtattgttcaggatttgtcgtgcacatacttgcagattggcagagccaactgccagagatgagaaccttttaagttgttg

SEQ ID NO: 55468 - DNA, 122 bp, Homo sapiens
gccttggttgtggcttttgctccatacactgaatcaaatgatatggaaaacatggggtgtcgccctgaagggctccatggctaagtgttctagaacagagctaaccagtgcaattccctgca

SEQ ID NO: 55469 - DNA, 122 bp, Homo sapiens
tgctcaacttgcagcagcctctgcctcaccccttaaaggagctgattatagattcccttacgctgcctctctaattgtctcatgattgcattcttgagggctatggaccgagggaaaaggat

SEQ ID NO: 55470 - DNA, 122 bp, Homo sapiens
tgcccgcagcaatatgacctgatcatccagaggcaaggaggaaaagtgtgggatcctcttcgcccactcaacaagcgtgaatagctgtttgtcagctgcctgacagatgttagtcacagggt

SEQ ID NO: 55471 - DNA, 122 bp, Homo sapiens
gaaacagaacacagcatccaagactggtgggaaaatatcaacatcaaatcaagaaataggcgcagtggctcacccctgtaatcccagcacttggggaggccgaggcaggcagatcacgaggt

SEQ ID NO: 55472 - DNA, 122 bp, Homo sapiens
tgtgggctatccccacccccaccccggcctccccacgtcctcctcacctccttaaggttccggaagagaaggtcattgtttttgtccagaaaccctgggaggggagaaccgacgtgaggtga

SEQ ID NO: 55473 - DNA, 122 bp, Homo sapiens
tcccggctcgcgtgtagcggcggcggcggcgtctccgtgaggaggcgcgcggggccatgacgtcagcgtccacaaaggttcgacctccctcgcggacagcgctccctggcggccacgggagg

SEQ ID NO: 55474 - DNA, 122 bp, Homo sapiens
tgcctgggcggccatcccaggacaccagaccactcggctcgtatctctggttacttcctgcgctggggaaaaaagaacacgcttgctctcctgggtcctcgggtaaactacaggcggcttct

SEQ ID NO: 55475 - DNA, 122 bp, Homo sapiens
ggaactattgctgggctcgttcgaaagtaaacggtggacggcgcggcccgaggcaggtggcgggagtcagtttaaggctggcgcccagctttccgcgcctgcgtgctaggcgcaggccgcct

SEQ ID NO: 55476 - DNA, 122 bp, Homo sapiens
catttcccagtgtggtacagggaaagcttgctgggaatgacacaggtgcatgagcgtccccgcccccacccccgccaagtggggctgagtccctgcagcggtgctgagagctgggaggagca

SEQ ID NO: 55477 - DNA, 122 bp, Homo sapiens
ctgctgtgccgggtatgtggggcgtgtgttagactttggacctggcctgcggggtcaggccgtggtgtatgatgacgccacgccgctctttctctttcaccctggcctcctgcctggccctc

SEQ ID NO: 55478 - DNA, 122 bp, Homo sapiens
atattagccaggcgtggtagcatatgcctgtagtcccggctactcaagaagctgaggtgtcgagaaacttcctgccgccgcgttcgcacctcgctgctccagcatctagggcatattccaac

SEQ ID NO: 55479 - DNA, 122 bp, Homo sapiens
ttcctgcaggggaccaggaagcgcccttacccaggagaatgacgatgcaggcgaggatggcgatcagggcgcctgtgctcaggccggcgttcagaatgtaggcctctgcgttgcaggagagc

SEQ ID NO: 55480 - DNA, 122 bp, Homo sapiens
tctctggagtggggcggagcctgggctgctaggagcccctgagcaggccggttccaaatgcgcatgaacctggccaccatcccgggcgggcctctcctcagcagccctgattccatcaggca

SEQ ID NO: 55481 - DNA, 122 bp, Homo sapiens
tcgccgcgcagcccgggggcggggcgggggcggctccgctgcggacacgccctcactccccgccccggccccgcccgcccccgggacccccgcctgcccctggccgccctgggccacgcccc

SEQ ID NO: 55482 - DNA, 122 bp, Homo sapiens
ctgccgccgccgctgcagctaccgcatcgccccccgcggggctggtccccaccctttctccgccccctcacctccggcagccgactccggctgccccctatgggtctagggaaacccctcga

SEQ ID NO: 55483 - DNA, 122 bp, Homo sapiens
tctccttcagggaatctaattgcaagtatattaggctgcttaaagttgtccacagctcatcgattctctttacctttctcttttttttttgaaacagagtctcactctgttgcccaagctag

SEQ ID NO: 55484 - DNA, 122 bp, Homo sapiens
aaaaatctacttgcctattccattgatttttttaattgcattcagcaaatccataaactgcggagagagctggttgcatcacaagaaaaagttgctaccctcacatctcagctttcagcaaa

SEQ ID NO: 55485 - DNA, 122 bp, Homo sapiens
atggatgcggacaacagggaccaagaaaacttaagtcgtgtttatcaaatgtcaggtggccgaggatttcttaagatgaaaagtggtggaagaattctcacacactggccgggcgcggtggc

SEQ ID NO: 55486 - DNA, 122 bp, Homo sapiens
tcaaggcttctctcttctaaagactattaaggtttgaggattcagggcccgtttcgcttccggctagggaaggaagcgtgcttcccggggcccaaatgaacatggaaatttactaagtagga

SEQ ID NO: 55487 - DNA, 122 bp, Homo sapiens
gacatccctgaacaccccaggcaggtcaccacccagccacaggggacactcgtgcgtccacgtccgcaggtcaccgcccaaccacaggggacactcgtgcgcccacgtccgctggtcaccgc

SEQ ID NO: 55488 - DNA, 122 bp, Homo sapiens
gttttcaggacttggactctgctttagacttgtgctcagactgtctccacaaaagtggtccgtttcctcatccaatgagctctgcctgtttgtctgtgtgacactccagtggaaggaagcca

SEQ ID NO: 55489 - DNA, 122 bp, Homo sapiens
gcaaattgccctccattgctgggactcaggttcccatcagtaaagtgacctctaaattcacgtcttgcacaaagaagtgaattttttcattttaaaaagctctccaggtgattctcagccag

SEQ ID NO: 55490 - DNA, 122 bp, Homo sapiens
cactcgctacggccacggcagccactctgatcacattcccgtcactcgctatggccacggcggccactcagatcacactctgtcacttgctatggccacggcagccactcagatggcactct

SEQ ID NO: 55491 - DNA, 122 bp, Homo sapiens
cagatccgggcccagccacagtaacaggccgccggtgtggatcagctactgacgactcagcgaaagcaaaaaaataaaagctgaaaacccgcccctctcagagcttccaccgccgcttcgga

SEQ ID NO: 55492 - DNA, 122 bp, Homo sapiens
tctcctctttaggagccagctggtccaccagaagtctgtgttctgcctgtccctgcagcacggagggctgggctttatacctgtgccaaggacaccaacggcagcatcagcaagtccgtgtt

SEQ ID NO: 55493 - DNA, 122 bp, Homo sapiens
gaggtaccgggttcttctcactagggagtgccagacagtgggcgcacgtcagtgggtgcgcgagccgaagcaggacgaggcattgcctcactcgggaagtgcaaggggtcagggagttccct

SEQ ID NO: 55494 - DNA, 122 bp, Homo sapiens
aggggatcctgtgggaaggcggcgtggtggtgagtgtccgcaggggatcctgtgggaaggcggcgcggtgatgagtgtccgcaggggatcctgtgggaaggcggtgcggtgatgagtgtcca

SEQ ID NO: 55495 - DNA, 122 bp, Homo sapiens
actgtgggctgctgtttcagcccggggattccctctgaatccctgtcaccaccgtgctggcggtggccaacccgaggtctggctgcctggccccaggctggacacgccctccccaccctggc

SEQ ID NO: 55496 - DNA, 122 bp, Homo sapiens
ggtatctgcagcctctagcgtccatgtgatttttcagtggttaatgaaactgccaaggcccggctatgttgcacgacttcgccatcataactttaaatcccattatgatcacctcattttac

SEQ ID NO: 55497 - DNA, 122 bp, Homo sapiens
agaacagcaggggaaagacctgcctccatcattcagttgcctcccaccgggtcccccccacgacacatgggaattcaagatgggatttgaccatcttgatatggtcagccaaaccatatcag

SEQ ID NO: 55498 - DNA, 122 bp, Homo sapiens
gctccgaatattaaaaatccaggcaggaatttgcccacaaatcaggtaagcccttgtctccgccaaaaggtctcttctggttttcttaatgtcttacatcgggcacggaccccatcatgcag

SEQ ID NO: 55499 - DNA, 122 bp, Homo sapiens
cgcggctgccccctcttccctcctctcttcagagcacagcgggtctgaggctcccgtcggcggagaatgaatgaatcacagagccaagccccacgcttccactggcaccctgcccccagctc

SEQ ID NO: 55500 - DNA, 122 bp, Homo sapiens
gaggccccgggggcggtgcgcggcgcggccgcaggatgcaggccatggacccggccgcggcggatctttacgaggaggacggcaaagacctggacttctacgacttcgagccgctgcccacc

SEQ ID NO: 55501 - DNA, 122 bp, Homo sapiens
cattgataataataggtttccctgaaagatacattgtaatccattcacatccgggaactgcgggcttataaagagaaggagctgcggccgcggctgctcctccagacaatgactgggaaggg

SEQ ID NO: 55502 - DNA, 122 bp, Homo sapiens
ctccacaaactggattttgctgaaagtctgctgtaaatacgcgtgcctcctcacagggaccgtcattttcttccctttgtgctttttgtacagaagcagcaggtccaggatgtactcagccc

SEQ ID NO: 55503 - DNA, 122 bp, Homo sapiens
ccactgcccggcggtggaggcgcgtctggaaccccccggctcgccccgcgcctccccacccggctcccagccctctgccgagacgctccgcctccagccccgcgggcctccgccaggggatg

SEQ ID NO: 55504 - DNA, 122 bp, Homo sapiens
tctcccaagagctacacgtctctcctctctgcttgcttctcttctctcctctctctctgtcgaccagcgtcctctgcaaactcatcagctttctcaaggtcacattgggtatttctctatct

SEQ ID NO: 55505 - DNA, 122 bp, Homo sapiens
tgaagcctgtaggatattcagagagggctccccgctgggcctgtgccctctcgggctctccggctgactctctgtggtgatgactgctctagagcagccgctctggaagcatggacctggca

SEQ ID NO: 55506 - DNA, 122 bp, Homo sapiens
gatgttggccaaggcccttcccctgttgcctgggggctggacaattgccccccccccctccgatccccagagctgtagacggggagggagaaccagcacctgttctgcaggccctggatcac

SEQ ID NO: 55507 - DNA, 122 bp, Homo sapiens
cctgcccggtgcctgcagtggaagcaggcggtggcgcggttgggggaactttctccctcccggtcaagcctcgggaattgaagggccggggaggcggggcccgatcgaaaagctggaaagtc

SEQ ID NO: 55508 - DNA, 122 bp, Homo sapiens
tgagcacaggaaaaattgcttccaatcgagactaaacacatctcttcctacctttttctccgccttccgttatggctccacccctcctcgccgggccccgcccccttagagggccgcgcctg

SEQ ID NO: 55509 - DNA, 122 bp, Homo sapiens
gtctgttttgttcatcacttaatgctcagcaccaagagcagtgtccggcacaaaactagacgctcaatggacatttgaaggaaggaagaaatgtttatccagtggaagaattgaggtccaga

SEQ ID NO: 55510 - DNA, 122 bp, Homo sapiens
gggggctgtgcctggtgctccccctgctttgtctcggtgcaggtttcctcttcctgaacacgctcttcatccagcgcggccggcacgagaccacctggaccatcctgcggcgcttcggctac

SEQ ID NO: 55511 - DNA, 122 bp, Homo sapiens
tcattatttctagttctttatgtgctagttatcaaaagcgaacgaccaggggcgcctgcgcggcttgtgactggcgcaagcagaactcctctgctcttagccgtttcctgctcacctacgag

SEQ ID NO: 55512 - DNA, 122 bp, Homo sapiens
atgacagcccgtggcgccaggggttccaactgatcttgagtgaacccctggagaagctgtcgagggagctgccagaagccgcagcggctgccccgtcgggtgcttccactacgtgctgtggg

SEQ ID NO: 55513 - DNA, 122 bp, Homo sapiens
cggcagcccggggaggtggcccagctagggcagggggcaggcggcaagcgggccgcgatgcgcagcgcggcgcagcgcagcgctcccaccctgtgcgccaggacctggaggaggatgcggag

SEQ ID NO: 55514 - DNA, 122 bp, Homo sapiens
gcaggcatcgggccaatctcagagggcgcgcacgccgcatcaggaccccggaacccgccccgttggggatagggacagatggagaatccagctcagacccaggtaagctgctttggaaggca

SEQ ID NO: 55515 - DNA, 122 bp, Homo sapiens
cagctgtgcaaagtatgtccataacaccttgcagaaagactaaaaaaattactaggggagcggactgacttctgtgtgtgtgcagaggagctgagaagcagcttctttagcgaaaggtgtgt

SEQ ID NO: 55516 - DNA, 122 bp, Homo sapiens
tgtttcatctcatttgactgtcttcttttttaattcctatgtttcttcaaatgaattaaccgtttcttttttgatcatttttatttttgcttccttgctgtacacacctctctttgaaatca

SEQ ID NO: 55517 - DNA, 122 bp, Homo sapiens
ccgggtgtcacctgatgttcttccgctccaggatcccacccaggaaacatgacgttctgtcggcacgtctcccaaggctcctctcggctgcgaccttttgcagacgttccttgtgtctgagg

SEQ ID NO: 55518 - DNA, 122 bp, Homo sapiens
tcacaatcaggagccctacatagataaaaattgttcattttctacaaaaaattagccgggcgtagtggcgggcgcctgtagtcccagctacttgggaggctgaggcaggagaatggcgtgaa

SEQ ID NO: 55519 - DNA, 122 bp, Homo sapiens
ccaagctacgggaaaggggtgcatatggaccgctgctcactcacggctcagatacttccacggtaatgggttggcgacagtgactcagcttctcataggttcaagcggaagaaatggtgagt

SEQ ID NO: 55520 - DNA, 122 bp, Homo sapiens
ggactgttcacagcactggagagacagaggtccttcattcactccaggtcacaggctgtgcgtgtgcatgccgaacacccacatgcacacagttggtggctcagtctgatgtacctgacttc

SEQ ID NO: 55521 - DNA, 122 bp, Homo sapiens
agtggaggctgttgacaggggcgtgccaacaaaagagcacaccaatgggcaccagcatgccggcaggccatcgatcagtggaacaacgcagagtttggccggggtggtgggaggagagcccg

SEQ ID NO: 55522 - DNA, 122 bp, Homo sapiens
aaagacgctccgtgaactttccatcttttcacgcccaagtttccacagctacaggggcgccgaggaaagatgggagcgtgtgggacacttgggtcggaaaagggaaataacggaggatagca

SEQ ID NO: 55523 - DNA, 122 bp, Homo sapiens
ggtacttcttcgttggcccctgggcagcatggtgaatgagattcagaaacctggcgtctgcgggttcctccaggttatcatgccaagacataggcttcctcgtaatcctgtgaaccttgcgc

SEQ ID NO: 55524 - DNA, 122 bp, Homo sapiens
tccgttgtggaagtgtttaacagacctaacaacctttcaaaccgcatggcatttgtttcccgggtccccttttgagaatgtttctggcagcttacaaggaccttctccaacgtgcttgggct

SEQ ID NO: 55525 - DNA, 122 bp, Homo sapiens
ggacgagggcgcgcagcctccgcgttcccctgcaaacttgcgcgcagccgggggcgtgtccgtcccgggagggtccccccaacacccgggtccccaaggctcttaccgaccagtaagcacag

SEQ ID NO: 55526 - DNA, 122 bp, Homo sapiens
ctcccaccaaagcctcccggccagcggccgcgtctgaaagtcctgggctaagcaccacgccgggggggtaccagacaccccggctgcagctgccgagggcctcactcaccttcagggccgcc

SEQ ID NO: 55527 - DNA, 122 bp, Homo sapiens
gccaggggaactgacttctccagagctgggttgttttccaggtgccctcggatggccttgcgcatcatggtgttcttgcccatcagcaccacagccttcccgcgaagggacatgcggatctg

SEQ ID NO: 55528 - DNA, 122 bp, Homo sapiens
gccccgccgccttgggcacccaggggtttcccgcaggaagaagcgccggcccgagctccgcgcggagggatctactacgagtcactggacccgtccgcatccttctccagcggccccggggg

SEQ ID NO: 55529 - DNA, 122 bp, Homo sapiens
tcagcagtcagctccccctgctgaatactcttggggaacaactttggaagaagcatttcacgaaatagtcagcggcatcgcccctccttttcccagcccaggtcctttcatgctcccatttt

SEQ ID NO: 55530 - DNA, 122 bp, Homo sapiens
cctccggctgggttgcgggtgattccccgctccctggcggtagcacttgggcattttccgcggagaccccagagcctggactttgcctgctgggggagctttccgcacagtcccgcagcctg

SEQ ID NO: 55531 - DNA, 122 bp, Homo sapiens
cgccctgctgcccttcctggatgcgcagtatcagaaggtccccgtgctctttcacctggacgtgacctcctcagtaagtgccctccagcgtcagccgatggccacatcagtaaagacgtggt

SEQ ID NO: 55532 - DNA, 122 bp, Homo sapiens
tgtctgggcctggggcttatttcacttcacaggatgacctccagttctttgcaaatgacacgatggctgaatagttctccacatacacatgtacaccacattttctttatccatgcgtctgt

SEQ ID NO: 55533 - DNA, 122 bp, Homo sapiens
caggccaaggccggctctgcccctgccgcccgcctgcgcggtggaagcacagacgtgaggcgttgggatggaaattcccatcttccaggcaccccaggatgttcacccagggtttccaccca

SEQ ID NO: 55534 - DNA, 122 bp, Homo sapiens
ggtcaaaaaatcggccaatagaacacaatggaaagcccagaaaatagactcagtgcaggccgggcgtgatggttcaagcgtgtaatcctagcactttgggagatcgaggcgggcggatcaca

SEQ ID NO: 55535 - DNA, 122 bp, Homo sapiens
cccaaggctgcactggggggataagccaggctattttcatcacttccttccgcccgctcccgcagcggccacctcagctgtatcccatagagttgccacccaggcctcagccaggacctttc

SEQ ID NO: 55536 - DNA, 122 bp, Homo sapiens
cggcacatgcggttactgtgggctccagttcagacagcaccaccactagagcgtgtggcacgccgggggtcccgcagcatcctgtgagcatttccgcggggaagctgagcacgtgaagctcg

SEQ ID NO: 55537 - DNA, 122 bp, Homo sapiens
tgtagaaccattaccattttaaagacagcaatcccccttttaaaaaactactgaggccttcgaagaaaccacacggctgccttgggccccaaaagctgcggaaaagcgcagtattcagttaa

SEQ ID NO: 55538 - DNA, 122 bp, Homo sapiens
aactccagggagaaccaggccacgcagatggtctccacgatgaaaatatagtagcacttccgagagcattcgccctgcggggagaagaggcaacaacgcggggtagagagtggacttgcaac

SEQ ID NO: 55539 - DNA, 122 bp, Homo sapiens
tgaggctcaacagttggtgtctctggtcagactctagggttggggtcatgggtcaggccacggaggtcagatctgagatttcgatttgggagtcagtgtctctggctagggcccagcatccc

SEQ ID NO: 55540 - DNA, 122 bp, Homo sapiens
aacaacaggaactctatccaaaccttagaatagcattccgtaggccaaaggtgcaaactacggacacgcgccccaacacagatgagcctcaaaaacattgtgctgagcaggagttggaagga

SEQ ID NO: 55541 - DNA, 122 bp, Homo sapiens
gtgaaaacttattttgtttatatttttttccctttttatacagttaaacactcacatgcacgcacacacacacacacacacacacacacacacaggccacagggaccctatggccctcaaag

SEQ ID NO: 55542 - DNA, 122 bp, Homo sapiens
ttgagggccagagcagggcatctgtctgtccctttctgcttctatggagatgactacacccggccctcttgctgagttgtaaactgaaccccccacaactcaccccacactgggtcctgcaa

SEQ ID NO: 55543 - DNA, 122 bp, Homo sapiens
ggagggggcagcggctgccgcctggccgaccgccccctctttctgagcccaggggggcagcgtgttcagcatcatcaccagggtcgaggccacccactcccagacccagggaacctgccccg

SEQ ID NO: 55544 - DNA, 122 bp, Homo sapiens
tgatattacctttgctccctcactgcaactgaacacatttcttagtttttaggtggcccccgctggctaacttgctgtggagttttcaagggcatagaatcgtcctttacacaattaaaaga

SEQ ID NO: 55545 - DNA, 122 bp, Homo sapiens
ctgcctctgagctgccttctctacatcgcagtggggtcagcttctaccggggcggcgtcccggggtcttggaactgcatgcagactgcctgcttgggaaacatacttctttatatgcccata

SEQ ID NO: 55546 - DNA, 122 bp, Homo sapiens
atgttctatcagcctgaaaactgctaggaaggtctctaaggccatctggctctgagcctgcgattccaatgcttgttagcggatttgtttgtccagctgttggtgtctcttcttcctggctt

SEQ ID NO: 55547 - DNA, 122 bp, Homo sapiens
gtgagttttccaccttcggttttgttttaaatggaacctggcagagggagtcgcctgaagcgccctcgggggtcgttctgcctctgagctgtaggacggggccgggcgtcccctccgaagcg

SEQ ID NO: 55548 - DNA, 122 bp, Homo sapiens
cggaggccggcgggggaggggacagctgtagggggcggtggggatgggagtggatgctcccgggtcagctctggcactcgccagctgagcccagcgccagtctaggtgagccccacggcggt

SEQ ID NO: 55549 - DNA, 122 bp, Homo sapiens
tgaggagaagcaggcagatggaagctgtggctgggcgggcccggcgggggggctgtaggccgaggcccgtgttcggggcccagaccagggcctccatgctgcacggggcccccatggccacc

SEQ ID NO: 55550 - DNA, 122 bp, Homo sapiens
ccggcggggccctgggacacgagctctgtgcccgcgaggggagtctggcctggcgggctccgccacgctaccggtgagcaccgggccagccgcggacctggctctccattcttccccggggg

SEQ ID NO: 55551 - DNA, 122 bp, Homo sapiens
gcctgcgcacggtgtcaggcggcgggtgatggatcggctcggacacactccacaatagctcgcagacactctattacccggtgattgtctgcccagcggccctgctcgggccgtgctgctac

SEQ ID NO: 55552 - DNA, 122 bp, Homo sapiens
tggctgtggctggggctggtgaagctgggctgtgccatggcgtgcctcaattacaacatccgcgcgaagtccctgctgcactgcttccagtgctgcggggcgaaggtgctgctggtgtcgcc

SEQ ID NO: 55553 - DNA, 122 bp, Homo sapiens
gggcacctagagcactaaacaaatctaacatagattccggaaacttctctttaccttttccggtgctctgtagctcagctggtgacacctcccttcacctggtcatcttcactggaaacccg

SEQ ID NO: 55554 - DNA, 122 bp, Homo sapiens
acgggcaggaagggagcccggagcggcgcgggtgcgcattgatcgtggtgcggatgcagccgctgcggcgcggccccggcttctctgcgagcccgtgcccgggccgggctgtcgggaactcg

SEQ ID NO: 55555 - DNA, 122 bp, Homo sapiens
cagaatctgctaaaggtagcagaatgtttgcaaactggataaaaactgctatgctcaacacgaaaagcaaagaatccccaatcttatcgcctcatgatttctttccccaaatttggcaaaac

SEQ ID NO: 55556 - DNA, 122 bp, Homo sapiens
cccggaggctgctgtgggatccacagccctgcgcgctggggaggcgctgcaatgaccctgcggcggcgccttcccccggcgtccccaaatagaaacagcactagtgccctctctccgacccc

SEQ ID NO: 55557 - DNA, 122 bp, Homo sapiens
gtgtacttggtccaaagctctcggctcctctggcgggcctccctgaatgtggcctggactcgcgcacaggccctgtctcgcaggtttgcaggtgcgcttggcttttcctccgctttgtgggg

SEQ ID NO: 55558 - DNA, 122 bp, Homo sapiens
accagattaacaacaacaacaaagcatacaaatttattttttatgtgatacctgagccttcggaaacaaagacccaaagaaacagggaagcctgtgtgttgttaaatttaacaagtggacag

SEQ ID NO: 55559 - DNA, 122 bp, Homo sapiens
gggaggacgacaaaccaaaacagcgacctggctgagaagcccctttgtctgggagagtgccgggtgaaagcccaaagctgagagcagccccggggtctgacgctttcgtcaccctgcagccg

SEQ ID NO: 55560 - DNA, 122 bp, Homo sapiens
taaaacccttcctgtctcaggttgctgtccctgctcttaccctgtgttcctaaatgatcacggccctgtgcctttcttctccttcaggtctaggctcagagatgtctcccatgccctcccac

SEQ ID NO: 55561 - DNA, 122 bp, Homo sapiens
gcgttggggttacaacaacgcacaaaacataaattctgaagctgacacgctagctttaaacgttccttaaatatcttcatcctcaatttacggttgaggaaactgaggtgtagcgagacctt

SEQ ID NO: 55562 - DNA, 122 bp, Homo sapiens
atatcagggcccttccaggaattctcgacgcaaactggaggccgatggcgcgggtcttttcgtggacggcggcagcacggtcctcggcttgcgtccgtagttgctcaggcttctggttcagg

SEQ ID NO: 55563 - DNA, 122 bp, Homo sapiens
tttctgatgtagaataaatactgatttccttagtcctgtagcaagttaacaagcctgtaacgtgacagatctgtatcccaggggctgatcatagagaaaccacaaagcgatgttttagctgc

SEQ ID NO: 55564 - DNA, 122 bp, Homo sapiens
aggttggcaccccgtttttcctgctctgagagggaccggttgccaccgccatacttctgtcgccctgtcgtctgtgttgtgactgctttggacgtgggagtcacctgaaagccaggaaatgg

SEQ ID NO: 55565 - DNA, 122 bp, Homo sapiens
gggttgtggtgcaaaaattcactctctagagaacacagctgttaccacctataaagaaagcgaggtctccactcacaaaggaaagcagcaggagtatgtgagatgtcgaaggagaacgtgga

SEQ ID NO: 55566 - DNA, 122 bp, Homo sapiens
gtcctcttcccactcccaggcatgtagcgacatgctgcagagcgcactgctggccgccggcgctcctggcagggagaaagtgaaggctgtccccgcctgtattccagggctgctccaggagg

SEQ ID NO: 55567 - DNA, 122 bp, Homo sapiens
aggcagctgacccccagggaactaactacccagagctggagaccagaagcgcaggcagcccgccagaatgaatggtgaagggttaggctgtgaagaggaggggaggctggaggagttggcag

SEQ ID NO: 55568 - DNA, 122 bp, Homo sapiens
agccgagatcacaccactgcactccagcctgggcaacagagcaagactccatctaaaaaacgccacccttgtatcttaaagtccctcatgactgtactactctgtgcaggccctccaagaat

SEQ ID NO: 55569 - DNA, 122 bp, Homo sapiens
gcacacaaaagcccagggccggggcctgaaccggggaaggcagacccggagaagagccaacgcttccttactcgccactctaacgggtcctgcccactgagcatgcccagcaccgctgccta

SEQ ID NO: 55570 - DNA, 122 bp, Homo sapiens
tccggagtttgttccttctaacgttcagatgtgttcggagttttttccttctggtaggttcgtggtctcaccagctccggagtgaaactgcggaccttcgcgatgagtgctacaactctgaa

SEQ ID NO: 55571 - DNA, 122 bp, Homo sapiens
ggcgcgtgcccttctcgggctccaaaaatcagcagtgctccgggcgccccctgctagtcgcggccgtaaaaggcagacaaaagccctagcctcctccaatcggagggctcgagcttcagctc

SEQ ID NO: 55572 - DNA, 122 bp, Homo sapiens
ttaaacacatataaatatacatctcttggtccaatataatatctagatgttacaccaatccgtcaacagtagttattgagagaataagaatacaggtagggagaactgaagaagagaattta

SEQ ID NO: 55573 - DNA, 122 bp, Homo sapiens
tttggtttctgctttccagttgaccctggttgctcctctgttttacggcattttgggagtcggtctcccagagcagcgctgattgtaatgagaagcgcgttccctctctgggggacaggagc

SEQ ID NO: 55574 - DNA, 122 bp, Homo sapiens
taagatcagctactcctagaagggaaggcctgggcccatggatgagatgctgcatttccccgaaagttccagatgtgaaagaggcagaaggtctcaccgttccagcagcagatgcttcgttt

SEQ ID NO: 55575 - DNA, 122 bp, Homo sapiens
tgggcttgggcgttagggcttcagacaggagatcagggaaggaggtcctggggaggaggccggaatgaagtccaggagaaagccactctcatatctgggtgaagggcattgcaggcactatt

SEQ ID NO: 55576 - DNA, 122 bp, Homo sapiens
agggctgtagattaaaagtgagaggtctctgaagtccaatttcaaaacccagagcctctccgccacttatctcctacttcgcaccaatcctggaatgagtctatagaccactgtaacttctc

SEQ ID NO: 55577 - DNA, 122 bp, Homo sapiens
ctcttttattgtctatttcaatggttctcaaagtatggtcagtgttccccagggggaccccgagactctttccggaggggtatacagggtcaaaactgtacataattcaaatgcccattcaa

SEQ ID NO: 55578 - DNA, 122 bp, Homo sapiens
ttgacactcaggaccgtacgtacgctgcgccatgttcaagaaactgaagcaaaagatcagcgaggagcagcagcagctccagcaggcgctggctcctgctcaggtacgatggccgccgctct

SEQ ID NO: 55579 - DNA, 122 bp, Homo sapiens
cagagggccagctaccggcgcggaacgcccatcccaggggctggttcaagacttccacaccgagagcccttcctgggcctccagccctggagcatctggagagcggacccctgcccggccac

SEQ ID NO: 55580 - DNA, 122 bp, Homo sapiens
cattggcctaccagtggctgagctcatggctcacactatcccttgtctcagagaagcactcgggctggggagtggggaggggagacttgcaggctgtgacagaaagaagcacagggtctgtg

SEQ ID NO: 55581 - DNA, 122 bp, Homo sapiens
tgaccaacaaaaatgtcccctgtcacacagctaagtcataacagagtcaggcataagacacgggtgtcccgactcccccatctgccctttccaggttgggcaacagaattaagctctcaacc

SEQ ID NO: 55582 - DNA, 122 bp, Homo sapiens
gtccggaaacaaaagcgaaccatcctccgacacaaacactttaaaaactgtactcccagacgtacacatacaccggagacctacaaccacaagcacgcacactcgcgcgcgcacacacatac

SEQ ID NO: 55583 - DNA, 122 bp, Homo sapiens
gtcttcagagttcagaagaaaatacttgttaggcacaggttgcttgtttcttttttcccccgggaccctggcctctgctccgtcttcagtctgagtaaacatataaccatacaacccctttt

SEQ ID NO: 55584 - DNA, 122 bp, Homo sapiens
attccacttcagccccacacctatactcacacagttgtctacagaggaatctgtctgccccgtctctaacacctatcaggtgatgggtcaatcctccctcagtgtacagtcccgaagccccc

SEQ ID NO: 55585 - DNA, 122 bp, Homo sapiens
gaggatccttagggaagactccaaaatggcggcgtcgccggggtccatcgggtccacacgcggcaccacccccaagcaagaggtaactactgaagtgcccgaataaaaagaaactcgagtcc

SEQ ID NO: 55586 - DNA, 122 bp, Homo sapiens
acttttctgattgttaaaaatccacagcatgctcaccttgttactgttttaccttacggtcgctgggaatctaagcaacaaagactagaagcctccgatatgccattatcaacacacaagag

SEQ ID NO: 55587 - DNA, 122 bp, Homo sapiens
agacccggggctcaggtcagaaatgcggccttttagggaggcctttgccaagctgctgtccggttcccccgagagaggggcccgtttggtggccccgggagtgagcagggcctgagacgggc

SEQ ID NO: 55588 - DNA, 122 bp, Homo sapiens
cgccttccccttggcagggcttaggtgatttgagggagctggagcagcgaccagcacttacgtggaatgcttgttgttatgtaaagataacacccactcactttttgaggtgcgattttttt

SEQ ID NO: 55589 - DNA, 122 bp, Homo sapiens
gttccaagagacggggcggggccgccacactttccacaccccagcctccccgcccttacccgcccccactcagccctatttccgggataggccccggagcgtcacaggcaccgccctctcgg

SEQ ID NO: 55590 - DNA, 122 bp, Homo sapiens
gcagccgactgaaaaggtggcctggatgggtgtcttcaagtacggagaactgcggtgtcgcgcctccgggccccatccggctcccagcatcttctcccgctgcggaggccgcatttccactc

SEQ ID NO: 55591 - DNA, 122 bp, Homo sapiens
ggattgtcccggactctaactaaagtcctcagtttccaatctgtctcaaagtactgggcccgggggtgggaggcttgtcgcggccccacccctgcttactaaccgagccctccccgcgcaga

SEQ ID NO: 55592 - DNA, 122 bp, Homo sapiens
aatcaccactgtgagacgatcctctaatcctcaccccctccccatactgcaaactgagcacgggaacaaactgcctgaaaaacatccatctgctgactccacagcaaaggcctcagggagat

SEQ ID NO: 55593 - DNA, 122 bp, Homo sapiens
tccctcaccactgccccgactttcaataccagttctgcctccttcctccaaactggttggcgtggcacggggttggcccttggcttcgcagtgcccggaggttcggagcgagcactggacca

SEQ ID NO: 55594 - DNA, 122 bp, Homo sapiens
gtgcatgttttgatcatgtttaaccacttttaaccgccgtaggtacgtaatcagctcccgcggcaaaggtttaagaaaaaaaaaaaaaaagccttgtgcatgcatcttacccccacttaaac

SEQ ID NO: 55595 - DNA, 122 bp, Homo sapiens
ggcgggggtcccgaggatcccgggttccggggttccggggtccagggtcggcggccggagcgctcagggcccccgcctaggccctgaggccagagtccccgctcaggcagggtcccgtctgc

SEQ ID NO: 55596 - DNA, 122 bp, Homo sapiens
caagcctcaaaagccagcattccatctcctaggccctaatttcaacaaagtctattcaaacgaattaacaacaaaccattgttaattttcacaaactttcgataaaatttgaatttaatgct

SEQ ID NO: 55597 - DNA, 122 bp, Homo sapiens
ctgtggggcggtgtggggcgggagggggcccgagcgtcctgagccgtctggcaaaggggccgccgaaagagacgaagcccccccgccatactccaaacccgcagctccgagactgacgccct

SEQ ID NO: 55598 - DNA, 122 bp, Homo sapiens
gccgcgcgggcgagctcggggcgcgttccggcggagccagcctggatccgggttttcactcgtgccctgttcacaagctcttgggacccgggttctaagaacaccgggccgccccctgctga

SEQ ID NO: 55599 - DNA, 122 bp, Homo sapiens
ttaccagcatctcttgtaagatatggcctttcgtagggtggaagaagggtgagaagaatgcgctgggttggcaacttgcaggttatatccctgaaccagctactttggccagctgtctctgg

SEQ ID NO: 55600 - DNA, 122 bp, Homo sapiens
aagcctggcgtccacttcctggataaggactccccggcccactccggaccagggctggggcggcctcccaggcgctcactccgctggcaccccaccggaaaacacgtctgcggcccgccccc

SEQ ID NO: 55601 - DNA, 122 bp, Homo sapiens
tttttggaaaaaaagtgctcctcccttactcagaaagttggtgtttacaaacttccaaagcgcctgcctcccttgaatgaagctaggagctgggttattatcactgcccccttctaaaaata

SEQ ID NO: 55602 - DNA, 122 bp, Homo sapiens
gcgctccgtttggactcagttggtctccttctaatatgacggggaggatctctgctgggccgggggcagtccctccggggacttcaggaggacagaactgacgagtgtctcaagatcctcct

SEQ ID NO: 55603 - DNA, 122 bp, Homo sapiens
cgcaaacttctcaaaggccagaacccattattaccacaaaggcgcggcatcccttcttagcggttatgatggctgtgacgtctcagctcaatggaaaattaaagtcacctctgggcacctca

SEQ ID NO: 55604 - DNA, 122 bp, Homo sapiens
ggaaaacaggagccatgtgtcagaattaggctagtgtcacaggatcttctatggaggtgacgaagcctcttcattattttctagaggcaattaagcacattttccataaatctacatggcac

SEQ ID NO: 55605 - DNA, 122 bp, Homo sapiens
ccatgcccagcgagactccagcactcggcaacgtggccgagagacccacgggctcccacacgggccagccccgcccccagccccacgaagggtcctgactggtggcccccctggattagccc

SEQ ID NO: 55606 - DNA, 122 bp, Homo sapiens
ctctgtcctgggaagactgacttttccttatgtgagctgcagggctacctcctccctcgccgccccacgctcactgcagggatcgtctttccttctgcggctgtcggctttcttcgacctat

SEQ ID NO: 55607 - DNA, 122 bp, Homo sapiens
ctgggattacaggcatgagccactgcacctggccgattttggcactatctaacaaaatgacgcatttattaactttttcactcagcaatcctacttctaagaatttagcttgaagtcatact

SEQ ID NO: 55608 - DNA, 122 bp, Homo sapiens
ggccgcctggggttttccctgcgacctgcgcccgcgcctctgcctggctttgctgtcccgcgagccggagcatcctctgccctgcctcctaggcatcctttggtagtccggacggccttgcc

SEQ ID NO: 55609 - DNA, 122 bp, Homo sapiens
tcagtgtaggctacaacacaggaaaaaaacagctgagccccacatccagccaaggaaatgcgcttatcttctgagacacaactggccaggattttgggggtatacacagaggtataccagaa

SEQ ID NO: 55610 - DNA, 122 bp, Homo sapiens
ttgctttaccttctgccaaaggcaagaggaacgccagtgaggaagaggtccggggtggggcgcataggcctccactggtctgaaagctgagtcacaggaatgatatccctgtagctgaccag

SEQ ID NO: 55611 - DNA, 122 bp, Homo sapiens
ccctagcgtggtccccggcgtgccagtggaggctgaacaggcctgttgagtacagggccacgtagccgatgccagtgggtccttgggaatcgtgctgcccctccgtgagcattcgagggcac

SEQ ID NO: 55612 - DNA, 122 bp, Homo sapiens
atgagtctgttttaatctcatctaataaacatgggcgcccggtaagaagccgaggagtcacgggggtgtgtgcgagcgcgaagggctgcgtctcactcccaagacccggcaccccctgcatc

SEQ ID NO: 55613 - DNA, 122 bp, Homo sapiens
gggagagcccgggtttgcgcacaccttccagcccctggagggagcctgctcggcttcgaacgccttcgaacttttgaccttcaaaggagtccctggaaaaggtcaggagcgcctgctgcagg

SEQ ID NO: 55614 - DNA, 122 bp, Homo sapiens
gcttcctcctccggtctattggctgatgcaaggaagtgctttctggcctctctccagatacgctccctctcctcagaggtaaagagagttaaaaggagcggttggcagtcatcccaggtggg

SEQ ID NO: 55615 - DNA, 122 bp, Homo sapiens
ctgagaaatacaccttaaactcccttctgtgtagttctgtgaggatgagttcccctcctacgtggggaaaaaggccactaacagggaatctatgtgaacatgtttatcctctagccttcatt

SEQ ID NO: 55616 - DNA, 122 bp, Homo sapiens
tcatttgtattcattgtgcaaagatctggaagttacagaagtgtacagagaggcacagtacgctcagaatttattctctagttaataggagatctgacaacataaatgcaccgtgccccaat

SEQ ID NO: 55617 - DNA, 122 bp, Homo sapiens
gattccacgtgtgcctgcgctcaggcagcgcgtctgtcatcaacagcttaattccgttttcgcatcaaaccacaccagcagacagtgcgttctctggaaacacttgtattttcctggctccg

SEQ ID NO: 55618 - DNA, 122 bp, Homo sapiens
gtggggttgttgctacttttattccagccgttttgatgggtgtgcagtggtgtcacgggacgggtgtgagtggtgtctcgggacgggtgtgagtggtgtcaccggacgggtgtgagtggtgt

SEQ ID NO: 55619 - DNA, 122 bp, Homo sapiens
aaccctctctctactaaaatacaaacattgggtggggcgagtcatcgtctgacgtctggccgtgagatgtttcgggagccggggtctctccgctgcagacatgacgaagggccttgttttag

SEQ ID NO: 55620 - DNA, 122 bp, Homo sapiens
gctgggcggcaccgagcaggccggcttctttgtgtggcgcagcaacttccatgaggcaggcgagggtgagacggaggccagcctgcaggagggcatggaccgtgtgcgggatgtggtgcggg

SEQ ID NO: 55621 - DNA, 122 bp, Homo sapiens
ttagttagatacccttgtcagatatactggccttgattctgacactacaataggactcctcgcctaggctgcaattttcatatgctgtgaaaagtgatcagcaaagcaaccacacagcttaa

SEQ ID NO: 55622 - DNA, 122 bp, Homo sapiens
cctcctgtgactctggaaagcaaaggattggctgtgtattgtccattgattcctgattgacgccgtcaaaaacaaatgcttgttaagcccataagctttgcctgcttactttctgccattgg

SEQ ID NO: 55623 - DNA, 122 bp, Homo sapiens
gtgttggacgtgtaataccctcagacagaggcagaagatagttgcaaacaataacataatcggtcgtaccaagaaacaagtgctggaacaatgggacttaaggataaatctgcctttcacag

SEQ ID NO: 55624 - DNA, 122 bp, Homo sapiens
cgccaagagtgggaacggggcggcgtgagaccgggtgccctgccctcacgctgcacggcacgctcacctcatagtggaagtccatgcaggtgaggtctcgccagcaccggtccccccggatc

SEQ ID NO: 55625 - DNA, 122 bp, Homo sapiens
gattccgccgcgtattaacatgaatgccgctttgagtacctcactgccctctgccagcctcggtttcctcatctgtacaatacagtcaataacattaccattgtcattttgtgtagctctgg

SEQ ID NO: 55626 - DNA, 122 bp, Homo sapiens
gctttcccatgggagggaggtggctgcggcggaattttcagatgcgtccttctctgtattcgttccctgggaaggattcccccaaatcttggctacttcctgcctgccagcttgctccctgg

SEQ ID NO: 55627 - DNA, 122 bp, Homo sapiens
catggtgaaaggtattctattgggaacagggtgggtagggaaagagagtaggaggaacagcgtgttagtaatgtggcccaagctacattggtctctcataaggaggcttaaggcagaaatga

SEQ ID NO: 55628 - DNA, 122 bp, Homo sapiens
agtgggaaggaggtaaacctattgcaaatctctccatgaaagcctgttaaagcagagacacgtacttcaaggctctactcttcagctcttcccacttcaatttacccaacaactacaaaagt

SEQ ID NO: 55629 - DNA, 122 bp, Homo sapiens
cctcccgctcccccgccaccgcgcctccgactcttctcccccgcgccgcggcgcccaccgcgtctcaggtttaatcccgggttggacctgctggtttgctctccccgctctgagcctcacag

SEQ ID NO: 55630 - DNA, 122 bp, Homo sapiens
cagcccaggtgaacacagtcaactgggacaaaatgtggcatctgccagggcaggtaggggcgtccaaggagagaatatagtcatgggttgtttgttagtttctggttgggccagtaaagccc

SEQ ID NO: 55631 - DNA, 122 bp, Homo sapiens
actacattttggcatggtttattgcatggcaagagataacagaaactgtataacaggggccgggtgcagactacagccacaaagtagagtaaaatccattggtctgtcatttagtaacattt

SEQ ID NO: 55632 - DNA, 122 bp, Homo sapiens
attttactgcactgcccctgtcgcagaagttcctggggaggcagggcggcagctcccacccgccatcccaagccgccgaagaattccccagagctaaggcagacgcacttagctttcttttc

SEQ ID NO: 55633 - DNA, 122 bp, Homo sapiens
gggtgggtaaagccgactgtgaatggagaagattcccaagtcccgagcttgaggaggccccggctgtttcgttaagtgtatatagctgtgggaagaggttgcctgatttctggggctcctgg

SEQ ID NO: 55634 - DNA, 122 bp, Homo sapiens
gcatttacacttcccacaggcctcgcacagcaagaagtgcttgtccagctcgggtgggaccgccgggcccttgaggtccagcggctggcagtggaccaccttgggctggatgcgcacagccc

SEQ ID NO: 55635 - DNA, 122 bp, Homo sapiens
tgtcctgctgccagggccgctgggggccccatcgatgtccacccggccagacacagctcccgtcattcaatatggcaaagtgtggtggtgctggctccgcagaccccactgtggaggcgaaa

SEQ ID NO: 55636 - DNA, 122 bp, Homo sapiens
ggggagccggagagcttcataaagccacagcaaagcgctgcgactctagtgacagcggcccgctggagaggaagcccgagagctgccgcgcgcctgccggacgagggcgtagaagccaggcg

SEQ ID NO: 55637 - DNA, 122 bp, Homo sapiens
gggtaccaatttttgtttcagctcctccaccttactccagtgagatgggatctccctttccgactccccggcctgcatttgcgggtcctcagtattttggctgtctcctctcgggggcttcc

SEQ ID NO: 55638 - DNA, 122 bp, Homo sapiens
gccgaggcgcggcttccactcggcacatgctctacgtgacactcgggggcaggtggcgctcgctgtgcagcctctgacctcctctgcagacctgggtctgccggtgatagccacgaggagga

SEQ ID NO: 55639 - DNA, 122 bp, Homo sapiens
ccccgcccactgggcggagaccaggccgctctgggctagtgcgccggcgcggacgtccgccgccttccgagtggccagcgaggactcgctctgtacacagctcgatcttgggaggcttctca

SEQ ID NO: 55640 - DNA, 122 bp, Homo sapiens
attttctgccggacgctgaggtggcaaaataaaccaacacagagaggtgtgggtcaggcccgggatgtctggttcccgaaagcgtctgccactgaccaggcggaacacacggggccccctct

SEQ ID NO: 55641 - DNA, 122 bp, Homo sapiens
taagatctgatcatattaggatgctcttgtagctcataagaagatgactgggtgttcacacgcatatgagatgtgcctccctcaaaccttgttaagacatgggcacatacccatctgatgtt

SEQ ID NO: 55642 - DNA, 122 bp, Homo sapiens
ctggcctcatattttaaaatatcaaagttatttctcatttctttttccctttttgggggccgggggaaacaggtctcgctttatcacccaggctggagtgcagtggtgtgatcatagctcac

SEQ ID NO: 55643 - DNA, 122 bp, Homo sapiens
tcagtacgtggtattattattctaagttgcaaacagaaattaaaaaggacattcagagaacgcttgcctgagccctccattagtctgtccacatacaaaagggaaaatggaaatctgaggca

SEQ ID NO: 55644 - DNA, 122 bp, Homo sapiens
gtgtccttgtacatgtttgcctctcccttcctcccacatacaattcattgcaggaggcatcgaaagagggagatgacaaaaaacaaaatgaaacatccagagatcaaagaaaagaacatgct

SEQ ID NO: 55645 - DNA, 122 bp, Homo sapiens
attggctgcctccagaggtccaatacagacctcaagtggtgtgtgccatgccaaattgcacggcatcgtacaagcaacccatggcggtggtgtttaatacgtcagcaccacagggcgcggcg

SEQ ID NO: 55646 - DNA, 122 bp, Homo sapiens
tggtctgaaagaagccgctcatctcagcctcaaagtcttaaggggctcctttcctctaggcggagccgagtcaggtcacacgtgctcggcgccggccgcattcccagctcttcgctcattcg

SEQ ID NO: 55647 - DNA, 122 bp, Homo sapiens
gggcgtttaacccttgggagccccgaaggaccctatcacctcggaggcttgggcgcggaccggccgaccccctcagggactcgcccatccaggtggccgcagcccgagttcgcacgcacccc

SEQ ID NO: 55648 - DNA, 122 bp, Homo sapiens
gggaaaatgaggctgcgcgggctgaagagcgcaccgagaggagccgcccccgcggtaccgcgcagcctcgcgtcccgtcagtggggaacaaggtgaggggaaaacttattttacgggattca

SEQ ID NO: 55649 - DNA, 122 bp, Homo sapiens
cacttccggcttccccacccaccttctaccagtggaaccccgcccctctctgcgaggtcccgccccccacacctgatcctggttcccattgggcgaatctggatgctgtatacacagccgac

SEQ ID NO: 55650 - DNA, 122 bp, Homo sapiens
ccggaacgtaagtgaacacttactcaaatccaggcttcagacgagatcagtgggtgaacacgtgggtatctgagatgcgggtgatgggggtcaggcttaagaacgttaatagtggcagttgt

SEQ ID NO: 55651 - DNA, 122 bp, Homo sapiens
accttacccccctgcttagccctagaatcaaggacgtaccaagtcacataaaagtacaaccgtcgaggccaggcgcggtggctcacgcctgtaatcccagcactttggaaggccgaggtggg

SEQ ID NO: 55652 - DNA, 122 bp, Homo sapiens
ggcgggacggctacaagagctgttttgcgtccgggccggagtatttgctcagcccgcctgcgccgcttgggacgcctctgcctttccctccctcccttccccgacggcttctggcggccaag

SEQ ID NO: 55653 - DNA, 122 bp, Homo sapiens
tgcctggggacccaccttcatagggacactggccataggtgaaaacctcgtgcagcaggacgccgaaggaccagacgtctgacttctgggagaagacacgataattggccgcctcaggcgct

SEQ ID NO: 55654 - DNA, 122 bp, Homo sapiens
taaacataatatttataaaatcaaagcgggaaagccttgttccttgctagaaatgagcctcgcaggccaccaccatccgcaccgtacgacaggccgtccctcagctgcggcttcctgcctca

SEQ ID NO: 55655 - DNA, 122 bp, Homo sapiens
gcaactaggagcgggggcccttcacgtggcggaggcttcccggcctgggggccacgggcccggaggaatttgcctggaagttttccatcacggcagagccttctggagctcgccccgtgctc

SEQ ID NO: 55656 - DNA, 122 bp, Homo sapiens
gtctgagacgcaaggagaatcccaggcaaggcgctcctgagaaaagatccccacggcggacgtggggcaacaaaacccgccgggagcgggcatctcatgagacccagagaggccctgcccca

SEQ ID NO: 55657 - DNA, 122 bp, Homo sapiens
tgcagagaaaggttagctgacacagaattagtggccctgacattccacttgaaatccattcgccatgctccgctgtctccgcctgctcactaacgctgttcccctccttggaagaaaagaaa

SEQ ID NO: 55658 - DNA, 122 bp, Homo sapiens
tagagccacccacccccttttagacactattacagcactcagcttaacgtcttcatggagcgaatcactcaaagtatcctgtttatttgcttgcttacttttcattcattcaacaaatattt

SEQ ID NO: 55659 - DNA, 122 bp, Homo sapiens
ggaaggagacatggattccagggatgaatgattactgcctatgcagcttctggcagcggacgtacggctctttggaggcggcacatcttccctgatatcgtgatgaacttacttttcgtatt

SEQ ID NO: 55660 - DNA, 122 bp, Homo sapiens
acagacgtttgcctgatgtgtgaaacgggtggctgtaggagaaggtgtccatcacacttacgggcagacggagaagctcattcgctcatgctgtcaaccctcgctgggtgtctagcagggac

SEQ ID NO: 55661 - DNA, 122 bp, Homo sapiens
tacagtctgctgcagaggagtgctgcccgagggactgcaccgcattccaaatgttgggtgcgggaggggaataaaaacctcatttcacctttttcttcatgccggtcttatttcctctgggt

SEQ ID NO: 55662 - DNA, 122 bp, Homo sapiens
tgtcttttagctcttaataaagctctaactagtcacaggaggagccaggctgcatgatcacgcacactctggacgtctaggttttccgacctaataagggggcaggtcgcgtcgttccctgc

SEQ ID NO: 55663 - DNA, 122 bp, Homo sapiens
aggtcagggtcagggtcagacgtggagccccgtggagtgcggagtggtgaccccttcgttcgggggcggagggatgactgagcatttataacttttgtgtatctccccgtgggtgcagccct

SEQ ID NO: 55664 - DNA, 122 bp, Homo sapiens
catccctcttcagacctagaattccaccttccaattactttcttgatgcatctgaaaggccgtctctgaaacagcaaagtgcaataattagtcattatgtattcaaggcaaatttgtcttac

SEQ ID NO: 55665 - DNA, 122 bp, Homo sapiens
atcttacacagctaagggctgccgacgccattttgcagggtgggctgcgcagactcttggcgggaggccggcgcgcttgagcgggagaggacgtggaagggttggaggtggggagtgcgcgt

SEQ ID NO: 55666 - DNA, 122 bp, Homo sapiens
taattcggaacgttcaacccgtgactctccctaagtctttaatctgcggtgtcgtgaggtcgcagttgtcctggagacacgctgacgagccccccagccgtcgcggtggagcagctgctggg

SEQ ID NO: 55667 - DNA, 122 bp, Homo sapiens
ccatgcctatggcggacggtattttctaaggctaaggagagaggaggaacttttgagggccgtagatagtagactatttccgttttggctccttgacaaagaagagaaaaattttgcgggca

SEQ ID NO: 55668 - DNA, 122 bp, Homo sapiens
gttcttatctgcatgtacagaacaacatatttgccacatttttaaagcacatttatatatcggggtctctgctcatgctcagaaaaccactgatgatgtgcaggagaatcacagctgggaag

SEQ ID NO: 55669 - DNA, 122 bp, Homo sapiens
accggccacagacatgccgcccaccgctgcaccgcgacttcacggaaaacccacgagccacgctcgaagccccgcctccagagctccgaccaattacgggagttctctattgcctcacgggg

SEQ ID NO: 55670 - DNA, 122 bp, Homo sapiens
gggctatgattgaaggctgtatggttctccctccaataagtgtttgcaggttctccaggacgtgttaatatccgtaatattataaaaataactctgtagacttagttactagggaggctgag

SEQ ID NO: 55671 - DNA, 122 bp, Homo sapiens
cgggggttcgcggggattaacccctccggggcggaagggctcattgttatgtcttcgctgcggaggccgacccccccattccccgccgcagcccctatccccctacaggagtggcgatcggg

SEQ ID NO: 55672 - DNA, 122 bp, Homo sapiens
tccgggtgaccgcggcttcccgggagcagacctctgtgggcactgtgaggcggaacggagcggcggggcaggagctgttctgggcaggtgaaggcaggctggtggctgaaggacctccttct

SEQ ID NO: 55673 - DNA, 122 bp, Homo sapiens
ggggtatcctgcagccctcccaaggattccggcagaagtgagagcacacgttcctgcctccgccctgctgcacagggcagcctggcaagagctgtatggcggtgcgcacggtccgcactccg

SEQ ID NO: 55674 - DNA, 122 bp, Homo sapiens
tggtcctcagcgtcctggaacgacaccacctgctccaatttcccgtctggaggttctggtcgaggctccgaactcgggttccctgctacctcccagactattcaagaattatccagtcccag

SEQ ID NO: 55675 - DNA, 122 bp, Homo sapiens
cgtacgtgcgctcctctcaacgtacgtgcgctcctctcaacgtgcgctcctcttaacgtgcgtctgcacagctgcttgtgtggcacagctgcttgtgtgttcttccgccaatgtgtgcaact

SEQ ID NO: 55676 - DNA, 122 bp, Homo sapiens
tcaagctcaaagtacacctacaaaactcaaataacagacctaaaagctgaaaactattcacgaccagaaatttgaaagttatgcaacaaagacatttataatatttataatattcctgtcaa

SEQ ID NO: 55677 - DNA, 122 bp, Homo sapiens
gaacatctgctcctgtcagccggagtgcagacaactgtatgctgtctcccatgccaggcccgggccaccaatgagcccacggtgagccgaagtcaaagcctcacccagcccacgttcacaga

SEQ ID NO: 55678 - DNA, 122 bp, Homo sapiens
cctctcttattcatcaactaattagatttaacatttttccattgtgaatgctaaagccatcggccaaattaaatgaaaacaagtcccttgttgggtgcttccagaaaagtaaggccatacat

SEQ ID NO: 55679 - DNA, 122 bp, Homo sapiens
tgcaccatgcgtgtggactgccgtgcacactgactgtgctctttttgttcagtatggctccgcttttaaagctgtggtctgtgtgtgtttgtgtggatgacgtgcacggctttctgaaacga

SEQ ID NO: 55680 - DNA, 122 bp, Homo sapiens
ccgtcaagatggggggcggggccagagccaaagccctccgaagagggtgaggcctaaggtcgcgacggcggagggcggggacctaagggcggggactgaggggcgggctctaagggaagggc

SEQ ID NO: 55681 - DNA, 122 bp, Homo sapiens
ccacgcgaggcaggtactgagagccagctcctcttcccccccgtgtcttaggacagccatcgcagcgggggaggtaccccccgtgaggcagggactgagagccagcccctcttcacctctcg

SEQ ID NO: 55682 - DNA, 122 bp, Homo sapiens
acttcccgctgttcgagcccacgtgagtggctccgccccatctggcttctgaccaatggacgagcttcctaaggcgtaccgtcccgactccaaggcgcctggctttgaggcgggctgcgtct

SEQ ID NO: 55683 - DNA, 122 bp, Homo sapiens
gccgcgagcgcaacaggagggggcgctggagcccagggcccttgcgcacccgaaggtttccgcagggccgcagcgccctctgccgggccttggcgcgcactcaccggggtgggggcattcac

SEQ ID NO: 55684 - DNA, 122 bp, Homo sapiens
cctcagtcctctacttcccatgtgaagctgatgcacttgtgattttgtcctaatcattttcgtagaagtctagttagtgattaggtgaaggctcaccacaccacaacacactgtacatggct

SEQ ID NO: 55685 - DNA, 122 bp, Homo sapiens
ctgtctttggaaccagaacatcccaagggaactccttcgcactggcgttgagtgggaccccgggatccaggctggcccagggcggcaccctcagggctgtgcccgctggagtgctaggtgga

SEQ ID NO: 55686 - DNA, 122 bp, Homo sapiens
tgggggtggcgtgccaggcgcgtaccccaccaggtgggcaaagcagaaacctgcggggagcggagacgccttttatctctggatgccacagacctgagcagcattgggctggctgtccgctg

SEQ ID NO: 55687 - DNA, 122 bp, Homo sapiens
ctgcccaggactctcaggttgggctggccctactcaggattacactgaaagtaatggcctcgtaagtacaggtgatggttttggacacgtcaggaattcctaaaggctgaaagagtgtatcc

SEQ ID NO: 55688 - DNA, 122 bp, Homo sapiens
gccggtcgggctaacagggggctgccttgggaggcccgcggggcaaagggcagcgggattcgcggctggagcaaccctggaggccgctgacgtgagcggggtactcccaccggggaggtcac

SEQ ID NO: 55689 - DNA, 122 bp, Homo sapiens
ggtcagctggaatcttaatgatgagctggtccaacccaacccctcttgttgtagtcaagtcgcttgtgcaaagccaccactttgctgggaccccaagctcaggccagggctctctccatggt

SEQ ID NO: 55690 - DNA, 122 bp, Homo sapiens
atgggaaggggaagaccagtgtaggccagacccctcccgggtcggcggctgaagggttgacgatacggaaaccacggagtcgggggtgggggagaggtgtcacacccccgcccgagttgtgc

SEQ ID NO: 55691 - DNA, 122 bp, Homo sapiens
atcaggtgggccttcttctggcgcagaggaagcaggcgcatctgggtgtgggcaatgacgcggatgacgtggcagtatttcttcatgctgctgaagtccttctccagctgcttcttgacatc

SEQ ID NO: 55692 - DNA, 122 bp, Homo sapiens
aggtggaggctgcagtgagccgagatcgcgtcactgcactccagcctgggcgacacagcacgactcttttaaaaacaggttttgttgagtgccgcattgatccggtccctcccacgccccct

SEQ ID NO: 55693 - DNA, 122 bp, Homo sapiens
ctcgaagacccctgcccagtgctgttttcagtagagggagtggagctgagatggggagaccgtactgagcggtccaggagtagggaaacagagctgctttgcagcttctgttccagaagatg

SEQ ID NO: 55694 - DNA, 122 bp, Homo sapiens
gctgcgggaaatacttcctgtttggcttcaacattgtcttctgggtgagcgcggggtctgcgccttgccctgtgctggggggtggtgggagagggagattcagtcttttgctgggggagacc

SEQ ID NO: 55695 - DNA, 122 bp, Homo sapiens
tcttcgcctcaggtctagtttaccggcaccccggcgtttcgccaatcgtcacctccttaacgctgggcacctcagaggcgtcataaaggcagatagccaacacctctgtgctgggtcctggc

SEQ ID NO: 55696 - DNA, 122 bp, Homo sapiens
tactgacttcaaaggttctcagaatcgcggcgaaagcaccctacgcaaaatagcggaggtcggcgccaagaaaagcactgcaggttcagggcgcatgcgcatttccgctccttgccggtttt

SEQ ID NO: 55697 - DNA, 122 bp, Homo sapiens
cctctgcaaggaagattatcccttctccctcatttatttaatcacgtatttatagcagcacgggctctgggctgttttatactttaggttataacttaatgcaatgtactttatattgctgc

SEQ ID NO: 55698 - DNA, 122 bp, Homo sapiens
gctctttactcctccagtttggcaaatgcgagcaggtcactacctacagctcagcgcgctcgtcaggaacatgttatagctcctttagctcctacctgcagcttggcgatccggccaggaaa

SEQ ID NO: 55699 - DNA, 122 bp, Homo sapiens
aatttttcattcttactgatgctgtctacaatttcccaagcagcaataactatccaccttcgacaccttgtggaccatgaaaacctcaaggatagagcaagggttattcatcgctgtatcgc

SEQ ID NO: 55700 - DNA, 122 bp, Homo sapiens
tgtttctctagctctattactggaggcgctttgaaaagcttttccatctgtagattgtcccgatggaaggcaagcagcgccggggagggagcgggtatccagagaaaacctgggatgcccag

SEQ ID NO: 55701 - DNA, 122 bp, Homo sapiens
ggtttcaccatggtgcccagcctgatttcaaacttgtgagctcaagagatccatctgtctcggcctcccaaagtggtgggattacaggtgtgagacaccacacccgatgtactacctttatt

SEQ ID NO: 55702 - DNA, 122 bp, Homo sapiens
tggctcaggtgctaagcccctcactgcctagggacggcagagccagtgggcagggccggccggcggctccctgtggggcccaagcccacgcacaccgggagctttagctggcccgcaaacgc

SEQ ID NO: 55703 - DNA, 122 bp, Homo sapiens
caagggggagaatgctagaaagtacgtctggtgggacggggctgggaactgcgctccccacgtgggccagaggaaaaagaacagcactcacaaggccatctatctgcacttgcttcacggct

SEQ ID NO: 55704 - DNA, 122 bp, Homo sapiens
gcggcggccatggagttgggcgagctgctctacaacaagtctgagtacatcgagacggtgcgcgggtccagatatgtatcctcctctttccaaccctgcgtccctttgaggcctggtcggcg

SEQ ID NO: 55705 - DNA, 122 bp, Homo sapiens
ctacgtgcaggagatggccaagctcgacgccaagtagccgccgcactttccagcagggatcggaggacgacccgagtcccaagagtggggttttgctttttaaaaggagagaggaggggtga

SEQ ID NO: 55706 - DNA, 122 bp, Homo sapiens
tttgttatcctcctactttccaaactgtgttattatctgggcaattgcttcacttctccgcgttatatactagacacggccaggaaatgatgcaattaccaaaggagtcaagacaccttaca

SEQ ID NO: 55707 - DNA, 122 bp, Homo sapiens
ataataatgaaaaatttgaaacattccaagaattaccaaaaagtggcacagagacaccgacggttagacttgctcttagtgactaattcctcagtatctcacttaagtgaatgccctttcaa

SEQ ID NO: 55708 - DNA, 122 bp, Homo sapiens
gtcccgttgaagaaatgacactcatacttatcctgctgcaagaaacgtgctgtggggacacgaaggatccggtcacaggggcggcctccggggaagatactgacagagacgccgccatccgg

SEQ ID NO: 55709 - DNA, 122 bp, Homo sapiens
tgctctcggtcctaccggctcagggcccctgcgaagaatctttttcaagaaattcccgaccgcaggaattccttctgcgctaggaatctccatggagtttgcgctccctctggcacgttgaa

SEQ ID NO: 55710 - DNA, 122 bp, Homo sapiens
actgttcaaaatgatgaacgaagatgcagctcagaaaagcgacagtggagagaagttcaacggcagtagtcagaggagaaaaagacccaagaaggtaaatcgccggaattaggaatgtctgt

SEQ ID NO: 55711 - DNA, 122 bp, Homo sapiens
gctggcggctcctctgcgcccggggcccggtcctccagcagctgtacccgcagcaccgtgcgctggtacagggccgggcaactctcgaagtcatccagaaagcgcagcatccgctcgtctac

SEQ ID NO: 55712 - DNA, 122 bp, Homo sapiens
gccccttctagagggcatggaagagggcttcatgccttccaccagctagagaggggatcccggaccccgcagaagacagcatgccatccctggggccacgatacactggtgagtcagaggat

SEQ ID NO: 55713 - DNA, 122 bp, Homo sapiens
ctttaggtcatcttttccacaaataatgcttcaactagtacttgcgtgccagtgactccacgtcccactcatgagctctgaacctagtaccagcttctgctggacatctacaatgggatctc

SEQ ID NO: 55714 - DNA, 122 bp, Homo sapiens
cgggagaggggtgtctcaggcccagggccggtccgggattcccaggatgactcccattcacgctgggtggcgggggaggggcgggccgggggaaggggcgcggcgacgcgcacatccgtcgc

SEQ ID NO: 55715 - DNA, 122 bp, Homo sapiens
acacacctttccagcagctggtggtatgtcagccgctccagcgtgttggggtcgaggaagcgcaggtcacctgtgccaggctcaagctctgacagcttgtgccatgtctcccggtccaggag

SEQ ID NO: 55716 - DNA, 122 bp, Homo sapiens
tttggaatcccatagaatgttctgcaatgattgggtccatcttgctgctcagaagaatcccgtcctgctctctagtgtggtgggatgaacttcaggcaacaaacaactggcagggttcccag

SEQ ID NO: 55717 - DNA, 122 bp, Homo sapiens
ctgcgaggcaggcgagggaaggcttggtaacggaggggcggggccgtgcaacccttacctcgactctgaacaggaatgtccagaaaagagtagaggagtgtttctcccttgatgtgggtggg

SEQ ID NO: 55718 - DNA, 122 bp, Homo sapiens
cacgtctagcagtcattaacaaggctgtactctcaaggccccgtgcaacgcctgggacaccgggtggggccttggggaaagtgcccaggcttcaggccctaaagggactgggtggaaaagga

SEQ ID NO: 55719 - DNA, 122 bp, Homo sapiens
caggtgtgagccaccgcgccccgccgagttttccttttgtaaagcaaacaaacaaaaacccgaacaaccctgtgaagaaggaacttacttgaggttgaagtcatccactgccatcctggcat

SEQ ID NO: 55720 - DNA, 122 bp, Homo sapiens
acagacacttttcaggcccatcttttaggacctcttaataaatcacaaacagagcaaagccgattatttcttttttttcttttttttttgagacggagtcttgctctgtcgcccaggctgga

SEQ ID NO: 55721 - DNA, 122 bp, Homo sapiens
cccccatgcctaaccaggctgggagccctgtttgacctctgggtgcccacctgcttttttcgactatggacagcccatacaatcccagaaaccccacgcacgaccagcaaatgactgagaag

SEQ ID NO: 55722 - DNA, 122 bp, Homo sapiens
gctgcgcgcggcgcttgctggccagcgcgagttccgggtgggcgtgggcttggcgggtcccgcactcggagccgccagcccgccccgccagccccgggcattgaggggcttagcacctgggc

SEQ ID NO: 55723 - DNA, 122 bp, Homo sapiens
atgttaacttacgtgaataaccataaatggatatgtacaggtagcatacaaataggaggacgggtgtctccacagcgaagaagaaatttaaaaggaggtttttcagtaggtctcattagcac

SEQ ID NO: 55724 - DNA, 122 bp, Homo sapiens
gtttggagttggtgcaaaagcaattgcagtatttgccattgaaagtaatggcaaaacccacgattacttttcagcagcctaataataggaggtaggtagaattaccagaaatgaggcataag

SEQ ID NO: 55725 - DNA, 122 bp, Homo sapiens
acgtccagcaggaagggcacattcacagatgacttgcacaagttggtagacaattgggcccgagatgccatgaatctctcaggcaggagaggaagcaaagggcacatgaattacgaggtaag

SEQ ID NO: 55726 - DNA, 122 bp, Homo sapiens
tagtcctcttattgaaatgattgcctcagctacagtttcctgtaagtttcagtaaatattcgatgaaaccccaaagttttaggtgattatagtgatttttcaaattgaaagaagagacagag

SEQ ID NO: 55727 - DNA, 122 bp, Homo sapiens
catcactatttcaccgccagctacccatgtccttaaccaaaagttaacactttatcctaacgacactcacgtacaattatatttgagaatatataactcctatttggaggaagtgggggtga

SEQ ID NO: 55728 - DNA, 122 bp, Homo sapiens
tagtcatgcccgcccttgtagccaccgcttcacccaccttctccggcctgcccccagccccgccacttttcaagttgggcaacttaatggaaaaaaatgaaataaaaagaagagcgagacca

SEQ ID NO: 55729 - DNA, 122 bp, Homo sapiens
ccaccgcgcccccccgtcatgccacctcccgtcaatgccactcttattggttgttggatccgggggatacaaatgtctttctcaaaagcagattagagctcagcccttcccttcccgggtgg

SEQ ID NO: 55730 - DNA, 122 bp, Homo sapiens
tttcaaaagtggagaacaaatgtccacataattttcttcctccacttccggcttctcaggcgggagccgttgcttacaacacgtgctgatgtgcagtgacaggttggtgcagcagaaagccc

SEQ ID NO: 55731 - DNA, 122 bp, Homo sapiens
aagatggtccgctggctgtctgccaagctcggccccacagtggcctctcgccacgtggcccggaacctgctccgcctgctgacgtcttgttatgttggtaaggaggcctgcggtcagtgctg

SEQ ID NO: 55732 - DNA, 122 bp, Homo sapiens
aagacggtgagggccacgttgctcagggaatctcagtgccttcacaccggctctgtgatgcggggctcagaacatacgctccttcttgagcctatggaaacgccaccagttacctgctaact

SEQ ID NO: 55733 - DNA, 122 bp, Homo sapiens
acatctactacagttgggataactaaacccactatctgccaaaatgagcctgtcagttttcgtatctgagctctactgctttcttagtggatggcttcaggcaggtgacttaatctttctat

SEQ ID NO: 55734 - DNA, 122 bp, Homo sapiens
gggcaagaggggaccttgcagagggatccaaaacaatccctcactgctaagacagaagaccggcggggataccaggaccgtgggccctgggccctgacgtctcggagcacacccggtcctga

SEQ ID NO: 55735 - DNA, 122 bp, Homo sapiens
gcgctcgagcaggttgtctctgggacactctaacttctcggcggtgccccctccccgcggcggcagtttgccctttacgttctttgggtccttcgtctgcagtggcgtttgctggtgagctc

SEQ ID NO: 55736 - DNA, 122 bp, Homo sapiens
cataggctcccccaggaatcactgagtttcctctgtgtaggtgaacagtttgagtagaatcggagtatcggagaggaaattaaagggtctggtaagagtttgaggccgggcgcggtggctca

SEQ ID NO: 55737 - DNA, 122 bp, Homo sapiens
ctcggggagcttcttatccccgcgcccgccgacgtcaggcgggtccccaagggctccgagcggggctttaattagaagccgctgaagtgttagtacccccatgcggatcttcgtcagtcccc

SEQ ID NO: 55738 - DNA, 122 bp, Homo sapiens
tggcagacctcgaggcggcctcggagatcccgggcctggcgaatactgggcggggaggggcgttaactccagcctcccgggcggggtctcccggctcccgcggccacgttgcagcccaggcg

SEQ ID NO: 55739 - DNA, 122 bp, Homo sapiens
cacagacactgcaggcctgcacatctcactgcctcacttctttcaggtctctgggtcaagcgttatctcctcagaaaggccctactctctcttcccagactctgctttgcttttcttcttgg

SEQ ID NO: 55740 - DNA, 122 bp, Homo sapiens
cccggggagccggttgagcgcggaggcgcggaggagccgagctggcctgggaggggccgccgagggacgcccgcccccgacgcgcccgggcccccccactcacttggtcctgcagtccatgg

SEQ ID NO: 55741 - DNA, 122 bp, Homo sapiens
atgctggggtgaggccctcacttcatccagcaactagcacccggtgcagcagcacaagcccggcactcaaatgcctctgtctcagcggttgtagacttcactaggccttcattctacactac

SEQ ID NO: 55742 - DNA, 122 bp, Homo sapiens
agctgtggttaagagccaaagcagtattttaggaagccccggaagtggccctggcaacctcgctgggaatctgcaccctgtttcctttcctgagcaaagttgggagctggatggagtctggg

SEQ ID NO: 55743 - DNA, 122 bp, Homo sapiens
actctacactagaacatttctggttgctggttggatttgccagtgggccagtgaggtcagcgggaatgagggaacagcgggtgacactgcctcagatgataccattaggggggccacagatg

SEQ ID NO: 55744 - DNA, 122 bp, Homo sapiens
accctttgggcagacgtggaccgcgccccggcgacctgggttgagtggacagacgggacccggcttacccatgggccaagccctgccacttaccgaggcctgccctgctgtgctttccaggg

SEQ ID NO: 55745 - DNA, 122 bp, Homo sapiens
tctctactaaaaatacaaaatttcagcgtcaaattagtagatactaatggttttaggaatcggaaaggagtcctatactatcttgccactcaattatgtgaatccacataccagcaatagtg

SEQ ID NO: 55746 - DNA, 122 bp, Homo sapiens
ctgaatcctccaacacattttagctgtgtcatctggaacaatgggtaatttttaaggcctcggttttttcatctgtaaaatgatcacattagtagttatatcaaaaatttgtcatgaggatt

SEQ ID NO: 55747 - DNA, 122 bp, Homo sapiens
agcggcccggagacttgcagctcggggcctccctctacgagctggtgggctacaggcagccgccctcctcctcctcctcctccacctcctccacctcctccacttcctcctcctccacgacg

SEQ ID NO: 55748 - DNA, 122 bp, Homo sapiens
ttatttatttatttatttaagacaggattttgttctgtcacctaggctggagtgcagtggcgtgctcgtggctcaaaaacatcctcaagttcccaggctcaggtgattctctcacctcagcc

SEQ ID NO: 55749 - DNA, 122 bp, Homo sapiens
accccaggacctggtgacaaacccggccgcggcagaaggcggtcaggaaccaactctgagcgccgccgcagctgcgggctgggctgggccgggccgaccggccgccgcctccccgcctcacc

SEQ ID NO: 55750 - DNA, 122 bp, Homo sapiens
gccctcagaccccttccttccaaagggtaacctccgcgtgacaggaatgagggtggggcgcgtggagtttcccacaatctgtactttagttaaatacccgagaattcacctcctgtgtccac

SEQ ID NO: 55751 - DNA, 122 bp, Homo sapiens
ttgggatgtggcttaactccagtgtcttccaattcttggaaaatgccagaaactcataaccggggccctgccacccagctatggctcctatcccctctccttcaccaacaatccatcctgac

SEQ ID NO: 55752 - DNA, 122 bp, Homo sapiens
tctcagaagctgtgtgtgtgtgtgtgtgtgtgtgtgtgtgtgtgtgtgtgtgcgcgcgcgcgcgtagatgcacaaaagctccgcgtggcaggtggtctcctgtaacacggctgagggggcgg

SEQ ID NO: 55753 - DNA, 122 bp, Homo sapiens
gagccagacccatgttggccgtagctggaagagtgcccagaaccggacccatgtcggccgcgactaggagactggccagatccagccccatgtcggccatagccagaagactgactggagcc

SEQ ID NO: 55754 - DNA, 122 bp, Homo sapiens
aggcctttcaaggacctaatctaaattcttttcaaagcctgcataattcgtgttgtatcacgatttacttaggcaggactgagtctttaatttctttttttctttctttttttttttttttg

SEQ ID NO: 55755 - DNA, 122 bp, Homo sapiens
agcctcggcccccggggcacgaggagccatggcccatcgtcctgagcacagagagcccggcggccctcaagctgggcacccaacagctgatccctaagagcctggctgtggccagcaaggca

SEQ ID NO: 55756 - DNA, 122 bp, Homo sapiens
cctctttctctctctctctctctctccccctctccccccctctctcctccccaccacccccgctgtctcagcaaggctctggctctccctgcagagctctggcaagcttccttggttccatg

SEQ ID NO: 55757 - DNA, 122 bp, Homo sapiens
tctcctccactgtctcatcccacttctccgaaggtgggcagggccacgctctggggccagcgtcacgccctgggaccagcggctccttgtgagccttctccccgcttccgaggggctagagg

SEQ ID NO: 55758 - DNA, 122 bp, Homo sapiens
gcgtgcaccacaccgggcggtccctggatgaccgtgacacaggcggggaaactcatgcaccgcacaggtccctcaccctgggtgcaagctcaccttggtttggaggttttacttaaaatgat

SEQ ID NO: 55759 - DNA, 122 bp, Homo sapiens
ttgtagaaatgagggctactggtctccttatctcaggtgggacataagtgtgtgatagagcgtctttcctcagatgaggcagtatcctgcttcaatgaacgtacccacactgtccccacatt

SEQ ID NO: 55760 - DNA, 122 bp, Homo sapiens
agttgccctgaagattatgctgcaaagtcagtctgaggctgtcatgcttctgcttaggaacgtttcaataaccccctatatttcaagactaaaggaaacagtagggtgtagcagcttcaggt

SEQ ID NO: 55761 - DNA, 122 bp, Homo sapiens
ctcagctcctgttctggaaagtgatgcacacctgaggctttaggctaaaatgctcacacacgctgcaggacaaaggctgctgcatctcacatctcctggagaccagaaattgccagggacct

SEQ ID NO: 55762 - DNA, 122 bp, Homo sapiens
gcacggtagtaggctctgggaattcgataaaccccaaatctgccctcttggagctgacagcgtggcaggaaagatagacactaagtgtaaagatgagtaatggcacgcgttgccagtgtatc

SEQ ID NO: 55763 - DNA, 122 bp, Homo sapiens
ttactggggcccggtgtttgccatctgcatcttcctcttctccttcatcgtccccgtgctcgtcatctctgtctgctacagcctcatgatccggcggctccgtggagtccgcctgctctcgg

SEQ ID NO: 55764 - DNA, 122 bp, Homo sapiens
cctaaaccccttttcaaactcattcatttgtgtgtgactcattcacagtaaatctatgcccgaacagttttagtcttaaccaaatgttgaccaagctgaaagtatgctaaaagctctgccaa

SEQ ID NO: 55765 - DNA, 122 bp, Homo sapiens
aaaaaatgagaggcaaaaaatcagacagagttaatcaaattcacaataaaaatgaatagccgtggccaggtgtggtggctcatgcctgtaatcccagcactttgggaagcagaggctggtgg

SEQ ID NO: 55766 - DNA, 122 bp, Homo sapiens
cagggcagggtcccctcagtttgggtgacggaaggggcgtgtcgcagcgcccaaagatgacgtgttctgccagcgccacgtcatgaggaagtgccggcccactgaagccgtggggacgcgcc

SEQ ID NO: 55767 - DNA, 122 bp, Homo sapiens
tctggatggaaaggcctgtttgtctccctcaatctttggcgagggtggcaggcagccaggcggccattacgggccgcgcctcccaccagccagtcgctggcaggagcgtccggggagggagc

SEQ ID NO: 55768 - DNA, 122 bp, Homo sapiens
gatccagcagaacaccttgttacaaagtttcgaggagggtgggaggggtggaagccaggacgggtagcagaaggaagaaaacttccagcaatagggattgaggttccacacgaagttaccaa

SEQ ID NO: 55769 - DNA, 122 bp, Homo sapiens
cctcagcgcctcctgtgtgctgcagcagatggcgcgctgcagaccccagcctggtgcctccgcgactcctccccaaccatgatttacaggcggggacagccacattcctgcgccccaacttc

SEQ ID NO: 55770 - DNA, 122 bp, Homo sapiens
ctcaagtgatccacctgcctcggcctcccaaagtgctgggattacagacgtgagcaactgcgcccagactgatgacaatctaatgcaaggcatgataaatgtcagaagtgccacctaatgaa

SEQ ID NO: 55771 - DNA, 122 bp, Homo sapiens
acacatccttggcaatttctcccatcttggcttctccttcttatcactttggtccacatacggggacagcgtctaagttctttctgaccacctcctcagtcctagaaaaaccagacttggtt

SEQ ID NO: 55772 - DNA, 122 bp, Homo sapiens
agaccaactcgatactcactaggatttgtagtctttcgtctttcttcgggtttactcttccggtcctagggtcacacccaccgcagggtctggcttggtacagttgggtgcatgcagaagta

SEQ ID NO: 55773 - DNA, 122 bp, Homo sapiens
tggcgcatgctgcggccgccggaagtggacctacgtcatgcaggtcagtcggtaggtttccggcgcccagcgccccgtgggagttgtgtctggtggcccacgctgggggggggctcttcaca

SEQ ID NO: 55774 - DNA, 122 bp, Homo sapiens
ctcacagctactgctcaacttttgattgggacttccgcttccggcggcaaaccatacttccggtttgtcgttgctataggaaccgctacggcgtttgaaagtgtccgggttgcttaggatcc

SEQ ID NO: 55775 - DNA, 122 bp, Homo sapiens
cccgctctaagaagttgcctgcgctctgaggtgagctgacaggcccctctctgtgtggttcgtcagcgctggtgacgtcatgcaaacgtgacgtcagccctggccagaacatctggcctggg

SEQ ID NO: 55776 - DNA, 122 bp, Homo sapiens
actgtgtttttatatttactcctgaatccccaggcctttgttatggtgtatgataatactcggatgaatgaataagtaaatgaataaagatgatacaagagaggggtacttagttttccagg

SEQ ID NO: 55777 - DNA, 122 bp, Homo sapiens
tcagtctccgcagagcccgggcgggagtagctggtggaccccgttgagctgccgaacttccgggactcccccgcgaccccttcccagcttcccgtccgctccgccgcagcgattgtctcggt

SEQ ID NO: 55778 - DNA, 122 bp, Homo sapiens
gttgtgcagccgcgtatactcggccatgtttcctctatcaccgagggcacctctgcctctcgccgtcaggcaaaccacttttccgggcgcgcccggcctcctccagaggagggacgccggct

SEQ ID NO: 55779 - DNA, 122 bp, Homo sapiens
tctcattcatcttcacgtgatagcatgggctaagagaatttggtagcttacccaagatcacgtgttgacaagtggtagaggtgggcccagtctgaacctcactaccctgcctctaaaaattg

SEQ ID NO: 55780 - DNA, 122 bp, Homo sapiens
gccattctagggccaggaaggaagagcctcagaccctggaattgccatgtacaaactagacgtgtatttatggtgtgtctgaatgtacaacaatttcctgtttcggagaaaatagttccttc

SEQ ID NO: 55781 - DNA, 122 bp, Homo sapiens
cctggagatgatattcagatcaatatcaccggctaggtgtacacctaccgcgatattgaacgtaatatcatgctctctccctccctggacattaggagcaatatcacaggtgggtgtacacc

SEQ ID NO: 55782 - DNA, 122 bp, Homo sapiens
agcaggggtataatggtgccaccagcacatacagaaggagtaagaagtatcctcaaggcacggagagatgatagggtgcagggcctttgcactgggcttattcacaggcaaaatatttttcc

SEQ ID NO: 55783 - DNA, 122 bp, Homo sapiens
aataacattatactgaacctattgtttcataactcttagcactttatttgtggtacatagcgaaagagtagaagttggggtgttcagaggaagatttgtcaagctttgccatgcttggcaaa

SEQ ID NO: 55784 - DNA, 122 bp, Homo sapiens
tacaagaagttggcctgcgcctgcacgctgggaggcttgcagaagctggtgcgcctgaatcggatgctctgcactgacacttggctggagccggagctggagtccgactcggtggacgagtc

SEQ ID NO: 55785 - DNA, 122 bp, Homo sapiens
aaaacatgttgaaactcacacacttccaagatgacgtattctcaggtctcctgccgttgccgttctctgccgtatgtgatggtgttctgtcttaccagaggctgtggccctgagaaagatca

SEQ ID NO: 55786 - DNA, 122 bp, Homo sapiens
gccattgctttgggggtcatcttccagacagctgcctgctagggagccctttgcattcggcgatgctgctgctgttcattgtctggccatgggagtaacaattttggacatcattgatgatg

SEQ ID NO: 55787 - DNA, 122 bp, Homo sapiens
cccagcggccacgcttcatcagtcctgcctcacaggtggccatctgcctggcacttatctcgggccagctgctcatcgtggtcgcctggctggtggtggaggcaccgggcacaggcaaggag

SEQ ID NO: 55788 - DNA, 122 bp, Homo sapiens
atttccggtcacggaaacggcactcagagcggctcccagaaccatttccggtcacggaagcgtcactcagagcagattctagaatcatttccagtcatggaagcattacttagagcagcgta

SEQ ID NO: 55789 - DNA, 122 bp, Homo sapiens
gaagagtcagatacaatacttcttcggggatttgtgagtaagcaaatatgcagaattacccgtggttgctgcaattttgaccttagaaaaatccacagtgtgtgtttcctagaaaacagcct

SEQ ID NO: 55790 - DNA, 122 bp, Homo sapiens
tgcgcaaaccgtttcacttctcaatcttgagtttgaactccactttcccttcatacgggtcgtggggattgttgaaggtcacgtgctccgccatgaccttgcacacgatggcgacctcagcg

SEQ ID NO: 55791 - DNA, 122 bp, Homo sapiens
aaggggaaacgctggtggcacttggtgcaggcgtagagcgccgccatgtccggcccgggccgcgctcaccgacccgccagcccggcccgctgatttatctcgttgcaaggattttaaagata

SEQ ID NO: 55792 - DNA, 122 bp, Homo sapiens
aggggcggggcgatggggcggggacggagccatggggcctcgttggagccgaggcctacacgttgcaggggcggggcgctgggcggggaggggcggggcctaggccagataccctgcagggg

SEQ ID NO: 55793 - DNA, 122 bp, Homo sapiens
taaagccactcatcctaaaagacagggctccagatggatgctgtatggcagaggataaggcgctatgagaagctgccaagcctcagatgtgcagctgggctgaataccgacgccagcgccta

SEQ ID NO: 55794 - DNA, 122 bp, Homo sapiens
agtcgaaactagtgaaagaggaattgggtttgggttccatgctacaaaaatcagcattcacggcttggcccctaggtccctttgcataagtcctcagtaggtctcctgcctccttccctaac

SEQ ID NO: 55795 - DNA, 122 bp, Homo sapiens
acagccttgggcagcaggaaaccttcagacccgcttctcatcctgcgtgagtcctggaggcgggaacgtggctggttgaggttcaaagacctgcgctctaattaccagcataattagaataa

SEQ ID NO: 55796 - DNA, 122 bp, Homo sapiens
ctggtccctgcctgggtgacatctgctgcccaattcccggagacagctgtgggggttaagcgacagcagcaccagcacacccaggcccagcaggatcctcaccagcctgcagctgtggagct

SEQ ID NO: 55797 - DNA, 122 bp, Homo sapiens
cagacagcgttcttggctacagcattggagaaatcaagcgcagcaacacttccgaaacaccggagctgcttccttgtggctatctggttggagagaacacgaccatctcagtgactgtgaaa

SEQ ID NO: 55798 - DNA, 122 bp, Homo sapiens
agacgacggcggcggtgccgggagggggcgcgggcgcggccccggcctgtggcggctactcgctctcgtctttgtcctggaccgtggtggtggagtggttgtacagtccctgggccatgagg

SEQ ID NO: 55799 - DNA, 122 bp, Homo sapiens
gcgggggataggggctggctcttactccccgtaccccgggtggggggcctcacccccctgcgatgggtctcctaagagccgggggagagagtggctggctcttactccccgtatcccaggag

SEQ ID NO: 55800 - DNA, 122 bp, Homo sapiens
attatgaatctctatttgaattattagagatttcagccaaaactacatctcccaaagctacgacctttgaacatttcttgtagcctccaaaacttcagaagctattcgaatagcagcagtac

SEQ ID NO: 55801 - DNA, 122 bp, Homo sapiens
cccgcagcccgcgaggctcctctcctgctgccctcgtgggttcaggagctgtgggagacgcgacgcaggagctcccaggcagggatccccgtccgtgcgccccggagcccgcgcgccccaga

SEQ ID NO: 55802 - DNA, 122 bp, Homo sapiens
gagactgttgcttacaggactgggctgggactaaagaggcagttttaaaatcccggccatcggcaagaagctccgcacagagtcagacatcctctgtgttgccacctcccgtgggggctgca

SEQ ID NO: 55803 - DNA, 122 bp, Homo sapiens
cagagcctcctggaatcgtagcgcctccttttaggagaagtgcaaccagggcaggggcaccgaggggcagggtgaggaagtggacgccccacgcgtggaccctagaagaccgactaggtatg

SEQ ID NO: 55804 - DNA, 122 bp, Homo sapiens
gggaggtgcccagatgggaagagcgggagcgttagggtcgaacctgagtttgagccgtggcgtagtgccctaggagctggtgtccctggttaaaggccgtagcaccagcacataaaaggcag

SEQ ID NO: 55805 - DNA, 122 bp, Homo sapiens
cttaaagaccctaactccaagtacagtcatattcagagacactgggggttagggttccaacgtataaattttggggggacaaaattcaactcataagagttcccaggcctatgctctctagt

SEQ ID NO: 55806 - DNA, 122 bp, Homo sapiens
ccattacacaaaaagacatactgactaaatacaacataatttctataacctgaggggactcgcacatcattacctgattgcttgctgacttggctgttgattggtttcatgactttgaagct

SEQ ID NO: 55807 - DNA, 122 bp, Homo sapiens
tgctatggcacacaggtgcaatgagtcagcctttattcctaatcacccacaactgctgtacgacaacaaagcagaaacacaggtggtgtgggcaaacacggccacagcctcttgtcacgtgg

SEQ ID NO: 55808 - DNA, 122 bp, Homo sapiens
tgaattcctgacctcaggtgatttgcctgcctcagcctcccaaagtgctgggattacaggcgtgagccaccacacctggccacctgttcttgaaggttgtgtcccttttcaaagttgccttt

SEQ ID NO: 55809 - DNA, 122 bp, Homo sapiens
aaaaataaaacagggaaacagcctgagagggagagatcaggagaaagcagggcaaagccccgaaaatacattcgaggtgacatcactgcctttcccacagaggccattgacttgggagaccg

SEQ ID NO: 55810 - DNA, 122 bp, Homo sapiens
cttgaactcctgggctcaagcgatcctcctgcctcagcctcccactgttgggactacaggcgtgagccaacacacctggcttcaaatgataactctatgttaaactttttgagaaattgcca

SEQ ID NO: 55811 - DNA, 122 bp, Homo sapiens
ctgtgtcctcaggttggcgccactccaccagctgctgcagcccatggccggctgtgcccgcgtggcccagtgtgcccaggccgtgcccacgctgctgcaggcattcttctcagcagtgaccc

SEQ ID NO: 55812 - DNA, 122 bp, Homo sapiens
ccgtcctctgcgatgcccgccaaggtgctgtttctcagttctttgggctgcagggcgctgcgggggaccctccatcaggcacgctcccttttgtgatgctcggtggatgcaccaaaggagca

SEQ ID NO: 55813 - DNA, 122 bp, Homo sapiens
aaaggccacgtacctaaaaaggtgtttactgcctcagaatatacttgacaattgtggaaacgttagcaatctactcttccaagattccttggagttgtcatacataagcaaatccatatgga

SEQ ID NO: 55814 - DNA, 122 bp, Homo sapiens
agattcccacccctctgacgctctgaccaggaaaaaaccggccaaggcggtaggtagccccgaggccaggtggaccttagccagacccaaccagagccctgaaatttgcctctctctgccca

SEQ ID NO: 55815 - DNA, 122 bp, Homo sapiens
tattttcagaaaacagaaacaatcttacatcttcttccttccctatatggatttcttttacgtctttgtcttgtgtaattgttctggctaggcaattacacataatgttttcagcatttgtc

SEQ ID NO: 55816 - DNA, 122 bp, Homo sapiens
acacgtgtggtaggcagcctggcctgggttgtggctatggccaggcccccaagctgtccccgatgcccagggctggtgaccacccaggcaggtgggggccccacttggtaacagagtcatag

SEQ ID NO: 55817 - DNA, 122 bp, Homo sapiens
cggtgcagggagcgggggctccgcggccaggctgggggcatgaagccgcccggtccggtccggcttcagcccacaggatgactgacctgccccgcccgggccctcccagtggtgccggcgcc

SEQ ID NO: 55818 - DNA, 122 bp, Homo sapiens
agcctccagggctgcctcgggcccggctgtgtcggggtacagatcatcctggaagaggtccgactgggcagggggccggggaggtcaggatcagttaggaggccccatcagggtcccctcat

SEQ ID NO: 55819 - DNA, 122 bp, Homo sapiens
tgaccgcctctctcccacctgactggctcctccctttccccggccggacacggcgcccgtcgcagctgccagactccaaaatggcagccgcgcagagcgcgcacccaagcggccggacctcc

SEQ ID NO: 55820 - DNA, 122 bp, Homo sapiens
ttataaaaaggctgctgagcacatcagtattttgagaaaatgccatatgttttaaaaacacgtttttaaaagtcgatgttgaaaaaggcacaccaccaagctgcgaaaacatcaccaatggc

SEQ ID NO: 55821 - DNA, 122 bp, Homo sapiens
aaaatggtgagcaacaatataagacttttttttttttttaaatgtaggaagactaagtcacgatgccactaggaactaacacagcgttggcatcaccaggtaaggggctgtggaaaatctcc

SEQ ID NO: 55822 - DNA, 122 bp, Homo sapiens
gcgccgggttccgtccaagcactgttgaagcaggaaaccccgaccactctcggcgaagaacgtctcaacttttaattatcatatttttttctgagaaagagtctcactctgtcgccaggctg

SEQ ID NO: 55823 - DNA, 122 bp, Homo sapiens
agtgcgccagccctcggggcctgcccaggttgtgcgaggcccgcgcggctccctggcacgcgcacacccggtcacctgtcttgatcctgtggctcctgagaagctggatcatctcctcggta

SEQ ID NO: 55824 - DNA, 122 bp, Homo sapiens
cgcgccaccgacgtgtaagtctggttggcccgcagtgggtagccgtgagcccgcaggtggcgctccaggtcctgcaccgtgccgcggaaacggctcagctcggccgtcaggttgccccaagg

SEQ ID NO: 55825 - DNA, 122 bp, Homo sapiens
gaggggggcggcgggcgggggcgggggcggggcgcggggccgggagagccacagggagtccgcgcgcaatcgagcgccgatggcacggatgcgaggcggggaaggccgaaccgaagggcaga

SEQ ID NO: 55826 - DNA, 122 bp, Homo sapiens
gcactgcgcggggctgggagcagataatgagatgtgtgttgaatcacgatgccaacctctcggggagaaacaatgttcagggattcatcattggcaggacggagtttcagatcccttttgaa

SEQ ID NO: 55827 - DNA, 122 bp, Homo sapiens
cagctggctcccttctccctttctgatttttaaacaaatctctccctcccttttgctttgcgttagtgaagccttctcgactcagataccaccgtccccctcaccaccccgccccgccaaga

SEQ ID NO: 55828 - DNA, 122 bp, Homo sapiens
ggagagaaaaccaaatactgcaagttctaatttagaaatgagagctaaacattgagtatacgggaacatacagaagggaacaatagacaccagggcctacttgatggtgtagagcaggagga

SEQ ID NO: 55829 - DNA, 122 bp, Homo sapiens
ggacccccacccgggagtcagcgccatggtgccctcacagcgtcccgctcgcgagccagacggcagcagccgctgaccatccccgtccggggccgcctccaggtgcagtcccggggcagagc

SEQ ID NO: 55830 - DNA, 122 bp, Homo sapiens
ctgtcagagtcacacattccaaagcagcagaaatcaactgacagcctccggttactcccccgcctcagcgaggcagggcaggcagcggaaagctcagcccatgtgaggtgcctcctgccaat

SEQ ID NO: 55831 - DNA, 122 bp, Homo sapiens
attattgcactggttaacttgaagcagcagaggctgtagtttcctagtgctgactctgggcgccgctgttggccaaagtggagagcttggcgctccagatctcctcgcgcagccgcagcgcg

SEQ ID NO: 55832 - DNA, 122 bp, Homo sapiens
tccacccagcgctggtcttctaagaccactcaccgtacggttgccagataaaatacaagacgcccagttaaatttgattttcagaagaacacgaataattcttttagcatttttatttttta

SEQ ID NO: 55833 - DNA, 122 bp, Homo sapiens
gggaggttgaggctgaagtggctgtgattgggccactgctctctagcctggatataacagcgagaccctagctcaaaaaaaaaagaaaaaagttaacatttctttcatcatacctcactcta

SEQ ID NO: 55834 - DNA, 122 bp, Homo sapiens
tgccacagaaagctagcatgttccatagagtaaggaaaggtagatcacaactgattgatacgatcagtgaatgactcatggagaaggtagcattttagcatttagggtcttaaaatgggctt

SEQ ID NO: 55835 - DNA, 122 bp, Homo sapiens
cctttctgccaaagatctcatcctacccatgagaaccatcatactccagagactaaaaaacgccagtcccagctggagacggggaaggaggtccattcctatgggcattgtcccaacatgtt

SEQ ID NO: 55836 - DNA, 122 bp, Homo sapiens
tgaccttgtgatccccccgcctcagcctcccaaagtgctgggattacaggcgtgagccaccgcacccagctgacagtttcagcattttgtaaaggaaaatgaagctcaaagtattcaagaga

SEQ ID NO: 55837 - DNA, 122 bp, Homo sapiens
agaggccttctggagagctggctgcttcagctgcgagcctgacagacatgggaggctctgcgggccgggagctggacgcggggaggtgagaccggccgggggctggccgacaaacttccttt

SEQ ID NO: 55838 - DNA, 122 bp, Homo sapiens
aagagtggcagtcggaatgagaaagcggtaaagagcgaaaaagaaaggaggcggccagtccgtaggcgtgactttaactcaggaagcacacagagcgcagattttgcggataactggcttga

SEQ ID NO: 55839 - DNA, 122 bp, Homo sapiens
aattaatctaacaataataccattaccttatcccaggtatttggcagtagattacaggcacgcatacaatattagccaaatctcatcaagctttaagacaaattgggaaataacaattagtg

SEQ ID NO: 55840 - DNA, 122 bp, Homo sapiens
tgacctgggcgaagtgtgttgccaacacgcacttggaccagactcgagacagcggccactcggccaggtcccccggggtccaaaccgatacgaaatggtgccctctgcccgtcgcccccttg

SEQ ID NO: 55841 - DNA, 122 bp, Homo sapiens
agagcccagccaagcacagcacatgcttcgactttccagtctgctgaatgagtgtgaggccggctgggcccagaagacaagggacaggcctttccccacagatggcagggggggcccaggat

SEQ ID NO: 55842 - DNA, 122 bp, Homo sapiens
gggctggagcgagtgcagccgccgccgccgccgacaccgcggcacatgggccggccccgccgctgccgtcgcccctagccccagcagccctggtctcgcagcctcctgcggctctggtcgcc

SEQ ID NO: 55843 - DNA, 122 bp, Homo sapiens
gggaatctgaggagcaaaggggctgttcaggccgagggcatcccggagccccttcccctgcgctgcttttcatttgcgtttgctttttagggtgacgtgtgaggagcaaacattcagagcac

SEQ ID NO: 55844 - DNA, 122 bp, Homo sapiens
ctcctaggatacaggctgggcaaggcagataagtggctcttggcctggtgacctttccagcgtccagttctttggagtaaccacttcgcagagcctcatccagccggaggagccccaggcta

SEQ ID NO: 55845 - DNA, 122 bp, Homo sapiens
gtgcagtgcgtcgtgggtcagatcccttagacccacgtagggaccgcgctacatccttaccggggggagttacttctctggaagacatttcagttgttgggattgaaagttagggcaagaac

SEQ ID NO: 55846 - DNA, 122 bp, Homo sapiens
cctgcaggtgtaggctgaggtcagccccaatccagtccaaagcccaccccctttagcctccgtgctctgggcaggaaagctcaacctggccccaaagaaatcgggggcaacgacttcatttc

SEQ ID NO: 55847 - DNA, 122 bp, Homo sapiens
cggttacagccatgaaaatgtgtcgtaagtactttctttctccgagggacaagatatatacgcctagtggtttcatgtgctacgtttcatctccggacatcaatgaactgcagacacccccg

SEQ ID NO: 55848 - DNA, 122 bp, Homo sapiens
gacactagcagcaaggatccctgggtattgtggtcctgtgctttgccagcaaccctctgccgacggtaaaattccagccggacatagaaccacaactcccagcaacccctgctgccgtgtgg

SEQ ID NO: 55849 - DNA, 122 bp, Homo sapiens
aaaagcaccccatcattaccttccactttgttctggagcaaggtttcaaaagaagagtgccgtattttgattaatttagtgaattggattttcagacacaagtaagagcatccactcagtgg

SEQ ID NO: 55850 - DNA, 122 bp, Homo sapiens
caacaaaccacgaacacacttccacatctccaaacattctttcctgcacatttaaatggccgtgtaaggctgttgctgtgccaccgttttatttaccataccctattattgttcttttagtt

SEQ ID NO: 55851 - DNA, 122 bp, Homo sapiens
ctggggcgggccctcggcgctgcaggagctgcccagaaacttttccctgctctcaccgggcgggggagagaagccctctggacagcttctagagtgtgcaggttctcgtatccctcggccaa

SEQ ID NO: 55852 - DNA, 122 bp, Homo sapiens
gaaggggcggggccgaggggacgcgggcggggccggctcactcttttggcaggcgggcggcgcggcgctccaagacaggtcccactggcaagtgagaatgtcggagcctagcagctcgtagc

SEQ ID NO: 55853 - DNA, 122 bp, Homo sapiens
ccagggaggaacctggttttaatgggccctgtgctcagggaggccttcagtcagcagggtcgcctcagcagcatttgggagcctgccctgcagctccctgcctccaccctgcacgctgtgcc

SEQ ID NO: 55854 - DNA, 122 bp, Homo sapiens
ttctcgctgccaagggatgtccacgtgtggccgggctcacggcgcgtctcactcaccaggcgaggtcacttgggttgtttgtgcttcttggctattgtgaatcgtgctgcgaggaacatttg

SEQ ID NO: 55855 - DNA, 122 bp, Homo sapiens
cttcccgagtcccttacatccccgaactctgcatcctcagggtgccccaagaccagccctcgtcctgcttcctgcctgctctccggcctgtggctttggtgtgcgccagtgtctataggctg

SEQ ID NO: 55856 - DNA, 122 bp, Homo sapiens
tttattgaaaggatgaacaattggtcattgtgaggaagtgaggtacagtagggctgtgaacgtgggctggggccagaccacgtcggtggtgtacacagctgccactgtacatggctggtcat

SEQ ID NO: 55857 - DNA, 122 bp, Homo sapiens
ttctagcattaatgctcctgcactcagcctctacacagcccagcatcaccctgggacccacgggcagctctgatttgagagaaggaaagacaatgggagtttatccagacacagagcttgaa

SEQ ID NO: 55858 - DNA, 122 bp, Homo sapiens
cagctaggtatctgatttcatatgcctgtttgctcgttttgcaagacaacatctgcctatcgtcatactgtttctgtgatctgagaatgaatgggctctcctggcacattagaggaatagca

SEQ ID NO: 55859 - DNA, 122 bp, Homo sapiens
tcgtgggcaggggcaggaccagcgcgggggcacgtcggggggtggaaagcgggaagaccacgcgcttgtgactgtcagcattcaccgtgaagtccgtgtctataggaggggacacgggcagg

SEQ ID NO: 55860 - DNA, 122 bp, Homo sapiens
gggttttgacagcgatctgtctggtgaggggcggcggcaggttaatgcacaccaagtccacgtcctgatgcagcagcacctcatcaatgcggctagtgtagaaggggacactcatctccttg

SEQ ID NO: 55861 - DNA, 122 bp, Homo sapiens
agaatggcagtgtgtgcagctccgtggacccctgccccagtgaaacagcacaactgatgacgattattcaaaagcaagcactgaaagcctctgggcatggtgcccagggcacacagcaaaca

SEQ ID NO: 55862 - DNA, 122 bp, Homo sapiens
gagtgtcgccctgtgctctccaccacggctgctcctgccaccatggcgtccctctgtctccgtaccatgtacatcacctgccaccagctggaaagcactgctgcacgtttctgcacgaggtc

SEQ ID NO: 55863 - DNA, 122 bp, Homo sapiens
ctctccgctttgtttcctttggtttgccacagagaatgttagtaagtactcaataaatgtcggctgtgacatatccctgccattgacatgcatcacgtcaccataactccctgtggggtgag

SEQ ID NO: 55864 - DNA, 122 bp, Homo sapiens
ttgcctgttttctgggaaagtcagggtagggtgtgggcaggtcgaaacagctcctgaatacgtcctgttgctttactgagtttctggaaaaggcacttcttaacctggtatgagcgaagctg

SEQ ID NO: 55865 - DNA, 122 bp, Homo sapiens
gggaggaacatcatcgtgttctacggctcccagacggggactgcagaggagtttgccaaccgcctgtccaaggacgcccaccgctacgggatgcgaggcatgtcagcggaccctgaggagta

SEQ ID NO: 55866 - DNA, 122 bp, Homo sapiens
ctagcacatgagggagagtacagtgtttcaggcaaaggcaatagctagcacaaaggccctcggcaggaatgagctcggtgtatacaaaaaaaagaaaggaagcaagttttgctggagcatgg

SEQ ID NO: 55867 - DNA, 122 bp, Homo sapiens
tactttctatctgtggttcaccatggagcctcagttaagttcctgaacctctctcagcctcgttttcctcctctataaattggtaaaccttctccagaagaaaagtgagaggactaagcaaa

SEQ ID NO: 55868 - DNA, 122 bp, Homo sapiens
agtcatatttccaggtttataaaatgatttgcaaacattttcttttgttccctctaacaccgctagtagataatggaaactcctttgatttggtctgtagataattttatgctatgttatat

SEQ ID NO: 55869 - DNA, 122 bp, Homo sapiens
ccagcagcggccggagccgctttattgtgttaacccatttgcgtgtcaagagctattgggcgctttctctgcctgtgcgttgcgggccgcgggaggagggctgcggtgccggccggtcacct

SEQ ID NO: 55870 - DNA, 122 bp, Homo sapiens
gctcaccaggccgcagaaagcctgccttgggaaccgggggtcattatccgccctattcagcggggcccggggaccctgggggccgagcgaggccagcccgggcgggagcaccgccgccagcg

SEQ ID NO: 55871 - DNA, 122 bp, Homo sapiens
cactcacctccttcagcctcttcacagcatacaccgtgttcctcatcaccgcccggtacacgcacccaaagccaccctccccgatcttgagctcctccgagaagttgtgggtgccccgggaa

SEQ ID NO: 55872 - DNA, 122 bp, Homo sapiens
agccagccgggcagccctattgttcagccactttcccagcccgaagggggccgctgggaacgcgaggaggccccggcccttcctgctccgtcgctgacgcgcggcctgcggaaggaacagcg

SEQ ID NO: 55873 - DNA, 122 bp, Homo sapiens
ggggcattgagagagaggaggcacccgccgagcagtgacaaggaacctgggagtcctgcccgcattcgctttgctgagcccaggcgcccaggactgcaattaccttgttccgcagaggtcct

SEQ ID NO: 55874 - DNA, 122 bp, Homo sapiens
ctctctctctctcccagaagccaagaggcaaggcctcagtttatcactataacaaccagacgacactgaagcggctggtgcgggatacagtatctcatttgcatagagcgcgctggttggct

SEQ ID NO: 55875 - DNA, 122 bp, Homo sapiens
aaaggaataaacgaaggaacatatctctcaaattggacttttaaaagccctttggccaagcgcggtggctcacgcctgtaatcccagcactttgggaggccgaggcgggcggatcacgaggt

SEQ ID NO: 55876 - DNA, 122 bp, Homo sapiens
tatagtggcagtaaacaaacattatagtctttgtaacacttttgtgcaggtgccttctcccgattttattaggtctatgccttccaagcctctgccttcattacacctgaaatgacccatct

SEQ ID NO: 55877 - DNA, 122 bp, Homo sapiens
tcccctcccctcccgcactctgttcccttccctggaaggtgactttgactcagtcacattcgcttcagtcctacgggcgagtggacggagggcttgctgcggcagagccgtgcctcttcctg

SEQ ID NO: 55878 - DNA, 122 bp, Homo sapiens
aaatcctgccttgactgcccagggcacacaggtctatacatggggcttcatgcccttctccggctctggagtaggaggcagaggtgtttccagccccccgggtccccatgaagcccagtgct

SEQ ID NO: 55879 - DNA, 122 bp, Homo sapiens
gatcgccgggcgaggccccagatggacctcaggggcggggagtgggcggagcttaggggccgaggcgaggtgtgggtggggcgggacgccgctgtggaggcggggcctgggcgcggacgggc

SEQ ID NO: 55880 - DNA, 122 bp, Homo sapiens
catcgtcaaaccccaggagtcagcccaccggaggatggagccccctgcctccaaggtccccgaggtgcccactgcccctgccaccgacgcagcccccaagagggtggagatccagatgccca

SEQ ID NO: 55881 - DNA, 122 bp, Homo sapiens
tctctgacttatgtgatgtgcccctgaccatgctgtatattttcaaaagtttaaaccttgcgttagacttctttgcatcccccagagcacctagtcgtgggccttgtacagagtcactgctc

SEQ ID NO: 55882 - DNA, 122 bp, Homo sapiens
tgcgacgagaggcgccgggcgctccatggccgcgccgtaacggggacccagccgcctccccgcccagcccagcccagcccttccgcccgcccaggatggaggcgcccgccagcgcgcagacc

SEQ ID NO: 55883 - DNA, 122 bp, Homo sapiens
aaatcatgtttgctctcccggttcttccagtggtttgagacactggtttacactttatgccggatgtgcttttctccaatatcagtgctcgagacacagtgaagcaaattaaaaaaaaaaaa

SEQ ID NO: 55884 - DNA, 122 bp, Homo sapiens
agcgcttcccctctgaatcaccgcagatgtgcagcgtggtgcggggaagcaagcgccaggcgcctggttggggggcctgttctaaaaacattctgtgaggttgaaagcccagcctggcgcta

SEQ ID NO: 55885 - DNA, 122 bp, Homo sapiens
cctgttaattgagttggcctgaaggtcatcaacaataatcaatatgaagacttgctgcgacgtgctaattgacactcccaaagaggaatagtgtcaacaatcaataaagaggacagagcact

SEQ ID NO: 55886 - DNA, 122 bp, Homo sapiens
ctccaacagccgcctctcgcgcgcgcgcgcgcgccgcccgccgcccgccgctccgcggtccgccttcagcaagggactcctcggcggccacagcagccacctcctccacctcttcctcctcc

SEQ ID NO: 55887 - DNA, 122 bp, Homo sapiens
aacaaggaaaaagaggagaaggcacacttatggaacagatgccagacactgctcaggcatcgtatgttctcaatacccgctcactgagggctcaaaaacccactcaagaggagcacctactt

SEQ ID NO: 55888 - DNA, 122 bp, Homo sapiens
ccaggttttgcctgggagggcggtctgaggccagcaggaatactgtaccggggctcaggccgtcacccgcagccagcatggagaacgctgtcctgacacaagtcactgcatcttctcatggg

SEQ ID NO: 55889 - DNA, 122 bp, Homo sapiens
tgcatgtgaccgtggctacagcctgagcgcccccagccgcatccgggtctgccagccacacggtgtctggagtgagcctccccagtgccttggtgattctgtgggcccttggggtggggcag

SEQ ID NO: 55890 - DNA, 122 bp, Homo sapiens
gtggcccagatggtccaggacccctagaattgagtgatgaccccacagttctcatcaagccgcattctggatagcgctaggggcgactctcagactccccctgcctgggccccgctggtgtg

SEQ ID NO: 55891 - DNA, 122 bp, Homo sapiens
gggggtcctggcataaaaaaattacatggatttagagtagagagagagtatgttgggggtcgggtgcaggaatctgcctttccaacagtcactcaggtcattttagtcctggggcctgaggg

SEQ ID NO: 55892 - DNA, 122 bp, Homo sapiens
taccagaacttggagttggccgtgatgttgacgtcgcccttgtagagggtcactgtgggccgcgggttcccaaggaaggcgcaggtcatggtgcagtcctggccgcggagcaccgtgtgtgg

SEQ ID NO: 55893 - DNA, 122 bp, Homo sapiens
cacacttgttccagttgtcccccacatacagtgtgaacttcttcaccaggtgtgtgtcctcgtctgtgaagaagccctgggagggaggtgggcagtccactgacagctgtccagccgccctc

SEQ ID NO: 55894 - DNA, 122 bp, Homo sapiens
ctatatctccttgttgtgctccttgcatgcggagaaccagtggcccgtaagacttatgaccggtgttttttaggggaggagccacctaaactatctaggaatggagtccagtgccagaaaga

SEQ ID NO: 55895 - DNA, 122 bp, Homo sapiens
tggcttgcttttctctggcaccagtaccccatggtaagagtaatatatgctgaggggaaacgcagatgcaggcttctgaagaaaaaggaaagaaagccctctacctgcctgattttaggccc

SEQ ID NO: 55896 - DNA, 122 bp, Homo sapiens
acaaacagaggccctggggctgggaagatggattttccgtcctggatcaccgtgagacgccgtcacgaatctgtccggcggcggattttcagaatattctcgtctgcggtcctgcacacccc

SEQ ID NO: 55897 - DNA, 122 bp, Homo sapiens
cggcttcgtggcgcaggcgcctaacaactaccgccgcttcctggagctcaagttcgggcccggggtcatcgagaacccccagtaccccaacccggcactgctgagtctgacgggaagcggct

SEQ ID NO: 55898 - DNA, 122 bp, Homo sapiens
ggaaagcaggggctagatctgttagcaacgtaaacaaactcagccgcctaaccggaactgcgtttccagcagcaagggggaacttccgagatcaaaggtgacagcttccggcaactgatgcc

SEQ ID NO: 55899 - DNA, 122 bp, Homo sapiens
ttgtagctgagtgggtgaaacggcatcaccaacatttggccctgctgctccactgagagccggcgccgttcgcgggataattatcctgtagtcttctcacctccggagagaatgcaaggcgc

SEQ ID NO: 55900 - DNA, 122 bp, Homo sapiens
ataaatgtttactgataacatgaggatatctttaaaattgagcaatctaccctggtcctccgtgggctcgatccgaagcctgggtctcgaaacctggcgcccaggggccgagttgtagttgg

SEQ ID NO: 55901 - DNA, 122 bp, Homo sapiens
cccgcgcggtgactcttgctctgccgtcgaagagaacggccctcgggcgcgtcgcggccgcggctccagagcccctgggcctcgcgctctgagagcctgagccgcttgaggaggccaagcgc

SEQ ID NO: 55902 - DNA, 122 bp, Homo sapiens
ttaccttcttgaactctctctagaaccacacagactactgtttacttaggtgagtcataacggtggttgtgatcatggtgatgatgaataactaacatttgtggggcagttaaatattctag

SEQ ID NO: 55903 - DNA, 122 bp, Homo sapiens
caggcatcaggagttatccaatgtgacttccaaagacgccttgaaaaggttttctgctaacgaaactcttcttagtcaaatgaggaaccaaaagcagaagtggccccccaggacgtggtttt

SEQ ID NO: 55904 - DNA, 122 bp, Homo sapiens
ggtatatccctaaggaatagactatctgggtcatatgataattgtttaagactacaggcacgtgccaccacacctggcaaatgtttaaaaattttttgtagataaagggtctcgctgtgttg

SEQ ID NO: 55905 - DNA, 122 bp, Homo sapiens
gtggccaatcctcctgcatggaaaagaatggggagatcagaagaccggtcagcaggcgaacgtgcccctaaaggcccgagttctcagagcagggcagtgattaactttccggtttctcctcc

SEQ ID NO: 55906 - DNA, 122 bp, Homo sapiens
ctagcctccgactaatcacttctgtaaaatgggcattgtgggctccgagtctcgtaagggcgctagggattcgagacagcaggaatttcctcactgctccagcaaccctgggttcctgggtt

SEQ ID NO: 55907 - DNA, 122 bp, Homo sapiens
gaggcgaggcgaggcgggagcctcgtgtgccagccgcagccccacacctgccgggatgtccggacaaataaagcggtgtaaacaaaaaggggggagaaggacgtgtcaccaagtcgtgtgag

SEQ ID NO: 55908 - DNA, 122 bp, Homo sapiens
cctctccagccctcccacctctcacactctgggtcttgcgtctaggctccgattctggcgcgggtttggcaggggacaggcctcctgggctctcaggatatctgaggccaggctgtttggtc

SEQ ID NO: 55909 - DNA, 122 bp, Homo sapiens
tagagacagagtctcaccatgttgcccaagccagtctcaaacatctgggctcaagttattcgcttacgtcagcctcccaaagtgttgggattacaggaatgagtcactgcacttggcctcta

SEQ ID NO: 55910 - DNA, 122 bp, Homo sapiens
ggccgccggggccctcagtaggtgcgtcgtgggcgctggggacggcagcgggtgccctggcgggccgcgtgcagccggagagatgccatgtccctgctcctctgcaatgaaaagcaagcgaa

SEQ ID NO: 55911 - DNA, 122 bp, Homo sapiens
cattcggcttggggcaccaggctccccagagacaatgctcagtattcattcatacacagacgatggaagaagccacttcttccctgggcggtgtgggtttcccccagctcttcccacacgtg

SEQ ID NO: 55912 - DNA, 122 bp, Homo sapiens
aaggggtgacagacagcacctggaaagtcgcgtcactcccacccgcatactgtgcttttccgacgggcttaggaaatggcgcaccaggagattatacccggcacctggctcggagggtccta

SEQ ID NO: 55913 - DNA, 122 bp, Homo sapiens
ggatactcctccccaaagctatcaatctttgcagtctgcggaaacaaaagtgaaaacactcggggtaaggatgcatgagatgcccccccccacacacacacacaaacacacagagttgtgta

SEQ ID NO: 55914 - DNA, 122 bp, Homo sapiens
gtccagctcctagagctggaggagccaacagagcgaggaggtattagtggcctgaatatgcgaccttccagaggtgttgtccactgagggaactggacaggggatcaggaaccaatatttta

SEQ ID NO: 55915 - DNA, 122 bp, Homo sapiens
acttactgatgaggggcacgggcatagtggctgagaggctcttggcagcctgcagctggacggccagggtttgaattccgcctctagctcttaccagatgagtgatgttgagcagggtccca

SEQ ID NO: 55916 - DNA, 122 bp, Homo sapiens
acagctttgtacataaaagatgatacagcttggtctaatgtggttctaaggaggctctgccggcgagtcttaggggttccggcgggcagccgcgtgaacctggagcttggggtctgcagtgc

SEQ ID NO: 55917 - DNA, 122 bp, Homo sapiens
gaggattctccagatagaaagggcagctgtctccccttggcagccgccatctttttctctcgttctcctctcctagatagttcctgctctgtcatttgaccacaagagggagctttcactag

SEQ ID NO: 55918 - DNA, 122 bp, Homo sapiens
gtgtgtgggggtgaggtgcctacagagcatcatttggggatattggcaagaagggctggacgccaatattaagagagcattttggttaatgtgttacctgttttctgatcttgattttgcag

SEQ ID NO: 55919 - DNA, 122 bp, Homo sapiens
gttatctccttcaacccccacttagtgttggtggaaaatatttcaaacccgctcaataagcgagcaaataagctgaacatggtggcacatgcctgctatcccacctactcaggaggctgaga

SEQ ID NO: 55920 - DNA, 122 bp, Homo sapiens
agatcaagggttcagcacaacggcttgagacacatacgcgaccctcagagtgcgggtctgcgagaatgcaagcaccctggacatggtccagagtagctggacttcttcccgagggcactgcg

SEQ ID NO: 55921 - DNA, 122 bp, Homo sapiens
gccgagggcaatttggtgattggctggtctcaccacgtgaccggcgctgagccttccgtgcgaccggattggctgtcgcggacgctgacggacaaggccggggcgggccagagcctggtcgg

SEQ ID NO: 55922 - DNA, 122 bp, Homo sapiens
aaagagacataagcggcttatgtggatttctcctccttttcctcagggatttgggtgaggcgaagagaagtgggtcctgggagacacgagagaaggccgaaggggtttcagacttggttgtt

SEQ ID NO: 55923 - DNA, 122 bp, Homo sapiens
cgcggagtccgccacccgcgcgaaacatgcgttggttgggggaatgagcagcggcggctgcgcctggagggttgctcccacctctgtcgcctccagctacccccaaacaaacctccttttcg

SEQ ID NO: 55924 - DNA, 122 bp, Homo sapiens
ctgctgccatcagctttttctatagccactatttgtttcaccctcggaactgaaaagagacgttgataaatagaggctgtcccctcacctgtggcagaaaaggggtgttcaggccctccacc

SEQ ID NO: 55925 - DNA, 122 bp, Homo sapiens
caagtaagaccacgaatgtgcatgtactttgcagtttctgaagttgatattctggccagacgtggtggctcacccctgtaatcccagcacttcgggaggccgaggcgggtggatcacttgag

SEQ ID NO: 55926 - DNA, 122 bp, Homo sapiens
taatgcatagtaaaaacactgtaatgaaactactgcttaatctgctgtgattatctaaaacgaacaagcaactgtttcatccttattttgcagcatctgctcattggtacataaactgtgtg

SEQ ID NO: 55927 - DNA, 122 bp, Homo sapiens
agcaaagagccctcgggagcctggagggaaggccagccccaagtgcgggtgtggacaacacggccagtggtacagaaatcacaaggctgctggccagcaagggaggaggctgcccccgacta

SEQ ID NO: 55928 - DNA, 122 bp, Homo sapiens
agttgctcgtcggagttccccagcaaacagtgaccaagccagacctcaggcttctagtttcggcttcgctgcttgacgggccgggctgccccgccgcgcattctgagacctggccgcggctc

SEQ ID NO: 55929 - DNA, 122 bp, Homo sapiens
cggaggcagcggcttttccttcccactccgggttgaccctaaagacacgatttaacgtggcggcggcagctgcccacgctgtctggaggagcagggcgcctgggatgcggcggcgaaactgg

SEQ ID NO: 55930 - DNA, 122 bp, Homo sapiens
ggcctccgtggctgtctctcccccatgagatggggcatttacacagcacacttagggacacggaggccctgcaggtttggtgaggtctcccgaggtccctgagctgcagaggtgagagttga

SEQ ID NO: 55931 - DNA, 122 bp, Homo sapiens
caccctaggggtacatacaccccactttagagaccctcaagttacagtggtatcattaaacgatccataaaggagtgggtttaagaaagctgatacaggaacatgtttgaaataatacattt

SEQ ID NO: 55932 - DNA, 122 bp, Homo sapiens
aaatcattcatcttatttgctttttaaaactttattttctttatgacacaggcaagcgggcgaaccttaactgaaacgctggctgtcattattttacaaaatagtcacaagttgttataagg

SEQ ID NO: 55933 - DNA, 122 bp, Homo sapiens
tccctatctcacctgcccagccaactgggaccttggccagatttctgcaataaacacttgcggtttctgtccaaaaaaaaaaaagtgtactttaatatagtaaggaatatgctgtctgggtt

SEQ ID NO: 55934 - DNA, 122 bp, Homo sapiens
ctgacgtccaggcatgaggtggttcctgccctggacgctggcagcagtgacagcagcagccgccagcaccgtcctggccacggtgagtcctgcctggaggggctcagagggagacccagctc

SEQ ID NO: 55935 - DNA, 122 bp, Homo sapiens
cctggggcttgagccattttgatttgaaagtggggcgtgagcggggtggcgcggcggcggcggcgccgggtcgccatgctgcttcccgagacgccgaggctgggccgagaggcgcgcgcggt

SEQ ID NO: 55936 - DNA, 122 bp, Homo sapiens
tgcacgaccccagaaccctgttcttaggggagtggacactgggcaatccagggccctcctcgagggaagcggggtttgcgccagggtccccagggctgtgcgaacaccggggagctgttttt

SEQ ID NO: 55937 - DNA, 122 bp, Homo sapiens
cgttggtgctctgaagggcttgagaatctctctctacccttcattttcatgcacagaaaccgattttcagggaagagctgtggcccaccacggtcgcttcagcccctccccgttgcccatgt

SEQ ID NO: 55938 - DNA, 122 bp, Homo sapiens
ggaaacctagactctggcttcagaccacacttcagagtggcttgtgctcactcctaggaacggctgctgtgccaggctccccctcccagctgatgcccctaagtctccagcccaggccccgt

SEQ ID NO: 55939 - DNA, 122 bp, Homo sapiens
ctggcagggaaggggctggcatctcacgttcatctcagtattatgtgagcacagtcgactcgctatgagtctcaagtcttgatctaaggaccacctacctcagtctctcctgatggttagaa

SEQ ID NO: 55940 - DNA, 122 bp, Homo sapiens
ttcctccttcacactttcttcctatcaaaatagttattgttttgaaattcactagaacaacgacgttctaaaaacaaaggcgcagcaagcatccctttcttcgctgccgcgggctgaaccac

SEQ ID NO: 55941 - DNA, 122 bp, Homo sapiens
ataactggctattccattttaggcaaggctgcctggccagaaacccatgtcttaccatttcgagtacattatggttggcttacaaatcgtagcctcatagagaactttttcttcttttagct

SEQ ID NO: 55942 - DNA, 122 bp, Homo sapiens
tctttaaaggccaagaaggcagtgttgaaaggtgtccgcagccacaaaaaaaagaagatccgcacgtcacccaccttacggcggcccaagacaccgcgactccggagacagcccaaatatcc

SEQ ID NO: 55943 - DNA, 122 bp, Homo sapiens
agcttcccagatgttaaagcgcccagactccgttttcaaagtagctttgagcgtgagggccgtggcgcaggctgtttgatgcatgtaataacgatgcgtccagagctccggacaatgcgtga

SEQ ID NO: 55944 - DNA, 122 bp, Homo sapiens
ggcgcacgggcgccgcaccgcacgattcggctcggggtagagcggagccgcagccccacgcgcagcccaggacccactcgccaccgccgcttcctcagcacccatggggaccaggagacttt

SEQ ID NO: 55945 - DNA, 122 bp, Homo sapiens
ctggaaggaaacttgcctgccgtttccagcatcttgtccccgccgctgcgtgaccttggccgggcagtgtggtggcacttaaaattggaaagtgtgagcttcttccccacagccccaccctc

SEQ ID NO: 55946 - DNA, 122 bp, Homo sapiens
ttgccgtcaacttgctgtgttttcttgggcaagtcattttacacttccaagcctggttttcgacatgtgttaataaagattcggctctcaccctttaggattctgtggttcaacccaacaaa

SEQ ID NO: 55947 - DNA, 122 bp, Homo sapiens
gacccaacacctttctcatgttttttctaaaactgtgtcaaccgttatctcatgtatacacgcacaatgcgccatcagttaaatacatatatatgtttaattgcatgccatttgccatatta

SEQ ID NO: 55948 - DNA, 122 bp, Homo sapiens
ataagcaggagccaggcgacccacaggcttcttggatgggctgggcgtgcatggcataaccgtttgagaacaacaaaccaagccggccgggctgccgctctgtttcctgcgaggagggaagt

SEQ ID NO: 55949 - DNA, 122 bp, Homo sapiens
tggcagctaccaaagtggacggttgcagacgagcagattccggcaccgcagaaaggtaggcgccggacagcgctgcccgcctggacctgccgttccctcagccagcacaagtcgctctcgtg

SEQ ID NO: 55950 - DNA, 122 bp, Homo sapiens
tgctcccggcctcccactgctctgccgtgtgcgggccgctcatcaccaggtggggcctggcgggaggtaagctgtcctccgaggggcttgtgaatatgaactatgaagatttaagaagccct

SEQ ID NO: 55951 - DNA, 122 bp, Homo sapiens
gaatgtgacgtagagccatgcgaccataccaaagtgccccccacttccctggtccccaaccgtcactctctgttcttgctatctaatggccgctgcttccgccatggctgaggcttcctctg

SEQ ID NO: 55952 - DNA, 122 bp, Homo sapiens
cgctgggagcgtggtgtcgctgcctttccagacagcggtttgggttttgtggaggagacgcgttcccgggcgaattccatggagtctgcctcgagtacagattcggaaaatgtgccaggcat

SEQ ID NO: 55953 - DNA, 122 bp, Homo sapiens
gatgagcagaacctccttgcaacgacccaaaatggacatgaagcctgggtgaggaataaacgttgtagttttaaggttcttgggctagtttgtttctgcagcatgacctagcctatcctaac

SEQ ID NO: 55954 - DNA, 122 bp, Homo sapiens
caatgtgtctaatacagctccccccgtttcgtgtgtctccacctctgacccctgtaaaaacgtgctgggggttcaagaccctcaaaagatctttgtgatgcaaggacacaagaaaagtcaaa

SEQ ID NO: 55955 - DNA, 122 bp, Homo sapiens
ccctccctccaggccccggcgcggctctgtgtggatgttagtgagggatcgccccttgcccgcagcccacacaatgagcctgagatgatgtggccgatatggccagcagggtgggagcaggc

SEQ ID NO: 55956 - DNA, 122 bp, Homo sapiens
gcacccacacatccatacagcaaatacctgcccaatgtccactttccgtgagcaggcagccggggcctcaggtgatttacatactgctgctgggggttggggtggagacttagcgtttagta

SEQ ID NO: 55957 - DNA, 122 bp, Homo sapiens
gtgctcagctcccatcgcccccttgcagcaattacgcacccgtccacgagcgggaagtcccgcatcagggcccgtgcctgctcttgcaggccctgggtgctgggactactgagtgtggtcga

SEQ ID NO: 55958 - DNA, 122 bp, Homo sapiens
gtatttgcaacacaatatatttttcaatagaaaaatagctaaaactggaaacaactaattcgcaaaaagaaacgtaagcaggccaggtgtgggggctcatgcctgtaatcccagcactttga

SEQ ID NO: 55959 - DNA, 122 bp, Homo sapiens
gtaatctttctcatgctttccaagctccttcaaatgcaagtaataataatcaaaggaaaacgaagccccgtatgtttaggaacagtgccatgctttgctgactggcgaagctctgtatcttt

SEQ ID NO: 55960 - DNA, 122 bp, Homo sapiens
tacgaggaggagatgcgggagctgcgccggcaggtggaccagctaaccaacgacaaagcccgcgtcgaggtggagcgcgacaacctggccgaggacatcatgcgcctccgggagaagtaagg

SEQ ID NO: 55961 - DNA, 122 bp, Homo sapiens
ggattagtaagaatttattttgaacatgttgtgggaagatggtgactgcagggggtgcggcggggggagggagcccattagaggcaccaggttcccctccagcgagcccccctggacgttgc

SEQ ID NO: 55962 - DNA, 122 bp, Homo sapiens
tgtccaccctgctcagcaaacccaaacccgagggtcagccgagcagtacccccaccccggcgttcccaagcgggcccggcgtggggtgactcagcttgttccactccatctgttagaaaagg

SEQ ID NO: 55963 - DNA, 122 bp, Homo sapiens
gaacctgcagacccgcccaaccccacctccatccccacccccagcccccacttaccccggcgtgataaactttattcgctcttttaatcttgatgtccagggcggtccccatctccaattct

SEQ ID NO: 55964 - DNA, 122 bp, Homo sapiens
tcagtatttgaaggggaagagtgggctgaaggggaacgggggaaggtgtggtcatccacacgttgccaaagaaggggaccaggtaggggaagagtcagttctgtgttcatctcatgctcggt

SEQ ID NO: 55965 - DNA, 122 bp, Homo sapiens
ggtctcggacaccttcttcctcatggacctggtgttgaacttccgcaccggcattgtgatcgaggacaacacggagatcatcctggaccccgagaagatcaagaagaagtatctgcgcacgt

SEQ ID NO: 55966 - DNA, 122 bp, Homo sapiens
catactttataactgagaatgtgtaaacacctgcctatgtagttatcaaacagaaggatgcgcgcaggcagacacacgatactcacatgcagccgcgaaacctactcaggtcgttgtttggc

SEQ ID NO: 55967 - DNA, 122 bp, Homo sapiens
aacattattcagagattctcaacggcaccagcacattagggtcccaataaaaatgagttacgtgaatgcttgagtccgaacactcttctaaggaaagaatgcttggacagatgcaagtgtgt

SEQ ID NO: 55968 - DNA, 122 bp, Homo sapiens
aactacaaaatgagcacgaaatgatgtttttattcttagaacagaaagtccccacacccgcggccctggtgactgatgaggatgaggttctgcggggcctctctggccgcccagctctgcct

SEQ ID NO: 55969 - DNA, 122 bp, Homo sapiens
ctgtctcagggtcttcctcctccttcctccacccgcccccagcgccgcaggatctggaggcgggagccccgccctcacagtgtccccctggaggggacatcccgctcctgcccccgccctgc

SEQ ID NO: 55970 - DNA, 122 bp, Homo sapiens
cccgggcaccaaggatggaaggcctctctgaggaggtgatgccgagctgaagctgggaagcggatgtgagggaagagttccaggcagagggaaggcaaatgcagagatcctcaggcaggaac

SEQ ID NO: 55971 - DNA, 122 bp, Homo sapiens
gctgcaaacaggaagggagtatgtgtgtttaattggctctcgggggtaaggcctggaagccgcatgtctttgtcacaggccattagcgatgctgctgcataatgagagcctgcaatcagctc

SEQ ID NO: 55972 - DNA, 122 bp, Homo sapiens
ctcaccaccttcctcaaatccattcagtgcctgacattgtctgcaccaccttagctttgccgcctccacctggccaagactgctcctatgcccagttaggaagaatatgagaacccctctct

SEQ ID NO: 55973 - DNA, 122 bp, Homo sapiens
tctttcatccgctcccctaattccccagagtgccggggcgctcggttgaaatgcgagttgcgtttggctgcaggccgtgactgaagcctcagaacaatgcccagtgtttcaaaacaacatat

SEQ ID NO: 55974 - DNA, 122 bp, Homo sapiens
caagcagctctgaccctgtgtgctggccgggctcgtgttccaggccatggcatgtccgaacgaggtggtgtcctatgagatcgtcctgtccatcaccaggctcatcaagaagtataggaagg

SEQ ID NO: 55975 - DNA, 122 bp, Homo sapiens
ccctcctttcccacccgcctgtgcccctgccaccatctggtacctccctgtgtgggcatccgtccccgcagccctttggcgccatagcagcctgagaacgccacagcccggaagctaggcag

SEQ ID NO: 55976 - DNA, 122 bp, Homo sapiens
gtggagtcaggtggaagagcctgatacttccaagtaaaggatctaccttaaggcttctttcggatatcctttatcttctcattttttaaggtctaccaaaaataatctgaacctaaaaagac

SEQ ID NO: 55977 - DNA, 122 bp, Homo sapiens
ggggctccggagcctctgggtctgcagctgtcttctcagccaggcactctctcgtactgacgggggtcctccgtgtgcagggccgaggaaaccaccgtggccaaagtggaccaccagctgag

SEQ ID NO: 55978 - DNA, 122 bp, Homo sapiens
tggtgaaaaggtttaaggcctagggcatattggtccgtagcagggcagttggggcaataccgcgatgcttggggtgggccgggggctgccaagaggagcacccccggccgtccagcccgctg

SEQ ID NO: 55979 - DNA, 122 bp, Homo sapiens
actttattgtgtattatcaataataaagctaatttgataaaacattgtaagtctctcagccgggcgccgtggctcacacctgtaatcccaacactttgggaggccgaggcaggtggatctcc

SEQ ID NO: 55980 - DNA, 122 bp, Homo sapiens
ggcggctggggagcaccaggagccgggcgaagaggggcacggcctcgcatagggggactccggaaaaacgcagccccaacagcgccagacgccctgcctggttacccctacagcccccacca

SEQ ID NO: 55981 - DNA, 122 bp, Homo sapiens
ctccacttgccccggcaggcgcgcgtgggctcggcgtcccgcgctccctcctcgactgtgcggctcccgcgctgccgggtttcctgttcaacaatataaccagggaggcaccggcggagagc

SEQ ID NO: 55982 - DNA, 122 bp, Homo sapiens
ggtggccacgggccagtgacctctgggtgggtgaggggcaacaggagcaacagggctgcccgggtgctcctgagctcctgagatttcaacgggctcagggaccagcactgaggagctgcctc

SEQ ID NO: 55983 - DNA, 122 bp, Homo sapiens
ttgcggtagagagtgttgtttgcgcatttgtaaaacgaggcgaatgacccagctgttggccgtaggggcctttgctgtccttcctggggtttgtggtcgctgccgaggatcagcactttcac

SEQ ID NO: 55984 - DNA, 122 bp, Homo sapiens
agcctggcctgctcaagagaaggagactccaccctttcactccctgcctccccaacagcccgctgtggtgggagtggcaaccctgatgatctgtgaatcatttttcttaaagaatgaagcga

SEQ ID NO: 55985 - DNA, 122 bp, Homo sapiens
agtactctgggtaagagcttgctccttacccctcactggtgccacgtggtgaggtatctgcgagctctgatgccctgtgggttgcgctggacaatgcagaaacctcaaataccaccctgcct

SEQ ID NO: 55986 - DNA, 122 bp, Homo sapiens
cgtgcattgtggtcctcttggggagtagctggcaggttaacagggcatcttccccaaccccggccaggataggatgagcagggccaatgactctaaagtcttctataaaataagtgaaaaag

SEQ ID NO: 55987 - DNA, 122 bp, Homo sapiens
tcacaaaaggatgcttagctattttattcaaaatacaactccatccatcactctgaacagcgatgtgtagaaaggaaaagaaaaaccaggccccaaggaatccctcaaaaatgaggtagata

SEQ ID NO: 55988 - DNA, 122 bp, Homo sapiens
gttctccctgtggacacacaggctgtgttctcctggccaagagtccaagcgtgtttttggcgcgtgctgacactctatatcgcttttgcttcggaaacgaatctggtcagtgacttagccac

SEQ ID NO: 55989 - DNA, 122 bp, Homo sapiens
acctatgtgcttggcccttactgtacacggggaatcagtggtctaccacagcttaagtaacgggtcatatttggagtatcacacatctcagtcttgtagaaattaggaacagcaattaggag

SEQ ID NO: 55990 - DNA, 122 bp, Homo sapiens
ctctcctgcccggtgcctggacacagggggatgtgtggacggcttgggcagaccagcctccggcctctggtgcaggcccagctcagggcttggtatcgtgagccagagcctttgaggtaact

SEQ ID NO: 55991 - DNA, 122 bp, Homo sapiens
gccgacccgagtgcttcccgcagagggctggtggtgggagcggagtgggtcgggcggggccgagccgggccgtgggccgtgtgggggccgggcggcggccgggccggcggacggcgggatgg

SEQ ID NO: 55992 - DNA, 122 bp, Homo sapiens
ggttccccctgtggcctccctgggagccctccgcaggacccgaccaccccgcttccccgccgcctccagggacagctgcgggcctgaggcctagaattttagacacacttccttcatcactc

SEQ ID NO: 55993 - DNA, 122 bp, Homo sapiens
cacctcctccggcgtcttagcccgctcttctggccccgccccgcgctacgcgtagggaggcggggcctcggggcgagacgccggagcgtgtccccgtccggcagactactctcccccatggc

SEQ ID NO: 55994 - DNA, 122 bp, Homo sapiens
tgtgtttgcaaatcttttttgaaacatcaaaatgtgactttttttttcaaagagaaggggcgattagccaaacttctcatttggagaaaacttgcaacagagtcccaataaatcctcccacc

SEQ ID NO: 55995 - DNA, 122 bp, Homo sapiens
tcaatgcagcagtccatagaatgcctctgtcagaatcaaagactaagcttaagagttcctcgcatatatcgttgtgcacaggatcaacatgatggtgactgggaaaaaattacttcaagtaa

SEQ ID NO: 55996 - DNA, 122 bp, Homo sapiens
gaccccggggccacttaccgatcttggccaagctggccacgaggatccagagcgcgatgacgtagggatcctgcacgtgggcccactcgaaggtgaccacctggaagcccccgctctcgccg

SEQ ID NO: 55997 - DNA, 122 bp, Homo sapiens
atggagtttagacaatggatctccaatggccctaagtcaaggggactcctttctccttgccgttacccaaattaacaattcctttaaaaattgttttattggagtataattgccatgcaata

SEQ ID NO: 55998 - DNA, 122 bp, Homo sapiens
cccctaaaactaaaatagaaacaaggaattgcttctggcccgtcagcaaccacaccttcccggctctgggtggctcacagcatgtacctgtgtctcggtgggcttctctgtgattagcgaca

SEQ ID NO: 55999 - DNA, 122 bp, Homo sapiens
tacccccaatagcctctgccatcctcatgctccagtcaacctttagctctctgtgcatctcgtatgtccagaatagctaatgctcatccattctagatagcagttttattttttctataaat

SEQ ID NO: 56000 - DNA, 122 bp, Homo sapiens
gaatcaagttcaccgtctgtgcaagcgccacctgacagagctccctgcgacactgaaacgcgtttgggcacttcccacgtgggaaccactcgccacgggcacctcctgagtacaaggtgcag

SEQ ID NO: 56001 - DNA, 122 bp, Homo sapiens
aagtgaagtttaatcaaagttacaaacgttggtgggttttccgggacaaaggcccctcctcgacgcagggttcgcttgggcgacgcgtcgactctcggctccctgcagtcaaggcgcggcgc

SEQ ID NO: 56002 - DNA, 122 bp, Homo sapiens
aaggacgtatttttggataaatacggtattgggctttcagcaggacaatcagttaccctccggaaattgcgcgcgctctgcgctgccaccctgccctccaggactaaggaggtttgctgacc

SEQ ID NO: 56003 - DNA, 122 bp, Homo sapiens
ttagaatcatttttctttcttcttgtaagccacatcactcatgcatgcttcagctaaccacgcaaccctgctttttcatcttcattaaacatcagcctttcacaggataacacttgagctgt

SEQ ID NO: 56004 - DNA, 122 bp, Homo sapiens
gctgacaagaattcaaagccatttcaaagtgctcctcaggggtgaacgtggccccatgtccggcacatgctctgctctgaacgctctctcttccagcagggacggccccagacatcgagtat

SEQ ID NO: 56005 - DNA, 122 bp, Homo sapiens
gacgcggtaggtagtgagaaatcccttctacttacaataccccagcccgcggtgtggctccggctgcggggctgttttattgctgtctccctttctttctctctctctctctccctctctct

SEQ ID NO: 56006 - DNA, 122 bp, Homo sapiens
gagcaagggtcaggggtcgggagggaggtgggaggctctaaatagtctttactctccccccgtccagcatctgtgagtcagcacagtcagcctctgatgagtctctgtcctttctcggtctc

SEQ ID NO: 56007 - DNA, 122 bp, Homo sapiens
ctctcctgcgccgtgacctcaaaagggcggcgggcgggggcccctccactccagccctgtcgatcctatttctgaagggccttagggaaggagattccacaatttatttgatgacctgtttc

SEQ ID NO: 56008 - DNA, 122 bp, Homo sapiens
aatttcttcatattccctgtagcagcaagaacagtgggctgcacgtcaccagcaaatcatcgtatccaaggtttcgctccagcaacttacagaaaccaggagaagaaaaagctgtgtctgag

SEQ ID NO: 56009 - DNA, 122 bp, Homo sapiens
aagttctacttaaaaaaatataacccatgcaacatcgtgtgtccactgagcagtgataggcgcctgtgtaaggaaaagagctctcatcatatcagctagcatttaaggagcttactgtgcgc

SEQ ID NO: 56010 - DNA, 122 bp, Homo sapiens
cctctcgctccgcgtccgggcagcaaaaatggcggcgcctcaatccgggacttccgcctgcgcacgcggacaactgctcagctctatggcaaccgctccctggcaactggcgcggggggcgg

SEQ ID NO: 56011 - DNA, 122 bp, Homo sapiens
tcatgaactttggtaatcccagttacccttatgctccaggggcactgcctcccccaccaccgcctcatctgtatcctaatacacaggtgagatggctaatgatcatgtttttctagatacac

SEQ ID NO: 56012 - DNA, 122 bp, Homo sapiens
aggcggcgggaggcagtgacaggtcacgtgagctggagctcctgggacaggtctcggactcgcgggcccgccgggctccaccttgtcggggcactacccgcggagccgcggtctcgggcatc

SEQ ID NO: 56013 - DNA, 122 bp, Homo sapiens
gggatgctgtggggacagtaaggacactgggggcagtgaggacgctgtggacactgcggacgctgtggggacaatgacgctgtggacagtgaggacgctgtgggggcggtgaggacactgtg

SEQ ID NO: 56014 - DNA, 122 bp, Homo sapiens
ccatctcccctacctctcaacccctgccgcctggcccattagggcctggggtgggggggtcggcagatggctgggggctgaggctgcaatttccggaccatttccctggtgctgggtctgtg

SEQ ID NO: 56015 - DNA, 122 bp, Homo sapiens
actgggaactactcaaacatttcacatcagtagaataaataaattgtggtttattcacaccgtggaataaaataaagcaggaatgaactatagttatatgcagtagtgtgatggatcttact

SEQ ID NO: 56016 - DNA, 122 bp, Homo sapiens
cagggttcctaagtcttaaactgaaaaatttaactacttgaatgctaaaattttacaccgcggacaactagggttaaaagatcaaatataggatacctggttaaatttgaaattaaaataaa

SEQ ID NO: 56017 - DNA, 122 bp, Homo sapiens
cgagctgtaaccaatccagctgtttctgtacctcatttccgttttctgttcatcatattccgttttctatccataaatattatctgactatgtggaagccccagagttgctctgaatctatt

SEQ ID NO: 56018 - DNA, 122 bp, Homo sapiens
ggctgagtcatccaagaactccaccaccaccgtgagcccggcctccggtttcatctttcccgaatgggactggctggaggggccaagctgctttacagaagagttccatctggtaagcccgg

SEQ ID NO: 56019 - DNA, 122 bp, Homo sapiens
aaacctgcggcttccgcgcgtcctttaaaaatacaggtatttagatacacaccgtggcgtcgacttaaggtgaaatctaaacaaaatgaaaggacgggagctattctgatttggccgaacct

SEQ ID NO: 56020 - DNA, 122 bp, Homo sapiens
taagtgcctgtggtattcccaaagaatttgcttttgtgcggcagtcacagcctggaagcgcgctgctttctttgctcctggtgtcagaaaagctactcctggttctcagattgggctttcct

SEQ ID NO: 56021 - DNA, 122 bp, Homo sapiens
atggaaaggcagactcaggaaggttcaggaattctaccgactttggagcatgctctcccccggatctgaaacactggcccccgtcttatccacccaccactccttaagacatccaggcgtgg

SEQ ID NO: 56022 - DNA, 122 bp, Homo sapiens
ctttatcccagcccttccgcttggaaatggggatgagtgacctgggggcgcctttaggggcgcgccatctggatttaataattacccccttacttttgtttttgagcagaggtgggtaacgt

SEQ ID NO: 56023 - DNA, 122 bp, Homo sapiens
ggtcgggcgggggccccggcaggcgcgcccagtccgcgcccttcgtcccagcgccggccgcgcagctccgcctgggtggacaagttctctccgagtcccgtgcactcggcgcgccggagcgc

SEQ ID NO: 56024 - DNA, 122 bp, Homo sapiens
gaatgaaaggtgttaaatcaggtcatcttgaatattcttcccagctctgttattttacaacgccatgaaatcagagtaacatgttccaggctgtttggggtttgggattttagaacctgatg

SEQ ID NO: 56025 - DNA, 122 bp, Homo sapiens
ccacccgtgccgaacagccaggctgcccaattgcaactgtagaccaatgaactaatccatcgcccgcagcccgactctcagcagcggttcgtcccggtgcccacccccgcgaagcggagcgc

SEQ ID NO: 56026 - DNA, 122 bp, Homo sapiens
ctgcctcctttcgggagtgagacccggacatgctctcacaagagcggtgcttggtgctaccgggtaagagaccagaggcccccgcagtgaacacagcctcacatcggggtacacttcttagg

SEQ ID NO: 56027 - DNA, 122 bp, Homo sapiens
tccctgtttttggagggtcgtcaaactaaagaggaaagaagataggggaacaaaacagtgcggttggtgttctaagtatcctctgatcacagaagagaaagctgcccctacccagggacatg

SEQ ID NO: 56028 - DNA, 122 bp, Homo sapiens
cgtggcctgcattggtcgggtgggggcctcggtagtctcctccttacctccaaaaaaacccggagaaaaagaagaccttatccctgcggtccgcgcgcgctgcgggcgcagctgcggctgcg

SEQ ID NO: 56029 - DNA, 122 bp, Homo sapiens
gtgatcctgttactgccaggcagaatcagaagttcaggttccttgctcagcctctattaacgattcagaagggacccctcattactactagatgtgggtaggagttttggctccccacctgg

SEQ ID NO: 56030 - DNA, 122 bp, Homo sapiens
atgggggggtgccaacaggaacggagggacgtggtgggcgggtgacttctcactgcttcccgcttatgtaagaatcaaactctcaagctgtcactctcagcatctccggggacagccacgag

SEQ ID NO: 56031 - DNA, 122 bp, Homo sapiens
taggagaggagaaagcggcaaccggggttgtagttcatgggcttgactgcttcttttctccgcgggcgccgaccaggcctggctcgcgcctctcccaggacccgcctggctgcgagatatgt

SEQ ID NO: 56032 - DNA, 122 bp, Homo sapiens
agactggaaggtgggtgggggagcagggccttcctacctgtttccagctcctgccagcgtcgcttaagcagcagaggagagccctggctcccgcctccagcttcttttggccctctcagaac

SEQ ID NO: 56033 - DNA, 122 bp, Homo sapiens
caatgccgcggaggacgccacctcttatcgccgcttgcccgtcgaggccacgccccctcccgcctccacttgccgttgcccggggtgtcggttacctcagcaaccaccgccctttcttcctg

SEQ ID NO: 56034 - DNA, 122 bp, Homo sapiens
tgtaaactgggccagttgtccagagaaagacacacgttgccatgagcctaacttcttgagcgccatgtgaatatgtgtatagcaggaaagccagagaaggcaggtattcgtgtgactgtgac

SEQ ID NO: 56035 - DNA, 122 bp, Homo sapiens
agaggtgtggaggtggaggaaagcttcctgggcaggcctttggggtcgtccccacgcaggcgcttgcagccaccccagctcgcgcggggccgggctttggggtgtgagagctgggacgggag

SEQ ID NO: 56036 - DNA, 122 bp, Homo sapiens
cgtggcctttttcctccgcttttcaaactttcgaaactttattggccactcggagaaacgcgcagtcggccacgcccacgcccctactgccagagtccggggcctggggttacagagcgcgg

SEQ ID NO: 56037 - DNA, 122 bp, Homo sapiens
gcagtgatagctgtgtctgttctttctggtttacagaagaatacagccctggtcagctaacggtgacattggaaggatggtaacagctggttgtacccgtagtcctaaaaattcttgatagg

SEQ ID NO: 56038 - DNA, 122 bp, Homo sapiens
cctgcccgactacccccggcctggtcggcctgtgcccggttaccgtgggcctgtctacaacgttacgggagaggaggtctccttcagcttcagcaccagctccgcccctgctgtcctgctct

SEQ ID NO: 56039 - DNA, 122 bp, Homo sapiens
agcaagttagtgagtgatgctctattgtggacccctgaggcagtggctcctgaaggaggacggggccaccggcagagcagggcactcagaggggtcccctgcccggggagcatgtgccagag

SEQ ID NO: 56040 - DNA, 122 bp, Homo sapiens
aaatgccggctcctgttttctggatgacgagcccgcggagaaggtggcttaatgagaggccgcgggagggtgggtgccggcacgtcgctaaactccgcctgcaatccttcgggttggctgcc

SEQ ID NO: 56041 - DNA, 122 bp, Homo sapiens
tcggggcggggccccgcgaggagcaaggggctggccgggctggagggctgggtgagtccccgccctggcaatcccagaagagggcagggagcgcccccaactgaccgccgggggcatcgtga

SEQ ID NO: 56042 - DNA, 122 bp, Homo sapiens
atcacaattcaacagatttgggcagggacaaacatccaagtgatatcattacagcaacaccgctggtgggctggagctgccaagggcctgtgggcaccctccctgctttgtgagtgaggcca

SEQ ID NO: 56043 - DNA, 122 bp, Homo sapiens
tttaaaaagtttcaatagtacctagaacaggaacctggactggagtaaatactatataagcgtctaaagaacaagttgactgggcatggtggctcacacctgtaatcccggcactctgggag

SEQ ID NO: 56044 - DNA, 122 bp, Homo sapiens
aggcagcagtgggaacgactcatcctttttccagccctggggcgtggctggggtcggggtcggggtcggggccggtgggggccccgcccccgtctcctggcctgcccccttcatgggccgcg

SEQ ID NO: 56045 - DNA, 122 bp, Homo sapiens
cgatcctcggggggcctgaggtcctggggggagccctgcagtactggggggcattgaggtcggggtcagtggggaaacaactgggccaaagggtgcccgaaaggggacccacgagtgtcgca

SEQ ID NO: 56046 - DNA, 122 bp, Homo sapiens
tgcgcggctactacaatcagagcgaggccggtgagtgaccccggccaggggagcaggtcacgacccctccccatcccccacggacggcgcgggtcccctcgaatcttcgggtcccagattca

SEQ ID NO: 56047 - DNA, 122 bp, Homo sapiens
tgataacacagaccaataaaaccagggaacgcacagtgaaggttgacacgccatccttaacgcgcctccccggcttgtttctgcaatagaaactcacatccatttaatcacctttctgacat

SEQ ID NO: 56048 - DNA, 122 bp, Homo sapiens
ctggcctacaggccgcccggattcagccggagggcatggaccgggtggagtcctgcaaggcgagaagggacacagcgcatgcgcgcggcagggagggcgtttccaggagggagcggcctttg

SEQ ID NO: 56049 - DNA, 122 bp, Homo sapiens
tgcgctgttgagggaagaccgcggcgggttacaacttgggggctatttccaccttccgtgcgactgatgcgaaccccgaagccggactctgtctgctacagtcctggcgtccaagttctctt

SEQ ID NO: 56050 - DNA, 122 bp, Homo sapiens
gctggcacagggctggagaggcaagcctggcatgaagcgggtggcctgatagggaagggtcgcccacttaacaaatatatactgagcctgactgtatcagactgtgttctaggcactgggaa

SEQ ID NO: 56051 - DNA, 122 bp, Homo sapiens
caaaaggcttagcatgcatggaaaattattgctgtcagaagttgctatttacagggtcaacgcctccataattgcttctgctacccctctccctcccaccatccctgcagcctcccttcccg

SEQ ID NO: 56052 - DNA, 122 bp, Homo sapiens
tctgctacccgcgcacattgggccttgagtcttggtaaatgtttctgagccaccagggggcgccagcggtgctggatgccacttcgccttttgcaggaaaactcccgccgctagcgggtgct

SEQ ID NO: 56053 - DNA, 122 bp, Homo sapiens
ctcatctgcagcaagcagaaccgctagagctgggggtaggggtgcagtgtccaggcaagccgagtgtttgcttatatttctgtttataatttttgtatactagatgcatcttactcaagtaa

SEQ ID NO: 56054 - DNA, 122 bp, Homo sapiens
tttggcccagctgacagggcttcagagcctgaggaagcctagcctgccaaaccagggggccgccaggaggtgcttttcacagcccggtctctgcagggcagcccgccagcagtgcccagggc

SEQ ID NO: 56055 - DNA, 122 bp, Homo sapiens
agaggggcaccgaggatgaggaggccaagggcgtgcagcagtatgtgcctgaggagtgggcggagtacccccggcccattcaccctgctggcctgcagccaaccaagcccttggtggccacc

SEQ ID NO: 56056 - DNA, 122 bp, Homo sapiens
aagaaaacaagaaactattgccactgcctggcaaggctgcactagtgctgggggaagaggcgtcttggcaattgattgatagacttaatctgggcttggcacctacttggaaggtaactaaa

SEQ ID NO: 56057 - DNA, 122 bp, Homo sapiens
agtttcatttctcactgtccatggctgggacaaagtccactcctcactctgaagagcaggcgcctggcgggacaaaaacacccatggggtaggagggttctggctctgccacctgccggctt

SEQ ID NO: 56058 - DNA, 122 bp, Homo sapiens
ttcgtgggagggggttacgcgctgtctccttatcctgtgcacacttgcgcacactctgcacgagcacccgcccggccaagctgccatcctcctgagggccagccctgaggggtgtgggagcc

SEQ ID NO: 56059 - DNA, 122 bp, Homo sapiens
tgtgcacaaatgcatgcacgcagaggcacgcacacatgcacacaaacagagtgtctttcccggttttcttaatttcaacctgtttatttccccagtctccccacttatttctaattcttcat

SEQ ID NO: 56060 - DNA, 122 bp, Homo sapiens
gcactcagcccctggccgaggtgtcgtctgggagtggctgagcgacgatggctcctggaccgcctatgaagccggcgtctgtgacgatctggagcagcaggtggccaggggcaaccagctcg

SEQ ID NO: 56061 - DNA, 122 bp, Homo sapiens
ccgctactctcctattcccaggcacatgctggctgaggaggacttcaccaggtaagaccccgcccccaacatcccattcaatctacccagaaattggggaggggaggaatccgtttctggcc

SEQ ID NO: 56062 - DNA, 122 bp, Homo sapiens
gcggggctgctcagtgcgtcccagctcctcctcggtgcccaaggaggctgccactgtggccgtgagtccaggagaggcctcccaaccctggcctgtggatgcatcgacccctttcaccgcgc

SEQ ID NO: 56063 - DNA, 122 bp, Homo sapiens
tctaatcttatctatctgtcttatctatcgacctaactgtccatctggttttgaatattccgtattccagccataagtagtagatcttttgcatccctggggttaatggttccttgagcaga

SEQ ID NO: 56064 - DNA, 122 bp, Homo sapiens
gccgtcacaccggcactacgggaagaagccggccggctagggcacggagctctgggcttgcggggtgcggcgcacgcccctccctcccaccgcctaaggtttttccgaagctgctgggcgtg

SEQ ID NO: 56065 - DNA, 122 bp, Homo sapiens
aaatttaagttgggcacgtttaaatgaagcgcagcattgcgtcggcggctctgtgtggagcgttatcaggatttgctcaatgcgtgtgcacagagatgcaaaattgcctttaccagaatcaa

SEQ ID NO: 56066 - DNA, 122 bp, Homo sapiens
aggcacggataaaacgcccgggtaatcgaaatccgaatgcacctcttaccattggaccgccgaacaatattctccagaaacgtgttttgaggggccactagtcccctcctgcccccagccat

SEQ ID NO: 56067 - DNA, 122 bp, Homo sapiens
ctttattcttagaaagcattctttctggattgttttgttttagtcctgagtaggtaactacgctgcatgacaataaagtggatcttcatgagcaggtgttgcaatcaaatacaattctcaac

SEQ ID NO: 56068 - DNA, 122 bp, Homo sapiens
cgtttcccctcgcaaagcgaacccaaaatggcggcggcagcggcggcagcagagtggccgcggcagctcctccagagggagggagctaagggcgcctagcgacacccccaacctcccactcc

SEQ ID NO: 56069 - DNA, 122 bp, Homo sapiens
cggccttggccaaaggcaaggggccgtggcacgggcagtgccaggccacagcccagctggcgacacactacgttggcgtccaccacgtcccagtcgtcatcacagacgctgccccaggagcc

SEQ ID NO: 56070 - DNA, 122 bp, Homo sapiens
ctgtttctttatctgtaaaatgggtattaatgatattataccacagggttgtatatgcagcgagaaaatgcaagtaaaacacttatcccggtgcctgcctcctagtaagtgcttaagaactg

SEQ ID NO: 56071 - DNA, 122 bp, Homo sapiens
ctgcctgcccgcccgccccgccccgcccggccgttcctgcgcagccctgggtcggcctcgcgcttctgtgtttaaacaagcctcgcccttgtgttgcccactgcaactttaaagggaaacag

SEQ ID NO: 56072 - DNA, 122 bp, Homo sapiens
ctgtcatttctctcaggtcatctttaacagtgtggagaagttctacatccctggaggggacgtcacatgtcattataccttcacccagcatttcatccctcgtcgaaaggattggattggca

SEQ ID NO: 56073 - DNA, 122 bp, Homo sapiens
agccctgatccttcttagggtcaggcagaagggacacccagcccactgcctctggagaagcggagctgagggttggggtagcaggcagttggaggagctccccaacccccacacccaattga

SEQ ID NO: 56074 - DNA, 122 bp, Homo sapiens
cctcagcaccgaatccagtatcttggcgtggaacttccgcccgccttctccagctacttccgccaggcgcgcgccccacagcgacctggaactacaactcccagactgtcccgcgcccctcg

SEQ ID NO: 56075 - DNA, 122 bp, Homo sapiens
ttcggccacagcatggtgcaggcggtgggcaccttgcagacccagaccttcatgcaggtgcgtggtgcccgggagggcgggctgggcgggggtgtcaccggggtacccactcacggcccgtc

SEQ ID NO: 56076 - DNA, 122 bp, Homo sapiens
agggaagtgagagttttattcaggctcagtacaactgtgcctggaaccagatgccctgtccgtcggcgctggtgtaagtcctggagccggggagcgggcggggcgcgcccgggccggggcgg

SEQ ID NO: 56077 - DNA, 122 bp, Homo sapiens
aatatatccaaagacacagaaatagtataactgtgaccacttcatggcaaagcgagcagccggatttgactggcctgaagggcagagagataaaacatagacatagattagggtaagagtaa

SEQ ID NO: 56078 - DNA, 122 bp, Homo sapiens
ccgagctgctgctgggcccttctctgtggcaaagcagggtcacacttctccttcaggagccgacggcatgcgcgtatccttctgttccagggacgtagccatcgacacagtgaagacgggca

SEQ ID NO: 56079 - DNA, 122 bp, Homo sapiens
tggcgggcagacacgcgggcgcgatcccacacaggctggcgggggccggccccgaggccgcgtgcgtgagaaccgcgccggtgtccccagagaccaggctgtgtccctcttctcttccctgc

SEQ ID NO: 56080 - DNA, 122 bp, Homo sapiens
aggcagcacgagggcacttccggcgctgtctgatgacgtttatgcgcccaccggaagcgacgaagtcagacactggcttaatacagaacatcgccccgcttacagggtctcttgcaactgcg

SEQ ID NO: 56081 - DNA, 122 bp, Homo sapiens
ttacccggggttgctcctgaaacagtttaccatataaatagacttcatttccccagcaaacgagggcaggtctggtagttttttctgtttcacatattccccaaccctatagggttttacat

SEQ ID NO: 56082 - DNA, 122 bp, Homo sapiens
tcccacagtagtagatgttggcttttggtatgatacagatgccatggctaaagtcttaaccgtgctactggattttcttcttcggcttcttcaaatcagttaagctgcaccagaaagaacga

SEQ ID NO: 56083 - DNA, 122 bp, Homo sapiens
gcgtgtgcgtcggtcgggtgcccacggtttgagtcctggcgcgccgcactctgtgcttctcgcagtgtctccttgggggtctccccacatgtggggctgccagagagcagacttgggttgaa

SEQ ID NO: 56084 - DNA, 122 bp, Homo sapiens
aaggtatccagcactttctaccttgcattctatcttcatcttcgctaggcctcacagcaccgcatgattccgggggagggtgcttatcagactcgcgtgtggccccacggcacctagggcac

SEQ ID NO: 56085 - DNA, 122 bp, Homo sapiens
ggacagcttcagcgggaagccacggggctcggggccacccgctggcacggcgctgcccatcgagggcgttatcctgagcctgcaggacctcatcatctacttcgagcctccctccgaggact

SEQ ID NO: 56086 - DNA, 122 bp, Homo sapiens
aatttaaaaatatttaagtcacgatccaaataagatctcacacattgtctttggttggtacgtctctttactcttaaggtccagacacccggatagataagtcgaggcctcctgagtataga

SEQ ID NO: 56087 - DNA, 122 bp, Homo sapiens
ggcattccttttattgtccctgaaggtgattttcagatgctcgtgtttccacaggaaaaacgtgtcaacatggttcatattgaatccaggaaatctcggcgaagaagttctgaggttgaaat

SEQ ID NO: 56088 - DNA, 122 bp, Homo sapiens
cttctcagcaacatgcagtagaggcgcccaggtctacagagagggcaggcccaggcgggccggttccatggagagggggcctcctgtctgcttccggttcctggtgagggacgcccccggat

SEQ ID NO: 56089 - DNA, 122 bp, Homo sapiens
gcgcgtcgtaagtaaagctgggatctctgcgggatggggcggcggagagtcgaagcctgtcgaccagaaacccagtttgtttccccctatctttccaagaacttggaaattcggctgctttt

SEQ ID NO: 56090 - DNA, 122 bp, Homo sapiens
ccgcgcggggaatgcgagcgccccggcgccttctagtgggcgcggaggaaactgcgggggcgcggagcaaacgcgggaaggtcctcgctcacagcccccagtccttagcctccaaacactgg

SEQ ID NO: 56091 - DNA, 122 bp, Homo sapiens
tggttctacataaaaatttcccagcttgctgcatgtgtttgctcattctattcttcctgacggtcagctgggaaactattctctattaatgagattatatttcccaaagtgtttttttaccc

SEQ ID NO: 56092 - DNA, 122 bp, Homo sapiens
gcccggaaggctccacggagaccagttatcagctgtcctctcccttcactcctcccggcacgcagggagtgttgccagccagggaccctcctcagatcttggtgtcccgggttcttactggg

SEQ ID NO: 56093 - DNA, 122 bp, Homo sapiens
ccgcaaggcggcggagaggctgatggtggggggccgagcggccctcgtggggagctgggccggcggcaggccctcagtccgttcgtccttcttttcccccctcccctagaggctggcggctg

SEQ ID NO: 56094 - DNA, 122 bp, Homo sapiens
aatgcagaccctccccctgcccagatccactgcacgagaatctacatgtctacgagattccgggggcacctgtctgtggagtttgaggagcacagccttagatgctagtccccggtgtgggc

SEQ ID NO: 56095 - DNA, 122 bp, Homo sapiens
ctctacctgcagtgctgcttcttttgtttgtttgtttgtttgttttttcagacaaagtctcgctctgttgcccagtctgtggtgtggtggtgggatcacagctcactgcagcctcgacctcc

SEQ ID NO: 56096 - DNA, 122 bp, Homo sapiens
ccctccaaaaagaatcagttcctttttacatagcaatcaatgtccacttatcagatttcacgacctgcttccccagagtcagtatccccagggtggactcaaacttgtgactccaggaaggg

SEQ ID NO: 56097 - DNA, 122 bp, Homo sapiens
cgagggcgagggtgaggagggcgacgacggcggcgagaccgagagccgcgagagctacgacgcgccgcccacacccagcggcgcccgccttatccccgacttcccggtggcccgctccagca

SEQ ID NO: 56098 - DNA, 122 bp, Homo sapiens
aaaggcttgtaaaagataagagaaaccctgtttcaagccatacttttctaagggcgcaagcgctcacaaagggaccacaagttttctaatgccctgctgctagaagttggaatctgtttacc

SEQ ID NO: 56099 - DNA, 122 bp, Homo sapiens
aaggggcccagagccatggagtgtagacagtggagggtgaacacagagggggcccagagccgtggagtgtggacagagaggaccacctggcctctcacctgcttggtcacttgctgggaatg

SEQ ID NO: 56100 - DNA, 122 bp, Homo sapiens
aatgactggggttggtcctgaagagaccacctggccaaccaagccgaggcaggctcagagcgccgcggggagcgcaaagccgcgcgcgcctctgagctccgggcagccgctgttcctcccgg

SEQ ID NO: 56101 - DNA, 122 bp, Homo sapiens
gaaatgcaggaatgggagttgggagagctgtcaggtgccaggtgggaactgccatggggtcggggtatcggatggctagcctgccaaccccgcctggccttgatagcaaccacctccctcca

SEQ ID NO: 56102 - DNA, 122 bp, Homo sapiens
tttgggagcttaagggcgccggcacgcgttcccctggcgcagagctcgctagccggggcgcgggctgcctccttgttctggtgtgatccgaatgtaacggagcggactttgggatccagaac

SEQ ID NO: 56103 - DNA, 122 bp, Homo sapiens
attggctggcctcgcgcgagcgccggcgcggagtggctggcgaggttttagagggagtcccgctctccaattaaagcggcccagctgcgcctggctgcgcacagagctccctcccaggcccg

SEQ ID NO: 56104 - DNA, 122 bp, Homo sapiens
tgtgttctgatagcagagaaagacaggaaacaagaaaaataaataaatatggtagttttgcgtagtgatagtgctatagaaaaacgttcaaatggggtagagtgatagacagtgttgttctg

SEQ ID NO: 56105 - DNA, 122 bp, Homo sapiens
ttacattttcttatttagcttagtttacagtaaattaaatttatgaaagcttccaattcccgggggatttttaaaatgttacatcttgtccctagtgaaacatatgcatgtaacgggagata

SEQ ID NO: 56106 - DNA, 122 bp, Homo sapiens
gcccagccgcctcgccccgctggcttgcggacacagcctcctagcagccgctggctcaggcggcgccagggatcctgacgcctctcccgacccccgccacccgcgcttagggccaatcgcaa

SEQ ID NO: 56107 - DNA, 122 bp, Homo sapiens
tttctctgacttgttcacatttaacaatttctttttggggtaggttgctatttctgttttcgcaggtggtttacctgtcttctcaggcagtcaccgtggtccttgtccccatggtggggccg

SEQ ID NO: 56108 - DNA, 122 bp, Homo sapiens
ctttttccatcaacagcccctctcctgattgtgtgaacaatagtttaagacacccaaaaacgcgcactttaatttctcattccttctagaattaccccgccccaaccttgtctacacacaca

SEQ ID NO: 56109 - DNA, 122 bp, Homo sapiens
caggacgacggcccgacgggcgggaggggcagccgaactgtggtcgtggtcgctttctggcgctccggggcctgcccctggtcagcctgcagcgtcggcccgtgccccgtgcgccagggcct

SEQ ID NO: 56110 - DNA, 122 bp, Homo sapiens
cgctccacgacaggaatctcacaactttgcaaagggatgcgcggaattctacggaagcggcgcgagggcgcagcccggagggccctgctgggcccaggggcctcctggccgccttcccgacc

SEQ ID NO: 56111 - DNA, 122 bp, Homo sapiens
tataaatgacctctagtaacatttataactgggtcatataattgcattgtgatgaccatccgttcttgtaatttttgtttttctagatattaataatagcctcatttttaaaatgtccatag

SEQ ID NO: 56112 - DNA, 122 bp, Homo sapiens
cgcccccatcctgctccggccggcgcgtggcgtcatttcccggcgtgcagcgcgctcgcgcgtcccccgcccgctaatgttttggccgcttcaagatggcggtgcaggagtcggcggctcag

SEQ ID NO: 56113 - DNA, 122 bp, Homo sapiens
ggaattattaataccttgtaaatattgtttcctaaatctgaatcatttactggatagggccgtccccatattcagaattggaggaatctgtgtaaagtgcaaggtggactttcagagactct

SEQ ID NO: 56114 - DNA, 122 bp, Homo sapiens
ggccgaacataactgcagcagacagggcagggactggcgcagcgagggcagggagtcacgcggcctcacacatccctgtgtctctgtctgtgtgtgctggcgccgcacgactgctgggccac

SEQ ID NO: 56115 - DNA, 122 bp, Homo sapiens
ctgggattcaaacacctggtcgggaagcactgtagcagggactctggccttccaagagcccgtgtttccccctttacacccaataaaatcctgtcttactcaccatttaagttgtgagtctg

SEQ ID NO: 56116 - DNA, 122 bp, Homo sapiens
gacatgatgcatatggcaagtcagggacttagaacgtccaggaccaagccttgctgaggacggaagggagcaacgtgccctggaggtcctcatgcagcccggatctctggcagtgaccagcc

SEQ ID NO: 56117 - DNA, 122 bp, Homo sapiens
aaagaacaaagatgaagagatgtgtagggcaaggtataagggaaggggcagggagcttcacgccctccctggggtgctaccctacaggaaccctcaggtggttagctatgcggaagctctcc

SEQ ID NO: 56118 - DNA, 122 bp, Homo sapiens
ccaggcaacaggaacagcatagccacaggaccgggcgtcagtcacattctccccgctggccgaatgacgcaaataatgctcaaattccatgctgcggtttgctttgactggcggaggtggag

SEQ ID NO: 56119 - DNA, 122 bp, Homo sapiens
acaaaattaaaatctcagtgcccgtaagtaaagctttattggaacacagccatacccactcgtttccatattgtctatggctgctttcacacacaacagcagaattgtcttgatagagactg

SEQ ID NO: 56120 - DNA, 122 bp, Homo sapiens
aggaacggaattctcttcacgtgaccttccttctgccgcccgaagcccgaagcctcagggcggccatgttggttaggggcaaagtcctcgtccccagttccgcttttctgacagctggtgcc

SEQ ID NO: 56121 - DNA, 122 bp, Homo sapiens
cgggagtaccgctcagggctttcgtacaggagctgctccacctgaggaaagacatcggaccgtcagagccggggactaccctcagcccagggagacacctgtgtttccagggctgggactga

SEQ ID NO: 56122 - DNA, 122 bp, Homo sapiens
gatggcgagcctgggaagccccgggtgtcctggtggagaggttccctgccgggggcggggcgctggagagcttccccggcgcggagagcttcccgggcgcggagagcgcagagaacttggcc

SEQ ID NO: 56123 - DNA, 122 bp, Homo sapiens
agccaaccggggaggtgcctatgatctttctttccaagtttgagggttcaggtctgtgttcgcctgctggttagaccgatttaagttttagagtcccaggagttctgggcgagctgcagcct

SEQ ID NO: 56124 - DNA, 122 bp, Homo sapiens
cagcgtcgtgccttgcaggggccggcaggtgagcaggggccgcagcacggctagcagccccgtgggccatcgcctccaaggcgccgccatggccagccgacttccggggtggggcttcctgc

SEQ ID NO: 56125 - DNA, 122 bp, Homo sapiens
ctaagttccagatgggagaggatgaggtcactcccaatatctcagaagttgtacatcccccgtgatacttactgttcatcatatccagggaagcacaggatgacattccattgaatttcgcg

SEQ ID NO: 56126 - DNA, 122 bp, Homo sapiens
aatcatttcaattatatctacatcaaataaaataaaaatgagtgaagcccccagattcttcgttggaccagaagatacagaaataaatcctggaaattatcgacatttcttccaccatgcag

SEQ ID NO: 56127 - DNA, 122 bp, Homo sapiens
gtgagcgatttcacatcaggtataaactgggcacttctgggaaatttcagtccgtctgaacgttagtgacccaggaagtgcgagtgtgtggattagggggtttcccacacagagaagcaact

SEQ ID NO: 56128 - DNA, 122 bp, Homo sapiens
acatgtcattccttctgcaacagccttaagaactaggcgttcttatcccaatttcacagacgaggacgatcaagtcgttaatttgtcaaaggtcacccgcaggcgacaggcggggacagggt

SEQ ID NO: 56129 - DNA, 122 bp, Homo sapiens
atgtatgttcatgtggccgttctcggtgatgttctcggttagaagctgcgtgtgttttttcggtgatttcactagaatgtgcgttcgtgtgcctgttctctgtgatgttctcgggtaagggg

SEQ ID NO: 56130 - DNA, 122 bp, Homo sapiens
cagtagaatgttggctccaggagtacagggactgcatctgtcttatttacccttgtgtaccgctagaagtgtcaggctgtgtgtgtgtatacacacatatatattttgcagtttgtatgtat

SEQ ID NO: 56131 - DNA, 122 bp, Homo sapiens
ggcaggtcccgctctagaacacctgccaggcggagatcacgatccagaactcccaccaggcgtaggtctcggtctagaacaccagcccggaggggcaggtctcggtctagaacacctgctag

SEQ ID NO: 56132 - DNA, 122 bp, Homo sapiens
cttcctgcgcctgttcaggtcatcgcttgctctggttcccaggctttggcctctagtggacgagaatcaccgagtctgcggggctagacgctgaccgcccgggccagcacctaggcgggcgg

SEQ ID NO: 56133 - DNA, 122 bp, Homo sapiens
agtggcgggaggagagctggtccagctggggctgttgccaggggtctttctgaggagtaacgtctgagtggggcctggagggtgtaggctggtgtcagcgtcgtggatggaaggcacagaag

SEQ ID NO: 56134 - DNA, 122 bp, Homo sapiens
cggcgaagcccgagcccaggggctgccagaaacagctgtctgaagcatgtgcgtggttcccggggccatgttcacaagcggacacggaggcgcacacacacgcacacacagccgcacaacat

SEQ ID NO: 56135 - DNA, 122 bp, Homo sapiens
cgtcccctcgccggctcgctggtaccggcagtgccatggcggccttcagcaagtacttgacggcgcgaaactcctcgctggctggtgccgcgttcctgctgctctgcctgctccacaagcgg

SEQ ID NO: 56136 - DNA, 122 bp, Homo sapiens
ggtagggggcggaacaactgggaaagatactgacaactaaccctggagcccgcgagactccgaatctagtcaaattcctggcagccaatcgggagaagggaggaatctggttagcccgccta

SEQ ID NO: 56137 - DNA, 122 bp, Homo sapiens
tgaagggaggatttctcccagggcaaggaaggggaaaaggcaaaatgggtggacctctggcggattttactgaaggcaacgtgtaaactgataccgaactccccgcgtctacgcagtgccgc

SEQ ID NO: 56138 - DNA, 122 bp, Homo sapiens
tttaagtaagcagtcgtgtgtgccaagtgagtttgtagcccagctgtctcccccaagccccgctggcaggaatggaaacccaagctctctcgtaatgcaggggatgatgcaaacttagaaac

SEQ ID NO: 56139 - DNA, 122 bp, Homo sapiens
cagggtttctgggactcgcgtgtccggggtcggggtcccaggtgggtacaggtgggagggcgaacctgcgggtagggtgggcccctccccgcgggctcagcatctgtgcgcctccagctcag

SEQ ID NO: 56140 - DNA, 122 bp, Homo sapiens
tggcatatcagtgctgggtgaacctaggaactctgatgccatgagcttagatgagcatcccgaggtaggaattgggaacttgtggtttctggctcagatgtgactaaggctgggtggagcgt

SEQ ID NO: 56141 - DNA, 122 bp, Homo sapiens
cgtgtttcataccattctcgaattttattttctagctcagtattagcctcttctagagctcgcaccttatccaggtaggaagctaatctatcattaagattttgcatagtttctttttctga

SEQ ID NO: 56142 - DNA, 122 bp, Homo sapiens
tccaataaccggtctcacgtcttacctcaggaacagcgacccgggtgattccagaggctccgccggctccgctcggctcggctcggctcggcgcgacccgcggcgctaggccgggtgtctgc

SEQ ID NO: 56143 - DNA, 122 bp, Homo sapiens
ccccatcactgtacacctgtttgggctgggggctggctgcagtctggcttgtctcagccacgccctctgccccatcactgtatacctgtttgggctgggggctggctgcagtctggcttgtc

SEQ ID NO: 56144 - DNA, 122 bp, Homo sapiens
cgaccccgccccagcagcctgagggggcgggaacagatgtccgagtgcgacagtattggtcggcttccccaggaagcagccaatcggaataggcaagcttccggcgggaagtgagccagggc

SEQ ID NO: 56145 - DNA, 122 bp, Homo sapiens
aaccccatctgggtgacctttgctgcagggcccctgatgcttacctcagcccggccacaccgcgcaccaccaggctgtcactggtcaacgtccccgtcttgtcaaagcagcacacctcgacc

SEQ ID NO: 56146 - DNA, 122 bp, Homo sapiens
gtttccagtgggacgcatgtcgcctccgtgggtgctaacttctcccagtgcccgtcggtacgtccgtccggctgtgcagtctctactgagtgctcaaagtccacttttagccccagccagca

SEQ ID NO: 56147 - DNA, 122 bp, Homo sapiens
gcgcggactgaatgggcgccgagggctggcgggttccggcgccaggtttcatcagcagtgcgcccggcccccgcccctcgcgctccgcgccccgcgccccacgcccgcccccggaccaggca

SEQ ID NO: 56148 - DNA, 122 bp, Homo sapiens
tgtctattcatcattcaagaccacccttcgcccctccccttaattacttcctcccctgtgcgccctcaaattcttgtactcattcaagcagtatttattaggggccagctttgtggccggca

SEQ ID NO: 56149 - DNA, 122 bp, Homo sapiens
ctgcctgggacacgtggacctcacccccagtctccttctctcctctgccccccgcaggcgcggccaggtcacagtcggcaccagaagtttggcagatctcagtgaggcgttagtttgcattt

SEQ ID NO: 56150 - DNA, 122 bp, Homo sapiens
gccgacttctcagatgcaccctggagggtgtgctcttggcctgacacttattagcccttccgcttcctacagttgtgatgggccctcagatactcaccaggaaaatgtgatgcccgcaccac

SEQ ID NO: 56151 - DNA, 122 bp, Homo sapiens
tcttcaaaaacatatttgccattattttaggaagccaaacaaggacaagatgcaatcaatcgtatgtgtaagtttaagcagcaaaaagtggtaaaaactttttttttctgagacaaggtctc

SEQ ID NO: 56152 - DNA, 122 bp, Homo sapiens
tctacaagggagggattgcagtgaaagctgcgagaaagacccgtgcgctctgtaactaggcgagtcagcatcacagcccaatggaatatactctaaagatgggattttcatgcaaaatattt

SEQ ID NO: 56153 - DNA, 122 bp, Homo sapiens
gcgtgtcaagcgtcgaggcctccctacagagcaggtctgcccacctgctttcttggcactcgtgggcatctaagatcttgccactgcctcttttgtcccatccccttcatgcttctgcctgg

SEQ ID NO: 56154 - DNA, 122 bp, Homo sapiens
ccaggagggcgaggagacatgaaatatgacatatatgctgtagagaatgagcatatgaatcggctacagtctcaaagggcaatgcttctgcaaggtcctgaaaacctgaaccgggccaccca

SEQ ID NO: 56155 - DNA, 122 bp, Homo sapiens
ggggcagcccgcagaggagacgcgcttctcggcagcaacggcgtctggagccgggaggggcggaggtttggggagggggagggagggcgggggaggggagggacggacggcggcggaggtgg

SEQ ID NO: 56156 - DNA, 122 bp, Homo sapiens
tgtttgttgaccgttttcaggtggtttatccccattacactcagcctgggtaaatgtagccggaacatctgtcatgatgtgcggttgaatccgatctggagagagagctttagggaaactga

SEQ ID NO: 56157 - DNA, 122 bp, Homo sapiens
ccaacgcgctggtgctgctctgcctgctgcacagcgcggacatccgccgccaggcgccggcgctcttcaccctgaacctcacgtgcgggaacctgctgtgcaccgtggtcaacatgccgctc

SEQ ID NO: 56158 - DNA, 122 bp, Homo sapiens
ccaagccccggccccagcgtaacctcgtgggtgacagtgtgacctgggttttctccgatacgcgcgatgtgcccgctgagggcaatatagcacccccctcgcacctcacccttaggcgtgcc

SEQ ID NO: 56159 - DNA, 122 bp, Homo sapiens
acaggcccacccagatagaatcacacccagagttcacccatttgctgacccagtcccacacgacacaatcgcagctatatacacttgttacacgtatctccactgctgcacactgacatctg

SEQ ID NO: 56160 - DNA, 122 bp, Homo sapiens
cagtgcaggcatggttgtaggttgtgtgtgaatctggtccctggccccagagctctgcctcggggcctcctgtgggtgagaaaccacacagaacctggcgtgagcctttggccaacagaagt

SEQ ID NO: 56161 - DNA, 122 bp, Homo sapiens
gtggtgagaaaggctataaggattaagaagcagaaaggggataagagagaggatgagaggcgactgtttaaatttaacagtgttttcttaattgtgaaggatggtcacatctttggtgccat

SEQ ID NO: 56162 - DNA, 122 bp, Homo sapiens
cagcaggcttccggcagtccaaagggctttgagagctgcagttggcagaaacagagggcacggtccgcggactgaggggcaggggtgagtgcccgcttggtctgggccactcccggaggccg

SEQ ID NO: 56163 - DNA, 122 bp, Homo sapiens
tgacagagcaagaccccgtctcaaaaaaaaaaaaaaaagaaaacagaaaaaaaaagttttcgctgtttttagtatcctcgggcctgagaatgctctggacattgggacagaggcagctcatt

SEQ ID NO: 56164 - DNA, 122 bp, Homo sapiens
gcaacatagtgagacctcatctctgcaaaataaaaataatcagctgggcgtggtggcgctcgcctgtcgtcccggccactcaggaggctgaggcgggaggatcacttgagcccgggaggtcc

SEQ ID NO: 56165 - DNA, 122 bp, Homo sapiens
caagctctgggtgagatgtaaattatgaatgttactgattactgagaaggtcagtggttacgtctttgaggttacataaaactgaacaaaggagataaaaagctgaggcatgtacccatatg

SEQ ID NO: 56166 - DNA, 122 bp, Homo sapiens
cttctctgagtggtgctaagaatggaaatggccacacgcaaggctcagtggactaaaccccgtgatgtgaggcacgaagcccagcagcaccaccctatattctgggccctgtgcaggtatgc

SEQ ID NO: 56167 - DNA, 122 bp, Homo sapiens
gcactgctccttagcttttcgctttgccacagtggaaagcagattttccaagaatcctggcggagccaagatcggctcgcccgcccccgcctcacgctggctcctgataggcagctagagct

SEQ ID NO: 56168 - DNA, 122 bp, Homo sapiens
acataggtgtgtgttgagagccgctggggactcaggaagcccagcagccccgggatccgccggtggtcagaactcatcatcagaatcgtcatgggcccccctgcagaccttgaaggtccggg

SEQ ID NO: 56169 - DNA, 122 bp, Homo sapiens
cgagccttggggcgcggcacccagggcctccccaccgggctccgagggacgcagcggcctcgccaccgcattaggccgaatccggtgccttctagaaatggcctcctgcagctccagagcgc

SEQ ID NO: 56170 - DNA, 122 bp, Homo sapiens
caagtctgaggttgattctatggggatgatttcattttccagatgaggaggctaaagatccgttaagcagcttgctcaagatagttaagtgccaaagccctccaccttaaatccaggtcttc

SEQ ID NO: 56171 - DNA, 122 bp, Homo sapiens
aggtgatgaattaggccaggacctgggcaggtagaccatttattctggggagatatgatgcgagcttgaattacatgggagaaatatttgtaaggcagatgggataacaggacttgataagt

SEQ ID NO: 56172 - DNA, 122 bp, Homo sapiens
gacttttacgcaggcgcagaagcctgtttcccctcacccgcggcttccaccctgcgcaggcgcaaaaagccgcgctggcaacctccgcagcggtcgcgcgcacccttcatccctcttgctgc

SEQ ID NO: 56173 - DNA, 122 bp, Homo sapiens
ctttctccctttcgtaaagggctaaaactttgcattttaaggaagttccaagagcagggtcggaggggagggtcaaagggcacaggcctcccagcccgcagaaaacccccacggtcctcaag

SEQ ID NO: 56174 - DNA, 122 bp, Homo sapiens
atcatcagggctttagagacggcaggcttgccgatgtccttatacctgtttggaaatgtacgaggtgctggtgttcatacagataaggctctcttcattgcaacagccaccacatcggaaca

SEQ ID NO: 56175 - DNA, 122 bp, Homo sapiens
ggtccgggtgggaagccgtctctccgcattctcctgaaagctctgttgtagtttgaaggtcggtagagcctgggctgaaaaggaaacaatttggggtttgaaaggatgtaattcattcttcc

SEQ ID NO: 56176 - DNA, 122 bp, Homo sapiens
aaggtgcagccaaccacacgagcaatactgtgctggagagtgagaatgggggtgagcaggcgaacagagctctctctggatcagctttacttgggtagattaagttaaataagcaaaaggaa

SEQ ID NO: 56177 - DNA, 122 bp, Homo sapiens
gtccggtgtctgcttccagatcggattaaccgtttaactccttcgtgcctgtgcgcgccgcggccaagcagggtgctttgaagacagacgagttccagcgccccctcccagcccggagcggg

SEQ ID NO: 56178 - DNA, 122 bp, Homo sapiens
tgagtggacatcatcactcatgcggaaatgctgtatttcagggggccgcttctcagggaccgggggctgtgggccgagagggagcacactgagggtcagagagcacctacagttttgcctgg

SEQ ID NO: 56179 - DNA, 122 bp, Homo sapiens
gtggacgtcgggggtgctcctggggcagggacacagccacggccctcacaccagtggagccgtcttccttcccgaggcagaggcttggccttctcacaccttgggacccttctctcccctgt

SEQ ID NO: 56180 - DNA, 122 bp, Homo sapiens
cctagcgtcctctaagtggggaggctggattcaggcatccattgggggctctggagctttcgaggttgagtttacattccagacaccccctcccccaccctgagtttccgtctccttctctg

SEQ ID NO: 56181 - DNA, 122 bp, Homo sapiens
accccgcggcacagggagaccccgtggcccagggagaccccgtggcacagatagacccgccgcacagggagacccgcggcactgtcttgaagccacctgtttacaatggctctgaacaacca

SEQ ID NO: 56182 - DNA, 122 bp, Homo sapiens
tcactgaagcaccttggggttccttctagtccggagtgtaacgagtcatgctggggtgaacgatcttggatgtgccttttgctggacgtagcagctcatctcttccgggaagtcacagagga

SEQ ID NO: 56183 - DNA, 122 bp, Homo sapiens
agaaggcatacaccgactgggccgccgccgccgccgccgctagccgagcagcacacatggcgcaattgtccaagaagccagcggagcgccccgaacaagcactgtaaggggaggccagcagg

SEQ ID NO: 56184 - DNA, 122 bp, Homo sapiens
ccttgctgtggtggagagaggaggggaggagaagcaactgacctattgccatgaagatttcgttcacgttcattgcagtctttgctgatgtctccatgaacagcaaactgttgtcgtctgca

SEQ ID NO: 56185 - DNA, 122 bp, Homo sapiens
tgtgacatttcaaaaacagcaccaaagcagtcagcattggaaggaaaattagatttctgacggacatcctgatgttggttttactgttttcgttttgaatacacaggctgggtcaggagcag

SEQ ID NO: 56186 - DNA, 122 bp, Homo sapiens
cacagctagccagtagcaattttgaccctaggcagttgcacactgctaactagataaaaacgtactaacttcagtcttctaagaattgaggctataccagtagtttttaagtaaacacgtgc

SEQ ID NO: 56187 - DNA, 122 bp, Homo sapiens
gcgatctgtttccgggtctgcaggaaactaagcgcagagcggaatcctgggcgggtcccgcgagcgacggcgtcgggagggaagaaggaagggggcggggcctccgcggagtgggggggcct

SEQ ID NO: 56188 - DNA, 122 bp, Homo sapiens
ggacaggccacggctgaggaggcctctctcctgcctccaggatgaactaaagacccaatccgggatcttcggcctagggctgctctcccagacctggggtctgagaaagccaaaccagccct

SEQ ID NO: 56189 - DNA, 122 bp, Homo sapiens
ccaccccagacagtcccaagttctgaagaaactgggcattgaaccacccttatcagcaaccggtgtttatttctggaacagatgctagtaatgtgggaaacccaaggtgtccaggagaaaag

SEQ ID NO: 56190 - DNA, 122 bp, Homo sapiens
gcttatttatgtcaggaacataaactattgcattaatatattatgcctattataaaaatacgtataaaacgaaaattttaagagatatcaataggaaacaagttaaacaaatgacgtcccat

SEQ ID NO: 56191 - DNA, 122 bp, Homo sapiens
cccagccaggagagctggagaggcagcgaggatcttccctcagagcctatctagggggcgcggcccagccaggagagctggagaggcagcgaagatcttccgttagagcccagcgagggggt

SEQ ID NO: 56192 - DNA, 122 bp, Homo sapiens
cgctgtagcgtggggtcaaggcgaacgcgctcgtcagagcaccccgccccctttctcctgcgctggcttcatgagtctcttctgcgcaagttcacactgttaaaaacttgctgaggatacag

SEQ ID NO: 56193 - DNA, 122 bp, Homo sapiens
actgcagaatgttccctcatccgggaactcggattgctcatcccaccaatggctgccacccgccctcgggacgcgtccttgagacttcagccaatgagcaagcgaagaaaagggtggagggg

SEQ ID NO: 56194 - DNA, 122 bp, Homo sapiens
aggcgcctatgcggctgcaggttttattatggagctgtcaaggtagaaaggtacggagaacgggaacccaccgacagccaacttcccttgggacccgccttttgctttaaaaacaacaacga

SEQ ID NO: 56195 - DNA, 122 bp, Homo sapiens
aagaccaatattatcaagtagacttgatctctaaatttgtgcttgtttcgagggactctgcgtctggatatgcaggatgttttttaaattgtgagatgcatctacagaaaagttcatagaac

SEQ ID NO: 56196 - DNA, 122 bp, Homo sapiens
tggctggtgtctaggcgagaacggcatctggagagggaaaggtcacccctccctgacccgcgttgcactcgtcaggaacgtggcacaacctcccagtattaattcccaccgcgccctgtggc

SEQ ID NO: 56197 - DNA, 122 bp, Homo sapiens
cagcaagactgcaaagacgctgccatggaaagtagcattcgcaggctccagggatcaggccgtgcctatctttgccgtgcccattttccagcccgtggaaggtacaaccgaggtcttctcga

SEQ ID NO: 56198 - DNA, 122 bp, Homo sapiens
tctggtgagggcgcacttgggcctgagccccttccggcccctcgtgtttgctggaggctgcgtgtgctgtgtccccaccccagatgcttgccctgaggggcaggtttccatccaacaccccg

SEQ ID NO: 56199 - DNA, 122 bp, Homo sapiens
ctggcccctgtcggtttctgtatctccctctgctccccgcccttcgagcgtcacaggccgcgattagacaaaatgctgacgaggacgaaggtgggcagagcccattggctgctgaaagagac

SEQ ID NO: 56200 - DNA, 122 bp, Homo sapiens
cgtccgccaagcacgccgctattccagctgagaagagctggacccccagggtcgggtgtacgtccgaggctgtcaggccccccatcttcactcagagactggagatgcagaggaaaagggct

SEQ ID NO: 56201 - DNA, 122 bp, Homo sapiens
tgcgcacaggcttggatattgggcgtttagtcagtaatttagctttggaaattggtgaaacgttagactgtgccctggtattgtttaacgtatccaacctaaagggaagtgggacagttacc

SEQ ID NO: 56202 - DNA, 122 bp, Homo sapiens
ttatattcccttctatctgcccaggtgttctcagcatttaactcctgtttataagtgagacgtgcagtatttggttttctgttcctgtatgagtttgctaaaggtaatggcctccagctcca

SEQ ID NO: 56203 - DNA, 122 bp, Homo sapiens
cgcctggggcgcaagatgcaggatcgggggcaaatggcttctcccaacttccccctaattcgggttctgccagatggttgtcgtttgctgaagtggctcggcggcatttccttttgttttaa

SEQ ID NO: 56204 - DNA, 122 bp, Homo sapiens
ccgggcggcgcggtcggagctacagcgcggcggccggccgactgagcgcgcgggccggggcgccccacacggaggcagcccttggccacccgagatccacagtgccctgctgtgcgcggcgt

SEQ ID NO: 56205 - DNA, 122 bp, Homo sapiens
aatcccagccatggatgaatgtactaatttgaaagccaagtgttaagtcggatgttttcccgttacactactactcagccctctcctgcggccacatcaacggatgcaagtcacagtcttaa

SEQ ID NO: 56206 - DNA, 122 bp, Homo sapiens
cgcagcaccgggaaagtccccgggtcgccccgcacccatgcgctctcttcccaacccttgcggtcacgttcagcaagtgtgagcacctactgtctgcagggggccagaagaactcgcatctg

SEQ ID NO: 56207 - DNA, 122 bp, Homo sapiens
gggggcatgtcggtgttacccaggtgtgatgcggtgaggggcagcaggctcagggggatgcggtgggggcgtgtcagtgttctgcaggtgtgtgcggtgaggggcagcaggctcagggggat

SEQ ID NO: 56208 - DNA, 122 bp, Homo sapiens
cgcgcgaagaagactgagcatgcgcaacagggacagcgcctgcgcaaaagactacgcgagcgggtggctgggttcactgcaactcccggcaggccgctggcatttttcattccctcccgtga

SEQ ID NO: 56209 - DNA, 122 bp, Homo sapiens
tgtgaaccctctgagttgctcactctatggccacctcctgaagaagcaggactcctcaaacgattaaatcagggcacaattgagcctctatggaagaacccattgaagggcttcttcaaata

SEQ ID NO: 56210 - DNA, 122 bp, Homo sapiens
cgcggactcctctccgtgtggacagatgacgaggagccccctccctgggctcagtggcagcgaaagcggtttccgtctgctcgggcctgggccgatgcctctgtctgcctgggcttgtcccc

SEQ ID NO: 56211 - DNA, 122 bp, Homo sapiens
caaacagccttttcgggaatgggactcgaactcgtaagccacgtctgttcctccatttcccgcctcagctggatgacggagagggatctccgggattaaagaacaacgaccgcaggcgagtg

SEQ ID NO: 56212 - DNA, 122 bp, Homo sapiens
aagcgggaactcaaggtggggcagccgctggggagggtctgacagagcctcagttaaacacgtggcccagcaaccccactcctagccacctgctcaagagaaccgaagacacggccacacag

SEQ ID NO: 56213 - DNA, 122 bp, Homo sapiens
aaaaaaatgagactatctgggccaggaatgggactggttgagaaggtgaccctaggtgtccggggcgggagagttcgggagagctgctgtgtgctagcggacggggttagagagctgggagg

SEQ ID NO: 56214 - DNA, 122 bp, Homo sapiens
tctagtgtcctcgcaatgatttcacagcccccagcctccttgcttttccaggaggagttccgcctcacaggttgttccctacaggcgcctgtggaccccaggttccatcctcccggatccgt

SEQ ID NO: 56215 - DNA, 122 bp, Homo sapiens
cgggatagaagctgctgggaggagcggcggggcgggcttgtctgctctaggccctcctctcggtggtagggggacgccgcagcagggtactcgggtccagggcgcagggaagacccggggat

SEQ ID NO: 56216 - DNA, 122 bp, Homo sapiens
attctttcagctctcctaaccctgcttgtatttattctattcttcctctgtgctagactgcgaattgtgactacttgcctttaatgttccttgtcctcattttgccataattagatactttt

SEQ ID NO: 56217 - DNA, 122 bp, Homo sapiens
gtagcaaccgtgtgccggggaggctgggccaagcatttatagaaactgcccaaagaacagcgcagggagggcatttcggcccattttacagaccaggaaaacgggcggagaggctgagtgac

SEQ ID NO: 56218 - DNA, 122 bp, Homo sapiens
gggggccctctacagcggcagcgagggcgactcggagtcgggcgaggaggaggagctgggcgccgagcggcgcggcctgaagcggagcctgagcgagatggagatcggtatggtggtcggtg

SEQ ID NO: 56219 - DNA, 122 bp, Homo sapiens
ggccaatggcgacgctcccaccgcctccgtcccccaggttgaaagcggcccgggagccggcggcccaccccgaaggcccccgttcccggctggctagcccggcagatgctggaggtctggga

SEQ ID NO: 56220 - DNA, 122 bp, Homo sapiens
aggcgagaggatgatgcggggtgggctactggcacgtgagagccagtggcaccgagagggcgccccggcggcgaggaaggaggcgcgcgtgggaggaccaggctaactccgtcacggacgct

SEQ ID NO: 56221 - DNA, 122 bp, Homo sapiens
ccaatcatatgattttctccataaaattgctccaagacccacaaggtaggtaatattgtccgttttgcagatgatgaaagcaaggttctgggaagttgagattcatcctcaactgcttaact

SEQ ID NO: 56222 - DNA, 122 bp, Homo sapiens
tccaggtccctctgcgaccactcagggtccccgtacaggtgggccattgtcctggaagaacgaggggacagaacagtaggagcccgaggcccagcatggggcgctgcaactcctgcttccca

SEQ ID NO: 56223 - DNA, 122 bp, Homo sapiens
ctgtagctcatccctagcactgatcctaagtccctcaaatagagttcatgtgcatccccacgactgccaatcacttgtactgtgaggtacctggctaagtgttgagattgcagaactggtgg

SEQ ID NO: 56224 - DNA, 122 bp, Homo sapiens
ggtgtgcccgtgtgttcctgtgtctgggtctcagggtatctgtcagtctaactgtatttgcgtttgtgtctggccgtgctcaggtctcggttgtttgcacagcacatgcggctgctcagcag

SEQ ID NO: 56225 - DNA, 122 bp, Homo sapiens
atttaaagggcgaggtttggggctcgaagcttcagaaaaagaggagaaagtgggaagtgccgctcagagcctatcttaagccctctagtaggaataggagggggatcaggggccagaacttt

SEQ ID NO: 56226 - DNA, 122 bp, Homo sapiens
tacctgagccaagctcacctgcgcctgaggcccgccccctcggccttgtccttacctgtgcggcagaattcctcggcctcctgcggcacaatgtccttgacgcggctgccataggctaggcg

SEQ ID NO: 56227 - DNA, 122 bp, Homo sapiens
acaggaagttatacaattaatcattttggtgcctctgtccaaagaacagaattcagcaaacgaaaaccaaaatgttaaaggttttaagtttccaaatatctaacatcttcctttctcaaata

SEQ ID NO: 56228 - DNA, 122 bp, Homo sapiens
acctgctgccacggccccagggtgggcacagggctagcaggacagtcatgcaggcagccgcggccccagcgattggtccaggaggagggcaggtgaccacacgcggccaatcacaatccttc

SEQ ID NO: 56229 - DNA, 122 bp, Homo sapiens
gcaacgctgttgtcatgatacctaaggaaatggccgcactctcaagttgtgtttttgctgcgcaccggctgtcgggctgtgttcgccgctgggtggcttcgtggaggcctttggggttgcat

SEQ ID NO: 56230 - DNA, 122 bp, Homo sapiens
gaggatggctgccaaagttccaggtctactatgtggtcccacttcctgggctgtggagaccgtgtctccttcttttatccctccagctgtggggtggtagtggcctcctgccttgccatttg

SEQ ID NO: 56231 - DNA, 122 bp, Homo sapiens
gccgggttttctcggggctgccgtccaggatgtgtgtaagcagctccgggttgaagctggcggaatcccgctccctgcgcaggtccgggttcatggcgacgaccagctggcagcgaagtaag

SEQ ID NO: 56232 - DNA, 122 bp, Homo sapiens
gcacccttctcccagctgcattcccacgggtggccctggagctggtgagctttgtctgggcgttgtcttcggctggcattgctcctcccagctctggcccctctgctccctcaggaagcagt

SEQ ID NO: 56233 - DNA, 122 bp, Homo sapiens
ctgctacgtgcagcggattgtgccgggcgtcggcaactgctcggctcgccagactgttcacgggcccagtagagcagtaaataaccggccacccctgcggccgtgccggccgtgatggaact

SEQ ID NO: 56234 - DNA, 122 bp, Homo sapiens
ccattgtcgaaaaagagaaggaaaacgaggaggccaaaagaagcagcaggacagagaaaacgccacatggattcaagagttgagacaactgacagtaaaatatatgctctttggttagcaaa

SEQ ID NO: 56235 - DNA, 122 bp, Homo sapiens
acgacgccctgctggagtcccactgggaagggttagggaggcaggactggtaccagtacccgctggtgcccctcggctcccaaggatcccttaaaggggcgatggtaaaagtgcctaatgag

SEQ ID NO: 56236 - DNA, 122 bp, Homo sapiens
ctacagtgcaggcatcgttacatttaatccacaaaactaccccatgaggtagatatttaccgttcttttcacttaacatcttttttaaaaagcggaaaacagaatgatgaattaacttgtcc

SEQ ID NO: 56237 - DNA, 122 bp, Homo sapiens
ttctattctgcaggagaactttgagtctcgggagactcagggtttcttcctcccgcctctcgcagtgcatctttcatttgcttttctttgtaaagccagggctcctcgactgcctcccagga

SEQ ID NO: 56238 - DNA, 122 bp, Homo sapiens
atttgcttatgtttactaaacaataatcttacaggttggtattttactgctttacaaatacgagggagacaaacaagcaaagctgtaggagagagaaaactctcacatcgcaattgtgtctg

SEQ ID NO: 56239 - DNA, 122 bp, Homo sapiens
aggttactctttagctgtttctcccagtggcttgaagagccctggtaaacacccagtactcgatatatcaaatggacagcactcagagacagctcagatacagccccacgttcaggctgtgg

SEQ ID NO: 56240 - DNA, 122 bp, Homo sapiens
gggcgggggggattgaaggatactgggaggggaggcgggggtggtagggaagacggagcacgaatggttggggttctaagcagcacgtccgatgaaatgtcttttgcctccttttttccccc

SEQ ID NO: 56241 - DNA, 122 bp, Homo sapiens
ctacaagctgtcccgctccaacgagaaggagcagctgcaggggctgaacgaccgctttgccggctacatagagaaggtgcactacctggagcagcagaataaggagattgaggcggagatcc

SEQ ID NO: 56242 - DNA, 122 bp, Homo sapiens
atcagtgattcttgagagagacagggtttgtgtgcatttggggaacacacagatgcacaccgtgtgttgttcctatgctaataaagacctttgatgtatccacttcagaatcaagtactcat

SEQ ID NO: 56243 - DNA, 122 bp, Homo sapiens
cgtggtcctgatcgacggctttgccggcccgtgacggccggagggctgaacttccgttggcgcaacgcccaataagcgcgcgtcggcaggctgcccagacagcctcccccgccccctcggcg

SEQ ID NO: 56244 - DNA, 122 bp, Homo sapiens
ggtggtgctggctggcttcggggggctcaacaagctgcggctcttcaggaaggccatgcccgagcctcaggacggcgagctcaagatccgcgtcaaagcctggtccagtatccgcgcctttc

SEQ ID NO: 56245 - DNA, 122 bp, Homo sapiens
aggcagcttcagggccctggcccgggagtgcatttgcggggactccgcctgaagacagggcggcagccgcggggcctcacgtcgcccaggctcgcggggcaccgcgatgatcaacgacactg

SEQ ID NO: 56246 - DNA, 122 bp, Homo sapiens
cgcggccgccgcctgccgggcctcccctcgccgcggccggccgccgcgctcccgcccgggcgcccagctatgtactccccgtactgcctcacccaggtaccggccgccgcccccgcgcgacc

SEQ ID NO: 56247 - DNA, 122 bp, Homo sapiens
aatcctgcggcctctgacaaatgcctcacaatgtctgggctgacctcgaaaattcaggtacgaccggtcccattctacagcggagggcaccgaggctcagagaggccaacggggctgttttc

SEQ ID NO: 56248 - DNA, 122 bp, Homo sapiens
tgtggggaagcaaaggagtgcctactaggatgcgaataccacttggccctgggctcgctccgctttagccttcccctctcgctggggagaaacaggcggtttgtgagggagactgagagagg

SEQ ID NO: 56249 - DNA, 122 bp, Homo sapiens
cccctccaaatctatgttcattcctgacatttttaatcatgttctttccccctcagaatgcgcagaaccctccctacccaaatcttactcctcatctttcaaggtttgattaaaattccact

SEQ ID NO: 56250 - DNA, 122 bp, Homo sapiens
agtccctgctataggctcagaatcgctctaggtgtcagagatgcagtggtgaaaaagaaacgagtcttatcatccagcctgtgtgtggacagaaaaggtttaaagccaggccctgttgtgcc

SEQ ID NO: 56251 - DNA, 122 bp, Homo sapiens
aagtgtgaggatcacttgagcctgggaggttgaggctgcaatgagcaatgattgtgccaccgcactccaatctggacaacagagtgagacaagaagagagagagagagagagacagatagag

SEQ ID NO: 56252 - DNA, 122 bp, Homo sapiens
cccgccgcgccccggttaccttcatgtcgttgactatggcctggaagagcccgcccagggcgccgcactccttctccgccgtctccatgctctggctgggccgggccgcggcggcggctagg

SEQ ID NO: 56253 - DNA, 122 bp, Homo sapiens
cgaactcctgacctcaggtgatccacctgcctcagcctcccaaagtcctgggattacagacgtgagccaccatggctggcctaaaatgctttctagaagggattcttctggaccgttaacca

SEQ ID NO: 56254 - DNA, 122 bp, Homo sapiens
ccgccgggtacctgttggcggggcgctgagtgctaccgtcctttgggaattgtagtcccgcgctcactgggtcccggccagcggtcctcatactgcgcactcatctggggcggggcttggcg

SEQ ID NO: 56255 - DNA, 122 bp, Homo sapiens
tgtgctctcatccttgcagaagcggtggggccaacacgacttcccgggcagcctcgggagcgtccccaagggaggtgaagcatttctgagtcgtgaacaaaggaccgtttggttctgcagag

SEQ ID NO: 56256 - DNA, 122 bp, Homo sapiens
ctccagggtgcactggggaaattatccgccatgcgcagcgcctcctgcaggtgtccggtgcgtgcagacctggccacgccggcacgggttttttagtgacgtggcggcctcacggtgagcag

SEQ ID NO: 56257 - DNA, 122 bp, Homo sapiens
cggggccggctgctgtagtggggacttcagtctggtgaatcaatattacgttgcgtggaacgtgaacatggacgccactccgtccgggattcagcgcagcggcactctctctgctccactat

SEQ ID NO: 56258 - DNA, 122 bp, Homo sapiens
tctcggcgcccccaggggccttcctgctgtgctggacgcccttcttcgtggtgcacatcacgcaggcgctgtgtcctgcctgctccgtgcccccgcggctggtcagcgccgtcacctggctg

SEQ ID NO: 56259 - DNA, 122 bp, Homo sapiens
gatgttggctagatgaccgccaaccagatgaccttggctaactgatcttatcccttgggccgctgtggcacaggatgagtgagctacgcctggtaacaagagtgccactctcgtgtaagggg

SEQ ID NO: 56260 - DNA, 122 bp, Homo sapiens
gccccttcttcctgggtcctccaattgctacaccgcgcctgcaacaaacaggcacgccctcgctcacttccgtcacttggtttgagtcacccacgctcctcgcgattgcgggcacaccccct

SEQ ID NO: 56261 - DNA, 122 bp, Homo sapiens
gaaacgactctcctgcctgtgcattgacccgaaggcattttccatttcctaggcccctcccgcttcccgtccctcacctctagcccctcggcttcagctcaggcccctcggggagcatccct

SEQ ID NO: 56262 - DNA, 122 bp, Homo sapiens
caaggccctggcgggcctcacactccccagcacccagggactcctgccccacccaccacacggccgtcacaaaatgactctgggatccaccctcagaaacactcagctgatggagccggttg

SEQ ID NO: 56263 - DNA, 122 bp, Homo sapiens
ggtgattcacccgcctcggcctcccaaagtgctgggattacaggcgtgagccaccgcacccggcccagtacttcattttcagatgcagacatgaaggaccagaaggctgaagcaacctgccc

SEQ ID NO: 56264 - DNA, 122 bp, Homo sapiens
ctggccatgggccactttacctttcttccttcccttgacctctaagcatttttagcttcacgcatccattcgactggtcttcagaaaaggcacccctccttttcctatcctccagtctgttt

SEQ ID NO: 56265 - DNA, 122 bp, Homo sapiens
agggaaacctctacattttcccctttctcagatttttcttatttaacagaaatgatactccgtaagagcagaattgccaaatattagtgttctttgtagcgggttaaataatgagtattatt

SEQ ID NO: 56266 - DNA, 122 bp, Homo sapiens
tagcttagcaagacagctgggaggggatttgtttgttatgttttgatggcggaagttacacgggtactatgctgcttttataaaggacttgcgtcgtaaagtcttttttcctcaccctagtg

SEQ ID NO: 56267 - DNA, 122 bp, Homo sapiens
agagaggaagtgagatcaagtcctaggccataaaacagaatctgctggtgatctgggactcgcccctcagacggtctagtgaaaagaggcagaatctatgatgggaagggctctaggtgagc

SEQ ID NO: 56268 - DNA, 122 bp, Homo sapiens
acctcacacaacagcttcatgtcagccaaggccacaaacaccatgtaccacacatgtgaacggacagattgacatgttaaaaacacaacatcagtgcatgttggggattcctggtgccagaa

SEQ ID NO: 56269 - DNA, 122 bp, Homo sapiens
ccacacatataagtgctttgagaaatgacacactgcacgacgtgtggcacaatgcagtgtcgaaagttcagaatctacagtgtcatccctagaccagccactaaaatcacgcaacgaaggaa

SEQ ID NO: 56270 - DNA, 122 bp, Homo sapiens
ccacatgtaaactttatttaaaattgttggccaccctttctggctcaacccgggaacaaccggagcacttctggccccttgactttgacgctcctcccactgttcctgtactggggaagata

SEQ ID NO: 56271 - DNA, 122 bp, Homo sapiens
ggtcatttctgcgagttaccggcttcctgtgagccatcagacacgactctgcggcactcacggagtctcgttgcagacttattttgattccagcgctttcgtgttcatttcacaaaggatgt

SEQ ID NO: 56272 - DNA, 122 bp, Homo sapiens
aagcctccagagaacaacatgctgatactcctgagctctcagctcttagatttttcacatcgtttttacaaaagaaacaccccaggtgtaccaaagctttgtgtaatgaaatctttcagagc

SEQ ID NO: 56273 - DNA, 122 bp, Homo sapiens
tggacaagtacggctttccactctaaccacagttttaataataacacatctattattatccgagagctaccaaagcctccttttccgtcttggcccttggccctgcccctcctctctagtct

SEQ ID NO: 56274 - DNA, 122 bp, Homo sapiens
cgaggccgcagtataaccgcgtggcccgcgcgcgcgcttccctcccggcgcagtcaccggcgcggtctatggctgcgacttctctaatgtctgctttggctgcccggctgctgcagcccgcg

SEQ ID NO: 56275 - DNA, 122 bp, Homo sapiens
cggtggattcgccgtgcgcagccggaagatggcgcagacgcacaaagcacaccgatgctgcgccatgatagggccggcgccgcagtgtcttccgggaaacatagtctttaggcgtaaaggca

SEQ ID NO: 56276 - DNA, 122 bp, Homo sapiens
tgcccaggactagtcttgagtgtgacattctctctgacctacagctgaaagtgcccactacggaaaagccaacagtgactgtgaacttccgaaagctgttgttgaatcgatgtcagaaggag

SEQ ID NO: 56277 - DNA, 122 bp, Homo sapiens
tcagccctccccattggtgggctgcaggacagagctgaggtttgaacacagctgtggaggcggccatcaggccgggggcacgcatgcaccattggcgggacatagagtggggtcccctggct

SEQ ID NO: 56278 - DNA, 122 bp, Homo sapiens
ctggtgctggggccacaggatgacgccacctcagggagcaccatgtccaggtgcttgagacgcatctcagaccggcggtccaggcaggactcagcccggcactccttgccatcatagatgac

SEQ ID NO: 56279 - DNA, 122 bp, Homo sapiens
aacagtggtaaggcgttcgcgagtcattgtaacgtaggcaggccgtgaacagtactaaggcgttcatgggtgtgtcactgtaacacaggcaagctgtgaaccgtagtaaggtgtccgcaagt

SEQ ID NO: 56280 - DNA, 122 bp, Homo sapiens
tttcggttgatctgaaaacacaaaactcactggctttgccaaaaaggcagttctcaaattcgcagccaaagaacgcatcgaacagaaatagcattagagggagtgcggggatcccttccatg

SEQ ID NO: 56281 - DNA, 122 bp, Homo sapiens
gaaagaaggggacgcggctgggcggggcggtgactaaggtgaggggctgctcgcgggatccgcaccgcgggagcagctcggaggggcggccctggggggcaagggcgggccgcggggcggcg

SEQ ID NO: 56282 - DNA, 122 bp, Homo sapiens
ccgtcgcatccggcccccatgcagtagcttttaagagatcgtgtcgttgcttctgtcttccgggccacagagaggtgatgcagtttccccacttgcatggctgggaaagtgagctggcagca

SEQ ID NO: 56283 - DNA, 122 bp, Homo sapiens
cccaggcggtgggctgggggtgcccggaggcggcactcaccgtgcagcagggcatgggggcgaggctggggtccctcctccggccggtcctgtgcctgctctgctctgctgcctgtccgggt

SEQ ID NO: 56284 - DNA, 122 bp, Homo sapiens
tctacttcaccctttttggctcgggtactggaacaggtctcggccaaactactgtctcaccgccatagtgataatcatctttaaaagcacagctagtcggtgcgcgaccactgcgcggtaca

SEQ ID NO: 56285 - DNA, 122 bp, Homo sapiens
caactggtgcatggacaggctgaggaagcacaggccgggcagagccctggccaagaggggcgtcttgcgcccacactcacttggcaagtttctgcagcacctgctcgcactccagctgcttc

SEQ ID NO: 56286 - DNA, 122 bp, Homo sapiens
aggcgcagtctgtcatctttgatcctggaggcgcagaggacgccttctgggtattaccttcggggtccccgcgggaggaggccgggggtgccctgggatgccccagcctgccggggagcggc

SEQ ID NO: 56287 - DNA, 122 bp, Homo sapiens
gcagccgggttgttacagcctttgagggaagtcgcaagacccagctccgcccaacagcatcgggccccgcgccccgccccatgccctcgccccgcccctcatccctcgccccgcccctcgcc

SEQ ID NO: 56288 - DNA, 122 bp, Homo sapiens
gactctgcattaattcaaggtaagccccgggtttttactgccagagatgtgtctgtcttgcgccccgcatgcactgcctgcggggctgcgctgcactccccggcggcgccacgggtctggcc

SEQ ID NO: 56289 - DNA, 122 bp, Homo sapiens
gtaaacatgctgtgtgtccaacgtggatcctaatccagggagggatattattccccatatcgcgggggttgtccacccctcctgtcatattgtttcttatgtccagggaggagaggatgata

SEQ ID NO: 56290 - DNA, 122 bp, Homo sapiens
ctgcagggactctgtttctaaataaggtcctacttacaggcgtgagggttaggacttcagcgtgtctctgcagagacacagctcacccccagcactgtctcttgaggggattcctgcatgtc

SEQ ID NO: 56291 - DNA, 122 bp, Homo sapiens
gaaagaacaaagagtggcagtcggaatgagaaagcggtaaagagcgaaaaagaaaggaggcggccagtccgtaggcgtgactttaactcaggaagcacacagagcgcagattttgcggataa

SEQ ID NO: 56292 - DNA, 122 bp, Homo sapiens
gacagccacctcccccagctcggccatggaccttgaggcttgagactgtgccctggtgcccgtctgcagggcagtgggggtggcctcggcccagcagggccaggtgggtgtcgggcgttgag

SEQ ID NO: 56293 - DNA, 122 bp, Homo sapiens
tctctggcctcagccactgatggcacaatttctgaagttggctgatagtctcaagcggtccggttgcttcatgataacggaagctccagaagtgcctgcaagcgctctcaggaccaagattc

SEQ ID NO: 56294 - DNA, 122 bp, Homo sapiens
gtttctccggccttcccgccccgcctcccggcccgaagagcagcagccaatcagaggcatcgcctctgtgacggatgggcagccgaacccttcagtgcagccgcagaaaagaagggggtggg

SEQ ID NO: 56295 - DNA, 122 bp, Homo sapiens
gcaaaaccacctcagacacccgggccttctcagccttctccccgcggccagctgggtctccggggaccctgggccctgggccgcccattcctggccctcccgctgcatctcagacctgacac

SEQ ID NO: 56296 - DNA, 122 bp, Homo sapiens
tgggtatgcaactgcagacacaacattcccgtgggagagacagaaacacaaaaaagtgaccgggaaatattaacccatgaacaatccagtgatgaaaataaaacagccatggacagaggggg

SEQ ID NO: 56297 - DNA, 122 bp, Homo sapiens
ggatgtgtgaggttctggaactcctgttaggataccactgcagtctacttcattcatacccggacaagtcgactccgagatcttattaaccacttttttttttttttagttcattatgcatc

SEQ ID NO: 56298 - DNA, 122 bp, Homo sapiens
agtcgcctggatggaatcattgtaatcctgccacaaaagccttggcaaatgaaacccctccgtctgctacggccaagcaaggctctcctagagaggctctccgggtatgtgcccaggagacg

SEQ ID NO: 56299 - DNA, 122 bp, Homo sapiens
agtgataccccatctctaaacaacaaaacaaaataaaacaacatggcttcattatgaatccggtcgcatcaatcaccaaagttctcttttattccagccacttggatctatctgcctttccc

SEQ ID NO: 56300 - DNA, 122 bp, Homo sapiens
agggtccgggtcagggggatcgagcgggcggccgggtcctggtggaggctgcggctgcttcggctcgcgggggcggggagaaggggaggggaaggagccttggtgggaggctccgaccccgg

SEQ ID NO: 56301 - DNA, 122 bp, Homo sapiens
gaaagcacatgaactaacctgcaaagacaagtcaaagaatccactgtatggtggtgacttcgtgttaatcaagtccttgtttctatgcaaatcattttaagtttcagaagagacaaggccag

SEQ ID NO: 56302 - DNA, 122 bp, Homo sapiens
agaccggaccctgaacagaatcgcagattgccagcccttttcccgacccctacggaaagacgagtccaggggccgtcctggcgaggtcaaaacatttagtctggtcttttcaggtgaggact

SEQ ID NO: 56303 - DNA, 122 bp, Homo sapiens
cctcacgtccaaaggaggagtcttcttccaaagaagagcctttggtatttggcagagcctcgccaatttggggcgcacctccccttcctgggatgctctcagaaggcaaaccaattcccaga

SEQ ID NO: 56304 - DNA, 122 bp, Homo sapiens
ccctcatgggttgggggacagcgtcccagccccgagggcaagcactgatccctcacaggacggggaagcctgtccttgtgcgccttcagacactggctcctctgcagccccattccctggcc

SEQ ID NO: 56305 - DNA, 122 bp, Homo sapiens
gtcagcggcggcggggcgggcagagggccggggatggcaggttcaaccaacgggtgggcacgtcgtcctcgcgaggaggcgtgccctgcggccgggcgtgcggtgtccgcggcggcgcaggg

SEQ ID NO: 56306 - DNA, 122 bp, Homo sapiens
gccgtacctgcggtggtcagctggccccgcaggcgccggatctccatcatggctttgtaccgcagcccgttggcttcgcaaaactggggtgtgcagctggcatactcacaggctcccacggc

SEQ ID NO: 56307 - DNA, 122 bp, Homo sapiens
ggtctgaggctgcaagaagtgggggcaggggcatcaagggcggggcaggggctcacagcacgcagtcatggtagctctcccgagctgcgatgtgcaggggggtgtccccatggtagttgaca

SEQ ID NO: 56308 - DNA, 122 bp, Homo sapiens
ttccttccagacgcagatgagggatgggcggatgacttccttccggacgcagatgaggaacgagcagatgacttccttccggacgcagatgaggaacgagcagatgacttccttccagacgc

SEQ ID NO: 56309 - DNA, 122 bp, Homo sapiens
ccaaagaacattcattttgaaaaatacaaaaatgacataattttgcccacttggttttctcgcttttccccaacttccacgaccatgctctgctgctactactgtattcacttgctggaggt

SEQ ID NO: 56310 - DNA, 122 bp, Homo sapiens
aaattcgcaaatcctttgattgtctgtttaaaatgaggaggaaaccagctccctttgcggcgggattacagtgggaacaagatctaaagattctcttgcaattcggcgaggccgagggaacg

SEQ ID NO: 56311 - DNA, 122 bp, Homo sapiens
attcccatgtccaggagtcaatggtgaaaccacaaaggggctccagtcacctcaagaagacgcagatgctaccgacggtggggtccaaagcggcctgaaccagcccggagatgccagcgcct

SEQ ID NO: 56312 - DNA, 122 bp, Homo sapiens
agcggctgcgccgagccccgccccgccggcatctgacggattaacgctgcccgccccgggcgccccaggtacctgtcgcttgaaactttctggttgtccccagcgccaccccctcccccgac

SEQ ID NO: 56313 - DNA, 122 bp, Homo sapiens
tggttaatgccaccaaactagaagatagccaaaccaatgttagtacatcctttgagaagacggcagaattcaatttggcaataagctcttgatcagtcagaagatcatctgggccaggcatg

SEQ ID NO: 56314 - DNA, 122 bp, Homo sapiens
gcggcacatacctgtagtcccagctacttgggaggctgaggcaggagaatcacttgaacccgagaggctgaggttgccatgaggctgcagcaagccaagattgtgccactgcactccagcct

SEQ ID NO: 56315 - DNA, 122 bp, Homo sapiens
cttatatgaaatgtgggagcttaaatgtgtgaaggatgaccctgtaaggtgccacacccacggctgaacgtatataaatggtcctgtccagatgtggcatgcaaactcagaatcttctcagt

SEQ ID NO: 56316 - DNA, 122 bp, Homo sapiens
gaacccatgctttcttgaggtacatatagttttaaaaggacccaaggcacagtggctgtgcgtgaatgagattatatttttgatgtccagttgaaatctgcttgcaaaagactgcttcagat

SEQ ID NO: 56317 - DNA, 122 bp, Homo sapiens
gggagacatattattgcaactgcgggacagcaactactgcagtagggagaaggctcccaccgtgagatctgcaagtgcctgaaaggttaggcagaaaagggcttttcctgcatacggaggaa

SEQ ID NO: 56318 - DNA, 122 bp, Homo sapiens
tcgctggtgcctacgctgtcaaaggagccgctctaggcttttgggaggccgtctgcattgcgtggggaaggcttggacgacgcaatcgcctcgccggcccccggggtggttagcgcttccgg

SEQ ID NO: 56319 - DNA, 122 bp, Homo sapiens
tgtgtgtggaaaaaacgccggttttgggatacgacggacaagtcagaagcctgcttgaaccgccgtcacccctttgcagccatccaacaccacgaacagcaaaaacatcaggttctggcaac

SEQ ID NO: 56320 - DNA, 122 bp, Homo sapiens
agcgatttctaaccagttatgtctggagagactgaagcaggtgaattagtctctcgggcacggtgttttgcagttgagagaaagaaatcctagtgtccacattgagattgggaggagcaagt

SEQ ID NO: 56321 - DNA, 122 bp, Homo sapiens
agggacaagggtgaaaattaaggcggggtgctggggccctgcagtgcgctctaggtcgtgcgtgagctgggactgtgcccgcagcctgctgggggctgctcttctccagccagggaaagcag

SEQ ID NO: 56322 - DNA, 122 bp, Homo sapiens
cgaacagggtagagttttaggaaataccagatgttgctgcgattttctacagtgaaggggcgtggaaggggacaatgggagtagaagcgggtttctgaagttgtgtttgtacttgattttaa

SEQ ID NO: 56323 - DNA, 122 bp, Homo sapiens
ctcctgaactcaggtgatccttccacctcagcctccccagtagctggtactgtagtcacgcgccaccatgtactgattttggaaaatggtgattttctaactccatcattccttttacttct

SEQ ID NO: 56324 - DNA, 122 bp, Homo sapiens
ccacgaggtggacccggtccgcagggccgtgcgggaccgcaacctgctccgagacgaccgcgtcctgcagaacctgctcaccatcgaggagcgctaccttccgcagtgctcctacttcaagt

SEQ ID NO: 56325 - DNA, 122 bp, Homo sapiens
cacggaacctgaaatccccgtgagtcaggatccccgagacacaggggcacgtgcaactgccgatcacagaagctttcagacagtgactccaggcagaaagggtggccttctcttcttatgca

SEQ ID NO: 56326 - DNA, 122 bp, Homo sapiens
ggcgacggggactagatactgggcaaggactgtcacaagcactccgaagacgcgacccggcgaggctcgggctggaacccgggcgcagagctgcctcgcacaaacgttctgggcactacatc

SEQ ID NO: 56327 - DNA, 122 bp, Homo sapiens
ttgcttgtgatgtctgtggggcatctgaggaacacagacttcatgaaggctgtggggaaacgtgagcaagggctctagggcatacacatggcacacagaacccgggcctgcaagtgatcaac

SEQ ID NO: 56328 - DNA, 122 bp, Homo sapiens
aacagaagaatgcacatcctcgggagctacctaaatctactgaattacaatgcatatgggcggggcccaggaatctgcagtttaataacgaatatccccaggccattgttatgtacgcttaa

SEQ ID NO: 56329 - DNA, 122 bp, Homo sapiens
aagtgatatttaaaacataaaccagataatatcagtcccctgcttaaaaccctccagtggcgtttcatcatattcagaatgagatccaactcttaccctctcctaacactcccgctcttatg

SEQ ID NO: 56330 - DNA, 122 bp, Homo sapiens
aagtcaaaggatctgagtgtcagaaacgtccttagcaatcaatgggctagtccaattagacgaaactgaggctctgagaacttgaagtgatttgccaagtgtcaatcaataggttggtgaca

SEQ ID NO: 56331 - DNA, 122 bp, Homo sapiens
gctatgacccaagatgctcatggagggaagagcagtccagggccagggcccttccaccttcgccaggcaggtgcctttgagcaagtcaatctctgcagcctcaaaataggaaagatggtaat

SEQ ID NO: 56332 - DNA, 122 bp, Homo sapiens
gattagagtagggctaagtgcaaagtggcacaaatttgcaacagaaaaggaactattttacgttcttttgaataggtaatgcattcacatggttcaaaattgggaaaataaaaatgtctctt

SEQ ID NO: 56333 - DNA, 122 bp, Homo sapiens
ccagccacctgttttcttggccggtaactgtggcacatttatcacattaggcctgtctcacgaaaaccagcatttactaacttaggctgccaaggacataaaaacacaaagcaacaaaacga

SEQ ID NO: 56334 - DNA, 122 bp, Homo sapiens
cacatctgcactcttcatagcagagacctctccctgttcaggttctgcatacagaagagacgcccagaaataggtacagacactgaggctgcagaaaagctgtttctgtggaggagtggaca

SEQ ID NO: 56335 - DNA, 122 bp, Homo sapiens
agcggctccagcgctgctgcctgtttacagcgcggggaaccggcggctacacctcccgcccggctgtccctttaacgtttctagggcatccctggaaggcccgggcacggcgctgaggtctc

SEQ ID NO: 56336 - DNA, 122 bp, Homo sapiens
gggagggagagagagcgccgtacaaaatcccctgccctcgaaaaaggtgaccagaacttacgggagctgggctttaaataggaatacagcagaagtggtgcttctttgaaaactctacgaag

SEQ ID NO: 56337 - DNA, 122 bp, Homo sapiens
cctgcaattgcttattgcttcccctgtcatcgacttgttggcaaaaacagtctcacgtctcgatagtgatgcctacttttacttcagggaagactgataaataatatagttttcacagaaac

SEQ ID NO: 56338 - DNA, 122 bp, Homo sapiens
ttgccaagctgccacctcctccaccgtgacccaccgcctaatgaatcacagtcccctgcacgggacacaagccccagtggggattcagaggtgtgggtgaggaaccatcagccctccctagg

SEQ ID NO: 56339 - DNA, 122 bp, Homo sapiens
actgaacaaatctaaacctgcagctgcaattcctgcagccatttcagggtcttgcttactcgaagggcagagccctcagcctcagggagccaagatgcttccaatgtcattttccacataca

SEQ ID NO: 56340 - DNA, 122 bp, Homo sapiens
gacatccctgagctgcagggcttctgagtcagactggctggcgtgtcactcagccgcacccgtgtgcactgtaacttttgtgtgctcaagaaattatacagaaacctacagctgttgtaaaa

SEQ ID NO: 56341 - DNA, 122 bp, Homo sapiens
ctacctcgcctccatgggggggtgttctccacagaggatattgtcccactttgaggtcctcgcacttaagcgactcctcgcccccggcggaggtggcaacagccccccagggtcctgtagtg

SEQ ID NO: 56342 - DNA, 122 bp, Homo sapiens
gcacccaccctgaggatctccggcggccccacccacccactcggcttcctcctgaggccacgccccctgaggccacgccccctgaggccagccacttcctggccacgcccctcaaagtccag

SEQ ID NO: 56343 - DNA, 122 bp, Homo sapiens
ctatttacaaggttttgatttttttttaaagacacaggatctgccatgtcttttaaaaatcgtgtgattcttgctgaatcacttgagcccaggggttcgaggctacagtgagatgtggcagg

SEQ ID NO: 56344 - DNA, 122 bp, Homo sapiens
agtttaaaaattactagcctgatcatttggaataatttaactttttcctccaccactatgcggtattgttctttttcgtaactttgcctagtgtgtcatttcttcccatctgcatgtctact

SEQ ID NO: 56345 - DNA, 122 bp, Homo sapiens
cgctctctcatgcttccggacacagtgaggctgtggttgccatgttggtgactggcagagcggccatgttgcttatagacgcgcatgcggccatgttgaatattcggagaggagtcctgaga

SEQ ID NO: 56346 - DNA, 122 bp, Homo sapiens
tgtaaactttccagaacaggcccagaatttgaaaatgtgataaagaggttattgtgcgcccgaacttttcacacaagaattggaggagatttaacacatggaataataaacagaggaaggcg

SEQ ID NO: 56347 - DNA, 122 bp, Homo sapiens
gccctgaggcgatggtttcatttactaaggaaaagtttatctgtgaactgggtgtttttccgtcagaaggttctatgagatgcgaatagatacctaccctccctggtatttttagggctggg

SEQ ID NO: 56348 - DNA, 122 bp, Homo sapiens
tgctcagtgcgcgtcacttccgggactcagggtcgcagggaactacttccgggggagcggcgcggcggcgcgggaggtgagtgccgcagctttgcggtggggtgggaaccgagagagagccg

SEQ ID NO: 56349 - DNA, 122 bp, Homo sapiens
tctccgcggccgagaggccccagcgcccgcctccccggcccccgcccccacccccgcccccggctctgcccacgccctccgcccgccagcccggcagccagcgcagctccgggcctcgctcc

SEQ ID NO: 56350 - DNA, 122 bp, Homo sapiens
ttccttcctcactgctcccatcagtgcgaaagcaacgtgttgggggttcggggtgtgtggcggctgaacagctgcctgaagttctctgatggcgctggagggagctccagagaagaggtcat

SEQ ID NO: 56351 - DNA, 122 bp, Homo sapiens
ggtgtgagccagcacaccggctgtgggccacattacttttgaaaagttctggataaaggccgggcgcggtggctcatgcctgtaatcccagcactttgggaggccgaggcgggcggatcacg

SEQ ID NO: 56352 - DNA, 122 bp, Homo sapiens
cgcactcattgagtattaactattattattattactattttgagacgagtctcgctctgtcgcccaggctggagtgcagtggtgcaatctcggctcactgcaagctccgcctcccgggttca

SEQ ID NO: 56353 - DNA, 122 bp, Homo sapiens
ggcaggaagaaacctgcctaatgtttactcaagctgaggggaatggtaaggctttcttggcgactaattagctctatgtcaaattgattaattgattaagataaagaaggtatattagtcaa

SEQ ID NO: 56354 - DNA, 122 bp, Homo sapiens
ggtgtgatttggagttgtcaggtagggactgtggagctcagagacgctggtgtctgggggcgttgggtgtgagtctctggaacctgcctgggcttcccgggagtcctgtcgtctccacatgg

SEQ ID NO: 56355 - DNA, 122 bp, Homo sapiens
gtgctgcagggcctgcgccaggccacgtcagggacatttctcgggggaggccgagaggggcgtgttgaagaggggtcttagctgagactgccctgagtctccaccgctcccccgggtcacct

SEQ ID NO: 56356 - DNA, 122 bp, Homo sapiens
ctggagccgagatggaggcctcatttgtacctcctgccgtgacaagcgcgtgcgcatcatcgagccccgcaaaggcactgtcgtagctgtgagtcgccatctaccctgacctttgaccctac

SEQ ID NO: 56357 - DNA, 122 bp, Homo sapiens
aacaagaaaccacatttcccagactctgagcagcagcctgtggtcaggtgactaagacctcgccagtgggtcagacaggagcaaatgtgccccatgcccctgcttggtcttggccctgaagc

SEQ ID NO: 56358 - DNA, 122 bp, Homo sapiens
gtcagcagcagagggagaaaagcctcgagaagttccctaggccgatgacctccatggggacggagccgagatgagtcccggagggagccggcaggaagccagctgagcagggtggtgtgttc

SEQ ID NO: 56359 - DNA, 122 bp, Homo sapiens
cctagccgctccccgggaagtggaaggaggaaggcaggtcccggccacgggggaggggcgcggctgggatgctcccgcggccccctccgtctcaccaaggctcagccgccttcccaagctac

SEQ ID NO: 56360 - DNA, 122 bp, Homo sapiens
tgggcgccccggagggagggcgggtcaccgcagctgggcccggtggagggggcgctggatcggcgcctgccccacccgagccccgccgagggcggcgggccgggcgcgatctaggggcgccc

SEQ ID NO: 56361 - DNA, 122 bp, Homo sapiens
gtaatggcaaaatagaacccagaggaggcaatgactgggagatgacagaggaaaccaaatcgaagcagctttattgcaccattaagtacatcactgcatcaaagacagtgccacaaatgcaa

SEQ ID NO: 56362 - DNA, 122 bp, Homo sapiens
ttttcttgacacttatttaggtgagaatgattaattaaagcctttgtggactggctcgagcgacttttaaaacgatcggccaatgacttctaaaaggaaacgagggggacagggggacagac

SEQ ID NO: 56363 - DNA, 122 bp, Homo sapiens
gcggggattctggcggtcccggagtagtctgggggttcctatgggagtctaagggtttcgcgggggcagagtgagggttcctgagacactgtattagggcgtaggaagaaggcagagggtga

SEQ ID NO: 56364 - DNA, 122 bp, Homo sapiens
aggagtggaatggtccctgttggagccgctgaggagcctggttacagcctccttcccagtcgagtgagttcctctggggctggctccctgggagggatggagaagttttactagagggtctt

SEQ ID NO: 56365 - DNA, 122 bp, Homo sapiens
cacggcgtggccattctatgaccccccagcctggcagactggggagctgggggcagagggcggtgccaagtgccacatcttgccatagtggatgctcttccagtttcttttttctattaaac

SEQ ID NO: 56366 - DNA, 122 bp, Homo sapiens
gaaaacactccagacataggacatgctcggcacatgtcaggtcttcagttccactatcatcgtaaaatgtatttcctaacttctccagctctcactgatactcccatttctctgagctccta

SEQ ID NO: 56367 - DNA, 122 bp, Homo sapiens
gggcagggcgtcccgagactggggaggggactccttggaaccggctggacatggcggtgacgggacctagtctgcgagtcgagtcctctgcagctcagccctcagtcccctccggtgcaggg

SEQ ID NO: 56368 - DNA, 122 bp, Homo sapiens
tgtaaatacgagataatttgcttatgattccgtggtgtgttttcgcaacgccggcaaacgcggatcccacccccgagcgggaccgggccccgtctcggcctgctggcgccctgcgggctgag

SEQ ID NO: 56369 - DNA, 122 bp, Homo sapiens
ggtggccggatgccaagtgtaagtgtaagttgctatggaaaccccgaccgaggcgagttccgaatccggagcgagacggagccccgggcgccgccggatccgcccctcgcatcccggccccc

SEQ ID NO: 56370 - DNA, 122 bp, Homo sapiens
gctgcggtggccgcttgtccctctgctcaggttttatatagcccgcgggcattccctccgcgccaccccgcaggaatgtcgctgcccttctcgagccatatttgggtgttgggcactagagc

SEQ ID NO: 56371 - DNA, 122 bp, Homo sapiens
gtggatgattaaaaagaaataggggcttaacggagggtaagtgcggggtccccagagctccgcgagcgctgaaccgtgcggctacagctgtctccacacaagcccgacattctttatttatt

SEQ ID NO: 56372 - DNA, 122 bp, Homo sapiens
ggggcttgggaaatgtgttctttcccaagagtatcaaaggaaagaatcaaatttcttgcccggtcactggcactccagaagacagcgtgccggaaccggcagctctcacctttctgtgactt

SEQ ID NO: 56373 - DNA, 122 bp, Homo sapiens
gctggtgatgtgatttggaagcagaaatcctgagaactgtgggtgggtgggttgagggggcgggttgagcataaatctctgtgtctacagacctgagaaccaggagctccaatgcctgaggg

SEQ ID NO: 56374 - DNA, 122 bp, Homo sapiens
tcttcctggagagggacttataaaagttttctgcggaggagtcacatgttaaaacagggacgcatgtgggaccagggctgagcctgaagagtactccacagtcctccttactcagcccaggc

SEQ ID NO: 56375 - DNA, 122 bp, Homo sapiens
agtttcagttttcattaagtttgggaaatcatttaaaaaaattttttgtctgcttctccccgttttcagatactgtaattgcatgtatattatagactgcttgaagttgtcccataactcac

SEQ ID NO: 56376 - DNA, 122 bp, Homo sapiens
gggcggaagtatgcgataagcgagcgaagacgcctccaccctctctcccgccagaagtgacgtcagtcacgtgggaggacaatggtgagaagagggaacctaagaattcctggactctgact

SEQ ID NO: 56377 - DNA, 122 bp, Homo sapiens
gcacacacctcgacgggggcgggggtaggctcggcacaggctaaaaacgagcggagccgccggggcttaggcatcgcggcacctccgttgaacgggtctaagaacagaactcctgaggaccc

SEQ ID NO: 56378 - DNA, 122 bp, Homo sapiens
tgacggtgacgttgtaaataatatgtatgagcccaaccgggacctgctggccagccacagcgcggaggacgaggccgaggacagtgccatgtcgcccatccccgtggggccaccgtccccct

SEQ ID NO: 56379 - DNA, 122 bp, Homo sapiens
aacaactacgagttgtccttcgggtccctgggagccaagtcactgtggggtggggcccagcggggggccatgactgtgtgatgcctgttccagcactcatgggcccagggcggtcctgctca

SEQ ID NO: 56380 - DNA, 122 bp, Homo sapiens
gagtggtcaagtttgcatagtcattgtccccatgcctccttgcaaggcaggccagggagccgtgggcctctcgcgccctgcttagccagtcctgcaggcaaaatcaacgtgggttcctgtcg

SEQ ID NO: 56381 - DNA, 122 bp, Homo sapiens
tcgtccagggccatcccgtccttctcccagtacagtgtgggctcggggaggccccccgcccggcacgtcagcaccacctccgccccccgcagcacccactgggatcgaggccccgtgaggaa

SEQ ID NO: 56382 - DNA, 122 bp, Homo sapiens
gggtgtggggagggtgtttcagcgtgaccaaagacagggaggcatgcaggagcagtactgcgtgcaggtgcctaagcggaaggccagtcaagtctgtatggccagcaggggaactgtaaggc

SEQ ID NO: 56383 - DNA, 122 bp, Homo sapiens
ctgagtgcctgcacccaaggcacacacaactttcaagtaagagggaacatgtcatagtgtcgttcaggatctcagatccaggatcagggagaggcagcacctgtgtacatgacatcatatga

SEQ ID NO: 56384 - DNA, 122 bp, Homo sapiens
atattgccgtaattctgaaagtttttttccttcctctcttcccttcgcagaggtgagtgccgggctcggcgctctgctcctggagctcccgcgggactgcctggggacagggactgctgtgg

SEQ ID NO: 56385 - DNA, 122 bp, Homo sapiens
cgtggcctctagaggcgtggccttgggcgtgggggcggggttttctggtgggggcggggccgcgcagggccgttcccgccgccggccgcccgcgccccgcccccgtgccgcagctcacaggc

SEQ ID NO: 56386 - DNA, 122 bp, Homo sapiens
gacagacagacaaggctgtcctgcagcgctcccccagacagtgagctggggttctgcccacgctgctgcccaataccctccaaaggggacaagctcagggaggttcagaggcctctggaagt

SEQ ID NO: 56387 - DNA, 122 bp, Homo sapiens
gtctccctcagcagtgcttcccgctgactctgctccatgtggctccacaggtggtttctgcgctgtctcctgggagcccagcagttcttagtggccgttttcatcattacagtagcagcttc

SEQ ID NO: 56388 - DNA, 122 bp, Homo sapiens
gcctcgacccggggcctcagtggcttgatatttgaggatttcgtagccggggaagggagtcgtagggacacggagacttaactgttgcccctctgcgcttttggctctggatgctggcgccc

SEQ ID NO: 56389 - DNA, 122 bp, Homo sapiens
gctgggtgggctggctggggcctgggccgaccctggtcttttgtgccccaggactttgaacgggatgaggagcgctcagccaacggtggctccgaatctgacggggaggagaacatcggctg

SEQ ID NO: 56390 - DNA, 122 bp, Homo sapiens
gggggatgcggacgaagaagaggacgaggaggagctgcccccggtttccgctgtgccctacggccaccctttctggggcttcctcacgccgcgccagcgcaacctccagcgcgcgctgtcgg

SEQ ID NO: 56391 - DNA, 122 bp, Homo sapiens
cacaaaacagccagcctcatggtctctgagccctcagatcattgtgcatctgtcttgtgacgcacacacacctgccatgagcttttaaggactcagttgggctgagaggtgggagatgccaa

SEQ ID NO: 56392 - DNA, 122 bp, Homo sapiens
ggctcttcccaggatcaaatgtcacaaatggggatacaagttagcccgaccctacagaaccgggaagaatcaacctgaccgcccaaaagaggccgactggcgcaagtcacctgaaaggggtt

SEQ ID NO: 56393 - DNA, 122 bp, Homo sapiens
cctggtaagtcctcctctattttcagactaggcagcatgaggtcccttcccccatgttcccgtaatgtttatgccagtgtttctcaatctgagtacttttgacatttggggctggataatta

SEQ ID NO: 56394 - DNA, 122 bp, Homo sapiens
agcgtgagtcacgctgaggtcgctgtgaacggctgagccctgggctgtgagtcagcccctcgaggcgcatgatacagcttcaggctccaccaacagtaggtgcttagagactcatgggctgc

SEQ ID NO: 56395 - DNA, 122 bp, Homo sapiens
ccggcgcggctgggcgggaggctcactgcgggcaaggcggggcctggctgcctcagggtgcgcttcaggtggcgcttcaggaaaacggtctccaagtccctagataccctgagaacagtcct

SEQ ID NO: 56396 - DNA, 122 bp, Homo sapiens
caaggtatctgtcacagagtcaccattactcgaccaggcctctgtttcacacagtcgggtcgtttttagtcagtgatccaagggggccgggcggtgaaccaagtctaacggaggcagtcaca

SEQ ID NO: 56397 - DNA, 122 bp, Homo sapiens
ttttcacccggtagagctggttgcctgtcgggatgccaggatacgcagttaattactatacggtgactgaggtgctacttatggcttgccactatgcacagatattttttactgtcagtggc

SEQ ID NO: 56398 - DNA, 122 bp, Homo sapiens
tgtgtatgtgatgctccctatgtgcagatgctaggttagggcttctccaccttttaatttcgtcattgttcttttttctacccccggagtgtttttagacgttttaatcctgaaaaatcttt

SEQ ID NO: 56399 - DNA, 122 bp, Homo sapiens
ggcagctggggtcatcagggtactttcaagaagggctcgtgcaggacatcaaacagcctccgggcctggatgggagggagaaaaaaatgaggaaccagtcattaaaggagctgtttcctggg

SEQ ID NO: 56400 - DNA, 122 bp, Homo sapiens
gcgatgcggggagtcatatcactccccccctggatatgaagatctacagtggtcacacagcgtgttcacgttattgtcagtaatatcttctccgcctctggaaattaccaactatgtcacag

SEQ ID NO: 56401 - DNA, 122 bp, Homo sapiens
agtgagtagtgaatgctggagtgaatagatgcaagagggctggtgtcttttagaaagcagcgctcagtggctgagaactcctgggttccctgctgggcaagggttaggcgtacatttgccag

SEQ ID NO: 56402 - DNA, 122 bp, Homo sapiens
acgtgctgccgagtagtcccggaagcgaagcagcgatggcggagagtccgactgaggaggcggcaacggcgggcgccggggcggcgggccccggggcgagcagcgttgctggtgttgttggc

SEQ ID NO: 56403 - DNA, 122 bp, Homo sapiens
gcgtggctgtaagaatgacaggtggacacgggggcccaccttggcctgtgctgggggccccggtggctggagagtgagagtgggtgctctcactgagggtctgaccctgctccgcagtgcag

SEQ ID NO: 56404 - DNA, 122 bp, Homo sapiens
ttatactttaagttctggggtacacgtgcagaacatgcagttttattacataggtatgtgcgtcccatggtggtttgctgcacccatcaacccatcacttacattaggtatttctcctaatg

SEQ ID NO: 56405 - DNA, 122 bp, Homo sapiens
cttctgcacgtatgcctccttgagtgtcagtggcgtgatcttggcccggctcacaccggccggcaggaagtctagtaggcaggccagcaccactgccttggtcagctggaaggatgcctcac

SEQ ID NO: 56406 - DNA, 122 bp, Homo sapiens
tcggggctcagccagaccgcgaggtcttggtgttcgttcctccctaacttggccgtggggcggcacagcaggcttcctggccccagcgcttccccttagggccagattggcctccgagtgta

SEQ ID NO: 56407 - DNA, 122 bp, Homo sapiens
tacgaaaaccgtccgccggcttcaggactccgcgtcccaggtccgtgcgccgcgcggtgccgcctccggttcccgggcgtcctcacctcatcgccccgctgccctgccgcccgcaccgccgc

SEQ ID NO: 56408 - DNA, 122 bp, Homo sapiens
agctggcacggtgcctggcacagagagctgaaatggcacaccctagtgttcccagtggctcgactccccaggctctccatcaggacgcagccctctcccacctctgatggatatgggaccat

SEQ ID NO: 56409 - DNA, 122 bp, Homo sapiens
tcatccgggcctgtgcccgccgagcccagcgccgctccaatccaccttcccgcaagggctcgggcttcggccaccgcctctcacctgaatacaagcagaatgagatcaacaagctgctgagt

SEQ ID NO: 56410 - DNA, 122 bp, Homo sapiens
gctggcaagtcagaggcagaagacgatgaggacgaggtggacgacttgccgagctctcgccggccctggcggggccccatctctcgcaaggccagccagaccagcgtgtacctgcaggagtg

SEQ ID NO: 56411 - DNA, 122 bp, Homo sapiens
tgtagagtggtggctatggtgacctaccaagtccatggaaaggtcgggcgggttaacggacgtgcacatggtctcaggctctaaggagctctgccgggcacgcaagcatcgcccggggggac

SEQ ID NO: 56412 - DNA, 122 bp, Homo sapiens
ctccccttccgagaggccgttgtaaagctttagcatcctgtgcgccttctgccgacgctccgtgagcctccacatcgggcccttttggggagtccccaggtccacaccccgggctaggccca

SEQ ID NO: 56413 - DNA, 122 bp, Homo sapiens
ccaggcaacgtgcgcgggagaggctggcgacccagctcttcggagatccgcctgcgtccacgctcggcggcagcaaaatgctcttctggttttcaatgtggtgggtggccctatggttgtag

SEQ ID NO: 56414 - DNA, 122 bp, Homo sapiens
tcccggcacatcacgcacagcagcttcccgtcgtcctcacagtagtagtgcagcttctctcggtgtcgctcgcacaactttgcatcctgctgctcccgggtcacctctcccggctgcctgcc

SEQ ID NO: 56415 - DNA, 122 bp, Homo sapiens
cacacgtgtagaaaagtagttttctgtttctaagcttcaatttcaattctctgtcaatatcgagccccctcctcatgctttctcttctcccctttccctctttccatccatcctcctctctc

SEQ ID NO: 56416 - DNA, 122 bp, Homo sapiens
caaggtgtattgggttcacagaggttaggagcgtcctcctgtcaggcagccagtgaaggccgggcttcataaaatgtaggcctattcagtgttctttctagcatgtgcacagtggctccctt

SEQ ID NO: 56417 - DNA, 122 bp, Homo sapiens
ttcgcagcctgagaaatggctcctctgtaactcctggttctgagtgacccatgcagcatgcgggaccattttccagagtctctgcaccctctgcatagctgagtgtgagccgtggggcacac

SEQ ID NO: 56418 - DNA, 122 bp, Homo sapiens
tccccagagcccccaaccagtgccagcatactcagcgtggccggtgagtgggcaggagtacgggccacccgagggactcgggacgggcgtccgggctcgggtagtggtcacactcttggtct

SEQ ID NO: 56419 - DNA, 122 bp, Homo sapiens
ggccagggggctgccggcactaggggcccaagagagtttgctgcccctccagactggcaacgcttgcatttgtttagtacagatttaattgacaaaggctttgagtcaacacgcctgtgggt

SEQ ID NO: 56420 - DNA, 122 bp, Homo sapiens
ctaactgagcagtcagtagttggtcctttggttgcatatgatgcgataattgtttcaagacgggactgatggcagctactaaagtaaattcttactagtaaactaagttaagtgagtctata

SEQ ID NO: 56421 - DNA, 122 bp, Homo sapiens
ggtcagtgctcgctcaccctgccctgcacagcccctaatgttggcacttcacggacaagccggcctgggtcctcagaggagaataaatgtgcacggaacagcacacggtggcccatggcctt

SEQ ID NO: 56422 - DNA, 122 bp, Homo sapiens
ctgataatactagcccagggtcctgctcccttacagttctgtaatcttcactcagtgactcgcttctgtctcaatacaaaggaaagacgttattttttctttttctcctttttttttttttg

SEQ ID NO: 56423 - DNA, 122 bp, Homo sapiens
gccccagcacggccccttagtcccagctctggtgacatgaccttgggtaaatgtgtgcaccgtgctgtgccctaatcttttcctctaaaattgcaacatgcccctcagcaaagggggccact

SEQ ID NO: 56424 - DNA, 122 bp, Homo sapiens
aggccagagagtagtgggaggggccgaggcggcctttcccgggagcgctcggttcccggccggcccttctattggccccagtcactcaggctcccaggtccggctcgggggggagcgggggg

SEQ ID NO: 56425 - DNA, 122 bp, Homo sapiens
ctcagcctccgcgcgcgccgcccgccccgcgagaaaactcgccccgaaagccgggccgcgcgccgcccccagagcaagactacaactcccgggagaaagtcgcctgggccgtgtttcccagg

SEQ ID NO: 56426 - DNA, 122 bp, Homo sapiens
ctgggcggggtgggcctctccctctggggtctggggagggaggacccggcgggaagagcccgtgctcagagctccgaacttcactttacattccagtcccgggttacactagcacaaaggac

SEQ ID NO: 56427 - DNA, 122 bp, Homo sapiens
acccagccttcactaggctccttattgtgcaactgccgttagcatccccatgccattttccggtattggtccctaattcctgctttcatctacaagttcagattaattttttctaaaataac

SEQ ID NO: 56428 - DNA, 122 bp, Homo sapiens
aagctgtgggcggggctgggtggtgggcggggccttgcctctggtggacggggccataggcggagcgggagatggggtggggtttggctgcggagagaaggggcaaggagcgaagcccctcg

SEQ ID NO: 56429 - DNA, 122 bp, Homo sapiens
tcgtagaaaggaggaagcactcaacagaaccttccgtttccagtcaccgggtgattgccgcgcctgttgcttccacaaggaacccactgcaaaaccatctagggcaggggcagccccgggtc

SEQ ID NO: 56430 - DNA, 122 bp, Homo sapiens
gctgcaggaaggcttgaaaggggagatcgaggcatctgtgttgtggaaggaaaacacaaacgagtcagaggtcccccaccacgggcaaaagtgcctctcgaccgcacatgcgtggggcccag

SEQ ID NO: 56431 - DNA, 122 bp, Homo sapiens
gtagctgtgattcccggctctgagttctccctcctcactccttgctctcctcacccattgcggtttgggctggttctgcctccacaatgaccaggctgatgatggccccggcgctcaaactg

SEQ ID NO: 56432 - DNA, 122 bp, Homo sapiens
ggaaaaaacccctgggcctggagcgcagaggcccgggagctgcgtcgccatggcaacgggcgccggcaggaaacgagggacgcgcgggagggagggggcggagggcgccgaggggaggcgga

SEQ ID NO: 56433 - DNA, 122 bp, Homo sapiens
cggggaggccagagttgccccgaagctatctccttacctcaccggcccccacgggctccgcgctcagctacagcccggcgggagcaatgcggcagccacaacagttgccggcggtcgccgcg

SEQ ID NO: 56434 - DNA, 122 bp, Homo sapiens
agcagcctggccaacatagggaaacccagtctctactaaaataatacaacaaaaattagccgggtctagtaaccccagctactcaagaggctgaggcattagaatcgctggaatctgggagg

SEQ ID NO: 56435 - DNA, 122 bp, Homo sapiens
gagtcataagactaggggcggggctctttcttgcttacagccaatctccgcgcttgaaagcggcgagaggggtggtgatgtagcggccggtgggcggggcgaccacgccctggctttttggt

SEQ ID NO: 56436 - DNA, 122 bp, Homo sapiens
tctgtggctcaggggcctcctgcctttgaataagacttgggagagaaccagacggcgatccgagcctctagctttccattgacaaggaggcagctccaaactgggattactgatttccattt

SEQ ID NO: 56437 - DNA, 122 bp, Homo sapiens
tgcttaaagtccagccacttcagcctctcccttcggtttgtctcctaggggttccctgtacgtacccctttccctccagcactggagcccgagtctcccgctgagcaggcacctctccctcc

SEQ ID NO: 56438 - DNA, 122 bp, Homo sapiens
cacacctgtctacaaaaggcagcaacagcagcaacacagcaacacagcttacggaaggaacgaacattcaagagcctcagccttcccgtcttacttgaaagtttggggaaagtgaaatagct

SEQ ID NO: 56439 - DNA, 122 bp, Homo sapiens
tgctgtacaggtttgtagcccaggggcaacaggtgatcccctctaacctggatgtgtggtcgcctgtaccatctaggtctgtgtgaacacactctctggtgttcctatcatgacaaaatcct

SEQ ID NO: 56440 - DNA, 122 bp, Homo sapiens
tgcctcctagaaccggagtggcatctataaaggccctggcccccagcgcgacagggtggacgcgccccaatacaaacccttcgtgggtggccgcgagcgcctccgctgggaagccctgggcg

SEQ ID NO: 56441 - DNA, 122 bp, Homo sapiens
agagtcttctctaaactcccccggggaaagggagattccctttcccggtctgctaagtagcgggtgtttttccttgacactaacgctactgctagaccaaggtccgcttggcaacgggcatc

SEQ ID NO: 56442 - DNA, 122 bp, Homo sapiens
cttcctcccgtccccgttggcggctggcaggctgtggtggtttcgggcagggaagggccccgcagtgtccctcctgtggccacacacactcctttattgctccagcgcccacctgctgcttg

SEQ ID NO: 56443 - DNA, 122 bp, Homo sapiens
tgcaccccccgctgtgacatggaccagttccagtgcaagagcggccactgcatccccctgcgctggcgctgtgacgcagacgccgactgcatggacggcagcgacgaggaggcctgcggcac

SEQ ID NO: 56444 - DNA, 122 bp, Homo sapiens
ctcctggtttccattcgaggcttgcccaccgatccaggccatttgctggagacctcaggtcggcaggaagccctcactggccacccaagcggactcccggctccgctctctgccctgggctc

SEQ ID NO: 56445 - DNA, 122 bp, Homo sapiens
aggacacttgacattttccataggaggggaccttagggttctagttcctagcccagggagcggggtggggggtgctcccagggatcagcaggcagggctgccagccaggtggccagccaggg

SEQ ID NO: 56446 - DNA, 122 bp, Homo sapiens
ggggcagacaagggagaccttgtcattcataagtaatcattgcaccatttattgagtaaccgctgcatgccaggcatttttctagatacattagacacatctctgatgctcaccacagttcc

SEQ ID NO: 56447 - DNA, 122 bp, Homo sapiens
ccatggagctcggcggccacccctaatccgggctggaatcctctggcaccagacgcccggcggggctccaaggctcctgggcccacgccaggccccggcctgaaacgcagcactgctggaat

SEQ ID NO: 56448 - DNA, 122 bp, Homo sapiens
aacctctgggtttcctttgcagaactgcataccccagagcagaggccatgtggagacctgcggcttggtcccgactggtgcagtggcctctgctctggtgtgggctggcggtttccccgcgc

SEQ ID NO: 56449 - DNA, 122 bp, Homo sapiens
tccaaggctgccacaccccccggcagccagggacacggcttcatcttcctctttctccagcggaaagggggccctctccacggaacgccccacctgctagagtcctccacatcccgaaacgc

SEQ ID NO: 56450 - DNA, 122 bp, Homo sapiens
gaggccgaggctggcggatcactcgcggttaggagctggagaccagcccggccaacacagcgaaacccaaaaaatacgaaaaccagtcaggcgtggcggtgcgcgcctgaggcactcggcag

SEQ ID NO: 56451 - DNA, 122 bp, Homo sapiens
aagatatcagcataatccaaaacttaaaaactcacaaggaacagctgcaacccactgcctcgttcataatcactgcagtatgcaatgccattttctaaaggagctgcagcaacaacttgtat

SEQ ID NO: 56452 - DNA, 122 bp, Homo sapiens
gctcctccgcagcacgcacacaggcacaggcacacacacgttcccatcccagctggtgcccgcgtgtgggtgttaggcacagactctttggacaaagctctggagatgaattgggaaagaag

SEQ ID NO: 56453 - DNA, 122 bp, Homo sapiens
gatggagagacagcttagcctaaggtggttggaatctgtctacaaattagttaagcctgacgttgatcattggacattcatccccgtttgtcaggcttaaattcaagtgctttggatgctga

SEQ ID NO: 56454 - DNA, 122 bp, Homo sapiens
aacccttgactcgacataggggcgctaagatgtcagggagttggctccccaggctcagcccgcgtttccctgggcagcggtctcgcaggagcccttctgggcggacctgcagcctcgcgtgg

SEQ ID NO: 56455 - DNA, 122 bp, Homo sapiens
agggggccgagagaggtcggagggcgcggagaggagagaggtagaggaggacgggctggccgagaagcagtgtttcagggaggcctgctggctccgcatgctcgaaaagcagtcgagaatca

SEQ ID NO: 56456 - DNA, 122 bp, Homo sapiens
cagggcgggtgccccagcttccggtctgcccgttcaacatccttagtttatcatacatgccgtctgcgcccatctgttgcttttcgctagccaggttgcgaagaactctgtttattgatgac

SEQ ID NO: 56457 - DNA, 122 bp, Homo sapiens
ggtgtaaatgagagggcacaaggccgtggggcagctccaaatctccctgccctgggcacacgggcttctgcccagccttgagcagccatgcctgcatacccatgcacccacctgtgccaatg

SEQ ID NO: 56458 - DNA, 122 bp, Homo sapiens
cccctgccacctgcagacccgtcgttcatccatgctgagctcattcctgacagtgcggagcgcaatgatgataagctttacttcttcttccgtgagcggtcggcagaggcgccgcagagccc

SEQ ID NO: 56459 - DNA, 122 bp, Homo sapiens
tcggggctccccggctcccatgcctcacctctgtgacaagtgtctgcctgagcccctagccggtccaagtcatcctttgaaatctaggtggaggccaccatggccccacagcttgtacattc

SEQ ID NO: 56460 - DNA, 122 bp, Homo sapiens
tggataatgagtacaactgcaaacagcactgtacacatgtggtgagccaggaggctgggacggaggttaggccaatgttgctgctgactcatagacccacagagagcagggacttcacaaag

SEQ ID NO: 56461 - DNA, 122 bp, Homo sapiens
gcggaaaacaagcaagaaaagatagcaacccggttgcggcaccttttcagctctggagcgcggatcaaaacattgtagcatctgttgaaagagaggctgactaaatcctatagagggcttgg

SEQ ID NO: 56462 - DNA, 122 bp, Homo sapiens
aactggaagaaagaggcaatggattcgccattcttcaccagatcaaactgcaggctggcccggtagacggtggcatggacggcgaagtagtagaccccaggcacctggcaggtgaacttgcc

SEQ ID NO: 56463 - DNA, 122 bp, Homo sapiens
gctgtcaatccaatactgctcccaaatcctgttttcagtgttcatttccctcaaggcaggcgctgggctcccacgacccctcaggacagatctggccgtcagccgcgggccgctgggaactc

SEQ ID NO: 56464 - DNA, 122 bp, Homo sapiens
cccaggtgctgaataaatgtcgaatgcatgaatgaattactgaatgaatgaacgaatgaacgaacaaatgaatggacgcgcgcacacatgctgtagggagcccttcttggctcgctcacgta

SEQ ID NO: 56465 - DNA, 122 bp, Homo sapiens
ttagtgataatgtcagaattttgtttctacagcttcttccccctgtagctacttcacatgcgttgacatagaaatgtgacacatctttctcattagagaaaatgttttcatgcttttagatt

SEQ ID NO: 56466 - DNA, 122 bp, Homo sapiens
gatgctggaaggggagcgggatttaagacaatccggcggcatccttggctggctggctggcggccggggtccttgcccatcacttggaacctgcagaggggccccctgtctgcaattctgtt

SEQ ID NO: 56467 - DNA, 122 bp, Homo sapiens
actcacagtgccaggagcggtcttggcagacacagaaaactaagtgaactcaatggcagacgatggaaggactctgcctgctgctgagggaggtcagtccctggggtcccttgtccatgtgc

SEQ ID NO: 56468 - DNA, 122 bp, Homo sapiens
cccctccacgggtcatcctggacatctgcaaagggtgtcagcagctgctggggctgggggcggggcccaagacccagggctgccaatcccagctacttccacctcccaagcctcagtcacct

SEQ ID NO: 56469 - DNA, 122 bp, Homo sapiens
cccactcccgcgtctctggagtggggcggagcctgggctgctaggagcccctgagcaggccggttccaaatgcgcatgaacctggccaccatcccgggcgggcctctcctcagcagccctga

SEQ ID NO: 56470 - DNA, 122 bp, Homo sapiens
tgcagtagcagagatcggatcgtgccactgcactccagcctggaagacagagcgagactccgaaagagacagagagagagaaagaaaaagaaagaaagaaaactggaagtggggaggcggct

SEQ ID NO: 56471 - DNA, 122 bp, Homo sapiens
gcaactagctctacatggggagaccagagaagcatcactgaatctgtccaggttgagcaccggtcagggccttggccaccaggcaggcactagggaggaggcagacattccacatagatgac

SEQ ID NO: 56472 - DNA, 122 bp, Homo sapiens
ctcaggaaggccaccacatgcgtggcctacgtggcagggaaagtcattccctaaaacaagcgacaattacagctctcatttcccacaacaggaggagattaggacagcggctagggaggcag

SEQ ID NO: 56473 - DNA, 122 bp, Homo sapiens
cagaacagctaaaatgaaaaaatggtgacaataccaaatattggaaacaatgtgaagaagcggatcacttgtatattgcttgtggaaatacaaataatacagttatcctggaaaatcgctgg

SEQ ID NO: 56474 - DNA, 122 bp, Homo sapiens
ggaatccgtttcctctccgcatcagtggcagagatgtccctgccccaaccggtgggtgtgcggattctgtgcggattcgcacggtgtttggcacgtggtaagctccgcagatgtcaatatca

SEQ ID NO: 56475 - DNA, 122 bp, Homo sapiens
cctcgggggaggagggaggtggggccggttggtctggggccccgctggccggagcaggcccggccactggacacggagcggcagaggcaggcgtggtgcagccgagggtcccagggggtcct

SEQ ID NO: 56476 - DNA, 122 bp, Homo sapiens
ctcagacgggcgggaaccacagccccgctcgctgcccattgtctgcgcccctaaccggtgcgccctggtgccacagtgcggcccggaggggcagcctcctcccgtcacttcagccagcgccg

SEQ ID NO: 56477 - DNA, 122 bp, Homo sapiens
cctgggcagctgcttcacacccattttgaattagctgcccagtgcttctggtgagcacctcggtaggagccactgctgtgaactcttttgcaagttctggtggtgactggtttggtttttat

SEQ ID NO: 56478 - DNA, 122 bp, Homo sapiens
gtgcggaggcgcagaacaagctcaggagtctgctgacctggtgcgccacaccccggggaccgccagtgggcgtgttcgaggctccgctgaccagggcgctgtcaggtctggttcgggcagcg

SEQ ID NO: 56479 - DNA, 122 bp, Homo sapiens
gcgtaggaccctccgagccaggtgcggaatatattctcctggtgcgccatttcctaagctcgttggaaaagcgcagtattcgggtgggagtggcccgattttccaggtgccgtttgtcaccc

SEQ ID NO: 56480 - DNA, 122 bp, Homo sapiens
ttagccagtaagtgtcctctcttgcatatactattagctcacaggtctttcagagaccaacgtggaaaagaaccatgcctctcaattacatccctggctcttgctacagagggaatttttat

SEQ ID NO: 56481 - DNA, 122 bp, Homo sapiens
ccgtgggcgggctcgggccccgcagaggcaggaccgggactacacccaggagggccagggcgcggggcccgacgctcggagcggcttcagcccggcgagcggcctcgacccggcgagcgcag

SEQ ID NO: 56482 - DNA, 122 bp, Homo sapiens
gtaaagaggaagaggttcatctaactataaaaggaaaagatgaaggcacgtgatattattcggtcccacaatccttaagaaaaacggtattttgcaagtttgtgtgtgtgtgtgctcgcata

SEQ ID NO: 56483 - DNA, 122 bp, Homo sapiens
aaaggggaggcgagggcccctaggccttaggcaaggggctcaggcccaccgggtggggtgcgtgggccagggccgccagccccggggtgacttggctggagccggaggaaggagttggagga

SEQ ID NO: 56484 - DNA, 122 bp, Homo sapiens
gaaagtatgttcatacccaatgtcacacagagaagtcagtaatgaggaccaggctgcagccgacaccacttggatcagagattcacacacttaccagggatgcttgctacatcaccaagtgc

SEQ ID NO: 56485 - DNA, 122 bp, Homo sapiens
gctctgccacagcagccagaatggttgccatccttcggcagcaatgtccctgagtgaacacggaacctgaaatccccgtgagtcaggatccccgagacacaggggcacgtgcaactgccgat

SEQ ID NO: 56486 - DNA, 122 bp, Homo sapiens
ggctaccaactggctcagctgccttcccgggcccccagaccagagatgccgggcccaggccgccactgcggcgggacacacttcctgctcctggcgtggctgtccttccaaccctgtctgtc

SEQ ID NO: 56487 - DNA, 122 bp, Homo sapiens
taggaggggccaccatgggcagatgtggtgagggaggaaaggagagcagaagaggggacccgatgagcaatccttacaccctacctgcagtgtcgaaacagcgtcccgcccacacacttccg

SEQ ID NO: 56488 - DNA, 122 bp, Homo sapiens
aaaggggtgacggacgcacctggaaaattgggtcactcccacccaaatactgcgcttttccgaccggcttaaaaaacggcgcacgacgagattatatcccacacctggctcagagggtccta

SEQ ID NO: 56489 - DNA, 122 bp, Homo sapiens
acccccagtaaaaggcactcatgggacctgtgtccctgccctctcctgagaagcctaaatcggatgtcacaagtcacgtgcagcaggacctgggccgaggagagagctgtaggaaggccagg

SEQ ID NO: 56490 - DNA, 122 bp, Homo sapiens
gctgtggtgggcattttggagagcttcggagcctggctggtcaggatgaaatcccggccccgttgctcaccggcagtggggtcttcgttggtttgggttgctcccgcattcacatccctggc

SEQ ID NO: 56491 - DNA, 122 bp, Homo sapiens
ctgggactaagaggcgcatgccaccacccagctaatttgttgtattttaagtagagacagcgttttaccatgtcggccaggatggtctcaatctcttgaccttgtgatctacccgcctcggc

SEQ ID NO: 56492 - DNA, 122 bp, Homo sapiens
tggtctttgaaactctgagctgtggtacgtgtggttgtgtcattttctttctttcttctccgccatggtgtaattggaaactcttcttccgtgacttgcatcgtatccctgtaaaccaggca

SEQ ID NO: 56493 - DNA, 122 bp, Homo sapiens
tatatatatagtcttgccctgaggttttctctctgttttctttacagggtacagctctgccggggggggaaaaagtggtaccattttgggcgttcttgagcttcagaatgcaaccagacatg

SEQ ID NO: 56494 - DNA, 122 bp, Homo sapiens
tttggttttggtctttcccctccccaagagactgtattcgtgtattcctgtataatgaaacgtaatgtggtaaaccttggtgctgccacttgctgaggttacctgagtgctactcacttgga

SEQ ID NO: 56495 - DNA, 122 bp, Homo sapiens
tggctttttgaaggctggcacggccggctggaatgagcctcagatggtcttcccgaacatcgtgaactacctaccgtgcaaggagaaccctggccccagctatgcccgtaggcgtgtgagcc

SEQ ID NO: 56496 - DNA, 122 bp, Homo sapiens
agaatgaggttcttgtaatccacaaagtgcgattttcggatgctgtggatcttgttatctcgtaggaaaagctcctgcacgttagagagcttgggcttcaaatcagccaagctgctcacgtt

SEQ ID NO: 56497 - DNA, 122 bp, Homo sapiens
gttatcagaagccgggtgctttactagagagtagaacagaaggccagtagtactcagccccggggccttcagtgttcttcctgcttcctggaaaggaggacttttgacttgggtaaatcata

SEQ ID NO: 56498 - DNA, 122 bp, Homo sapiens
aatgcctggtacataaaagatggccagcattcttgaaataatcaccaagtgggccgggcgcggtggctcacacctgtaatcccagcactttgggaggccaaggcgggcagaacacgaggtca

SEQ ID NO: 56499 - DNA, 122 bp, Homo sapiens
tacagtcccatgctgtacagatttgtagcctaggagaaataggctgtaccatctagcctacgtgtgtagttggctataaaattaggtttggaaaagtgcactctatgatgttggcacatgac

SEQ ID NO: 56500 - DNA, 122 bp, Homo sapiens
ataaaggaccttctggtggacagacctgctattctctatctccttctttcctgctgtgaacgttcacactcatgcacacaggcgcgtgcacacacacacacacttatccaacaagcatattg

SEQ ID NO: 56501 - DNA, 122 bp, Homo sapiens
gggcaagctttaaaggcggggcgagcctcggggtaatgcgtgggtgaggcgagggctaaacgggcggaatgaactgggagtaagatgctgccgagtccgggcgaaaagcaacgcatgctgtt

SEQ ID NO: 56502 - DNA, 122 bp, Homo sapiens
ctttgaagcccagcttaacagtggcctcctgtgtggaatccctctggcctctcctcccagcggagggaacactctttcctctatgttccctagcaccctgcacactcccatacagcccttct

SEQ ID NO: 56503 - DNA, 122 bp, Homo sapiens
acggactcctgagtgcctgggacgctccattcctttgttataaattgtgtaaattgtcctcgacctcttatgagtttttccatcttgcgggctctttcccagtagtttttgaaagcttttat

SEQ ID NO: 56504 - DNA, 122 bp, Homo sapiens
aaaggcggctagattgcaaacgtacctacacagctctgagtcaaaggctgtcagtcatctcggctcagactgctctgctctccagcagcccagccctttcccagggctggggcaggagattg

SEQ ID NO: 56505 - DNA, 122 bp, Homo sapiens
cttggtcttaagcctgaaacttatatttatcttatctgagttcctttcttagaaaactgacgctcgggcctcccagagagtataaaggaactgaaactcaccagatcaccgcatccagacag

SEQ ID NO: 56506 - DNA, 122 bp, Homo sapiens
ctcctgcatgtgctaggtttcctcttaaagggggataaaccgtccagccggttccagcgccggcttctactattgaggatgcaagtagggagcagaaaagatagagggagaagtcagaagct

SEQ ID NO: 56507 - DNA, 122 bp, Homo sapiens
gtttccttatctgtgaagggcagctagcattctgaaggatggccagaagggtggtccccccgagcatggcatagatggtccattggtattggctgggatcctcatctgcctcctctgctcta

SEQ ID NO: 56508 - DNA, 122 bp, Homo sapiens
taagccccattttttttactaaagaaaacagaagtacagagaagattaaaacttgcccagcgtcacacggctggtcagtggtggtactgggacttaaatttagctctttttgatgttctccc

SEQ ID NO: 56509 - DNA, 122 bp, Homo sapiens
ccgaacccccaccgcaagccctggaacggcttcttaacccttttctcggcggctccgccccggccccgccccagccatgcctcgcccccgccccgtttgccggctattggcttctcccatcc

SEQ ID NO: 56510 - DNA, 122 bp, Homo sapiens
tcccccttagcccactacggacccgaacttcgcgcacaggaatcgcgcatacggaagtcccgcccctttctggaaggctgccctcccagggagggcagcgcaagacagcaagtcatctccat

SEQ ID NO: 56511 - DNA, 122 bp, Homo sapiens
gtcactcctttggagcctgggaaggtccccacatgcattgtctaaactttgggatgaatacgcacagctcttaaatgggagcatattattataggtacctgcctacacaaagggtcctccct

SEQ ID NO: 56512 - DNA, 122 bp, Homo sapiens
gatagatgttaatggctgaagaaggctgctgcgtccaacttccaccctcccaaattctggcggctgcttccaaagcagtgaaatttccagtcttcatggcccaaataatttttttaaatgag

SEQ ID NO: 56513 - DNA, 122 bp, Homo sapiens
ggaggcttggaggcaagcgctgcccgcgagctgagccgccggaggaggagccgcgggcaacgaggtaggcaaaggaacactggccgcacggcctggagccttcagctccctcgtcccggccc

SEQ ID NO: 56514 - DNA, 122 bp, Homo sapiens
aataatcgggttgattcggccaaggtttccctcccccaacacggtgcgcactgggaagcgcgaggaccacgtcccttggtttaccactgcgcacctcacaaggcgcccagtgcatccgggta

SEQ ID NO: 56515 - DNA, 122 bp, Homo sapiens
ttatatggatgtgttccagcaattgattgctgagcaaaaaataatcttaacgcatacaaacgccgggcatggtggctcacgcctgtaattccagcactttgggaggctgaggtgggcagatc

SEQ ID NO: 56516 - DNA, 122 bp, Homo sapiens
ctgtccaagcatctgcttctgtacttctgtacaactgttgctcaaattcactcttcttttcgaatcaccatctttgaagagagacagaaaaatccatttaaaccacccgaactaatcattcg

SEQ ID NO: 56517 - DNA, 122 bp, Homo sapiens
ctctttcctttcttcttcccaagcctcttacgccaagagctcaaagcgcaccgcgcaccccggaacccccaggcgcaaacttaccctgttcctccgcggctggaaaaagaaaaatctagcta

SEQ ID NO: 56518 - DNA, 122 bp, Homo sapiens
ctggagaaaaggctgctggaatcagctggtaggtacagtagtaacccgagccccacccaccggctgcctttgcttgctcaggtttctccggtcactcctgccaggggagaagacatgtaaac

SEQ ID NO: 56519 - DNA, 122 bp, Homo sapiens
tatttaatctgtttagacacttgatctttattctgtgtacatctgtcttctagggtgatacgtaggcccagtgaagatctggatcagattctgccattgaaacacaatttagatctacttca

SEQ ID NO: 56520 - DNA, 122 bp, Homo sapiens
aaagttttcatccccagtgttccctgggtcctttctcagtctcctctgggttctgaggtgcggcacactccaaaccctaacctcaggaagctcacagtctggttagaaattccagcacgctc

SEQ ID NO: 56521 - DNA, 122 bp, Homo sapiens
aaatacattctgaggtgccgggggttaggacatgtaaattctgggggatacaactgagcccgcacatcaggctctggcttgagcctcagggagcatccctgtgtgactccgaactgctcaag

SEQ ID NO: 56522 - DNA, 122 bp, Homo sapiens
gcggtgggggggccttgctgcactcactcttgggggagctctgggatggtgggcgcgccccgggcctgggctggagtgactgatcgcttctctgtgaccagacctgcgaccgcatcaagcag

SEQ ID NO: 56523 - DNA, 122 bp, Homo sapiens
ttgctggtgccttatcacacagtcccaaaatttggattgctggcataaaatattgtattacggccgggagcagtggctcacgcctgtaatcccagcactttggggaggccaaggcaggcgga

SEQ ID NO: 56524 - DNA, 122 bp, Homo sapiens
tcacatacaaagaaggctaaaaatgaccgacaactttgtcccattaaacataaaatgaaacgagatagtattatgcagttaaaatctggcagtctgcggagatccttgtttataaaacaaat

SEQ ID NO: 56525 - DNA, 122 bp, Homo sapiens
aaatggtcattcatttccagctggctgcagacactcaaaccattgacccaatgccaccgccgcagaagctctggctgataaggcgatgagacagaaaaaagtggggagaaatcagagagtga

SEQ ID NO: 56526 - DNA, 122 bp, Homo sapiens
ctcaggcagaagagttaaacaaatgcctggttttcctaacttgtatcactgtcctccaaacgacagttacgcacgggtgagctgccactgaggaagaaggtggacccccgccctctcgcgct

SEQ ID NO: 56527 - DNA, 122 bp, Homo sapiens
ctagcacagttatgtgtacgcgcacagtggccgagcgcggcccgggttcctggccctggtcgctggcttccaccaccagctcatagctttccatgtgctcgcggtccactcggccgctggtg

SEQ ID NO: 56528 - DNA, 122 bp, Homo sapiens
cagctctgagccctgcagatgatgcaaccgagcttcactgcttgcatcaggcaggggtcccggcggcagtgagggctggaaggaggtggaacgggtagggggctaagtaaggggaaagggta

SEQ ID NO: 56529 - DNA, 122 bp, Homo sapiens
taagggcctcggctttcccctgagtaaggtgggtgcccccggagggtctgagcagagggacgaagcgatggacttgggctttcacaaaccctgtacagggcagggtgagcaggtagacgggg

SEQ ID NO: 56530 - DNA, 122 bp, Homo sapiens
agtttaatgggcatttggttaacccatttctggtggcactaacgtattcataaacactttcggtaaagttctcaagttataaagagaaatgggttgagtatcccttacccaaaatgcttggg

SEQ ID NO: 56531 - DNA, 122 bp, Homo sapiens
tgttcactcaggctttggtatagtgcaatgtggaaagccaccccaaatgggaagaggacacggtgatgaagatcatggggttattgtaatgattggcactgccattgttgagtggttactac

SEQ ID NO: 56532 - DNA, 122 bp, Homo sapiens
aaccaaatgctgctgttgtttcagcatcccctgaagacgcatcccaaactgatctgctgccgctcctcatttctccatgtttaatgttcatggttcacatggaagtgagaggttgattctgt

SEQ ID NO: 56533 - DNA, 122 bp, Homo sapiens
ttgtataatcccctttcctttgagtgtcagtagaacataatcactcttgtgattatgctacgttaaatggcaaaagggagattatctgcgattacctaatcacatgaatctttaaaagcaga

SEQ ID NO: 56534 - DNA, 122 bp, Homo sapiens
ggtggcgcttagcgccgcctttgccaagacccttcccgcctttgccgcggccagacatgacgagcaagaggagtctcacccaacgctttgtgaggactctggcctgaggcagcgcctttata

SEQ ID NO: 56535 - DNA, 122 bp, Homo sapiens
agcttcctcccacccctggggaacactaaggctgcactgtccgcctttctgataccacgacgtcagtgctcctgtggcctccaccccggggctggcggaggcttgcgagtcctttgcggtaa

SEQ ID NO: 56536 - DNA, 122 bp, Homo sapiens
ccctgttctagacccttctgcagagttaggtcccgcttggagctgctgtctcatgcgatgcggaggtgaagtggagtcccccgacattgctcatggactggcagccccctcggcgagagagc

SEQ ID NO: 56537 - DNA, 122 bp, Homo sapiens
gtgtgattcgcaatgcccagaaccctgggctctaaacagtgaaaccgtctggaagtcggccggtttttactgaaacctcccagatactttgtggtgtctctgcccaccgcagtcgggagcag

SEQ ID NO: 56538 - DNA, 122 bp, Homo sapiens
caagtgtgaggaaatcttcaggattcaagagtacatcccagacccctccttcctcacagtcggcttttacctttccaaactccttccccagcccaatgcctgtcttgctctcactcacctga

SEQ ID NO: 56539 - DNA, 122 bp, Homo sapiens
ccggggacgaagcagaaagctgacttcgctttcgcctgggatttcgctgcacacgcaacgcggaggttgagtaattttaggaaccaagagtagtgtgtgtgcgtgtcttaagtgtgcgagga

SEQ ID NO: 56540 - DNA, 122 bp, Homo sapiens
gggggagtgcgggcagggtcccggctgcgcagacctgcgggtgcccgcccacccgcgccccgcgctcccatacttgacctgtgtggatgtggagtctccgggaaataccggatcaggcactt

SEQ ID NO: 56541 - DNA, 122 bp, Homo sapiens
gtcccatctccctcgcagctgctagtctgtcctcttccaagaggccatcggcgcccgccacggttcaccctaaacaggggtttctgctccccaggtccgcctcggaacccctgcaaccctca

SEQ ID NO: 56542 - DNA, 122 bp, Homo sapiens
ccctccaagaccgagtccatgttcatggcggggggcagcgactgcctcatcgtcggtgagcgccagcagacggggctctgggatgagggtgtggggtccgggcagctgaagctgctgcaccc

SEQ ID NO: 56543 - DNA, 122 bp, Homo sapiens
ggcgtcggccagtagcgggaggcggtcgggtcaggccccagctgggcgcgagcgggtcggcgttgagggagccaccgccctcccgcctgcgcactgcctctcgcccccctccggccagcccg

SEQ ID NO: 56544 - DNA, 122 bp, Homo sapiens
ggtcctgtttttattctactcgaggcagcaacagtgcccagggctctgatgtgtctctcacggcttgaaaggtgagaccttggggggcctgatgtgtgggggatgttgggggggaacagtgg

SEQ ID NO: 56545 - DNA, 122 bp, Homo sapiens
ccccacaggatgggcatgagcccccctaggggcaagagacgacaacaggtggacaagatgcgagccaccagcccactaggacctcggagctgccatggggtgggtctccctgaagaagagtc

SEQ ID NO: 56546 - DNA, 122 bp, Homo sapiens
cggtagaccttagagtttagagatagtcaaacagtactgctggtgaaccttcacaggtcacggatgtgccagacactgggctgggctctacatacgtttccacgctgaatccacaacagccc

SEQ ID NO: 56547 - DNA, 122 bp, Homo sapiens
cacgtggagatttgtaacacagcacttcaagaggggcgtttaaagagtactgagggaacacgagcttcctgagagaaagggacctctgagtggatgtcacttttaagatggatcctaatgca

SEQ ID NO: 56548 - DNA, 122 bp, Homo sapiens
agccttgctggtggtcgtgaaggctctaaacacctgcatggcaatgaggccaaccttctccgcttgatccgtttcaggctctggctccgctactgcatcgtgtgcttctgtccaagaggcag

SEQ ID NO: 56549 - DNA, 122 bp, Homo sapiens
cagctggcccctggcagctcctccccggctcggaggcggcggcaccatcagggaagctcccggcttcttcccagcgccgagctccgtccggaccaagcgtcctgctcctccgcggccgccgc

SEQ ID NO: 56550 - DNA, 122 bp, Homo sapiens
tttggaggggatggtaggttagaagattaggaagatggaaaacctcctgtaaatgaagcacgcttgagctaagtccaacaacaacaaaatgagttatgagttacccagaagagaggtaaaac

SEQ ID NO: 56551 - DNA, 122 bp, Homo sapiens
gttgagttatttataaactggccacctgggagtggcatgaaaagggctgctgccctggggcgtggatgctgggcctatggtgacaggcctgtgtgacggagggtggtgattcaacagggtca

SEQ ID NO: 56552 - DNA, 122 bp, Homo sapiens
atgtttaggaagaatcacttttggcaaaaccctctcacttgagagtattctctaaatgaacgtatttttggtccaagagctagcagaagataacacagggaagaagttttgctttgtgggaa

SEQ ID NO: 56553 - DNA, 122 bp, Homo sapiens
tctgtcccctgcctctggggcctgggaaccccccttcttctttctcctgaatggcacccccgccctagaatccagacaccgagtttcccactgtggctggttcaagggtatgtgaggtgaga

SEQ ID NO: 56554 - DNA, 122 bp, Homo sapiens
gagatctcgcctcaggctcggcttccgtagggccggcacgctggccctgacacacttccacgccctccgcgacaccgcgagccccaccctaggctcttcaggccctaccgtcggccggcagg

SEQ ID NO: 56555 - DNA, 122 bp, Homo sapiens
agatcctctcctttcggggcaaggatctggggccctgaatgagccttggagctcgaagaccgcggctcgggctctcggagggctctgcgcggtggccgaggaagctccggggtgacggcggt

SEQ ID NO: 56556 - DNA, 122 bp, Homo sapiens
gggcaggcctggggcaatcagggaggggcagtggcacactgggagcaaggcaatgttccgcgacccacagaggcagcgcagtagctgttccaaccctggtcagaagacaccccggaaatgcc

SEQ ID NO: 56557 - DNA, 122 bp, Homo sapiens
cagtaatcatataagtatacccacataaccacctaagtggagagcagacgcccagattcacggtccccacgtgttgctggagttggcgcagacgcgtgtgcgggcatagcggcggacgtgac

SEQ ID NO: 56558 - DNA, 122 bp, Homo sapiens
cacctgggcgatgcggatccacttctccagccgctgcgccctctgcggggcggccaagcccggtgctccgagcacggaacccagcacacagccggtcacggtgttgaactgggccacggtgg

SEQ ID NO: 56559 - DNA, 122 bp, Homo sapiens
actgctgagaagtgagccctggtggaggcttcgaagagcatcctggaaccccctaggctccgagaagtcctgaggtcagggagtttgcagagagcagccttggctcaatgctacagaagcca

SEQ ID NO: 56560 - DNA, 122 bp, Homo sapiens
gttggtagccccctggcctgttggcttgggcagccagcagtgacatgctccagctgttagcgctgcctgggcctgccgtggctgtcagccccagcagatggggcacagagcagcctctgtct

SEQ ID NO: 56561 - DNA, 122 bp, Homo sapiens
ggcggcggggttggggccggggtgggcggccctgggggcccgcggggaggtcagtggccccgggagggtcgcgcagaggcgctgggggctgtggaagccccgcggccgcctcccgtgggcac

SEQ ID NO: 56562 - DNA, 122 bp, Homo sapiens
gtgggggggggggttgcgtggggtcgggttgggagcagagggtggggacagagagacagacggagagggacatctgggatgagaaagagacccagaaacagagacacgggggagacaggcgg

SEQ ID NO: 56563 - DNA, 122 bp, Homo sapiens
atattctacaagaagtggtctggaagggactggccgacgctggtaatctttccacgtgaacgagaaacccacgctgggcatttctgatccactaaaaactaaagtgtttccaaaagaacact

SEQ ID NO: 56564 - DNA, 122 bp, Homo sapiens
gacctaaccccctaggaccccctcgccacggaggaccccccgggtctgcgtctggcccctcgctctgctccaggactgccgcgtcagaccctacagaaagccccttcctctgggtagtgctc

SEQ ID NO: 56565 - DNA, 122 bp, Homo sapiens
atttaagtaagaagcaattcatgaattggggagcaccagaccgacaaaggtttagtgttgcgatgacaaaatgtcagaggcaagcatttattgggaagttatagaagcaaaatgaaacatta

SEQ ID NO: 56566 - DNA, 122 bp, Homo sapiens
ggcctgggaagtgcagcgtctccctgacgcttggaggagcggcgtaaagttccgggacagcgattggtgtagagcgcggtcactcaggcccagaaagtgcttcctgtgccgggggaggtggg

SEQ ID NO: 56567 - DNA, 122 bp, Homo sapiens
aatgtagaggatggaatggaagcttgtgagactagggcaaaaagaactaagaaaacagcacgataatatagaaaaaaaaacaaggaacagtgttaatagagggccatccaattgaatgtatg

SEQ ID NO: 56568 - DNA, 122 bp, Homo sapiens
cagggctgggagacaaagacccagatggcgaggccgggacaggctggagtccggcttctccggtccaggatgcccgcttttgctttttcaaaagtctcatgccctgtgctttttcctctttg

SEQ ID NO: 56569 - DNA, 122 bp, Homo sapiens
aaaagaagatcccaccctgcacgtgcacgaccctgcaagttatgcaagtgagggtacctgcgcattgaaaaaagatgtctcaccattgaccagtcattgatcagtcattgatcagtcttgag

SEQ ID NO: 56570 - DNA, 122 bp, Homo sapiens
gcgttggtcagtgtggtcaggttggcctcacactgctccaggtagaagagcagcagctgccggtccgagggccccaggccgcctgttcgccccggggccaggggttgggctggcgtccagtt

SEQ ID NO: 56571 - DNA, 122 bp, Homo sapiens
gcaatcaatcctcccgcctcagcttcttgagtagttgggagtacagtcatgcaccacccacgcagccagttctgctttttaagtgcgtacattgggtaggtttcttaaccttccttcttctg

SEQ ID NO: 56572 - DNA, 122 bp, Homo sapiens
gaacgccacgcacgccttggtccatttcatcttcgaaagggtgtcatgagtaggcactgccggtctccccactttcccaatggagaagctgagacacagagaaggggagtgacctacccaag

SEQ ID NO: 56573 - DNA, 122 bp, Homo sapiens
caagcaggctaaaaagaaaaagaactgattagacctcagacgacccactaaacgggatgacggccacagctgaggtagagacaccaaaaatggagaagagtgcctccaaggaagagaagcag

SEQ ID NO: 56574 - DNA, 122 bp, Homo sapiens
gcgtggcatccacccagggccaaggtggaggctacgcaggcacagtcacagacacagtcacgatgccccagccaggcctgggggtgtgatcgctggcatgcgggtgcagacccgaaccagga

SEQ ID NO: 56575 - DNA, 122 bp, Homo sapiens
tgatcctgatacctccctcattcatatctgccgtaagagtaaatgagataatgcctgtagcgtgcataggatagtgcctgtcacatagcaacttctcaacatgtgttggcaattattctcat

SEQ ID NO: 56576 - DNA, 122 bp, Homo sapiens
ggaggtgtggagggagaggcgcgtgcgggaactggggctgcgcacaggcttgcgggccagcgcgagttctgggtgggcatgggctcggcgggcccacactcagagtgaccagccggccccgc

SEQ ID NO: 56577 - DNA, 122 bp, Homo sapiens
tgttctctgggaaatccttttcaagataattgaactctgcctttgaaactcatcctctaacgtagatagcggggcagggctgattacagaggacggaagcccaggagccccagggcctggca

SEQ ID NO: 56578 - DNA, 122 bp, Homo sapiens
tgctgagagtgaaattggcttcgtaatttgtggggactggtgcaaaatgaaaattgttcacgtttcaagatggcaagagcagagcactaaactaagtctagggcccgactgagcacagcaca

SEQ ID NO: 56579 - DNA, 122 bp, Homo sapiens
cccccgcccgcagcgactctacaccgtggactgcaggttccgggagcgcatcgaagagaacggccacaacacctacgcctcacagcgctggcgccgccgcggccagcccatgttcctggcgc

SEQ ID NO: 56580 - DNA, 122 bp, Homo sapiens
ctgggctgcagactcggagtgtgagtgcacagcctttgcccgccgggcagcggggctgagcggagggagggtcgcctgggaacactagttctgtgctcgtccaggcagcggctgagagcaga

SEQ ID NO: 56581 - DNA, 122 bp, Homo sapiens
ggctcaagtgattctcctgccttgccttcccaaagtgctgggattacaggcatgagccaccgtgcctggccagatttgggaaacattttataaataggtgcttagatcaggagagcaatgcc

SEQ ID NO: 56582 - DNA, 122 bp, Homo sapiens
gcactcacacacacacccgcgcaccctcacactctcctccctgggggcggggcgggcgggcgctgccctcacacaggaagtcaggaaacccagggggcagagaagccacaacttcgggccat

SEQ ID NO: 56583 - DNA, 122 bp, Homo sapiens
ctgaactgatttcaccaacactgtgcaaatcagaaacaattattttatatgtaagagggacgtgcttatccctaaaattactacactggacaacaaatttagtaataagtgcaattccttta

SEQ ID NO: 56584 - DNA, 122 bp, Homo sapiens
aaactggggagggctccggcctcgcctcgtcagccccggagccttcaccaatcccgggcccggaaagaccacgcccactgctggccccgcctagcacctgcgcaggtgcagtctccacctca

SEQ ID NO: 56585 - DNA, 122 bp, Homo sapiens
tttcaaaaccaggctttggcccagagtgctgagaaaggtgggcggcgagaggctagctatcgccccactctgcttcttatgagcgtgacttggcgcgttagcatccctggaaatgaccataa

SEQ ID NO: 56586 - DNA, 122 bp, Homo sapiens
gatctgaagattccaagcctggggctttctggggaatgatgttgctggcagcaggaatagcgtgtgggaagggcccgagggaaaaatgcaactatgatgattttgaaggcctgagattcagt

SEQ ID NO: 56587 - DNA, 122 bp, Homo sapiens
atgaccctttctctgtgagtcactcccaccaaggaaaaaagatgtgacagcagcagcaggcgggggctgggaatgggaccaacagtccaaacttgcagacgtctggatcacttcagtttggc

SEQ ID NO: 56588 - DNA, 122 bp, Homo sapiens
tgtctgccgggttctcgctctgtcttctgctctgctaaggtgcctggcacaccatgctctcgatcccagatgagtgaatgaactaatgaatgaatgaatagcagcaccacatcaggctgctc

SEQ ID NO: 56589 - DNA, 122 bp, Homo sapiens
ggaggggcggggcccggggcgaccgggtaagagcgtggttggttttagagcgctgagggacgtggccaagagtgaaagcatgaatgggcggggcccggggcgactagataagagcgtggttg

SEQ ID NO: 56590 - DNA, 122 bp, Homo sapiens
caaattccatacagaagctcttacagcactactttcagatgaaagcaagtctggattcatcgtaatagatggtagtggtgcactttttggcaccctccaaggaaacacaagagaagtcctgc

SEQ ID NO: 56591 - DNA, 122 bp, Homo sapiens
atgaggaggaagaaaatgtaggtgataaggttctcatattgggccttttgacttctgttacgaaagctgttcattattatacatggctattgtatatgtctaattgagattacagataagcg

SEQ ID NO: 56592 - DNA, 122 bp, Homo sapiens
ctcacaggcgggctgcagcaggctagcagcaggctgatgcccagggccccgtagtctcggcgcaggtcctgcagcgtgctcacaccggctgcgtctaggaacagcagcggggcgcagtcgat

SEQ ID NO: 56593 - DNA, 122 bp, Homo sapiens
cctccatgtcatctcatcgtgtttttccagatggcccccgactggacgagagggattgtccgggaaactggacgtggccagaaaattcccagcagactccaatgtgccaggcttgggggaac

SEQ ID NO: 56594 - DNA, 122 bp, Homo sapiens
ccacccagcggccaccagcctgtgtccgattggggtgaagaggtggagctgaattctccccggaccactcacctggctggcgccctctccccgggtgaggcctggccttttgagagtgtatg

SEQ ID NO: 56595 - DNA, 122 bp, Homo sapiens
acctcgctccggaaaggggacacctggtaagagaaaggggttgagatgcccgcggttgcccgaggatagtggagaagtgggcgggagccgcgagctggttctttcgctagtgacaggtgcgg

SEQ ID NO: 56596 - DNA, 122 bp, Homo sapiens
ccacaaagccacagtgatcctcgcacagtccacatttttatttccccaaaagatgtttttcggaaaggtccctttcccttaccatagctagcaccataccccaagaccaggatgaaataagc

SEQ ID NO: 56597 - DNA, 122 bp, Homo sapiens
tgcatgttggtgctctcctggccccacacaggaacttagctttcaaatgcaggcgtatgacgtaaatgtctatttaaccgagaagtggaaaatatgttctgaaggcacaatcataaggacag

SEQ ID NO: 56598 - DNA, 122 bp, Homo sapiens
aggcagaggaggttggagacaatggagaacctggagcttcttgggagagttcggggatgccgactttggggtcaggggccctgagcattgagggtcaagtcccttattatgggggtggcagc

SEQ ID NO: 56599 - DNA, 122 bp, Homo sapiens
gaacgggtggaacgggtgggggagcggacagtcgaacggcctgagagggctcagctggtccgggtgggattctgaaggccagcggaggtgggcttactagggaaaggggcgcagcagtaact

SEQ ID NO: 56600 - DNA, 122 bp, Homo sapiens
ctgaattgagtgagttgtgacgcttcccggaaccccttttatttcatttgtgaaagggtccgatggatactcgctatacccacatcagaaggcgtaagagtgcctggctcagacatttttcc

SEQ ID NO: 56601 - DNA, 122 bp, Homo sapiens
ggtaggtgttttgtcatgtacccttaaccggtgcaagcgcagtttcgagttggtaccaaacgtctgggggcaagagctgcaggggatgcggccaatgcctgtgtgtcgggactggtgagcct

SEQ ID NO: 56602 - DNA, 122 bp, Homo sapiens
ggacattttcctcgcctcagcaaaggcgagaagagtgccccgcggagtggctgtgatgagcgggatgcggaaggtgtccactgagccgatctgtctcccgctcacccacagcagttgctcca

SEQ ID NO: 56603 - DNA, 122 bp, Homo sapiens
ctgacccccgccccccgccccgccgccaccccggcgcccccgccccagcggctggccggccgcatgctgcagatggtgaagaccctggcccagttcaccatcgcgctggaagacatgcgcga

SEQ ID NO: 56604 - DNA, 122 bp, Homo sapiens
tcatttcgcccgtctacttctacattaacgaagagcagattctcatcaacgaccggaacacggtcaaggtaaccagcctggcggccattcttaagaaggggcccggaaacaaggggttggct

SEQ ID NO: 56605 - DNA, 122 bp, Homo sapiens
tccaaagtgcctagaacagatggtccataaatacttgttgagcgagcacacgcatgaatacgtgtgcaaaggggctcaggtaaagagtgtaatttctataatttcaaagctgtgatgtactt

SEQ ID NO: 56606 - DNA, 122 bp, Homo sapiens
agccttcttggatttaggaatgccagacagcacttcagccctatgcttggggtcgggggtcggggatcgggggcactttaaacagcaaaatcaggcagtggctcacacctctaatcccagca

SEQ ID NO: 56607 - DNA, 122 bp, Homo sapiens
gccgacacaagtcccttctcggacttgccgtcctggggagtagagaccgggactgggacacgcccccctcccggggcactcagagaagttgtctaacccgggggcagggagccccgaatttg

SEQ ID NO: 56608 - DNA, 122 bp, Homo sapiens
gggaatgttcaaggccccaggcgtgggttagtgaagcttgcagtgaaaacaggcagccggcggggtcgtagtgaggtcaaggcgctctcagtcaggacagagaaaaaaggaggggaaattgg

SEQ ID NO: 56609 - DNA, 122 bp, Homo sapiens
ccggcttcccccaaaccctgtgggaggggcatcccgaggaggcgaccccagagagtggggcgcggacaccttccctggggagggccagcgcgcttccttccttccagatgttccagaaggag

SEQ ID NO: 56610 - DNA, 122 bp, Homo sapiens
aggccagtttcctggagggagaggccagtccccctttgggcgcccgccgccgtttctcggcgctgctggagcccagccgcttcagcgccccccaagaggacgaggatgaggcccggctgcgc

SEQ ID NO: 56611 - DNA, 122 bp, Homo sapiens
ttaaaaaaaaaagtaagtttgtactattgaccctatgttcatcttttccagctaaagtctcgtgatcatcgagtaaaatttctctcatccttttataatttctagatagaaacaccatgaat

SEQ ID NO: 56612 - DNA, 122 bp, Homo sapiens
ctgccggtgcaaggaggctgccacctgcagaaggtgctaacgccaagtgtgggaagacaccggggtcggcctgggcgcagtcactcctgggtggaggctgagcttgggagtgtgaatgccgc

SEQ ID NO: 56613 - DNA, 122 bp, Homo sapiens
gcagcgcgagagcaagagcaacgcggccacgcccactaagggcccagagggcaaggtggccggccccgccgacgcccccatggtaaggccccagcctggctcctgctgctggagggcacccg

SEQ ID NO: 56614 - DNA, 122 bp, Homo sapiens
tagtaaaaaagatgcggcaagatcaacaaggcatatagcttgcgcccgccagaagttccgcggcctccacacccatcccggcatactttgcgccgtgcacaggcaagccctggtgcgcattg

SEQ ID NO: 56615 - DNA, 122 bp, Homo sapiens
cggtattttgttatagacacctaaaaggaccaagacattctccctgtttgccaagaccatcgtgttgagtttctgtatcgaaaatgggagccgtgatcttggctccctgagcagctgcagcc

SEQ ID NO: 56616 - DNA, 122 bp, Homo sapiens
ggcagcagtggtgtaactgatggcagagcagacagatcatccggggtgagcagccactgccggctgagcttggcttggctctttctgggctctggtgagggaggtctcagtaggaactccca

SEQ ID NO: 56617 - DNA, 122 bp, Homo sapiens
ggctcattacctaagtagctacggcttccccggccccctgtacaggcctcgtttggacagcgctgactcctcttgagctcagggggaggaggcagggagagtatatccaggaaggcttcctg

SEQ ID NO: 56618 - DNA, 122 bp, Homo sapiens
ggtgagtgttacagctcttaaggtggcgcgtctggagttgtgcgttcctcccggtgggctcgtggtcttgctgggctcaggagtgaagctgcagatcttcgcggtgagtgttacagctcata

SEQ ID NO: 56619 - DNA, 122 bp, Homo sapiens
aactgtaaaacatcctcaggcaggtccttcagggggtattccagaaaaaggcattgttatcgtaggtgatgacagccctatgcacgtttttcaccagtgggatgaaatatggagatggaaga

SEQ ID NO: 56620 - DNA, 122 bp, Homo sapiens
caatggaagggtgataccgagagggcggggcgccaggcggcgagagagccaatgggaggccgagccgaggaccgcgggcggtgggcctccccccgagaggagggagacccggaaggcggtgg

SEQ ID NO: 56621 - DNA, 122 bp, Homo sapiens
atcgcggcgaaggggacagcggctgacaggacacaacttggttacgaccggctgcggcagcggaagcgggaggagtcggcgaatacgcccggccgcctgcggcccggcttccggtcccgtct

SEQ ID NO: 56622 - DNA, 122 bp, Homo sapiens
tggtgccctcaggccagcagagtggggcacattggatggctccgacctcgaggacacggacgatgccttccagcggagcacacaccgctcccgcagcctccgcagagcctacggcctgggcc

SEQ ID NO: 56623 - DNA, 122 bp, Homo sapiens
agagagcctgtgctagccgcggggtagaggggaaggagaagagctttgggccgaagtgtccgcacaccctggagcaagagacacttgtgcactgaaattctaaccgtgggatgcaaggagag

SEQ ID NO: 56624 - DNA, 122 bp, Homo sapiens
ggcataatgttgtttttcatatgcaataactcactgaagatccaaaacaaccctgtgtgacgagtactatcatcactatttttcagacaaggaaacggagacatagagaagtgagatccctt

SEQ ID NO: 56625 - DNA, 122 bp, Homo sapiens
ctttggtcattgggaagaatgtggcggtgtctcttttagcagcaggcaccagttgcaacacgacattgaccatgcaacatcaactgaagcagccgccaactcgccagccaggcgcactggtg

SEQ ID NO: 56626 - DNA, 122 bp, Homo sapiens
taagcccctctgccggctcagctgccgggaccctggacctgtgcctccctgctgttcccacgccagcccccaagtgacttggctcagaccagagggtgttttccccaaagcaagaccagggg

SEQ ID NO: 56627 - DNA, 122 bp, Homo sapiens
ccggggccgggagcagttccctaaatagatccgctacgtagccattaattaatagcatctcgaaccagaaacagttttaaccttggaaaagcaaagaatcctctcccggttgaaattgaaac

SEQ ID NO: 56628 - DNA, 122 bp, Homo sapiens
ttcagagctaagggctcaggagatcctgtgtttagggaaggtgacggtccaattggggcccgttttagctgcactcacctctctcggtggctcctctggtttccttctccagcagcagcgcc

SEQ ID NO: 56629 - DNA, 122 bp, Homo sapiens
cccactcagagggcgggacagtgtcactactcccatgccaatgacaagaggcctgtgacccggcgcccacctccgcttggggctcagtcccacccagcttccccagccccacaccctggccc

SEQ ID NO: 56630 - DNA, 122 bp, Homo sapiens
aggggcggtgcaggagagcgcccggagccagagccagggcgcgctgggcgcaagctggggcgcgcccagggccaatgagcttctgattggctctttgctgtgaatagactaggccgaggcta

SEQ ID NO: 56631 - DNA, 122 bp, Homo sapiens
aggaatgtcgcagtagtcatctctctgttctggatcagtagtatagcaccagggcccctgcgcatcgttgtctggattcctccagtccctctgaggggtgtgtagcaggtgagaatctgggg

SEQ ID NO: 56632 - DNA, 122 bp, Homo sapiens
gacttccactgggaaaaaattaatttttcttattggttagacttttgcagctccagagatcggttgtctgccaagaatcagaccttcctgatgagctgctttatggacgggcaggttatctg

SEQ ID NO: 56633 - DNA, 122 bp, Homo sapiens
gcctggggcccctgctgggaaaacgaggggacagtcacagcacagggaaagagcacacgacggccacagtgcagggaaagagcacacgacggtcacagcacagggaaagagcgcacgacagc

SEQ ID NO: 56634 - DNA, 122 bp, Homo sapiens
acaacacctgttacacaggttgtcatcaatgcacatgtatggaatgcatgaaaaaaagatcgaaagagatgggatggcacaaaaaacacaagaaactcctggcaatttgaattatttccgct

SEQ ID NO: 56635 - DNA, 122 bp, Homo sapiens
ggggaacaggaaagcccgccgggcaggtcaggtgtgaaggcagaggccacgcacagcggccggccacacccgcctgtagctgcccggaaaccccaccgggacccaaggccgcaggtcctcac

SEQ ID NO: 56636 - DNA, 122 bp, Homo sapiens
ctgtttcagggagcacatcgctcctggggcatgtggggtttatgtttcaggctgagacaccgccagccacagcacaaggacggtgcatcaagagctacgtcgggtattaggcagggtacgtg

SEQ ID NO: 56637 - DNA, 122 bp, Homo sapiens
gagctgctagacaatccctcagccccacagagccaagcaaaagcactggagctcagacgtcgtgaaggcaaagaaacagttaagtctccagtgcctcgtcacggaccagcccctcttccccg

SEQ ID NO: 56638 - DNA, 122 bp, Homo sapiens
cccgcgtccccttccgacgccactgcccccccttgtccccttccgacgccactgcccccccgttccaatgccactgcccctccgcgtctcctgtagacgctctgctcaggatgcggggcgca

SEQ ID NO: 56639 - DNA, 122 bp, Homo sapiens
agaagaggagtggaggaggggtttgaggctgagggaggctctgaccacagcacagagcaccggcaactttgtctaatgtgatcattaaccttcctgcaaaacacagctggcagttctctgag

SEQ ID NO: 56640 - DNA, 122 bp, Homo sapiens
tgtgatcactccagtcaaaaagaagcggggacgaccaaagaagcagcctttgctcacagtcgagacgattcatgagggaacttccaccagccccgtcagtcccatcagccgagagtttcctg

SEQ ID NO: 56641 - DNA, 122 bp, Homo sapiens
agatgcacgcacacagcaggcagtgacccctcctgagcctgatctacccctctaacctagcgtatgcctttgtgcaggtgagagcccagctttggagtctgaatgcctagccagggcccctg

SEQ ID NO: 56642 - DNA, 122 bp, Homo sapiens
gcctgggccaggtggtatctggcccgccccattccagcctgaactccgcccaccgcgatccggaagcctagcgcccagtgggttgcaggaaaaacccggagctgaacacactgcccgacccg

SEQ ID NO: 56643 - DNA, 122 bp, Homo sapiens
gcgcgagtggggcggggccacgggggcggaactgagggcgaggcggggtctcgggcaacacgcccaggacaggtgcgcgggcgggacggggcggggagcgcgtggccgccggtgtcctcccc

SEQ ID NO: 56644 - DNA, 122 bp, Homo sapiens
tcacagttggtgtggggctagcagctccccagggaccaaaacaggcgcatccccgcccaccgccccgcccatcgtgccagcccgactccacccctgtggctacacccactgccccgcgcctt

SEQ ID NO: 56645 - DNA, 122 bp, Homo sapiens
gctgcccgaacgggaagaaggtgattcagtacaagagggcaaagctggagaagtgggccccgtacctcaatagcaatggccttgtgagccgcctcaccacctatgaggacttgcagtgtaag

SEQ ID NO: 56646 - DNA, 122 bp, Homo sapiens
acattgttgcgccagatttccctaagcacatcactgcatggctgttctctcttctggatacggccgccctttctgcctagagacgtttgattcttcctggggggcggtgcagggtcaggtga

SEQ ID NO: 56647 - DNA, 122 bp, Homo sapiens
gaacagagaagtgccctccacccttcgcctgcgccagggcagttaacgtgcaggcgccgccgggattttcctggaacaaacccgggcacttgatcttccgcaccctcggagctgccctggga

SEQ ID NO: 56648 - DNA, 122 bp, Homo sapiens
tcttatgtcatgctgagtcataaaaagaagtgttcttcagtgcaacacatctctggaggccgcttaagccagcctctgtgttagtcatcactatattcacaggcttggagccagtgccattc

SEQ ID NO: 56649 - DNA, 122 bp, Homo sapiens
taatcttatttcttgttttttgtttttttgttttcttcatatgcctttgctcatacgtaacggaattttcatcaattcaaataaagtgaagtgtctagactttagatggcaggcttctgagc

SEQ ID NO: 56650 - DNA, 122 bp, Homo sapiens
tgagagctctcctgagtaaccggtgctcatccgtacacccctcctacgacagacagctttcggccttctggggagctggaagcatgaccatcaggagcctcgtgcttaaaaaaaaaaaaaaa

SEQ ID NO: 56651 - DNA, 122 bp, Homo sapiens
tgctccctgatccccatcctacactgctgctaaggcaatgccaaggctactgtcctgtcacggtgtccctacttccagcatccacacatgaaaagatgctcaatgtcattagtcattaggga

SEQ ID NO: 56652 - DNA, 122 bp, Homo sapiens
tgacactccctctgccttcaaaataaaagtcctaactccttaaggcatggtttaaaataccgttcataatttggctccatccatctttccagattcatcaactgccactctaccccaagtac

SEQ ID NO: 56653 - DNA, 122 bp, Homo sapiens
ccctccatccttcccctcgagttgtgcccaccgtaaagaggtgggtctggagcgtctcctcgggtcctggagtgcctttccctgggaggaaaacttgcgccgtgaagcgttcctcccgttgt

SEQ ID NO: 56654 - DNA, 122 bp, Homo sapiens
agtgcatactcaattttatagattaggaaatatacagaagttgagcaacatgcccaaggtcgctaaactagcaagtggcagaggaaggattcaaagccgggctcagactccaatgctgaggt

SEQ ID NO: 56655 - DNA, 122 bp, Homo sapiens
tgaaccgctcctgaaaatcctgatattttttcccgctgcagcccgcacgggtcaagcgcgcgggggctgaccaacactttccaggtcaggtcgagttgattgctcccagctcacgctccgaa

SEQ ID NO: 56656 - DNA, 122 bp, Homo sapiens
aagtctcctgggaggaataaaggacgcttagccggcccttatattccagatttggaacttcgaaaagagtacgtactgattttccaaagggttttttttttttcatgtttaaacgttaataa

SEQ ID NO: 56657 - DNA, 122 bp, Homo sapiens
ggggagccctgcagatgtggggacacctgaaccctcctatggggtgtaacctgagccctccgacacagggtgcacaggatgtctgcagtcctcacccctggcctgttcctccccctcccagg

SEQ ID NO: 56658 - DNA, 122 bp, Homo sapiens
caggttcccccagacccctcctgggcaggcaggtgcctctcagaggccacccggcactggcgagcagccactggccaagcctcagccccagtcccagccacatgtcctccatcaggggtagc

SEQ ID NO: 56659 - DNA, 122 bp, Homo sapiens
gaggcgggagcatcgcttgagcccaggagttcgaggcagccgtgagccgtaatcgtgtcgcgccactgtactcaagcctccagaccgggcgacagagcaagaccccgagacccctcccatta

SEQ ID NO: 56660 - DNA, 122 bp, Homo sapiens
actggaaactggaaggtagagccggtggcggcaatttcagggaacgcatgcgccttagctcggagcgtggtgaacgtgtttgcgcatgcgcatcagagcctgcctcgttggcaatctcggga

SEQ ID NO: 56661 - DNA, 122 bp, Homo sapiens
gaagccacagccgcctagtggctgccagggaggctggcaggaaggggcatctctacccggcgtctcctgggaaacagcgagctccccagagaagggacatttggaaataaaatttctgccgt

SEQ ID NO: 56662 - DNA, 122 bp, Homo sapiens
gggaggaggggcccagcctgttggggcaggagattggggtgcgggtagaaggctccaagacgcatccgggccgggaacccacagacatcccaggtgggcaggaggtggctcgaggaggcctg

SEQ ID NO: 56663 - DNA, 122 bp, Homo sapiens
gctcagagagcccggcgctagctcattcttcgtgcagttattggctgggactctgtgtgccgctgtcggccaatgaagacgctggagatcgggcccctgcccgtcccctttctgcgccccgg

SEQ ID NO: 56664 - DNA, 122 bp, Homo sapiens
cccccaaatttaatgcaacagcaggcggaagacctgcagggtcccgttcagaaaaagggccgtcagactgtcgagcctaagaataaaaagaccctgtttctcttagatacccggttagcaag

SEQ ID NO: 56665 - DNA, 122 bp, Homo sapiens
gggggaaggggctgggcatggtgactcacctgtaattctgaggcgggtggatcacgaggtcgagtttgagactagcctgggcaagatggtgaaacccccgtctctgctaaacatgcaaaaat

SEQ ID NO: 56666 - DNA, 122 bp, Homo sapiens
gggtgagtgcgcggtggaaccacagcatgtcctcgggcttgctgcctccgatgctgagcacggtggggtccgagtccacggtgcgggaagactggcgcttgcccgacgaggaggccttttcc

SEQ ID NO: 56667 - DNA, 122 bp, Homo sapiens
tgtttactctgcaggcagggggaggagggcgggactgagcaggcggagacggacaaagtccggggactataaaggccggtccggcagcatctggtcagtcccagctcagagccgcaacctgc

SEQ ID NO: 56668 - DNA, 122 bp, Homo sapiens
gcctggggtagggccaggataagcctcactggggcaggtcctgggtagagaccaggttggcgggtcttggggcggggccaggatagggcgatcctggaagctgggcttcggaagcgtccagg

SEQ ID NO: 56669 - DNA, 122 bp, Homo sapiens
tgttttcagctcacagagaatgaactgtcttattgtgtgacccttgctccgtccagcggacgctcggagaccagagggacttttcccgccctctccagcccagcctcgcctccccagcacgt

SEQ ID NO: 56670 - DNA, 122 bp, Homo sapiens
cttcctttcagggaaaaaacagtttaagcgccgtccattttccgacttggtaaaataatacgaaaccttgggaatagagaagcaacgaaaacatttcacgcagtgttggcaagatttgtaga

SEQ ID NO: 56671 - DNA, 122 bp, Homo sapiens
ccgcgggtgggcgtggggcgggggagtggcgagggtcccccgcctccgcgggagcgcacgcggctgcgagccctacacctgctctccgaccaaagaagcacctgtttttctcaataagtgct

SEQ ID NO: 56672 - DNA, 122 bp, Homo sapiens
catttcctccctgggaacctcagtgttttcactggaacagtagagattgtccttctgtcccgcctgcttcacacagatataaggaggatcgaacaagaagtgaaagtgttttgcaagccact

SEQ ID NO: 56673 - DNA, 122 bp, Homo sapiens
tccgccagcggtcctcggcgcccttcctgccccctccccccagcggtctcggccccatcccgaaccgccaccctgggatccccagccctcctgcgccctcgaggccaccgggctcctgcgag

SEQ ID NO: 56674 - DNA, 122 bp, Homo sapiens
aggggctgctgcgggactggggagcctcctggcagcaagcgctcccaatgcgtagcgggacgctgtgatggggacaagatcctggctttgaagaaagccctttccaccctgtccatgtgggg

SEQ ID NO: 56675 - DNA, 122 bp, Homo sapiens
ggctgcttcttgctgctgtttattaataacgattcccaacacaggctcctcaggggcagccggggaagccagtcccagggcacaggctggcatcacactctgcctctgagggaccccaggca

SEQ ID NO: 56676 - DNA, 122 bp, Homo sapiens
gtgtgagtggctaaagaaccctttctgaaaggaattgtgataccttggttataaaaaaatcgttgggataatatcagagatttggtaccccccgaatttgaggtatgtgaggaaggagaact

SEQ ID NO: 56677 - DNA, 122 bp, Homo sapiens
tctccagaactcacggggaggccccaggatgacaggagcacacgccgtattcaccacagacggggatcactctccagaactcacggggagaccccaggacgacaggagcacacgccatattc

SEQ ID NO: 56678 - DNA, 122 bp, Homo sapiens
ggagaaaaacctgttaaaacacggtttctcaggtctcacatccaatgtgtgacatacatacggttctgcaccgaaaggcagcaacctgcgagggtcagaggcgccgaagacccgaggccctg

SEQ ID NO: 56679 - DNA, 122 bp, Homo sapiens
tttatggcactttaagcaagctcctgtgggaggcggtcctggaggaaagcctggccactgcggttcagacgttttgaagttcttgtgtgctggagatgtggctggggtttctctcacagtgg

SEQ ID NO: 56680 - DNA, 122 bp, Homo sapiens
gcaacaaaatgttccttatgagagggagaacattgatttaggagttgcacagccagagaacgcagtgaaaacaaggccatattttggaggtagtgatgtattttcaaggaggaggaaagggg

SEQ ID NO: 56681 - DNA, 122 bp, Homo sapiens
ggccgtggcgggaaggaaagttgtgcggagagttggtacctgcgctgagctccaggctggcgctgtcgctacccgtgccgccggtgccggcggccgccgccgcgcctgggccatacctgacg

SEQ ID NO: 56682 - DNA, 122 bp, Homo sapiens
gctgtggcgggaggatatgggcagtgatcatccccggctcctccgaggagctgcatgcttcgtgggctcctttagttcttctcggatcccctcttccggctgtttcccctcctcacccagca

SEQ ID NO: 56683 - DNA, 122 bp, Homo sapiens
gccgcggccagcattaattaggtgccgatgcacgggggcgggccggcctgggccagaagccgctcccggaggctccgacccccggggcttcgcgccgcctcccagcccggagctcctccagc

SEQ ID NO: 56684 - DNA, 122 bp, Homo sapiens
tttaagttaattgcagtggtctctgttgcttgcaaccaaaaacaaacctaactgatatatcgtacatgtgaaactgtaactaatatattgtacatgtaaaatgggaataattatacttcgct

SEQ ID NO: 56685 - DNA, 122 bp, Homo sapiens
atctactgtagtatgcagattcgttatcaaacagactacaatgtatttaaattttgtaggcgatgaatgcacaaggcccttaagctgcattgaaggctgcctaaggcagtatacaaaatcag

SEQ ID NO: 56686 - DNA, 122 bp, Homo sapiens
tgacagggaccctgagaagagcagtgaggatgatgtctacctgcacacagtcattccggccgtggtggtcgcagccatcctgctcattgctggcatcattgccatgatctgctaccgcaaga

SEQ ID NO: 56687 - DNA, 122 bp, Homo sapiens
cccccgcgcggccccagtggatgccgaagccccgacgggacacacggtcctgcctgggctcgcagaatggctttttattcccaaaggctctgcgccgcgcacctgggcccagcccagggtgg

SEQ ID NO: 56688 - DNA, 122 bp, Homo sapiens
gcccacgacgggtgggcgcgtctttaccgacagcctgcatggatccgcagatgtgctgggcgcttagatgcctgcggctatgcagagacgcagtccagagaggtgaccccagatcctggtgg

SEQ ID NO: 56689 - DNA, 122 bp, Homo sapiens
gacaatgagatcctacctacctacctgtgttcagagtcagaaatacatggggtgggaaaccgataacctactctagctttcttttagttccttaatgtctcagagattcaaggagtgcaggt

SEQ ID NO: 56690 - DNA, 122 bp, Homo sapiens
gtccctaggacagagtctgcttcgcacacaggtctcgctgtctgtggaggctgcaggccccgatgcctgggcacacggactgacggcaaccctcggggtgggaggccccagatgggacttcc

SEQ ID NO: 56691 - DNA, 122 bp, Homo sapiens
tcaaatgtgccttaatataggcgctggggcttggtcatggtgctcttgatacataaggcccggacattccgccagtttttcttgggcaatgacaccaacaaggtgacagccaggtgaatgtc

SEQ ID NO: 56692 - DNA, 122 bp, Homo sapiens
aggtggaggtggtggcaggtaggaggcgctgcggggacactactgtccctgccctccagacggcgccccgggacggctgtgcccccagggcctagaaaagtgcctgaagctcaagggccgct

SEQ ID NO: 56693 - DNA, 122 bp, Homo sapiens
acagggtcattttaagacaagcaatgattacaagaataaaagagttgagtagcaacattacgatgccacagtggatatgccacggttttggttttcaagctgcattttagcacccttcactc

SEQ ID NO: 56694 - DNA, 122 bp, Homo sapiens
ctcagatgatccgcccgccttggcctcccaaagtgctgggattacagatgtgagccaccgcgcccggccagagcactgttttttttaatggccttgcactcttcttatggacctttgctgcc

SEQ ID NO: 56695 - DNA, 122 bp, Homo sapiens
ccatgaacagaggaagaagaacacaattccctcctcatttagggtccttctcagcccctccgtggagctaggcacccagcccgtccgagatcctgaacccccgcacgctccagggccattct

SEQ ID NO: 56696 - DNA, 122 bp, Homo sapiens
ctggccacgagagctcatcacctgggggcagcttttgtacctgcaccctgtatgaggctccgggtctgcccttcctggtccatcctccagacacactgcctgttcttctctcaggtcccgct

SEQ ID NO: 56697 - DNA, 122 bp, Homo sapiens
gcaccgccccagtttaccccgggggtgagttgagttccccaccctcaggcgggagattatcgggtttggccggagggccgaggggccctgtggcgtcgggggtctttccctgcagggtgggt

SEQ ID NO: 56698 - DNA, 122 bp, Homo sapiens
acgcagctcacacacgagggaggtgtgagactcagatgtgtggtttccattcagcagccacgccgggcggcgggctgtgtgggtgcgtggcgggctgggggtgtggcacaggtgtgaaaggg

SEQ ID NO: 56699 - DNA, 122 bp, Homo sapiens
agagatattccttggggggtacacgcagtcgaaggaactttctattttccttccgagccccgcaacactcccaccccaacctggggctggctggtgacctttagcgcccctaggctaacgtc

SEQ ID NO: 56700 - DNA, 122 bp, Homo sapiens
aaactagtgcaaaaaagcttgccagggcctgcagaaagcgccgcgactgcgaggctgacacgcgtctttccttccctcccccggggaatgatcccagcatctctcgcagtgatgtcagtgta

SEQ ID NO: 56701 - DNA, 122 bp, Homo sapiens
ggaggctgtactttgctaagacccaacccagagggctctgcagtgcacactcacccgtgacgcccacagcagacactgggcccacgcgccgcccctcgtggaggccgtacaggtgcatcttg

SEQ ID NO: 56702 - DNA, 122 bp, Homo sapiens
aggcgcaggcgcaggcagcggaatgcgcaggcgcggggccttctggaagccaccgagttccgcggtgctgtctggagccgtacggttcgcgtttggggcacaggggcccctcttgctggtgc

SEQ ID NO: 56703 - DNA, 122 bp, Homo sapiens
tggaggaacaggcaggcttaaagaatgcagggcagaattgcacaggtaaaggatgtcttacgcgtactgtgtactccaatagattcttcaatttcttcaaaattaaaaagcaatgggacaag

SEQ ID NO: 56704 - DNA, 122 bp, Homo sapiens
gatccaggagtcggggctctccttctctgaacaagccaggagtcggagtccttgagattccgaagtccaactgccacctccccacagcctcggccccctcacgagctcaggcttcggcgcgc

SEQ ID NO: 56705 - DNA, 122 bp, Homo sapiens
gacgccggccgcggggtgccttacctttgtgtagagctccgacgcagccatggcgggccccgcgcgcctacgccccccgcctgtgcggaggccgcacctcgcctgggcggccgcccgagcgg

SEQ ID NO: 56706 - DNA, 122 bp, Homo sapiens
tttgggttcacggtgcatttgcgagctgtaacactcaccacgaaggtcctcagctttcctcgctggtgagaccatgaacccccccagagggaaaaaacacccaacacatcagaatgtcaagg

SEQ ID NO: 56707 - DNA, 122 bp, Homo sapiens
taccctgttctcagtgaggccttccctaacctgcctatttaaaatgaccatccccataaccgggcaccgttcctcacacctgtaatcccagcactttgggtggatgaggtggatggttcact

SEQ ID NO: 56708 - DNA, 122 bp, Homo sapiens
tccccgcggcctcgggacagaggggactgagcatggatttcggactggccctcctgctggcggggcttctggggctcctcctcggtgagaaggggagggggcgcgggagagaggagtgagtt

SEQ ID NO: 56709 - DNA, 122 bp, Homo sapiens
agtctgtatctgcatttctgaagccccagccttggggttagaggccacacccggtcgccacgtcccgcacctgtccatgttggtgccagccacctcctttcttagtgacacccatgtcctct

SEQ ID NO: 56710 - DNA, 122 bp, Homo sapiens
ttattcaggctaacaataaggggcctgcattcttagtccagggaattcaagctgatgcatcgtcaaagcaaggcagtgaagtggagacttgagagatcggcctggcctggaagcatctaata

SEQ ID NO: 56711 - DNA, 122 bp, Homo sapiens
cagcggtgaaagccgctgagcgggaagcagggccgggatgtaaggcagaagccgcagggacgtcggctgggcctcggttgagagcaggggaacgaggagcgggtctcccagtcgggcttcta

SEQ ID NO: 56712 - DNA, 122 bp, Homo sapiens
tggagggggcgcggccgcggtggcccgagcgcggctgtcagcctggcggggcggcagcaccgtgcctcgcgccccgcgcagccctggcacccagcccgctgccccccgcatccccgctccgc

SEQ ID NO: 56713 - DNA, 122 bp, Homo sapiens
atttttctgtctcccaacctctactgtaaactttctggtccgagaacgagccgaacacagcgcgacgcagggactaggacggcccggtgaccgcgcggattcaggattgcggggacgcagaa

SEQ ID NO: 56714 - DNA, 122 bp, Homo sapiens
tgccgcagggaaaagtaaggtgtttctgctctcgcgccatatgcagttcccgcgggatctcgttgagggcggggcacccagttccttacgaaagggatggagggggtggtacttctaaagtt

SEQ ID NO: 56715 - DNA, 122 bp, Homo sapiens
gaggccttgctgatgaacctgactgaggtgggtgtcccgtcccaggctcccccgcccgaccggtcctcccagtgctgaagccccctgaaggggccctgcaggtcaggccccttgtcccgaag

SEQ ID NO: 56716 - DNA, 122 bp, Homo sapiens
gggcaggaggaagggaaagaaagagggcttttcagggctctacaaccaataaaatcgtgccgctttgaggacatacttgagctccccaaaagacaggcagctgaagggcaaacagtgtctaa

SEQ ID NO: 56717 - DNA, 122 bp, Homo sapiens
cgagcctcgtttatgaaaacagtaccaggagaaggctaaacgtgggccccctgcccagggcgagggactccaaggcatccagatggacttgcttggcctgagctttgggaagtgttctccta

SEQ ID NO: 56718 - DNA, 122 bp, Homo sapiens
caaatgtaaaaaaaaaccgaacaaaaaaaaaaaaaaaggaaaagtgggggccttgagtggcggttcacacctgtcatcctaccactcagggggaggactgcttgagcttaggcgttcaaagc

SEQ ID NO: 56719 - DNA, 122 bp, Homo sapiens
ggtgagttcagccgggttgggtcggaccagctcgggggttctgggcactggagcggatgccgggcgccagggcgtcggacgccgtcagcgcggtgggtggccgagccagcatcagccggtgg

SEQ ID NO: 56720 - DNA, 122 bp, Homo sapiens
tagctctcccaacatgggctgtgtgaggaccaaatgagctgaggagcccagatttgaacccgggtctgcaaggttatgtcctctgagccatccccacccctgcccttaaggaccaggggcct

SEQ ID NO: 56721 - DNA, 122 bp, Homo sapiens
gcgctcacggggtagccggcctggcccaggtgacatgggtagcagcccctccagaggtagcggtagtgcgtgcccgcgacgcgcgccaggccccccaggagcccaaggcaccagagcgcggc

SEQ ID NO: 56722 - DNA, 122 bp, Homo sapiens
tccgtggctgtgctaacagagtgtatgaggaacaagatactggccaaattcttcagggagcgtcaggaaactctgaaacactcgctgcctctggggtcctatctcttgaaaccagttcagcg

SEQ ID NO: 56723 - DNA, 122 bp, Homo sapiens
caagtaatgcatctagttacttgcacacatttagaatccacaaaggggtggcactccaggcgcgtccagcacgttgcttttctcatttgctgctgctccgggatctttggcagcagcaaaac

SEQ ID NO: 56724 - DNA, 122 bp, Homo sapiens
tctttccccacttctcgtcggttctcttgtctaaggagtccaggagccctaggatcaccacggctttttaaccttctttaaaatctgataaaatctctcaggaaaatgttcttatctgtaca

SEQ ID NO: 56725 - DNA, 122 bp, Homo sapiens
ctaggtttgtgtaacttacactccatgttgcttgcacaaggatgaaatcccctaatgatgcgtttctcagaagagtatcctggtggttaagcaacacatgactgtatatgtaacctgaagct

SEQ ID NO: 56726 - DNA, 122 bp, Homo sapiens
tctcagttctcgccctgattggctgtgtgatctcaggaaaaacgcctctgctctgtgccccggtttccccatttgtaacacgagggagtgtggtgcagcccggccctgtcaggatccttaag

SEQ ID NO: 56727 - DNA, 122 bp, Homo sapiens
tggctccagcctcctcggctgtgcctccggtggcggtggcagcggtggcggcggtggctgcggcctcgtgttgtctacccatccggcctttgcgtccacgccgcttccggggccgccgccgg

SEQ ID NO: 56728 - DNA, 122 bp, Homo sapiens
attccctgtaggtttccagtatatagtagtaaacaatgtgccctactcaaagatggcgaccgtggcggggcgttgccaagcaaccaccattcagcctgatatccattccaaggctgtaaaca

SEQ ID NO: 56729 - DNA, 122 bp, Homo sapiens
tggcatggccaaaagatggagacgggcaccgagaccatgcccgccagcactaaaggacagcgtgcagagttcacacaaagggctggaagaagaaagtggaccaaataaacaaggtggtgctg

SEQ ID NO: 56730 - DNA, 122 bp, Homo sapiens
catcagacaccaaatttgctggttctttaatcttagacttcctagtctcccaaaccatgccgaataaacttctgtcatttaaaagtacataatctatgttattttgttacagtagcctgaac

SEQ ID NO: 56731 - DNA, 122 bp, Homo sapiens
agagcctggagatgcccagctcgaggagggagggtgtaggtgcagcgttgcacggtctgccgtctcacccgaggagctcccctggacaggaatggagaggggaccagaccacggggttttag

SEQ ID NO: 56732 - DNA, 122 bp, Homo sapiens
tcttcatccacacaactgccccaggagccactgaatgaggctcgatgaaacctcaactcgcgttgcagcgcacgtctgatcacactcgcctttgatcacttttatcactggggatcctgcag

SEQ ID NO: 56733 - DNA, 122 bp, Homo sapiens
gggtgtggagggagatggggatgtctatcactccaaaggccctactgtgggatctccaggcgggaataaccatccttcaagggctttgcttttaataaaacctaattctcagcccattatct

SEQ ID NO: 56734 - DNA, 122 bp, Homo sapiens
tgcctgcacacaggaacagaatgactccgtggcatgaagtcagcatctcgcccgggatcccgggaagctggtgctccctgctccattgggttggaagatgtttgatgtgctcagtctctgtt

SEQ ID NO: 56735 - DNA, 122 bp, Homo sapiens
gcccgtccccgtggtggagttcaccaccttgagggacacgccggagtagccataggcccgcgtgggctggtcctcccagtaggtctgcgtcacctgcttccacatcaccacatagaagcggc

SEQ ID NO: 56736 - DNA, 122 bp, Homo sapiens
ccgccctccctcgcacacactgatgtgtacacaaacacagcccggccctccgtgccttctcgtggcacctgcctggggtttcaggggcagccagagggcttattccagagtcgcaggcccat

SEQ ID NO: 56737 - DNA, 122 bp, Homo sapiens
cagagccggggagcgcaggccacagccaccccacgcggtggcctctcgggcgctcccctccgcctgcaggcagatgtcagccacacctgggctcacgggctgcgcagctgggagggcggcag

SEQ ID NO: 56738 - DNA, 122 bp, Homo sapiens
aaagttgtttaatttgtcaccaatgccatctactcatgtatattaaaagtttgttatgtgcgtactctgtgccagggtttgagccatgctctgaggaatgaacaaagcaaatgaacaaatat

SEQ ID NO: 56739 - DNA, 122 bp, Homo sapiens
gcgcctccgcatttcctgcaggggcacctggggcccagcgagaggcgaggccacttacatcgaggggaacacaggaatgtgtgtcatcgtgtgtatgtgtgtgtgtggtgcgggggggggag

SEQ ID NO: 56740 - DNA, 122 bp, Homo sapiens
ctcacctcttgccttctaggtcacttctaacaatgtcccttcagcacctgaccctctacccgccagttattcctaggttatgttagtaacgcaacaaagagtaatattaaaagctaatgatt

SEQ ID NO: 56741 - DNA, 122 bp, Homo sapiens
cgaaagccctggaggcgagctctccaccgtgttcggtggccaccttaattcttgttgaaccgagaggaagttgttgaaaccggaagtcggcctctggggtctgagcccgtccaccctttgca

SEQ ID NO: 56742 - DNA, 122 bp, Homo sapiens
tggccattaaaattgtcacattatgttagtatcatgggagccataatatctacatgagggcgattaccattagaactgaactttgaagaatggaatcagttttgaaaggcagataaaagggc

SEQ ID NO: 56743 - DNA, 122 bp, Homo sapiens
tcctcccggaacctctggattctgacgccccaggggttcttcacacaggctggccggtctcgggattgaagccggagacgtcagacgctaaggttgcttagactgcggcccacgtggaaggc

SEQ ID NO: 56744 - DNA, 122 bp, Homo sapiens
ctgccgtcccctcttgggtggaggggctgtgatgctctatccttacaagccccagcaagacgcctggcccttagagaagtactcacaagaggcttgcagaatcgaattagatcttaagatag

SEQ ID NO: 56745 - DNA, 122 bp, Homo sapiens
cccctggtacgatctcatcactggcaatgggcctccacttgcggcttcggtagacctgggcggggcatgggtgtcagcacagaagccgcacctgtgctgcacccccaacctgggtctccctg

SEQ ID NO: 56746 - DNA, 122 bp, Homo sapiens
tcaaaatgtctaagagaatgtatccccataggcccgttatgatggtgatcagccacgctgcgccccacggccccgaggactcagccccacagttttctaaactgtaccccaatgcttcccaa

SEQ ID NO: 56747 - DNA, 122 bp, Homo sapiens
cttgttatacccaactaaaacagaattggaaggccaggaggagaaaacacactcagggcacgccaagaatgtaattctttgcaagcctagctgctgaaattgcctgctgtaacccaaaaacg

SEQ ID NO: 56748 - DNA, 122 bp, Homo sapiens
ttgggtggattcccagaattgtgattgctgagtcaaggccatgtgtacagacagtgttgacgtccttcaccgagttgccctctgtattagtgaagacctcaagagaaacaaatcctatggga

SEQ ID NO: 56749 - DNA, 122 bp, Homo sapiens
ggcaatctgcccgcctcggcctcccatagtgctgggattacaggcatgagccaccgcacccggtccagatttattaagcaatagtggtgcatttcatgcacaggtatcagctagtctagtaa

SEQ ID NO: 56750 - DNA, 122 bp, Homo sapiens
agctccgaaacacagagcataaagattactagaagcaaaacaaaaaactgtgtaaaagatcggttactgtaggcagcaccgcatgacagtctaacccctttaattgccctggtcaaaaacac

SEQ ID NO: 56751 - DNA, 122 bp, Homo sapiens
aaatcattatctttggaaactgcgtggaaaaggccagtgaggaaacccgcgcagaactgacggcgaaggcacctgcctcgtctgcagcgggtgttggcgggaatggccttttgggcgggctc

SEQ ID NO: 56752 - DNA, 122 bp, Homo sapiens
gaagacaagcctggcaacagtaaggcctgcctctaccaaaaaaaaaaaaaattagctgggcgtagtggcatgtgcctatagtctactcggattgggcaacagagtgagactctgtctctaat

SEQ ID NO: 56753 - DNA, 122 bp, Homo sapiens
ggacttatcaaggaataaggtgcgtagaaatggttatacttaagtttggggcacaatgggcgtggggctaagaaagatctcacatgtatcattaggctcatgaaaatcattcagagactttt

SEQ ID NO: 56754 - DNA, 122 bp, Homo sapiens
ggaaaaaaaaaaaaagtttgggccaagcattcccggaatgtgcttcctgctggcgcggggcggggggcgggcggggaggcccgggcggggcggggagggcgcggggcggcgcggccggagcc

SEQ ID NO: 56755 - DNA, 122 bp, Homo sapiens
atgtaaatccaagcataattactgaacacaaggctcaatccaaaacatgcacagtaagcccgtgtgaagtgttcacatgctgttctgaggctggctggatctggagtttctgggagtgctct

SEQ ID NO: 56756 - DNA, 122 bp, Homo sapiens
ccgcgtcgggaatccctggggatggtgttctccaccgtcaagacctttgagccgcctgagcgactaactcctgcgcccctgagggtaaggagcatggggtcaaggaggggcttcattgtgcc

SEQ ID NO: 56757 - DNA, 122 bp, Homo sapiens
tcccttgagcgagcacttgtttagcatagtttcaccagtggcctgtctgtctaaagtagtcggcgaatattaaaatagtcctaacaataaaataacactcagtcaaccgtgtagccttcttc

SEQ ID NO: 56758 - DNA, 122 bp, Homo sapiens
aagcacccagcctgaaagcagacagacagtgcctcaccacaagaggtctttcaggacatgcgcgtggaatttctttgtagtgtggctaagcagctgggccattctgggaggaccagggggaa

SEQ ID NO: 56759 - DNA, 122 bp, Homo sapiens
ctcccccacaggtatggcgcagtggaattgagtggcgccggtcgccgaaagaacgcgacccgggagaccaccagtacactcaaggcctggctcaacgagcaccgcaaaaacccctaccccac

SEQ ID NO: 56760 - DNA, 122 bp, Homo sapiens
cacttcctgttttccataaattatgtggtcacctatcacttgagcacaaacaaataggcacgttcaggacacaggcagccagtatcagaataggcagcctatcacagagggcaattctactt

SEQ ID NO: 56761 - DNA, 122 bp, Homo sapiens
gctcagctcgccgctcctctagccttgagggaggcgctgtgggggacagcctggcagccacgcatgcgcaaaacaccgtcaggaaggggccggggaggggcgggctcccgaacccggaagcg

SEQ ID NO: 56762 - DNA, 122 bp, Homo sapiens
caggggctgcactgcccgccacctagtggccaaagtgagcaggtcccctaaaagacacgacgccccgcgatctgcggtaaatcacattccttgcgattctgcaatcacaggtagatttggaa

SEQ ID NO: 56763 - DNA, 122 bp, Homo sapiens
cattccaccgtcccgttttcccaccacaccgcgtggcctgacgctttcctctgtcatgaacggctctgatacaacgtgagatgaaattccatctcagacatgcactgtgatcactcacccct

SEQ ID NO: 56764 - DNA, 122 bp, Homo sapiens
gttccctctgcctcccctcccaaaagaacgcgtctgcggggacagatggccctgtgtcagcgtccctgtgtgatattgatgtgaacagcgagggaaggcgacgtgtctcatggctgtaaaaa

SEQ ID NO: 56765 - DNA, 122 bp, Homo sapiens
actgacaagaatcctcactgcggcattgttcatcgcgccccaaactggaaacagctcaatcgatcctcagcggaacggagaaatcatggcctcttcacgcgatgaaatattatgctgcaatg

SEQ ID NO: 56766 - DNA, 122 bp, Homo sapiens
gcggcgtggacctctgtagttagcactctcaaaggtgctgtccgcgcccctgctgtgacccggagggcttcatctccagggtccttgcagggccaacctcagggagtaggtcaaggcccatg

SEQ ID NO: 56767 - DNA, 122 bp, Homo sapiens
tacttcctacgacagatcagcaaattatgaaccaggcttataaacagggctcctctgcctcgaggagcacagacacatactaagcttgcagtaaccactccagcacagcccctgtgaggctc

SEQ ID NO: 56768 - DNA, 122 bp, Homo sapiens
cctttgtgtactctatactggagttcccttcttcctcttgctgtaggctcaatcccataccgacatctacaactaatctttcccatcaactctgtgtgaaggcaggttgcaactagaaattc

SEQ ID NO: 56769 - DNA, 122 bp, Homo sapiens
ggagtcagagtggagtgagaaaggcaattggtggggtgtgggagcccgagtggggtgaggcggcacctgggacatggcactggtgaccaagggccctaccccactttactcttctccctagc

SEQ ID NO: 56770 - DNA, 122 bp, Homo sapiens
gagtgaccagagagggcagacagcagtcctctgtccctggtctcctgtagcaagagcagccgtgcacaaacaggaggggacttccctatttaagggtgatttgggatcaggtatcctaatat

SEQ ID NO: 56771 - DNA, 122 bp, Homo sapiens
tagatacgctggctcccgcctgtcacgtagatatgctggctcccacctgccgcgtagctacgctgcctcccgcctgtggtgcgcaatttcccctgtggtttgtcaccggttagctcctcttc

SEQ ID NO: 56772 - DNA, 122 bp, Homo sapiens
gcgcactgtacagctgcatcagctgttcgtaggacatgtccagcagctggtccaggtccacgccgcggtaggtgaacttgcggaaggtccgcttcttcttctgctctacttctgccatcttg

SEQ ID NO: 56773 - DNA, 122 bp, Homo sapiens
ctctcgaagcggatggcttttgcctgagaggaaagggagtggctggcggcgcatgcgccacggtggccgacttgaaccgaggcttttattgctgtagtttatttccacccccttccctcctg

SEQ ID NO: 56774 - DNA, 122 bp, Homo sapiens
caagccaggtgaccccatgagctgtcgctgcatctttctcatgaagcacggggaacgggtcggatggtaagaggccaacccagttccctgtgcatgtggaggagaggagggtggggaggtca

SEQ ID NO: 56775 - DNA, 122 bp, Homo sapiens
aagaggaaccagaagaaagagaaactcgcgacaacagagttgccgaaagagaagtgttggcgcctcaaacttgaggatcagcttcttgggccccactccagggtgtcgcgggggtcgggttc

SEQ ID NO: 56776 - DNA, 122 bp, Homo sapiens
tgggaatcctgggccagagccccctggtcactcccacctaggggtgggactgaccagatccgccagggactggagattggagcccagaggaaactggaactcagatgggtgggggaaatcac

SEQ ID NO: 56777 - DNA, 122 bp, Homo sapiens
gatatatatgctggtgtggctgagaaagcggaaccgagcctcgcatccatcggagggagccggggactgacagctctcaggtaggcaactgcacggggcccccagcccgaccgcgactaact

SEQ ID NO: 56778 - DNA, 122 bp, Homo sapiens
gggctccctgtgcttcccatcccagcggaggagatggagacggcctctgcagcacagcgacggtccccagcccgtgtttcttatgggacagaggcctgtaacctgcttagctgtctctggag

SEQ ID NO: 56779 - DNA, 122 bp, Homo sapiens
ccagcggggggtgacggtcccagaggcagaggcgccgcagccccagagtccccatccctgcgcggaccggcaaccccagtgcaccaagaggccctaacaccgagcccccagcaccgagtccc

SEQ ID NO: 56780 - DNA, 122 bp, Homo sapiens
gttgccaggaaggagagggctggcaagagagccgcggcagccgtggcagggtgtaggggacggtggacggccagggcccccccctctctctctttctctctctctctcttgcttggtttctg

SEQ ID NO: 56781 - DNA, 122 bp, Homo sapiens
ctaccacagagattttcttgaacttgactgagtcccttatccaccttgtggtgttccccacggccaatgtcctctcaaggattgcaccgtcacttctggctctcagttcttgcttttcctga

SEQ ID NO: 56782 - DNA, 122 bp, Homo sapiens
aacatttgcttcaaaagactatttctaagcacttttgcaggcaggcaggctcgctccaggcgcgtaaactcggctacgcattaagaagcggctgcttttcgaatactgcaaactccagctaa

SEQ ID NO: 56783 - DNA, 122 bp, Homo sapiens
aacgtttcccccctctgtggccaaggctactggggtgccttcggagatttaggggccaaccggtcggtgcccacacctacctgtggggatcagtgccgcggcggagaagagcaacagcagaa

SEQ ID NO: 56784 - DNA, 122 bp, Homo sapiens
atgacaccaagggccactagaggacagcaatggtccacaaaggactttccaaagtcttaacgtggaaatccaatttttccagtctcatatgacttctccttttccctgtcaccatatgttta

SEQ ID NO: 56785 - DNA, 122 bp, Homo sapiens
ggcggggtgcccttggtgcaggctccctacacagtcctgctgctgccgctggggacaagccgccaagacccaggggcccagagcttcttcctttgggtgagtatcagcccaacaagaggtcc

SEQ ID NO: 56786 - DNA, 122 bp, Homo sapiens
aaacaataacctaatagcctgatctccttcccattgccttttgttagactacttatactgcgtgtcatactttgtctactgaatgggacttctgccatttgtaggctgtgaggtctctatct

SEQ ID NO: 56787 - DNA, 122 bp, Homo sapiens
aggatgatatgactcccaatacagaccggtgtacaacctctgtacacaaagggtgtacaccggtctgtgaaacagttcaaaatccccagagcgggagatgatattactcacaatacgataaa

SEQ ID NO: 56788 - DNA, 122 bp, Homo sapiens
ttccacttgtcattttgggatttgtgaatatgcagcatcgtctttttaccattgctaatgcgaagagctgcctccctctcaattactgttgtgcaaatatcagtttatagattgtccttgta

SEQ ID NO: 56789 - DNA, 122 bp, Homo sapiens
ccctcacctgtgggggaggctaagtgggtgtcagggccctgtcagagggtgagccacccccgggggtgcccatcggccaccagcctcccttcagtagacacccagcccaagtgacagcagtg

SEQ ID NO: 56790 - DNA, 122 bp, Homo sapiens
agagacttctgaagtgtagacagagaagttggttcacagggagcgaaggagggggaggggcggcagggaaggctgctgagtgtttgctgtgagcattgttactatcacatcctttaattttt

SEQ ID NO: 56791 - DNA, 122 bp, Homo sapiens
ctccctccggcctcttccctcggtgtcccggctcctctggcaactgggcgggaccgcgagcgtctagaccgcagcgctaaaatgcgctcagccaatccggcagctggcgcagacacgtggtt

SEQ ID NO: 56792 - DNA, 122 bp, Homo sapiens
gcagggctttctaggggtccgtcgctcttgaagccgccggcggcgggcgcgtgcgcggcccgatgaagaaggaggtttccaagccgtctccgcccaagttgatcggtggatgcgcgcccccg

SEQ ID NO: 56793 - DNA, 122 bp, Homo sapiens
ggagcctcggaagccaccacggggaagctgtaaggggaagtgagtgagaccaatcggagacgaatctctgccccgttcggcacgcctcccttaactgtcgcgaatgcaaaggcaactttacg

SEQ ID NO: 56794 - DNA, 122 bp, Homo sapiens
caaagtgctggcattacaggagtgagccacacccggccccatgactcaaagtctagaaaccgcaaaagaaataaactgaatatacacagctacattaaaaatttttttctcttttttttttt

SEQ ID NO: 56795 - DNA, 122 bp, Homo sapiens
gcaggcggccatggacggtgatcacagtgaccagagggacagcgcaccctccggtcgaagcggggtaggcgttggcaggggaggggcgacgaagactggcgaggttcaggcgccagccaaag

SEQ ID NO: 56796 - DNA, 122 bp, Homo sapiens
gtaagccgcccagtgagggggtctttggaaactgatgcagcgcccccctctacccgtccacgtcatctgctcagggtccaggcacaggcaggcgccgggcccaggcatggaaggtcagggcc

SEQ ID NO: 56797 - DNA, 122 bp, Homo sapiens
gttctgcagcagagatggtggccttgaagacagcgagcctgcctacggggtcgctgcgtccggtctcactccagccaggctgccggcctggcccctgcctccgtttcccttgctttgaaatg

SEQ ID NO: 56798 - DNA, 122 bp, Homo sapiens
gagatgctccataggcggagggcttctgcccagccaagcctcatgactgagcgataaaggcgccccccaacccacctcccacacagggcagggcctcatcaggtgcgggcaggtagaatgca

SEQ ID NO: 56799 - DNA, 122 bp, Homo sapiens
ttgaagaacagctaagatatttgaaggatgtgtattgcatttatttataatgcacatattcggaaaataaatagatctaagtcactggatgtaaagacatagcttctaagcatttaacatac

SEQ ID NO: 56800 - DNA, 122 bp, Homo sapiens
aattgagggaaacactcctaccctcccttagagctcactttggtaatattaatgtttaaccggttagcaaaattaacaccattatttcaatagctactctgttgtgcatagtaaatgctgca

SEQ ID NO: 56801 - DNA, 122 bp, Homo sapiens
gactcgcgcacaggtgagtactggccccggttgcggcatgccaggcaggccagggtcgctcgggggcgggcaggttgggtttttgctcaagcacgtggggtgagccgccctcccgggcctct

SEQ ID NO: 56802 - DNA, 122 bp, Homo sapiens
cctattcatccagggttccctaaaacaaacagtaaattcttttgacagccctgagcttttcgaggcaggaatttaaaagaaagctgggtggttacggagacacaacgaatgatcttacggtg

SEQ ID NO: 56803 - DNA, 122 bp, Homo sapiens
cgggatatgagctggaagaggcatcacctgatcccggagacctttggagttaagaggcggcggaagcgagggcctgtggagtcggatcctcttcggggtgagccaggtaaccatggcaaccc

SEQ ID NO: 56804 - DNA, 122 bp, Homo sapiens
gtgattgtcaattcacttgtcagattcccccgttagactgttggctctgtgtggaaaggacggtttgccttactcattcctgtattctcagcaccatccatcaatgcctgacatataatagg

SEQ ID NO: 56805 - DNA, 122 bp, Homo sapiens
cgtatgaggctggccagcgcttcctggagttccagtacctcacgggaggtcttgttgacccggaagtgcatgggaggataagcaccgaagaagccatccggaaggggttcatagatggccgc

SEQ ID NO: 56806 - DNA, 122 bp, Homo sapiens
gaagaaagagactttgttctagtgaacagtttgcaaaccagggagttacagcctctggtacgcaatgaaggtgagttccacagaacacaaggcaggcaggtttcacggcaaaaagttccttc

SEQ ID NO: 56807 - DNA, 122 bp, Homo sapiens
ccaccttccgtgggcaggtgtggagaaatcctagaaaggaccagctttgggaagggatcgcgagccctttaagaaagctttacaagcggggtggtgacaggcgcccagtgaagcgccacgtg

SEQ ID NO: 56808 - DNA, 122 bp, Homo sapiens
cactgtataaaccaggtttctggagaattccagccagacagtgatccgaggcactcaccccggaccctgcatatggaatctgactcagatctatgttgtattcacagcacctgcctagtgat

SEQ ID NO: 56809 - DNA, 122 bp, Homo sapiens
aagggttttggtgaaaaaacaggttctggttctggggaggtttttgttatgttaggtgatcgcctctgaagtttgcatcatcatagagctcttaacgttaaccagggctttggcctcaggag

SEQ ID NO: 56810 - DNA, 122 bp, Homo sapiens
ttaaaagtgggtgtgccccgtctactctctgttgccccttctgtaaactgaaacaggttacgatgataagctatgggatggtggagctacaagataggggtgtgggacccagagtcactgca

SEQ ID NO: 56811 - DNA, 122 bp, Homo sapiens
ccccgccctattcgccatcttaacatagggcattccccacagctgcaggcaccagtgaagcgtctaagggaccatcttggttgagggcggaagtgaggactgtgtcgcgctggaggagccca

SEQ ID NO: 56812 - DNA, 122 bp, Homo sapiens
ctttcagcacttgccaccttcacccttaaataggttctagccatactaaaatacttctagcgtttaggatcttcctctccttaggcacattacatgcttttccctttgtttagaatgctatc

SEQ ID NO: 56813 - DNA, 122 bp, Homo sapiens
gagtctccttctcgttcccctcggcccttcctaaaacctgctggctcaggtctgaacaatcgcagctggacaggtggtgcacaacgatgttaattttcatcctgtctttttcatcagtgcat

SEQ ID NO: 56814 - DNA, 122 bp, Homo sapiens
gcaagagaaaaaaaaataaaggaaagcagtgcgaacccgtccgtacagcagattgcttgacgcaacagtaaagaatgggaaagggagagtgaggattggaaaggtagaatggttggcctttt

SEQ ID NO: 56815 - DNA, 122 bp, Homo sapiens
gtacagtcatatatattcccacagaagagtatacaaatatctccatatgagacataagcacgccctcctccattcctcttcctccaacttcatcccgtgtttcaaagctcagagagtggtac

SEQ ID NO: 56816 - DNA, 122 bp, Homo sapiens
cgtggaacagctcagctcggtgccgggtgcacgctggctctgtgtcccggccgaggcacacggacgctgggaccctgttctatagcagacagtcgatgcctgctccttgtccgcgggggaca

SEQ ID NO: 56817 - DNA, 122 bp, Homo sapiens
ggtgatctgcccaccttgccttcccaaagtgctaggattacaggcatgagccactgctcccggcccctggtgcagttctgatacaccttacaactaatacagccttgctgcactgtttatct

SEQ ID NO: 56818 - DNA, 122 bp, Homo sapiens
ggcctcccgtgcggggtttcgcatggcgggaaccgtgttgagcgcgctgtgcgtcgtgtccgtgggttgcgtgtccggggtgtgggcgtgcggctcggcctcgggatgcgacgctgtgttgc

SEQ ID NO: 56819 - DNA, 122 bp, Homo sapiens
ttgccatctcatatacagatccctcaaatttctcaaatctgtagatatagtatttcattacgctgtaggaattttaaaacgcttaactttataattgctgtttatagacatccttaaagaag

SEQ ID NO: 56820 - DNA, 122 bp, Homo sapiens
ggacagcgggagtcggaggcaggaccaggagctgcagaggggccgcgggcagagccccagcgagcgcgctgccctggcgcggagcccaggggccgcccactggcgggggaggcggggagcgc

SEQ ID NO: 56821 - DNA, 122 bp, Homo sapiens
agttcctttaagactcatgatatacattgtaccctacaaaaggcctcaggaaagaaaatccgcttagctaaccagtgaggggggaaatgggtcaccagctaagctgattacactccaggctt

SEQ ID NO: 56822 - DNA, 122 bp, Homo sapiens
gtgcagacatatgccctgggagcccacaatctgttaacaggaagcaggtaaacccgagagcgtccgcctgcgttccagtccagtgcccgtcccagcacacacctgctttttcagacctgccg

SEQ ID NO: 56823 - DNA, 122 bp, Homo sapiens
caagcctcagagaggacactgaaggagctgaatttagctgagaatgctatctttattcatcgaatgaggaagcatcagcctagcctgcacatcattgagtgccttccataaccctcccctcc

SEQ ID NO: 56824 - DNA, 122 bp, Homo sapiens
taaattaaatcatttaatccttacaatcattctgagattgattaatcatccccattttaccgatgaggaaaatgaggctcagagagggcgagtaactcgcttgggatcacacagcgggcagg

SEQ ID NO: 56825 - DNA, 122 bp, Homo sapiens
cactgcacccagctcatcctttggatgtttcatcagaacaggtcccttctgtgctgtcaacgagctaaacacaaactgggagttctcagggcaattggagaccgtaggagcccagtaaggtg

SEQ ID NO: 56826 - DNA, 122 bp, Homo sapiens
gttatgaactgccatcttcataggcgtggagtgaagtgagggtcggcctcgctttctccccgggatcctttgagactgcatttctgctggtgccagtcttacagaatgaggtgacaaatcgc

SEQ ID NO: 56827 - DNA, 122 bp, Homo sapiens
gccaggcacgcagcccacccggccggccctcccggccagctcactggctcccatgggccccggacctccttgggctttgcctgaaggtgggagcagatggccttttccttgtgagggtggac

SEQ ID NO: 56828 - DNA, 122 bp, Homo sapiens
ttaaatcctaactacatagccattggtttggggagtcccaggattgctcagagtttgtatcgtttcaaatccaagactgctgctcttaatatagagccctccccacctcagcaaatatagcc

SEQ ID NO: 56829 - DNA, 122 bp, Homo sapiens
taaatattttgaaaggactagtgtgaaatatacatgaatgtattcctagggattctgctgcggggtgggaaaggggtgcagattaagccagaccccatcattcatccctggaaatgtgctcc

SEQ ID NO: 56830 - DNA, 122 bp, Homo sapiens
tggggagcggcgtcccagcctttcccgggaggctcagccaggtgcctggagcgggagagtcggactcagattcctgctttacctagaatagcaacgtgccctgttcccgttgtaccctctta

SEQ ID NO: 56831 - DNA, 122 bp, Homo sapiens
atcccaggtctcacctgctccgggccccgaaggtctcaggatgctgtggctgcacgcggacgccagccgccctaaggtgaccgtcagggaagatgctgccatggccgcagcctcggccggaa

SEQ ID NO: 56832 - DNA, 122 bp, Homo sapiens
tctaaagagccggagagctgctgcggaaaggcggagtcacagtacaatcggtgttaactacgtgtgcagccaccgtctccttagtcatattacaggtgcagaagcagtataggtggatccct

SEQ ID NO: 56833 - DNA, 122 bp, Homo sapiens
gaagcgtggaggggtctccggtgttgctggagggcagctggagcctgcggagagcctcggcgcgctcctccctctcccccaccctccccccaccccgggcggggctccgcgtggggcggtgg

SEQ ID NO: 56834 - DNA, 122 bp, Homo sapiens
ttttacctagacgttttgcacttaaaaaatgctattaaaagtctttggcaaagccacggtcggggagaaacacgtcggtgccgcttcccactcgtgtgccctcaccacccacgtggcccgcg

SEQ ID NO: 56835 - DNA, 122 bp, Homo sapiens
cagtgcatggggtggggtgcgaaaaggcttagccccagcaaactgggggcagagaggagccgcagagcctcagagaggctggggagctggcaactggcctggtttcccaaggaaactacccc

SEQ ID NO: 56836 - DNA, 122 bp, Homo sapiens
agacagaaaactttaagaagagtgcacgttatagcctcctaaaaattaaaaaataaaaaacggccaaaagaaagacatagaatagaatggtggttgctgagggttggagagtggatgggagg

SEQ ID NO: 56837 - DNA, 122 bp, Homo sapiens
aaaagatatcattatcccttctccctcccccgcgtctttcacccagagctttatgtttaacggggaaaatccagcgcctggtgttggccaaacctcatcaatgggaattccatgtgtctgag

SEQ ID NO: 56838 - DNA, 122 bp, Homo sapiens
agtggctgcacgcaccgttcgcgagctgaagcagggtgaggcattgcctcacttgggaagcgcaaggggtcagggagttccctttccgagtcaaagaaaggggtgacggacacacctggaaa

SEQ ID NO: 56839 - DNA, 122 bp, Homo sapiens
aagggccacacttccctggtttgagggctacctggggtggcagggggtatagtccacttgcgattagtgccataggtggggtgttttttgttttgtttttttcttttttttgagacggagtc

SEQ ID NO: 56840 - DNA, 122 bp, Homo sapiens
taaatgggatctctcaaagtgtgatgagaaccagaaaaaaatggctatttctagtagcttcggtacaattgagcaagaaacaccaaaggatggtcttttcataactttaaagcagtgtggtt

SEQ ID NO: 56841 - DNA, 122 bp, Homo sapiens
ggttgtggctacacccggggcagggccccagctcagatcccacacgggtgcagccagcgccgggccatccactgggcccagccaatctcggaaatgacacctgacttgggactcgctgtgag

SEQ ID NO: 56842 - DNA, 122 bp, Homo sapiens
gcgctgtccaatggcgcggaagagaacacatgagctggccaatcgggaacggcacgggggcgggctcgctcggcgcgaagttcgggcccgggaattccgaaggaggggtaggcgctgcccgc

SEQ ID NO: 56843 - DNA, 122 bp, Homo sapiens
gagggaggaaagaggagggagagggaggagatggagggagggaaagagccgaagacccagcgggctttgcactcacccgtgttgtacacgtgcagttcgtccactattccctcgttgccgcc

SEQ ID NO: 56844 - DNA, 122 bp, Homo sapiens
tgaccgcggcagcagccccagcattgggtcggccggggcggacgggggcggctctccgcccggctgcatttgcatgtcggtttagtcaccgccgccggcgcctacttcctctaaggccgggg

SEQ ID NO: 56845 - DNA, 122 bp, Homo sapiens
ccgagagccggggctctgccttcgccggccgcggaaccgggctccactcagccctcagcccgcctccagggccccagagccaccaactggggccttggggattcacgagtcccccgtattca

SEQ ID NO: 56846 - DNA, 122 bp, Homo sapiens
cagcccctttcccggggcgggcaccgcttcccggtcccgggcctctctgctctcccgaggcgatagccaccctgcgatctctcgcgcggccagcaggggccagcatcccccgcggaaagggt

SEQ ID NO: 56847 - DNA, 122 bp, Homo sapiens
ttcccctcccactagcaatatatacagattccaattttcccatcttcaccaacatgtcaccgtccagtactggggttttacccatcccagtggttgtgaagtggtatctcacggtggttttc

SEQ ID NO: 56848 - DNA, 122 bp, Homo sapiens
actgaggtgtgcctggcttcgatctaccctaggaagggtctgccctggggcgccccattccgcgactgtccccagtgggaaccacgccctccatctaccagagccatttctgcaacgtctag

SEQ ID NO: 56849 - DNA, 122 bp, Homo sapiens
gggtttgtgtacacagcgtggacgccacgcatccgtcaggtgaatctgaggttcttgtcccggccaaaatctaaaccaggcgcaggtgaggtcccctcaagcgcgtcaaaggggacccggct

SEQ ID NO: 56850 - DNA, 122 bp, Homo sapiens
caccttaaagacacagagtggctcccaggcccacaggccccgacagtgggagtcagagagcgttcactcatcaacccaagggatcaaacggaagccgagttggtgagtaacagacagacaac

SEQ ID NO: 56851 - DNA, 122 bp, Homo sapiens
ctcttcctccatttccaggacctgaagggatggactacggcattcttctttctctaacctcgtgttatgcttctgatataccaaataggattaaagccacataaggaatctctcagaaccag

SEQ ID NO: 56852 - DNA, 122 bp, Homo sapiens
agcgatcctcctgccttggcctcccaaagtgctgagattacaggtgtgagccaccacgcccggcagcaaccattttttagctttaatgtgcaccagctctgtaatcaagtgcatcctatatg

SEQ ID NO: 56853 - DNA, 122 bp, Homo sapiens
cgctctgtgggtgcgggcagcgacaggggtgggtcagggtgcaggcggtgagacggcgagcgaggaggtcgggaaggagcctccacaccccagcagggcccattccacacgagaccccagac

SEQ ID NO: 56854 - DNA, 122 bp, Homo sapiens
ttcaaatatccagtttcacatacaggcaggtttaggaaatcctgacttagtaacaattaacggtaagatagcagaaaagacaagaatgatcatagttgtcttgctccccaacaagaatgcct

SEQ ID NO: 56855 - DNA, 122 bp, Homo sapiens
gccggcggcagcggctttggacgagggcagaaccacaacgtgcaagggttccacccctaccgacgctagcccgcggcgccgcgacgtctgcacggcccagacccaggattccaaacttgtga

SEQ ID NO: 56856 - DNA, 122 bp, Homo sapiens
cgcgcgtgcgctgctcaggtctgtgagcccattggccagcagggccaggctgaacagatacgggacgtgcggccgcagacgcgccaggcccgccagggcgccgcacgccgggcgcgccacga

SEQ ID NO: 56857 - DNA, 122 bp, Homo sapiens
ccccctcgacaccccatgagggtgaggcgggtgtggggccagtacttagagccccggcaacgccctcctgcctgggcacctacctggggtgtctgctggggctccgggggtggcatgggtgg

SEQ ID NO: 56858 - DNA, 122 bp, Homo sapiens
ccccccgctatgcagggagtcagagccagcccctcttgcccccctggctcttaggatccgcggtagactcacagcctgtttatcatattgtgagtaatatcatctccccctctggagattat

SEQ ID NO: 56859 - DNA, 122 bp, Homo sapiens
gagggctctgctagtcgggttccctcccaggccagcccagggggcgggccaacagtgcaccgcctccttcccggagccagccagcagtgggccccctccgccagccatggcctcctttaacc

SEQ ID NO: 56860 - DNA, 122 bp, Homo sapiens
tgggacgcccaggcagaggcaagactcgcgcgctcctaagccgaggcaggtcagcctaggcgcctggctgctggaagagtccattagggatggccaaggcagggtgttcccgacgccagagc

SEQ ID NO: 56861 - DNA, 122 bp, Homo sapiens
taacagtcattggctgaattgggccagagaggtctcattggctgaattcctgcaccggctcgtcggaggcgggacccaaagtaggctaggcctacggaagctgggtcttcttgctgtgaggt

SEQ ID NO: 56862 - DNA, 122 bp, Homo sapiens
gcgggcgcggggtgcgcgtgggcgggcggccggggtgggcaggggaccgtgggcggcgggcgccgcagggggccccccacccccccatcccccccttacccccccaactcgctctgagcccg

SEQ ID NO: 56863 - DNA, 122 bp, Homo sapiens
tggcgggttcctgtgggggtgagctggcggggcctccgggctgcttttaaggccactgcccgccccgtcccgcctgcctgtgctgtgcctgcctcctagagctcattccctacgccccgact

SEQ ID NO: 56864 - DNA, 122 bp, Homo sapiens
gttcatcctcccgggccccttttaagcgcttggagtcactaggaatgtaccaacggccctcggagggaggacgaggcggagagccacccaagaaaggtggcggaggcggggagaccctgcgg

SEQ ID NO: 56865 - DNA, 122 bp, Homo sapiens
gaaggcggggccctcctggggcggggtcggtgtgggggcggggcctgggtggggcctaggcgggcgcgatggcccgggactctggcgcgcagggtgcatttcgggatggagcaagcgcagcg

SEQ ID NO: 56866 - DNA, 122 bp, Homo sapiens
atcccgccgctcagacagcctctcccggggatccccaagggtgctccgggtggtgccagccgggatggcgccctggaccacagcccttgcgacctgctgtcctcggctctcccctcattcag

SEQ ID NO: 56867 - DNA, 122 bp, Homo sapiens
ggccacgacctgcaggacggagggagttaagggtggcaagggggagcacaccgagggctccgcttccagctggaaagaccagcctccggcacgtctggactcggagagagcgctgcccgcct

SEQ ID NO: 56868 - DNA, 122 bp, Homo sapiens
gtatctctgctcaaagttcccctccctgcctgggggcagctctggactctggtctactttcggccagggcacacctagcccactcccaggtccaccttcctccagtctacccccagactcct

SEQ ID NO: 56869 - DNA, 122 bp, Homo sapiens
caggatacaacatcccggggtcagtaaaacccggaggggtcgctccgtgggagccggagccgcgaggagacagtcatggaagcggaggggtagtcctgaccccgcgtgggtcctgacgccga

SEQ ID NO: 56870 - DNA, 122 bp, Homo sapiens
caggcaacaacaggggaaggggtgagcctctgccaccgttagccaaaaacacagcgagcgcggtgataacccgtcaccctgtccttaagcataaatggctccgcggccgctaaggcaaactc

SEQ ID NO: 56871 - DNA, 122 bp, Homo sapiens
ggttttttgagacagggtcttggtctgtcacctaggctagagtgagtacagcagtgtgatcgtggttcactgcagtctagactgcctgggctcaggtgatcctcccacctcagcctcctgag

SEQ ID NO: 56872 - DNA, 122 bp, Homo sapiens
aacagcttgctgtacttctcaaagctgagtgtcctatttgtttgaggtagagaagaggctcgaacagataattctttgggaacattctgggtagcggacataaaacctggcacatggcaagt

SEQ ID NO: 56873 - DNA, 122 bp, Homo sapiens
cctgtgggacagaaagcaggggaggtagaggacaggccgttttccttaagagcccaatcccggacacgcacacgccacaccagctcgtgtctcgtggtcctaaacttaggcactcggcctta

SEQ ID NO: 56874 - DNA, 122 bp, Homo sapiens
tgctcccattatgattttgttcggcagtggaagtttcacctgcttctccagagcgcttggcgtctttgttccaaatttcctttcttcaacctcacaccagagtgccctggtcaggcttggct

SEQ ID NO: 56875 - DNA, 122 bp, Homo sapiens
tccagggcaactcagcagcctcggcgtccacatggctgaccgccgctggactcttgcgggcgatggaggactggcggtggctgaggtcagcacctcccaccaggccacccgctccgaatctc

SEQ ID NO: 56876 - DNA, 122 bp, Homo sapiens
gagctcggggcccgccagggtcatcgccatcgtctccgtcatggtcatcctcatctccatcgtcatcttttgcctggagacgctccccgagctgaaggatgacaaggacttcacgggcaccg

SEQ ID NO: 56877 - DNA, 122 bp, Homo sapiens
ggccgtgagatctgcgccctccccagtttagttatctgccagctactttaaccagagtggcgacattctgaaatatttcctatgacactcgctaacagtttcatcccctggtcacaccttgc

SEQ ID NO: 56878 - DNA, 122 bp, Homo sapiens
caccctattcttgccaatatgagtgactgctgcttctttaccagttacagctttagtcttcgtttctctccccatgtagatatgattgattaagacaccaaatcatataattgctcacagtt

SEQ ID NO: 56879 - DNA, 122 bp, Homo sapiens
aagggagagaacttgtcagtcagccctaggagcccggctgtcactcacagcctgacagctcgggctccgcgtcttattttggactgtgtcgctctccgcaccaccagcagcgcctctcagtt

SEQ ID NO: 56880 - DNA, 122 bp, Homo sapiens
aggggatgtgtccaaagtcatgcagctggcaaatggcagaacacggatatgttaagcactcggtcatcgagtgtctctgagcctcatatcaaccccaaggtgtaggcatcattattcctact

SEQ ID NO: 56881 - DNA, 122 bp, Homo sapiens
gcaaggagagtagccaatgctctggacctctggtcctttttgtagggtaccctctgaggccgggaacctttgctcaactctcaggctgtccagggaagctttaggcggtgataccgagctac

SEQ ID NO: 56882 - DNA, 122 bp, Homo sapiens
agtgtagcgtcagacacatgcctcagtcccacctcacgtccccatccgtgagtccagcaacgacccaccagccgcataaatcagaggccagggaagtcgagctggcggctgggtttggaaca

SEQ ID NO: 56883 - DNA, 122 bp, Homo sapiens
ttgtggtcagccatcgtctcggccccgggccctcctaaccgcccagccagctgcaggctccgccttcccgccgccacagttaatgtaactctcgcgatgctcccgcacagccccacgggaat

SEQ ID NO: 56884 - DNA, 122 bp, Homo sapiens
ccctggcatggtacagtgtcgcggagcccgaggtggcatcttttgtttggctgctgatggcggccttcgggccttggcatccacgttgctgcaattttccaggaacagtagatcatttgaaa

SEQ ID NO: 56885 - DNA, 122 bp, Homo sapiens
tgccggagctgccaagaagcctctgtgtagctgtgtaagaaacttcacacctgtcttccacggcagccgcaccattttgcaccctcaccggcaatgacggggagtgcccgtcgctctgcatc

SEQ ID NO: 56886 - DNA, 122 bp, Homo sapiens
gccagactccagggaccgcccctgaagtcttcttagggggcggctctggagggggaacttcgtcgggggggagcggcggctggctgtgggtgtggaaaagcgggcgcgccagaggggctggg

SEQ ID NO: 56887 - DNA, 122 bp, Homo sapiens
agacagaaattccttccttctagctcttacagtgtaaggcctgcgcccaatacctaggaccgtctctgaaggaaacacgtcagttatcaaggtcaggtgaccacaacaattattctgtaacc

SEQ ID NO: 56888 - DNA, 122 bp, Homo sapiens
aaacaaaaaaacaacgtatttccaatgaccaaagctaaagacatgcagcgctggcacaaacgccaagtctcacacatctacacccacaagcacaccctaccttgtatccacagtttttcatt

SEQ ID NO: 56889 - DNA, 122 bp, Homo sapiens
aactcaaattctatttttatacaaatcagcaaacatgaatttaaggccttcagactagtccgtcacagggaggacttcagtcaaaagattagtttccttcctgttgctgcctcaagataaca

SEQ ID NO: 56890 - DNA, 122 bp, Homo sapiens
caaactcaggacctcaggttatccgcctgccttggcttccggggatgctgggattgcaggcgtgagccagcgcgcaaggcccaattgattaatcagaaaaaaataaatcagcctggcgtggt

SEQ ID NO: 56891 - DNA, 122 bp, Homo sapiens
ccccagctcatacagccagggctgtggacccacagctgcagtacctgagctcaaactctgcgaacaggacgtcgaagtgcctcagcgcttccctcatcttctctgtgtaggtgttcaggtcc

SEQ ID NO: 56892 - DNA, 122 bp, Homo sapiens
cttttttttatttgtttcaatgttcctaatgggttcgtttcagaagtgcctcactgttctcgtgacctggagttaaccggaacagcgtcttcattcatttctgttgggaccagacgcggagc

SEQ ID NO: 56893 - DNA, 122 bp, Homo sapiens
agccccggccgcttgcagaccccgccatggacccgttcctggtgctgctgcactcggtgtcgtccagcctgtcgagcagcgagctgaccgagctcaagttcctatgcctcgggcgcgtgggc

SEQ ID NO: 56894 - DNA, 122 bp, Homo sapiens
cttcttgaaaggcggctgtttatatgtgaagatgagattggtgaagattggttacttttgcgcagctcaagttcttttatcaagggaatgacagaaaaaccacagagagggaagttgctagc

SEQ ID NO: 56895 - DNA, 122 bp, Homo sapiens
atctaccaagtcaccccacctagagatgtgagaatcattctggaatctccctctctatcacgaaccccaatacttctagctaatcaccatgtctctctaattctactttctaaatatttctc

SEQ ID NO: 56896 - DNA, 122 bp, Homo sapiens
aaactccatttctttccagtttgcaactggaattgtcactttcgtctttcggcacgacagcgcccaggccacaaaagcccacagggcagggcctccattttgtggcctgcgtggagggcggg

SEQ ID NO: 56897 - DNA, 122 bp, Homo sapiens
acggtttttattttgccaatatgatttcccagttggaagccgcagttgtggctctctgggcggctgccttgtttgatcttgggaggggcagcaaccctcatgcagaacagagcttgatcgaa

SEQ ID NO: 56898 - DNA, 122 bp, Homo sapiens
ttgaggggaaatcctggagaaacgccttgcacactcagaaacaaacaagagagatggtcacggcggccaagtctgcagttcacctctgtggccacttccctctggatgaagccctcagccat

SEQ ID NO: 56899 - DNA, 122 bp, Homo sapiens
ccctggctgcctcattgctcgtgggcataagatactccctccagtgccatgactgtttaccgatgccatggcaatgacctagaagttcccacctgtttccatggaaacaacctggacatctt

SEQ ID NO: 56900 - DNA, 122 bp, Homo sapiens
gagacggagtggacattttcaccatatatttgtgaaaacagagtcaacagaatttgctgacgaatgtgatgctgagtgtacaacagagaaggttcagacatagggaagttctgaggacaagg

SEQ ID NO: 56901 - DNA, 122 bp, Homo sapiens
ctccaaggcagacacccttctctggtcgcacaaggcaggaactgaagatccacccttcctcgtgcctccagcgctctgctcatcatgaccccctaagctactccagacatgctctgctccct

SEQ ID NO: 56902 - DNA, 122 bp, Homo sapiens
ggcctgttgccccggtgatgggcgctatggaaacaaggtggtggggaagagggtagggcccggcggctcagtttccgccctcgggtaccgctcccccaccatccagatcccggccagggttc

SEQ ID NO: 56903 - DNA, 122 bp, Homo sapiens
cagtaggaaggtgtggatgtatggataaatactgaatgccactactgggtatgcagtgaacgtttagacattcttcctggtgagtgaatgagaagaatcactgtggttcacagaaggacacc

SEQ ID NO: 56904 - DNA, 122 bp, Homo sapiens
gtgtccttgcagctgccagtcctgatctccacctgtcccaagctgctcagaacgtggcagcgccatccaggagccacgagcatgggccagtggccagggaggctggatctgtctgccaagtt

SEQ ID NO: 56905 - DNA, 122 bp, Homo sapiens
gcggagatctgagacgagtatgtggctgattcgggcaaaacaaaacaaaataaaaccaaacgaaaccaaaacagacttactattaccaaatctgagagtcagtgggtgggaatccttttcaa

SEQ ID NO: 56906 - DNA, 122 bp, Homo sapiens
ctctctcccctcccgccagcgccccctcccgccctcgccgcaagctggccccggccttgccggcccttcttaggggctttatcatgcctcctgcaagaatagagatcacacacgggacggaa

SEQ ID NO: 56907 - DNA, 122 bp, Homo sapiens
cactgatgagcagagagcaatttccatttccctcctatgatctaacaagtagccgggggccggttcttccagatgcatcctcggcttggtagcacacagaggtcagtccattagggaggcca

SEQ ID NO: 56908 - DNA, 122 bp, Homo sapiens
cccaaccctgacttttctctttaactgtagtgtgacaactccgtacaatgcagactttgacggggatgagatgaacttgcacctgccacagtctctggagacgcgagcagagatccaggagc

SEQ ID NO: 56909 - DNA, 122 bp, Homo sapiens
cccgccgccggcgctcaccgaagaccaggatgttcttgccggacggcagcttggacctggcgcgggtggacacttcgctcagaatggaggacctgtggcgacaatggcaagagtggtcagcc

SEQ ID NO: 56910 - DNA, 122 bp, Homo sapiens
gtgaacacagaacccaacgggtagtgctgggtccactctgggaggccttctgttcagccgcgtgacctgagggacagaacgtagctcctctataaccaaggaacctggcaaactatccaaga

SEQ ID NO: 56911 - DNA, 122 bp, Homo sapiens
tcctttttatagtgactctgtgtcagttaagattctttcagttgcaaatgacaaaaagtgcgaaccaaactgggttaaacaaaaaaaaaaaaaaaagaaaaaaaaaggaagggaggaaggaa

SEQ ID NO: 56912 - DNA, 122 bp, Homo sapiens
acccccttcccgttcctagaaaatgccataaaagcgggcagggcgcggggagggcggctgcgcgcccggcggccggggctcccttcccgcgccgtttccccacgcctccccgcccgccccgc

SEQ ID NO: 56913 - DNA, 122 bp, Homo sapiens
ggggggccgccgggccctcttcgacagctacacaaatctggaacgggtggccgattactgcgagaacaactacatacaggtgcgaagcatccccagctgggccgcgtcggggacccccccgc

SEQ ID NO: 56914 - DNA, 122 bp, Homo sapiens
agacgcacacagagacaccaagacacagacacgcaggttgtagagacaaattcagagacacgagcgaggatagaggcgcggactgagcccgggactgggacccggcggccgctggagggtgc

SEQ ID NO: 56915 - DNA, 122 bp, Homo sapiens
gagcacgatttagcaggggcagtgcataaagtcagaaactggacaatttcagtgtgcttccgatgtccctgaagacctttggggcccttctttgcaaaacattaattctagcctgtatttta

SEQ ID NO: 56916 - DNA, 122 bp, Homo sapiens
ggtgcgcacgggttccgccagacacagctaccattggctgtcagtcggatccgagaacgacgattggctttccttgaccgtccctcaagcgcctctccggagatggtctgaggtgggagaag

SEQ ID NO: 56917 - DNA, 122 bp, Homo sapiens
agtgcctttttttttataaataaagttttattggaatacagacacgttcatttgggtagacgttgtcgatggccgctttcacaacaatagcagagttgagtgatcgtgccagacattatatg

SEQ ID NO: 56918 - DNA, 122 bp, Homo sapiens
gcagccaaatttggttggtaacataaagtactttagacacttttggtttcttaagccgagcgtgtcataaaacttgtgttcttaagagcagaactgtagatgacgatcttagacttacagaa

SEQ ID NO: 56919 - DNA, 122 bp, Homo sapiens
aagggtgtgggtggataatcccatcatgctggagtggagaatcaggacccacaactcaatcgaccacacatggcaataccatttgagaaaaatatattctagaaacataacaaaaaattctt

SEQ ID NO: 56920 - DNA, 122 bp, Homo sapiens
gccccccacccgaagccttggggcgagtggtggttcctcctgcacccccacctggggccccgcaaagaggcgggcagggaggcaggcagggggcgcacgcgggcgggcgcgcggccgccgcg

SEQ ID NO: 56921 - DNA, 122 bp, Homo sapiens
attctgagtccagcacaccctccagtggggccaacacagccaccaactctgagtccagtacgacctccagtggggccaacacagccaccaactctgactccagcacaacctccagtggggcc

SEQ ID NO: 56922 - DNA, 122 bp, Homo sapiens
taagcacatgtgtacgtatgtggtatgatcgcctgtggaggcccattacctgtactctctcgctgcctgggcccctcctaccaacacatcggacaagcgaggccagcctcttgcgttatttt

SEQ ID NO: 56923 - DNA, 122 bp, Homo sapiens
tcagtaaatcagaacaacagtaacagcggcagccagcagtttcagggtgtccaaggtgtgcgggactctgggcctcatacatgttaggcacttacacttaaccctcacggcagccttcgaag

SEQ ID NO: 56924 - DNA, 122 bp, Homo sapiens
ctacgcgtgcagcatcggcgtgaacatcatccgggccagaccctgcgctgggcctgcatgcggcactgcaccaaggagcccccgagcgctgagagcccacaccccgtcccggctgtctaggt

SEQ ID NO: 56925 - DNA, 122 bp, Homo sapiens
ggaagttctcggggtgagtgtccaacctcttcttggccctcgcgggcgccctggggtccccggggacagtgatgcttccttaaagtcttagctttcagcagtagtgtaggcccagtcaaagg

SEQ ID NO: 56926 - DNA, 122 bp, Homo sapiens
ggtcggtggtgcagcgcatgaacagggagggcaggatctccgtgtcgatacggcacttctcgctcaccacgctcacgcacaccttgtagaactgcacgggcgacgcgctgctgccgtccgcc

SEQ ID NO: 56927 - DNA, 122 bp, Homo sapiens
aatagagagaggcagagaaagcatactgggactaggtagaggccagggagggacaacctacgcacatcatttagggaggtgctcattcttgaagggcctagatgtcttgctttccccaccct

SEQ ID NO: 56928 - DNA, 122 bp, Homo sapiens
cccgacttattctggggtccccgctgctaggccttcggggagagttgatcccctgggtctcgggcttctgccacccccccggggcccctaatagtcacccggggcaggagccgggtgtgggc

SEQ ID NO: 56929 - DNA, 122 bp, Homo sapiens
tccctgccaggatctcaccttgaagacccagctagaggcagtaaatggaaagacgatgcccgccctggaggtgttcgcccatgccctgcgcttcttcagggagcacgcccttcaggtgcgct

SEQ ID NO: 56930 - DNA, 122 bp, Homo sapiens
acaaacggctcagctaaactccctgaacacaatccacctaaacagtctaagctcaatagccgaccgagttaagcaggatgacagctccagtaacttcctcttcctcacccagctcctcagct

SEQ ID NO: 56931 - DNA, 122 bp, Homo sapiens
tactgcagtatttgattaaccaagcttctgcagattttgtgattcttgggacttttttgacgtaagaaatacttctttatttatgcatattcttcccacagtgatttttccagcattcttct

SEQ ID NO: 56932 - DNA, 122 bp, Homo sapiens
atcctagaattctgaaatgagaatgacagggtcaaaacattattttattcacaaaagcaacgttctctctagggtgtcagtgttaagattgtttggaggccagaggtttggaggaggtggtg

SEQ ID NO: 56933 - DNA, 122 bp, Homo sapiens
ctgcccccgcccccagtgccagggcggaggcagtcccggctcgcaggtaattattgccagcggagcccgccggggagcgggggtgggcgcgccggcggtgggcgggcgggcgcggcggggcg

SEQ ID NO: 56934 - DNA, 122 bp, Homo sapiens
gaagaaccaaccataaaacacaccggttttaaacatatctatgctttgccttaataaacccgtgctctaaaaatagcattctctctaaacagactacttatcacatttgtaacacatacacg

SEQ ID NO: 56935 - DNA, 122 bp, Homo sapiens
actgcaggaactgaggtagatgggaagcaagtgggcagaggccatgaggtaggcagggcccgaccaccggcctggcagcattctggttgaagttcattctgacagagacaggttctagcagg

SEQ ID NO: 56936 - DNA, 122 bp, Homo sapiens
cactcagtgggtagactttccccgaatccccactttcagcctgggccctaccctgaaccccggtcccgtgactgctgctcccaggacagagcgtttctggttcaatttctcccgaaaccaat

SEQ ID NO: 56937 - DNA, 122 bp, Homo sapiens
tagggggaggaaaaagctttctaggctgggagaacacccctgtggaggggtgtaacttggcgcattacgaggaactagagaaacgtgcacttttcctaagacatcaggaaaggagcgaggag

SEQ ID NO: 56938 - DNA, 122 bp, Homo sapiens
caaagcagatgttctatcctatctacagagcagaaaattgaaattctcaagtagcagacccggtattaaagtgcagatctgactttaaagtccatgttcattttacacagcaggctgcctct

SEQ ID NO: 56939 - DNA, 122 bp, Homo sapiens
gagaggcgtcgagcacagtagggcggcgggggtgcgttgagcgctcgggggtcaggcagtcggccgggatcgccgctggggagcgtttccgaggcgaggaggaggaggaggagatgctgctc

SEQ ID NO: 56940 - DNA, 122 bp, Homo sapiens
caacatcgcctaccaggtgagccagtgcccggggcaaggtgggcgggggtgtcctaggtgcgtatgccccacgctgacctcccctccccgcagctgcagctcatgagcgccgtccgcaccag

SEQ ID NO: 56941 - DNA, 122 bp, Homo sapiens
ggcggccgggccagcgtcagggacaggttcttcgcaggaagggctacaggagaccaggctcgccgctggtgatggtcctggggtatgggcggcggagaccagcggcgggaatgggctggggg

SEQ ID NO: 56942 - DNA, 122 bp, Homo sapiens
accagctaccaataaaaactgtaacacaaaacggcactcacgtggcatcagtccccactgcggtccacggccaggtgaacaatggtaagacatgctggtcggtggctccccgtggctgtggg

SEQ ID NO: 56943 - DNA, 122 bp, Homo sapiens
tgaggagtgcctgtgaggcagaaggcgtctcgcagtccgggttcgatcccagctgcgagccgtcaggcggcaggacctggtctgctgcctgcctgcctcagtttccacgggagtgtgtgtgg

SEQ ID NO: 56944 - DNA, 122 bp, Homo sapiens
ggcaagaggtgcccactggatacggggtatccgagccctctgaggtgctgggagtaagaacgcgggaggtcgcttgtccgctggaatccgcggccagggcgaccctcatcaggtctgcccac

SEQ ID NO: 56945 - DNA, 122 bp, Homo sapiens
cgcccggtttttttgcaaacgctgtgttcggggatgggcatttgagagcggcctggcagccgggctgtgaatgtgagccctgccctgggggcttcagacgaggagctcagggatctgggttc

SEQ ID NO: 56946 - DNA, 122 bp, Homo sapiens
cattgatctagtctttcctaccatcagagctgacacagctccagtccacgggcttctccgcggggtctaggatccacagtccctgggggctgaagacccaatggaagtaactgatggatcgc

SEQ ID NO: 56947 - DNA, 122 bp, Homo sapiens
actctggtggcggaaggccccgtgtcccccggagcacaatgccagccgtgctccgggaagcgcatcccggcccaggagggtgcttcttgctcagagcccgggtcctggacccaatctcagac

SEQ ID NO: 56948 - DNA, 122 bp, Homo sapiens
atttgagggttacggcaaaaagccaccactatctctgctgtgtagtctcctagccaaggacgaaaatgcaaagggagaggacaggcctctcatccacagaggcgtcacagtcacggtatggg

SEQ ID NO: 56949 - DNA, 122 bp, Homo sapiens
aagactagcctggtcaacagagtaagacccacatctctgcaaaaaataaaaaattacccgcgcatggtgacccatacctgtagctggggaatgcaatgagcactccagcctggcagcctggg

SEQ ID NO: 56950 - DNA, 122 bp, Homo sapiens
caaaatccagctcctctgcagctcaggcctggtgttgcccactctcgggccaggcaagcacggagcagggtgacttcccagaggctgtgtcctcccaggagtccctgtccggggtgccagga

SEQ ID NO: 56951 - DNA, 122 bp, Homo sapiens
ctgatagagaacaccagagagaagaaacaaatgctgtgtgtgtatatgtgtgaggacacacgcatgcatgtgggtgtgaatgcctgcatttgtgcatcctctcgagctgcaactgtggctgt

SEQ ID NO: 56952 - DNA, 122 bp, Homo sapiens
tcatgagtatgcccagagggacgtggtgatcatgctgctaggcaacaaggtgagtggctccggggcagggtcagcccagccctgcacttcctcagccctagccggccccataaccacccaag

SEQ ID NO: 56953 - DNA, 122 bp, Homo sapiens
cggggggcagcatggagccgtaggggtagcgcgccccgttaggagccgggtacacaggtccgtggggcgccccagccgccgcctggtacgggaagagtgagcagggcgcagccagctccgac

SEQ ID NO: 56954 - DNA, 122 bp, Homo sapiens
ccacgcccacacacccaaggctgccccatctggcgctgattatcctgctgctgccgccaccgctgctgctgctctgcaaaattcagctgctgcctctgtcttgaggaccccagcgcctttcc

SEQ ID NO: 56955 - DNA, 122 bp, Homo sapiens
cccgcctttcagccccccagggttcactcgaaccgcctccgcgcaccccaacagcagagacgtaacgtgcaggactgactggtgcttcccaaaaatcttctcggactcagtggcacacctgg

SEQ ID NO: 56956 - DNA, 122 bp, Homo sapiens
cacagagtattttcagatgtctctaggctcagcgcatgcgcggcgtgcagggaggtgtttcgggggcggaggttctggttctgcggagagggatgttgaagacagcgcgcccagcgatggca

SEQ ID NO: 56957 - DNA, 122 bp, Homo sapiens
gcggctgcgcttcggtcccggacccgggccacccacggggtagtgggtgctcctcggccccggacattgcaagccccagaaggtaaatttgcgtgggagccgcgcacctggagcgcgagggt

SEQ ID NO: 56958 - DNA, 122 bp, Homo sapiens
attttccaggtaacaccgatgctgctggtctggggactacagttgaggtgccctggcctacgagctgtgggtttaggtggtagtgtcctatttccaagcaatttcagatgacagttttacca

SEQ ID NO: 56959 - DNA, 122 bp, Homo sapiens
ccccaccacaatcactagcaaacccactcccaaacacacagacacacacgggcgcacgcgcgggaacacaagcacacacacagacacacaaagacacagacaacttgaaggagagcaaggga

SEQ ID NO: 56960 - DNA, 122 bp, Homo sapiens
ccggccggtcccccaagccccgcccccggccgctcgcccgcacacaccccctaggctccgcgctccgcggccgcctgctggcccacgttggatgctttgcaacagcgccccgccacgcctcc

SEQ ID NO: 56961 - DNA, 122 bp, Homo sapiens
gcgccgcctaaacttggttttttggagttgctaggagggccgacttaactctttgtcagccgggctggttttcacccacctggtggcaggaatcctgtttgccttccccgggagccagggat

SEQ ID NO: 56962 - DNA, 122 bp, Homo sapiens
ggtcacaaaagccccctctagaagttcacaccctgaggcttccctggcaaggctgggggccgtttggcccttccatgtggactgcaaaaacagtgttggaatgcaggactctgggtatgttc

SEQ ID NO: 56963 - DNA, 122 bp, Homo sapiens
ctccgctccttcagagacaaaaggggggctctgcataggcgcatagccatgaggcatccgcgactccagcctgcgttgtgcggtaaggagcctgccacccatattatccaatgcctcgcttg

SEQ ID NO: 56964 - DNA, 122 bp, Homo sapiens
cggtcagcagcgcgaacacggacagaggcgtcggcagtgggaacagcacctgctgcgggccgcacagggaggggcgggctagggggtggttcaggacggggcctcagggggcgtggcttgta

SEQ ID NO: 56965 - DNA, 122 bp, Homo sapiens
cccaggcggccctgcaggcggtgaactcggtccagtcggggaacctggccttggctgcctcggcggcggccgtggacgcagggatggcgatggccgggcagagccccgtgctcaggatcatc

SEQ ID NO: 56966 - DNA, 122 bp, Homo sapiens
tgctacattgcatttttactgttacagttgtctgtaaccagatactaaccccctgctgtccgaattcacatagagcaaggaattctgtaggtgtggcccagtgcaaactaattgtactaatg

SEQ ID NO: 56967 - DNA, 122 bp, Homo sapiens
catttatagtgcctgttatgttgcagctctgttctagggattgaggattgaacaacggatcggacagtgttagttttggtcatcccaggaaaactaagcagaggcttgctcaagaactcctg

SEQ ID NO: 56968 - DNA, 122 bp, Homo sapiens
ctgagccgcggcattcccgggccccgctagggctgcagggtctcaggatggcagcctcggcgcaggtgagtggacgaggttttggccttgctgctgctctgctacttctggaggcctcgtgg

SEQ ID NO: 56969 - DNA, 122 bp, Homo sapiens
ctgcccagggtcctcaagagacaaccgcttaggcctggcgcaaggtacctggcccgggagcggctggggcggcggaatttggggtagaggggcacccgtgggccggctggtggggaggagac

SEQ ID NO: 56970 - DNA, 122 bp, Homo sapiens
tcgtgtctctggagctttagcagttgtgcggggaaaatgtcttcagtactttttttataccgggcttctctgcgcttccggggcccagagcggcacgttcgccacaccctcctcatctgcat

SEQ ID NO: 56971 - DNA, 122 bp, Homo sapiens
cgggcaggaaggccgcatagcagcacttcttcttgatgtgctctatgatgtgcaggtggtcgtccgtgaatgcgtggcccgcctcattgagcagctgcatcaggtagttggtgaggtcaccc

SEQ ID NO: 56972 - DNA, 122 bp, Homo sapiens
gggccctgcaggtcacgtggtgcggggtggggcctgggcgagtcacgtggggacggtgcgcgctcagtgcggctgcgccggccggtagctgcagctggagcagtggcgtttggaggagactc

SEQ ID NO: 56973 - DNA, 122 bp, Homo sapiens
atatttgttctgtgccaggaggtggccaggcactttatgagcgctataattttaccaccccggccccaattcaacaagctaaggattagcccagtgtttcagatgaggaagaggttaacttg

SEQ ID NO: 56974 - DNA, 122 bp, Homo sapiens
gggaggctcccccagccccttctcaggattctgcaccacaggttccattccattgcccagcgggaagcgcttctccagtgccgacagtggtaactgataactaacaggaagcgcggactcat

SEQ ID NO: 56975 - DNA, 122 bp, Homo sapiens
gaccagcctggccaacatggtgaaaccccgtctctattaaaaatacaaaaattagccgggcgtggtagtgctcacctgtaatccaagctacttgggagactgaagcagaagaatcgcttgaa

SEQ ID NO: 56976 - DNA, 122 bp, Homo sapiens
agcagggactaggcttcccagaaacctcgccgcccctctcctcgctgcggggtgtggggccgccatcagagacagcagccggcaggagcaattagaggccaggaaggagccggggtatcgac

SEQ ID NO: 56977 - DNA, 122 bp, Homo sapiens
tgttattaagctccgtaataaggaaggggagagaaagttagtgtagctctgctgtaggcccggcaaggcccccagtgattacgctaactgactgcgaaaatgcacagaggagcccggcctca

SEQ ID NO: 56978 - DNA, 122 bp, Homo sapiens
cttctcttcaaatgggttgttttctcactaggaaaaacaatgttccatctctggaattaacgttgatggtgttttgctcattctgaaagtttttatcctcccttctcaagcatggccactct

SEQ ID NO: 56979 - DNA, 122 bp, Homo sapiens
agaaaatgtccactcacaagatgtccccccaggctcaggttcatgtctccgtggctcctgcgcctgcttcttccccagcctgtctctcgccagctgcagctgtggcatccactgacgcctgt

SEQ ID NO: 56980 - DNA, 122 bp, Homo sapiens
cacaaatgatcatccctcccgggctgtagttaatcatgcaagctgctgtgtcactggggccggggtagttaacagttaactcgatggattaaggatcctcagccaggctgagcccatcacag

SEQ ID NO: 56981 - DNA, 122 bp, Homo sapiens
gtgatgtgtgtgataaccaaagtgaagggagacatgctgcccccgggttgcagagccaaacggatccacctggagaacagtccctgcattgaatgtatttctcttgcctcctctctagtagg

SEQ ID NO: 56982 - DNA, 122 bp, Homo sapiens
gtggtctctagaagaacccggacaccgcccctctcccggcttggtggaacgggaaacaaacgctagctagtgactgagagtctcggtggaagtgtgaaatcgaatcaatcgcggaacctcgg

SEQ ID NO: 56983 - DNA, 122 bp, Homo sapiens
ccccgggggtcccgggtttccatataacaggcatctctgaagtgcctgtgctgtgcctggcgctgtgctagggagacacttccattcattcttcccactccagttaactgagcatctattag

SEQ ID NO: 56984 - DNA, 122 bp, Homo sapiens
ggcagcgtttctaactcaggcggcgtgggccgaggtagagaaccaccaaaattaccatctcggagcggtgccggaagtcccgccttaccgtatgcaacaaacggagacaggtccgttcctga

SEQ ID NO: 56985 - DNA, 122 bp, Homo sapiens
tacaagtcatgagccctggacaaagttctacatcacaaagacgggcatgaggctggttagcgcagcaccgtctgcagtaacaccaaactcctaccagccccgtcagtcaacagcagaagcat

SEQ ID NO: 56986 - DNA, 122 bp, Homo sapiens
gcaggtcacctagcactcaggtacctagcactcaggtacattgtggctccttacctctcacgacagcagcaacaacgttgattggaagtttatcactgtgtgttacgggccatgggccatgt

SEQ ID NO: 56987 - DNA, 122 bp, Homo sapiens
gctttcgccctccagaggcctagttagggggttactttctccttttactcagaggctttgcgcgcaggctcagtgcagcgttctcggccacagccgcagggttcgggtcttggtcctgcagc

SEQ ID NO: 56988 - DNA, 122 bp, Homo sapiens
gagactacaacccagaggcggaggacaaagcggaaggccgaagagcgaggacgaaaccggcggaaccgcactttggagcctaacgagccatcgctgcgtctgagactgggacccggaagtaa

SEQ ID NO: 56989 - DNA, 122 bp, Homo sapiens
ccaaaggaaaacaaactccaagctgaacaatacacagtgtactgcctctctgataaagaccggctttattgtgtctgttccacacagcgtgggccaaatcaatcggaatcaaaatactgcag

SEQ ID NO: 56990 - DNA, 122 bp, Homo sapiens
ttgccctgaagtgtgcagttgtggaatatgtctaaatgtctcctgtgaagagattggaggcgttggttttaacaaaagcaataaaatgattacagctgaaaagcatgctggaggtaaacaga

SEQ ID NO: 56991 - DNA, 122 bp, Homo sapiens
agacattctaataggttctatgaaggatttagacaaagactcagccataggtcctatcatcgagattcttccagtctgtgaggaggcacaaacctgcataaatgtaattacattataatatt

SEQ ID NO: 56992 - DNA, 122 bp, Homo sapiens
gttttgcttccctgcagcttttgccccgccccccttcccctgcctccccctggccctccgcgtgttaatttaggggccccaacccggggaacccctcgcagagccagctgctgtcgttaggc

SEQ ID NO: 56993 - DNA, 122 bp, Homo sapiens
aaagtggatgataatatgggctactcaaataacacagtcattgccgtttataggacacctcgtggagcaacagtacacaaattcaagtgcgcatgcaacaaccgccaaccataatcggggcc

SEQ ID NO: 56994 - DNA, 122 bp, Homo sapiens
aatggactagaggtcaggactctacagtgatgactggtggcctgggggtgtcagctgaaacggtctggattttttttttttttttttctccttcttcccctacctccttcctgggcttagaa

SEQ ID NO: 56995 - DNA, 122 bp, Homo sapiens
aatagcagctcccaactaacatgcagggcgacttcgggctggcctcccaatttctctggtcgatgtcctcagctctgaggtcggggctggcggggcggcggccgggtcgatgtcttcagctc

SEQ ID NO: 56996 - DNA, 122 bp, Homo sapiens
ttcagtggccatgtagtcaactgttatggatatgaaccaaaccttatttcatcagtctaccgttgaaggtcatttagattgtttttgatcttttgcatgaatatctcatacacatctttgtt

SEQ ID NO: 56997 - DNA, 122 bp, Homo sapiens
ggaagcgggcgaggagcagcccatggagacgacgggcgccaccgagaacggacatgaggccgtccccgaaggcgagtcgccggccggggctggcacgggcgccgcggcgggggctggaggcg

SEQ ID NO: 56998 - DNA, 122 bp, Homo sapiens
ccgctcaccatctacggcatccggtgtaagtcgggccccgccttgggggactggggtgtgcggggagctgggtcaggacccacatttcaatgctgaggacgctggcatcagtagcaccggca

SEQ ID NO: 56999 - DNA, 122 bp, Homo sapiens
gtctgcctggaagggtcaccaatgggcgcggaaagtcctcactctcatggctcgggccatcgccgccgcggggagggatcctggcggcccggtttggggagaggcaaagggagttgggtgag

SEQ ID NO: 57000 - DNA, 122 bp, Homo sapiens
cagtcctctttttaaggcatcgttggtatctttcttcaagaagctgacccctttaagattcggcttaggtgatactttcctcttggcacgcagttacgggagccccaaggtagtgtgatctc

SEQ ID NO: 57001 - DNA, 122 bp, Homo sapiens
agcttccaacttttcattttcaggcgaggtgcaaccaggctctccaaatctgccccaacgcgcgcgcgcgcatacacacacacacacacacacacacacacacacacacacacacgaacaca

SEQ ID NO: 57002 - DNA, 122 bp, Homo sapiens
gacatgtctctttgcaacaggatgtaacagtgaatgctctctcaagctccccttggtattcgccagcccctaaattcctgctgaacttccagctatcacccacccctgggagcaggaccaga

SEQ ID NO: 57003 - DNA, 122 bp, Homo sapiens
ggagctgcctggggccagcccctcagttctggctgtggcaggttccccatcctagctccccggatctccatagggagtgtccagggaccctcaatctccagggccacttctgcaggagctcg

SEQ ID NO: 57004 - DNA, 122 bp, Homo sapiens
gagggaaccagccagcttcatacaggtgcccaatgacaaccctctctggagacggagtcacgtggaccatataatacctgtttctctgctggccaaattcccatgggaaaagaggcagggtc

SEQ ID NO: 57005 - DNA, 122 bp, Homo sapiens
aacttctcccggccaccagcagagcggctggacagccagagagcccagggcgcttcctggcgcgctgcggtaccccggggcgagaacgcccgccgcttgggaactccgcagctttgtgtgcg

SEQ ID NO: 57006 - DNA, 122 bp, Homo sapiens
ttaggcgtaattgactggtttttctgaggtcttgccacactgggcaagaaaatgctgcatcgggcccttattccagagagtgcagagctggggccaaggtcgtggtcaaaaaggaaaggagc

SEQ ID NO: 57007 - DNA, 122 bp, Homo sapiens
aataatttaatactaaagatgggcccagtggataagcggaaggtgagtggtcagtggtcccgctgctccgcacggacacctgcatcttccccgactccagcttaggggagggcagcttggtg

SEQ ID NO: 57008 - DNA, 122 bp, Homo sapiens
atgcattcgatgcggcagccgctgcccatggcaataaccgggcccaggcccgtagctcctcgttcctcgcgcagaggcgtccccacctcctgtgaacacttgtcagagacagcctcgaggcc

SEQ ID NO: 57009 - DNA, 122 bp, Homo sapiens
gacctgatgcgctcgccctctaggggcagaacgccctgaatgagagtgggttggcgattgcgtgggcctggagtcgcccaacaggtttgctgccaggattacaattgtctgaacagcacgaa

SEQ ID NO: 57010 - DNA, 122 bp, Homo sapiens
aggcgcctgggggagccttggctggttggggcagggggtgtgcagtgggggccccccaggcgccgaccaggcagctgagggtatgctggcccccagcacccgctcggccaacgggatgctca

SEQ ID NO: 57011 - DNA, 122 bp, Homo sapiens
cccaagaccagggaggacttgccagagcaagcaggtagtttggttggcgtttgccatgggcggttgtattttccccctgttgacaaggcagaaggaatcccagcagccccagcaactttggg

SEQ ID NO: 57012 - DNA, 122 bp, Homo sapiens
ctgagccaagggggacgctgtgggcgcggctcaggccaggccctcaggttagtgggtccccgctgtccccgcgcttcggcccgtcctctcgcgctatgctctcctgatgaacgccccgcgag

SEQ ID NO: 57013 - DNA, 122 bp, Homo sapiens
gcccaggtctagtcccttctcaaacatgccacttccgtgtcctgaagcacaggtctgcggcggacctccccaggccaggatgccccgttgttggagtcactgagttctactgatgtggctct

SEQ ID NO: 57014 - DNA, 122 bp, Homo sapiens
agtgggacagctaggaaatgacagcaatagcttcagcagagaactagctttagatcactccggaagggggtctccaggtgaaactttacaatgaaaagaagtaaagaagaaagggaagaggg

SEQ ID NO: 57015 - DNA, 122 bp, Homo sapiens
aggcactctcaccctcagccttcacatttccctcacctccaagtcccgcctttcgcgcatcgcctgctgctctcccactcagcgccacctcagtcccacaaaggccgggctgggatcctgtg

SEQ ID NO: 57016 - DNA, 122 bp, Homo sapiens
gagggatggtagggtgcttcaggcccggacctggcgccgagaggcgggacaaggggacctcgcgcccaagccccgcggaaagttcgcgctccgcgctccagccggtccctggatccgccgca

SEQ ID NO: 57017 - DNA, 122 bp, Homo sapiens
caggtgcgcggggcccaggccgcccgggcgccctctccccgcacccctcacctttggccgcgctctcgggcttggggagttgccatatcgaagacaccctcagaccccagctctatctgccg

SEQ ID NO: 57018 - DNA, 122 bp, Homo sapiens
ggaagtggggggcagcccccgcccggccagccgccccgtccgggagggaggtggggggcgcgtctgcctgggcgccaccccgtccgggaggtggacccaacagctcattgagaacgggccat

SEQ ID NO: 57019 - DNA, 122 bp, Homo sapiens
gcgatgtggatcgtaatatccagggtgggagaggggggtgatattactccccgatttttccgaggagatttcgtctactaccacccttggttgacatcctgggacattattttccattttct

SEQ ID NO: 57020 - DNA, 122 bp, Homo sapiens
gcggcaagcgcggagccgttccttagcaacgagttgttgacatttccgagagagcgggagcgtctgtacctctgcggcgtcactgggagcccgacggaaaactgcgctaaaggcttgtcttt

SEQ ID NO: 57021 - DNA, 122 bp, Homo sapiens
gaggccgctgggttcggggtatgcagagtgtagcggccacgtagctggcgatctcaggcacgtgactgcctggtcctgtggccccgcgctcgaacactttcagcacccaggcagggggtaag

SEQ ID NO: 57022 - DNA, 122 bp, Homo sapiens
gggaagcgggacccccaccctcagccccaaccaagaagggcgtcgtctgctccccatcgtcgtctgctctgtgctggatgatccagggccacaggccaggacagaacccctgagattggtgg

SEQ ID NO: 57023 - DNA, 122 bp, Homo sapiens
tgaatgaagcagccttttctccagccacactggtttgctcggccttagtcccactggatgcggcgagggttgaccggtcaggcccttgctggtggcctgggtagatgtctggagagggggcc

SEQ ID NO: 57024 - DNA, 122 bp, Homo sapiens
gggcgtgaaggctgagccccgctgtctggaggccggaggagagcggctggtgtggcgctccggcgagacccagcgagcccagcctctgccctccgcagttcgggtttgcccgagaacctcgg

SEQ ID NO: 57025 - DNA, 122 bp, Homo sapiens
tctctctctcctccaaacacaactgattctcctcctccatctgaggtcccaggccctggacgctcctctcagccaagacagatgttcatctgcaaggagagtagtgcttgaattcttccact

SEQ ID NO: 57026 - DNA, 122 bp, Homo sapiens
acgcaggtcgcttacccggctgggtaggtcggcggcctggttgccatggcagcggggtcgcgggccggcgccagggaaggccccgaggctgcgggcggccagggctgcccgcggattcccag

SEQ ID NO: 57027 - DNA, 122 bp, Homo sapiens
gacatctcctctccctctctctcagccaggatatgggacctcagtgctcttggcagttcccgggctgtctgtgtgtcctggcctgtggatccactcccttgcctgtgcaggcactttttcta

SEQ ID NO: 57028 - DNA, 122 bp, Homo sapiens
cggaatcggagcccaacgtgtgtaatgccggggctgtgcttacaagatcgtgctccagtccgcatggaaaattactcccaaagacgtggtcggagaggtcgagatctctgagccttggcccc

SEQ ID NO: 57029 - DNA, 122 bp, Homo sapiens
tccagttttaatctttaaaaagaagaagaagcagcaatgcataagctgagtgattccccgcggaatccaaagctaacagagccaataaggcaccttcgagggcatcccagcccagctactga

SEQ ID NO: 57030 - DNA, 122 bp, Homo sapiens
accccgaagagataaggggtagcggcccagccagcaggatctcaggtagttaggtctgagcgcccacttccattcctggagaaggatgtgtgggggaggcggaacgagttccggcggagggc

SEQ ID NO: 57031 - DNA, 122 bp, Homo sapiens
cctggctcggctcgccagcgggctggcaaagaggaaagggcgataccacccggagacctccggcaactttctgcccgcggcagctgctcattcacgcgtttcttataagcccaggagccaat

SEQ ID NO: 57032 - DNA, 122 bp, Homo sapiens
agccttcatgcccggcgctctgcagctgtctgcgggcaatgcacacagccttctccacaacggagcccatctttgcgtcagggacagtttgccggcagtgcctcttggctgcagtaaaacta

SEQ ID NO: 57033 - DNA, 122 bp, Homo sapiens
gccgcgtggggaagagtcgcccagctgcgggagacgggccctacggacctttttttagctcggggtttagaaatcacagatttcaggattcctgcctttggtgcctctcgggttcacgcgtc

SEQ ID NO: 57034 - DNA, 122 bp, Homo sapiens
cctcacggggcccggcggggctcagacaccgattctcacacggaccctcacgggccccggcggggctcagacaccgaggctgacacactgccctgtgcacacctgcctggagccggtggcgg

SEQ ID NO: 57035 - DNA, 122 bp, Homo sapiens
ccagactccttgcggagctcgccgcctgattctaggctggtcactactccgagcctgtgacgtttgcggcagccaggccgtcgacgatgcccaggtattccctgaacccggcttgcgtggga

SEQ ID NO: 57036 - DNA, 122 bp, Homo sapiens
tatctccaggccgcagccgccgccccgcccgccacgaaggccacttccgccgcggcccggcgagcgcgcccccgccacgccctgctgtttagaagcggcctttcttcacatatcgctgtccg

SEQ ID NO: 57037 - DNA, 122 bp, Homo sapiens
tgctacacttctctaacttgcgaggccctggctgctgggctgctcacaggacaggctgtccgtgcctccagcacactgtctaggaggtggagtggtcagctcggagtggcccttttctctgc

SEQ ID NO: 57038 - DNA, 122 bp, Homo sapiens
tccgcggctgaaagacacaacagcgatgatggggccactaaccgatggatgggactgtcacgggccgggacctctgaggaccagcgctgccacggggaaacctccggcccatgtgatccacc

SEQ ID NO: 57039 - DNA, 122 bp, Homo sapiens
aggaggaaactgaagagacatcctcacaagagtctgccgaagaggactagggggcgccaacgttcgatttctacctcagcagcagttggatcttttgaagggagaagacactgcagtgacca

SEQ ID NO: 57040 - DNA, 122 bp, Homo sapiens
ttgacaagaggcaacagcagatggcaaatgtagacagcagctcctcttctaactggaaaacgtccctcatctcggtccattaccaagcgttcaacctggttcccaactctggtaattaggtt

SEQ ID NO: 57041 - DNA, 122 bp, Homo sapiens
gtggcctggggcattcacggagcccagctccaagtgaaggacctccagtgagtccattgacggccccggtgtgctcggtccagggccaggctgtgcccgctggccctccttctgccacccca

SEQ ID NO: 57042 - DNA, 122 bp, Homo sapiens
ctgaggatgactgggacaaagtcatagctgtcaacctcaaggtggcgatctctgaacctgcgacgtttggcccccttagcctggggagggagttggaggagggctgtcaccccagctgatct

SEQ ID NO: 57043 - DNA, 122 bp, Homo sapiens
ttctcctttatacacccatgtatcagcagagctgccctgtaggtaggattcttactcccacgtggccagtgagtagcaagcaaggccccaagtaaggtctttgggtgctgtctgttctttca

SEQ ID NO: 57044 - DNA, 122 bp, Homo sapiens
catcagcactgcacgtcgctctctccagcacaccgcggcctcggcgtcgtcagcactgcacgtcgctctctccagcacaccgcggcctcagcgtcatcagcactgcacgtcgctctctccag

SEQ ID NO: 57045 - DNA, 122 bp, Homo sapiens
ctgcactcttgaggaggggcttgatcttgaagaagagtttcatccagggccagtgcttgacgttcatgaatgagcgaatgttgtactggatgcagaagatggactccctaaaaacaagacat

SEQ ID NO: 57046 - DNA, 122 bp, Homo sapiens
cggcggaagaagaagccggtccggagttctggccgacagcaggcgaggagtgggtagcagcgcctatgtgaagttaggtaggtctgatgtcgtataaagcgcggagagggtgcccgccaatg

SEQ ID NO: 57047 - DNA, 122 bp, Homo sapiens
gtggcaggctcggcgcgtgatggaggagccccttctgcagggctctgtttagagggtgcccgccccacagcctgtggctgctcctactcatgccaggtgaggctcctacacccaccagtggc

SEQ ID NO: 57048 - DNA, 122 bp, Homo sapiens
actccgcccctcttggaatgcggctgagcggtggatgtcccttttcgggcgccgtaggcgcgttcctattggctagctttgttcggcgccaaagcgcggagcggaggccgaggcgagagcct

SEQ ID NO: 57049 - DNA, 122 bp, Homo sapiens
ccgccccgctctagaccccgccccacgccgccatccccgtgcccctcggccccgcccccgcgccccggatatgctgggacagcccgcgcccctagaacgctttgcgtcccgacgcccgcagg

SEQ ID NO: 57050 - DNA, 122 bp, Homo sapiens
cacactcacttctgggctgctcaatcagcagcgcgaggcctcagtctcatcacaggaagccgatactgagaggcagccagaaggataactgacctgtggttaccaaaagtcaaggtccagaa

SEQ ID NO: 57051 - DNA, 122 bp, Homo sapiens
cgggagagcccggacactgctggggcagccatcttctcccgggcggctgtaggtcaaacccgagtgggaagagagaaacgcgcaagggcgcacgcgcgcgttggcgtaaccgctaggttctc

SEQ ID NO: 57052 - DNA, 122 bp, Homo sapiens
tgcgcaggagatgggccaagtgcaaggtcccttgagcgcagctgggcgcacaccgcaggacggcccctttcgcaccggctcgcgagggaggcgctgtgccccccgtgtgcggcttctctcac

SEQ ID NO: 57053 - DNA, 122 bp, Homo sapiens
aaaagatacattgaagtaatttaaaaacacataggaagatgtcatttcttcctatcaaggcgtcctccctttatgttttgttgttatattgggaacgataaaaaaatttttttttcaaccca

SEQ ID NO: 57054 - DNA, 122 bp, Homo sapiens
cccacaccgtgggactcctcccagcctctcaggggcaccgccccctcacttccttggctccgccccattgggatatatttgcatatttctctgaggaaccctgcccaggtgccagccgcaga

SEQ ID NO: 57055 - DNA, 122 bp, Homo sapiens
gacactgggctctgtgagccacaggcatgcttacccacaccctccattaggtttggatcccgacaccacccctctgggagttccttagggcctcacttctaggggggtacccagccccctgg

SEQ ID NO: 57056 - DNA, 122 bp, Homo sapiens
caagtcattctagaatagaacctggttctgggggaggtcctgatggaagcctgtcatggccgtcccatccttgtctgcaggggccggctcagggaccgaagcttaagtcagcattctctgga

SEQ ID NO: 57057 - DNA, 122 bp, Homo sapiens
cccttttgccaaacttccacagaagccaaataaacagtgtagacactccgtcactcgctacggccacggcggccactcggatcacactccgtcactcactgtggccacagtggccactcaga

SEQ ID NO: 57058 - DNA, 122 bp, Homo sapiens
agcaggaggaggagccactggtgggaagggggcggactgaggctgcgtcacctgatgctgcgtcacctgatccagcgtccggagcgccttacagccattttcggtactggtgccatcacaac

SEQ ID NO: 57059 - DNA, 122 bp, Homo sapiens
tcctcttggctgaaccatggtcctcttgatccccaacaagtttgtaatctttaagtttgacggatctccaaatcctccgcttgctgtatcgactctggcttgcctggccatcctcggtcttg

SEQ ID NO: 57060 - DNA, 122 bp, Homo sapiens
gtagcgcagtcccgcgcctgcgccctgggcagttgccggtgagcttgggagaaccgtgggcgctgaggcggtgagtccccgagcggccagagggcgtggccgttccctggggcgcgggcgcg

SEQ ID NO: 57061 - DNA, 122 bp, Homo sapiens
atcatcatcaaggatctttgttattactagtgaggaccagtgacaggaatgctgcctaaacgtgcactctccgacatcccaaagccaatgccagagctcacagtttagtgagcgtcacagcc

SEQ ID NO: 57062 - DNA, 122 bp, Homo sapiens
ctagaagctgtgtgttggtgtaagcagttctcaggcgccgcgatcccccgccgctgccatcggcgatttccagggattctgcggaaagggaaaccaacaagagacacacgcacagttggagg

SEQ ID NO: 57063 - DNA, 122 bp, Homo sapiens
ctttttttattcacaaaatcaaagttagcaacctacgattcctgagcatatgcagctccacgtacaaagtttagctgttgactgggccaagagcttctgggcttgcatgcttccaatcctct

SEQ ID NO: 57064 - DNA, 122 bp, Homo sapiens
ttttgtgactggcttatttcatggagtatcatgtcctcaaggtccatccgtgttgtagcacgtgtcaaaaggtccttccttcctcaggctggatatgggctctttaaaagcctattttctta

SEQ ID NO: 57065 - DNA, 122 bp, Homo sapiens
ctgaacagtttgagctctttttgtaatatactctaaacctgttatttctgtgctaataaacgagatgcagaacccttgaatgttggatgtttttgaatgttggtaattaatataatttactt

SEQ ID NO: 57066 - DNA, 122 bp, Homo sapiens
cgtcgggtccgacgccgggggcagctccaggatctggcctcgtgaacgcgtgcccccaggcgtggccctcgagcgcagcgggtccccagggtcccctccgctgatctccactctggacccgg

SEQ ID NO: 57067 - DNA, 122 bp, Homo sapiens
ggtgttcggccaggaactcgggtgtcagcgtccagggcgcattcctcaccacctcatccacgtagcggcagtgctggactgcgtcatagcgctcattctcgttcatcaccgtgaagcctttg

SEQ ID NO: 57068 - DNA, 122 bp, Homo sapiens
gattctgatgtgctgcaggtatggaaaacactgcaccatgacaaagggcttttgagcgcacgtctgaagatccggcctctaacttcagctatgctactaacagcccttctgatgcagagctg

SEQ ID NO: 57069 - DNA, 122 bp, Homo sapiens
caccgccgcgcccgccgtgccgggcctgagctggagccgggcgtgagtcgcagcaggagccgcagccggagtcacagccgcagccagagccgcagccaaagcctcagagagcaggagttgga

SEQ ID NO: 57070 - DNA, 122 bp, Homo sapiens
taccacttcaggaatctgcagagagtccccagtagcaagaaggctctcttgcgccacatgcgccccctcagccttggactttccatcctccataactgtaagaaataataatacatttcttt

SEQ ID NO: 57071 - DNA, 122 bp, Homo sapiens
cagccacgcacggatgggcgcggggctgcaggtgcatctcggggcggatttctttctcagcgctcggagcgcagggcgcccggcgtgtgcgctccctgccggaggcgcggggctggcgcgca

SEQ ID NO: 57072 - DNA, 122 bp, Homo sapiens
atcaaatcattcaggcctttgaaataaactcaatcacgggagaaattagatttaaaaaggcgttggattttgaggaaattcaatcttatcacatggaagttgaggcctcagacggtgggggt

SEQ ID NO: 57073 - DNA, 122 bp, Homo sapiens
gctccctccggggtggccccgagcccacttagagctggaaaccaggactgtggggtggcccggggctgggcggttgttgttccaatctggctgtgcccagggccacgctgtgccctccctgg

SEQ ID NO: 57074 - DNA, 122 bp, Homo sapiens
gctttgaaggtgacagcgggccaaggccaggactctgggtggaggaggccccttctctgccggccccgcctctgctgggagcagccacagcctgtggctggggtgctgggatttcttcctgg

SEQ ID NO: 57075 - DNA, 122 bp, Homo sapiens
cgcgggtgggaaccggggctgcgtgcggcccttgcaggttccgggtgggtgtggactcgacgggccccggactcggagcagccggcctgcgccgctggcctcgggcagtgaggggcttagca

SEQ ID NO: 57076 - DNA, 122 bp, Homo sapiens
aatgaaataatggatgtgaaaaggcctcggcgaacaagtgcaagggataaggcctgtctacgtgaatcactgttgtgaactggttacccagggcccctgtccaacggtttccgtcccaatcc

SEQ ID NO: 57077 - DNA, 122 bp, Homo sapiens
attctcttagttcttttccctcctcatccctgagaggacaggggccttttaacacaataacggtgtgatcttatccacgtttcatgcagaagagtctgacagacctaatacaacgcacgctg

SEQ ID NO: 57078 - DNA, 122 bp, Homo sapiens
tctggaagaatctcccaccagcctgcacagtgggaggacagggcgggacctcgggaagttcgcgttgtttgcagcggggaggatcccggcctctcctgtccctgggattcaatctgtgagat

SEQ ID NO: 57079 - DNA, 122 bp, Homo sapiens
ctgccctgtgttggctgctgtgccatggggtgttaggagaagggcacaggtgtcggctcccggctgcttcaggtcctctctgtccagcgcttccttgaagcccttgggaaatgctgtggagc

SEQ ID NO: 57080 - DNA, 122 bp, Homo sapiens
aggttgactgagtgcccgagcgtccccgccgccccgccgcccttcctggccgccgggctgcggtccagcccccggcctcgctatcctagttctctgcttggggtcctgcttctgctcttgcc

SEQ ID NO: 57081 - DNA, 122 bp, Homo sapiens
gatggccctacgttattgtctgaagctcccttctcctccccagggtggaagtgataatgccgggaatccgggaatcccggggaggtgcaggaagacagcgagctcgaggcagtggggtgcga

SEQ ID NO: 57082 - DNA, 122 bp, Homo sapiens
ctctctgatgaaagtgaactccggagctctgatgaaagttaccgtcaacttcatcacatccgtacagcttcttacctatgtggtttcttggatgtctatacaagtctgatctctgagagaag

SEQ ID NO: 57083 - DNA, 122 bp, Homo sapiens
ctgcccgtctctgattgggcagcttctcttgccccggttccgcccatttttcttgcctagcgagtgacgggcccacggcagaggggtggggcggggaggctggagcgagagtagtggcgggg

SEQ ID NO: 57084 - DNA, 122 bp, Homo sapiens
cagtggctcatgcctgtaattccagcactttgggagtctgaggcaggaggattgcctgaacgcagaaatttgagaccagcagggcaacattgtgagacctcatctctacaaaaagtaaaaaa

SEQ ID NO: 57085 - DNA, 122 bp, Homo sapiens
agtcactctcccactctgacctcaattttcacatctctaaaaggagactgctagactagacggtgagtgaagtcctgctgagccctccgagttcattctcccttgtccagtcagtccttccc

SEQ ID NO: 57086 - DNA, 122 bp, Homo sapiens
gattcctgagtatgtcaccatgttgcacgcgcgcagcacacatatgcacactcgcgcacacgcacacacatgcactcatacagacaggcggccggctgtcagcagacagcgcggttcccggc

SEQ ID NO: 57087 - DNA, 122 bp, Homo sapiens
tctctactctggaaccttgagggaccacgccccactagagtacttgaggctagcgcgccccgggccttctgggagttgtagttttgttgctcacccaccaacagatggggtatagggctctg

SEQ ID NO: 57088 - DNA, 122 bp, Homo sapiens
tcatcagtccatgcccttaactccgtccgccttctctgaactccttgggaatgcatcggtcgtgagatcagcctgggctctgctgagagaggcccacagtatcgggcctctcagtgaatctt

SEQ ID NO: 57089 - DNA, 122 bp, Homo sapiens
agggagtggcacgggtgggaaccccggctgcgtgcagcgcttgcgggctagctagagttccgggtgggcgtgggcttggcggctctgcactccgagcggtctgccgaccccgcgggccccag

SEQ ID NO: 57090 - DNA, 122 bp, Homo sapiens
cccacggtagaaggagcaagggaactccccagggtctccattatggggcactaatcccatcgagaggcgccgccccgacctcctgtcctggcagagttcttgccttgtggtgaggatttcaa

SEQ ID NO: 57091 - DNA, 122 bp, Homo sapiens
ccctgcacatggcttctgggaagacattctcattcgttccatttcactccagagcaaagacgagctgacctgaaataagacctgacccagaacttctctagggcagaatactgataaacaca

SEQ ID NO: 57092 - DNA, 122 bp, Homo sapiens
tgttgtaagagaataatgtgctcttggcagcctggatgttgttaaaacaccccctggcaccgcacactcagagcctcccagcccttcgctggcccaagggccaccaggcagcggggagcaaa

SEQ ID NO: 57093 - DNA, 122 bp, Homo sapiens
atctgagaagtatgcaaatcgataacatgcactgaaaactgcagggcctgcagctggcatcggtcaacagaaagggcccagttcttctccacgacaatgcccggccacacgtggcacaacca

SEQ ID NO: 57094 - DNA, 122 bp, Homo sapiens
acggctgggagggcggtcaaataaaaacctcatcccggtgttttccctactagtttttcacggggaaaaggagtttgtgcacatctgacaatttcccacgcatgccctgcagaggccggcga

SEQ ID NO: 57095 - DNA, 122 bp, Homo sapiens
caagcactgaggccgctgctgcaccggccatcctgagaccctagtcgaccttccggcctccgcatccccgccccgcactaggacccctgcagacgatcaggcggcagccggggtgactttct

SEQ ID NO: 57096 - DNA, 122 bp, Homo sapiens
gagcggcgcgcccagccggtggctaccattacctgagccccgggcggcgggaccccggtccgccccgcacccccgccgcggccagcccttcccggcactcacccgtcacgcgaatggactcc

SEQ ID NO: 57097 - DNA, 122 bp, Homo sapiens
aagaaagtctgcaacgcaggagtagcgctggggtagtgcacgtgaacacccaaattaattcgtccacatcgcccaaaagtcccaaagggagagccaaccccgtgcccctgccaccccagctc

SEQ ID NO: 57098 - DNA, 122 bp, Homo sapiens
cccctttgggcggattttaccaccctcctcctactgtaccagctttgaccgacacgtggacgtggttgcgggactcgtagtagacccagtcgaagccggcttccactgcgaggcgcgccagc

SEQ ID NO: 57099 - DNA, 122 bp, Homo sapiens
agatctgatcgagcagagccaggttctagcaggtgctacctaaatgagttgattagagcacgctttctggaaccaaaataaaaaatgaattgttcctattgttttaaagttagttgtaatga

SEQ ID NO: 57100 - DNA, 122 bp, Homo sapiens
catgtcccctgccctatccatccatacctgatgtaaatatacataggttcaaaagcttctcggccagatgctggctcaatgcagcctgaacctttgccccgcaggaagactttggcacctgt

SEQ ID NO: 57101 - DNA, 122 bp, Homo sapiens
gaagttggctaggatgggagcccactggtagcccaggaagtcaaagatctgccgctccagcgcagccacctgtggaagagacaggctgaggccactgtcacccccctgaaagggaaggacag

SEQ ID NO: 57102 - DNA, 122 bp, Homo sapiens
acacctcctgtagcgaaactttccttctcaaaacccttcccgacccgtcctcccgcctcgcgctgtttcaggtcctcaccagcgagttggactctcgccctgggctcctcatcggcgcctgg

SEQ ID NO: 57103 - DNA, 122 bp, Homo sapiens
aatgtcaccacctcacgccctgttccaggtggctgagtccgaatccagtaaccaccacctcgttttggttaatctcaggctcgggtgttgtagcaacattggaaatgggaggggtttacgaa

SEQ ID NO: 57104 - DNA, 122 bp, Homo sapiens
ccaaagcaaaggtccctgcatgagaagatcctggaggagatcaagcaggagcggaggctgcgcccggtgcggggcgagggctgggctgcccgcggtgagtgaggggatggcaggagaagaga

SEQ ID NO: 57105 - DNA, 122 bp, Homo sapiens
gaggtgcggcgtccagaacccggctcctgcagaggctctgggtggcagcagccctgttaccgcttagatggcgcgcaggacagagccccccgacgggggctggggatgggtggtggtgctct

SEQ ID NO: 57106 - DNA, 122 bp, Homo sapiens
accacttaaatgtagttaatgacagatggtttgaggtttaaaagtcttctggagaaagcccgccagagaacattccctttgaagccccatgtaaaaatacgtgtgggagagaaagtgttttc

SEQ ID NO: 57107 - DNA, 122 bp, Homo sapiens
gcgggtctggcagaaagtaagagggaggcgaagttcaagatcccggggatgagcaccgagcgctggcagatcactagtcacgttagaggggcagctgtgctgagaggcaaattcccccagga

SEQ ID NO: 57108 - DNA, 122 bp, Homo sapiens
ctggctctcgctctctcaggaggctcagcctgaccgcgggcttctcaggagcccattccccgggctgctgtcgctccatgcctcaaggtttgaacacatagctggagtggccccttactttt

SEQ ID NO: 57109 - DNA, 122 bp, Homo sapiens
tcaagagccccgtttcgagccacacacagcctgcccaacctgggtagcggatgaagaacccgggggctggacccggcctagctctggacccggctgccaggggctcgcagtcttcccgcgct

SEQ ID NO: 57110 - DNA, 122 bp, Homo sapiens
tcagctccatctttccccccgacacagcactagatgtccagcctcctgagtgaacacactcggggaagaggtcacactcctctgtccactgtcctgagcacctcagagcctgcattgtttct

SEQ ID NO: 57111 - DNA, 122 bp, Homo sapiens
cagacgcccctcaccctcctctagcggccagcacccctcgggctggctggcacactccgtcgcatgcctgcaaacacgtgtgtgtgttgcccatatgtgggagtgagggtcgcccgggggcc

SEQ ID NO: 57112 - DNA, 122 bp, Homo sapiens
gtgagccccgcccccgccacccaatttgggagcttcgaatgcccgcccgagccttgaaggcgaaccacctgagggttacctgtgtctccgatgatgatatacttgaagagataagcataagt

SEQ ID NO: 57113 - DNA, 122 bp, Homo sapiens
cattactatagttttgagtttctgctctgaaatgatgcaatcttctactcaggacggcttcgtaaatatctttcccaaatgatggagaaacagaattcaacttcacttctttcattcctcaa

SEQ ID NO: 57114 - DNA, 122 bp, Homo sapiens
agcatccaagggtcatgcctagaagccagagcagccctcagctgacagccagcaagaaaacgggccttcagacctatggttacaagaaactgaaagccactaacagccatgtgagctcggaa

SEQ ID NO: 57115 - DNA, 122 bp, Homo sapiens
cgtgccacgcgcggaggggactcttaacgtgaagcgctgggtgactcagccgcgtggccgcgcggtccggggcggggggcgcgcgccgctgcggcacagccggtcccggctgcggcttctgg

SEQ ID NO: 57116 - DNA, 122 bp, Homo sapiens
ccgcccgccagtccggagatttgctccgaaagcaacttctaggaaagggagccgtcgccgcgcctcacctgccagctttcactgtatccccccaagggaaaaattagcccctgttggccttt

SEQ ID NO: 57117 - DNA, 122 bp, Homo sapiens
gcggggccggctgcccatagcctcgacggcgctcttgggcctagcagaggacgtagggagcgcgggcagcgaagtcctttttgaggtaacaggtgtcggtgctaggcgaggcgggttggggc

SEQ ID NO: 57118 - DNA, 122 bp, Homo sapiens
aaattgttccgtccctacacctactgctcattaaagcagtggccggggcctcaccgtacacgttggacaggacttgcccctgtaaaactacaacggcagagaagaagggagggaacaagata

SEQ ID NO: 57119 - DNA, 122 bp, Homo sapiens
ttctttctcccctccccagtactggctttggaaactcttggataaaaattaccctagaaccgaagagaagaaggaacccatagataggcaaagattcttggacattcccctgagaaataaaa

SEQ ID NO: 57120 - DNA, 122 bp, Homo sapiens
agactttctcagctcacctgctgtgcacgcagggccttgagttcctgctccaggcgagtccgcagacgcagctccagctgctcccgcttctcacaggctgcctgcagctgcccgagcgcctg

SEQ ID NO: 57121 - DNA, 122 bp, Homo sapiens
gagaacaatctccgcttcaagagattgtcttaaatggaacatgcaaagcatcactgatatcgtttaccaaccacacatagcagctgtctttccccactcccctgttgtttccactgcctcat

SEQ ID NO: 57122 - DNA, 122 bp, Homo sapiens
ctggcatctttaggacagaactgcatgttagtaaactttcacagcttcccaaggccctggcgtggtgcagagggactttaggtgttgcaagttggctctgcccatcacctgctagatttgga

SEQ ID NO: 57123 - DNA, 122 bp, Homo sapiens
tgaatacttacttagaaaagcattgtgtcctgctcaagtgttgcttaaatagaatttatacggtagtaggtcaccttgaaaaaatatggcagatcgtgaaggaactgagaaataggttgagc

SEQ ID NO: 57124 - DNA, 122 bp, Homo sapiens
caggggcccactgggtcactggtactggttgggggaggacagcgtgttgcagcggctgtgcgacatgtcctcgtacaccacacatgccgccgaattcttatcccgccacgagcacagtttct

SEQ ID NO: 57125 - DNA, 122 bp, Homo sapiens
gagaagtgaggctggcaatccttatcacttgcctcccctgactgggtacaaggctctgcccggacccatttcaccaggcccacaagcgagaaatcagagtggggaggctgaagggaggtgac

SEQ ID NO: 57126 - DNA, 122 bp, Homo sapiens
gacctgggtgcctaagccctacctattgttcagagatccctgcccaccgctgctcaccggcgctgcctcacctgctccaggctctcgatgtctgcccggaagcctgacagcaggggcacctc

SEQ ID NO: 57127 - DNA, 122 bp, Homo sapiens
atgtccctgaagacgagtggggagagcagaccacccgctgattccaattccctaggcggccgcggcgagctgcggcgtctctgtgccccggcctgcccctatcccgcctgcgccccgccccc

SEQ ID NO: 57128 - DNA, 122 bp, Homo sapiens
gaagggatgggaagggaggcgatcgataactccggtgtgccgctgactgttggattggctcgaacttctcccgccaggcctaacctactcccgcgcactcctgggcccgcccagccgccatc

SEQ ID NO: 57129 - DNA, 122 bp, Homo sapiens
tcagccagggctgtgttgtcatctggaggctcaacgggggtggcatctgcttgcaactcacgcaggcgttggcggaattcagcagcttgcggccgggggaccaagggtcctgctcagttcct

SEQ ID NO: 57130 - DNA, 122 bp, Homo sapiens
ccatgacctccatggctgagtccaccccatctctgcagtgctggtagaagaggcaccgcccggcctgagtcctggcgtctccgttcgcagcctggagaagcgctttcctggaagcccgcagc

SEQ ID NO: 57131 - DNA, 122 bp, Homo sapiens
gaaaaagctttctccttttctaagagtccatgggcgccgccatgttgctgtacggaaaaacgtttccagggcgagttgagcgttcagggcactcctcggcgctcaagctgcccacaggtctt

SEQ ID NO: 57132 - DNA, 122 bp, Homo sapiens
gcgtctgagttcggggcatccacactggcacgctgttttgctcggagctgggacataacacgtgggctgtgtgagcgctcttgggggctggaaacccaaggggccgatcaagggttcttgat

SEQ ID NO: 57133 - DNA, 122 bp, Homo sapiens
ggatccagagattagaatgtggacattttgggggagccattctgcctaccacagttgttgcgggtgtcaccttcacttctcttttctatcagattctctgtctaaccactttgttatagaat

SEQ ID NO: 57134 - DNA, 122 bp, Homo sapiens
ggtgcacccacaacatggataccccaaggtaggtgagggccaaaaacaaggctgcagggccgggtgcagtgactcacgcctgtaaccccaacactttagggggctgagatgggaggactgct

SEQ ID NO: 57135 - DNA, 122 bp, Homo sapiens
tccctcccagggctttcatttctctatttgtataatggcaagtttatgttctatgcttttcgaagccccttccagctcaggtcgtctggatggccaccatttagacagtgtttttcagaggg

SEQ ID NO: 57136 - DNA, 122 bp, Homo sapiens
cgagcatcgttctgagatcagtggccacagggaataattctgaaattggcatcacatctacgcaagataacaacctggaggtcttatttttatagaatatcaagaacaaaatcatccaaaag

SEQ ID NO: 57137 - DNA, 122 bp, Homo sapiens
tcagactggataggtttgtacaggtttgtgagaggagacagacgcaactacaaagaaatacgttcagaaacggaaaggactagaaagacaaaaaactagggaacagggtaggcagggatctc

SEQ ID NO: 57138 - DNA, 122 bp, Homo sapiens
caggtcatctttgaggtgctggaggagtatgactggacgtcctttgtagccgtgaccactcgtgcccctggccaccgggccttcctgtcctacattgaggtgctgactgacggtagtctggt

SEQ ID NO: 57139 - DNA, 122 bp, Homo sapiens
tccatcactgcctcctgccatgccagagtcgaaaacctgagctccaggctcggcgtttcccggagtcacatggactgcaatcagcaggtccctttgtccggcggcctttgcaggaaatgtgg

SEQ ID NO: 57140 - DNA, 122 bp, Homo sapiens
aagttctgaatcctatccatggttaactgactgcagaagagtgagttggagaattaaacacgaggggcctctctgtccaacacccctggacctgccaaggttacagtgatgtggctgtgtac

SEQ ID NO: 57141 - DNA, 122 bp, Homo sapiens
gtgtggggataattggggataatttggggggagggtatgtgaagggtgtttaaagccaatcgattttgtacatgtttgaagatgctgctgtgcttcctcagcccgatggagggggccgagga

SEQ ID NO: 57142 - DNA, 122 bp, Homo sapiens
gtgggtctcggtcttgcctccgcgtgggccgtacaggacaagggccagagccttgcaacccgacccacctgccaggggtggtctcccagcatcccggcagagggcgctgtgggacagcgttg

SEQ ID NO: 57143 - DNA, 122 bp, Homo sapiens
gtgggggcccagaggcctctgcagcatctccccggggtcggggttggggcagcaggtgcccgccttgggcagcccggttcacgctgtgtggccactctccctggggtccaaagtcccttccc

SEQ ID NO: 57144 - DNA, 122 bp, Homo sapiens
caaggaacaggctcagcagcctgaaagcctcgcaggacgcccctcccctgtccccgcacgcgtctatttagggcccagcccgggcgcccaggggattctgggacttgtagtccctccccgca

SEQ ID NO: 57145 - DNA, 122 bp, Homo sapiens
gttgaccaggaaggccaacccatctccttaaagggcccttcactggtgcgtgggtgaatgcggtccccggcctcctgggacctcgaggaacacaggacgcagccggtagtacggccagctca

SEQ ID NO: 57146 - DNA, 122 bp, Homo sapiens
aaaggtgcaggaagaaaggcaggctcttcctccagagcctgaagccctgcactaggcgtgcggtgcctcaggagcaggagcctcacggcccccaacagaaattctgatgcccagggagaccc

SEQ ID NO: 57147 - DNA, 122 bp, Homo sapiens
gacgcatgtgcagaacggcgtgtggaaggccaggcaattgcctatagggtaaactggggacgttgtgctgggggtgtacagttttaggcattctgttgtccagttttgtgcctgttgagcag

SEQ ID NO: 57148 - DNA, 122 bp, Homo sapiens
ctaagagggctgttttggtttatatttttaaatgttagcctgtgagatttcttaacacttcgtgcatggcctctttggaaactatgtaataggaatgccaggggagttgagaaagacagtgt

SEQ ID NO: 57149 - DNA, 122 bp, Homo sapiens
ctgttgggatgctggctgcagtggggcgccccaagcccaggtcccctctgtcttctctttcgactttgcagctgtacttgttttgctcctctacccgcaggagctgacatggacccaaatcc

SEQ ID NO: 57150 - DNA, 122 bp, Homo sapiens
gcgttgtaagcccatgtgtccaaacgaagggaaagagtagtcattcactccgcggggcagcgtctttcaaccccaacggagaccgcacgcgcagcgccccacattacgcacgcgccctggct

SEQ ID NO: 57151 - DNA, 122 bp, Homo sapiens
cagtcattacattggggacctttacgaggcacgtgttagttcccaggcagcactgctaggcggtctgtgccagaaatttcacgtactgcccgcgggcttcaaaatggtcagcgggccggttg

SEQ ID NO: 57152 - DNA, 122 bp, Homo sapiens
ggaactccataaatatttaataaataaatgaaggaatgagagaaataagtgtctgacctgcgagtagcggtcagaaagcccaagcactttgccgagcggtcaatgctggaccagagtagact

SEQ ID NO: 57153 - DNA, 122 bp, Homo sapiens
ttgtttgttttttcctggatatcaggaaggatggaaatggggaaggctacacagggattacggcccaatcttaacaagctttttctgctttgagaacacctgtagggttaaaggtggaggct

SEQ ID NO: 57154 - DNA, 122 bp, Homo sapiens
ctggagcacttgttctgagagagagatttatgtgtgggagaagaagctaatatcgacaggcgatgagttaggagagtaatacttcagctaccacgcagaaactctctgaccgtgaggaaagc

SEQ ID NO: 57155 - DNA, 122 bp, Homo sapiens
cccaggttatgcacacaggaacgaacaagtttcaggagctaaccagcccatgtgcaggcgcgtcccaaccctaaaagcttccagcgcactttccctttccccgcagtctaatcaggggaaag

SEQ ID NO: 57156 - DNA, 122 bp, Homo sapiens
tggctcctggtggtgacaaaacatgctttctgctcctcagggtggcctttgtgattcctccggtggtggcagcacccccgtccctacgggtgccgcggccgccacccctgtacagccacaga

SEQ ID NO: 57157 - DNA, 122 bp, Homo sapiens
tatccctgccatgtgccacacggcactaactgatgataaataaattccctgtgcgctgcccggacagactctacggtcagaaacacgaaaagcagctagcacagatcaaagataaagaagac

SEQ ID NO: 57158 - DNA, 122 bp, Homo sapiens
agagcgcacacgagtttactcctgtccaagtattctgataagcttcctctactgccctctcgtggccacagtcctcagtggtataaatctaaaaaacaacaaaaatcactgcgaatacctaa

SEQ ID NO: 57159 - DNA, 122 bp, Homo sapiens
ggtctccaactgataaaaaatggaacggagtagccaagtaagaccgaaggcaactatgaacgcatggcatccaaagggcagaaggaaaaatctggctggaggtgagataagtgtaagggatg

SEQ ID NO: 57160 - DNA, 122 bp, Homo sapiens
agagagaacgctgtgacggtgggcttcccgggaacacccacctgctgccgctccgtgccacggactttgaggtgctcagcaccaagtttgagatgcaagacctgtgctttctgggacccttt

SEQ ID NO: 57161 - DNA, 122 bp, Homo sapiens
gcgtcccccgagcttggtacggctcagcccgtctcccccgaagccgcgcgcccgcgcccgcgcccctcagtcggtggagcccgcagccccccttgtggcccgcggcagctccccgcccgctc

SEQ ID NO: 57162 - DNA, 122 bp, Homo sapiens
agattgtgaggattattataccatcccacacggacacaggaactattctaccatcccacacggacacaggaactattacaccatcccatacagacacaggaactattccaccgtcccacgcg

SEQ ID NO: 57163 - DNA, 122 bp, Homo sapiens
cgttatttacctgctcagaagaagttcctactataatgtatacagcatgggggcaaactccgtgttctgacttctctaatctggccccaccatgtccacaccaacagatcaaagacccaaaa

SEQ ID NO: 57164 - DNA, 122 bp, Homo sapiens
tctcagctcactgcaacctccacccccgacctaagcctactgaattagtgtctacaggcacgcactaccacacctggctcacttttgtattttttgtacacatggggtttcacaatgttgcc

SEQ ID NO: 57165 - DNA, 122 bp, Homo sapiens
gtctcttccacctgctttgaaaccagcgcggagatcctgccccgctatccgcttcaggcgcgacatgttcaaagtcctaggtccagaagctgcagccccacccgtgacgcttaaaggtggcg

SEQ ID NO: 57166 - DNA, 122 bp, Homo sapiens
gaggctgagggagagaggtggccctgccgggtcacactgacgatggaggccgggtggagccggagcccaggccttccagctctttcccagcctcccttgcaaacgtgggggtctcagggccc

SEQ ID NO: 57167 - DNA, 122 bp, Homo sapiens
cggtccggtcagggctccatgggaatgctgaccacacttcctctcaggggcagacctgcacggctgctcctccccagtgccgttcttctcttactgcagagactatgtcagcacgttatgat

SEQ ID NO: 57168 - DNA, 122 bp, Homo sapiens
tgctgctggtgggaagggtgggatgtgcctgcttggtaaattgtggggcgccaccaaacgcggggggcccccatttggtgccaggcgaggcctggtgcgtgggcaggagagtcaggatgggc

SEQ ID NO: 57169 - DNA, 122 bp, Homo sapiens
taagggtcttgctactccaaatgtggtccacagcccagcaacattattatgggccacgggcgagcttattagaaacgcagggtctcaggcctcactccagatgtaccgaatccgaatctgca

SEQ ID NO: 57170 - DNA, 122 bp, Homo sapiens
ctatcacctaatggacctgggccacccgcaccactccatccgctgcatggctgttgtgtacgaccgcgtgtggtgtggctacaagaacaaggtgcacgtcatccagcccaagaccatgcaga

SEQ ID NO: 57171 - DNA, 122 bp, Homo sapiens
gctgagtctgtgcagcccagctcctgattcatgagatactcagcctcaaagctccagtgacgagtcaccctccctcagaccaataacctctggccaggtctgaaaaagggaagccaacccag

SEQ ID NO: 57172 - DNA, 122 bp, Homo sapiens
accgcccatctccccagacccgcccaccccctgctgcgaatccctgacgttctagcccggcgaaggtcctcttaaattaggaaacaatagctatttaagaagaagcgcaaataacccgcgct

SEQ ID NO: 57173 - DNA, 122 bp, Homo sapiens
ggactccggattcagaggcggtgtataaaacatacgctgcttcgggaactgcgagggggacgcggtgggagacatccggggacagaaggcctgaggagtctgccgctccaggcagggtcgtt

SEQ ID NO: 57174 - DNA, 122 bp, Homo sapiens
gtatctgtgttatttctgattccagtctcctgtgtgtggggtgtccagcgactcatcgcacgtctctgggctcctctgcgtgtgagttgcttacttgttctttgcccatctctgtcctggga

SEQ ID NO: 57175 - DNA, 122 bp, Homo sapiens
caaggctggtttttgaaaattcgacacttactatccaatttttttgcgacgtcagcacctcgggctcaggggggagggggtaaaattttggaggaaaaaaaataaaacaaccaaccaggacc

SEQ ID NO: 57176 - DNA, 122 bp, Homo sapiens
taatacaattccagaaggcttttcagtttataatctttcatatagattttattcctttcacgcacacaggaaaataggtaagtggggtcacaatgtcttcattttccttctgtctttttttt

SEQ ID NO: 57177 - DNA, 122 bp, Homo sapiens
gggaggggccggcggcgggggcggacccctggcggtcctcctggctggggtccgcgcgctcgcggcagctccccgtggaggtcactgtccgtgccagtccctcccgctgtcccgccctctcc

SEQ ID NO: 57178 - DNA, 122 bp, Homo sapiens
acaaagtcccctcttgtccttaccatggttgctggtgaccgggactcctctgttgcaggtcgcctcctttgcactccaccacccaaagatgacctggcctgctctagcccccgggatttgta

SEQ ID NO: 57179 - DNA, 122 bp, Homo sapiens
actgtgtatggaaaacaacagcagtcgctttaacagcaaaagcaacaaacacacaccaaacgggatcatccctgtgctcccaggtggtgggaggcagatacgggagggaggacacattttcc

SEQ ID NO: 57180 - DNA, 122 bp, Homo sapiens
gccacctgcagaccaaccttgcgccaggcttccggaaatgggagggcgggcttccggaaacggcggccaatgggaaacgtgatcagatgttactaggcagacagtccgtttccaggcaacac

SEQ ID NO: 57181 - DNA, 122 bp, Homo sapiens
gattatgtgacttaatcttcccatcagggggatgtgagtgattggaatgctagtggctggcggtgggtttgtttcttaaaggctatatgttgtacttcactgaaccacctgtacagctaagc

SEQ ID NO: 57182 - DNA, 122 bp, Homo sapiens
aacagcgggctcccttccctggctgtgggattattaatgggtgttattttgctaatagtccgcccctctaatggggactcttcccaccggcctctcctctttatagccccacacgggatcat

SEQ ID NO: 57183 - DNA, 122 bp, Homo sapiens
ccagatcagaaaacgaattctgtctgtggcccccacagctgtgaaatggagtcgctgactcgccatgctcgtgcacgtgcttagtgcccactgcagaaggctgctttgaatgaaagctagtg

SEQ ID NO: 57184 - DNA, 122 bp, Homo sapiens
ttaataacttctccatgttgtgttaggattatattagatagccaagtaaatcgcatagtacgttggtgctgtagatgtttaataaattacagttatgattattaattagaaagtggtcaaca

SEQ ID NO: 57185 - DNA, 122 bp, Homo sapiens
tggaaatggccagcttccacacaccagagaggccttcacatatgttaaagcatgaggctgcgaatttgcgcctgcaaattcaaacctcctagtttattttttaaattaagccttttattttt

SEQ ID NO: 57186 - DNA, 122 bp, Homo sapiens
gtcgactgtgactcttctctaattgaagcttcagggaactttcccaccagggactggaaccgtttctttgaatgtggaaatcccctgccatttgctgaggtggggtttcaacccctgaagct

SEQ ID NO: 57187 - DNA, 122 bp, Homo sapiens
ccgatacgcgccttggggtccgggtcggctttccccgggacccctggccggaaactgagccgttcacttccgccaccagccggaagttttctgtcactggacgccaaggagttttcggtggc

SEQ ID NO: 57188 - DNA, 122 bp, Homo sapiens
gtgtggcacagtggagtgattaagagcactggctttagtgtaggacactctgagttctgccgagggaatttatcattaccttttcattttttttttttttttttttttttttgagacagagg

SEQ ID NO: 57189 - DNA, 122 bp, Homo sapiens
gaatatgagaaatataaaagccagtattgattttgggttgttgaagaagcgtatttgtaacgtactggtactaaaggcttattgagaatcaaagatattgaaaaaaatatatcaaaggaatc

SEQ ID NO: 57190 - DNA, 122 bp, Homo sapiens
gagacaagatggagacggccgcggccacgtgctacgcctgcaagctcttccgcaggaacacgcagctgctggagctgaccaccaagaggatcgaggagcagagcctgcacgacgtcctgttc

SEQ ID NO: 57191 - DNA, 122 bp, Homo sapiens
aagtgtgaagagagaggcgcgggcggaagcggcgctggcgggccacgggttccaggtgagcgcgggcttggcaagccccgcactaggcgccgccggccggcacttgctgggcttgatcggag

SEQ ID NO: 57192 - DNA, 122 bp, Homo sapiens
ggttggccgggaggtgccggctgcacaacggcgcccacgtgacccaggtgcagccccaggcgcgcccaagggcagctcgccttagagaaggacctaaaaccccgtctggggcacagaggagc

SEQ ID NO: 57193 - DNA, 122 bp, Homo sapiens
ccacaagattcagaggttgtgggggcgacctttgggatgagtcttcccactccagtatggcggtgttttcctttgtggtgagcccagggagaagagatcaactttgctgacctacccaattt

SEQ ID NO: 57194 - DNA, 122 bp, Homo sapiens
aatctctacagaaccttcccctttgcttcctgactttgtttcaaattcctctaccaggcacgcagaagcttagcccacagctctcctcttgcctccccacctcacatgccttggctcacctg

SEQ ID NO: 57195 - DNA, 122 bp, Homo sapiens
agcaggtaggacatgggagctacagtctctttgtcagaacacaaagcattcatacactcccgagcagggagagctggaccaggagcgcccctccgcgctgcccttgccagaacgccagtgga

SEQ ID NO: 57196 - DNA, 122 bp, Homo sapiens
ctcgcagggaactcatctcttgctcagggtttccgtgtttggaatccagttagatgtctgcgggggatctccaaggctctcattccatgaaggcatttttatccactctgggggagatgttg

SEQ ID NO: 57197 - DNA, 122 bp, Homo sapiens
acacatgtgccagcccagagcctcttcctgtccgcaccggtcggtgacgccaggcgcagacgccgagagatgacgtataccccacgtaccgcgcatgctcaaggacgagcctgccttgagca

SEQ ID NO: 57198 - DNA, 122 bp, Homo sapiens
gccctcgtgactcagttgatatttccactctgcatcaccgcgtgtatattgtactgagatcgcggtggcctcgccaccagacacagagggcagaggagagagagagagagagaaagagagga

SEQ ID NO: 57199 - DNA, 122 bp, Homo sapiens
gtggttggaacatggtgggcacacgctgggtgagcgtggagtatctggaggtgaggctagcgttggtgggatcctggtaatcccgctaggacaccgggtcatcctccgtcattagatgatgg

SEQ ID NO: 57200 - DNA, 122 bp, Homo sapiens
tggaaagcaacattttccttgaatttcctggtttggtgttttgttgatctgtaagtcgctcgagtccagttgaattttaaacgcggctctttgtttccgatttttccttttgctcgtggaca

SEQ ID NO: 57201 - DNA, 122 bp, Homo sapiens
accccttccccattctgcctgcttactctccagtctccgagctgggagagacatgaagaacgatctggatctgacccaatctgagcacctgaggatttagcctgagccctgctcttcagctt

SEQ ID NO: 57202 - DNA, 122 bp, Homo sapiens
cttcttacccttggcatggactgccagaacctccagtctctatccctcttcaatgcttctcgcagctaccacaggtgggcagcaagccacggggggcgtggggagcataaactcatcttgga

SEQ ID NO: 57203 - DNA, 122 bp, Homo sapiens
ggcaaggtgggaatcttaggaaggaagtgattccggttcttgaaaaagagaaccggattccgtcaagtagaatcggtatgaattgtacccatctctaggaaacatcaattccagaagggtga

SEQ ID NO: 57204 - DNA, 122 bp, Homo sapiens
gccgggtgagcactgaggggagggaggctcgggtcccctctccccacctcggcccgaccccgcccctcctggtctgcacacgttgggtctgagcactcaggtgaagtctcttcctcgggctg

SEQ ID NO: 57205 - DNA, 122 bp, Homo sapiens
gcagcgggaaggagttcgggctcagggggcggggggacacggagcgatgcccgcgcaggccgtaggggcggataaaaagccgtagcgccatggctcacgcctgtaatcccagcactttggga

SEQ ID NO: 57206 - DNA, 122 bp, Homo sapiens
acctcacatccgtttgtggctgccgagtgcttcctgggaattgtagtttctaagtggaaccgcccctccccgccctttcctgtccactctggtcccctcgttctaggagctttattttactc

SEQ ID NO: 57207 - DNA, 122 bp, Homo sapiens
actgttcttaaccaaacaggcaggaacttctatgggctttagcaatcgcttctgaaccagcgcgacaatactcctctgacctcgcgcaagaaggccaccttctccctcccagaagagtcccg

SEQ ID NO: 57208 - DNA, 122 bp, Homo sapiens
cgggcagcgccgccaccatgttcctgggcaccggggagccggccttggacacggtaagaacgggcgagggggcgacgccgggcgggcgtccgcgaggcctcggctcgtctccgtcgcccgca

SEQ ID NO: 57209 - DNA, 122 bp, Homo sapiens
ccctggggctgcgggatccaaccgcaggataggctggaaagcgcagcagaatggttttcccggctcacacttgctcccatgagccaggaccccctacttttcttttttctttctttttcttt

SEQ ID NO: 57210 - DNA, 122 bp, Homo sapiens
ctatcttcttttccctacactttaggatatgtatcatctttctctcagtcaaccttacatcgtcagcatatagcagttctccataaatgtttgttaaatgcatgaatgaagctgggtgcagt

SEQ ID NO: 57211 - DNA, 122 bp, Homo sapiens
ggatctctgaagtcctgacctccaaccagtggtgggctccttcttgaggatttgagcacacggggacctgaacagagaggcctattgtccccgaacaccccaaggcagacacacacctgccc

SEQ ID NO: 57212 - DNA, 122 bp, Homo sapiens
gcgaatggcggtggctgtggtggagggaatcattgaggacagaatcaaagccgaccacttcggggagcgcccctaacatcagggctagcacgaagcgggcgagcgtcatggtgccagcgctg

SEQ ID NO: 57213 - DNA, 122 bp, Homo sapiens
ggggcccatttctgcctgctcagtttaaagcccagggctccttcatccagacctgcagatcgcccagtgcccctctcagagcaaatccagtctggaaacggttttcggaggcccctagtaac

SEQ ID NO: 57214 - DNA, 122 bp, Homo sapiens
tgagcaccacccaggacttcggttacatttccgtcagccacatgggggaggtgggccccgcgcacgttaaagttcattcttcaagttcatccccaacaccaacgaccacatcattgtggacc

SEQ ID NO: 57215 - DNA, 122 bp, Homo sapiens
ctctaccagccgcggtggccactgcgggcaggggcagtgtgtggagcctcagccagggtacgatcattccagccttgtgcatgctcttatacctgggcagggggaggggggatgtctgggga

SEQ ID NO: 57216 - DNA, 122 bp, Homo sapiens
gagaatggcagcagtgttagtgcaactgcacagatggcaggagccacgtttgtgtggagccggggacagggtgtgaccctccaggccagcccagtaagtgttagctactgtttgaactagtc

SEQ ID NO: 57217 - DNA, 122 bp, Homo sapiens
cctcgccgcaggggccccctccctgtcttcccggtgcgtgtggtgggtggggggggcatccgcctcgccctttgaaggccccagcagagacctccagctgtcagcccgcagcctgggaaggg

SEQ ID NO: 57218 - DNA, 122 bp, Homo sapiens
ggctaatttttcgtattttttagtagagacggggttccaccgtgttagccaggatgatctcgatctcccgacctcgtgatccgccggccttggcctcccgaagtgctggaattacaggcgtg

SEQ ID NO: 57219 - DNA, 122 bp, Homo sapiens
acaatccccttgagtagaatatggggctcaggagaaaccattatttctgcctctgtcaagcgcagaataattgaatattttcagatccaaattccaaaatggttagtccttaggtaaattaa

SEQ ID NO: 57220 - DNA, 122 bp, Homo sapiens
cccgggagtacgggaaggaggctggggcagacaggagtcagaggcccattccagcccaaacgagaagccagtgagcaaggtggagaccagggatgctgtgaccaaagcagagaggaatgggc

SEQ ID NO: 57221 - DNA, 122 bp, Homo sapiens
ctttatggaaggggacaggaggtgggtgccaactgcgggggtgtaggagggcgtgggctgcggcccttctgtccgcactcagcggcagagagcgcacagacgctcagcacacccgggcccac

SEQ ID NO: 57222 - DNA, 122 bp, Homo sapiens
cccgaaggcttcggtactgcctggccacgtagctgctccgggccctgaccagagactggacgtgaatggtgagcacgtcctcagggccttcctcttcagggtcgtcctcccttccttcctcc

SEQ ID NO: 57223 - DNA, 122 bp, Homo sapiens
tcctgcctggggctcatggttccaccacgcattgcaatgggcactaaggggagtggaaggcgtgggctcaggagcagcagccagctcagatccacacccccaccccaccgctctcgcttggg

SEQ ID NO: 57224 - DNA, 122 bp, Homo sapiens
gcaggcgctcctcgttctgctagccgatggccgcgatggtgccgtaggtgagcttgtcgtcggggatggcatggcgccgcagccagccgccgcaggcgaacgagtataagtcctggcatggg

SEQ ID NO: 57225 - DNA, 122 bp, Homo sapiens
agggctgttcagactacctaaacaatgttgttaagagaagcactcgtacttctcagacttcgctgttccggaccccgcgagccaggggcaggcaccgggtccacccggggctgagctgcggc

SEQ ID NO: 57226 - DNA, 122 bp, Homo sapiens
ccttcaagattcagaaacctgcccaaaatggattaagtctcatctgtacattccccatgtcgcaccaaagctaagggacatccaaaagcactctgcccttggtttatgcctagaggtcaata

SEQ ID NO: 57227 - DNA, 122 bp, Homo sapiens
gacaggcggcagaggaggtggcagcagaattgatgagagccagccccccttcccggaccccgccaccccagtcagccccctcctgtcccaggagagggaggggcgagctggtgagctccgtg

SEQ ID NO: 57228 - DNA, 122 bp, Homo sapiens
tgagaactgaattgacaggtgtgtggacatccctggtcattgtcttctgctgtctaaccacgtcgtctttcccataggctttccatctactgagaaaggggagaaggaagagaatgaaatgg

SEQ ID NO: 57229 - DNA, 122 bp, Homo sapiens
cgtcctgttccggcagggtgactccgggggcccgctggtgtgcgggggcgtgctcgagggcgtggtcacctcgggctcgcgcgtttgcggcaaccgcaagaagcccgggatctacacccgcg

SEQ ID NO: 57230 - DNA, 122 bp, Homo sapiens
ttctgtgaatattccagtacaagtttttgcatggacatatgtttttacctctcttggttacgtacctaggattagaattgctgggttacatggtgactcttaagtttaacattttgaggaac

SEQ ID NO: 57231 - DNA, 122 bp, Homo sapiens
ttttctgttttactacattgtgatttgctaattcatgtgtcaggccctttcccttggactcgctttttagtggttaatgagctgagtttctttgcatttaaaaaatggatcctatttcataa

SEQ ID NO: 57232 - DNA, 122 bp, Homo sapiens
aaaaactcaaaggccatcccatgcacttccttggggttgtgacctgtacttcagcagggccgtctgggggatctgatagttggtcatgggtttcctgaaggaataaatcttctggaggataa

SEQ ID NO: 57233 - DNA, 122 bp, Homo sapiens
acctcaggtgatccacccgcctcggcctcccaaagtgtggggattacaggcatgagccaccgcgcccggccttatttaataaactctttggagtaggtactatttattaaccctgttttaca

SEQ ID NO: 57234 - DNA, 122 bp, Homo sapiens
tccattggttagtctgggctgaggtgggcgtgtgtgtttctgtatcagtgatctgttttccggcaggcctctccctgaggggagagctggtagcttccatgtaagtggcagggcatacttca

SEQ ID NO: 57235 - DNA, 122 bp, Homo sapiens
tatccgaacatcagaaggaacaaactccagacgcgccaccttaagagctgtaacactcaccgcgagggtccgcggcttcattcttgatgtcagcaagaccaagaacccaccaattctggaca

SEQ ID NO: 57236 - DNA, 122 bp, Homo sapiens
tggcctcaagaaacactataattggtcagcctggggtgcgtttgaaggccttctctatcgcgtcattagctattctcaggaaaggcagggtatcccactgggagaatgacaacacacttgtt

SEQ ID NO: 57237 - DNA, 122 bp, Homo sapiens
caagggaaagactttctggcctgctgaggtcgaatcttccaagaggctcttgcaaagacccgagattctcataaatccccgcccagaagagctgcacgtatccctttcatgagtccagggaa

SEQ ID NO: 57238 - DNA, 122 bp, Homo sapiens
ggtagatgggaccacgcgcagcggagcagggggcggtgcttgtctgggaggttccagccgcgcaggagcccacggcgggaagaggggaagctcaggcatggcaggctgcaggtcccgagccc

SEQ ID NO: 57239 - DNA, 122 bp, Homo sapiens
cagatcgtcgagctggcccgagactgcttggccaagtctggcgagaacctcgtcacctcccgctacttcctagagatgcaggagaagctggagcggcttctgcaggatgtgcgtggtttttc

SEQ ID NO: 57240 - DNA, 122 bp, Homo sapiens
ggatgaaccctctggggcggggccctgggcaggctggttcagtgataagcaggagccaggcgacccacaggcttcttggatgggctgggcgtgcatggcataaccgtttgagaacaacaaac

SEQ ID NO: 57241 - DNA, 122 bp, Homo sapiens
acagaacgtgggctttggaggaagacctggattggaggcctggctccatcatctatcagccgggtgaccttgggcaagtgacttctcttcccttggcttcatttccttcactataaaatgag

SEQ ID NO: 57242 - DNA, 122 bp, Homo sapiens
cggttttctaaccgggcccatcgcgcgtgtgggacggggaggcaggagccacggctaagccggaagcctcaggctgaaagcagctcggccccgcgcagccacggccaactcaactcagcaaa

SEQ ID NO: 57243 - DNA, 122 bp, Homo sapiens
tgaggcaggtgaggaaccaggcacagcgcccagcacagggcctgaatgcacgggtggcagcgacttttaaggagggaactggcccagctgcaggccgacagcctggcagtgatggaccccct

SEQ ID NO: 57244 - DNA, 122 bp, Homo sapiens
gcctggcagaaaattcttaggattgaatcatttagactttccaccctgaccccatgccagcgtcctgccagtggggaccctgcagaatcaagaaagtttagtttctttttctccccctccct

SEQ ID NO: 57245 - DNA, 122 bp, Homo sapiens
ccctggtgtccactgcctttgagaatcctgagtcgcttcaccttgggggtgtctcttcctcgccctctttgctctttggtggaggaggcttccgagaccccggactttgctgtgattctact

SEQ ID NO: 57246 - DNA, 122 bp, Homo sapiens
cgctgaagaagtagaatgggattatgcccctaacaaaaactgggagttcgaaaagcagcacgtggacgcaagaggggaaaggtaccacaggcgccgccgctagggctcctcggtgggatcgc

SEQ ID NO: 57247 - DNA, 122 bp, Homo sapiens
ccctctgcctcctggctcctgagagccagcactgtggctggagctcagtcccccgcagcacgggtggagaaggagtctgagggtctccccacccactgctgccaggctctggccatgcagag

SEQ ID NO: 57248 - DNA, 122 bp, Homo sapiens
cgctctgtgggaagaccttctcgtgcacatacacactgaagaggcacgagcggacacactcgggtgagaagccctatacgtgtgtgcagtgtggcaaaagttttcagtactcccacaacctg

SEQ ID NO: 57249 - DNA, 122 bp, Homo sapiens
gccctggcaggttttattactgaacgtggaatgagcccagcaaacctgaccacttgggtgcgctgtgcattcctgttgctgggtggttgactgccagttaaccctgcccagctttttcagtt

SEQ ID NO: 57250 - DNA, 122 bp, Homo sapiens
tctggaataagtagatatgcccaccatccaaagacggtattgtagggagattctgtgccccgtctgtaaaagcttagactctccatctgaaccctgctacttcccatccccagaggtgctct

SEQ ID NO: 57251 - DNA, 122 bp, Homo sapiens
tctcctaggatgccaaaaagtcattctcactttatgtccacatggtgtgaagggagggaacgtaaccagttaagaaaagggcttttgggtcaaacacaataggcaaagggttcaatcaacat

SEQ ID NO: 57252 - DNA, 122 bp, Homo sapiens
ggtaaaaagcaacaggtgaagctgctgggaggcgtgcagacgggagttctcatgctgtcccggtgcatatataaattgctgcaaactccatggtgagcaatttgcagtatttccccaatttg

SEQ ID NO: 57253 - DNA, 122 bp, Homo sapiens
taagaacatcagtgttaccgtccttagtatcaaataaatgcaggcaaaagcacaagactacggagttttatttagcctgaacagcctagtagtgttggatttaggaggtgtttaatgctgac

SEQ ID NO: 57254 - DNA, 122 bp, Homo sapiens
aggccatctcccgggtctggacctgtctctctccaccttgcctccctttctgactttggccgccccctctcactgtccgcctctctctctcacgcttccgggaaccagtcttgcaggtcctg

SEQ ID NO: 57255 - DNA, 122 bp, Homo sapiens
cttgctaatggcagccggggtctccctgggacagcaagacctccgctcaggcccctctttcgaatgctccacgccctcctgcgatctagaatggtatgaattctcatacttgcccagaccag

SEQ ID NO: 57256 - DNA, 122 bp, Homo sapiens
caaccttgcaaatatttatgttttttatcaaggccctttatgcaacaccagggatttaagcgatctctaaacgttcaagtttttacacattgtgaacatcagagcatccccgtgcacgtgcg

SEQ ID NO: 57257 - DNA, 122 bp, Homo sapiens
agggagtgggtgaaaacaggagagaaatcctttcttctggcttcctcagggaggaacggacgagacagtgtgagcaggtttacgattggctagtttggataatttcaatgggctctgggtca

SEQ ID NO: 57258 - DNA, 122 bp, Homo sapiens
acgggaacggggcactccaccggtggatccaaagttggcctgggtaggagatgtcttcaccgccacacccgctgaaccccgcccacttacctcacctctgcgccaggctgcggatgaggatg

SEQ ID NO: 57259 - DNA, 122 bp, Homo sapiens
gccaaacttacctgcagtttctcagattctcaggtcctgtgtagactacatgcccagaggcgcaaacctcgtagggacgagatggctttaaaagtaaaaatgctcagaaattattttctcac

SEQ ID NO: 57260 - DNA, 122 bp, Homo sapiens
accggacagccatcataatgaaaggcctaaaagcaaactatgacttccctaataaggcgacggccaaagctggctccctggcggtcgagcgctaatacaattaatcagtctgttttcagttt

SEQ ID NO: 57261 - DNA, 122 bp, Homo sapiens
tatgcacgtggtctcacagtgtccgcctccaactgttttttagttgcaaaaggaaagaatcgttcatatatagtggaaaaattgaccaacaccttgcctgtgtaatcagaattaatatcacc

SEQ ID NO: 57262 - DNA, 122 bp, Homo sapiens
cagcttccgtagtggccacttcctatttttcggatgtgtcatcaatctgttcctcaccagcgaccaatggcagcggcgctggcttgtgcgcatggccacttgggctcacatccgggctctca

SEQ ID NO: 57263 - DNA, 122 bp, Homo sapiens
tgccagggatcccatagcctccttggctcaccagccctctccagtataatagattaccaacggccctacccctgccgcacaaaccctgcacagagggtggtctccagtgcccctgggagcag

SEQ ID NO: 57264 - DNA, 122 bp, Homo sapiens
tcacctctctgcttctgttccagggctcaggaggaaagtacagggctgctgagcggcctccggatctggcacacacagctgctcccaggcgggctccagggcctcatcctcaaccccatttt

SEQ ID NO: 57265 - DNA, 122 bp, Homo sapiens
gccgcggctccggcgaagctttaataatcccatccgccaggcccactcgcaggtttttttcgctcggtttcggattttttttttttttcggtgtgggacattctgcaaactttttttttttt

SEQ ID NO: 57266 - DNA, 122 bp, Homo sapiens
gccccctcccagccacctgtgcccgctcctaccagtcttcgcttgggcttgatgagtggtcggttctgcccattcatcttgtggtagaggccacaggcattgcacaggtagtggccggtgcc

SEQ ID NO: 57267 - DNA, 122 bp, Homo sapiens
ccagatatacctgttcgcagagtgtctgtctcagaatcaccctttgacaatacggatacacgtgcacacccatttacaaactcacctatcaagatgtcttttgcttttaatcatcactgtca

SEQ ID NO: 57268 - DNA, 122 bp, Homo sapiens
ctttttcttcattgggtttatgtttaattaggggacaagaaataaacaacctcaaccccacgtggctattgcaaaaatgaggtaacccatgaggaaataaagaggaagaaaacctatatgtg

SEQ ID NO: 57269 - DNA, 122 bp, Homo sapiens
ctgctgggcatgaaggcagggctggggctccaggggcacctgagcttgtccttgttctcccgtcctgtcttgctttgtctctctccaagtctctctgtgtctctccacgtctctctgtgtct

SEQ ID NO: 57270 - DNA, 122 bp, Homo sapiens
cataatggagcttattagtgtggttcccgggcttgagcccaatcttttcttcttgtgaaacgaaatcaagatagtattgtttccctgtcaataatgggttcttaaatgggcttgagctttgt

SEQ ID NO: 57271 - DNA, 122 bp, Homo sapiens
tttggtcagggaaaaaaacaatgcctgtcttcacctaggtccgtgggcacaggctcggggcggacccctagccaaggaccacgccctcctctacccagtacttctctttccgcttcggtacc

SEQ ID NO: 57272 - DNA, 122 bp, Homo sapiens
ttggcgtgcacctcggtggggtccgggcgcttggataacgttcttggtgggtaggggtcgcggggaatctctgcgggcccgggactgcggggacttggtccccggctccaccccatcatgtg

SEQ ID NO: 57273 - DNA, 122 bp, Homo sapiens
gaaggagggggaagctgtgggcgcccagggcgtgacaggcgcaggtgagaaagtgagtttcgcgggagcatctgccgggaccgcagacaggtggagaaacgcagtcccaccgcggcccaccg

SEQ ID NO: 57274 - DNA, 122 bp, Homo sapiens
caccttcatcttgaatttctggtttccagaactgtgagaaaatccattgacgttctatagcgctcccagctggcggtactttgttatgacagccctaacatgaatgcagccatccacactgt

SEQ ID NO: 57275 - DNA, 122 bp, Homo sapiens
gaagaaaccaagctgaagctaggggggcgctgggacccctattggggctttgagagcttccggttgtcatctcctaagtattcggagacccttctccaaaactcttggggtgaccctcaaga

SEQ ID NO: 57276 - DNA, 122 bp, Homo sapiens
aagtaaatgtccaccttccccagtttacagtctgaaacaacagcctgagactcttttatacgctgagctccagaacaatcttagattttgataattaaacagcttacttttgggaactctaa

SEQ ID NO: 57277 - DNA, 122 bp, Homo sapiens
tctgtcgctgcgggtctcctcgcatctcggcgtctctctccgcgtctctctccgtcccggcgcctgtgtcccgggctgtccccagctccgagcctcagttccctgcgcgcctccatttccct

SEQ ID NO: 57278 - DNA, 122 bp, Homo sapiens
aacccaaatggaaaattaaaatgagcaagaacagccacacacccaaagagagagcaaacccgcactgcttggaggaggaaatcctctaattgcctccacactcctgctcgcttccatctgct

SEQ ID NO: 57279 - DNA, 122 bp, Homo sapiens
ataaggtatcctggggaagaaccacgccaatccattattattaagcaacatgtttattggcgttgatgcagagacttacacaagtcttcttttttaagagaaaaattacaaggtattcaagt

SEQ ID NO: 57280 - DNA, 122 bp, Homo sapiens
cataaaactgggactggtggcaaagagcctccatccccatcaccatggtgaccactcaatcgccttgtcactacagtgaccgctagcctgttaagcctttgccacctgttcagatcctgggg

SEQ ID NO: 57281 - DNA, 122 bp, Homo sapiens
taagagtgtcacaggtgagaattcctaaggcaggtcagaaagcccaccccatgacatgtgcggcctggtcttgaaagacgtttttccatctagctggacaaggggaacattctctgaatagc

SEQ ID NO: 57282 - DNA, 122 bp, Homo sapiens
actgacttcaagaatgaagccgcggaccctctcggtgagtgtcacagttcttaaaggcggcgtgtccggagtttgttccttctgatgttcagatgtgttcggagtttcttccttctggtggg

SEQ ID NO: 57283 - DNA, 122 bp, Homo sapiens
agggggctgagccaagcccccgccggccaagccaacccgcggcggccgctgggccaaggccgggtgtctgcagcccccagctccagccgtcctcctgggcttgcagggtttgcaaacccatc

SEQ ID NO: 57284 - DNA, 122 bp, Homo sapiens
ttctctgtaaaaatggcgaccccgcgatgcagcgcctgagtgccgcgcgcctgtgacccgcgggtagatttcttaccacgtcctcctttgtgctgactggctgggctgctcagcgggggctc

SEQ ID NO: 57285 - DNA, 122 bp, Homo sapiens
gtgggcgggcactgcgctcttggacacgtgggtggcgcgcggccctggacttggtggcgacggaccctgcccgaggtggggatcccaggctaaagaggaagaagagcctccggagagggaca

SEQ ID NO: 57286 - DNA, 122 bp, Homo sapiens
ccaaggagcgcgggggtcgaaaggaccgggaggaggaaacaggttagggaaactgcaggtcgatggcacagagcgtactggtgaaaaaatccagctcttcctcggaaaaagggaccgggctg

SEQ ID NO: 57287 - DNA, 122 bp, Homo sapiens
gggctgaacacatgctggagctggtgcttggcaattgcctgccacttgcctctgttttctcgctccagccgctcccagatttctgggatctaggagagagaagtggagagtggcaggaaggt

SEQ ID NO: 57288 - DNA, 122 bp, Homo sapiens
cgtactgtaagagccctccatgaacacatattaatgtctaggcatgcatggcaatgagtccgagcaggagccctctggctgcggttcagcactttttccgtttacgtatgcggggtgaaagt

SEQ ID NO: 57289 - DNA, 122 bp, Homo sapiens
aacaatagtggcaaaaccaaaacaagaagtcggtctcctctttttatataatagtttatgcggccgaggtagtgggaaggtctctgctgattggtaattatccgtggatgacgacagatgcc

SEQ ID NO: 57290 - DNA, 122 bp, Homo sapiens
gccccggcgccggcctctccccacccggtcaccgccggggtcacgcggcccctcgtgctgcggccctacccctggggccgccccctgaccccgaccgcccctcgggcccccacccccgccgg

SEQ ID NO: 57291 - DNA, 122 bp, Homo sapiens
ggggcgggagcgtggacggtgggtgggaccggacgcgggcgggcaggggcggggcgcgggcgcccctgcactagtcggaaaaaaccgagaggtttctcttctcagggctgagtcaccagcac

SEQ ID NO: 57292 - DNA, 122 bp, Homo sapiens
cctctcactaccgcaaccaccaagctggacccggccgcgggccctgacagatccctatcgcggttccacgcggactctgggtccagccaaatggtcccgagcaagccaaagcggcagcggct

SEQ ID NO: 57293 - DNA, 122 bp, Homo sapiens
gagaccttggtctgagtgagctggcggcatggagcgactgagcatgtgcagctcccacatcgctatataaagatggggatgaactctgtggctgtgagtcaccataactgcgacactcactc

SEQ ID NO: 57294 - DNA, 122 bp, Homo sapiens
tcgtttgtacagtgttcttttatgagtgaattcacggacataccaaagtcctggggttcacgtgggctcaccatttgttgagttgcggttgggaatgtaaccctgtgttcgtggtaatgagt

SEQ ID NO: 57295 - DNA, 122 bp, Homo sapiens
aacagcagtctaggccacacccgggagcttgttggcaatgcaggctctcccaccccagaccggcagagcagattctgcattttcacaagtccccaggggtgcctgggccattacactttgag

SEQ ID NO: 57296 - DNA, 122 bp, Homo sapiens
tactggggggcctctacgagccgccccggtgaactccattgtcggggggcctctataagccgccccggtgaactccattgtcggagggcctctataagccacccctggcaaactccagggct

SEQ ID NO: 57297 - DNA, 122 bp, Homo sapiens
caggctcaaggtccagctccattttctcctgagccatgtcagacttgcaggcaggcacagcgggcagtgctcagctcctggtgcttagctatggactcccaagactctcactgcaggactga

SEQ ID NO: 57298 - DNA, 122 bp, Homo sapiens
cttatctgaggtgaaattgctgggtctcagagtatagatagcttcaactgtgctagattacgccaaatattttccacagtggctgtgccattttgtattcccaccagcagtatatgagaatt

SEQ ID NO: 57299 - DNA, 122 bp, Homo sapiens
cccgcgggggccgggcctggggtggcgcctggcgggcgggggcgggcccagctgcgggggcgcagtcgccgggccgcgggcggcgggacggacgaggccggggccccgggtggcacccggca

SEQ ID NO: 57300 - DNA, 122 bp, Homo sapiens
cgacctgcgctacgtgtggggcggcttcgtgtacctgcaagacctggtggagcgtgcagccgtccgcgtgctcagcggcgccaacccccgggccggcctctacctgcagcagatgccctatc

SEQ ID NO: 57301 - DNA, 122 bp, Homo sapiens
caggtgacagcccccgggcaggccctgatccagggtcccagtgggaatccctgggagctccggactgggacccccggggcctgacgttgcctctgcttcctttcacgccttccctggctgag

SEQ ID NO: 57302 - DNA, 122 bp, Homo sapiens
gaggcctggcgaggaggcgaaggctgcaggcgtgaggtgaaggccgcaggccggccgggccgattttcgctatgtaaatatcggtgagggggggggagggacgggggacaagatggcggcgg

SEQ ID NO: 57303 - DNA, 122 bp, Homo sapiens
tacaccttctatctagggacacttgatgttttcttcttttggaaatcatgctactgtatgcgttttttactttttgaactgtcttcccatctgctatcccaaggcctccctcaccccagata

SEQ ID NO: 57304 - DNA, 122 bp, Homo sapiens
atcttagcaccatatgtaaaccacctgaggtatatggtatatatgtatgttttatgtgtccgtctgtatgtgtatagacatatatagtcagccctccataaccatgagttctgaatctgtgg

SEQ ID NO: 57305 - DNA, 122 bp, Homo sapiens
agagaaatgccaaacgtgccttgtgtgccgggcggcctcactgagtgctgccagcttccccggccactcctgcacagtggatccaccctcccgaaagtggcagatgacaagcacactcttcc

SEQ ID NO: 57306 - DNA, 122 bp, Homo sapiens
tccgtggtcaggaggagctgagggcaccgtggatgcgtaaacatgggcaggaaggcaggccgcctgaaagcttccaaaagcccctttctgacaagtgaaaaatgttggtgacttgaagtcac

SEQ ID NO: 57307 - DNA, 122 bp, Homo sapiens
ggaaacgccacggcctaatcctggctcaagaggacacgttgtaccagagattatataaaccgacctctccctttgtttgtttaattctttcaggctttttccctcatccttctctctttaat

SEQ ID NO: 57308 - DNA, 122 bp, Homo sapiens
ctgcagaatgtacattcttttcaggtatatgtggaacttttagtgaaacagaccctatgccgagccataaaacaagcctcaacaaatttcaaaggaatgaaatacaaaatacgttttctgac

SEQ ID NO: 57309 - DNA, 122 bp, Homo sapiens
ggctcacctcccagggcagcgaaaccccattctggttggttatttccagggttagtcgcccgcagccaaagttctttgtggttttatttgtggtgaataaattagcagtattcaagtacaaa

SEQ ID NO: 57310 - DNA, 122 bp, Homo sapiens
gatgctatcttgcccagccttgatgttcatgtctttcccttggttgcagtagcctgtggtcgctcatgtctgaatctccagggaaacatcagacatttagtttgcacctaggcctcaatgcc

SEQ ID NO: 57311 - DNA, 122 bp, Homo sapiens
gtgctcagaggagcattttgggctctggtggctgaatgggggaagagctggaagaggcagcgactggaatcagagagataatgatccagggaagaaacagtaagagctcaaacttgggcaat

SEQ ID NO: 57312 - DNA, 122 bp, Homo sapiens
cttggagtaggcgcccagccctggctcttccatgctctgcccctttcctggatgaggaaccggactcacaatttctatttccgggactacaggaagggcagagaatactgacggttaccagt

SEQ ID NO: 57313 - DNA, 122 bp, Homo sapiens
tcacttcgtggcctctggcattcagcagctgggttagggctgtcccaatgaagcctgtcccgccacctgatcggaaaatacaaattgtttatattcccgtggagttggggtgggggcgcctt

SEQ ID NO: 57314 - DNA, 122 bp, Homo sapiens
gggcgtggccttaatgcttcaagcccattggtcagtgagaaagatgaaagggaaaggaggcggggccaggcagccacgtgtcatgaaggacctgtgatgtcacaaggaaagccgcccatgca

SEQ ID NO: 57315 - DNA, 122 bp, Homo sapiens
tcaaaaaaaaaaaaaaaaaaaaaggaaataatactgcttcacagggctgtctagggctgtcgtatgcatgaaatgacataacacttgtacttggagcatcacttaatttcaggtgtaagcac

SEQ ID NO: 57316 - DNA, 122 bp, Homo sapiens
aggttgttgtccttgggtggcggggacacaaacaccgactggggcctgaccgccacctgccgcactccgttcctcatcttcaccgctggagtgcctgaggtcttgccgaagcccccgggagg

SEQ ID NO: 57317 - DNA, 122 bp, Homo sapiens
ggggacgccaggcaggctgacggtatacgcccgccttgtgttagtctggggccaggtcaccggcaatgtcttcaagaaccagaaggtgggaggacaaaaaggccatgctcaagctctgcaaa

SEQ ID NO: 57318 - DNA, 122 bp, Homo sapiens
gcaggatggagccaagggagagcgtggtgcgggggcgtggggaaatcgggttgccccagccgttactggtccgcgcagtcagggcatcctccgcatcctccacatccttccatggctctgaa

SEQ ID NO: 57319 - DNA, 122 bp, Homo sapiens
gtctgcggccatcagatcgtacatcgagaaggccctaacgtccgcagccatcagatcgtacgtcgagaaggccctaacgtccgcggccatcagattgcacatcgagaaggccctaatgtccg

SEQ ID NO: 57320 - DNA, 122 bp, Homo sapiens
ccgcgctcccccagccctgtgccacatccctgcctgccatgtgccctgatgcactgctcccgcccaggactttgaccaccactgcccctgggtcaacaactgcatcgggcgtcgaaactatc

SEQ ID NO: 57321 - DNA, 122 bp, Homo sapiens
ccagctgggaacccccagataaagcggtttttggaccccagccactttcagcagtccgggcgcacacccttttcccgtctccccactcccaccggcgagcagcccctgctcaccgttcacca

SEQ ID NO: 57322 - DNA, 122 bp, Homo sapiens
aagaggcccagttccagggccgggggcgaggggtgggcggtccaaagggcaccgcccctgcgggtcacgtgctcgccgaccaccaatggccgcctccgagcccaccttggggacggggcggg

SEQ ID NO: 57323 - DNA, 122 bp, Homo sapiens
tgcgcgctcgaccctcccctcccccgtccaggtccacacccccagacggacgcctcccagcgaggccaccgcatacacgcctccacatcccaggcctacagctgctatcccacgcaccctcc

SEQ ID NO: 57324 - DNA, 122 bp, Homo sapiens
ggggcggcggctggggcagcggctgcagcagcggcggacgctctgcattacccagtcttgcgtcctcggcaggcgcccgaagctgagtgcgcatcctctaccgcacccaagcttcgtctgtc

SEQ ID NO: 57325 - DNA, 122 bp, Homo sapiens
ccgtcacttcccttgccatactccatccgacctcctacaccagccgcgcccctcccccatcgcctgagtcctcccttgggaataaccggccacagaacaacagcaaaagtagcaaaaagtgt

SEQ ID NO: 57326 - DNA, 122 bp, Homo sapiens
actctcagggccacagtccatattccaaaccaggcgcttgggtctatgggattcattcctcgtgggcattgcaggaagtgtagtcaaagagcaccgcggagtcccacgcttcccgccggaag

SEQ ID NO: 57327 - DNA, 122 bp, Homo sapiens
acagaaaaatgcttttgttaaaggcaccgatggccttcatattgcctaacactatgatcacgtcctcatccttttacactatatgtccagatgccttcagtacatctgacacctccctcctt

SEQ ID NO: 57328 - DNA, 122 bp, Homo sapiens
attcttaatttttgaacaagggtcccagccttttcattttacactgggctctataaattacgtagccagtcctgccagagtgtctgaattgtctaactctattctcatgtggcagtcatctt

SEQ ID NO: 57329 - DNA, 122 bp, Homo sapiens
ttcaaccacaaaccccgagtgtgtgtagtttctcagatccaggaatgttattccaggagacgtttcataagcacacattcaccatgtgaacttttgtctaattacaagatgaaggttttttt

SEQ ID NO: 57330 - DNA, 122 bp, Homo sapiens
tgttctttttagtctcctctgctgattccccctcacttctcagacctacaaatattggagcgcccgggaagcgagcgtagggagcatagggagataagaagacctattcccttccctaccta

SEQ ID NO: 57331 - DNA, 122 bp, Homo sapiens
aagagggagctgatgggggtggtggagtgcataagaggccacagcaggctccggcgcgcacgggaaccgcacagcccttcacggcaaagtgggcggcgagtagctctccaggggtggcatag

SEQ ID NO: 57332 - DNA, 122 bp, Homo sapiens
agttcggcttcgcgaggttggtgcccattggctttcgcataaaagctccgaggttacagacgtttccacctcttgccggcctcttaggtaattggcgtccgtggtaaccaatcaggaagagg

SEQ ID NO: 57333 - DNA, 122 bp, Homo sapiens
ggttagactgggggtttctacacagcctgaggtgggcgaggtgaggcagggaaaaatccccgaagaagctggttccccactagactgtgaggtcagaggccttctctaatcttttttttttt

SEQ ID NO: 57334 - DNA, 122 bp, Homo sapiens
taaaagtatatttttatcaataaagtggaaagtacacatatttgctcaagattctctgtccgcccccacacctccaggaggtcggtaagaactctctgaagctgtggtgtcagatcctttct

SEQ ID NO: 57335 - DNA, 122 bp, Homo sapiens
tcgggtgctcagccacaggggtgtctgcaaacagtgaacatggagatggccccacaggggcgtcgtggagatgctgcccctgtagccaccgcacgtgggcctctcaccccccggggagctgc

SEQ ID NO: 57336 - DNA, 122 bp, Homo sapiens
gacaggcgagtgtccctggggcctgcagggcagtcctgctggctgcaaaagagagaatcacgcgacccctagccgggcctcccagggcctccgcgcgtcagtcctcctggccaccgcgtggc

SEQ ID NO: 57337 - DNA, 122 bp, Homo sapiens
gacttctgcggctcccaccctggttctcagagctctgacccgccagctgccatgcgtgagcggcccacacggcgaggagctgccataggaccaagcgcggcagcccaaccacggatagaagc

SEQ ID NO: 57338 - DNA, 122 bp, Homo sapiens
gcgcctccagggagagtcccggcccgcgcacctccttgagccggtgctccttctccgccacgatgtgctggatggtcatggccacggagtagacccaggagatcaccatgcacagcggcatc

SEQ ID NO: 57339 - DNA, 122 bp, Homo sapiens
ccgccgccatctttcttcctggcaggggccgacgcagggaccggcgcgggggtgagagcgcgcggccggattcaccacaacatggcaactctttttataaggaaaatggtgaaccctatgct

SEQ ID NO: 57340 - DNA, 122 bp, Homo sapiens
ttggctgagccatttgtaatctcacccaagattctggtgtgctggaacccatctataagacggaaaatagtaaaaacagcttacagggcacatgccaatttgcattctgaggacctgaatga

SEQ ID NO: 57341 - DNA, 122 bp, Homo sapiens
catgcatccagcaggggtgctaggcaaagaaaaggtgggttgaggacagggcgtgttctccgggactctgtgagccacgaggaggctgcaacaccagccccagagcctccgggaaatgggga

SEQ ID NO: 57342 - DNA, 122 bp, Homo sapiens
ctgactaatcttatcacattcctgactcagtacagatgcaacataaaggctggcacaaagcgggtattctaaaaatgttaattgttgctgttattgttattatttacctgttcctggcccag

SEQ ID NO: 57343 - DNA, 122 bp, Homo sapiens
ctaaactccaggggaagcaggatccaacttccccttgtaggtaaaaagacttagtgcctccgatatatcttttttttttccaaccaagtgtacaataatttttaaagatacctcggcccttt

SEQ ID NO: 57344 - DNA, 122 bp, Homo sapiens
tggcccagcatccctttcccacccttgtccatacatcgcggtgcccccttcacagagaagcgttgcatgagttccttcagttctgttccaatatcccctgcgcagccatgcagacaggcttc

SEQ ID NO: 57345 - DNA, 122 bp, Homo sapiens
cgcgactaccccggcggcccccggcccccgctcccgcccgagcccccaccttctggaccccggccccgggctgggctgcactgtccaacggccgcccagcacccccccaccctcccccgcac

SEQ ID NO: 57346 - DNA, 122 bp, Homo sapiens
gcctagctctgaaggctagtgggctccccgctgtcactccactaatgccagtaatctgctcgtaaattccaaaaacctagatccaggaaccctgaaacttgtgttcatattataaaaataca

SEQ ID NO: 57347 - DNA, 122 bp, Homo sapiens
gcagaaaaggttccagttcatttacaagcctcggctatttttagttcatcgatccctgggcgcggtgtgtgtgtgttgaggggggccgggggacggggcttgcagagctcacggtttgaggt

SEQ ID NO: 57348 - DNA, 122 bp, Homo sapiens
cgcataaaggctcttttcctgcaccacctaacttcgctctcggacagaacagattggtgccgtgttgcacatccagaactccactcccacccgcgcctttggtataatgcctgctgcccaaa

SEQ ID NO: 57349 - DNA, 122 bp, Homo sapiens
tattatgctgccaggattaagaaccactgagaattcaagtaaagcaatggctctcaaccacgtctgtacattggaatcacttggagagctttaaagatgactgatagccaagtcccaccccc

SEQ ID NO: 57350 - DNA, 122 bp, Homo sapiens
cgcctccccgcccgccccccattctacgcgcctgcccacaccctcctcccctccttccagcgcctttcggtggagcactgcggcactcagcccgagctgccgttttcccctcgcggggaacg

SEQ ID NO: 57351 - DNA, 122 bp, Homo sapiens
tctgctgaccagaaatccttccttgcagccgcccctgtaacggggctggcatttgcaattcgaaagtgtctttggccttgtttttccgaggaaatgaaaacgctatgcgttatcagcatatc

SEQ ID NO: 57352 - DNA, 122 bp, Homo sapiens
ccacgcagcagcctctgggagccctggggccttccgtgggctgcttcctgtggcgtcctgcgggctggccgcccctcggtgggctccggtgctggcctctgccttccccagggccacggtgg

SEQ ID NO: 57353 - DNA, 122 bp, Homo sapiens
caaggctgggcgaggggagccaaagacgggtggtgggagccgaggtcggccgagaggaaccggaaaagccaaggccaatgggaggagccgaggccaggcgggaggagccgagcagggccgaa

SEQ ID NO: 57354 - DNA, 122 bp, Homo sapiens
tttcttccctggttattcaatctctatctactcatatactttccagcattttccctctcccgtccagccttcagccctacttgccgtcttccttttccttgctattaagttggtggttcact

SEQ ID NO: 57355 - DNA, 122 bp, Homo sapiens
ggagggagaggcgcgcgggaagaacaggcgcgcacaatggctgcagatccacctgtggatcgctgaagattcctgctgagggttgaggctgctgggctggaggactgtatggtccatgcatt

SEQ ID NO: 57356 - DNA, 122 bp, Homo sapiens
tgggacatgcatgtctcctgtcacctttacaccttcacctttctgctgtgacacagtccccggctcatggtcataccattacccagaatgtcagggttcttaacatcacaattcactggcat

SEQ ID NO: 57357 - DNA, 122 bp, Homo sapiens
ctatattagggctttgttgctgacaacagtgaaaacttgtttgtgtcaggaagtgaggtacggagatatgacctggaaggtacagacaaaaccaaagtggcagtttttgcattacttttctg

SEQ ID NO: 57358 - DNA, 122 bp, Homo sapiens
aggggcctttgggcgaaggaggcgcgtcgttttctcgaagccagagaaatttgtcctgtccgccccacccactcccctaagatggcgccctcgcgaaacccgcccggccacccccgcgaggg

SEQ ID NO: 57359 - DNA, 122 bp, Homo sapiens
aaaggcataagattcaaagtacaattcatcctaagtgaaattcccctccagctatgagcccgtgaaatcaaataggttacaggccttcaaaatacagtgatgagacaggcataggacgtaca

SEQ ID NO: 57360 - DNA, 122 bp, Homo sapiens
gcgtgggcgggtgtgggcgcacctgggaaccgtgtggggtggcggttctcaggccgacggcgctgccctggaatccctggcacccactcaactggggagcgcgttcacgcaaccttagcagg

SEQ ID NO: 57361 - DNA, 122 bp, Homo sapiens
tctgggtggcggaccctgggggcggcggctccgctgactggaggccgcgacccgcgactccgacaacgcagcttggaatgtccagtgggacatgcagttccccaaagtcatctctaaccaaa

SEQ ID NO: 57362 - DNA, 122 bp, Homo sapiens
ttgaaattacagtcttccccaaagctacgcagagcgtggtggtagcggctctgcatcccacgcaggtgagtgcgggcttcacctttaattctgctctgcaggcgcttccgcgctcttcacct

SEQ ID NO: 57363 - DNA, 122 bp, Homo sapiens
ttcggggattctcagccggaaaggaacatttcctgttatctgtgggttttagttcttccccgctctggaagtggaggggaaaaaaaattaccagtaatctgtgggtttggacgtatacatgg

SEQ ID NO: 57364 - DNA, 122 bp, Homo sapiens
gatctgcctgcctcggcctcccaaagtgctgggattacaggtgtgagccaccgcgcccagcgcaatcaggatttaaacaggataatttgagtctttaggtggaggagttcgggattttagtt

SEQ ID NO: 57365 - DNA, 122 bp, Homo sapiens
ccgaatcccctagattgggccaagactccttaggtgttctctctgccatttatggtgcaacgtggcactcttccaatttaaatggttgcaatgtttgtccacctggccaaaaagcaagctgc

SEQ ID NO: 57366 - DNA, 122 bp, Homo sapiens
ctctccccgcgggtgggggcggggaaattcatatcccctgttcgtctcatgcgcgtcctccgtccccaatctaaaaagcaattgaaaaggtctatgcaataaaggcagtcgcttcattcctc

SEQ ID NO: 57367 - DNA, 122 bp, Homo sapiens
ggcccagagtttgggaagagcctccgagtggcctttcgaggctgatgtttcccttgagcccgtgccggcctggcaccaggccaatattcacgcacctgcttcagctgacccctcaggcggtc

SEQ ID NO: 57368 - DNA, 122 bp, Homo sapiens
gaaggtcgcctctcccctacaggccctacagactgagaaggaggcacccatagcctccctcggaaagggctgcccggccacattaccctccaaaagccgtcagaagacccgaccgctcatcc

SEQ ID NO: 57369 - DNA, 122 bp, Homo sapiens
cgacaggtctaattaagggagaaagaggcctcgaaaaaagggaaaagaaaaacacatacccgcagaggaagtcaaaatgcaaagggccaaatcctgatacatatcatgtgcaaagaacgtcg

SEQ ID NO: 57370 - DNA, 122 bp, Homo sapiens
ggcagagggaatgactaagacagaaccctggggtgggagcctattgttctcacaaagtgtcgtctagcaataaaattcagtgatttcgacatgagaaatttcaaagttatgtattgtttctc

SEQ ID NO: 57371 - DNA, 122 bp, Homo sapiens
acttctgaggtgtgctcacagcctcagcttcagcaaattttggaagtggcaaagtgggcacgccgggcgcggcctccctgtctccgccagtgcacctcgggcggcggggcgagtctcggagt

SEQ ID NO: 57372 - DNA, 122 bp, Homo sapiens
tcttcgggaacgtgtccgcgatcatccagcgcctgtactcgggcaccgcgcgctaccacacgcagatgctgcgtgtcaaggagttcatccgcttccaccagatccccaacccactgcgccag

SEQ ID NO: 57373 - DNA, 122 bp, Homo sapiens
ccggccgcgggggacacggatgcccaggaccccaggctaatcggtaactacaaaggaagacgggttgggggcgcccggctcggggggacgcgcccgcctcgcctgcctcgggtggcggagag

SEQ ID NO: 57374 - DNA, 122 bp, Homo sapiens
tcctagcgcaatgacgcgaccccaccgcagggcactgacccggccgacccgagccctgcgcgcaggaccccagctcacagattgagccccgacccgacctcagctcacggacctggccctga

SEQ ID NO: 57375 - DNA, 122 bp, Homo sapiens
tttctaagactccagaatttttcccaatgactgaatcatattggccaccacattcaggaacgcaactatttgcctatatctactttaccacaactgatctgtttaatgctaactcagaggcc

SEQ ID NO: 57376 - DNA, 122 bp, Homo sapiens
tcccggctcccgcccccagccctgcagacacactccgctcccagcgaggagccccggagccgcacaaaggaaatggcaagagactgagtcaccaccatccagagaggctcgcccgcggcccg

SEQ ID NO: 57377 - DNA, 122 bp, Homo sapiens
gacagggatgaagtccaaagggacaagatcccttgctgagttggttccagcaaataggctcgatttctctgtgactcaagtaggaacactctcccccggcccgccacccacccacccatgat

SEQ ID NO: 57378 - DNA, 122 bp, Homo sapiens
gcacccactccgcctgtgctggggacagcagaaggggccctccaagccagactcggctctcgtgaacccttcacgactggggcctccccgctaaaacagcctcattcccacttaacagcttt

SEQ ID NO: 57379 - DNA, 122 bp, Homo sapiens
agcttctgacaagttttatgagtgattataaattaggataaagataatgatgacaatgaccgatgcttacaggattcagagcaatgtttttgtttgtttgttttgttttgttttgtttttta

SEQ ID NO: 57380 - DNA, 122 bp, Homo sapiens
aagagaaatgctttgctggacagaaaaatattgtcctaagggaatggtttggtttatcaacgtctaaggtgaaagataatcaaatgccaagaggtcatttttatgtttgaattatttcagtg

SEQ ID NO: 57381 - DNA, 122 bp, Homo sapiens
ttacggccaggacccgcccagccgccaccagcagccagtgggccgtgactcggaaacgagcggccagccgtgacctccgtgtaggggccagcgttgctgcttcctgcagccctgccgtcggg

SEQ ID NO: 57382 - DNA, 122 bp, Homo sapiens
gcaagcggtgacggcaggcctgccccaggtgcacacggggacactgtctgatgtacgttccggaggtccggacggggcctgcaggctcgacggcccacagagctctgccccgccctggcccc

SEQ ID NO: 57383 - DNA, 122 bp, Homo sapiens
aaatccccttcccgggagcaagtgccttcagctgggagtgtctggagccctggccaccagcgggtaaggagcgcgcggaggggccaggaggaggatgggctggggagcggagagtcctccga

SEQ ID NO: 57384 - DNA, 122 bp, Homo sapiens
gaggagcgtctctgcccggccgccccgtctgagaagtgaggagcccctccacccggaagccgccccgtctgagaagtgaggaacgtcaccacccggcagccaccccgtccaggaaggaggtg

SEQ ID NO: 57385 - DNA, 122 bp, Homo sapiens
cgggccaggcgcagctccaggtccacatcatctgggagccgcgaacatgtttgtcaggggcggagacccaggatgcaggtccccggatgccaccgcctccactccccaccctcactccgctc

SEQ ID NO: 57386 - DNA, 122 bp, Homo sapiens
tggagtcatgggacgccaaagagctggtggagagcagggaatctctctcggcacagtgcccgtcagtttccaagtcctcctccacctcctcctcctcctcttcctcctcttcatcatctccc

SEQ ID NO: 57387 - DNA, 122 bp, Homo sapiens
cacctgcgttccgggaaacgaaaagctgcgtgaccagcatcatctgcaggcacagccagtcgggctggggcgagaccctcggccctgctctggaggaggagctcaagggactgaagctccgc

SEQ ID NO: 57388 - DNA, 122 bp, Homo sapiens
ctcctgccaggacaagcagaacaccgtgtgcgaggagtgccccgacggcacgtattccgacgaggccaaccacgtggacccgtgcctgccctgcaccgtgtgcgaggacaccgagcgccagc

SEQ ID NO: 57389 - DNA, 122 bp, Homo sapiens
agtgctggacgggaggctgatagtccactgctgtatttttaggtgaccctgtttcttagccgtcctgggcagccccgaggccaaggccatggggtagcagggcaaggagccccaagatctcc

SEQ ID NO: 57390 - DNA, 122 bp, Homo sapiens
caatacaatgtgccaattgctccggggcgaggtggcggttaggaagctcgcccatgaagacggcggcgaaacgaactcccctctcctctcgggcctattctgcagtctcctctgagcgcctg

SEQ ID NO: 57391 - DNA, 122 bp, Homo sapiens
gtggggcggcaacccggagagccaatcaggaataaggagtccggttcatgaaaaggtagccggattctgactgggatactcactgtgagaaggctgggcggagttgcagaaagtcaacagaa

SEQ ID NO: 57392 - DNA, 122 bp, Homo sapiens
ggctccctctgcactgcgcggcgccatggacgacctgcgggtgctgtggatgcgcgaccgcgtgtatgcggctttcggcatcaccgacccccagcttttcgaggacctgctcaaccgcgacg

SEQ ID NO: 57393 - DNA, 122 bp, Homo sapiens
cctgtgtgtgaaaggccggtcggtcggtgggtgaggctcaatgagaggccggtgtgtgttcgagagagagaagaatcaccatgtatgcgagactagactgtgcaagaacagagtgtgagact

SEQ ID NO: 57394 - DNA, 122 bp, Homo sapiens
atttctatacacagctttattcctaggacaccaacactagatacctaaactgaaagcttccgccgatttcaccgaaggtcaggaaagtccaacgcccggcaaactggatttgctgccttggg

SEQ ID NO: 57395 - DNA, 122 bp, Homo sapiens
cctctgaacctcccttcttggattgaagcccattctgttcacaggaagactgcaaggtgccgagtcacactgttcactggtttattgagattcggggagatccttccccaagagacaccaca

SEQ ID NO: 57396 - DNA, 122 bp, Homo sapiens
tggacacccgtccttcgggaggggaggaaaagcggccggtaaaatggagacagtcggtggcgtgtgtttgccgattggactggcattggtatagacagataccaatcactgcacagacattt

SEQ ID NO: 57397 - DNA, 122 bp, Homo sapiens
gccccacgtgtggccgagaggatcattcctaacgcaacagtctggcagctttgggaaccccgtgctctcaggacaagggttgccctggacccagcccctccatcctgctgccgggcactgcc

SEQ ID NO: 57398 - DNA, 122 bp, Homo sapiens
ctgggtgtttatgtcatttctttactctgatcaacaatattgggcaggtgtagtggctcacgcccataatctcagcactttgagaagccaaggcgggaggttcacttgagcccaggagtttg

SEQ ID NO: 57399 - DNA, 122 bp, Homo sapiens
tcccggcgcgccggtccatgctggtcccggtctttgttctggggccggcgccgagacatgcgcggctgacgatggaggtggaggactcgggcggcgtggtgctgaccgcctaccactcgtac

SEQ ID NO: 57400 - DNA, 122 bp, Homo sapiens
acgtccacacacttccctcggtcatttccctgttgtaagcaatactgtaacgaacatcttcggggcgtgagagttgcttggagcagtgtggggaggaggtggggagctggaattgccagggc

SEQ ID NO: 57401 - DNA, 122 bp, Homo sapiens
ggagcggttctgcggcctcctcgggcttcttggccctgggcggagtgggattgggtgtcccggctgttcgcagtggccgcgagtgcggccggacctggagtagtacctgagccgctctggcc

SEQ ID NO: 57402 - DNA, 122 bp, Homo sapiens
aggtggtgcagctctcagaccctcccacttgtttacttcgtggcgagagggcgaacactgcgcctgcgcactctccgtagccggatccaccttcagcgtctgcgccacgtgactccgatcca

SEQ ID NO: 57403 - DNA, 122 bp, Homo sapiens
cgacccaacatggcggcggggtccggggcggattcccgggggcggtgcaggccgagggggcgtgaggaggaggtgcttccctgcccggagagcaggcccgcggcgtcccttcccacccgcga

SEQ ID NO: 57404 - DNA, 122 bp, Homo sapiens
tgcggggatttgacgactgtgggaatcccgtgctcggaaggcgggcgttgctacagggcacgatgaatgttgagcccgtgccccaatttcgccagacttaacgacaattcctacacaagtcc

SEQ ID NO: 57405 - DNA, 122 bp, Homo sapiens
tacactgttccttgatctgagtgctagttaagtcaatgtgttcagtttgtgcaagttcatcggctatgcatttgtgatatgtgaaaaaaactctgtgtgatgaagtatgtagctagatgata

SEQ ID NO: 57406 - DNA, 122 bp, Homo sapiens
tggtcgcgggagagggtcgggagtgcggggatccgagggaggctgcctcctcccggaagccgtccggactgtgcagccgaggccggcggaaaagatccaggggggccgcgtcggggccaccg

SEQ ID NO: 57407 - DNA, 122 bp, Homo sapiens
accatcctggctaacacggtgaaaccccatctccactaaaaacacaaaaaattagctgggcgcagtggtgtgcctttgtagtcccatataccggaggctgagacaggagaatggcgtgaacc

SEQ ID NO: 57408 - DNA, 122 bp, Homo sapiens
ggggtcagggagttccctttccgagtcaaagaaaggggtgacggacggcacctggaaaatcgggtcactcccacccgaatactgcgctttatgcaccatgagattatatcccacacctggct

SEQ ID NO: 57409 - DNA, 122 bp, Homo sapiens
attttaatatactggaatgctactcaggaataaaaggaaataagctgttacatgcaacaacgtggatggatggcacagacattataccaagtgaaagaaaacacaaaagctcatatagtata

SEQ ID NO: 57410 - DNA, 122 bp, Homo sapiens
ccatgctcttgcattagggtctctgcactagctcttccttctatcagcaatttcttcctccgaatatcaacatgcctcactcgactccttcaaatttgtttgaatgttaccttcttgatgaa

SEQ ID NO: 57411 - DNA, 122 bp, Homo sapiens
ttctaggagaggaaccctgagcttagggaacctacattttaggtggacaacaagcatacccgccctttgctctaaacagagacattctatctcctaaggcggttcactaagcaaacctccgt

SEQ ID NO: 57412 - DNA, 122 bp, Homo sapiens
tgaaacaggctccccagaactgacgagggactcggtttgggaatcatcgcctcggggcctcgggaatcaacccgatacccgggattgtggattcacatcccggccgtcacatcccagcggct

SEQ ID NO: 57413 - DNA, 122 bp, Homo sapiens
cccgtttattaatttattatctcattgaatttctcaacaatgggttggtcctctgattatcgtcatttctggaaactggaaggccttcctttcttccccacctcgctcaccccagagccaat

SEQ ID NO: 57414 - DNA, 122 bp, Homo sapiens
tggtcctagaacacagggtggtgatcttgcttctctggggggtgccaggcaaatagaagacgtgaaaatctgctgccaaggtcaggatgtaggtcctggattcaggatcttgaccccaggcc

SEQ ID NO: 57415 - DNA, 122 bp, Homo sapiens
caccctccaacttcccctgcaaactcccaagaaggtactgagacctgagaattcagtgctcgtgctggggcaccctgagctgcacccagtgggcccaaccccaggttttggctggctgccca

SEQ ID NO: 57416 - DNA, 122 bp, Homo sapiens
gaagttcattccaggaacaggaaaccggtctgtggtagagacttgtactcatattggactcggctctccttcttggcatacaggaggattttcctacctgtggggctataggtagttacttc

SEQ ID NO: 57417 - DNA, 122 bp, Homo sapiens
aatgttttaaattactacgtaagccttcttaatataagaaagtgtaaacctagagctttccgttggcattctggtaaactctgcattcctaccactagatggcagactgtacagaggaacaa

SEQ ID NO: 57418 - DNA, 122 bp, Homo sapiens
aggccgtgggggccgcagggcgcggcgggcgcgggcgggggctgcagggccagggcgccccgtacccgctcctgctgcgtggctcgcagcccctgcagctcctgcagccccgcgaacgccgc

SEQ ID NO: 57419 - DNA, 122 bp, Homo sapiens
tcggagaacagcagcgggtggtcgtgggtggccactcggaggtcgtgctccagcaggtggcgccagatgagctcggcggcatcccagtccacgacgatgccgctgcgcaggggttgcaccag

SEQ ID NO: 57420 - DNA, 122 bp, Homo sapiens
ggggcagcgtggggatgtggacacccaacaatctcccacgtgacagtgatgctgcggctgcgacctggctctgagaggtgctgggtgcatttcatcctgcgcgctgagttcgtattgaggaa

SEQ ID NO: 57421 - DNA, 122 bp, Homo sapiens
gcagagggcccgtgtcagccccactccgacctagtcctcggccgtctggccaggacacttcggccccccaggtgcccaccccaggacccaaagctggtggctgctggactcggcagggctgg

SEQ ID NO: 57422 - DNA, 122 bp, Homo sapiens
atgaggctgcaccgtaggagcttgccggtctccgaccgctgctggcctgcgaagccggcacgtttacaaggctcagccctgggctgtcatacttccaccagaacagcagcaaatgcgttcat

SEQ ID NO: 57423 - DNA, 122 bp, Homo sapiens
aaatgccatcatgggcttgtgcccagcatccaccctgccaatgatgacaacagtgataatcgaggcattcataccaaccaccatttagggagcctttatagagacttccccccaacagtggc

SEQ ID NO: 57424 - DNA, 122 bp, Homo sapiens
agtgattttttaaaaccatcatcctatcatcccctcatcacccatcttggatggaagctacgcagaatggtaaatcaatgagtccttatggcagagtgcactccgagacaaccgtcagtgaa

SEQ ID NO: 57425 - DNA, 122 bp, Homo sapiens
tccgtatcaatcaatcagtcaatcaatccaagcaaaacaaaactggctttgaacagtcagcggcatcccaccagggattgagccccagtgtggggcacactctgtttacattagctagctca

SEQ ID NO: 57426 - DNA, 122 bp, Homo sapiens
caccgacacgggtgtgttcatgaacacccgggtgcacgcatgtgcacactgacgcacacgcgtgctctcagacaccatgctccagcaccctagtcgggcagcggggtaggtgtagagggact

SEQ ID NO: 57427 - DNA, 122 bp, Homo sapiens
accaggtttaaccccgagtcgcctctccgcacccgagcgcacacactcccctctggctctcgggccacatcatccccagtaacaacatgggggtaccactgtcagagctgccacagacacag

SEQ ID NO: 57428 - DNA, 122 bp, Homo sapiens
ggaggcggaggttgcagtgagccgagatcaagccactgcactccagcctgggcgacagagcgaggttgtgggggaaaaaaaagagatattatcttacatcagtcacagtagctgttattaaa

SEQ ID NO: 57429 - DNA, 122 bp, Homo sapiens
acataaaaattcaccaaggtgcatgcatgcggtgcctcaagtgcattgttgaaatgcatacgcatattttcatacagtgcatttccctccgggggttgcacaaccatgtccatataaatcat

SEQ ID NO: 57430 - DNA, 122 bp, Homo sapiens
cccttcgcggacgtggccccgctacagctcaaggtccgcgtgagccagagggagttgagccgcggcgtgtgcgccgagcgctactcgcaggaggtcttcggtgagtgtcgggcgggctgccg

SEQ ID NO: 57431 - DNA, 122 bp, Homo sapiens
ccccggaaacagtccccccccagcgccgccgccgccgccgccgagaggaggccggcgcagcgcagccgacaccgacacaaagctccgagcgcccgacggccttccccaggactgacccccgc

SEQ ID NO: 57432 - DNA, 122 bp, Homo sapiens
tcttaaatgcactcttttcattcccattcaaaggactccagtataagtgccacataaactcgttttctaacttttaaaactcttcctctaaatgcagcccaactcagtaaaaacgtacctaa

SEQ ID NO: 57433 - DNA, 122 bp, Homo sapiens
gatgcatctctggccatcataaaagattcagttctgtcaagggccttccaacatgcagagcgtgaatgaggcctgtcaaggggctcccggggcctccctcccttcgcctccttcctccagat

SEQ ID NO: 57434 - DNA, 122 bp, Homo sapiens
ctatagtttttcaaatggttttcaaaggaagaaaaattcaactgagattatttcaaaattcgagtcaagttgtagcttttgactgccgctttcttgccactccctagaggcagtggggggct

SEQ ID NO: 57435 - DNA, 122 bp, Homo sapiens
agccagatgcccgctaacttcagagtcaactggcactgcaatcctcacacattccagctccggtatgttactgtttgtgaacacaacaattctctgctcattaacattacaggggtctccag

SEQ ID NO: 57436 - DNA, 122 bp, Homo sapiens
agggagggaaatgtctccatgtttcctcacatccttccccagtaggctgcctagagcgcccgggccctttcccaacaaatgcctcagggactcccactgcagaggaaaatccttcttcccgc

SEQ ID NO: 57437 - DNA, 122 bp, Homo sapiens
ctgcagcatccggcggccatcgccaagattcgggaggagctggtggcgcaggggctggggcgcgcgtgcggctgcgcgcccggggccgctgggggcagcgaggggcccccgcccgactgcgg

SEQ ID NO: 57438 - DNA, 122 bp, Homo sapiens
tagacccagcagcatcctacagggcagtgaaggggccttggcccaaccttgtctgacccacgtggacgccgaagtctaggaggggaagggacacactcagtgctcagagcagcccagcagca

SEQ ID NO: 57439 - DNA, 122 bp, Homo sapiens
tccatataagcaaaaagccatataagcaaaactcaggtaaccactaataacttaaatgtacgtttgtctttttctccatatattcacagtaagatgcacagcaagagaaacatcaaaagttt

SEQ ID NO: 57440 - DNA, 122 bp, Homo sapiens
ttggtgcttttgagaaccaagtaaaacaaaaccactgggaggagtctattttaaagaattcggttgaaaaaatagatccaatcagtttataccctagttagtgttttgcctcacctaatagg

SEQ ID NO: 57441 - DNA, 122 bp, Homo sapiens
gggcgcgtcccacccatgcaagcccggaacaaaggcgcctgtcactcgtcactctccacgcgggctggctctggaaagcccaaaggaaaaaaccctcactttcaggaagaataagcctcagc

SEQ ID NO: 57442 - DNA, 122 bp, Homo sapiens
ctcctataaaataaaagctctcctgatggcctgttcctgcacatttcctgaggacgccctcgatcacaagcaggttatagctatttaaaccttgccttacctgtactctttacacaaattga

SEQ ID NO: 57443 - DNA, 122 bp, Homo sapiens
cagactccacgcgcctcacggctcctccagctcctcggatctttctccttgcgtcgccgccgagtcccctggggcggccccgcctccggccgtctcctcagagaccttccctggggggcgcc

SEQ ID NO: 57444 - DNA, 122 bp, Homo sapiens
gggggttcgtgggagcgccttagtggaagtttgtggagctcgggaggtggcatgcacaggcgcctcggagcgcggccccgaggggcgccggcaggcgagaggcctgcactaaccggccgtaa

SEQ ID NO: 57445 - DNA, 122 bp, Homo sapiens
gtgtcctggagggtctgggcggctgtgccctgtggcctgcaggggcctggggagctgcagcggacaggcccggtgccctcctgtccccagctctgtccttgagaagtccgccatgtgagtgg

SEQ ID NO: 57446 - DNA, 122 bp, Homo sapiens
tccaggctccggcggtccaggagagagctgcagtcagcctgggcagccaggaggtggcgtcggtcatggggcgagggggcagctggccgggctgccagcgtctgtgcgcctttcctgtggaa

SEQ ID NO: 57447 - DNA, 122 bp, Homo sapiens
agcgagaagcccggaggttgcgctgagcttggctgctcgctgggtcttggatgtggggttcgaccacttggccgatgggaatggtctgtcacagtctgctccttttttttggtccgccacac

SEQ ID NO: 57448 - DNA, 122 bp, Homo sapiens
cacgatttccagactctgttaagcccctttctccccagggctgttaacaagtctccactgcggtgaagcttttttcattttccactccgcctctgctccttaaattaggcatttcgtccata

SEQ ID NO: 57449 - DNA, 122 bp, Homo sapiens
gaggaaaatggacatatgccacaaacttacacttatatatgggcaaaaaccatcttaattcgagatgaggggcttccctgtccttggaaacattcacatggtgtatcagtgactggcagctg

SEQ ID NO: 57450 - DNA, 122 bp, Homo sapiens
taatgtgggcagccatgagcttggctgggtcctgaccacgggccccacagctgtttcccacgccgtcatggttcatgccgaatctggggaaaggggtgtcggctctgccgggcgctgaggga

SEQ ID NO: 57451 - DNA, 122 bp, Homo sapiens
cgagcagcggtcagacacgcgggccggcacgcaggggcctgaatcgagcgcagggctgggcgggggccgcactcaccgcgatgcactgccgcatgatgcagctctgcttcatgcgcccgggg

SEQ ID NO: 57452 - DNA, 122 bp, Homo sapiens
agggggtacatgtgcagggttgttacaggggtatatggcttgatgctgaggtttggggtacgaatgatcccgtcacccaggtagtgaacatagcacccaacagttattcagtcctgcccagt

SEQ ID NO: 57453 - DNA, 122 bp, Homo sapiens
ggagaggggagaggctcaacagagaggcgggtgatactcacagggggaccagcgctgccgcgagcacctttggctccaggagcaccaacattaccctgtaggagagcacagaggcatcaagc

SEQ ID NO: 57454 - DNA, 122 bp, Homo sapiens
agaaggtgtggttgtagcggtctcggaagagctcgtcatggaacaggggcgccgagttggcgcccagctccgtggcccagaccacggagctcacggccacggcggtcttgacgcggcgcagg

SEQ ID NO: 57455 - DNA, 122 bp, Homo sapiens
acaaacataattttaaacataattatagatgcacaaacattagtttcctctagccaggcccggagctttctgagtgtcagttttctcaaagatccaatcagtgattctcaaacacagatgat

SEQ ID NO: 57456 - DNA, 122 bp, Homo sapiens
aattgttgcggcctaacaatgaagcgcagccataacagtcctgagccactggcatgtttgcgggccctttattgccttgggaataaactgctgtggcattgtatcgtatattgttttcatgg

SEQ ID NO: 57457 - DNA, 122 bp, Homo sapiens
cccgcacatgtgcacctgccgcagccccgatgtccctccccgggtgaaggaacccacggacgtggctcatccataccgcggaacgtgagccatgaaaaggggcagcctcggctcagccaccg

SEQ ID NO: 57458 - DNA, 122 bp, Homo sapiens
cctacatttgaattatggctccatctattaactgtgtactttaggtcagttgcttctctgcgcctcgatttctgcatctgtaaaatggtaacaacctgtgtaatatggttggggttttaaat

SEQ ID NO: 57459 - DNA, 122 bp, Homo sapiens
tttgatgcgatggtgcaatcattgactcaacagaaatctttcacttgcagagcgagcaggcgctctggtgctgctacccagcgcggttaagcggaagagccggctggcgggtgcagcgggag

SEQ ID NO: 57460 - DNA, 122 bp, Homo sapiens
tcttctcacccaagacatctgaagctgtcatgaaacaggcagagccgagcagtggggctgcggcaatgagtcatggcaagctcccggaggggatgtgcccggttactaagagagagcatcaa

SEQ ID NO: 57461 - DNA, 122 bp, Homo sapiens
gtcttggcatgagcagttccctcgccgtcctggaaagctagatcctgtctgtttgcatggcgggctctggtctcagcttaaatgtgacctaagtcagaaaggtgtgatctcacttatttcct

SEQ ID NO: 57462 - DNA, 122 bp, Homo sapiens
acgcagcggcggcagcggcgacagaagagctcagccacgcggtcgccatgctccgggcagcgccagccgcatccctcgacaagctccgacctcccaggggtccggctcccggtcgccgcgcc

SEQ ID NO: 57463 - DNA, 122 bp, Homo sapiens
ggcccggggctgcgcagaggtcagactgccgcgggcagggccggagcctgctctgggggtcgcggaggtgtctcgagagttgaggacccgacccgggcgcgcgcgggcgcaggtatggggag

SEQ ID NO: 57464 - DNA, 122 bp, Homo sapiens
gaataatttcatttagtcaataaagggataaatcattctgcaacagctatttttccttgacgcgactttggattagaaattcagtccatctcagagaagcacttatgcaaatgctggtgata

SEQ ID NO: 57465 - DNA, 122 bp, Homo sapiens
cagcaggtacacagggcggggagcctcgggagcggctcccttagcaggacctgagggtttcgggagagtcctggctttgcacttagttttcccgctgcctggctgcctccgtggcggttgtg

SEQ ID NO: 57466 - DNA, 122 bp, Homo sapiens
accaggagccattcttacacttttgaattatactttatctgtttgaacctataaatttcacgagtcctactttgagaactttcatcagaaattaaaatgctgaattcagagtatggggaaga

SEQ ID NO: 57467 - DNA, 122 bp, Homo sapiens
ctgagacgcccaccctgtgcctcttcacttgtttcaagcgtgcctgtcattggtcactggcgcatctttgtggcggctgccctaagtctgtggcgggattccaatgtccaggccatctcagt

SEQ ID NO: 57468 - DNA, 122 bp, Homo sapiens
ggaagaaggacccgacgcaggttgggagaagtgaaactcaggggagtggagaatccccaacgcggcgcctccccaatgcagacacggcccttggagcctgagaccctgagagccccgcccgg

SEQ ID NO: 57469 - DNA, 122 bp, Homo sapiens
tagctataaatcattcaatgccagcaggtcacagagcgacggagtgagtggcagaatcaccgaagtctcccggagcagaggacacaaggcaatgaagccctaaccccgcgctctggctgaag

SEQ ID NO: 57470 - DNA, 122 bp, Homo sapiens
cctggaggggtagggctgtgcctggaagggtagggctgcgcctggaggtgcgcggttgagcgtggagtcgtgggactgtgcatggaggtgtggggctccccgcacctgagcacccccgcata

SEQ ID NO: 57471 - DNA, 122 bp, Homo sapiens
gcccttcacgataactgtgcgtcccttcagagtaatgtcgactagaagagagaacacactcgtcaggccacacaacgcttggaacgtgcagtaaagatgtaagtaaaagacatcaagtctca

SEQ ID NO: 57472 - DNA, 122 bp, Homo sapiens
aaggagagagatagggaggcagctggtcagtgcagtggtcagaacacataaaacatttatcgactcagtttgctgtcttatataggggtggttcatggtgccccccaagcaattatgacagt

SEQ ID NO: 57473 - DNA, 122 bp, Homo sapiens
gtgaacctgagcggccttcataccctacctgctttccttcaccaagcccttccctgtcaccgtggccctaaacagtctgggggatgaacactccttccaaataaacacccgggccagggtgg

SEQ ID NO: 57474 - DNA, 122 bp, Homo sapiens
ggatggacttgggagcgggccacctttcatttgggaagggtagctcgccaagtccggtgacggtgctccctggagacccccacctgcccgcccctccacactgccggtccccaaccccaaga

SEQ ID NO: 57475 - DNA, 122 bp, Homo sapiens
tagggcgggacgtgcaaggcgattggcgaatgcaggcgagaggcggtcgctattggtccgcggcgctgtcggctcggcgggcggtgcccggacgcaggtgccggccggagcggagctagtgg

SEQ ID NO: 57476 - DNA, 122 bp, Homo sapiens
ctgtgtgcagaggtttcgggtgccatgtgttcatcagctgtgtgccagctctgtgctgtgcgcccaaagaggagaaacgtcgagcctgccccgcatcctccccagctcatgttctcccggtg

SEQ ID NO: 57477 - DNA, 122 bp, Homo sapiens
gttggggcgctgcggaagcccctgggcagaaaatgaaaactgcctcatgctgacaggaggcgaggtgctggtggtgcaaagggagctgaagcccgcccggaactgcttgccacagcatggct

SEQ ID NO: 57478 - DNA, 122 bp, Homo sapiens
tgaacaacataccccactgggaagtaagcagccctggattctgcctcttgctaactgattcgtttcgaaccctgtttttctatctgtaaaagggactgtaactcccctgcccctgcctagat

SEQ ID NO: 57479 - DNA, 122 bp, Homo sapiens
atatatctaatatacatatatgtaaatatttatttatatattaatatataacatttttaacggtatggcagtgtttgtgttcaagcatacccaggtatatttttgttttgttttgtttttag

SEQ ID NO: 57480 - DNA, 122 bp, Homo sapiens
tggactgcccactcaggacagggtctggggtcccgctgctgctgtaaggggcgtgcacgacggggaaggtggagccgccgccgtactgctgggcgctgacgtagccgctgctgcacatggga

SEQ ID NO: 57481 - DNA, 122 bp, Homo sapiens
gtcctgtcttaggagtctcacctgaatttaccaaggatgcatctgtgcttggggatggctcggtttgaggggtctgaggagcggctcccctggatcctttcctccccaggagcccacctgcc

SEQ ID NO: 57482 - DNA, 122 bp, Homo sapiens
ccgcgtccagccgccgactcactgacacatcacaatgagtcacgtgctctgtgcaccgggcggatttgtcagatccgctgctgcatcacggctcggcagggctctctgggttctcagtgccc

SEQ ID NO: 57483 - DNA, 122 bp, Homo sapiens
gcccatgggtcagtgcctccgtccacacctactgcctcagggagcccggggtctctgagacgactgcaagcaagctgtgtggtggctgccacagtttccagagaaatggagatttaagagcc

SEQ ID NO: 57484 - DNA, 122 bp, Homo sapiens
agcctgtgtatcctggcaattatactaatggctttatcaatgacctttcccaaattagtacgttaaccccattcttatcacagtggccttcctcctgaatagagctcatgatgccctactta

SEQ ID NO: 57485 - DNA, 122 bp, Homo sapiens
gagttcctgaggacgtgctacgggggcagcttcctggtacacgagtcgttcctctacaagcgggagaaggctgtcggggacaaggtgtattggacctgccgggaccacgcgctgcacggctg

SEQ ID NO: 57486 - DNA, 122 bp, Homo sapiens
tacccaaggctactaagtttgatcccagtgcccatttgtgctaatgacgttggccagggacgccaatttactaccctgaccctgtccttcaaatattgtctctctctccttggctagggttg

SEQ ID NO: 57487 - DNA, 122 bp, Homo sapiens
aaaaataaggatgcatataaaactaagacacaaaatgaatccctgagctgagtttgcatccgaaaacatcacgttcacacttcatttgggtgaaaatgaacaaggacacttctcatgggcaa

SEQ ID NO: 57488 - DNA, 122 bp, Homo sapiens
acgtttcttagaaaaaaaaggaggaatttgggaaggagtcagagaggcaaaaggagaaaccgggcaacagcagtatctcagaacccaagttttggacaatccagtttgggaagaatgatcac

SEQ ID NO: 57489 - DNA, 122 bp, Homo sapiens
ggactggacaggaacattagaggacccccagcaggaggtcaggccaccagagtggacaaccggtgtaagcccctaacaacctggcttgtcccccagccccacccattttgagaaaactcgaa

SEQ ID NO: 57490 - DNA, 122 bp, Homo sapiens
ttcaaccttggtactatcaacattttgagccagatcagtctttgttgtgggggcctatcccgtacattgcaggatgtttagcaggatagttgatctttacccactagatgccaacagcactt

SEQ ID NO: 57491 - DNA, 122 bp, Homo sapiens
gccttatttgggctggttggtggggattcagtaatgggaatacaccaagaacaagacagacgtgctgccagacatactggaactcacggtttagttgggaaagactgacaggaaataattat

SEQ ID NO: 57492 - DNA, 122 bp, Homo sapiens
acaggggtgagacactatgcccgaccacactgccttttgcttgtaacactttctttacttcgtatcacatgtcacaatttttcctcctacttcaagcaattctttttctcagtcttcttagt

SEQ ID NO: 57493 - DNA, 122 bp, Homo sapiens
tccgcctgggcccagattccaccccttgactgtctccccccaaaaatttcctttcactttcggtctctggctgtcacccggcttggccccttccacacccaactggggcaagcctggtgcgt

SEQ ID NO: 57494 - DNA, 122 bp, Homo sapiens
aaaagtttttagagccttttaaaatgaacctgtttctgccacttttccaccgcctcaaaacgactgggaaatgtaaactggcttcaagatgttcttgcttgagggtgtctggatttggacag

SEQ ID NO: 57495 - DNA, 122 bp, Homo sapiens
gtggaggacgcccctgtggtgagtgcgcccgtgtcccccgccgcccctccgtccctgggtcgtgggctgtcaaaccttctaattctgcggccgccccagggctgtgagacccagcgtcgcgg

SEQ ID NO: 57496 - DNA, 122 bp, Homo sapiens
cttgatgtggttttggggtggctttgctccctgggtccctagtgatgtgggagtagccaccgaggcatgtaaggctggccacacagggtgcactgcgtcagcctgtgcccgacaggaaggga

SEQ ID NO: 57497 - DNA, 122 bp, Homo sapiens
tttttagacgcagaacgcggctcgcggccaccagaaagcgtcctccgcctccgcccccagcgtccccgcgcccctgcgcggccgcaccttcacccgctgcgcctcgtttatgcactgctggt

SEQ ID NO: 57498 - DNA, 122 bp, Homo sapiens
tatgaggactgctcttctcaaagccaaaaggtcattgggatggcttcttagaagcccttgcgttgctttttcgtttggtaacggggctaggaaatctctgtgtcaccaggaaggcgagtggc

SEQ ID NO: 57499 - DNA, 122 bp, Homo sapiens
cgacctcttcaggagaaaagagtgccggccaggagtccctccagtaacctcagtttagatcgggttttcgcgcctcccctaggaatccggctggaaaccccggagactctgcgcctagagtt

SEQ ID NO: 57500 - DNA, 122 bp, Homo sapiens
ggaggaggaaatccctccacagaaggtttacattatttcgctccgcgggagacccggcttcggcagcacttagcagaagattttggcgggaaaggcccaagccctagctgaggactccgggt

SEQ ID NO: 57501 - DNA, 122 bp, Homo sapiens
ttcttaacattccggtcgtttgtgctgtaaacttggaaaggtttccagaatttccagaagcgcctacctctacctttacagaaaaatacacaatctctgcttgtatgttggtttctcagcaa

SEQ ID NO: 57502 - DNA, 122 bp, Homo sapiens
gcggcccgtcattggttaatattttattctgttgacatgttttcttactgctgaggcttccgacaccttctcccaggccccccctcccggccggagcttggcctgagctgtcaaaaccccgc

SEQ ID NO: 57503 - DNA, 122 bp, Homo sapiens
cccaggttctccgtaacagaacaaaagctctcaatacctgaatccagactgcttgactctcgatttccactagaaggcgcatctgatgcggatgttggagagaacgcattgcttacttacaa

SEQ ID NO: 57504 - DNA, 122 bp, Homo sapiens
aagcgacccaactatattctgaagtgcctctgctgcaagacccaagcacccagtcgggcgcgccttgcatttgtctccatgtcgtaggaatgtcaagaaagttaccgccaagtggtttacca

SEQ ID NO: 57505 - DNA, 122 bp, Homo sapiens
atccggcaactggagacacaagcggaccccactggcaggctgctggacgcctggcagggacgccctggcgcctctgtaggccgactgctcgagctgcttaccaagctgggccgcgacgacgt

SEQ ID NO: 57506 - DNA, 122 bp, Homo sapiens
gctcacgcgcgcagaagaaaataccggcacacggacaggccattgaccggcaggaccaggcggagtttggcccgggcagtgggaggagagccaggggaagatcatcttccttctggctcccc

SEQ ID NO: 57507 - DNA, 122 bp, Homo sapiens
gaaggagagagagagaaagagggaaacagagatagagtgcgcatgtgctagctgactgaccgtggagccatggatctaggtgttcctgaggccagttccatgtcccaagcatggtgatgtaa

SEQ ID NO: 57508 - DNA, 122 bp, Homo sapiens
gacattttgtctcacaaaggaacaaattaatggaatcagcaaaagttgcagggaaaatgtcgctgctgaaaagtgacccctggaaaagaagaagtagctaccagagctgtgggacctggagg

SEQ ID NO: 57509 - DNA, 122 bp, Homo sapiens
aaactgcagcacagctaggagggtccttggagatcacatggtcccacctctctccccaaacgtacataccaggaaatggagacccagatgggacagggacctgggctccagaggcaaagctg

SEQ ID NO: 57510 - DNA, 122 bp, Homo sapiens
gctggacattttgtcctccctgtcaaaacgctgcgagcccaggagcagatggagtggtgtcggcagtcgtaaaacgccccgccccaccggggacaaataggtcaacaggagggattggcgcc

SEQ ID NO: 57511 - DNA, 122 bp, Homo sapiens
caaaatccacagatgctcaagttccttatataaaatggtacagtatctgcatataacctacgcaaatccttcagtatacttaaagcatctctaaattacttataatacctgatacaatgtac

SEQ ID NO: 57512 - DNA, 122 bp, Homo sapiens
ggaaaagcactggaggcacgcagcgcctgctccaagaaccaatatttccactaactgctgcggaaatggcctgctgtccccctgagaccagattcagctagtaactgctgaaacaacccgcc

SEQ ID NO: 57513 - DNA, 122 bp, Homo sapiens
ttcggatgaatttgaagacatgtggctgagaagcggctcatcccagatggctgtagggtccgatacatccccactcgcggcgccctgggcaagtatcggactctgagctcatgagagattcc

SEQ ID NO: 57514 - DNA, 122 bp, Homo sapiens
ctggccaccacgggacaggaaggtgagatccgggacctcagctttgcaagcaggctccgccggcgaccgctgacgggcgctgggctcgcggcgctgcaaggcggcgaggcccgggcctggcg

SEQ ID NO: 57515 - DNA, 122 bp, Homo sapiens
gagttttgaatagtcctttcccccaatttactatataaatttaattttcaagcattggaacgtggtctatttctcaattctgtatacatttaattcaaggtgctgtagctgagagtttggag

SEQ ID NO: 57516 - DNA, 122 bp, Homo sapiens
cccgagtccccggacctgctcccgcgcctggggctagggcaggctagccgtccccggcagcgggggtacctctccagcccctgcactgcaactgcgggaggaaacactgcccgcgggcggtg

SEQ ID NO: 57517 - DNA, 122 bp, Homo sapiens
taccccctctctctgtcttcaagagctagtctggctctctcaggctgtggcgctcacagacgattctccttttccagctgcagtgctgaaagcatccatccttttcacttttttttttttca

SEQ ID NO: 57518 - DNA, 122 bp, Homo sapiens
caaggcccagcgatcaccagacgtgcctcaggacacagggcacagtgtccaactttgacgcgtcctctccgggcactttaataccaaatcacggctccgccacttgacagctatgtggacag

SEQ ID NO: 57519 - DNA, 122 bp, Homo sapiens
ggttttattcactgctgcattcctattgcctagaatggtgttgggtactcaacagagagtcgatttagtgacttgaatgaagggaagactttctcatgttccttcaaccttgcctacccagg

SEQ ID NO: 57520 - DNA, 122 bp, Homo sapiens
ggggttccggaatgagccggggaaagcaaggggaaggtttggggttggctcccggtttcgcgcatgcgtgcactgcacaaaccatttggcgggtttttccggccactcagttctgccaccgt

SEQ ID NO: 57521 - DNA, 122 bp, Homo sapiens
gtcctcgcttgccctgactgaggctgccagggacagggccctcctggatgagaggtggggcgggggcgggtccatgcctgtggtacggaagcggccaggccaggccggcgggtggggtggca

SEQ ID NO: 57522 - DNA, 122 bp, Homo sapiens
tttggatagacggatccttaccttgagcttggcaaatttctttccaaatatcctggcagccggctgggtcctggaattttagcaccaaaccctggttctcagcttcataccaaacaattagt

SEQ ID NO: 57523 - DNA, 122 bp, Homo sapiens
gcaaaaatggtctctgttaaaacaggctgttacacaagatgttaccatatgttcatttcacgagacctcacacatgctttaaggaccatcattatttcaaatctaagtagtttatagttcat

SEQ ID NO: 57524 - DNA, 122 bp, Homo sapiens
tacaataaggcaggcttggagtcgtggctggtgctagttaccgggaagagttcctcttggcgcggtgggcgaacaccaaagcttccaactgttcccttccctgggtggcggcagctgcccaa

SEQ ID NO: 57525 - DNA, 122 bp, Homo sapiens
tgcaaacccgagagaactgggtaagttggggtcggcttgcagtttggggtaccccgagggcggtgtacgtcggtaagattgtaacagtattactggaagacttattcgactgtcctgatgat

SEQ ID NO: 57526 - DNA, 122 bp, Homo sapiens
ttctgttcacagggttttcagtctggcaagagacacaattaagctggtaaaattgcaggacgagagctgagctgatttaccacaggacccatctattcatccatccgtcttctttttctttt

SEQ ID NO: 57527 - DNA, 122 bp, Homo sapiens
cgggtggcagagggaacatgggaaaggctgccgggccccgggctcgccggtgggtggccccgtgcagcctgttattcataaaacttggagagaaagtgcctttttgtaggaaagtgtggggt

SEQ ID NO: 57528 - DNA, 122 bp, Homo sapiens
atcaggcacgcagctggagcgaaccacatggtttctgggggcctttgtttctcgctgcagcgggagctccaggtttatcctcagtgttctgtgtcctgtgcttatagaggcccgtcctctgt

SEQ ID NO: 57529 - DNA, 122 bp, Homo sapiens
tttctaggtccttggctgcatagagccccaggccctggatacgggagcgagccaggtacacgttgttcttccattcggtgcgcagccgccggtactgagatgacttggagtgcacaaactgc

SEQ ID NO: 57530 - DNA, 122 bp, Homo sapiens
gagacaagaagtcttctccggatcgaagttcttttctctatcgaaaggttcgtggtctctcgggcttaaaggaatgaagccatggaccgcagcgccgagtgttacagcttgattagagaaac

SEQ ID NO: 57531 - DNA, 122 bp, Homo sapiens
cgaaggctagagaaggcaatggcaggggaggtcagtccctgccgcgggccggctgcagagcggacgttccgccctgctcccggccccctcttcgcccgccgggttcgccgtgtcgaataact

SEQ ID NO: 57532 - DNA, 122 bp, Homo sapiens
acgtccttttacattgaagaacccaacggggccttttacattgcggatgatggaccggctcgtgacgtccatgaatttcacgcgcacctgtgtgcactgtccctgagagccggtcctgccca

SEQ ID NO: 57533 - DNA, 122 bp, Homo sapiens
attcgcaggccctggactcctgtctaaacaggacaggcccgggcaaccgcagggcaggggcgtctgccaatgatgggggaggactctgctgcttcttaagctccagcgtctcaagccagggc

SEQ ID NO: 57534 - DNA, 122 bp, Homo sapiens
aagctcttgccgcactgggtgcaggggaagggccggagctccgggtgtgagcgctcgtgccgacgcagcagcgtcattgtggagaaggtctccttgcactctcggcacacaaactggggggg

SEQ ID NO: 57535 - DNA, 122 bp, Homo sapiens
cagcctctacctgcagaagtcagaggggcctgggctgagtgcttcctgcccctcctggtgcgctcctgcccctggagccacagcggcagggggaatggggagggggtgtctttctgggggcc

SEQ ID NO: 57536 - DNA, 122 bp, Homo sapiens
tcatcatagaaacagaaattccactaataaatgtcaggtactgcctccttaaccttggtccgctatttccctcccactttcagcagtctggtttattccatgggtggaagaggaagccaagt

SEQ ID NO: 57537 - DNA, 122 bp, Homo sapiens
gtagcccaataatggttattccccaggagccgcgcgaagcatgagctaattttcagtgagcgcggactttggggtaacggttccagcacagcacatccctttctcctcttttcactcatcgt

SEQ ID NO: 57538 - DNA, 122 bp, Homo sapiens
ggcttctaacggtccgagaaccgggcagggagagagatgcggaaacggtcgcagacaaagcggggcgaggttttgcccatgtgcatcccgcccaacccccctgcggggtacttagggccaaa

SEQ ID NO: 57539 - DNA, 122 bp, Homo sapiens
tattgagagtaatgtcatcctctcccctcctggatatgaaaaacaatatcacagtggggccgtgcaccccctgcgatattgggagtaatatcatcctctctaccccctggatatgaggaaca

SEQ ID NO: 57540 - DNA, 122 bp, Homo sapiens
aagcagggaggaggatgactggtcctgcggataagggtgtgcgcgagagccaatcaaaagcggatgtcgaaaagaggcgccgctccagccagtcacgtcgcgaggtgcggtcggggccggct

SEQ ID NO: 57541 - DNA, 122 bp, Homo sapiens
aagggagctcttaaaggagagccatctccaccctcaggtatccatcacccagctccagcgcgcctgggaaaaccgccccgaaagtccaagaggaagctcagagttgtaacggccgcggagcc

SEQ ID NO: 57542 - DNA, 122 bp, Homo sapiens
tatatactgactttgccagattgcatcagctacctgcttaacattttactctggtgctttcgaaacaacactctgaaagtcagaataatatgtggcctctgcagcatttcccagtttggcat

SEQ ID NO: 57543 - DNA, 122 bp, Homo sapiens
actaatcagcacgcaggagcctcagtcctcaaaggaggactattacagtgttatcagctgcgggcctgggtgtacggagcccggaacagggatggggacaggaccttgcgctgtgcggcttg

SEQ ID NO: 57544 - DNA, 122 bp, Homo sapiens
aatcagattcctttatcagctttgttggcccacagctgctgtaatcaaggcaccatgagccgacctgttttggagagccctctgcagctcctaggattttccagcactgggattagtaggtc

SEQ ID NO: 57545 - DNA, 122 bp, Homo sapiens
cactgcttggaaagtccagcacactggggtccagcgctgtcaccccaatctcaatggagccgctccaggagttgacctgggataggggtattggacagaggcttagaatgggccacccccca

SEQ ID NO: 57546 - DNA, 122 bp, Homo sapiens
gcccgcgcccaggctctgtcgctgagcagggcacgccttccacgcagcacccaaatgcatcgaacactgtgcacgcgcacgagaataagaaaccgtgacaaaaatacgggtgcatcaatgta

SEQ ID NO: 57547 - DNA, 122 bp, Homo sapiens
agagactttgacaaggtctgtttcccctctgtgctcctgctcccatccttggcaaaatatcggcaatagtagtgttgttgcctgggaagttgccctgtcctctctctgttcacaattccctc

SEQ ID NO: 57548 - DNA, 122 bp, Homo sapiens
ctgctgagttttatgccacaaggtaagcccctctttgataatgtgctcacccagagttttcgcacaagtctcctcctctgatttgggttcagaatacattttttctctcaatttagtttcag

SEQ ID NO: 57549 - DNA, 122 bp, Homo sapiens
ctttttataaacataaggtttccctggcatccttggccagactccacctactcttcttcccggctgtagaggtcactgtgtttttgtggcaaaagctgcaggtggtgacagaaatgctggat

SEQ ID NO: 57550 - DNA, 122 bp, Homo sapiens
ttcaaggctccagtcaccgcagcagttgtccatgctgtagtttccactttcctgtatgggcgggctggttaggattccactttcccccaagtgcttagcccagggccagacaaaaagtagtt

SEQ ID NO: 57551 - DNA, 122 bp, Homo sapiens
cgagggaggagagggacgggagtcagaggacagaggcggggaggaggaaagggccggagccgccctgctcccggcgtggcctcatccccagcgaaagcgcgacacccgctgtctgggaaggg

SEQ ID NO: 57552 - DNA, 122 bp, Homo sapiens
attcagtgatggctcaccagggctgccggctggactgcagccagcgagaaggggcttgtgcgagttcagctgggagccagggagggagcagcggtgggaggatggccggggctcaaatcgct

SEQ ID NO: 57553 - DNA, 122 bp, Homo sapiens
gaagccgggccacctggctcagagacgccagaccctggccggcaatggggctgccaggggcggggacgctggaggagctaggggtgtgggccactgtgctgcctgccccggcctggcggcct

SEQ ID NO: 57554 - DNA, 122 bp, Homo sapiens
agagaaggacccctcccgcccccactcagacacacagagctcccctgtgtgtatgcaaaacgttcatgtccagagatggcccagagctgcaagttctcccatagtcctccctgggcagctct

SEQ ID NO: 57555 - DNA, 122 bp, Homo sapiens
tgtgctgtcatgatacattgtgtgtgtccaggcagtgacagtatatttagggctggccctcgctgtctgtggagatcaaggtgaggggacatctctggtgctcttgggcttgagagaatgca

SEQ ID NO: 57556 - DNA, 122 bp, Homo sapiens
ccactgcacgcccacaccacaaactcgcctcagctgggcacgtcctttcccagggcccctcgtgggtcaagccgtgcgtcattttgtgccattgtcttcagttattggaatttggaaacgtt

SEQ ID NO: 57557 - DNA, 122 bp, Homo sapiens
tttccgtaagtggtaaggtcagcctcatacagtattgcacagcctttcccattccttttgcgtcagtgagaatcaaatgattcaacagtgaaaagcaaactcttggactggaatagcaagat

SEQ ID NO: 57558 - DNA, 122 bp, Homo sapiens
ggcgctcatcgtgtcaaaccctgtgttgagggctccattcctcaaggtccattttaccggcgaggaagccccggctccgggaggggaggagcgcgcccaaggtcaccagccagttgagtgag

SEQ ID NO: 57559 - DNA, 122 bp, Homo sapiens
ataggattctcattattatctttcccttatccaggaaagaatccgcaccacatacagatacggatttattgaacatgcagcactaattaaaaactcacccagcctcttgacgaggtttgggt

SEQ ID NO: 57560 - DNA, 122 bp, Homo sapiens
tcggggtgcttgctggtttccggggtgtgaatgggtgagggtggaaaaccactcaggcaccggtctttggtgcctgctttatctcttggctggcccattcggtgctcagtgaggcacctgtc

SEQ ID NO: 57561 - DNA, 122 bp, Homo sapiens
cactgggaatgcagagtgccgggcagagcagctcctggggcacagcaggcctgggtgcagcgtggagggcgggggaaggaggagccctgtgggtgaccctggcaccagaacctggatccgcg

SEQ ID NO: 57562 - DNA, 122 bp, Homo sapiens
agccagaggtttgggacgacattggccccatcaaaaggttccgggacgaaggcatgctgccggcggccttcctcactcctggctccgctcccggccatcctgctgctctcctctggaacctc

SEQ ID NO: 57563 - DNA, 122 bp, Homo sapiens
tttgaggagagccaggctgacactaaaaatgaaattggttctctcacagcatcttggacccgtaggattgttcctggctcctctttacagtgcctggtggcttttccttccctattcaatct

SEQ ID NO: 57564 - DNA, 122 bp, Homo sapiens
tcttgtcgatggcattgaagtcggacacgtggaagacgtgggcggacttgggctctgaggcgatctcctccagctcctccttgagtgcctcgcccacgcccacggcaaagatgcggatgcca

SEQ ID NO: 57565 - DNA, 122 bp, Homo sapiens
ttagcttgaaattaaggcatcttctctgactgcattacaaacaggcaagttttttcatatcgattcactcaacaccttttatttatccagataatatctaggatcacgcttaatatctaagt

SEQ ID NO: 57566 - DNA, 122 bp, Homo sapiens
ctcgaaaaagagtggccacttccttcacatcaccagggccttggtcctggtagggggtcccgcccccggccctgtcctcctccccaggccgggacctccgcgcctcccacacacagtacaac

SEQ ID NO: 57567 - DNA, 122 bp, Homo sapiens
ggtcgccagcgcctcagctctgtggaggagcagcagtagtcggagggtgcaggtgagggacgaggccggggtcgtggggaggggagttcggagggtccccgtagcccaggcctgtctttgtg

SEQ ID NO: 57568 - DNA, 122 bp, Homo sapiens
agagtaatttacttagtctatagcttcttatcctctagtttatgtctgctgaagcccagccgatcctttaaaaccctaataaaattatcgccatgaaggtttctcctcccccaatcagaatt

SEQ ID NO: 57569 - DNA, 122 bp, Homo sapiens
gtctgtgtcaaataccctttttcctggccggcggcagccatgacgctttctgggttgctgcggcaacagcagaaggcggggctgggccttattgctggcggcgcggtctcgtggggcggggc

SEQ ID NO: 57570 - DNA, 122 bp, Homo sapiens
gttggggcaagtaacaaaggctgcagagaccgagcccggaacgtagccagagccggaatccgaggccggcgagggctgggtcggagggcttccagaggccatggtcagcaagactcggggta

SEQ ID NO: 57571 - DNA, 122 bp, Homo sapiens
agatctaacaatagcttaggacaagtaataaaatgaatgaagcttgagggaccgggaagccgggctgctcagcctcctgagccaccttttaattggctgatgtcaacctctcagacatctga

SEQ ID NO: 57572 - DNA, 122 bp, Homo sapiens
tctctcaggtggggtgtgggtcttcacagccagggcttgagatccacccaggagtgggtgcggagagggcagctatgtcccctctccccacacccggccaacttggggagcctctcccccaa

SEQ ID NO: 57573 - DNA, 122 bp, Homo sapiens
ctcttgcccctctcagctttgtgggagaccagttcttcagttccacagctgggggtctctcgtaccccgtccagcacctgaattcagccagacctctaataaccagggaagggagatcagac

SEQ ID NO: 57574 - DNA, 122 bp, Homo sapiens
atgcagatctgcagaaaatattgacagcagctgagactaccgtattggtaacgctgggcacgaggaagccgaggccgggcatccacactcccgtgattctacggtggcatggctggggcgag

SEQ ID NO: 57575 - DNA, 122 bp, Homo sapiens
cttaatgttctccacaaacctggagtgatcttgtaaaaaatactcattttgctaacaaatcgaatatgtaaagttaacaactgcttttatttcactcaaatttcctttcctttggttaaatt

SEQ ID NO: 57576 - DNA, 122 bp, Homo sapiens
tttagtcactgctttggaaacacacattatccacagtcacgctgctcccagtgcaatctccgggacaatatatctctattagtttgcatttgtagctatcccagtcatagcagttttgtatc

SEQ ID NO: 57577 - DNA, 122 bp, Homo sapiens
atgacatcaatgacctcactctggctgaacacgctgtgcacgggcacctgcttctccagccgggcctgggcccaggccaccttctcggccaccgtgccaccgttcagctggatctccatgat

SEQ ID NO: 57578 - DNA, 122 bp, Homo sapiens
aacaagccagtgagagccggcctgatgggaggaccggcgaaaggggcttggtgaagcccgcgctccttgggggtgggaatgcggggatggggtggtcgcgatgcagggagggcgacagggtc

SEQ ID NO: 57579 - DNA, 122 bp, Homo sapiens
tcagtctccaaagttttgctttgcagctctcccagagggaacagactgattccacctcttcgtttccactgccactgccccgatccctcaagccaccatcatctcttgccaggcagctgcaa

SEQ ID NO: 57580 - DNA, 122 bp, Homo sapiens
cccctcctcccagcatgggggtcctgcagcctccacacccccctccctccgtccccggcccgcacctccgcaggcgtgaccctgagaaaggacacagtgctcggatctcggccccccgcggg

SEQ ID NO: 57581 - DNA, 122 bp, Homo sapiens
cgtgactctccctaagtctttaatctgcggtgtcgtgaggtcgcagttgtcctggagacacgctgacgagccccccagccgtcgcggtggagcagctgctgggacgatgaggcagcccctcc

SEQ ID NO: 57582 - DNA, 122 bp, Homo sapiens
tccaggatccagaagcattgaaggggtaaggctcaaggttgaggcctctggccatcggtgcgcaaatgagggcaaagtgtttggctggggcaggggattgggaagggaaaatgaagagagtt

SEQ ID NO: 57583 - DNA, 122 bp, Homo sapiens
ttcttaatacgcatccttgaccgctcctcactaacagtgaaaagaacaatgcttccaaaacggtcacgtcctcgctttttacacaagtgcgcgtgcgcactgggcgctaggcctctgacgtc

SEQ ID NO: 57584 - DNA, 122 bp, Homo sapiens
gcaatcttgaagggtgtggcattcaccatgtgctgcttccggataccactccacctggttcggtagtccacaatgtggcaggggggaagaatgtactcgtcataaagcacatctccgttgta

SEQ ID NO: 57585 - DNA, 122 bp, Homo sapiens
cggccgaagtacaatacacagttgttcttgtgggtctaatgcaggtggttgcgattatttcgtgaaacaaatatggaaagcacctaacgctgaaagcacttgacccagaaataggagtcagg

SEQ ID NO: 57586 - DNA, 122 bp, Homo sapiens
agccctgagccctttgggaatctcacctggggacacgctccgggggctgcgtccacctgtcgggccccacacacatcttcatccattgtagccaagagaaaaacacggaatcccaaagtcgg

SEQ ID NO: 57587 - DNA, 122 bp, Homo sapiens
gtctgggcctgtggaatgaagcagaagacgtcatcgtgaaggaatcagtttcaggtctcgcgagagttggcacatgccacgcgagggccactgccctattggcttctgagtcacggactgcc

SEQ ID NO: 57588 - DNA, 122 bp, Homo sapiens
tcaactgactgaacctccacacatttgctgatggctcccaggatgcatctcaggatgagacgtcccctctaagatccagctcccttttggaggtcaccacctcgtggcctgcagtcaccctg

SEQ ID NO: 57589 - DNA, 122 bp, Homo sapiens
ttgagctgctttcccctaggcctttctggttcagtcaccctttctctggcagcaccagcccgagccccgagacctctcctgaaggtgggcttcacagattcctccaccccatcaggagggaa

SEQ ID NO: 57590 - DNA, 122 bp, Homo sapiens
acaaagcagcacacaggcaaactggagtctgtaattagatgtcttccagggccctcctgccgggctcctttcagcaaagttgcgacccctcccgctggccctcttcagattgcagaccatct

SEQ ID NO: 57591 - DNA, 122 bp, Homo sapiens
aggagggttagggggctcaacaagctggctgtgggcaaatcatcatgcctggctgtgtgccggcccttcgctgggtgtggggaggcagggaccagacctaggcttctgaggaactaagatgg

SEQ ID NO: 57592 - DNA, 122 bp, Homo sapiens
gttccagacccggcccctggcagggcgggcttcctccctgcgttgtgacccgacccgtcccgggaaacgtttgccttaaagcggaatttcctacctgtacgcagtgggccctttttgcttct

SEQ ID NO: 57593 - DNA, 122 bp, Homo sapiens
aactctgcagcaagagtttggtacccgcgttctcctcaggcgccatgacgtgggcggggccgcagcgttgccaggagaccgggcggaagccgggcctggactgaaaagggggcgggcccagg

SEQ ID NO: 57594 - DNA, 122 bp, Homo sapiens
gcctcaggttagggaacgtccagtgcgcagaagctgccccgtgggaatcccattgtccatcgcctcctaatgtttcgtcctggccgtgccctatcccttcctgaggctgggttgttatgatg

SEQ ID NO: 57595 - DNA, 122 bp, Homo sapiens
cggggcccggaaggcattttcagcagccccagcggctgcattggcagctgcggttcgcaccgcagggttggagaagacaccagcagcaaattcttgctgggccttctgaaagctggcacctg

SEQ ID NO: 57596 - DNA, 122 bp, Homo sapiens
ccccctgttggccgcatgccgcggcctctggtgagctgggtggggatgctcctagtgccccgcctgcgtggcgccccccaggggccacccgccacggcgctcgtggtgtctgacccgcaagg

SEQ ID NO: 57597 - DNA, 122 bp, Homo sapiens
aggtacctgcgcctgggtccccgcccatagagctgcctctggaggttctgggaaatgggccgcagatgcatgaagttgcagaagccacctcgggtacattccctgcatagagggtagagaga

SEQ ID NO: 57598 - DNA, 122 bp, Homo sapiens
cgggcaccccatatctcatttcatctagtgaagtaagtcccaaaccccactccagaggcccggtccctgacctggaggaaactcagtcccagcccctggctcacccgctgggaagtcgaagg

SEQ ID NO: 57599 - DNA, 122 bp, Homo sapiens
cttctcagggcattataaggactgaacaagaatgtctgtgtgaaacaccaggcgcatggtcgggggtggtacatggtagttcttcccgggtgacaccatattcatcccagggtccatgggac

SEQ ID NO: 57600 - DNA, 122 bp, Homo sapiens
ccaggcgtctctggatctgaggatcctggtagtgatggcttagggtggtgttccctggtccgaagcccggagctaagggcaccgggtctgcggtgcggctgcgaggagcagggaagcgcagg

SEQ ID NO: 57601 - DNA, 122 bp, Homo sapiens
ccagcctggcaggggattttaaaatcggccaatcacagcgggcgccaggcctccgctttccgcttactggtcctgccgtaggaggcgggtacgtgagcgcaccaatctgtggccggcgagcg

SEQ ID NO: 57602 - DNA, 122 bp, Homo sapiens
ggtggacatcttgtcggctcttaggtggaaccatcggagcagaagctcggggttgctgggcggttccgaggtgacggaagcgggagggtgcgggagaagtcgctgttcgctctgcggagtgg

SEQ ID NO: 57603 - DNA, 122 bp, Homo sapiens
tgctcccaccacacagaattaagttccatctcactgccctgtattcaaggcgctgcaggacgagtgctccttcacagcccccagccattccaaactacctgactctcttcctggaatgccca

SEQ ID NO: 57604 - DNA, 122 bp, Homo sapiens
accttccgcggaacggacgtcaggccaagcagtcctgagatctgctggcttctacctaaacgggacttggttcctgaatactcagttcatcagtgtcaccacacatcctcatcttcagtgtc

SEQ ID NO: 57605 - DNA, 122 bp, Homo sapiens
acgcgggagcagatggcccggccccggccagacaatgatcgcggcggccggagggctcggcgcagtgctggggcctggacttgttggtttgcaaaccacggggaaaacgtctgtgccgtgaa

SEQ ID NO: 57606 - DNA, 122 bp, Homo sapiens
agctattatgtcaggaaataactctggcctttgtcctgtccgctgtgtgtttcaggatctcgatttccctcccgtcctagaagggagttggatcaggtgattctttccaaatgaaaaattgt

SEQ ID NO: 57607 - DNA, 122 bp, Homo sapiens
ctcagcagctgctgccaatgccagcttccaatgccagcttcctccatttgaacaaaactacggagctctttgcacttttaattttttcctcttccctgctagggtagctggcaggagttaat

SEQ ID NO: 57608 - DNA, 122 bp, Homo sapiens
gagacagagagggacaggcagcgccatggtaggacgccaggcgaggacggatggggaagccgaagctgggcggaaagagccgaagccaggcgcgaaggaagccgaagctgggcgggggaagc

SEQ ID NO: 57609 - DNA, 122 bp, Homo sapiens
cactctcaaagctttcatccagtggtaccaatttagttctctggcacctcctatgtcacacgtatgagagacttttggtagacttgcgtggcaaatggacaggtgttcctttgggcctcctc

SEQ ID NO: 57610 - DNA, 122 bp, Homo sapiens
gaccagatcctcttccttccttctttccttccttccacaccttgcaagggtcctctgtcccgcactgcgagtaaatcatacactttggaagtttagcattagagagcccagcaggggagaaa

SEQ ID NO: 57611 - DNA, 122 bp, Homo sapiens
atccgcctcagcctcccaaagtgctgggattacaggtgtacaccctgcccagccacaagccgatttttaaaaggtcaaatgctatgacagccattttacaggaaaaaaaaaaattgtatagt

SEQ ID NO: 57612 - DNA, 122 bp, Homo sapiens
ctggccccagggaagttaccccgaaggtccccaagttgggggggtgccagcgctaagcgccgctcgtgggccctcggacggaccccgcgaccgatagggcgcggaaagccccctcccttccc

SEQ ID NO: 57613 - DNA, 122 bp, Homo sapiens
acccgccgcacggcaccatgggcctcgggggtctgtccaagactacaaggcccgaagcgccgcgcgccgcgcacgcacagtaggcgagggtggtagggacttatagtttttaaactgtaacg

SEQ ID NO: 57614 - DNA, 122 bp, Homo sapiens
taaaagaactggctgtacaagagtactcccctttcacagtattcctttttacttcatatgcgagttattgattatgctgtaggatttaactattacagcactaaaaggcaactattgaggga

SEQ ID NO: 57615 - DNA, 122 bp, Homo sapiens
ggaaaaagaaacaccaaggccttgctaaaaaggagaagcctaaaaaagataaaattcccacggcagttctgttcaactgtagcctgtgagtgcaggaataatgttcccgtggggaagcatta

SEQ ID NO: 57616 - DNA, 122 bp, Homo sapiens
cgaaacgccgcgtgacttgtaggtgagagaacgccgagccgtcgccgcagcctccgccgccgagaagcccttgttcccgctgctgggaaggagagtctgtgccgacaagatggcggacgggg

SEQ ID NO: 57617 - DNA, 122 bp, Homo sapiens
tataatgtcaaaatcaggtagagagttatagttccctcaaaatcaaggttcagtcattagcgtgactagatcagtgtcatagacatttctaggctgaggtctgataagggaccagtggacac

SEQ ID NO: 57618 - DNA, 122 bp, Homo sapiens
atttcctgccaatcttagtgtttgatccctggctcaagttatttcctctgcctggattgacgtccggccttgtttgctgagctcgtccttcacgacaagttgcaaatcacgttttctgggag

SEQ ID NO: 57619 - DNA, 122 bp, Homo sapiens
aaaccttcccttctgcctgttgcctgtaacaccacccagccaaggtctttaacttttggtcgggtggtagcatctccctaaaggagtgtctgagttttaagagggactttttaacccccatg

SEQ ID NO: 57620 - DNA, 122 bp, Homo sapiens
agtagctcgcctttgcggcccacccaaaatatctggataatggttaccccgtcctcagtgcgttggacttgcatagacgcgagttcggtctcgggggccaccacgataatttgggggtctgg

SEQ ID NO: 57621 - DNA, 122 bp, Homo sapiens
ttttttaacaccaaatcttgagtgtgaagatagaagcttcctccagtgaagcagcagccccggcactgggcctgcagtggagaccgggaatgagagaagcccctggcgtgggctggcaagga

SEQ ID NO: 57622 - DNA, 122 bp, Homo sapiens
agagagacacagcaaagtggggtgccaggcagaggccaggggctttcaaagaccggggctcgagttccgtcacagccacccctgtgacatcggccgtctttctgaccctccgtgtccccggg

SEQ ID NO: 57623 - DNA, 122 bp, Homo sapiens
aggcaaatacctgataccttctgtctggcctcctgaatgctccttggttccattccaatacgttgttcactgtgctgccagagtaatcttctcaaacgataagtgtgatcatctcacttccc

SEQ ID NO: 57624 - DNA, 122 bp, Homo sapiens
tcatctccatagggttcacttttggatacttctcagcccaacccaggctggccttgccagcgtcccttccccgcccgaggcccacccagcgccagcgcccggttctcttgcagcgactgggc

SEQ ID NO: 57625 - DNA, 122 bp, Homo sapiens
aaggtgtttcaccttggtctcaaccagctagcaggttcactttcagatacttcacacacacgatggcatctaagcctcatgtctctacgagttggtttaggaattgtgcaagtgaggaagtc

SEQ ID NO: 57626 - DNA, 122 bp, Homo sapiens
cattgttgatccaaatccaagtgtcaaggtgcgccccagaaacgctgcttcccagacagtcgtgtctggtcttgcgggaaaggaggaggcgtcccgccaaggaaccaggcgctcagaagctg

SEQ ID NO: 57627 - DNA, 122 bp, Homo sapiens
gggtcgggccagatgacacggcaaaaagataggagagatgtgcctgggactcacctggcacgtggcaggccaagatctggatacggatcggagcccacagctctggctctgtgtctgccagg

SEQ ID NO: 57628 - DNA, 122 bp, Homo sapiens
ctccaggcaagaaacgagagtccctcgcagcctaggccagctctccctcgccacgccccgcgggggctcccgtgacagaccaagtctggcgctttcccagcgtcgcagctggaccgagagag

SEQ ID NO: 57629 - DNA, 122 bp, Homo sapiens
agggaaaacccaccctaccacagtccgctcttccaagtggacggcagacctgggaggggacgcctgtgtcacgagcccttttagatgcttaggtgaaggcagaagtgatgattgtaagtccc

SEQ ID NO: 57630 - DNA, 122 bp, Homo sapiens
cccactcaagcctcaaggcatacctgtttgcatatgaacctgaactgtgcctaagccttccggtttagggatcaaagcttcagggttctgagtccagagtgtgtggattcctcccttgctcc

SEQ ID NO: 57631 - DNA, 122 bp, Homo sapiens
ggggtcctggcgcgtgatgccccatcctgggcactgagaagagtgaacggggtcctggagcgtgatgccccgtcctgggcactgagaagagtgaacggggtcctggcgcgtgatgccccgtc

SEQ ID NO: 57632 - DNA, 122 bp, Homo sapiens
gtggtgatgcaaggaagagcagcgtggggggaagaggcaccttctcatgtaaaatgaccccgtggctcagcagctgccagtggatttcagtgcagtctggtgacagaaaattcagagggctg

SEQ ID NO: 57633 - DNA, 122 bp, Homo sapiens
aatcctctctcggaactttaataaccaaagagccttctgtctaaaaggagacagcttaaccgcattttatttgcttatgacaaataaatcacgatatgaaaggctttgccgtacttaagcct

SEQ ID NO: 57634 - DNA, 122 bp, Homo sapiens
ggctgctgcagacgtacttagaaaaggggtgcatactggatattcaggctaggagaagaacgcaaaaagcagtgacgtacattattctctgcatatatttacttgggaaattgtgcgtctcc

SEQ ID NO: 57635 - DNA, 122 bp, Homo sapiens
ccctgagcgcagtactaagcggcacaatcaggacctctcaacaaagcacaccaaagcagtcgcccgcagcctggccccccgccctaagtccccccagagtcccctcaaagctaggagcgccc

SEQ ID NO: 57636 - DNA, 122 bp, Homo sapiens
ctggacccaccctgtgtgtgtgtggttgccctgagcccacagaaagacaccgccagagtgcggattgagaagcctttattgtgggaggatcggggtgtctgagggccccgggagtcgggatg

SEQ ID NO: 57637 - DNA, 122 bp, Homo sapiens
ccacgcgccggggatcaggtgcggaaggctcctctctaataaacagcccattgaaagggccgcccgctctttattggggcttttcaaagttcgcctcaaacctccctttaaaagattgagta

SEQ ID NO: 57638 - DNA, 122 bp, Homo sapiens
gcagccgcacctccgcaagctcctcttttccttctcagctctcggagaggggcagtgtcgcgtcaggagggccggaaaacggccccgcagcgctgccctcggggggtccgcctcctgaactg

SEQ ID NO: 57639 - DNA, 122 bp, Homo sapiens
ggggcggctctgggccttataagcggcgggggcagggcggcagggaggcaagtgtcaggccgatgtgtcgcccgcgaggggccggggtcggggccgccggggccatgcgcgcgggctgggca

SEQ ID NO: 57640 - DNA, 122 bp, Homo sapiens
aaggctgcgtagtggagcttgcaggctggagctccggcgcttcctttccctgagctaaaacgactgggtcctgggatctggcctctagctcgcctgccgagctctttccaggcaaaggttgg

SEQ ID NO: 57641 - DNA, 122 bp, Homo sapiens
ctgctcccgccctgagttggctgtgtttgcaaagtgggcccgctatcagaattcagctcccgaaatcaagctaagtgacacggtgtggccatttatcacattaccggactccaattgaagtt

SEQ ID NO: 57642 - DNA, 122 bp, Homo sapiens
tatacacctggcacatgtgtatcttggtcgtcggaatgagaatcccattaaaacctcccacgtgatcagaacaagttcagaaaaatgaggattatctaagcagctctggacaaagatgggtt

SEQ ID NO: 57643 - DNA, 122 bp, Homo sapiens
aacataattaataattggatcattaaaaacacaacttcaatttatatagcacctttcttccgaagagttgaaagcattcgtgcttatctctattatttcgtttgtccccataacatctctat

SEQ ID NO: 57644 - DNA, 122 bp, Homo sapiens
ccacgcccgcagctcacagaggagaagaccacaaagtagtccagctcagggcacgcctctcgggtcaccctgtgggcacgcgtgtcactccccattggccagcatccccaggagcccccaac

SEQ ID NO: 57645 - DNA, 122 bp, Homo sapiens
ctgagcagggcttctggttgtctctatggtgtggtatgattttcattattttcccagaaccgtccttccatggtttccaatgaaaaggctgatgattctgggagcataaaggtcagcctggc

SEQ ID NO: 57646 - DNA, 122 bp, Homo sapiens
tgccgcggcgcggggagctgggagcgcggcgagcggggcggagcgggcggagcgggatctcgcgggaagcgcggggacgcccggcgcctcctccccgccctccgcgcccacccccttcccgc

SEQ ID NO: 57647 - DNA, 122 bp, Homo sapiens
tgctttttagaaagattagtttggcagttacttatttgtaaccagaattagacagcaaatcggatgcaggggagaagtcaggtgactattagtctgcgaagtaattctggacaagagcagtg

SEQ ID NO: 57648 - DNA, 122 bp, Homo sapiens
ggcggggggcggggccgaggcgggccgggggtggggcggaagctataaggggcggcggcccggagcggcccagcaagcccagcagccccggggcggatggctccggccgcctggctccgcag

SEQ ID NO: 57649 - DNA, 122 bp, Homo sapiens
cctgacgccactttgtcagtgtggttttcacatcctgtcctagcggtatgtttgtcttttcgcccccagattcacagcttcctaagtgaaggagccaagtcttgctcttttctttaccctag

SEQ ID NO: 57650 - DNA, 122 bp, Homo sapiens
ctgtcttggggcagagctgcatacgttttgtgttttttttttttttcagaaaagaaaggtcgagaaagaaaaaaacaagtcattcagggatggtccctgtggccagtcggaaaggtgagaga

SEQ ID NO: 57651 - DNA, 122 bp, Homo sapiens
actgcatcaatcagtgtgtcctacatgcccctttgagcatttcttatcagcacagatgcccggctcagttccccctacttccaagcacccatttttgctgatccctcagcctggaagccgat

SEQ ID NO: 57652 - DNA, 122 bp, Homo sapiens
gtgtaagctgattggcacttcagagtttcagtgtcttgaggatgaattccaaaccgcacccggcctcagcctcacttttaccagaaaatgaaaccggaagcctcccctactcttaattcccc

SEQ ID NO: 57653 - DNA, 122 bp, Homo sapiens
ctgttcacccttcctaagtttcctgctgtgtgtgtgcttgtgtgtgtgtgcacacacacgcgtgtgtatggttgcttcactttatctgccagggactggagaaatgtctctcttgttttccc

SEQ ID NO: 57654 - DNA, 122 bp, Homo sapiens
tgtgtgtgtggtgggttttattgttgttttagcggggctgctccaggagtggggctgcgccggtcagatgcagccggcacggccccggggtcgcgcgatcgccccttccccgccctcggatt

SEQ ID NO: 57655 - DNA, 122 bp, Homo sapiens
ccgccccgcccctgctgctccgtgcacactgcagtgaggggcccgggcggggcgcaggggcgcgccagggtccgggtccgggttcgggggcggggcgcacctgggctcctccccggggcggg

SEQ ID NO: 57656 - DNA, 122 bp, Homo sapiens
ggcttggagtgggagggcggggagggtgcactgacttagccttaccaccaggtggcgacacgaacacacccaccggggaggacaccggccccgcggaaggtgaggataactgggaataccag

SEQ ID NO: 57657 - DNA, 122 bp, Homo sapiens
aggaaacaagtacgcaatcctgaagctggtgcaaagcccaggccccctttctttttcaagcgtgcttccagcctctgaagttcctccgtacggacccccagctctgcctgcaataaggaata

SEQ ID NO: 57658 - DNA, 122 bp, Homo sapiens
gggagggggctgcaaggcctgtactgaatctccctgctacagagaaccctgggcatgatgcgggtctctttcctctgactgactgaagacatcctgaacctcaccagtggggttgatgtcag

SEQ ID NO: 57659 - DNA, 122 bp, Homo sapiens
cccacgccagtacccccggcacgctcagtgccccacacacccacgccagtacccccggcacgctcagtgccccacacacccacgccagcatcacagaggaacaaaggccaaaatggtgctga

SEQ ID NO: 57660 - DNA, 122 bp, Homo sapiens
cgcaccctcagcggctcagtccagaagccccaccacccccgccccccgcgcccctctctgcgcctgcgcgcagcacggtcagccagtcaaccgctgcagagcccgcctccccgacagaggac

SEQ ID NO: 57661 - DNA, 122 bp, Homo sapiens
attagcaaaccgcaaacaatactaagtctcaattgtcctaatcagtaagtcagcatttaccgagtgcctactaaatgaatgagtgttgagcttgttccagcgcatctgtgagatatcacctc

SEQ ID NO: 57662 - DNA, 122 bp, Homo sapiens
accccatcaccctgaccttgacacctgtaacacttgcccacaggaagtatctaacaccctcggcctgcacgcccccttgccctttccgcaccccgcgcgactcacggggaaggccaggaggc

SEQ ID NO: 57663 - DNA, 122 bp, Homo sapiens
tgaggtttcgagtgcactggtgatttgcctactgccacaaaaccaggctaatgggctgggcgcggtggctcaagcctgtaatcccagctctctgggcaaaggctgaagcggacggatcacct

SEQ ID NO: 57664 - DNA, 122 bp, Homo sapiens
taaaactgctggcagtctagttagggaactgccacaatccagggaggagtccctgaaggccggacctagatagcaggtaaacagaggcagggagcaccagataagagaggcttggtgtgcgc

SEQ ID NO: 57665 - DNA, 122 bp, Homo sapiens
ggcgcccgcaggctgctgcagttggcgaatgaggtcagtcgcgctgcccgcggtggcgggcgccggggtgggagcagagggggctgggaaggccgcggtccccgcctttcccccctccacct

SEQ ID NO: 57666 - DNA, 122 bp, Homo sapiens
ctgccctgaaaggctgggggtttctgaggctcggttttcgctcgcgtgaaatggactattcggcgaccggccggctctgtgcctggcaggcgcctcagccccgcggtgccgggaagcagctc

SEQ ID NO: 57667 - DNA, 122 bp, Homo sapiens
gcatttggcacagtgacgtctctctagtgctcaagaaaactttgcagttacacccaggagcgtctctgtcctgtttcccccttaacctccagcctcagccgactcccacttggctgcacagg

SEQ ID NO: 57668 - DNA, 122 bp, Homo sapiens
gtgttcagcgttgggggcagctttccctccaagaggagcttcacaaacatccgctctctgcggggccgcctctccgtggcctggggccgctgtcggaggaaggctctccagctgccgtcatc

SEQ ID NO: 57669 - DNA, 122 bp, Homo sapiens
gtccgcggggcgggggggcggtctcgcgcttcagctggggcctctaggcagatgcttccccgagttgaggcctttggggcccggcctggggtcccgtccggccgggggcagggggttaggtg

SEQ ID NO: 57670 - DNA, 122 bp, Homo sapiens
aagaagcagttcaatcgcatgcgccagctggccaaccagacggtgggcaggtaggtcacccgcgggcaccgctgtcggtgcgcgcccgcgaggctgcatccgcaggggcgcgcaggtgatgg

SEQ ID NO: 57671 - DNA, 122 bp, Homo sapiens
ccctgggtaaggagtgcttcaaatgggagattcaaagtaggtgagcctggtctcctgagacgcagctgcttgcctaaagccgcgcaggagggcttcgcagagcctgcgttagatcgctcggt

SEQ ID NO: 57672 - DNA, 122 bp, Homo sapiens
cactgttacaaaatcatatgacttcttttttcgagggcggaggaggatgttgaaggcagtcgctctaaaggccaggaaaggagaggatgtttctgcccattgccattggtctatcagcaccc

SEQ ID NO: 57673 - DNA, 122 bp, Homo sapiens
gggctgggaggcccgggccaaggctgtgcacacaccggctgccagcgggttcacgcccgccgggccctccctgtgcttctcagaggccgcacaaaagatgggctgcctgccgcaggaggagg

SEQ ID NO: 57674 - DNA, 122 bp, Homo sapiens
attttaactttttattaccaaaaaagtataaattatgttatcttgagtaatattttttgtcgtttgttaaacatctaaacagaagctcctttttgatatgtgtgtgtgtgtatacaaattgt

SEQ ID NO: 57675 - DNA, 122 bp, Homo sapiens
gttcaggcctttccagggcgggcacatagaatgtcctcgcctccaaggtttggagagctgcgctataaaggttcttgcaggcggtgtcctgagcccagagctgcctgcaggcgggcaggagt

SEQ ID NO: 57676 - DNA, 122 bp, Homo sapiens
cagagccattgtgatatgaggagatactggctcttctggaaaagagaggcttttcttcatcgagagctaccagaggagatattatctgtcctctgtgtggcacataggaaaatgtgagacct

SEQ ID NO: 57677 - DNA, 122 bp, Homo sapiens
atttggactataaacatgaagaccgtacttatcttatatacaaaaacttgccgcattgaacgaggcaggaatttctaccccagtggtagtggtctcctttatgtacataatgcagaagtgaa

SEQ ID NO: 57678 - DNA, 122 bp, Homo sapiens
cgaactcctagcctcaagtaatctgcccaccttggccttccaaattgctgggattacatgcgtgagccaccttgcccagccaagctgttgttattttctgatctgaatactttgatagtcca

SEQ ID NO: 57679 - DNA, 122 bp, Homo sapiens
gttttcatctcccgtggagatctactcggtccgcctattaaacttgagacgctggggtcccgcggagccgctgtgtcaggctctaaagaggttttacatttcccagaggaaagcgctctatg

SEQ ID NO: 57680 - DNA, 122 bp, Homo sapiens
ctgtgggagggcgggtccgcccagcttgtttaccgaccgccggccgcccgtggctggacgcggtgccggtcccaccgccgctcttccgccagatttccccacaacttcttttcctgccggag

SEQ ID NO: 57681 - DNA, 122 bp, Homo sapiens
tgagaatgtatctcgggcagtgtagtaggaaaggcccctcacgttttgcgcctcctccaccggcattcctgggacagcactgatgactaagggagagtaacttccagggaaagtaacttcca

SEQ ID NO: 57682 - DNA, 122 bp, Homo sapiens
ccgcgctccgatttgccgacccgggaatggcctctgggatgtgggcgtcccagacaaagccgcattgattgcagcccaggccggcccggccgcgaggccgcaagcactgggtggaccgtcgg

SEQ ID NO: 57683 - DNA, 122 bp, Homo sapiens
aaaatttccttcatctcagaataacagaaatggtcagcactggtctaaaatgacatgggtcggccaggtgcagtggttcaagcctgtaatcacagtactttgggaggctgaggcgggtggat

SEQ ID NO: 57684 - DNA, 122 bp, Homo sapiens
gccaatgggaacatgtctaggaccggggaagccttgtagtttttcttaagcacactgccacgcttcaggccagcccttctgggccacgttggtaacagcaagcatggtctctggaaagcctt

SEQ ID NO: 57685 - DNA, 122 bp, Homo sapiens
gtccctgagcagtgcagcacgctctgctgccctcgacgcagctcggccgcgctcatgggacgtaccctggggtccgacagaagggcagatggtacatcctgatgtcttcctcgatccttgtc

SEQ ID NO: 57686 - DNA, 122 bp, Homo sapiens
caatagttcacatgtacccagctcttgctctatgtcaagtcttcttcctgagaacattcccgagcaccctggagagcctcccccgcacccctactgtccagttcccacttcccgactgcggt

SEQ ID NO: 57687 - DNA, 122 bp, Homo sapiens
ctcccccgggcctagcgcctttctgcgcgtgtgcgcccttatggtcggtgcgggagaccccgtatcctccagctgcttccggtggcccttcctcaggtcatgtcccgcagtcccctgcctct

SEQ ID NO: 57688 - DNA, 122 bp, Homo sapiens
cttctctttctctccacccacagaacccaacattgatagtcccttgaacacacatgctgccgagctctggaaaaaccccacaggtgagtcctcagtccttgagcccagggtgatccctcccc

SEQ ID NO: 57689 - DNA, 122 bp, Homo sapiens
aaaggtctgcattacccactggggtgagtgtggggctgccggtggcgggtgtacatcagacgcattttatctactggcggcacaatactcccgggggttggaggtttgggtgcaaccgcaag

SEQ ID NO: 57690 - DNA, 122 bp, Homo sapiens
cagacctgcccctctgacttttcttgctcttttctctctgcttttccgaggccggctttccgcgaggcacttacttgaaaatggagccccggcattcctgcatgcacggacactaaatccaa

SEQ ID NO: 57691 - DNA, 122 bp, Homo sapiens
gccacataatggaggcgctgccaccgccgacacacacacacacacacacacacacgcgcgcgcgcacacacacgccccgagcccgaggcctctcggctaatctgggattccccgcgccccct

SEQ ID NO: 57692 - DNA, 122 bp, Homo sapiens
ctctccctgtagttgtctcaggcaaggctcctgacttccttcttgccggctcaacttctccgactctaccagctgatgctcttcaccctgccagggacccctgttttcagctacggggatga

SEQ ID NO: 57693 - DNA, 122 bp, Homo sapiens
tagtaaatcctgttcctaattaccaggggaaatttcagaagagtgtgatggcctctatgacgcttaattctaacactcaacactcaattcactaattcactggtcagtacagataaataaca

SEQ ID NO: 57694 - DNA, 122 bp, Homo sapiens
agccaatgcacagtatttatcaaatggcatctaagatggttaaagcacacctaatcctctcgtgggtgcctgccaagagtagaaaagggtagtgtatagatatcaattttattgtccagcat

SEQ ID NO: 57695 - DNA, 122 bp, Homo sapiens
tggggcggcctcagggcgcgagcaaggggactgccgcgcttcccgcgcctctgcgcctggcgcagcctctgagctgagctccgcctggttgggattaattgcacgcctctgtgtcatcgggc

SEQ ID NO: 57696 - DNA, 122 bp, Homo sapiens
ctgggtcgatgctgcatcccccacccccgtgcacgtggcctctgggctagcacgcaaaggcgccctcacccttgctgcgtcctggaaggaaggagcacctgccctggaacttggccgggtgg

SEQ ID NO: 57697 - DNA, 122 bp, Homo sapiens
gagtgggcttctgcccagtgcgtagtgtgaacgtgcagacccgggcctgctgcgggtgggcggtgggcaggtctctgtggagtatctccccggccgtccccattgacttcgtggaacactct

SEQ ID NO: 57698 - DNA, 122 bp, Homo sapiens
cattttgaatcactaatatagtaatcatgtctctggcagcctatcttgcccaaacacacacggagagacaccacacaccctacttcaaattaaggtgggggcggggggaattccactgctgc

SEQ ID NO: 57699 - DNA, 122 bp, Homo sapiens
cagagttgccgagccctgagcgggctgatgggtgggagcctcttccagacggagcgcgcccgccccgtgacgccactcagtggccgccatggcaagcgacagcccgtgccgggctcggacac

SEQ ID NO: 57700 - DNA, 122 bp, Homo sapiens
ttgagggatgggacagcccagtgttgagggacgctgacccagggtgctccagaggaggggcgaagggctgagggggtctgcaaagtactggcctgggagagcaaatctttccacctccctct

SEQ ID NO: 57701 - DNA, 122 bp, Homo sapiens
acaaaaaccaaaaataaaaatcaaaaccattaaagatgcataaagtgacccttgcacttccgttgtctcttcttgcaaatagaggtggtgctgctagggaactgctccagcaccggtgtaag

SEQ ID NO: 57702 - DNA, 122 bp, Homo sapiens
gacctgacagtgtggcgcaggtctgttgactggctctacgtgccaacgatatcacacaaacgctccgtgctcggtgtctcggggcctagttcaagtcccaggtcagccacttccctggaaag

SEQ ID NO: 57703 - DNA, 122 bp, Homo sapiens
gccgggtgggccgtttgctgaccggatcgcggctacccgccagcgtgtccgcggcgccgccgccagcatgggctgtgccccgagcatccacatttccgagcgcctggtggccgaggacgcgc

SEQ ID NO: 57704 - DNA, 122 bp, Homo sapiens
gccagggattccccgctccgcgccctcatcaccccccggaaaccacaaccgctgcgcgcgcggctcggacccccacccgccgctcccctccagcagaccctaggcctccgggaaaccgcgcg

SEQ ID NO: 57705 - DNA, 122 bp, Homo sapiens
ctgatatttatagctagatcttggtcacatgagccccaggaggggaccagctgagcattccgatgccaagcggctggtggggcttgagtttcctccaggcctgaaagactggccctctcaaa

SEQ ID NO: 57706 - DNA, 122 bp, Homo sapiens
aaggtcctgggagtccatagacgctgagcttggccccaccccctggttgcttcagagggccggatctggctttgctcaggtggagcacctgccctggggccagctccgtccctggggtaggg

SEQ ID NO: 57707 - DNA, 122 bp, Homo sapiens
gccgtaggacctggaagattctcgaaagttctggaaggttctctcagggatcgccgcgggcgggggagcctgttttcccaccgagacccgcgagggcggtgtccggggtctgactgcaggac

SEQ ID NO: 57708 - DNA, 122 bp, Homo sapiens
gcggcgagtgggtgccctctcgctctcagtcctcccggtccgcgtttgcatgctagcggccgctcccagtggtggtcaccgccagtgccaatcccttgcgccgccgtgcagtcccgccctct

SEQ ID NO: 57709 - DNA, 122 bp, Homo sapiens
ggcagtgcctctaacaccttggcatgtcttgggattccagtcagccagccgggctctcctcggacaggactcctcttgtttctggccaaaattctggtgaggatggttgtggggggaagaga

SEQ ID NO: 57710 - DNA, 122 bp, Homo sapiens
attctaatttaactggttgtcctggattttctttgccaaattggtctgccctacggagtgcgagggctgggattttaacccaggcctgcctgctctgagctgacctttcctggcacctgcaa

SEQ ID NO: 57711 - DNA, 122 bp, Homo sapiens
tggtcccgctttgaacgctctgctggacttacggagctgctcttagtgctgggcagtgaacgccaagctgtcgtgtccacacggccaggggaacgccagggccaaggccagcatgcgctgag

SEQ ID NO: 57712 - DNA, 122 bp, Homo sapiens
aagaagtttgtatgagtttgacgtcattctcttccttaaatgtctaatagaattcagcaacgaatccctggcttccaggatctcgctagaatagaatattatcgccttgatttcactgcttt

SEQ ID NO: 57713 - DNA, 122 bp, Homo sapiens
tttctcaaccctcttcccctccagatcctaaactccttcctctaggaccaggctgctattcggtacccgtgtgtgtaggtaccagtatggccataccagctgttaagtcattaaaatacttt

SEQ ID NO: 57714 - DNA, 122 bp, Homo sapiens
agcatgcgcccttccgcacctccgtacagggatcctcccattaagccaccagggtctcctcgccgccttctggagcatgcgcctgaatcccctttcaggtcccgcctcctcgcctgtgcatt

SEQ ID NO: 57715 - DNA, 122 bp, Homo sapiens
caatgaaaaaaatccacagtaaccaaattgttaaaatgttcaataaaggcaagatccaaccgtgtaggactcactctcctcaccctgatgtccatcgcaattccaacaaaacatttccaaaa

SEQ ID NO: 57716 - DNA, 122 bp, Homo sapiens
cttgggtcctgtgctggttttgcttcagaaatgacctgcaatagtcccgttgctcacgagcgtctcatttcctgctgggcccatgccctggcaccgcaggctcccctgcagccccgcacgcc

SEQ ID NO: 57717 - DNA, 122 bp, Homo sapiens
gctgtctcttcccagaggaggtgccccatgggcagaggtgccaacaggccacactgccctcgggccgcagagcagggagccggcaggaacgacctgaccacctgcgcggcctggtcaggcca

SEQ ID NO: 57718 - DNA, 122 bp, Homo sapiens
gcagaggctagaaggcctacaaccagagcccccctccagcccgtggtatacgggaaaccacgcaatggcacctatgggttccagtcctggtggtccctatgcacagctgcgctgccaggacc

SEQ ID NO: 57719 - DNA, 122 bp, Homo sapiens
atccccttccggctttggggcctggcttgggccactgtgcatggtgtggagtgggcaccacggcctctcctggggttccaccgggcctggcctgtccctcaccagccactgcccctctgtcc

SEQ ID NO: 57720 - DNA, 122 bp, Homo sapiens
tgcaaagagcacatttaaaaagacggtatgaggcagggagctggaggtgctctttgaccccgcacagccactgttttagctgtgtgtctcccagcaactcccatgagcttctccgagcttca

SEQ ID NO: 57721 - DNA, 122 bp, Homo sapiens
ggaatgaacccaaacacccaaaggtgagctgccctagaaaggcggacattgggccgggtgcggtggctcatgcctataatcccagtactttgggaggcccaggtgggcggatcacctgaggt

SEQ ID NO: 57722 - DNA, 122 bp, Homo sapiens
tccaggcctcttgcctgcagggcgttcatccccaccaccatgctgctcaacatgcttacacgtgtctcctggcgccctctgcaagcacgcgttccactcgctggttaagctgagtgttgccc

SEQ ID NO: 57723 - DNA, 122 bp, Homo sapiens
ccgaagcgccccgtattttgctgcagcccgcggggggtcgccggagggaagcctagagtgcgccgagcaccgccccggcaggtggaggggctgcgggaaataaaataacttgggcaggaact

SEQ ID NO: 57724 - DNA, 122 bp, Homo sapiens
cgaggtgtcggcagcctgccctccttccgggtctctctgggctaaggctgaggtgtcggccgttggcccttctttccggggatctgcgtggggagtggttttctttcacatcaagatgttac

SEQ ID NO: 57725 - DNA, 122 bp, Homo sapiens
acagctggggcagcttcttctgcctgcgcagccggcctccgccgcccactcgccgggggacgcccccggagtccccagagctgctgcagctagaggagatgctgtatttgcagtgcttgggg

SEQ ID NO: 57726 - DNA, 122 bp, Homo sapiens
gaaaagaggaatttttaaaaacaaatcttcccttgcctgaggccattttccagccttccacgcgcctttgccggggaaagagtcgatgactcgccctgctcatcggctcagaccagagctac

SEQ ID NO: 57727 - DNA, 122 bp, Homo sapiens
cggaagaaaacaaaggcccggctccatcagggcaccaatcccgctcgtcggcctctttctcggcctccaatgagcttctagagtgttatcacgccagtctccttccgcgactgattggccgg

SEQ ID NO: 57728 - DNA, 122 bp, Homo sapiens
tccactggaggcactgtcttggagatgacctcctcgtcctcgtcatcatcatggtcattccgtttaaattccttcagcagcttgaggcaccgaaccatgacgtcggtccctggcaacacaag

SEQ ID NO: 57729 - DNA, 122 bp, Homo sapiens
gacactccttcgctctgggcggcctcacagctcccgggccatatccagggggaacctggccgatgaaactgcagaggtttccacacaagtttggttcccataaagggtctgtgagtggggaa

SEQ ID NO: 57730 - DNA, 122 bp, Homo sapiens
cgcttgaagcacagtcgccaacaacaaccgtagcccaaacgccggcaccagacacccactcggcccagccgccatcgctaccattttccgcaggtttctggctgcctagaaggacccctaag

SEQ ID NO: 57731 - DNA, 122 bp, Homo sapiens
cgccccctccccgcgctcacctggcgcaggtgctgcagcagcgtccccgcctcctcccgccggccctggcgcaccatccgcagcagctcctggaccatgccgactcgccggtggtagggggg

SEQ ID NO: 57732 - DNA, 122 bp, Homo sapiens
acaagatttgtggttgtgaagtataattctaaagcctcacaagcatgaagggtgtgtggacgttttcctgagtcatcctagggaacaaaagggagtgggcagagctagttaccagagttgga

SEQ ID NO: 57733 - DNA, 122 bp, Homo sapiens
tgtgtgcgtccggactctggagcccagcggggaagctagcaccagcctgggccgcacacacgtcctgctgcaccactgccctgccttcgggctgctggcctcctgcagacaactcttcctgg

SEQ ID NO: 57734 - DNA, 122 bp, Homo sapiens
ccctccctcccttgctctgaggattagacacaggagatgctgcctcatactctcgcgagacggacggagctcttcgatcgtccgattctcccagccgcaccacgggtgctcccacctgcgga

SEQ ID NO: 57735 - DNA, 122 bp, Homo sapiens
gctgggccaggctgctggcttccagtgacatcacatgactttggggccactgcctcatcccgtatctgcgcgtatgagatgcattgtctcttcctctgcagttgagctgaatgaatacctcc

SEQ ID NO: 57736 - DNA, 122 bp, Homo sapiens
cacctgtcccagccgtgccgctccggtccggagagcctggcctcgacatctgtcccagcccggccgctgcagcatcggccctagtggggaaggtctggctgtaacttcttcacccacagcta

SEQ ID NO: 57737 - DNA, 122 bp, Homo sapiens
gcatgtgtgtttagggctctcaggtacagcttcctctttccagataactccaccctagtccgctctcagggttggcagtgaggaggggaggccaccagacgcccggtttatgaccttgggca

SEQ ID NO: 57738 - DNA, 122 bp, Homo sapiens
tccccagagtgggaagcatgtcttctgcatcttcatccccccaccccccgctgctgctctcgctgcctagcagagtgcctgaccacagcttgggctcagcaaatgtttgtggtgtgaatgac

SEQ ID NO: 57739 - DNA, 122 bp, Homo sapiens
tgcaacccaaattccctgcatctgagtacgttgaatgatgaaatgtaccttgggagctgtcgctcctctcgctctcgaccccgctcgaagaaggaactgtccaaatagatgaaaacgtgaaa

SEQ ID NO: 57740 - DNA, 122 bp, Homo sapiens
ttctcagtcatcatcatcccagcttttcccggctcgaattcagcctccaactcaagctcgcgggaaagactacctgagaggagaaaagcttctgtccctggaccttcttctgagggtggtga

SEQ ID NO: 57741 - DNA, 122 bp, Homo sapiens
aattgcgggagacagggaaggtaaaaaaaaatcctctttcgtgagggctttaaactgctccgagccatctgattatcaaggtggtttaacactactctggtgttctcactattgttaatttc

SEQ ID NO: 57742 - DNA, 122 bp, Homo sapiens
acatttcccgcctgcgcgcttttcagtctcagtgtccgctggaggtgggggcaggggtaacgtagatatataaagatcggtttcctattctctcacttgctcttggttcacttcttgggaag

SEQ ID NO: 57743 - DNA, 122 bp, Homo sapiens
cctaaagaaagtatccctttactctgcctctagagtaaaattgttgaaagttgaagtatgcgggaagttgctaataaacagaacaaacttcacaacatacgtactctctttttttcgttatt

SEQ ID NO: 57744 - DNA, 122 bp, Homo sapiens
ggagatcccagacactcagcggtaagaccagcaggatgggggaggggtccctcctggcctcgagaattatgcaactttcttgaagcaaagaagttgcctggaggaggagaagatagggcgag

SEQ ID NO: 57745 - DNA, 122 bp, Homo sapiens
ggaaaccggccttttcctccgcggcccatgggagtggttcgttacagcggcgacgggaagcgtccaagcgtccctccaagacattcgccgcagcagcttttaaaccatttgcgtttctgccg

SEQ ID NO: 57746 - DNA, 122 bp, Homo sapiens
tctcattaagtgacttgcatatggagtgaagacacctctcccctcgcccaccctggctcccggccctcacgtgctctgcgggctgccagcttccccggctccacgcacaccgccagcgccgc

SEQ ID NO: 57747 - DNA, 122 bp, Homo sapiens
tcacatcctgcactgagacgcacacaaaccctggtgcggcctccagccctcaggctgacccggagtgaccacttcacatcccgcactgagacgcacacaaaccctggtacggcctccagccc

SEQ ID NO: 57748 - DNA, 122 bp, Homo sapiens
tgagggcaaaaagagaacaaagtgttttcaagtctctattctttatttttcaaaaattagcggccttgtctaaaaaaaatcctagtaattataagctaggaaggcagaaggaatgtcacaaa

SEQ ID NO: 57749 - DNA, 122 bp, Homo sapiens
catcatcaaacttgatgaaatacacagagggtttggtttccacttggtgaatgaccatgccgatccttttggagccatcttctttggtatattccacatgcttacctattaggccatctaca

SEQ ID NO: 57750 - DNA, 122 bp, Homo sapiens
cccctccgacccaggactgccaccaggcagggacgctgaagcctgggcacttgtgcccttcggccgcagcgcgcagggtccctcccccgccagcctggcgcattgcgggcctcgggctcatt

SEQ ID NO: 57751 - DNA, 122 bp, Homo sapiens
tcccaagaggccctggaggcccaggcccagaccctgggggatatggaagcactcctttgtcgtggcgtgggaagccccacactgctctttccttggtgacgggtgacccgccatgttcaggc

SEQ ID NO: 57752 - DNA, 122 bp, Homo sapiens
tcggccgggcggttgttgttgttgactcgcgttgccgggttgcttggtcgccacgactaccgtggctatggcgcctccgtttccctcaccggggcaactgttgctacccaccctagttacgt

SEQ ID NO: 57753 - DNA, 122 bp, Homo sapiens
ccagcctgtccagtctcttcccagagttccctcagggctggagacaggcaggcctgactgcgggcctggaaagcagcacactccgggcactcctgctgtctgggcccagccttagagcccaa

SEQ ID NO: 57754 - DNA, 122 bp, Homo sapiens
tgcaaccttctttttttcccttgctacagtatattgcacaccttgccaaacattagttctcgttagattagaccacaaagaagtacacatttaagaggagacacacagaggacctcgcagag

SEQ ID NO: 57755 - DNA, 122 bp, Homo sapiens
cagaccaagggattattctccagccacctcctctatgactcccttgttcttcatcttggccgctctccttggtcattggcaggtagcagcttcatgactagtggtgttcagaaaggagaaaa

SEQ ID NO: 57756 - DNA, 122 bp, Homo sapiens
tggcaggaggctgcgaggagccggcgcggtcgcagtctccacggcgcaggcccacggtagcgcagccgctctgaggtgagtgccctaccgcgcaatctccagctatttcagccccggcgcag

SEQ ID NO: 57757 - DNA, 122 bp, Homo sapiens
ctctaagcggtcggaagggtttcctgtgtgtcagcaacttcactttgccgagatagctggcggaagagggaaggagcgctcgcgggccaatcgcctgccagcagccaccttggagcgcaccc

SEQ ID NO: 57758 - DNA, 122 bp, Homo sapiens
ctgcatagcaacaaaagtagaagctggaatgggcctcctccttccggacggaccgttggccgggctccgccccggcgcttctgattggacaaggtacaaggccccgccccctcagaactgag

SEQ ID NO: 57759 - DNA, 122 bp, Homo sapiens
ccacagggcactcagcagctcccagaccagggaggccacacccagccacacagtgggcagcgtcagtgtcttcagccactgagaaaactggtggaaggtgaaagctggtggaggaggggggt

SEQ ID NO: 57760 - DNA, 122 bp, Homo sapiens
ggccccccgcccactttagttttcccgcgactgcccaatcaacgccaagcaaccgcaatccgtagagacctaaggaacgcacatccgccaatcacgagttgcgtcgccaccgccccccccca

SEQ ID NO: 57761 - DNA, 122 bp, Homo sapiens
gcccttctcggctcagggcgtgcatgaacctgcggatggccggcgggcgagtggcgccttcgcgatcgcggccgcccctctaggcggaggcaccggggaccgaacccgtgacttcgagctcc

SEQ ID NO: 57762 - DNA, 122 bp, Homo sapiens
aggttgcggtgagccgagatcgcgccactgcactccagcctgggcgacagagcaagactccgtctcaaaaatagacacaacagaagtcccagttctgcccctggttgtgcggtccgcactta

SEQ ID NO: 57763 - DNA, 122 bp, Homo sapiens
tgagctcgagtttgagtaaggcctgggcgacatagtctctttaaaaaaattcagttcatgcgggtgcggtggctcacgcctgtaatcccagcactttgggaggctgaggcaggcgggttgcc

SEQ ID NO: 57764 - DNA, 122 bp, Homo sapiens
tgcacagctgccggttccaggtacagtccagcacatggaagagcttggggtgctccatgccgatcatggtgaagaagtcctggtccccgaggtggccgcggaagtggtacttgtcggccagc

SEQ ID NO: 57765 - DNA, 122 bp, Homo sapiens
acagcagcgaactcagtccggccgggcccagaagctgggcgggaaggttccgggcttctgcgcctgcgcagcgccgccgcgtgagcgtggctgcaggggcgacagcgggccctagtggcccg

SEQ ID NO: 57766 - DNA, 122 bp, Homo sapiens
ggaaatctgctttttcctgaatggattctgggctggacagcctgaagacagccatctgctcgcagcaacagcagcagcagcatgcttgcttatatgcatacaatcttcctttgcactgctgg

SEQ ID NO: 57767 - DNA, 122 bp, Homo sapiens
gggggtcacggtgaggtggcggggcgccccgcgacagggttggagaggtggtagcctcggcgctaacaattcaccaaatagttaatttggaggaaggggtatgctgaggctccctcctaggc

SEQ ID NO: 57768 - DNA, 122 bp, Homo sapiens
tccctcccaccgccctcacccggccgccggtgcaggaagatagctttcgccggcctctcgcggccaaggcccagctccagccgctcagcccgactcggcccgcccccggggtgcattgtggg

SEQ ID NO: 57769 - DNA, 122 bp, Homo sapiens
tcttgctctttgggtatttgcatttcagccaaatttgctccgaattgctagagggggtaccgttgtcttcctcactcaatgggctgtccctgctcctttgtcttgcacaggaaattccagac

SEQ ID NO: 57770 - DNA, 122 bp, Homo sapiens
tgctccaaattgatggcagagccaagttgtacacacagggatgtgttatgactcacatttcgttatttcttcctctgttttcccaccttatttgaatcttagaaaccagctatacatttcac

SEQ ID NO: 57771 - DNA, 122 bp, Homo sapiens
ctgtccggaacacttggaacatgtttccctcgcacgtgacccctcgagatgcttctgagacgtgccgggcaagacgtcaccacagggagcccgggccgaggcgcacgcctctgatttcctgt

SEQ ID NO: 57772 - DNA, 122 bp, Homo sapiens
tcctgaggcgttctcccacccacaccccggcggggaaggctgacccagggcagatttcagcgtccagcaggaacctgtccggaggaggcctctcccgccgggcacctgttattccaagtccg

SEQ ID NO: 57773 - DNA, 122 bp, Homo sapiens
ggccgcttgcctgcacgcaaccaactaaggcggtggtgcgcaagtagtggtgacggcgggcgcgcggagaaaaggaacgttgtgacggaaactccagctgccggagaccccaccgcagtgag

SEQ ID NO: 57774 - DNA, 122 bp, Homo sapiens
ccggagggctgcacggaggaccacacggacgcctgcgggcccgccccttccgcttcacgacgttcagcctgcgtctggaactggaatggcctagcccaaagctagataacaggtagattgtt

SEQ ID NO: 57775 - DNA, 122 bp, Homo sapiens
aaagacaacctcccgagtccctcaaggcaggtgcttatttgagcttcagatctaaagctgcgaatggacagaacccgcccagtgcagggtggacccgcgagagacagcgccgcgacaagcgt

SEQ ID NO: 57776 - DNA, 122 bp, Homo sapiens
ctctctcagcggaagtaatagtgacaaagctgggttcgcggctggcccaggagtgcggggcgcgactgggcggccggcggcggggaggggcggagcgcaggagtcggaggcgggagcagacc

SEQ ID NO: 57777 - DNA, 122 bp, Homo sapiens
cgtctgtcgcgttggagaagaattccaggcatgtcgtcttcccacttgcaatattgccctcgacacagatctggcaaaagacgaatgcatattagagccagaactcaagcacccaggggaat

SEQ ID NO: 57778 - DNA, 122 bp, Homo sapiens
acatgtggcagagttctctggaacctctcctctgttcctaccacaggaaggccacaggcacgcaccagggctgtactggcctaaaccatagttctgtgctgactgagaggttctgaaattag

SEQ ID NO: 57779 - DNA, 122 bp, Homo sapiens
ccgcgctgtcccttccgcgggctcttgctgttcttcgccaggaggctttgcactccgggccgcatgggtcctggataaggacctcaagaggttgtagtggcgccccttcgctccggcgtact

SEQ ID NO: 57780 - DNA, 122 bp, Homo sapiens
ggcctgacagctcacctcttccccgcctagtggcacgtcctaagtcacttttcagttctgcgatggttaatcttaggtttcacgtgaatatgtgaaactagctaggcgtctgggcactcctt

SEQ ID NO: 57781 - DNA, 122 bp, Homo sapiens
aaggcttgcaggtcgtctccaggagtcagagaggtccggactccggggattcctgctccgcggagaactggggagcccccgttcctgtgccactctcaggtggggtgactttgggctctggg

SEQ ID NO: 57782 - DNA, 122 bp, Homo sapiens
tgtcctgttacccagtttctttaactggtgcttacctgtgccgagcacaaatacaagctccgataatcctcacagcagcccagtgaggtggatgctgtttttatctctactttgctgatgaa

SEQ ID NO: 57783 - DNA, 122 bp, Homo sapiens
gccctgctcatgatggcagtggccgtgttcctctggggcttctatgcctaagaccaactgcgttggacaccataagccacagcctcacaggaagtgggggtgaggagcctgcggtgctcccc

SEQ ID NO: 57784 - DNA, 122 bp, Homo sapiens
aagcactcgccgcaggcccggaaaaagaatccgcctcgcagcgtcctcttcaggcacccccgggtggccttgttgtctgtttcctggccgagtttgtgttttgctggctcgcggagttttct

SEQ ID NO: 57785 - DNA, 122 bp, Homo sapiens
gcgagcggagagggatgaacttctctgactggccagatccagtcacatgccaacatgtgacgcgtggaatctacgccagccacagcagagaggtgggggttgtgaccggagttagatgccag

SEQ ID NO: 57786 - DNA, 122 bp, Homo sapiens
gcgggaccgagcatggtcacagagcaggatcggtgtcctccatagaccccgctgcactggcggcctgcagctccaccctcgcccagtgaccaggtggcaaagcatccacatggcgggcggcc

SEQ ID NO: 57787 - DNA, 122 bp, Homo sapiens
aggcagccaacaaaagaataattttaaaggaacccaggcacaccttccaggcctgattcacgaacagggtgaaaatacccgggcagaaaggggagagatcttccaagatcgttgacggtgcg

SEQ ID NO: 57788 - DNA, 122 bp, Homo sapiens
acaacctgagcctctggcccggtccgcagactccctctctgcacagatcactcccgatcccgctcactcctgggacccctcaagctggggagcgcagccctgggcctctccgaaccttcccc

SEQ ID NO: 57789 - DNA, 122 bp, Homo sapiens
ggcattttcaggtggagatttcaagcgatttgaggacaattgcagaaaaggaaatatcttcgtataataaccagacagaatcattctcagaaagtgctttgtgatgtgtgcgttcaactcac

SEQ ID NO: 57790 - DNA, 122 bp, Homo sapiens
cactgactttagagccagctgcccctccggcctctttgccaatggcctttcccaccccttcgctcagggcgtctcccaggccatgtccaagggcctccccaatatttgtcccagtgctttcc

SEQ ID NO: 57791 - DNA, 122 bp, Homo sapiens
acatcctgcgggtgcctttgaaaatcaacgacaacttgagcacaggtaaggcctgggagccgggcccgcggcgcccacccctcccccgccccggaaagttagtgcaactcgcgcggggccgc

SEQ ID NO: 57792 - DNA, 122 bp, Homo sapiens
ctgctggctggagtgcagatgtgatggctggatctggggtgccattttgagccatgtgaacgaaaagcctatccatgaagtctggggctccctgggccacccatcccagcttcattgggctg

SEQ ID NO: 57793 - DNA, 122 bp, Homo sapiens
taggagcacacgccgaccgcttcctgcaccgcggccgccggcatctgcccaactcgctcgcgctttccgcccagggttctgaaaaatagaagaaaaaaggacaggtgcgccaggtgggtttt

SEQ ID NO: 57794 - DNA, 122 bp, Homo sapiens
gttgtcatgattagttgtagtcacctttgaaccctggggttgaacagggcctcataggaccgcttcagtcagaggatggggcttccccctcctaggagcccctctggaaggctgatagctca

SEQ ID NO: 57795 - DNA, 122 bp, Homo sapiens
tcccctttttcattgttatttgcagcatgtaatctgctggacttgcaacattatttcccacgaagcacttctttcttttttttctttacatcccaagagatctgtgtcttgcattaaacttt

SEQ ID NO: 57796 - DNA, 122 bp, Homo sapiens
gtctataatcctcctgcttcacatttgtactcctagtggctcaataacccaagtcgtcagcgaggggatggacaggagacagtctatgatcctcccacttcctcctcccaggagtctgagac

SEQ ID NO: 57797 - DNA, 122 bp, Homo sapiens
ggacaaggggagaagcattgtgtgctgggaatggtagtcccagctcggccagcccggggccgccttgccggtgccgggactacgaatcccaataagcccgcgcggcgcaagtcttccggtct

SEQ ID NO: 57798 - DNA, 122 bp, Homo sapiens
gtgtgtttgagtgtgaaatgtgctaataaggaggagagacctctcctttgcaatgtgctgcggcaggagaaagcaggctgccggcccctgcctccctgaatcctcagtggctgactggatac

SEQ ID NO: 57799 - DNA, 122 bp, Homo sapiens
gctatccaattttgcatctgggaagtgttcatcgattgctagaaaaataatcaggtcgaacgcaggccatttccggtaaagaggctctagggaagcaccttcaggccagatgactcaggact

SEQ ID NO: 57800 - DNA, 122 bp, Homo sapiens
gaactctgctctaagttgcaccccaccacaccaaggaaatcgcttcaaaggtgtctttcccgcctgagtgtcagctgtctgatggcgaggttgcatcatgctcacctccgtgttccccacag

SEQ ID NO: 57801 - DNA, 122 bp, Homo sapiens
aatctaggctgaagggaggggaaagcctagactaagattgtggctgtgggattgaaatagcgttgaaggagctgactttgactcccggagatgatggggaaagaggaaatcagaagggacca

SEQ ID NO: 57802 - DNA, 122 bp, Homo sapiens
gccttcagcatcgctgtgataggcagtgaggagtaggtgttattatctctccctcacccacgaggaagacgcagcccgagcagggaggaaatgagcccgtggcttgagaccagtgcagggaa

SEQ ID NO: 57803 - DNA, 122 bp, Homo sapiens
ttaccaatttgggtgacatggcacaaccctgtctctacaaaaattagctgggcccagtggcgcatggctgtagtcccagctccttgggaggctgaggcaggagaattttttgagcctgggag

SEQ ID NO: 57804 - DNA, 122 bp, Homo sapiens
cccaccaagctctgccgcctgcagagccagagcgagagaagggttcgcgcctgcggggggcgtccctgtgacccagggtgttgagcccggagggaggctctcttgctacccacacgctgtcg

SEQ ID NO: 57805 - DNA, 122 bp, Homo sapiens
cgcaacacttggactatttctgttgaagttttctctcctttccctgccttcccaacagaacgctgtcctctactgcagctgatgcaacccagccacctcccggcaatccgcttacttgcaat

SEQ ID NO: 57806 - DNA, 122 bp, Homo sapiens
aagagcgcatgtcatgttttcaacattaggtactcttctaatttctcaccaaaaagtaggcggctccctagagcagcttatttagaggccaagtgtggcctcggatagttctcatcataaat

SEQ ID NO: 57807 - DNA, 122 bp, Homo sapiens
taagagttaggaactgggacagaccttgaggaagctgcacttcctcctgaggtgagccagcgttggagctgtttttcctttcagtatgaattccacaaggaaatcatctcaggaggaagggc

SEQ ID NO: 57808 - DNA, 122 bp, Homo sapiens
cagagaggaaaaggatggtgggagagaggaggaggaagcaaaggagcagcccaggtgtgtcgtccgctctaagcgcagcggagctcacacgccctgctcctgccacgcgttgccacgaggct

SEQ ID NO: 57809 - DNA, 122 bp, Homo sapiens
tcggacgccgcggagcggaaaccccagccttggcgggaagatcctggaggattccgcgggcggaaatgaaggtgaagcgcaggccaggccaagtggcgctctgcgggaggcgacatcagggc

SEQ ID NO: 57810 - DNA, 122 bp, Homo sapiens
gatcccctgaaagcctgcaagcctggcgtcctgtccctgtctctcgaagggacttcttgccgccttgtggtgcccacgaggcgccctgggttgaaagccagcaactccacagcaccccgggt

SEQ ID NO: 57811 - DNA, 122 bp, Homo sapiens
cttgagcggcagtcagagcaacagagggagacccttgctcagctgcagcaggagttccagcgggcccaggcagcaaaggcaggggctcctggcaaggcctgaccccatggtggggggagggg

SEQ ID NO: 57812 - DNA, 122 bp, Homo sapiens
tcttttctgccgatgatgatatgataataataactttaaaacagtaagctccagccagcacggtggctcaggcctgtaatcccagtgctttgggaagccaaggcagcaggatcacttgagac

SEQ ID NO: 57813 - DNA, 122 bp, Homo sapiens
tagtcttgtggctcaaaatggacccggggatggcatgggggtgcctggtgggcaccaggacggtactggagccggccctctgggtgctggccaggtccacgctcagggtgccgtccagcttc

SEQ ID NO: 57814 - DNA, 122 bp, Homo sapiens
caagaccaaggctcggctgggccccaccccagatccggcctgagcgccttccgcgctgctcggcctcaaggcgtgagtcaccaagggcaagtcccgtgacttggtcctcagggtctccggcc

SEQ ID NO: 57815 - DNA, 122 bp, Homo sapiens
gaatgcgaaccggcgcaaactctcgaggcgcaaactctcgaggcgcaaacttggctttggcgctggcgctgcagccacgggcgccgtaggagggccgggcccaaggcgccccgcttcccgct

SEQ ID NO: 57816 - DNA, 122 bp, Homo sapiens
gcctctgtcgggcctctggcccccggtgtcctcgcagtcctggaggttgtgtcctagaagcgatccccttcctcctgggccggcctgcggcaggcaagcagcccatctcaccacggtttatt

SEQ ID NO: 57817 - DNA, 122 bp, Homo sapiens
agcatggtgtaaggttaaatgcacagactttggtgtatctcctggctctaccacagaactcgctggttgactttggacaagtcacttaatttccttctttctctgggtgactttagacaagt

SEQ ID NO: 57818 - DNA, 122 bp, Homo sapiens
ttgtgaagtgttttcctgcagtcttcccctcaccagttcatccccggtgctgacagggcacggagagaagacagaatccgcgcctgttccacgtgcagcaacactcggcgttcgttagacta

SEQ ID NO: 57819 - DNA, 122 bp, Homo sapiens
cgggaagaatggttctgaacgcctagacctaaaggttgagactcagaattgttaacaggacgaatgaccaaggagaggtttaaagaacccagagtaatccgtaaagcagagattacctatag

SEQ ID NO: 57820 - DNA, 122 bp, Homo sapiens
gccaggtgtggtggcttgaacctatagtcccagctacttgggaggctgaggcaagaggaccgcttgagcccaggagctccaggctgccgtgtgtaacagtcgtgcctgtgaatagccactgc

SEQ ID NO: 57821 - DNA, 122 bp, Homo sapiens
gggccagaaactcctgaaggtgggcgtggggtggctctgggaaacaagcagcatcacagccgctcctcttgtccctttcccagggcctgagcccaggctgctatgacacctacaatgcggac

SEQ ID NO: 57822 - DNA, 122 bp, Homo sapiens
gcctggcttgggttgagggctcagtgcctcttagccttgccctggggttcttggaccttccggaaactgagccacatcaggctcacgttgatagcataggtggtgatacaaacaatgcagaa

SEQ ID NO: 57823 - DNA, 122 bp, Homo sapiens
tgtgtgtgtctgagggtctgtgtgcatgtgtgtatgtgctcatgggtgtgcatttgtgcacgtgtgtgtgagtggcccaaatgggcacgcactgtgtgtccagcacacattggttcccccat

SEQ ID NO: 57824 - DNA, 122 bp, Homo sapiens
gcgcatccccggccccccagcgctccctgcgtggcacccgcagccagcccgggacccctccgccccgcgcgcccctggtccccactcgctccccgcgctccactcgcacccggtaagtagcc

SEQ ID NO: 57825 - DNA, 122 bp, Homo sapiens
caaacgtaccattgaggttgcgtatgagtctcgcttccttctccccatcttcgtccaagccgtcaagctttagtttcttccaggcgagttcgtccctctcctgtatcttcagatcagcgtgg

SEQ ID NO: 57826 - DNA, 122 bp, Homo sapiens
caggattagggaacagtcgggggcgtggggctgcatgaaggtgctgccggctcctggccgcgatggaaagccccgtctggggaagctttagctcctccttgatttccagagatcccccctct

SEQ ID NO: 57827 - DNA, 122 bp, Homo sapiens
cagacatttggctctatctagggctttgttaacaagaaaaatggagcaggggtcttgctccgtgcctgaggtctcgtcccaccatggcaggatctgctgagctctgacggacctgagttccc

SEQ ID NO: 57828 - DNA, 122 bp, Homo sapiens
gtgcgaagactaatggttgggatgcacatgtaggatttgcttgggccccccatggcctcccgggccaggcacctgtgggttagcagtgccctgatatgggcctactcaatctcttttataat

SEQ ID NO: 57829 - DNA, 122 bp, Homo sapiens
taaggggctattctcattcacactagttcaagcacactaaatatatgtgcttctatcagacggtggaaggtgaaaataggagctttgaagccctcccataaatttaactttcctgtctgtaa

SEQ ID NO: 57830 - DNA, 122 bp, Homo sapiens
ccagctccccgggaggctgaggtcggcggatcgtgggtgctcgggggttcggagctacggcgctgtgtggagcgggcgtccgcaccgggcctggcaccaacatggtactcccgggggagccc

SEQ ID NO: 57831 - DNA, 122 bp, Homo sapiens
ctttctaccgcccccgcgtcctgtcccgggggctctcctaggatcccctttccgtaaaagcgtgtaacaagggtgtaaatatttataattttttatacctgttgtgagacccgaggggcggc

SEQ ID NO: 57832 - DNA, 122 bp, Homo sapiens
ggccttcttaaggtcacaataaggaatggaaaaggattgaacagaacttgacagctgcctcgccctaagtggaatgatttcagttctggtcaaagcagtgcatagggaggaaggaatttacg

SEQ ID NO: 57833 - DNA, 122 bp, Homo sapiens
gggctggatgcggacaggctgggcggacgcgggaggccggggaaggagaggcgaaaaacacgcccttgatggatgagagggacaggggatagcttttgtggatcgagactcaataggggagg

SEQ ID NO: 57834 - DNA, 122 bp, Homo sapiens
cccacgtggtgcacctctgagcctccgcccctctcccgagggaaccgcaactctacttctcgcgagaattgcttctatggctccatcctgctttccggctgtcgccctcatgcgataggctc

SEQ ID NO: 57835 - DNA, 122 bp, Homo sapiens
gccggccagagggagtgcgagggggtgcggggagctcgcagtcttggggagccggtgccccgcgcgctataaagggccggcggcgcgctctcccgcgcctctgcccgcccccggcgcccgcc

SEQ ID NO: 57836 - DNA, 122 bp, Homo sapiens
tggacagcagtagtggcggaggagagctcggggctgggctgcctggctgctgggtggccccgggacagtggcttttcctctctgaaccttagcttcctcacccttgttctggggtcatggcg

SEQ ID NO: 57837 - DNA, 122 bp, Homo sapiens
ggaaaaccataaggatgagaatcgggtctcataccttcagtcagtgctgccacaaccctgcgtagcaactccaggaccagccccaggtatggctgagggttagccctaggctcctccgtagc

SEQ ID NO: 57838 - DNA, 122 bp, Homo sapiens
aacgggggaagcaatccaggattctggagccctaggaagcaagacctgccatgacccagtcggccataatgtgggcccttatttagcagattagctctagtatggtcataacaattattaaa

SEQ ID NO: 57839 - DNA, 122 bp, Homo sapiens
tcgttccttctgatgttcggatgtgttggcagtttcttccttctggtgggttcttggtctcgctggctcaggagtgaagctgcggatcttcgaggtgagtgttatagctcttaaggcggcac

SEQ ID NO: 57840 - DNA, 122 bp, Homo sapiens
tgcggaccatcacatctcaaaaggggggaaagctcgtatgaggcagtgccagctacctttcgggaatcaccttgggcagaaggcctttttgcaaaaagactcggcagcccgggccccgtagg

SEQ ID NO: 57841 - DNA, 122 bp, Homo sapiens
tgggtatgccggggaccaggcccggcgcgggcacattgtcgtaggtggagagtctctgcacggagcccgagtccttgagccggtctcccgacgaggcccggcggtgtccgcgcagggaggac

SEQ ID NO: 57842 - DNA, 122 bp, Homo sapiens
tggggagatgccttctctagacctgagacgaccacgtgtccagatgtgacctgttgctgtcgggggtctatcaggcccttagaccgtcaccccagtaggctctccaggacccaggagcctcc

SEQ ID NO: 57843 - DNA, 122 bp, Homo sapiens
cgagtccggcgggaagggtaggcttatcaaaatgctccgcgccaaatcagcaggaacccgcgggcttctcgcacctgatgagttctctcgaacaggtcgcattcacagtctgcctgggctct

SEQ ID NO: 57844 - DNA, 122 bp, Homo sapiens
atccaaagggcaaagatgctgccagcaggcggtgccagcccagggatagtcggtgacaaccggagacaagccttatgggagggtgacagctggggacagcacggagaaggggcgggggcatt

SEQ ID NO: 57845 - DNA, 122 bp, Homo sapiens
tggaaaaaaaaaaatcacaccaggttgactcggttgggctctgcaccccaaatgccatagcggcctccgggggaggcggggagcgctgtgttggcccctcacgctcgctggactttctgcca

SEQ ID NO: 57846 - DNA, 122 bp, Homo sapiens
cctcccctctgatacccattgcgcgccggcctcaagatggccgccttctggcgtctccggcgctgttgaatggcgaaagctttattgttcccttcgggcaggagtgttcgtgtcctctatgg

SEQ ID NO: 57847 - DNA, 122 bp, Homo sapiens
tcgccatttaagcgattgccttctgggaacaagcgagctgggtgcccagcggcatattcccggcactgggctcgccttgagcttggccacagcagctcccgctatgacatgccctgtgccgc

SEQ ID NO: 57848 - DNA, 122 bp, Homo sapiens
aaccactttcagtaacaggtgaggttctaccttaaaatttaatgcatggggtgggagaggcgaggaagtcaccatcaaaccactttatctacagttagcataagatgtgagaagtgttgaca

SEQ ID NO: 57849 - DNA, 122 bp, Homo sapiens
aattcccattctttttcatttgtggtgtccccttcccaggcttgaaggtaggagtgatatcgtggtgacacttcagctgtggagactctcctcctaccacataaatgctccaaacccagatg

SEQ ID NO: 57850 - DNA, 122 bp, Homo sapiens
cgcggactaaacaggcataaactacaagccccagaatgccttgggcgagacgcgagagcacggaggagcggaggggcgtggccacgtcgaccgcgcgggaccgttaaatttgaaacttggcg

SEQ ID NO: 57851 - DNA, 122 bp, Homo sapiens
aataaagctgttataaaaagaaggaggaaaagggggaagccccactctgggaaccaaagccgggcccttagttgtgtgaggtctccgtaacattcttccacactgacagccgtctcccttac

SEQ ID NO: 57852 - DNA, 122 bp, Homo sapiens
ctaaggaagcagttgattgacctgagagctcgctgctaaaaagcagtgcaagtggccatgcgcggtggctcacgcctgtaatcccagcactttgggaggctgaggcgggcgcatcacgaggt

SEQ ID NO: 57853 - DNA, 122 bp, Homo sapiens
ccagtcggccagtgccgggaatgtctgcagaagcaaaagagtcgcctcggggaggagccccggctggcccggctcactcttggatgcatttcaagtcaactttcagaaacacgcccgcccga

SEQ ID NO: 57854 - DNA, 122 bp, Homo sapiens
tcttcacgctcagccatccctggcgactgtcccaatcgcgccaccgtctctcagcagcctcgggattgatcaacttcctggtcttcaaatgggccgagacaagcctaaaggttcaggagagc

SEQ ID NO: 57855 - DNA, 122 bp, Homo sapiens
ggcacccagagcttcggaggataatgggtttcttcaaactcggtaaggatggacgacggacgattcgcttagagctgatggtggcggtggtcttgcatgccatccctgacctgttgcgcgtc

SEQ ID NO: 57856 - DNA, 122 bp, Homo sapiens
ccaaaggcttcacctctgataagtgttcctctgcagctgcagccagaatcttaatgtgcgcgctgtaatttaatggccgtctcggctattaacacgctcttctcgggtgaagtggactccct

SEQ ID NO: 57857 - DNA, 122 bp, Homo sapiens
gtaaaaaggacataagagtgacaccatgatctgctggctgctgaaaatttggggcagctacggagccactgagtgggcagcagtgatcagaggggcagggctctttctgaacagaggctatg

SEQ ID NO: 57858 - DNA, 122 bp, Homo sapiens
cgaaaaaaacaaaaatgaaaaaaaaaaccctgtgagtttgtgtgtgtgcacacgtgtgtgcgtatgtgtgtttaggcgttagggctggacagggctactgggcaaaagaacagaatgatccc

SEQ ID NO: 57859 - DNA, 122 bp, Homo sapiens
taccataggttaagcagaggagaagaatgaataaacagagcacagagaatgtttatggcacggaaattattctttacaatattgcaatggtgaatacaagtcattatacatttgtccaaacc

SEQ ID NO: 57860 - DNA, 122 bp, Homo sapiens
tcctccggctcatctttgctccccaggagcagcatatttcgcatctgccagaggtgtgcccgggggtcgttgggagagggacggggtgaatccctgcagagagccgggacggggagggaagg

SEQ ID NO: 57861 - DNA, 122 bp, Homo sapiens
tgaagtatttcaagaagattgctcagtggggtttgatacaagaactgcccagtagctgggcgacattcagagctctctctctgaggtatataagaagagccctgggagctcctcactgagcc

SEQ ID NO: 57862 - DNA, 122 bp, Homo sapiens
aaatagtaaatacaaattagtgatttttataattatattgcaggaaggttgtatgcttttcggatgttggatttttatagcgccttcatcatctttagtgttggtttcttcctttgactttg

SEQ ID NO: 57863 - DNA, 122 bp, Homo sapiens
atggacattgtgacccctgccctccagggaccatccctgcgtcacgtctgcacccagcaccggcctcacagcccggcccctgccctgcaccaggccactgccctgttggtgaggagggtcgg

SEQ ID NO: 57864 - DNA, 122 bp, Homo sapiens
acttcagatgatccaaccgccttggcctcccaaagtgctgggattacaggcgtgagtcaccgcaccaggccatcttcaggtcattttaacaatacccctgagccacctgaagcttcctccct

SEQ ID NO: 57865 - DNA, 122 bp, Homo sapiens
aatgccttcccgcagtccttacattcatagggtctgtcgccagtatggactctctgatgtcgtgtgagctgtgcgtgctgtctgaaggccttcccacattccttacactcatagggtttctc

SEQ ID NO: 57866 - DNA, 122 bp, Homo sapiens
agtagccgaaagcactccgagaagacaagacaactgcagttctgtagggactgcgcggcacgcgtgggcccagagcctgtcccagcgaggtagcagctgccatgccgaccgctggagcgccg

SEQ ID NO: 57867 - DNA, 122 bp, Homo sapiens
cacaggactgtggggaggacaagaagcagggtaagggtgggatgagccacacagggatgtcgaaggagagctgggggatgccaaaagccaacctatggcaatctatggcccttcttagggcc

SEQ ID NO: 57868 - DNA, 122 bp, Homo sapiens
tgctgtgtgggcgtggttattgcaggactggagtgtcggtggtgaggaccgggtcatcatcgggaaggaaatggcatgtgggcactcaccaccatggtgaacacaccggcaggcctggcctt

SEQ ID NO: 57869 - DNA, 122 bp, Homo sapiens
accctaccccaggttcattcccagcgctctggtctgctctgtgtctcagggctggcccagcgggtgctcagggtgaaaggagaggggccgtgtctccgaagctccctcccacctccttgcca

SEQ ID NO: 57870 - DNA, 122 bp, Homo sapiens
aagatttcctcatttctgtttctcatttcagttctcagtgttttagttttgtccttttcacgttgctgagtcagtctgtaaagattaccaatgatttcattgcagtcgaatccagcgggcat

SEQ ID NO: 57871 - DNA, 122 bp, Homo sapiens
cacggtaagaatgctgggcgctgctcccgtgctcaggagatgtggctcccgggaaactgacgatgctgcgaggaagctcaagcgcccgcaccccagctgagctcccggctggcagccagtgc

SEQ ID NO: 57872 - DNA, 122 bp, Homo sapiens
ggcggccgaggctgcggcggctgcgagtgtggcggtggcggcggtggttggagcagtggccgctccgcccctctccaccagggctggaccacacagccttcgcccggggccctaagcagcca

SEQ ID NO: 57873 - DNA, 122 bp, Homo sapiens
ccgcctcctgagttgctgggatcacagaactgagccaccaagcccagctggaaggaaatgcgtttcaaatgcacatcacggtcactggcttagcagagtggagtctatcttccttggcaatt

SEQ ID NO: 57874 - DNA, 122 bp, Homo sapiens
gaatgttgctcaaggaataagtggtgaagctttcttctagtcttgttcagatacctcaatcgaaatatttattgactctctgtgagggcattgtgcttggcatgggtagatggcatgtagag

SEQ ID NO: 57875 - DNA, 122 bp, Homo sapiens
ggcctgaagcagatgccctcttagggccccacagcctgacatgctgtagggcctgagaagcggcgtcgtggaggacgagatgtgtgagggcagcaaagagtgctatgtgtccagcagagggc

SEQ ID NO: 57876 - DNA, 122 bp, Homo sapiens
ctcgtgagcgccgacctccgctaggcgttatcagggactgtgctcgtgagcgcggacctccgctaggcgatatcagggactgtgctcatgagggcggactttcaccagccacgcttccgagg

SEQ ID NO: 57877 - DNA, 122 bp, Homo sapiens
ggaagatggagtttctcctgaggccaccaggaggcgccagacgtcaagcggggcggggggcggggacgggctcggtaactttcctctgctgaaaacagccctgagcagggttagcaaggatt

SEQ ID NO: 57878 - DNA, 122 bp, Homo sapiens
gcccgcggtgggcgctcaaggaggcctggggaatggcagtgaccgtgacaggttccctaacggggcgtggcctgcaaggcggtcagaggcttctctgagctgagatcccggagccagccccg

SEQ ID NO: 57879 - DNA, 122 bp, Homo sapiens
ttaattaagtgcgagaattaaatgaggtgagccgcgaacggggcctagcatagtgcggggcgcactcagcaggtgttgtttatagggatcatttccctgtaactggccaggtggacttggga

SEQ ID NO: 57880 - DNA, 122 bp, Homo sapiens
tcccttggcgagctgccctcagcacttagaaaaccacaggcctgagaggatgtggctgagcgcacatgtgcctacatactttgtccactgttgcagatctcccaggctgatgggtttccaga

SEQ ID NO: 57881 - DNA, 122 bp, Homo sapiens
ttaagtcccacgtcctgaactacactggagccctcggacactttaaggatcactgcactccgaattggggtgtatcttcctccaattcttgcctaaccatgacagaggagagacaaaaacta

SEQ ID NO: 57882 - DNA, 122 bp, Homo sapiens
ctccctgagatgcacacagtagaaaaaataggcactcacctgggctggcagatggacttacggatttcttctctgcaagacaaaaagagaaaacgtgtaatgcgaagtgaaggaaaaaagaa

SEQ ID NO: 57883 - DNA, 122 bp, Homo sapiens
ggggcgtggccaggcggtgagttcctcggtggcatggcctggccaggtgaatgggtcctgcggaggtgtcgtgaagcggttgagttccttgggggcgtggccaggtggatgggctcttgggg

SEQ ID NO: 57884 - DNA, 122 bp, Homo sapiens
cacgccctgactccggacttctgctgccgcctcggcgccgccaaggccctagtgttgacgcgttaccttggcaaccactagcccgcgttcttcggctcaggccccgcccccggccccgcccc

SEQ ID NO: 57885 - DNA, 122 bp, Homo sapiens
aggatgcccgtgacaactgtgctgatgccacgtggaggctcagaatcctcatgggggtggcgtgggaccgcacgggagccgaggcaggggatgggtgtcagcgtggccgggtggccctacct

SEQ ID NO: 57886 - DNA, 122 bp, Homo sapiens
ggtgagactctaagtcccatcattcccttcggcagccaagccaggctgttgagggcgagccggcgcaccgtacgctgggacgtgtggtttcagctcgtgcgcctccccgtgggtttgcgacg

SEQ ID NO: 57887 - DNA, 122 bp, Homo sapiens
gccctctaaatgtttgatgaataaatgactacatgactgacccatgcagatgtctatatgcggctaatatcaatttagctgactctcagaactcagaagccacttttagcctttggaaaggt

SEQ ID NO: 57888 - DNA, 122 bp, Homo sapiens
cggccgagcgcgtcccgcctgtgccgctctttggggccagagcgtagtggaggctgccaccgccgtgcaacggcaggaacagggcgcccagcaacgcgtccgcgcttcggaagctcatcatg

SEQ ID NO: 57889 - DNA, 122 bp, Homo sapiens
tctctctgggccttggggacgatctggtgcagccaggctgcctgccagagacccctccatcggattttctctgcttggatccactcagctgctgcaccggctcagcggggcattgtgggcct

SEQ ID NO: 57890 - DNA, 122 bp, Homo sapiens
gtccggctgccttgggctgccgaacagacaaggcgtgggccacagcacctcagaagccgacgcagctcgacgcaggggccggcaggagggtgggcgatcgcgtgtcggagggcgccgcgcgg

SEQ ID NO: 57891 - DNA, 122 bp, Homo sapiens
cataatgtaaaattaagcattttaaagtgaacaattcagtggcattcaacacattcacaacgttgtacaaacatcatgcctacctagttcttgtacattctctctctctctctctctctctt

SEQ ID NO: 57892 - DNA, 122 bp, Homo sapiens
gctccagatctctgtctccaccctcaaatttaactgggttctttttgtccccactgggggcgaagtagatggtggggaagccctccaccttatagcggtcgctggggacgtcgttggcagtg

SEQ ID NO: 57893 - DNA, 122 bp, Homo sapiens
gaagctgagagagggggcggggcctgccctgcagtcgaacaagcggggcgtggccttgcccgcacttgggcaggcgggggcgtggcccgtctctgagcgccgcggctctgggcttgcgcgcg

SEQ ID NO: 57894 - DNA, 122 bp, Homo sapiens
gtttccaggcaccggacgacaggcagtgcagggctgtgatccttaagagaagggaagcagcgagccagagtatccaggccacaacccaaatggaggccaagagaggaacagcagaggataca

SEQ ID NO: 57895 - DNA, 122 bp, Homo sapiens
atttctaccctagtgttacagcttttttagaatttgcctagcaggctttctggtttttgccggaaggcctccaaaaagtaattttttttcttaatatacaaaataaaaataaataatttcta

SEQ ID NO: 57896 - DNA, 122 bp, Homo sapiens
cactgagtcatgtcctgtagcagctgctcagaaccacagacatatctccctgttttggggcgttctctctgcccagagctaaggttcctgggagtagtcctttgtcaacgctggttgaacat

SEQ ID NO: 57897 - DNA, 122 bp, Homo sapiens
cccgacctctggtaaattaatgcgcaaaatggcggttgcacgtctgtttccccaccccggcgcacaatcctgaggaaggacgtcacgtcaccagggcaacgacgctcttgcgtaaaggcccg

SEQ ID NO: 57898 - DNA, 122 bp, Homo sapiens
gagccctgagtcactactagaagccaccctgggcccacggggagcacagagctgggtccacggggagcacagagctgggtccacggggagcacagagctgggacagctctccctcaaggtgg

SEQ ID NO: 57899 - DNA, 122 bp, Homo sapiens
cagcccagggggccgctctcgccggcgtcgagggcgtggcggcgaggctgctgctgcaggcggctcccggctctgccttcggccccgcccgccgcccaccaggctcccagaggccccgcagc

SEQ ID NO: 57900 - DNA, 122 bp, Homo sapiens
cattgcccaggctagtcttgaactcctggactcaagggatcctcctgcctcagcctcctgcgtagctgagattacaggtactaaagttggtggctcaaactcctctgggctgggggtgggca

SEQ ID NO: 57901 - DNA, 122 bp, Homo sapiens
gcgcgccgcgggtgggcggtgggtaaggacgttctccgcggagctcctaggcccggagcacgtgtcactggcttctctgccacccatgggcttgaaactattttaactgttcctagtcctta

SEQ ID NO: 57902 - DNA, 122 bp, Homo sapiens
tgcgctgggctggccagtccagaaggctccagagggaggcaggcagggtcccggggccctcggcgtgtgcaggtctggctcagttgttattcattatccaccaggaggctgggggtcagagg

SEQ ID NO: 57903 - DNA, 122 bp, Homo sapiens
catggtctgtttcttcacatcaccctcccatatggagaaaacaagggccctgcaggaagtcggtgtgcccaaggtcacaccccaggcagcacagaaatgaatgtctgaggcctcttcctgcc

SEQ ID NO: 57904 - DNA, 122 bp, Homo sapiens
aggctgtgcagtcaggaactttagggtaaaaaacgtgctgtgcgattctgtgtgtgacgccgcctgtgtgagcctccgattctgtgtgtgacgccgcctgtgtgagcctccgattctgtgtg

SEQ ID NO: 57905 - DNA, 122 bp, Homo sapiens
acagcctgttgcgccccccactttgttaactacgcttggtagtcagggtgtccccagtggcgggaacagcagcagcggtctcctcagggccagcggagggcacggcttctgccagcaggaca

SEQ ID NO: 57906 - DNA, 122 bp, Homo sapiens
ctcccacttccctgcagactccaggctgtgcccagagagagctgagctcggcggcccaggcgcctcaccactggccctcagtttcctcttcctccggtagtttccatgagagccccaaagga

SEQ ID NO: 57907 - DNA, 122 bp, Homo sapiens
tattaacaattggctccccttaggtcaggctaatttgcctagcaagtggttgctccacagcgtgcttgaacttctctcctgaaaatgattttctttcctgctacatggcctgtttattagtc

SEQ ID NO: 57908 - DNA, 122 bp, Homo sapiens
gcaggcccagctcccgcctgccagtggcctcctcaggcccatggggctcattcctcacaacggcctttcccggcccagtttttcccgtccggcggcctctccgggcccagaagctcctcaag

SEQ ID NO: 57909 - DNA, 122 bp, Homo sapiens
gacatccaccctgtactgcaagtgatggccctactggctgtatatacagatgggcaactacgattccaaatatcacacagctatagtagggttcacccaaatggagccctttgcctccaggg

SEQ ID NO: 57910 - DNA, 122 bp, Homo sapiens
ggcagtgtttggaggccagtttctgctcagcgcctcatggtggggctgtttccttggcaccgtgaggggccggtccatgcggccagtggaagcgtccatcggcccctcaccactctgttcgc

SEQ ID NO: 57911 - DNA, 122 bp, Homo sapiens
gggatggctcagagggcatctggtggcacagctcatgtcactgggcctccccagggtagccgggcgcaggccagcaagcgcctcccgcctggagaacaggaggctgcgtagccgacggggag

SEQ ID NO: 57912 - DNA, 122 bp, Homo sapiens
ccatgctggctccagagcgatagaacattctttcccactatctcccaggaggctgaataacggcatcctactgtgtctaggcaatcactaagctcactggacttgatttatccgttaaaact

SEQ ID NO: 57913 - DNA, 122 bp, Homo sapiens
gcaaccttcagatgccctcatgcccctgtgggatgggtgcttttactatgcccatttcagcgatgaggaaacagacacataggaaatgcccagagtcaagaggctgcatcagaaccgggcct

SEQ ID NO: 57914 - DNA, 122 bp, Homo sapiens
gcgcgcctctgccggtcctcctagaaatcccgccctgcctacccgcggcgcgagacgcaacgacgctttcaggggtcaaagacctggcagaaatgacttcccaaccccagatgcccccagca

SEQ ID NO: 57915 - DNA, 122 bp, Homo sapiens
cagcggacactccccagaccccacccagcccctgcccaggctccccaccgttccgggacacgtccagctccaccagctgcatgaagttggccacctcgggaggcaaccgctggatctcgttg

SEQ ID NO: 57916 - DNA, 122 bp, Homo sapiens
gcccggcgccggcaaagagggtcgggacccgggcaggggcccaggaggggtggtccgctccgtacctctctcccgcacctgggagccgctgagcctctggccccgccgccgccttcagtgcc

SEQ ID NO: 57917 - DNA, 122 bp, Homo sapiens
ctgattttctgttcatgtctcagctgcatctgatttccatgacatgctcctcttgctgagcgcaacctgggactgactctcacctggggcttgagagatcttgatggcagatgctgcttatt

SEQ ID NO: 57918 - DNA, 122 bp, Homo sapiens
tggacgctaaggcactcgttaactgctgtgtaaacgcagcctgacttccctcacctcaggcgaggcccgcatcaggcccctctgacctaggacctcccgatccggccgttatcgccaaccgt

SEQ ID NO: 57919 - DNA, 122 bp, Homo sapiens
agaatagaattttagaactgatcatttgggtctactcttcaacttgcaaggaactgtgcgcggtgttaagaccatgcctctgagatcactggagagacagatggagaagtggaggatttgta

SEQ ID NO: 57920 - DNA, 122 bp, Homo sapiens
gcccccgcacctccagcccctccctccagcctgggtacctcggccttccaggggcgcccccggttatcgaccgcacccttctctagagacgcgcttccgcccgctgagccctctcccgacca

SEQ ID NO: 57921 - DNA, 122 bp, Homo sapiens
aaccggggctgcgcgcagtgcttgcgggccagcgtgagttccgggtgggtgtgggctcggcggaccccgcacttggagcggtcggccggctccaccggcccagggcagtgaggggcttagca

SEQ ID NO: 57922 - DNA, 122 bp, Homo sapiens
tttggcttggccagcgggatccccttgacttggtccctttgtggctgagccctgttcccacgctgtgcgagcactcccggcccagcttcaggcctgaggggtgggggtggcctgagtctcca

SEQ ID NO: 57923 - DNA, 122 bp, Homo sapiens
agctatcacctgttgagtgcctcttatataccaagcacggtataattcactttatgctctcgcggtctacgaatatggattagccccagagaagtcaagagacccaaggaaggtcctacaac

SEQ ID NO: 57924 - DNA, 122 bp, Homo sapiens
accacctgatccgcaagactcctggacaagaagatgagaattgaaactccgcgttctcatcggagagaaaatcagacccgggcctggcagagctaatgatttcatagcaagaggcgttccgg

SEQ ID NO: 57925 - DNA, 122 bp, Homo sapiens
gggagaagggcctcgtgggccagcgcagcttgctcctctgcagacccagaagcatttgtgcgtcccgggcgtggcaggcccggcgcccactccgccctcccgcccctcccccgcgccacgtc

SEQ ID NO: 57926 - DNA, 122 bp, Homo sapiens
tcctttggcccgccccggaagaggcctctacgggaggcactgggaaggccgccccgagagcgactatgggcgccgccggttaccatggcgacaaccccgccgaaagcccccgcccgccagct

SEQ ID NO: 57927 - DNA, 122 bp, Homo sapiens
gctggatgaagggaaagatccttgtgctcagcccggaaaaccggaggatggataccaggccgaggggtccctccgtgccccaagagaaagttcaccaagtttagatcccagtgccccgcagc

SEQ ID NO: 57928 - DNA, 122 bp, Homo sapiens
agatcagggcagggtgctcaggggcacatggaagccagcaggggtcctcagggtgggtctcggcggtccccacaggctccccaggacggggcaggacaccctccctcagaatccgactgcac

SEQ ID NO: 57929 - DNA, 122 bp, Homo sapiens
cagcgtatggatcatgtttcgtgactagcaaaacacgccagccgggacactttgagaacccggccggttttcaggaacaggattttacacatttcccaggattggcggatctgcgctcgcct

SEQ ID NO: 57930 - DNA, 122 bp, Homo sapiens
ggggcaggtatctctgccttcctcgacccgccctgcctgacagcgggctcccaccttcgtcgccccgccctgcctgacagcgggctcccaccttcgtcgccccgccctgcctgacggcgggc

SEQ ID NO: 57931 - DNA, 122 bp, Homo sapiens
agaggggagaaggttttatgaggccttaaaacgctcacaccgggttcctcccacgccatgcgccaggggcaccccatgtggccaccggttcctcccgggttcgctctggccggggctccccg

SEQ ID NO: 57932 - DNA, 122 bp, Homo sapiens
ggccgggaggagaacgtactgtcctcaaggtctgtctcgtcgtgggggccgggaggagaacgtactgtcctcaagcagaatttcctgcgctggtctctgggatgggcagagggccctgcttt

SEQ ID NO: 57933 - DNA, 122 bp, Homo sapiens
cgtgcgcgccgggcaagcccactctagtgtgctccagcgcggcagggagttggtcgtactcgcagcagaggcggccgagggtgtgctctggggagggcccgcataagacggacctcatggcc

SEQ ID NO: 57934 - DNA, 122 bp, Homo sapiens
aattcagaacagcgctggtaccgagaagggagtgaaccgaacctcactaacctctgtcagcgccggttttttatttcatgcaaacccccggaggagcatctcagatcactccttcctctctt

SEQ ID NO: 57935 - DNA, 122 bp, Homo sapiens
aggactacagtcccttatgcaccttgggatctgcggctagcccctgcgtaaagagggacgcgtagtcttttccctgccccgccctgccggggcgcccgcctccgaggccgccctcgcttcgt

SEQ ID NO: 57936 - DNA, 122 bp, Homo sapiens
tgaattcaagcaattagtggagagaccagtgtgggaatccttactgctttacttatttgccgacttagagcaggttatataacctctcccagcaacatattcttcatttgcaagctggggct

SEQ ID NO: 57937 - DNA, 122 bp, Homo sapiens
ctggagggaaggtcccagggcgcctccttcgtaggctatggaggggaggctcacttatttcggatttcgtcactgaattttgctggattttacagatggcctctgctcagggctcttctcca

SEQ ID NO: 57938 - DNA, 122 bp, Homo sapiens
tgaggggcttagcacctgggcgagcagctgcagagggggcgccaggtcccccagcactgccggcccgccgtagccacgctcgaattcttgccagcctcagccgccttctcgcggggcaggtc

SEQ ID NO: 57939 - DNA, 122 bp, Homo sapiens
gggattgcctttcccccatgctatcctgtcctcatccatcaccacctgaatctcccttgccgtctcttgtcataggtaaggaggggctggtgggctttgcagacctctcaagctctgaaggc

SEQ ID NO: 57940 - DNA, 122 bp, Homo sapiens
gggcggcagccgctctgatgcccttcacaacctcagcagagacaaggtctgactcgcagccgggcctccagtctcagcatcactgtggagcatgccttggagagcttcagcttcctcaatga

SEQ ID NO: 57941 - DNA, 122 bp, Homo sapiens
cctcaacagcctgcccgaggaagaccagaagggcctgggccgctcgctggagacgctgaccgctgccgaggccactgccttcgagcgcaacgcccgcacagaatccgccaaatccacacccc

SEQ ID NO: 57942 - DNA, 122 bp, Homo sapiens
agaaagagacaagggagaaactgacaaactagggtgtttccgaaaaaaggctctcagtatcgggctcaagggcttgtgcccacatctgagcatgcagggaaatagatgtcccccactggctg

SEQ ID NO: 57943 - DNA, 122 bp, Homo sapiens
tggccagctcctttcctttccccatccccacccggggagaccccgcgcccagcagctcaccgcgctcgggcactgctccctctgccacgcctgtcaaggctcggcaaacatccggctccgcg

SEQ ID NO: 57944 - DNA, 122 bp, Homo sapiens
ctggtatggggaggcctgggctggggaatggccttgttctgatcctctgccctccctggacgactgacctccctgccccaacccatctgtcaagaaaaggcacagagcttgataacagagaa

SEQ ID NO: 57945 - DNA, 122 bp, Homo sapiens
gatatccaggcgatgaggaagttttacttctgggaacagcctggatacgaaaccttcacacgtcagtgtcttttggacattttctcgtcagtacagccctgttgaatgttctcacggtgggg

SEQ ID NO: 57946 - DNA, 122 bp, Homo sapiens
actcacaattcctgttgactaaaagagcacccttttccaccacaagcctgacaaatcagacgtccacataatttctgaactcgttttggttaggacaggaagcacaggctcccttcctgtct

SEQ ID NO: 57947 - DNA, 122 bp, Homo sapiens
taactgtaagttcacatgaacctcatgggtttggcttaggctggtagcttctatgtaattcgcaatgattccatctaaataaaagttctatgatctgcaaacctgcccgtctttttttttta

SEQ ID NO: 57948 - DNA, 122 bp, Homo sapiens
tgggcactctgtcccagggagcaatcagagctctgtctgtagattatgggcagggatggccgacagatcccacccagtgaggaggaatggatgggggtcccacataaagaagcatgtattaa

SEQ ID NO: 57949 - DNA, 122 bp, Homo sapiens
tcctcctcctcacagttgcgcaggaactctgcccgctgcagggtctgctccagcagggcccgcctgagggacaataggggccaccgaaggacatggggagtcgtgaggcatgggcagtgggt

SEQ ID NO: 57950 - DNA, 122 bp, Homo sapiens
gtacgcacggacgtcctcccgagggaggcgggaactcggttcgcgggcgcggagcggtcccggaccctcgaagccagttccttgcgtcagtgccgcggctctttaacccgaagggagatttt

SEQ ID NO: 57951 - DNA, 122 bp, Homo sapiens
ttaagagaccgcggaacagatggtggagagctcctggatgaaagtttttgaacaggcactcgctaatagacttgctttgacgactcagggtgtaattgaagggtcatttaatctagacgcaa

SEQ ID NO: 57952 - DNA, 122 bp, Homo sapiens
gctggaacaaaataccgagcctggggacttaagcaacagaaatgtattttctcacagcctcggagggggaggggaaggtccggtgtcccagggttgccgggctggttctgcggaggcctctc

SEQ ID NO: 57953 - DNA, 122 bp, Homo sapiens
ggtgttggttgtactgaatagaagaaactctgagccgggtaggcagcctagtcttggggacgtagagacgggagaaaggagaagccagcctgggcagatgatggcaccaggggaggatcaga

SEQ ID NO: 57954 - DNA, 122 bp, Homo sapiens
cgctcgcggggaccctctgctgaggaaatgcattgtgttccaggtgggcactctggtgggcgtgaacccaggtctctcttcagtgtcacagagaggagatgagggcagaagaacatggtggg

SEQ ID NO: 57955 - DNA, 122 bp, Homo sapiens
ccatccttccctccatctcggtcccacaaagccactgcttttgagccaggtcttcagaagcgaatctgagaggtggtgggaggtgggaagatggctccctttggaaagcactttggaaaagg

SEQ ID NO: 57956 - DNA, 122 bp, Homo sapiens
gcaccagccatggactgctacacggcgaactggaacccactcggggactctgccttttaccggtgagctgccccgccctcccgcccacggcctggcttaccctgctcgcccgccggctggag

SEQ ID NO: 57957 - DNA, 122 bp, Homo sapiens
tgagctggaacagcctgaggttttggtgctcaggatgtgtgtttgtcttggcagctgggacgacagcagctccgtcagcagcggcatcagcgacaccatagacaacctcagcactgatgaca

SEQ ID NO: 57958 - DNA, 122 bp, Homo sapiens
ctaaattatagaattcctgaatatttaacagcagattctttcagccagtaggaggtggcacgagtacactgcccgaaccagtccattacctgatgtgtttgtgtggaaaacagcattgagag

SEQ ID NO: 57959 - DNA, 122 bp, Homo sapiens
attgctgggccagagtatttctccgctgagagcacagttcataccgtgtggcagattccccgcgcaggcggggcgcgggggcaggggagaggcttgtgtgtccgcgtgcctgcgtgcacccg

SEQ ID NO: 57960 - DNA, 122 bp, Homo sapiens
catgctctcaaaagaccactctgctggttagatggtagtcaagagacaggtcaccatgaccgtgagagaatggagaagtccagatgtatttgaagaaggcacagatctgcaaatgaaccgag

SEQ ID NO: 57961 - DNA, 122 bp, Homo sapiens
ggcatttccagccctctcgcatgtctgctgggcagcagccttcacccggggcgctcccagcgcctctgctgcggccagcacatccccctgcgaggcggggcccagcaccccctcataggcaa

SEQ ID NO: 57962 - DNA, 122 bp, Homo sapiens
ggcccgccccctgtgacaccagccccgccccaccccgccccgcatacccgtgcgctgccgcgcatgctccgagccccgcccccgtgcgtcacagaatggcctcggacacccaggcagtccct

SEQ ID NO: 57963 - DNA, 122 bp, Homo sapiens
gggggtgcagggagagggaagatctggcctccttggtccttttgcgtgggctcttcagagcgtgagcgccggggagggactccggagaaaagcttggggggctgcgtattgctgctccccaa

SEQ ID NO: 57964 - DNA, 122 bp, Homo sapiens
tgagcctcattgttttaaatctgtaaagtataagtaaaaatatctaccttcaggaattaccgtgaggtttgtatagggttgggaacaaagttctggagtcagactacttgtattcaaatcct

SEQ ID NO: 57965 - DNA, 122 bp, Homo sapiens
cacttgcccgcctcccgccagcggtgggtggctgcgtctgaaggctgtcgtcggttacagcgggaatgggcgggccaacatggtctggaggccggacacaggtgggggccaagagcctaccc

SEQ ID NO: 57966 - DNA, 122 bp, Homo sapiens
tgatgcagattaatgatgcagagtccgctggcacggcattgtacaaaggctgtgtgttcacgtggccagcatcagactaaggggcctcaggaggtgctggcgtgggttcagaacccaaggga

SEQ ID NO: 57967 - DNA, 122 bp, Homo sapiens
ctccggagcctgggagatcagagggtggagtcagggccccctagttttggactccattgccgcactgcaggcgacttctcggaccccaccgttgaagcaccaggccccccgcccacccaaga

SEQ ID NO: 57968 - DNA, 122 bp, Homo sapiens
caccctctctcccccacccgcaccagacctggtgctcgagaccttccggaagagcctgcgcggccagaagatgttgcctctgctgtcccagcgccgcttcgtgctcctgcacaacggtgagg

SEQ ID NO: 57969 - DNA, 122 bp, Homo sapiens
agagtgagagacagtgctgtaaactgtcagggtgcccgtgccaggtggtttgcgaggaagcgcttgtcactgtgtgggggcagcagccttagtgcacctcccagcgtgtgtggcccccgccc

SEQ ID NO: 57970 - DNA, 122 bp, Homo sapiens
tccctctctctctctctctccctggcatgcacacgcacacacacaccactgttacggcgtcgggtttgaagggtctctgtccacagctgaaccacaaccacagcagggtggttcccctgccg

SEQ ID NO: 57971 - DNA, 122 bp, Homo sapiens
ccagcgctgcccatccccctcccaatctcggggccagtctccatccctgtccggtatccccgcccccgggcctctgtgaggttcccaagaacttccccatcacgagggggcggaaagaggag

SEQ ID NO: 57972 - DNA, 122 bp, Homo sapiens
caaagtgggcccccgccctggagctcagtggctggtctcccccttctgcaaaatgggtgtcgcccctgacctgggttggctcccggctctggcacccccaggtcccaatccaggagcctcgt

SEQ ID NO: 57973 - DNA, 122 bp, Homo sapiens
ttgaggctatagttttgggtttttttttaagtatttaaaacaaatcttcctcctgaaaagcgtattgctttatttactgggaataaactggcagtcaacaatgctagaaacgcctggcctcc

SEQ ID NO: 57974 - DNA, 122 bp, Homo sapiens
gccttcgcttctcggctcgggggcatccggggagcagcaccagggctgctcatggctgtccggcaggacctttattgtttccccttcagctaattctgcaggtggcagcgcggccgaatgtg

SEQ ID NO: 57975 - DNA, 122 bp, Homo sapiens
tcttccggacaacctcagccccagccaaagcagcacgcaggccctcagcctcagctcggccggccttctccgcccgtgccagagcctctagctccatggcctgggcctctagcctcatcttc

SEQ ID NO: 57976 - DNA, 122 bp, Homo sapiens
cggttgggaatactcagtcaccagcaacaagaatccccacagcgtctccacgtggctgcacgtagccgagggagatcacgcccaggattcctgcaggaagaaagcagacggctgagagcctc

SEQ ID NO: 57977 - DNA, 122 bp, Homo sapiens
ttataaaaatgatgcactttctacacatctgattttgtgaacccaaattagtttccacaacgcaactgtgttaacatttgccaacctctggggcaacattggttgtctttgttgcttttttc

SEQ ID NO: 57978 - DNA, 122 bp, Homo sapiens
gagtagagacccccagaggggaggcattcagctgtggcttgtcctttcctcacctatactcggggacctggcctcggcgactgtgagcactccgccggctgagggggagagccagggcccag

SEQ ID NO: 57979 - DNA, 122 bp, Homo sapiens
ccctaggccgggagttgttgtcaggcccaggccacttccgaggcgcctgcggtgtgtcgccgccaccacaggaggacgacgtcgacgccgaggaggaggcggtggaggcgtgttgttgtctc

SEQ ID NO: 57980 - DNA, 122 bp, Homo sapiens
ttaaatgttgttctctctgctcctctctctgtctctttctcctcacaaattcgcttcaaacgccaaagggaagaggagcagataggaacatcctatttgctgcacacctgctctgtgctggg

SEQ ID NO: 57981 - DNA, 122 bp, Homo sapiens
cagcaacatcagtaatgataatggcagcaacaagtctcaagtgtttgttgcgcaacaggccgggttttctgtgcttcgtatagatctgttcatctgatactcagcacagccctacacggagg

SEQ ID NO: 57982 - DNA, 122 bp, Homo sapiens
aaggtctgcagtcagccttgtcttctacctctctggtgtttgcttctcataagcagagtccgtattccaaacatccggacactgaaaagaagactcctgctctggaagttgacaagaaggaa

SEQ ID NO: 57983 - DNA, 122 bp, Homo sapiens
gccagggcccgccccctccccggcgcccggctggctctcaccggcccgcgtggcgcgctacgtacccagcgcctccgccgtggcccaggcctccgcctctagcccaatctccgcagcgctta

SEQ ID NO: 57984 - DNA, 122 bp, Homo sapiens
ctctctctctctgcatttctttccttcagtgcaggctctcagtttacagttctgcactcacgcctgtcttccccatcaactaagctccttgagaacatgggctttgcatctgctcacatcgc

SEQ ID NO: 57985 - DNA, 122 bp, Homo sapiens
ttatgccaattacatggaagttccccgttgtccagagagatgctgctatatccatcccaacgcctcctggcccaggtgctcttgtgcagtgaatgacctgcccaactgtatggaacagccct

SEQ ID NO: 57986 - DNA, 122 bp, Homo sapiens
gtagatgctcacaaaaaagttgaaagcttgttttaatgccatgcagcttggacttggccacggtagaagtatttatgccaggggagttggcaaatgctactttttgtcttcccagaaattgt

SEQ ID NO: 57987 - DNA, 122 bp, Homo sapiens
ttacgttctttaatgtcctggttatcttctccctaccgcttttatctgaacctttcctttcgtctctactaacttgtctctctgcagctcaatctggattatatttccaacagtttgtcctc

SEQ ID NO: 57988 - DNA, 122 bp, Homo sapiens
taagcttgaattactactctttatgctttatttaaccaaaatgtgtaaatttgcaagaaacggtagtctgtactctcaaaaatgcatgaatggaaaaccctaggactgtctgggtggcataa

SEQ ID NO: 57989 - DNA, 122 bp, Homo sapiens
acgattcgaggtgctctgtggccgcgagtgcatcttccacgtgagtatagttaccgcgtgcggacctggatcctcctccaggtgcagcgtttcgtcatctagcccaagcttggtctggcggc

SEQ ID NO: 57990 - DNA, 122 bp, Homo sapiens
tgcccagacacaaagcctggcctcccctcccagcttcagctgggggctcagggacttgagcgaggcccgcagtcctttgtcaaaagtctgctcccccttgcgggctgcagagaagccgaaca

SEQ ID NO: 57991 - DNA, 122 bp, Homo sapiens
tgtgagtgtttcttaattagagaacggttgacaatagagggtctggcagaggctcctggccgcggtgcggagcgtctggagcggagcacgcgctgtcagctggtgagcgcactctcctttca

SEQ ID NO: 57992 - DNA, 122 bp, Homo sapiens
tgccactgtcgcagtgcggggcagtgcaggcccttcagccttcgggtcctgcccgggaggcgccagtggtgggatcgggagggccggggccctgccagacccagcagctgcagtgcagcagg

SEQ ID NO: 57993 - DNA, 122 bp, Homo sapiens
taataatcaccaggcccaggagcccaggaagttgagaccacatgtgatgtggaggaaactcggcagcattgggcttaggcgcctggctccgggcactgaagggagggctgcagagatcatgg

SEQ ID NO: 57994 - DNA, 122 bp, Homo sapiens
agtgctgggtagaggagggcatggtccctgctgagggctccaccccagggccggtgcccacggacctaggtgaggacaggcttttctgttttcgcgcttaagtgttgcatttcccaagacca

SEQ ID NO: 57995 - DNA, 122 bp, Homo sapiens
ggagcgcgggcgccggcagcagcatctcgggttagaagcggggctgttcgctggatcgtccgcccgggcgcggcgagaatgcacaaccccgtccagagcgcaccacctcgatcctcgggggg

SEQ ID NO: 57996 - DNA, 122 bp, Homo sapiens
tgatgtagctgttaattgccctcctgtttcctagaaagcttatagggcagcagtaggaaacgggttaggtatgcctttcctggtaggagccgagctttgggtcttatctctgccacttgttc

SEQ ID NO: 57997 - DNA, 122 bp, Homo sapiens
cagtgcctgaccatgggacctcagcagggtctcttcagtgccaggctctgtgcctgatcccgttggtggtccctagatggatatggtgtgatcttgcactcaggatgctccatgtcaatgga

SEQ ID NO: 57998 - DNA, 122 bp, Homo sapiens
ccatttgggtggcacatttcacaacacagatgcacttcttaagagtcctccatccgtcagcgttgtaaaaaaggaagtggcacgtttgcatgtagttcttctgagacggagatttagggaca

SEQ ID NO: 57999 - DNA, 122 bp, Homo sapiens
cacagcacatcccaccactctccttccagtcctgaccaggccccagccggcaacttctaccgagagccatggctcaacaccaaactggacagtagacatcatgatccctccagttagctcta

SEQ ID NO: 58000 - DNA, 122 bp, Homo sapiens
gcggccacctcagtgcagacgtcacttttttttccaaagagtgacagtcgaagaggctcacgggagatgcaaacggtacttttgggggctgggccagggtggggcgtggcccggggcggggg

SEQ ID NO: 58001 - DNA, 122 bp, Homo sapiens
ctctccccttccccactccatggagttagaggtcctgttgattttgccatgtaaacatttcggatttgcttacttcatccccactgccaccaacagtgcaggatggccctaagaggagaagt

SEQ ID NO: 58002 - DNA, 122 bp, Homo sapiens
tagatgcacatctgaatcagctgaggctatttaaaaaatggaagttcctaaacattcacacgagtgaatgaatagctctgggatggggtcctggaacctgcgtttttaccaagttccccaag

SEQ ID NO: 58003 - DNA, 122 bp, Homo sapiens
tggcatttgctatctgattggctgatggccgtctacccaatcagaaagtcgtactagaatcgcctcatttgcattcacgccacttcccattgtccaatcagattttggataccgaacgcggc

SEQ ID NO: 58004 - DNA, 122 bp, Homo sapiens
ccggggcccagggcaggctcccgggcagtgacggtcctggctgtgccagaggctcatgctcgctttgttctgggaggcctggtctccagggcctgttttcagcaccagggcttcaagccaga

SEQ ID NO: 58005 - DNA, 122 bp, Homo sapiens
aatactcaagctgattactaatagagtcacctacattatcttaatatgcttcatctttcccggttttgtcttggggtcagaagaagtatttatgtacaaaaatcttttattaagtccatttc

SEQ ID NO: 58006 - DNA, 122 bp, Homo sapiens
gttgaggccaatcagcagtttaggcgcacaggtgcgggctcagaaagcagcagcaatctccggcgtgttctggaatcagaagttgaggtccacgtctgattagttcccttcgtttcattaga

SEQ ID NO: 58007 - DNA, 122 bp, Homo sapiens
tgacagtagaagaaggaccacctgcgcctccagagccagccaatcccgaccctatcatggcgcggtttgcccacctcctgatgaaggaggagccatgggagacttgaccaatcgactaccgc

SEQ ID NO: 58008 - DNA, 122 bp, Homo sapiens
tgcttttcccgtaacaacttgggggctctctgtgggcccttgaagcagtcacattgctgccgtccccagctagggtcataggagtccctgtcccccaggcctttccctaaacccctattcta

SEQ ID NO: 58009 - DNA, 122 bp, Homo sapiens
gaaccccctgataacagagctctactggcccgagatgcttctgcagagccggcgtggcaccgtggccagcacccactcccggcgggggcttcaccgagcccagccgtccttcccagcgggct

SEQ ID NO: 58010 - DNA, 122 bp, Homo sapiens
agcccaccgccccgtgagcggcgccggccccactgggctccggggtgatgacctgacgcgcgtggaaacccagacccgcgccccagaaacagtattccacttgggcttgcctccccgcccct

SEQ ID NO: 58011 - DNA, 122 bp, Homo sapiens
aattgggtggcaaagtcagtagggtgagacagattagagcatttcctcctgtctccctgtcggttcactggcaataaacttctctccctggaagaaccatgcttcagcgttcggcttcctat

SEQ ID NO: 58012 - DNA, 122 bp, Homo sapiens
tggctgaagagcagatccatctacatggggctgggaggggaggtgcggtcaccgctcagccgccgactcagccgagggagaccttggccagcccctgccactccgcaggctcggtttcctcg

SEQ ID NO: 58013 - DNA, 122 bp, Homo sapiens
tttggactggataacttttgttgtgggagtctgtcctgtgcattgtaggatatttagcagcgttcctggcctcagctaactaggtgccagtagcacatccgatgtgacaactgaaaatgtct

SEQ ID NO: 58014 - DNA, 122 bp, Homo sapiens
agaatttgctctcccactcagtgtgctctgcagctgtgaggaaacagccttcgttagaggcgggagcagagacgagccgctgctctgtgtcgtgtttgctgtggccgcagggagaggagcag

SEQ ID NO: 58015 - DNA, 122 bp, Homo sapiens
ttccagagatttgcatgtgaaagtcttaaaatgtaaattaaggccgggtgcggtggctcacgccggtaatctcagcaatttgggaggccaaggcaggaggatcatgcggtcaagagacggag

SEQ ID NO: 58016 - DNA, 122 bp, Homo sapiens
tccatggcagtgtctgcttttctctgtgaaggcaaagggcctctgagggagtattacagccgcctcatccaccagaagcatttccagcacatccaggtctgcaccccctggctggagggccg

SEQ ID NO: 58017 - DNA, 122 bp, Homo sapiens
gtgggtttggggggagggtggaggagtggggggagagtgggtggctacagccaggggctccggccctgccctggctctcacctggagtcgttgaaagtgtgccattctcctgtccctggact

SEQ ID NO: 58018 - DNA, 122 bp, Homo sapiens
cctcccaaagtacacttctggctggctcagctgccctctgcgtgcaggaaagagggtgaccgttgttggcgacagcaacctttcaacgtgagtaaattggcaaggaaatgagcccaggaagt

SEQ ID NO: 58019 - DNA, 122 bp, Homo sapiens
gccgcctcgggctccgtcaggccggccagccgcgtccccggcagggtgcgcagcgtcgagcggtacgtctcatggcgcacgccgcccacgttgatcacgatcttgccgctgtcgccaccgcc

SEQ ID NO: 58020 - DNA, 122 bp, Homo sapiens
ccaagcctggcaccgtgtttaattttcgaggacctgccggactgtcttccgcagcagcggcgctgttctgcactcctaccacaacgtgccatggctccggtctttcccgcatggaagctgtc

SEQ ID NO: 58021 - DNA, 122 bp, Homo sapiens
gtaaggctgcaggtggcctgggggtggcgtgccatcctgacttgggggacttgggggtcacgacacggccctcgtcctgttgaaatcgcagctgttgatgaaatcagccgagtcttactgct

SEQ ID NO: 58022 - DNA, 122 bp, Homo sapiens
gctgtttataatatatccatgcctctcccacgcctgactataaactccgtgactgtgcctcgcttttgatctcatgaagttcttgtacagggtaagaactccttgttattgacttgaatgtg

SEQ ID NO: 58023 - DNA, 122 bp, Homo sapiens
caagttcctttgcacttctctcagtctcctcatctttctgttgtggagggctagcctggacgcttgcatccaaagattccacagaggaaccaggcgtctcttcctccatgctttctccatct

SEQ ID NO: 58024 - DNA, 122 bp, Homo sapiens
gcagccctccctgatggaaaaatctccagtggtttcccactgtacttaaaatcctaactgcgaggccccccagctctccacctccatctccctccaaccccctcccactgtgatcgtgtaaa

SEQ ID NO: 58025 - DNA, 122 bp, Homo sapiens
gcgtcgagaaagggggaaggagccagcccacgggcagggcagggcggctgcagactctcccgcagctcaggggcctggagaaacctggccacacctggcccagctgggtcaggcctctgcca

SEQ ID NO: 58026 - DNA, 122 bp, Homo sapiens
aatgtctacagttgccctctaccaggagggagagcagtttatgggtgaaatcagttttctcgtgcctcagtggggtgtgctccacagtctcccagagagccccactaggagtgagccccagt

SEQ ID NO: 58027 - DNA, 122 bp, Homo sapiens
ctactgttccccagggctctccagtgggactgtggtctagttgtccacgatggcaacacacggtgaatgctttgcttcccctccctgtcttacttccctactctcttaccagtacttcctgg

SEQ ID NO: 58028 - DNA, 122 bp, Homo sapiens
ttggttaagactctggaatctgtcctcccgcaccccagaggacaccgccacctctgactccgcactgacaacagcatctgaaggcatttcttctgtggggccatcactttattaaggggtca

SEQ ID NO: 58029 - DNA, 122 bp, Homo sapiens
gagccgtacggttcgcgtttggggcacaggggcccctcttgctggtgcggatgggaaaggcgcggggtcgagtcagcgtccctctcgatgttggtttcttcgttttacaaataacacttggg

SEQ ID NO: 58030 - DNA, 122 bp, Homo sapiens
tctttagctctgcgtcggatccctgagaacttcgaagccatcctggctgaggctaatctccgctgtgcttcctctgcagtatgaagactttggagactcaaccgttagctccggactgctgt

SEQ ID NO: 58031 - DNA, 122 bp, Homo sapiens
tgagcaccaacctccacctccagccaagccaggccctttaaacacacccttcggttctcccgatccaaaatcttatagttgacagccttcaatgcagaggcagtactggcgtcttcaacgaa

SEQ ID NO: 58032 - DNA, 122 bp, Homo sapiens
tcaccttcaccaggccttttcgccaactaggtgagggtttccagggttgggcctgggcctcgtcaacaaagcaaagtgaggttattcttcctggccaccaactggcaggaggaagatgaagc

SEQ ID NO: 58033 - DNA, 122 bp, Homo sapiens
aacaaactttaaaaacaaagacagacattcagcaaaagacaagtacaagcatgttcccagcggcaccacttctaacagccaaaaggcagaaacaatctaaatctctgcctccaagagaatgg

SEQ ID NO: 58034 - DNA, 122 bp, Homo sapiens
ctctgccccagccccagttcaggacccactgtggctgtcactgagctccagcctcagagccgcccaccaagcccgacctcacgcagggcccactgtgcccaccagagggcgccagaagccgg

SEQ ID NO: 58035 - DNA, 122 bp, Homo sapiens
gcaggtgggaagcggaggagaggggtttcgaggcgggtggcagtcagacctccagcaacgcggccccattgtgaagctgccaaactctctctagtggtggaatctgcaggtctccgccagaa

SEQ ID NO: 58036 - DNA, 122 bp, Homo sapiens
cctgctttccacgtttccacactctttttgccaagaggtgtggcagtcctcctgcacattcgaccgaagttagagcctgccccctctcagaaattctttggccttgaggtgtcccaaacaaa

SEQ ID NO: 58037 - DNA, 122 bp, Homo sapiens
gcccgttccaggggtcccagaacgcccgggcgtggggctgggggtgtggcgcagcgaggccgcgcagcaagcagtcctcccggcaccgtcggaagcgcagttgcagcagccgtcggacaagc

SEQ ID NO: 58038 - DNA, 122 bp, Homo sapiens
tgcatgttctcgatggacctggttcagagcagatgctctgtgaatgcccactggagtgaacgacaggggcagatggaagcagggacagccactgccagcctcaatagtttcaggtgcctggc

SEQ ID NO: 58039 - DNA, 122 bp, Homo sapiens
gaccccctgaaggacagaggtgaacccgggaccccctgaaggacagaggtgaacccgggacgccctcaaggacagaggtgaacccgggacgccctcaaggacagaggtgaacccgggacccc

SEQ ID NO: 58040 - DNA, 122 bp, Homo sapiens
cgatggcttcgctgtaccagaggttcactggcaagatcaacacctcgaggtccttccccgcgcccccggaggcgagtcacctcctgggcggccaggggcccgaggaggacggcggcgcagga

SEQ ID NO: 58041 - DNA, 122 bp, Homo sapiens
ccctccaccaacccccaccccgcacgccacctcttcaccagagacgactttgtgagggcccggtttcacatttctggaatgggtgatctgggacgcggctcaattccctagagcataaggag

SEQ ID NO: 58042 - DNA, 122 bp, Homo sapiens
agggcagttcgatatccttgctggttactttgttatttcttcgtaagtgtagggttacagcgggaaagaccttgagagttgtctcttttagcattgtacattggctaaagtggaggggaatc

SEQ ID NO: 58043 - DNA, 122 bp, Homo sapiens
agggctgtgtttgaatctcctgaagcccctggtgggtggctgggaaacgcaggtgctccacgtgaagcacagaaggcacgtacgggctcacgggacccgcggtcagctgcatccgagagtga

SEQ ID NO: 58044 - DNA, 122 bp, Homo sapiens
gaccagaacgattactgcctttaaaaagtcgtgaaaatgatcgtgaaccgtaccccacaccgagcgcgcgtctaccccctaaggcggtggagacgcccccagcttccgccgccagctcgcgg

SEQ ID NO: 58045 - DNA, 122 bp, Homo sapiens
gggggccagcctggatagcccagtgcggcgcagggcggtgctcagggctgtggaatgccccgaagggcgtaggctcggggtctcccagccaggacacacaaggcaggctggggagccagggt

SEQ ID NO: 58046 - DNA, 122 bp, Homo sapiens
ccatcaggagcaaatgaaacagccaactccactgcctcccccatgccagaaggtgcctgtcgagctcccagtggaggtcccatcaaagcaagaggaaaagcacatgactgctgtaaagggac

SEQ ID NO: 58047 - DNA, 122 bp, Homo sapiens
caagggttatccccgttactgcactgtcacgactctctcagatggctctgtggtcctaaacggaggccgttcccggagggggaaactgaggggcccaccggagagcagagagtgggggaacg

SEQ ID NO: 58048 - DNA, 122 bp, Homo sapiens
tacagtgcgtctccttctgcagcagccggccagcctcgcactggctgcacagcggcttctcggccaccacaaagagaagattggtgttggtcagtctctgcgcgtggaacagcctgcgggca

SEQ ID NO: 58049 - DNA, 122 bp, Homo sapiens
cagcccgggtctggttccccaggttcatcacatgctcaatctccttgacattcttggtgacgaaggaggagaggtccttgatgtagacgccagtctcggggttctctttcagctctagcctc

SEQ ID NO: 58050 - DNA, 122 bp, Homo sapiens
ggctctcctgggcagcctggtcaagaaagactcctttctttcctagagagaggtctccctcggttcctgagctgagcacatgctttctcagtgagccggcagaacaggacagaggggcgtct

SEQ ID NO: 58051 - DNA, 122 bp, Homo sapiens
cagagcttccgaggctgggtggccctggttctgcatctgcgggcccattcagctgcaaagcggcccatcgcttgtcccaaatgcgagagacgcttctggcgacgaaagcagcttcgagctca

SEQ ID NO: 58052 - DNA, 122 bp, Homo sapiens
cgctctgagtcccatgacatgctatgcctggttccacaggagggggtctcagcttgtacccgggggcatgactgtaggggctttcagcttatgatggagcaggagagtggaggggaagctgt

SEQ ID NO: 58053 - DNA, 122 bp, Homo sapiens
aatggggcggttcccagactcgaaccagggcttgttagagcctgcaggagagccaggctccggccgtgccgcgcccgccgccattaacgcccacgggcccgagctgtgctcccgccccggcc

SEQ ID NO: 58054 - DNA, 122 bp, Homo sapiens
tcgcgactccccaggatctgacagtctggttaatgtccgtcattggaaacgaccactgaccggcgccaccttttactccgcggaaacagcctgccattcgcgccccgggcagctgcagagag

SEQ ID NO: 58055 - DNA, 122 bp, Homo sapiens
cccaccttgaaggtagggcacatgtcacaacatgtgtaataactctctaactccccatgtcgctatgcccgaaagcaagacagaatgaataaattcacagtcttcaaaatcaaggcttctgt

SEQ ID NO: 58056 - DNA, 122 bp, Homo sapiens
tcagacgcaaatttccatcagcctacctctgaaatcaccttggccgaggcgaccgccaggcgcatgcgcacggggcagccaccagctagttagggtgatcccaggttagaggcgcccaggct

SEQ ID NO: 58057 - DNA, 122 bp, Homo sapiens
gcctggcatgtaggaagcacctggaaaatattcgctgtgattaccatcagtccattttaccgaggaaggagccaaggtccaggcccactgaaggacttgcataacattacaatagcagtggc

SEQ ID NO: 58058 - DNA, 122 bp, Homo sapiens
ctacgacagcgaggggcccgggaagcccgcggaaacgcaggaggcggccaggagaggcagcgctacgcacatcccccccaccttcggagccctgtcctagcttaggctgagacaactgggag

SEQ ID NO: 58059 - DNA, 122 bp, Homo sapiens
acccagaatccctctaaccccttgggtgcggtttgctcagccccagcttatctcctcctccgcgctgtgtaaatgctccagcactcaataaagtgggctttgcaagctacctccttccctgc

SEQ ID NO: 58060 - DNA, 122 bp, Homo sapiens
gcggcgggtggcatctgaagaccccgcaggccctgctttccttccgggagcatctcaggacggccgctttgtctgtctgcccccgccccttgctgaaacgtcaacaaggccggcatcccctt

SEQ ID NO: 58061 - DNA, 122 bp, Homo sapiens
atatgagcaagatcacctgaatgtgtgaataaagaccagggcacaaacacccaggttgtccgtggctagggatccaccatatgttaaggttttgtttagtgtatttctgttgaggggatgac

SEQ ID NO: 58062 - DNA, 122 bp, Homo sapiens
cccaacactgccggagtcgcgtcatgccatgccccctctcctgcacctccctggccctgccggccactgtggacgccctggggcttggcacccacctctggagaaactcggggccacctcca

SEQ ID NO: 58063 - DNA, 122 bp, Homo sapiens
caaggtgagcagagccggcctcctcccgcttgctgcccccgcatccctgtgagtgccgtgcgtgagcgcacacagaagcatccctgcgtgtgcgtgtctatttgtcaatagttccttttgga

SEQ ID NO: 58064 - DNA, 122 bp, Homo sapiens
ggctcatggggaaagttactgagaggtgacagcgtgctggcagtcctcacagccctcgcgcgctctcggcgcctcctctgactgggctcccactttggcccaccgctgcactgtgggatccc

SEQ ID NO: 58065 - DNA, 122 bp, Homo sapiens
cttggctgaccgctggcccacagggatacccaggtccagcaacaggggtgcaggagtgggcggggagtcgggcgtcttgagcgagaagcagatgagcggggaagggggcggctcggtcgggc

SEQ ID NO: 58066 - DNA, 122 bp, Homo sapiens
ccaggaagcagcggaagcgcacgttgagccccttcaagaggtggatgttggagcccaggtcgtcccgcagcgccgccgtcaccggcgacggacccggccctgccccgccgccgccgccgccc

SEQ ID NO: 58067 - DNA, 122 bp, Homo sapiens
cagacagttcaagcctcaccacctccagagaaagatatgcctctttctctccctgctgtccgggaggcccctcaccagtcacagactccccagctcccagcaaagcacctcccaccctgggg

SEQ ID NO: 58068 - DNA, 122 bp, Homo sapiens
cgctccacctggagacaggctttgaaagtgaattatttgaaactgaggaagtcaaggcctcgggcctctcagcattctcagagcaaacaaacttttggcaagttcagagaaaaggaagtggg

SEQ ID NO: 58069 - DNA, 122 bp, Homo sapiens
cccacacatgctgggatcatgccccctgacttgtcatctttcccttcccaccatcaccagcgttgtgagggttgtgcacagaatgtcagcagagataccacccaacttgtcctctctttaag

SEQ ID NO: 58070 - DNA, 122 bp, Homo sapiens
acaaaagaaggtggcaagtaaggaaagctcaccccagggagttttctcggagaacacaagcggtcccaacagggtaaaggagaaaataattatctggaaaggttgcaattaatagtatcagg

SEQ ID NO: 58071 - DNA, 122 bp, Homo sapiens
cagccacccctttcatctcggctctttattggcagcttctccataaggcgccgccctttccgtatcagaaactaccaggtgcttcatggttggactgaaattccgctttcccgtcttccagc

SEQ ID NO: 58072 - DNA, 122 bp, Homo sapiens
ccttgggaaggggggcggggctggaaaccaacgggaggggtgactgtccatcccctccgacgggagtactcaggcccagcacccattttctctgatgagcttcccagtgccttctagaccaa

SEQ ID NO: 58073 - DNA, 122 bp, Homo sapiens
acctgcgcctgtcgctgacagagcggggccagtgccgtgtgcagcacctccactttccctcggtcgtggacatgctccaccacttccagcgctcgcccatcccactcgagtgcggcgccgcc

SEQ ID NO: 58074 - DNA, 122 bp, Homo sapiens
cgcagaggcgccaggggtcggggaccactgcattccccgtgactggggcgctggaggccgcggcgaggccccgcgacggctgctccgtgcgcccccggccggccgtcgcccacgcccggcag

SEQ ID NO: 58075 - DNA, 122 bp, Homo sapiens
atttaccaaacattaagttagaaggaccactccatggatgcaggctgtcctacaaatattcgtttagtgagggtatactcacataaactgttcatgaaaatcagattgattctttcacataa

SEQ ID NO: 58076 - DNA, 122 bp, Homo sapiens
actttcccctgcccctgttttgtttggtttttattgttctgtggtggtggtggtggtgatcgttactatgtcagtcaggatccaatcaggaaattatggcaaactcaaggtgcctaatttaa

SEQ ID NO: 58077 - DNA, 122 bp, Homo sapiens
gccaattaatagttgtgtgaccctgagcaggtaatatctcgggactctgcatctgtaaagcgatggataaagagacctacctcataagaactatgaggcttaaataagatagtgtgtgtagc

SEQ ID NO: 58078 - DNA, 122 bp, Homo sapiens
gtatccataaacaaaatgttgttggaacacagccgtgctcattcatttacatattatctgcggctgcctttgcacttcagcaggagagctaagtagctgcaatacaggcattatggatgcaa

SEQ ID NO: 58079 - DNA, 122 bp, Homo sapiens
aaaacataaggcactgggcaaatgtgacgtaggctgggatgaaacccattctcccagagccggtctctcccacagcacaaagctgctcctcatgcagccagctggctgagggcccggagtgt

SEQ ID NO: 58080 - DNA, 122 bp, Homo sapiens
ctatggcaggaggctgtttgggagtcgcatgtgcggcatctctggcaggtgcacgggagccgagactccagcagaccagggtgggggccggaagggagctgctctcgcctgacacccctcgt

SEQ ID NO: 58081 - DNA, 122 bp, Homo sapiens
gcacttccagtgactgagtatggccaatccaggctagatcacttctctaggtgatctttacgctagaacttccccatggacctggctgagactctctgagctgcactgaggggtgaggcttt

SEQ ID NO: 58082 - DNA, 122 bp, Homo sapiens
aaaatgttcccccaaaatggaggatttcgcagactctgaagagcctgcttgtttgagcagcgtttctttcttttcccggtgtctcggccttcacgccgctccttgcccatcgcctcagagcg

SEQ ID NO: 58083 - DNA, 122 bp, Homo sapiens
aagtctgatgttgatgtcccctgaagacagcggcttttatgcgaccattgttgcagtggtcgggcttcatgtggtgctggcaattttcgtcttcatagtgtggaaggagggcttgccccagt

SEQ ID NO: 58084 - DNA, 122 bp, Homo sapiens
ccctgactgtcctttcccggacccctgcctggcacgcctgggaaaggtttaccctgggggcgggggcaggttggcgccaggcagcttgcagaatgtgtgctcggaccccgggcatcgcgaag

SEQ ID NO: 58085 - DNA, 122 bp, Homo sapiens
ctgctacaacacggtcatctcgcctatctactttgtgtccttcgtgctgacggcccagttcgtgctagtcaacgtggtgatcgccgtgctgatgaagcacctggaggagagcaacaaggagg

SEQ ID NO: 58086 - DNA, 122 bp, Homo sapiens
ggctaaaggtaagctgcatgacagcaatccctagaggatacttctctgcccttccccaaccgtactgcttgaaagaagctccatattgaaggtttcccattcccttattttcttggaaattt

SEQ ID NO: 58087 - DNA, 122 bp, Homo sapiens
acccccaccctccacccccggcctcgctctgcgaggttagcccgcttcgggaggtggaggcgctaaatcgaggtcccggaaagcttttctggggcctggttcacagacacctgcctgagaga

SEQ ID NO: 58088 - DNA, 122 bp, Homo sapiens
atcaccatactgacaaataacacctgagagagtgggttggttttgtgtcgtgttctagtgcgttttcatcgtgaacatcttaggatgggaaggcctcagggaagggctttcggggaaggaca

SEQ ID NO: 58089 - DNA, 122 bp, Homo sapiens
agacatcgcgcaggcgtcgtcagtagacatcgcgcaggcgatgggtgaggcggctttggccgccatgttttcgtcgcagtaactgccttggtgtcagtagtcattgccagtttcgggcgttc

SEQ ID NO: 58090 - DNA, 122 bp, Homo sapiens
cactcacacgccgtcaggaagcagtttccgaaacaggccgggtgcgggggtgggggatcccgttccagccccacccctgaaagttgctgggagtggcacccaaagaactttcccagattgat

SEQ ID NO: 58091 - DNA, 122 bp, Homo sapiens
ggggctccgaactttgtctctaagtttccggttctgtgctcagcggctccaccctcggtgcgcatgcgcgccttgccagccctctgttccagctccacacccggccccgagcgcgagcctgg

SEQ ID NO: 58092 - DNA, 122 bp, Homo sapiens
ccccacagaggggctctgggaacaccagctagatggggcagtggggccctgagcacatcccgctcaaaagccccataatgagaggccggggaagcggaacgctgtcacccctgcatctaatt

SEQ ID NO: 58093 - DNA, 122 bp, Homo sapiens
ctcatcgctgcctcggcggcggccccttccggccacgctctacggcttctggcctaagcgcgtccataccaggccgtggcctcagaagtgactcccagtactcactcgcattgtggtcccgc

SEQ ID NO: 58094 - DNA, 122 bp, Homo sapiens
aaattttaagttacagcaattaaatgtgtgtttttcacagacatcttgttacacaatcaccgtaagatactatccccattttattttatttttttaaagagatggagtcttgtatgttgccc

SEQ ID NO: 58095 - DNA, 122 bp, Homo sapiens
aacagctggaggaaaagcacctcctgggtcctaaaatctttctgggctctcctcaaggaccggagagatggcacagagacaactttcatggcgacgccaggctgcgccctcctgtgcagtgg

SEQ ID NO: 58096 - DNA, 122 bp, Homo sapiens
tctcacgaaggctgaactctctctacattcttctgcacctgttttttgtgcatactctttcgttgtcaaatatttccctccaactgttgttgtgtatgaaataaatacacacatataagcta

SEQ ID NO: 58097 - DNA, 122 bp, Homo sapiens
tagagaagtaaactgcccccattgttctgagacactggaattcaattcagtaaacaatcacggcccccttcccccaaaatgataaagacaatcactgccatttattgagcttccaattacgg

SEQ ID NO: 58098 - DNA, 122 bp, Homo sapiens
cgggttccatctgcccgcggcccggaggtgcgcccctgcccgcttcgccccggggaccctcggaacccgcggctctgccctccacacaatctgggctgccgctcccttgggcttttcgtgaa

SEQ ID NO: 58099 - DNA, 122 bp, Homo sapiens
ctgctacctcttgtctcccctgcagtgggctcccaggacagcttgctggagatcaccttccgctccggagccctgcccgtgctctgtgaccccacgacccctaagccagaggacctgcattc

SEQ ID NO: 58100 - DNA, 122 bp, Homo sapiens
ctcactccgactctgagacttcagcccaggtttctgctcctctgaagtctgagcagaaatcggaatattaaacttactgatgctgttgctaaaaatcaggctgaggtagtggcaccagcacg

SEQ ID NO: 58101 - DNA, 122 bp, Homo sapiens
cgtcaagggcgcattggagagtgaccctcggacccggctgccgccgtcgccgccatcttccggccgtcccagccccgccccgcggagaaacctggccaggttcctgttagaatcctgccagg

SEQ ID NO: 58102 - DNA, 122 bp, Homo sapiens
aatgtactaaattcatcttgaaagtcaagctttttgctctctgctattgcacatgctaggcgctgggaggcgatgagcgactgagcacaaagcctgttgttgacctaatggcagagccagat

SEQ ID NO: 58103 - DNA, 122 bp, Homo sapiens
gagggacagggcctccccctacctctgctccgtaccctccgccccttcagtctggggctccgggtaaagtttcagcctccgcacgtgactcgctatggccgctgccatcgccccgcgcccct

SEQ ID NO: 58104 - DNA, 122 bp, Homo sapiens
tcatgcttaaaatcacaggacgggttcacctgcttcgtccttggacctgtgatctatgtacgctgcttttcaacaagtttctagttgtcccctcctgggtatggccctcccctccttccttc

SEQ ID NO: 58105 - DNA, 122 bp, Homo sapiens
gtactgccctttagcctttgcgctttgcagcctaatccaaaccaactgctgaacgagacacgcgtctccgcagtctccgagtcttcatggctttggttgttaatcactctcagcaatagcca

SEQ ID NO: 58106 - DNA, 122 bp, Homo sapiens
gcagcaggaactgaaacctttagctttagggctccagttatcactctaatcaagtccacacgcaaagaaccaagcagaaaggaaaactgaaagtgagatgtggagaggcgataccggaggct

SEQ ID NO: 58107 - DNA, 122 bp, Homo sapiens
cctggactactgtccattcatccatccattcatccattgtctccccccacccccccatctcggactgtcccagtgacagccctagcaagaagagacaagaaacaagttcacgttgtccagtt

SEQ ID NO: 58108 - DNA, 122 bp, Homo sapiens
gcgccggcgcgttctggcgacaggggagccaggggccgcggggaagcgaggactggcctgcgctgggctcgggagctctgtcgcgaggaggggcgcaggaccatggactgggggtggggcat

SEQ ID NO: 58109 - DNA, 122 bp, Homo sapiens
gagtgttgtaaagagaacaggcgcttcaaaagccagcccccatccctcggatctgctttgcgatggtaccggatgcgagaggacagtactctcgcttaccttccctagcgtcccctcgttcc

SEQ ID NO: 58110 - DNA, 122 bp, Homo sapiens
tcagtttcagaacaagcttcctggaacccatgacccatgaagtcttgtcgacatttataccgtctgagggtagcagctcgaaagtagaagaagtgggtgaggttttctcttcagtctgatag

SEQ ID NO: 58111 - DNA, 122 bp, Homo sapiens
cggccagcggtagcgtgacctgacaggaggagtgcgtcttcagagacattgggaaactggcgtgcctgtcgcccgtcccagggtcagagtcttcgaaaccaggctttctgggaacccaacaa

SEQ ID NO: 58112 - DNA, 122 bp, Homo sapiens
agagagcaaaggcatagactcaaccaaaatgtccatcaatggtagactggctaacaaaaacgtgacacatatacatcatggaatactatgcagccataaaagaagatcatgcccttttcaag

SEQ ID NO: 58113 - DNA, 122 bp, Homo sapiens
gcagagcacagagctgggctgtaagaactgttggcagacggaatgactgagtggcagactcggtgccacgttggatggggggtagaagagggcagggtgacccagccccagggagggtcgct

SEQ ID NO: 58114 - DNA, 122 bp, Homo sapiens
gacgcttggaagcacttctcgttcctcaatctagaactacaattcccgatgtacagtgcgcgagattgcgcattacaactctaaaactacacctcccagagttctacgcgaccgtccagccc

SEQ ID NO: 58115 - DNA, 122 bp, Homo sapiens
attgtgaagtcccagcctgcatgtaaaatagaactgggctttaaaagaatcggataattacgaaatgagttacataaagtcaggtgcctattttgttttctatgaggagaagaaactaattg

SEQ ID NO: 58116 - DNA, 122 bp, Homo sapiens
cagaagttagggctccagggcaggattctcagccccgacccaggaaaatggtctcaccgccgccctctgagaccgggaataaattccaggccgagttcccactttacctcgctctccaccct

SEQ ID NO: 58117 - DNA, 122 bp, Homo sapiens
acccaagtgctgaggggagccctcccggccatttctgtcccagctccaagggtctctccacgatggcctgcaacagcacgtcccttgaggcttacacatacctgctgctgaacaccagcaac

SEQ ID NO: 58118 - DNA, 122 bp, Homo sapiens
tgttcagatcatccggcgttagagtctcataaggagcgcgcaacctggacccctcgcatgcggagcacacagtaggctttgcgctcctgtgagaagaacctgatgctcctgctgatctgaca

SEQ ID NO: 58119 - DNA, 122 bp, Homo sapiens
agtgatggcgacaaacacccgacagccagcgaggcccaaagaccaggtttcagaacaaagcgacccctgaccccaaggccgccctgtaaaagaggaactccccgctcgtatcacagccagaa

SEQ ID NO: 58120 - DNA, 122 bp, Homo sapiens
caggtcaccctcgcttgccacccgcccagacacccagaggccctgcggcttctctcttcccgtctgtcccgccaccaccttcattgacacgacgtacagctcaggtacaaagacgaggagaa

SEQ ID NO: 58121 - DNA, 122 bp, Homo sapiens
gttcgtggctcccctcctctcttggccacatctgaggacccaggaatgtgtggagccttgcgggaacctcctgttccttcatgctacacaagctgtctttcttctccccacatcttgcgctc

SEQ ID NO: 58122 - DNA, 122 bp, Homo sapiens
aaggcaaggctttctgaggtttctggcctgcaaatcccactggattcctgcagtgcccaccgaagaccttcccctaccagaccgacagtcccttttcacccctagacgtcgcgggttggagg

SEQ ID NO: 58123 - DNA, 122 bp, Homo sapiens
ccctctggctcctcctatctccctccagtcctgggcccatcctcccatcctttgtttgctcggaagcccagtgtttcctgccaggccccagccagggacccccaagtgaacttgacctgcct

SEQ ID NO: 58124 - DNA, 122 bp, Homo sapiens
gagcaacagaagcaccacgctacaaagagcatgacgagttcttccaggcttgggaaagcacgggtaaatgcccgcggtcctgcgcgccagcggggagcagtagagacttccggcgtcggctg

SEQ ID NO: 58125 - DNA, 122 bp, Homo sapiens
aactttgcatggtgcttagtcaaggactcctgcgacctggctcccgaggtcagctggcggcgctgacacacatgcatggcagactatccctggctctatctccctgttcctcgccccctcca

SEQ ID NO: 58126 - DNA, 122 bp, Homo sapiens
ctcctgggaaatgtagttctccttggactctagcctgtttgctcgcggggtagcggactacgctcttccagctgtcggacctgggaaattctcctgtgctaaatcccgtggcgctcgcgggt

SEQ ID NO: 58127 - DNA, 122 bp, Homo sapiens
ccgggcttctgagcggctcgggttccgcgctgccggcagggcttgggggcgccttagagccgaaccccgttttttcaggaaagggcgctgcgaccacccccgtcccgggcctcagcccctct

SEQ ID NO: 58128 - DNA, 122 bp, Homo sapiens
cttctagaggtaacattaagaagggaatttggtgccagattttgaatgaccttaaaacaacgggaaaccactgaaggtttttaaccattgtgatgacaagatcagatcagtgactcagaaag

SEQ ID NO: 58129 - DNA, 122 bp, Homo sapiens
acccctcctgtcgaaattttagtaccccacaccccaagatgtgaggaacctgagcatgaacgcggtagccatggggtgagcgcctggggccacgctcagctgccccgagacctcccaacctc

SEQ ID NO: 58130 - DNA, 122 bp, Homo sapiens
tcctttcccacggcgcgcgggctcccccagtcggggaactagccccggggctgggagctacgcctccgcctttcaggatgttcccgggccccggctaggaacagcagccgggcggaaggcgc

SEQ ID NO: 58131 - DNA, 122 bp, Homo sapiens
ggtaatatcccctccttggcctccaagagagctgagattacatgcatgagccaccacgcccggtcatatttcatttttaaatggcataccttagagaagcagaaaagagaccgggcaccatg

SEQ ID NO: 58132 - DNA, 122 bp, Homo sapiens
cgccctccggaggctttgcttcgggtttgtctaatacaacacagggggaaatcatttgatcgtggacgtttcacgtttctttgtcttcaaaaatgaagaggacattttgtaaaattatcaca

SEQ ID NO: 58133 - DNA, 122 bp, Homo sapiens
ccggggcgtccacctgtaggactgcagacccgggcacccacctgtaggactgcaggatgtcgatgatgccaatgtgcagcagcagccgctccccgcggccgttcacagcggggatcccgccc

SEQ ID NO: 58134 - DNA, 122 bp, Homo sapiens
acgacccttgaaaattgaccggaatcccggacagcgccgaggtagcgcggggaacgggagcgtgatctgctgccctctcctggcaatgtgaagcattgtcctaagcacagacacttccctct

SEQ ID NO: 58135 - DNA, 122 bp, Homo sapiens
gaaaggctggctccggaattcccagcctccgggaaagctagctgctcgggaaacgccaatcgaattagctcagagaagagtggccgtggccttgtgtatccagtgtctgtgcctcaggcttc

SEQ ID NO: 58136 - DNA, 122 bp, Homo sapiens
ggaggggagaggtcccagcgctgctgtctggcagaccttggtttcggtgggcaccagaagcgaggcagattgcttgctgctgcaacttcacgcgtgagctccaggctcccctggttggaagg

SEQ ID NO: 58137 - DNA, 122 bp, Homo sapiens
aggtgtaaaagaacatgttgcgtgacaagaggaggggggatttctggttacatcaactctcggtgaaaacactcatagttcaaactgaagttggctgaaatccttaagatacagcacaccac

SEQ ID NO: 58138 - DNA, 122 bp, Homo sapiens
tagtaatgggggagggctgttaaggcaaagactgtgttgttcacggctatctcaccggggcgcggcacattgcctgatacaagcaagtgctcaatgatactggatgatgaataaactctgca

SEQ ID NO: 58139 - DNA, 122 bp, Homo sapiens
gactactcttacactgctagaagaaatgtgaattgctacagtcttcttggacagcaatctcgcaattccttttaaaattagaaatacacataccctttgacctagcaatccgactccaagga

SEQ ID NO: 58140 - DNA, 122 bp, Homo sapiens
tcaacctcaccgtggcctcaagagcacgtggggaccagccccgtggtggcctggagagcacgtggggaccagccccgcggtggtctggagagtacgtggaaatcaacctcaccgtggcctca

SEQ ID NO: 58141 - DNA, 122 bp, Homo sapiens
gacaaatgcagatggactggcctagctcctctgctgggtggtctcaacttctgccccggccgtcgctcccctgctcctccttggtggctctgagacacacagacatgctctcccatccaacc

SEQ ID NO: 58142 - DNA, 122 bp, Homo sapiens
gtttgaggggctccgctgctgagctagggctggggctacaaagaagattatgacaaagcccgctcctacaaagtgtgcaccggcctgccgggccagcgaagaagcagagtagcatcagcaca

SEQ ID NO: 58143 - DNA, 122 bp, Homo sapiens
caaaacccatgtatccccacaaagccagctctgcacagttttggtgaaaggccaggcaggcggctacagggtccaggaaacctgacccaagcatccctctcccagcactcctgtgcgaggtc

SEQ ID NO: 58144 - DNA, 122 bp, Homo sapiens
cggggcctcctccctggccgcgggtccgggctgggggacaggcagtggttcttgttggagcgctcccaacccgtccttcactgagacccgggtggtggtggaggaggtctttttccttccat

SEQ ID NO: 58145 - DNA, 122 bp, Homo sapiens
gtgagacacagccaagagccatgagcggcgcctcctcgcctgccaatcctggcacctgtgcgccgagccactgcaccgaggaggaccctactccgggtgaacaccgggcttgaagccacgga

SEQ ID NO: 58146 - DNA, 122 bp, Homo sapiens
tccccggggctggctgcaaagctcacagctgcccctcacacctgaactccacggcctctgcgggatcctcgccgcccttttgggacagaactcagccctacctctgagtcacctagcgaccc

SEQ ID NO: 58147 - DNA, 122 bp, Homo sapiens
ggtgagaggtatccacactgctgcgcccttaaatctctttcctgggctaagctgggagtgcgccccaagtctgaagctccggcttcagttgcgaattccccatcctaagattgaagggtggg

SEQ ID NO: 58148 - DNA, 122 bp, Homo sapiens
tgaggcggggccggggcggggcctgcagggtgcgcccgcaggggccgagggcggggaattcggggagccgcggggctaccggactaccgaacgaggggcgggaggagaggcggagccgcagc

SEQ ID NO: 58149 - DNA, 122 bp, Homo sapiens
gtgaaaccctatgaatgtaagcaatgtgggaaagccttcagatgtgcctcgcaccttcaacggcatggaagggttcacacttgggagaaactctatgaatgtaagcagtatgggaaagcctt

SEQ ID NO: 58150 - DNA, 122 bp, Homo sapiens
aatcattcgatttttcaaaataggttattaacaacaaaaccagagtcacaatcccgaactcgcctggtggctttaatggcattagaagtgtaaccccagcaaagccgcaggcacgtttctaa

SEQ ID NO: 58151 - DNA, 122 bp, Homo sapiens
ggcagccaagaagtggcagcagagaggcctgccttccacaaggcacagcagcagggaccacgagtgacctgggaacactggccccagcctccctgcctccctctgtctgccccggcctccgc

SEQ ID NO: 58152 - DNA, 122 bp, Homo sapiens
cgcgcgttagtcagctccataaatcaccgctgcccattggctgcgcggcgggctttggagcggccctgggctgtcagcgaaatacaaaatgtagaccccagaggctagcaatagtagcctct

SEQ ID NO: 58153 - DNA, 122 bp, Homo sapiens
gcagccgtctctgtgagtcccgtggacgtggacagcagccatctctgtgagtcccgtgcacgtggacagcagccgcctctgtgagtctcatctgcgagtcctgtggatgtggacagcagccg

SEQ ID NO: 58154 - DNA, 122 bp, Homo sapiens
agtgtctcaaaccagcctgccaactataccctgttgccttggtgacagaaggcaagcagacgtggagaaatctggttgccggagcaacaggatcctttaaaaaaaaaaaaatgtgccttaag

SEQ ID NO: 58155 - DNA, 122 bp, Homo sapiens
acctgcctggaaatccgagcggctcctctagcctcggctgctgccgagctcgctcctccccgtccgctcgcctggctcagctctgcacgccccccagctagctcccgctctagtcacctctt

SEQ ID NO: 58156 - DNA, 122 bp, Homo sapiens
ctgcgagtccatccgagggagcctgccggcaaagcgtctgacatgtggtggcagcaaattcgtccccggggtggtttcctcgcctggcccccgagtccccacgggctggcgggtggaatccc

SEQ ID NO: 58157 - DNA, 122 bp, Homo sapiens
gtatggaagaaatgcccaagacggcaggcagcagctgtggcggccggcgggacgacaatccgaggagaggcctctgatgtcctgaggtctcagaggacgcctaaaggccttgaatgggacaa

SEQ ID NO: 58158 - DNA, 122 bp, Homo sapiens
gcaagaaatgccatcagcaaagagacggtgtgacgcccggctccctccccgtcactgatacggcctaggatctcaccagggaccaaggcaagcacactggtctgcggttcccacaatctacc

SEQ ID NO: 58159 - DNA, 122 bp, Homo sapiens
tactctgcagttccttattctgatcttccaacccagtgaggggaagaggatgtgatcatgcgaccgccagcagaagggaaattgtgaaagcgacctgctgtagaaaaggcggcccacagcca

SEQ ID NO: 58160 - DNA, 122 bp, Homo sapiens
ctctagagagtgggttgggctgcagtgggcgctggccgcggtgctgaagcgcctccaacccgcgcgccccagtttaccctctcccccgctgctatatagctagcccacctcaaaagttttga

SEQ ID NO: 58161 - DNA, 122 bp, Homo sapiens
gtcccaggctcctcgcggccgccgggctcggagcctaaagttggggggcgggcggggaggcgcttcccggacgcgcgacccccaggttccggaacacccgccgcccacacggcaccgcctgg

SEQ ID NO: 58162 - DNA, 122 bp, Homo sapiens
aactttcagtttttcaacacaaaccaatagctggtaaagataaatgacccagaaaaggatcgggtctgataatttgctgtggaaaactcatgcactaacaatacagaattagaataaagtta

SEQ ID NO: 58163 - DNA, 122 bp, Homo sapiens
gaggagcgcctcttcccggccgccatcccatctaggaggtgaggagcgtctctgcccggccgcccatcgtctgagatgtggggatgaggagatcctctgcctggcaaccgccccgtctgaga

SEQ ID NO: 58164 - DNA, 122 bp, Homo sapiens
tccatcttctttgatgctcaccacctccctgtgaggaaagtactcttactaccccagcttcgcagatgacacttggaaaacgtaaggacccacagttaggtggccagactgagagcagagtg

SEQ ID NO: 58165 - DNA, 122 bp, Homo sapiens
gtctgtgacggcagcagcacctcctgcaggtgtggggagagccctctctctgttctcacgcgtcgggctgcggcagaggtgcctgtgtcaccgaggtccctcggtaacttcagggcagaggc

SEQ ID NO: 58166 - DNA, 122 bp, Homo sapiens
ttaagggaggtatgtgtattggggcagaagctggggaagtggaaaggggacagtgggaggcgaacctggactccagttggcctaagctaccaacaggccactgggttaaagaagagggagtg

SEQ ID NO: 58167 - DNA, 122 bp, Homo sapiens
cttggcgctggagccctggaggtgggcggtgagggccgcgggccagggaaagctcgggtccgcaagagcagggctctgtttctgcgcctgcaggccgcccgggagtcctggatgcgcctcct

SEQ ID NO: 58168 - DNA, 122 bp, Homo sapiens
cccgccgccaggggccgctgcggcgccggggacgcgcgaggcctgagggtctcccaggcgcgcccaagacccatccgcgccggccgcctgccctgctgcgtctgcccactgcccctggggcg

SEQ ID NO: 58169 - DNA, 122 bp, Homo sapiens
cagggagtgagcggaggccaggatctcaggaaggcccggggtggagatgagccttggggtcgcttgaacacccaccgcgctccacgttgcatggggcgccgtgggccacacagacggtcaac

SEQ ID NO: 58170 - DNA, 122 bp, Homo sapiens
gggggtgctgcaagctgcaattagggaccttcactaggacccctgatagatatgataatacggcacctctgaccaattagaaagggcaactcttccttaagaataaattcagttggtatatt

SEQ ID NO: 58171 - DNA, 122 bp, Homo sapiens
ggcctcggcgtccctgtcttgagcgatcccgttaggccaaacacgagtgggtagggggaacgagacagagacacaggttctggagtccagccacaggtagtccctggtggctccggccgccc

SEQ ID NO: 58172 - DNA, 122 bp, Homo sapiens
gaggaagaaacatttttttgaggacataccatgcggcaggcctgtgctgggcagtatacacgcattataggcaattgtagacagggcttcccttgtgtcaggcactgttctaagcacttcac

SEQ ID NO: 58173 - DNA, 122 bp, Homo sapiens
caggcgtctacacggacacatcccggagttgtcctgggctgccagcacagcccagcacctcgagggtttcacagatctcttcatgaatatttctcactacacactggatgtcattattctat

SEQ ID NO: 58174 - DNA, 122 bp, Homo sapiens
tcacctcctacctccgccggacttcatctcccctctccgcccactcccacctcacgtactcggcccccagtcgcctctacaccccgaacctctccggtgtttcggtctcccccggcaaaatc

SEQ ID NO: 58175 - DNA, 122 bp, Homo sapiens
ctggagctgcggggaaggctcccggctcactgacacgaggggagcttcaccgtggctcttcgcaggatcaggaactggcatttcagcctggcgcagcctggaacatgggaagccaccgtggt

SEQ ID NO: 58176 - DNA, 122 bp, Homo sapiens
ctccggcgctgtgccgtgggcggggttcagggatggctgtggtcgttgtcctctgtactccgcatagtgcgagaggacttggcatttatgagcgcttctttaattttttattgttagagaaa

SEQ ID NO: 58177 - DNA, 122 bp, Homo sapiens
ttacctgtataaccagtgtatatgtacccctgaacctaacataaaagttagaaaaaccctcgaaaataataagatattaagtatattcaacctatagtgctactgaacaccagcacctattc

SEQ ID NO: 58178 - DNA, 122 bp, Homo sapiens
tgcctgggcggggccggaatcctgacaggcggagttagagcggggggcggggtcagcgcgcgcgggtggggctctggccatgggcatggggcggggccgtcagcgggggcgtggtcggggtg

SEQ ID NO: 58179 - DNA, 122 bp, Homo sapiens
ccctgccgctgcccaagcctccagcaggggccaccgagggctccaggagcaccccaggcccgttcttctggcccacagcgcccctcctgtgaccctcagcgaccctcctgtcctgccctccg

SEQ ID NO: 58180 - DNA, 122 bp, Homo sapiens
acctcggttccgctgcgtgtggtgtagacttgcggcctagaggtcagggtgcatgctggacggttcgttcaagaaggcctggggacactgtttgtttccggcccatggacttgaaactcatc

SEQ ID NO: 58181 - DNA, 122 bp, Homo sapiens
cagtgttcagcgatcagctctaaacatcacctgccccactaataatacaaactgagagcacgctgcagtgctcaccaatcagctctaagcatcacctgccccactaataatacaaactgaga

SEQ ID NO: 58182 - DNA, 122 bp, Homo sapiens
aaggggtgacagatggcacctggaagatcgggtcactcccacccgaataccgctcttttccgatgggcttaaaacacggcgcaccaggatattgtgtcccgcatctggctcggagggtccta

SEQ ID NO: 58183 - DNA, 122 bp, Homo sapiens
tgagccgcattctgcctgtcttcaggccgcacagggcctggctttctgtaggacaggacccgagggaggtgaggccatgtctaggtcacgtcctggaatacatctgtccctgtccttctcac

SEQ ID NO: 58184 - DNA, 122 bp, Homo sapiens
ggatcgatgtttcaatattggaagcgctttgatttacagcagctgcaggtcaggctcctccgcgctcggcctcgcgcccgggggtgggggctgcgggcggtcgcggcctccgccgggggccc

SEQ ID NO: 58185 - DNA, 122 bp, Homo sapiens
cacgctcgggtgccaccctgcttttgtctggagagcaactccacttaatagctgttaacccggtgacccgcctccggctgacgtctgggtcggccgggctcggcgcgcaccgctccctctgg

SEQ ID NO: 58186 - DNA, 122 bp, Homo sapiens
ctttatgtgcctcacttggaaggggaaaaaaagaacaaaaaaagaaagaaaatcctactgcgggttggcaactctaaaaggattttaatggatttatgaaacccccagatttccttacagcc

SEQ ID NO: 58187 - DNA, 122 bp, Homo sapiens
gaaaccaagggaggtgaaggttctggggaagtcaggtgggacaggacagaaacgtgcctgcggggtgagcagcacaggtgctggtgtcacctttgggaatcttttccagggaagtggtcacc

SEQ ID NO: 58188 - DNA, 122 bp, Homo sapiens
acgggtgtaggtctggattttcctggactaaagggctccaagggagctgcagctgcactgcgtggggtgtgcatgtgtgctgggcggtggcacagaggcacacacaggctgggaagtgggtc

SEQ ID NO: 58189 - DNA, 122 bp, Homo sapiens
actgacctggtggctccacctggagccactgcccgagcctgcgaggtcaccaacagcctccgcaagatttccacacgtgtggctctccactgctcagggggcaggatgtgaagggccaagac

SEQ ID NO: 58190 - DNA, 122 bp, Homo sapiens
ccagagagaaggggcaggcctgctggcggtcagtgatgcatgatggaaggaaccgggaggcgcgccctggaagcagcactctctccaaagcactcactaatgaccgaggacagccccgagtc

SEQ ID NO: 58191 - DNA, 122 bp, Homo sapiens
gcagtaaaaatacaaaaatttagatgggcgtcgtggtgggcgcctgtagtcttagctactcgggaggctgaggcaggagaatcacttgaactcgggaggtggaggttgcagtgagctgagat

SEQ ID NO: 58192 - DNA, 122 bp, Homo sapiens
ccgagggcccagacaggcccctctcgccacctagaagagaagaagggtctgcaaacactccgttcctggggaagcccctggacacatgtgggggccacagccaccctcgtccctggagccag

SEQ ID NO: 58193 - DNA, 122 bp, Homo sapiens
gcagcctggcagtcagtccatgccccggtgcagcttcaggtgcctggagaggttgctgagcgtgatgaagcccttgccgcagatgtggcaagggaagggccgctcggtgccgtgcagcagcc

SEQ ID NO: 58194 - DNA, 122 bp, Homo sapiens
gggagcagcgagggccccgccccctcccgtcctctccccagggcccgcgcaggatgcccccggcccctggcagccccccgggaggtcctgagctcgacgcgccccctctacgccatgtcccc

SEQ ID NO: 58195 - DNA, 122 bp, Homo sapiens
agaatcctccacaagctcccagagtttggactttccaggacagccttgcatcttccctgccgatcgggcagccttggaacctggcacaattttattaaagatatgtccagttttagtggcca

SEQ ID NO: 58196 - DNA, 122 bp, Homo sapiens
atgattctttccataacctgtagtggggcgggcggggtttggggggacaaaccaaaaacacgtctccttggtgaattaaaattctcatcattgctcacactttctctgtcagtcttgctctc

SEQ ID NO: 58197 - DNA, 122 bp, Homo sapiens
acacaatgaaatttgaaaacaaaccaacaatagcaacaacagaaactccaaacagatgggcgaaccagtagtctcctccaaggcggaggctcactttttactgcagaattcggagctgttta

SEQ ID NO: 58198 - DNA, 122 bp, Homo sapiens
cggctctggaaacggggatacaggagcctggcggcgccgaagcacccgcgcaggccaagacggctccccaggccaagacggctccccaggccgcacacagccatgagccaggctgcttgacg

SEQ ID NO: 58199 - DNA, 122 bp, Homo sapiens
tcttcacttcagtgaggtcctcctcggtgagggacggtgcggtgggctccatggtggaggcgggagatggcgcttcttccgggtccgggagctcgggctgcgccgccccgccctggctgggg

SEQ ID NO: 58200 - DNA, 122 bp, Homo sapiens
ccgtaggccatttcccacgaccagctgctgacaaccatatcatcaaactgctcttgttctcgcaccccttaaatgtccagccataatttctcagggaaaaaaatttatacattttcaacaaa

SEQ ID NO: 58201 - DNA, 122 bp, Homo sapiens
ttttatacttgtctggaaaggggtaaattagcagaagcctggctaggagtgaccccactacggagttaaggtcttactttgcactgggggcttggacaagccacattcgtcttgtctttcct

SEQ ID NO: 58202 - DNA, 122 bp, Homo sapiens
ctccagagccgaggaggcggcagcctggcctgtcacacggcatgggggcaacatcccgggcgcttacctggtgaccgtagctggtcttggtagtccggtgtgtacgggtccactgtctgcat

SEQ ID NO: 58203 - DNA, 122 bp, Homo sapiens
ccgccccgcaccccagatcatgtttagtgactcatctttcagcccatctgtcaccgtgcccggccaaaggggtcagatcattcctgcctgtcgctccctgccccacagctggacctagaagg

SEQ ID NO: 58204 - DNA, 122 bp, Homo sapiens
gccaggcggattcccgtggaccagagcagccgcgtgggagagcagagatcatgaagctgccgcgccccctgcaggccgtgggctagaagtgcatccgcctctgcactgggagtttttcttct

SEQ ID NO: 58205 - DNA, 122 bp, Homo sapiens
agagcttggcgcaagtgcgcgtcccgtccgagtgcttgaggtcggcggaggcggggcaggcgccctgggcgcaaggcacggaggcaagggccagggccagcagcagcgggcgcagcggggac

SEQ ID NO: 58206 - DNA, 122 bp, Homo sapiens
ttctcctaattccctccccgctctcctaggcagagtgaagcaggtgagagcggtttgcgtcgctggcgcctttcatttcccaggctgcaggcgagaagaggatgcggactgaatgaaggtcc

SEQ ID NO: 58207 - DNA, 122 bp, Homo sapiens
cttcacagtttacaaaacacccctcctcctcaccccctcccaaactcggtttatttttgtcgttaaagcagagttgtaggccagggtggaccataggttttcttggtcacgagagacttcct

SEQ ID NO: 58208 - DNA, 122 bp, Homo sapiens
ttcctatctcaaggctctataataaatgcttcaaatttcctaaaaataatttctggagagcgctataagggttgcttgcaggctaaccaagatgaaaactaccacatttctagtctccaaat

SEQ ID NO: 58209 - DNA, 122 bp, Homo sapiens
cacctgaggccagcacagcttccctgagctactgctccacagagggggtccctgggtagccggtttggagcaggggcatttttgcttctggggtcagccccaagtgttcttcaggctccacc

SEQ ID NO: 58210 - DNA, 122 bp, Homo sapiens
atgcattcagccggaattgtagcctgccaagaccctgtgggtccttgggggtgtgctgggcgtctttcagttgttgttgctttgttttttaaaaggaaaaacatacaaggccgccaaacccc

SEQ ID NO: 58211 - DNA, 122 bp, Homo sapiens
caaaaaagacaacattgtaatattttccaatgactgtttatcatgaattacgtcagccttcgtttaaattgctattatttctccttaatgcttcttggtgcctgcataatttacggcactgg

SEQ ID NO: 58212 - DNA, 122 bp, Homo sapiens
tcctcctcctcctcctcatgtctgcctcgggctgtttggtgctgaagagcgtttcttctccgtctcgtgcaccgcatcctgacgaaattgtctggtcaccagaaccgagtagcccgtagcgt

SEQ ID NO: 58213 - DNA, 122 bp, Homo sapiens
tttcatggcaggggaaactgaggtccagagaagagaagaaactcccctcaaggttgcacacggtcagacagtggctgccacaaggtgcaataaatcaacgtcagggctctggactttggttc

SEQ ID NO: 58214 - DNA, 122 bp, Homo sapiens
agcttgagcaggacaagctgggagcctgagggcccacacaccatcttggctactgggacccgctgtaggcttggctctccatgctgtgggttctggaacagggtgcccaaccatacctcata

SEQ ID NO: 58215 - DNA, 122 bp, Homo sapiens
ctttcacagaaccgcaagggcttgatgctcccccaacagaacggcttgagctttccccagcgcaattcagaaatgctgtggcggtcgccagactcttcgggtagctcccggcagctccgagg

SEQ ID NO: 58216 - DNA, 122 bp, Homo sapiens
cggtgctgaaccggtcgcgcgcggggcgctgtcagcgctatgggcgggggcaggggcgggcggactcacttgcggaagcagtgcgcagccgtcaggacccactgctccgcgatgaggctgcc

SEQ ID NO: 58217 - DNA, 122 bp, Homo sapiens
tagtgtgctgaaggtgccagcatagtgactaggccctttgttccatccccagccccacagcgattagggcagtaccattgcagctgcaatggcagagggattgtgggttttctctgggagtt

SEQ ID NO: 58218 - DNA, 122 bp, Homo sapiens
ccctgtccatcgggctgtgtcgctgacataaaatccagatagaaaagctaagaactctaccggtattctaccccggaataccccgcctccgctgccaggagggagagctcccagatatccag

SEQ ID NO: 58219 - DNA, 122 bp, Homo sapiens
gggccgggagagcagaacagggaggctagagcgcagcgggaaccggcccggagccggagccggagccccacaggcacctactaaaccgcccagccgatcggcccccacagagtggcccgcgg

SEQ ID NO: 58220 - DNA, 122 bp, Homo sapiens
gccgtggagtcccgcaactgctcactgatggatctcctgagctgcgtttggcaaggtttccgtttgctggtcattttagatccgtcctcataacgaccggcgggctctccaccgccactccc

SEQ ID NO: 58221 - DNA, 122 bp, Homo sapiens
taagagagagaaggtcaggcccttgtgagccagaagggatttgagagatgatgaaagctacgtatgttacccataacctaaggacttctggcaaggtggcctacctgagctggagtcatgcc

SEQ ID NO: 58222 - DNA, 122 bp, Homo sapiens
acatgcagctggagacagctgcacccagctccgcctcctgctttaggctagcacgggatccggtattcagctggtgctcaatccatactgattggcctgcatcccggagcaggggcgggcag

SEQ ID NO: 58223 - DNA, 122 bp, Homo sapiens
caatcacgactctgcaaatcttcagtttgtgccagatcttggtgttatactggtatttcacgcttctcttctaagcctctgaaattctccagcccatgatttgtggtgatatggatagctaa

SEQ ID NO: 58224 - DNA, 122 bp, Homo sapiens
agaacattcttggtagagcacttccacattcataactattccattcctcttgtgggctcacgcgcatcctcgttcaatgctgcgttgttaggttagtacttccttaggaacaggtaggacag

SEQ ID NO: 58225 - DNA, 122 bp, Homo sapiens
gaatcaaaggctgcaggctgggtgtggtggcacatgcctacaatcccagtactttgaggccgagatgggtggatcacttgaggccaggagttcaagaccagcctagccaacacagtgaaaac

SEQ ID NO: 58226 - DNA, 122 bp, Homo sapiens
gtttgcctgtcatataaagaaggttttcccaaagtggtttagccagaactggaagggccccgccctgtgaagggataggagcctgactgttgcagctgcagtgagtggcggggaagcagcag

SEQ ID NO: 58227 - DNA, 122 bp, Homo sapiens
tccagccgaggcctgcagtgtggggcccccctcagtcttgtggacctggccgggagtgagcgacttgaccccggcttagccctcggccccggggagcgggaacgccttcgggaaacacaggc

SEQ ID NO: 58228 - DNA, 122 bp, Homo sapiens
gctggccagggcctgcacgtagcccgacaccgccgatgccagggcgcccgtggcctcatccgccacttccaggaaacctgccagggagggagaaaggtgaggcctagctccatggagacagg

SEQ ID NO: 58229 - DNA, 122 bp, Homo sapiens
ctgtgtgacgagtctgtcctgtgattcccaccgctcactcatcgtggctggcctcggtgacggctccatccgcgtctacgacagaaggatggcactcagcgaatggtaccttgaccctgtcc

SEQ ID NO: 58230 - DNA, 122 bp, Homo sapiens
ggcttgttcttgaattcctggcttcagatgatattcttgccttggcctcccaaagcactgcgattacaggcatgagctaccacgcctggcctggaatttcttcttcatggaacttttagctt

SEQ ID NO: 58231 - DNA, 122 bp, Homo sapiens
agaaatagggatggaagagaacactaagtctaatgcattacaattcagttaaattttcaacgtaagtcagactgcccacaagaatatcatttggccgggcgccgtggctcatgcctgtaatc

SEQ ID NO: 58232 - DNA, 122 bp, Homo sapiens
ctccctttgtctctctgtctctgagtctccgggtggtctctcaggcagggggccccagtccgccaccgttggaagaagtcttcgaagactccctgagccccgggcagagctggcgggcgtgc

SEQ ID NO: 58233 - DNA, 122 bp, Homo sapiens
ccgcgggcgaaccccatccagggagggcttgggctgtgatgtgtgagcctgcactgccgccgcgcggccacttttgagtccacacttacaaccgattctgtgccatccgggtggtgagacag

SEQ ID NO: 58234 - DNA, 122 bp, Homo sapiens
ggtgcgggggacgacgcaaaggttaactgcgagctgccgggcactcagcgcgggtcatggcgtggatactggactgccttttcgcctcggcctttgagccccgcccccgccgtggtgagtgg

SEQ ID NO: 58235 - DNA, 122 bp, Homo sapiens
ctcgcaggccgagggggagtgtgcgtgggggcaggggggcgcagcgaactcccccacgctcggagttcagcccagcgcccgaagtaaacttccttaccgctggcagcaaggccgggcggcgg

SEQ ID NO: 58236 - DNA, 122 bp, Homo sapiens
ggatgcagacgcaccagcggctgctcacactccctccacaaacctgccggagtctccactcgcccgccaactgtagcctccatctgcgccccacgcccccgcacaagccccctccgtcgcgg

SEQ ID NO: 58237 - DNA, 122 bp, Homo sapiens
cgggcctcactgccgccaccatgtcctccttctctgagtcggcgctggagaagaagctctcggagctgagcaactctcagcagagcgtgcagaccctgtccctttggctcatccaccaccgc

SEQ ID NO: 58238 - DNA, 122 bp, Homo sapiens
ttaggtcatgattctaccatcagtctgcacatttccagaaagagcataagtttgtgccatcgaaacctaaggcctctggtttcacaatactttccatactcaaggtatcttttgtaaggtaa

SEQ ID NO: 58239 - DNA, 122 bp, Homo sapiens
gttttctgaccgtgttctctctggcagcgctggaggagctgacctttgacccgagctctgcgcacccgagcctggtggtgtcttcctctggccgccgcgtggagtgctcggagcagaaggcg

SEQ ID NO: 58240 - DNA, 122 bp, Homo sapiens
cacaggagagaagagcagtcacaatatattagcttgatggcataactcgaaccggagaagcgaggggagcctgagtgactggggcgcacatgacccccctcctggggcctttgggctcaacc

SEQ ID NO: 58241 - DNA, 122 bp, Homo sapiens
acgccgcccacgcttggtcggcaacacagagattccatttcttcctgggattaggaagcacgaagtgtccagatctgcttctgaaatctcttcctcccttaaggtaaggtgctgtgtggagc

SEQ ID NO: 58242 - DNA, 122 bp, Homo sapiens
cgccgagtggcttttgcaaggcgggggcctgtttgcagagagccgggcatttgcatgaagcgactcgaccccacagagcagcggcagcagcagcggaccccggcggcggcggcggcgcgcgg

SEQ ID NO: 58243 - DNA, 122 bp, Homo sapiens
ctccatctcaaaaacaaaacaaaacaaaacaaaaaccagcagttcaagcacaacaaccaacggcgcggacagagggcctcagtgtcagagagaccctgggaaggggtgaggaccacggcagc

SEQ ID NO: 58244 - DNA, 122 bp, Homo sapiens
gccgcccagtccagcctggactgcgggcggggtggcaaggctgagtgcgggcgaggcgctcgcttcgcgatggcgccgcctcctccactgcgcccccgcctccctgagtgcctggcaggcac

SEQ ID NO: 58245 - DNA, 122 bp, Homo sapiens
tccctcatgaggtaaagacctaagaggctttgcaattacagctatgctggtctcccttgccgcctgccatcccccaagatcccggccactgatctctaaagtgctatcactttcctcaacag

SEQ ID NO: 58246 - DNA, 122 bp, Homo sapiens
cccagaaagcacgtgacagctccagcaggtctccaacaggtggtgttctgctggtgaggtcggcgatccgggtgtagctggggttgcaggcttggcaggcacggcggcggtatcgggaggca

SEQ ID NO: 58247 - DNA, 122 bp, Homo sapiens
ttgtgagctggggaagggtgggcctggaaaggctctgtgcaaattgtagctgggagcctccgggcaaaagctgagggaaagggagaggcggctggcctaaaatttaggtgggcggaagaacc

SEQ ID NO: 58248 - DNA, 122 bp, Homo sapiens
aaccatcactggggccgtatttctaacaaccgcccgtccctccctccggatgctcaggtacggaggtacaagactgtggattcctttgctacatgctatgattctattcagctaacctcaga

SEQ ID NO: 58249 - DNA, 122 bp, Homo sapiens
gctgggcagcagcacgaggacatccctgtgttccgaggccatcgcgtccattcccagggtcggctcctgctgactgcatgcaggcctctcaggactgggttccatacatcgcgcccctgaag

SEQ ID NO: 58250 - DNA, 122 bp, Homo sapiens
gtccctggatcctatgcagcgggcatttcctgcaaggagctgctgcatgcctgtttccctcgccgcctgccccaacccgaatccaaggctttggtttctaatgttccctccctgtgcagtta

SEQ ID NO: 58251 - DNA, 122 bp, Homo sapiens
gaagatgccccggccggagctgcccctgccggagggctgggaggaggcgcgcgacttcgacggcaaggtctactacatagaccacacgaaccgcaccaccagctggatcgacccgcgggaca

SEQ ID NO: 58252 - DNA, 122 bp, Homo sapiens
acggctgtctcaggctgcagggaggagggtgacaagggggagggggcagaggagcagccacggctgctagctctccaaactaggacttgctcagcagaggccgccagcccggagctggatcc

SEQ ID NO: 58253 - DNA, 122 bp, Homo sapiens
tttactgtgctgctgagtgtgaggtcatctccggagcgttttcagcagcccctggctctgcggcgtctcttccgggctgtgggcatgcagggaagtggctctgaggcagtctgcgctgtggc

SEQ ID NO: 58254 - DNA, 122 bp, Homo sapiens
tgttccctgtggaaacgtggattctgtggacccgttttccatggtctgtggtaacatcagcgttcgcagaactgttttcctgacgcgctcacagcagcttgttgggcgggatgaggccaaca

SEQ ID NO: 58255 - DNA, 122 bp, Homo sapiens
cccggtccccttgggtcaggttcttggggtaagctctccattcaagaatctgatgtgggccgggcgcggtggctcacgcctgtaatcccagcactttgggaggccgaggcgggcggatcacg

SEQ ID NO: 58256 - DNA, 122 bp, Homo sapiens
ctcggcggcagacgcctccgtcccggggagcaggtcctcggcggcagacgtccacaagcacgggaagtacccgcagcacctcgggatggctgcaccgcagtcctgcatgtctgggcctcggt

SEQ ID NO: 58257 - DNA, 122 bp, Homo sapiens
acattttcccacctggaaaaactgggcttaagtatctccgacaaacaaaaagcaatactgcgttcttcccaatatgccatgtcacctttgtagcactcacacacttgcagggaagggactcg

SEQ ID NO: 58258 - DNA, 122 bp, Homo sapiens
ctgaaataagacacaggggcagggagagctggtggattggactgcagttgtcctagcacccgatccatcctaggaaggagccttttgaagacagaagtggaaaggagagaatagtggacaag

SEQ ID NO: 58259 - DNA, 122 bp, Homo sapiens
gccccaagggttcatgggtagcgtatttacaaaggagcctcctccgccagcccgtgccaccgctgctaatgagagcagtcattaagtaaatgagacgtcgcctttagctggcttaggagttc

SEQ ID NO: 58260 - DNA, 122 bp, Homo sapiens
gggcgacagggcagaaacgggaaagtgacacggtccaaacgtcactttttcaagtgattccgcaatcctttgatatgggatttaagaaagctcaagaaggaaaagggcttccgcagcatcta

SEQ ID NO: 58261 - DNA, 122 bp, Homo sapiens
agaacaccacccaatctcgccctcactctgacactcaccggccagaccttttcttccgtccgttttctgcctctggcccagggcccagctcacgtagcgttttcgggggctgtttgggaacc

SEQ ID NO: 58262 - DNA, 122 bp, Homo sapiens
tcgtgagctgggtttccaatggctcagtcgaccgtgtgcacaaacttgcgctttatccgccggggatcgctgggagcggagataaattcaatccccagggcaatcttggccccgcccgcccc

SEQ ID NO: 58263 - DNA, 122 bp, Homo sapiens
aaaatatttgtgttgatttcttccaatagactccaagctccatgggctttcatgtaggaccgtgtttgtcttattcatcatgagcctggcacagagcagatggtctgaacatatttagggga

SEQ ID NO: 58264 - DNA, 122 bp, Homo sapiens
gatccaatggtggttcctgcgggggccggaggacctggatcccggggccgagggggccggcgcgcaggtagcggagcccgccgaccccgcgtctccccttcgctcgcccggtcctcagggtg

SEQ ID NO: 58265 - DNA, 122 bp, Homo sapiens
atctccgtctgctggagaattgaaggtgttagcaggttcaccgggcagcaacgctcagaccgatgtgcaggccaccgccgcatgctgcacgtgcctcctaatagaaccttgagctcccgcag

SEQ ID NO: 58266 - DNA, 122 bp, Homo sapiens
gcaggcagggcccgggaggttatcggccagggcgtgggacccggaggactcaggtgccttcgctcccttgccattgttgtctccttccactagggggtgaccgcagggtctccactgaacac

SEQ ID NO: 58267 - DNA, 122 bp, Homo sapiens
acctgccctgggccaagggcctcggccccgcgaaactgcgagtcctccagaaagacacatcgctgttggggtgtccaacctttctgggattcgtagtttatacccaggtcctggttatattt

SEQ ID NO: 58268 - DNA, 122 bp, Homo sapiens
tagcccgacgcgggtgcaactggaggcgcgacgggccaggcccaggagcagcgggaggagcgcacctggggcgcgcgggcggaggagggccggggagggacgccggaaggactgggtaggga

SEQ ID NO: 58269 - DNA, 122 bp, Homo sapiens
taattacagtagagacagtaaaacagtacagatgaaaaatactaacaggtgaggcccccgcgatgcgggcagtcatatcacccccctctggatatgatgattcacgtcgcaggggggcgggc

SEQ ID NO: 58270 - DNA, 122 bp, Homo sapiens
ggggcacgcggttctccctgatcccggagctgggctcagggctcggactcagtcctgcagcgcctctaggctgcggatccgcgcttcaaccacctgctttgcgctgcgtccggggaagtggg

SEQ ID NO: 58271 - DNA, 122 bp, Homo sapiens
aaaagcaactgtgtttttcctacccaggtcgggttactaacattcctcaagggatggtgacggaccaatttggaatgattggcctgttaacatttatcagggcagcagagacagacccagga

SEQ ID NO: 58272 - DNA, 122 bp, Homo sapiens
ttggcagggtactgacacttggaggtgctgggagggtggtgcccagatgggccatggaagcgccaagcctcttcctcccaaaagctcaccctatgcatcttttaaatccagctattcatcta

SEQ ID NO: 58273 - DNA, 122 bp, Homo sapiens
ccctgcgcctccctggctaaagagcgccctgtggggaggaagcagggccccaggcggaaccgggaaaacacaccggggctttaaacagaccgggccactcccatcgaatttggaaagcggtt

SEQ ID NO: 58274 - DNA, 122 bp, Homo sapiens
ctcctggagtgggtgctcctgggatgcttcaggtttagacaccggggttacggcagctgccgaggaaggctaaagccagcgtcctggattcagacagaccttttagccattaaatccactaa

SEQ ID NO: 58275 - DNA, 122 bp, Homo sapiens
tactgcaccggaccacctgaattccctgggctgaggctccatagcacgcgaactaccttgcgtgagcactatgtagattcgacttcgtgttgcctgtgacacacaggcagggcaaagccgcc

SEQ ID NO: 58276 - DNA, 122 bp, Homo sapiens
tttacagttttaacaaaaaggctctctcacatctgttaaattatttgacactaaaaacaacgaggtaaatgcacaggaagcaagactgagggttaagtgatttcctcactgtcacacggcaa

SEQ ID NO: 58277 - DNA, 122 bp, Homo sapiens
ctcacagtacacgaaggctagggccttcaggagcacgatccgggtcagccagaaggtgcccgtgtggagatgggccggagagcctgcggggccacgccccggcgcgggcggcgactcaggct

SEQ ID NO: 58278 - DNA, 122 bp, Homo sapiens
taaaaagttgtgttcagaaaactactcctgtactcttaagaacttttgcagttaaaattgcggtgaatatttccaaggacaaacaaaatgctgagggaatgaggtactgcaactttaaatac

SEQ ID NO: 58279 - DNA, 122 bp, Homo sapiens
cagtactttaaggttggggacaggtggctgggggtgtcactcacggaagcagaggaagagcgtgtccacacacatgccgaaaacgctgaagaagccgctggcgatgacataggcccccagga

SEQ ID NO: 58280 - DNA, 122 bp, Homo sapiens
ttcagaagtaacatgtccaaaataaaatttgattcctcccaggttgttccctgcctggtccgctaccccacagtaaggaacaccttattatgcaatggcgtgatctcatctgttccctccag

SEQ ID NO: 58281 - DNA, 122 bp, Homo sapiens
tgtcccttggtgatctcaaggaagcccctggtatctagtatgaagggagtctgtcctacccgatcacctgtctaccctgacccactgaccgctgttagctactagacaagcacttgtacttg

SEQ ID NO: 58282 - DNA, 122 bp, Homo sapiens
gctggctttgcagtccagccctgccccagggcgggcagatcagcggggtgggcgaggtcacgagggaaggcttttccacccgagaccccaggccctgcaggtcactgcaaagtcgtggggcg

SEQ ID NO: 58283 - DNA, 122 bp, Homo sapiens
acagcgagggctgccgcggagaccttcatggtacctgtgggagaggctgtgcgaggtccacgtgctgtcttgatcctctgcaggaatcctctgcagctcaggctggccctttatagggccag

SEQ ID NO: 58284 - DNA, 122 bp, Homo sapiens
cccgcgccgcggaggaggcgagcttggtgatgagctgccccagcggtagggggcctggggcggagaagccgctacagccgcggccgggcgacgctgacatctggcatccctggggtctcaga

SEQ ID NO: 58285 - DNA, 122 bp, Homo sapiens
agaatgcggggagcggcgcgaggagctaaagaatgggccggcccaggcgggtaggaggtccgctttaggggagcagacaaaggagccactactccctaagcctcacgcctgggcgcaagggt

SEQ ID NO: 58286 - DNA, 122 bp, Homo sapiens
gctgggcagcagcggggacgccgggggccggggccagggctttccgggcttaggtgaggccgccgtgggccccatcttccggcggtcgccggagtttgtggtgattgttgctgccgccgcca

SEQ ID NO: 58287 - DNA, 122 bp, Homo sapiens
tgatcctcaaatggctcagggcctgagggaatctttgctgagggttggccccagcagagccgctgcagaggtagaggtggccagcaagggacacagactgcctgcatgaaggctggagctgg

SEQ ID NO: 58288 - DNA, 122 bp, Homo sapiens
agctctggctgtgaatgcactttattttggacccagaagatcctggggctcctcaggcctcgacagagggaaaaccgaagcacaggcgactccgcggcggggttgtaatggcggcgcctcct

SEQ ID NO: 58289 - DNA, 122 bp, Homo sapiens
actgagcctggccccatctggctgctggcttcccagctcctcatctggttttctctcccacgtggcctgaagaccacttgcttgggtgacccagaaaatattcctgtgacctgtgcctttcc

SEQ ID NO: 58290 - DNA, 122 bp, Homo sapiens
tcccagtggcgaaaggtcctcagggaaaacaggtgaacgctatcaaagtatgcttatctccgaacctttcttaaaccagagtcttaagggatcgtctctgattaggtctagaattcctctcc

SEQ ID NO: 58291 - DNA, 122 bp, Homo sapiens
tgagttcctagaactcctgatagccacgcacacagatgccaggccacgggccacgccacgcgcacagatgccaggccacgggccacgccacacacacagatgccaggccacgggccacgcca

SEQ ID NO: 58292 - DNA, 122 bp, Homo sapiens
gtgtgtgtgggacgatttctcgtgttgttctcattgggcggtacctggccgcatgtgggacgatttctcgggtggttactgtgccccgtttatctctaggtctccatgctgctgtgatactg

SEQ ID NO: 58293 - DNA, 122 bp, Homo sapiens
gcgccccgaggcggcttccgggtgcgtggctgcgctcgccgaggcccgggaagttgccgtcgtcaaacccaaaggctgaccgcctctgggagctgctggcaaacgtgggggtgcgcggccgc

SEQ ID NO: 58294 - DNA, 122 bp, Homo sapiens
aaaaaattagctgggtgcagcggcatgcacctgtagtcccagctacttgggaggctgaggcgagaggctcacttgagccccagaaattcaaggctgcagtgagctgtgatcgtaccactgta

SEQ ID NO: 58295 - DNA, 122 bp, Homo sapiens
aaggtctactgtaatgaagcttgatcctgggtctgctggagtatgaggccagactagtaccgagtccacagagcctcgcctggaactgggaaaatccagaacttgtgtctgtgggggctggc

SEQ ID NO: 58296 - DNA, 122 bp, Homo sapiens
tggagaagatgggaatctgctggatgacagtgtttccttttaacattactttgtattggccgggcgtggtggctcacgcctgtaatcccagcactttgggaggccgaggcaggtggatcacg

SEQ ID NO: 58297 - DNA, 122 bp, Homo sapiens
gattggaagactcgttacatcctgtttttatgttgcaataaaacgtcttgtggccgggcgcggtggctcacgcctgtaatcccagcactttggaaggccgaggcgggcggatcacctgagat

SEQ ID NO: 58298 - DNA, 122 bp, Homo sapiens
gcagggtccgggaaggcagagtccgggatgggtccgggatgggtccgggaaggcagagtccgggaaggcagggtccgggaaggctgagtccgggaaggcagggtccaggaaggcagggtccg

SEQ ID NO: 58299 - DNA, 122 bp, Homo sapiens
gctgtcttaccacatctgttcaagccatattgtcctctcactctttgtcctatgtcctcacgttctttacatcttgatgggggacagctgtagtgtgtttagagatatattctaggatcagc

SEQ ID NO: 58300 - DNA, 122 bp, Homo sapiens
tcctccaaatacaaacataaactcagtcaggtttctcatcagcgcagaagttaaagaacacgtgactctggtagacaaaacaagaagatatacagactcattggaaatgtctagattttgaa

SEQ ID NO: 58301 - DNA, 122 bp, Homo sapiens
ctcaatcaagcctctcattagttatttggtctgtcaatccatttcattcctgcagtcttccgccccgccctcttgagctcgcccctgataggctggcgcgtccgtcacttcaaaaaggtccg

SEQ ID NO: 58302 - DNA, 122 bp, Homo sapiens
actggagaggtgccaggtgtggaccatcctgggacaccagcctggtcactttcctaggaccgctcaatgccttctcctgtcagtgtcgcaccccactgggttcatccttccactttcacact

SEQ ID NO: 58303 - DNA, 122 bp, Homo sapiens
gctatctacattgcttccacatctttgaaatgaggtatatgcctgctttatttgggaatgcgaggattaaggagaataatatatacataatgttgaacacctacgccttttaaccactttga

SEQ ID NO: 58304 - DNA, 122 bp, Homo sapiens
atgccctcaccagcctctttcagacctgcctttacatgcaccagcagacgggggggctggcgaggacgggccaccaagcctgagccaggctaccacctccgggctgtgtgactctggacagg

SEQ ID NO: 58305 - DNA, 122 bp, Homo sapiens
cgtggccaggtgcgtccagcatctcattctctgctctggatcttgcagagaccccaactgcgctgcctggctcttccatccatggtgccgggcccggcctgggaggggctgcacaggccgag

SEQ ID NO: 58306 - DNA, 122 bp, Homo sapiens
ttggcgcccacctgtattcccagctactcaggaggctgaggcaggagaatcgctagaacccgagaagcagaggttgcagtgagccagatcaagccacagcactccagcttggcgacagagca

SEQ ID NO: 58307 - DNA, 122 bp, Homo sapiens
attatacttagttttgaaaataaatagaccagagatatatgcacaagaagtgtgtgtgcacgctgcagctgtttcaggtgaaggaaggctgggttctgggtctttgcactgagagcagtcag

SEQ ID NO: 58308 - DNA, 122 bp, Homo sapiens
caagcttttcaactgcttattaatattacatcaaaatagcagcaatgcacattttttccacgttttcaaaaacataaaatacatccactttatttacttttgaaattacaagagagtcacag

SEQ ID NO: 58309 - DNA, 122 bp, Homo sapiens
agtgggtgcatgcaacgtgcgcgagctgaagcacggcaaggcattgcctcacttgggaagcgcaaggggtcagggagttccctttcccagtcaaagacaggggtgatggactcacctggaaa

SEQ ID NO: 58310 - DNA, 122 bp, Homo sapiens
ctagaccaccccgttccttcctgactcaataagagcatctcagcttttatataaatcttccgggtaagatttcatttgaacaaaagaatctgcccttagaaagggtttgcaagtaactggat

SEQ ID NO: 58311 - DNA, 122 bp, Homo sapiens
ctttcctggagaggaggccgcgggagtcatcgcggggcagatcctggaggccagcaaggccgcccctcctcctaagtggcactgattgacaggggagaaagacagaggcttgttccccagaa

SEQ ID NO: 58312 - DNA, 122 bp, Homo sapiens
gtctagaactatccgcccatctcttcaaagcttacctggggtcctgtttcctgacttcaacgcctgtaacagctgagatctctcttccccagccaggacctggtgagtccctggttggcttt

SEQ ID NO: 58313 - DNA, 122 bp, Homo sapiens
ccagtctctctctgggcctggggcttcgagccaagccttgttcccttccccttcttgccccgaccaggaccaaaggctcatcttggagcggttgcaggtcatgtacactgtcggctactccc

SEQ ID NO: 58314 - DNA, 122 bp, Homo sapiens
tattttttgactatccactggcacgaggcccaaaattggatcagtctgagccaggagtaacgtacttaacttttctgagcctcagtgaggcatcatcccctctgagtctcagtgttttctgc

SEQ ID NO: 58315 - DNA, 122 bp, Homo sapiens
agcagcctcggcagtgcgcggggctgcagaatcaggtgcacaactagggcatcccccacccgcaacacacacggcacacaggagcctcggcagtgtgcggggctgcagaatcaggtgcacaa

SEQ ID NO: 58316 - DNA, 122 bp, Homo sapiens
gagcttgtatcaggaggctagggaaagagggatctgcaaagagaggaggcagaatggatccgattcttggctaatcaggaaaagggctaatttcttcaaccgagaggtatacaatccaaagg

SEQ ID NO: 58317 - DNA, 122 bp, Homo sapiens
tagcagcatcgaaaacttggagtcggaggccgtgttcgaggccaagttcaagcgcagccgcgagtcgcccctgtcgctggggctgcggctgctgagccgttcgcgctcggaggagcgcggcc

SEQ ID NO: 58318 - DNA, 122 bp, Homo sapiens
tctcctgacgcgaaaggcaggggcgcgccccggctcccagcgccctgtttttggaaaatacgattttgtagggtgttcctaaactgcagtcttctgtgttttgcatacacgtcttagatcag

SEQ ID NO: 58319 - DNA, 122 bp, Homo sapiens
gcctgaaagggtacgcctaggggtcttgggagggaaaagacccccggccaatacaaaggacgggatggagcgtccgacccggagcttcctagccctccgcccccaccccgacccgcaccccc

SEQ ID NO: 58320 - DNA, 122 bp, Homo sapiens
aggaagaccgacccggggctgcgggggcccctttccagaatccggccccgcccgcctggccgctgccctcgcggatctcccccggcctcgccggcctccgcctgtcctcccaccaccctctc

SEQ ID NO: 58321 - DNA, 122 bp, Homo sapiens
gcagcggaggaggggcgggagccagggggcgggggcgcgcggccggccgggctctggcggcggcatctgttcgtggtgctgaaaccccgagcgctgagctcagcgcaactaagtcacaatgg

SEQ ID NO: 58322 - DNA, 122 bp, Homo sapiens
ttggatcctcccaaagttggtacaagtgtggtctctggcccaggtgggctgtgggtactgcggggcgtccagctgtgcatgcctctggtgtgaactgggaagggtggcctctggtcagactc

SEQ ID NO: 58323 - DNA, 122 bp, Homo sapiens
tgcgcgcgcatcccaggccagcccctgcctctcgggcacctgcgctggaggccggcccgccggctgcctgccatacccgctgccgctgctctgcatccccaattccggcgggcacgggtgca

SEQ ID NO: 58324 - DNA, 122 bp, Homo sapiens
tcggcatggcctacgtggctgtccaggtgagcagtgcccaggctcaggtggggcaggggccgcccgccgggaggagctgggctgggcgtctccaagtgcatcctggcccctggctcagccta

SEQ ID NO: 58325 - DNA, 122 bp, Homo sapiens
cccggcttcggggcgcaaccgggctctgggggagaccgcgtttgtccaggtggcaggccgcgccttctgatggctgtgaagagaaggagcgggggttttaagagccacagcgccaccgagag

SEQ ID NO: 58326 - DNA, 122 bp, Homo sapiens
aaagactggtcgtacattctctctcaagtatctttcacctgcaagccccatcaccactgccgcccagggtctttgctacctgaccaccaggggtgattaaaccatttcatcacctggcccta

SEQ ID NO: 58327 - DNA, 122 bp, Homo sapiens
tccgcccccgcctgctgcttctctccggttcctagcctccttctcaagtgtaccttgccccgaaacaacctgttttctgtgcaaataaagcagcactgttgttattgttattattattttta

SEQ ID NO: 58328 - DNA, 122 bp, Homo sapiens
ttagacattgctacatctgttattttgccaggaattcccccaagtacaacttttgctagacggtctttcctgaaaccatctgaaatcatgagtcagtatgtgccagctgtatttaagaccaa

SEQ ID NO: 58329 - DNA, 122 bp, Homo sapiens
tgagccggcctcaggatgcagggaagcgcggacatacctcgaacccctttggaccgcgtgcgatgccgcttctcctcggtgtccacctccatctggggatagattagcagccatcaatgtgc

SEQ ID NO: 58330 - DNA, 122 bp, Homo sapiens
ccaagtgctccccacctgttgacaaaactgaattgcctgcccaggggcaaagccttttgccgaacactgcagaggtcatggctgacgctctcctgtgagcagctgtgagcggggagaacaga

SEQ ID NO: 58331 - DNA, 122 bp, Homo sapiens
tgaggcaccagagtcctctgagagctggaagccagagcagctgggtgagggcagtgtccccgatggtccagggaaccaaagcatagagctttccagaccagctgaggaagcagcagtcatca

SEQ ID NO: 58332 - DNA, 122 bp, Homo sapiens
ggaaaacagagggtgcttgtagggtgggagggatcaggaagtctgcctgggtcacaccagcgtgacacgagggtaaggacaaaactcaaagtgtggcagtggaaatggaaaggaaaagagaa

SEQ ID NO: 58333 - DNA, 122 bp, Homo sapiens
cgcaatcctggccctcggtgtcaaccagctgacagggccgaacgaccgctgggcctctggcgccccctgcaggacgcagacagggtgacaagcgctggctcgaacctggacagcccatggga

SEQ ID NO: 58334 - DNA, 122 bp, Homo sapiens
gggctggggtgaccctgcggaacggcgcaggggacgcgtgggggcctaccttggtctgttcgctcagcttctcacttctcaggtcgctcagcaggtcgcgacccaaatcctccccctcggga

SEQ ID NO: 58335 - DNA, 122 bp, Homo sapiens
acccagaagagtttgccacggccgcacggttttctgggaagtgtagtttcttggtcccggcgccattgtccttaaaagtagagggtggcccttggttccgaggtgtatctttcacctcatca

SEQ ID NO: 58336 - DNA, 122 bp, Homo sapiens
tataagtagcgagctgggcgcattccttctcagttgtgttaaaacttgctggtattcccccggtatcagcagaggtgtgtacgggcactgctttaaaactgggaaggaggaagacgaggcca

SEQ ID NO: 58337 - DNA, 122 bp, Homo sapiens
gagaaaaggagtcaaggccttcaaggagtggacaaccccttttcctcctccccctcaacacgctcacggcaagtccctgggacaggcaggaaggatgccacatggacccctcaaacaaccct

SEQ ID NO: 58338 - DNA, 122 bp, Homo sapiens
agcgagagccttgggctgctgcagcccagggaggccactaccaaggccatcagagggacccgggatccaggggagcctggagcatggtccatggggatccaccttcaagagagcgacttcgg

SEQ ID NO: 58339 - DNA, 122 bp, Homo sapiens
gctttctatgctatgttttcctcagatttatagttatttcattttacttcaaaccagctccgtctcacaattcttgcacatttatgaatttattggcatttaattaaatgccatgtcaacat

SEQ ID NO: 58340 - DNA, 122 bp, Homo sapiens
gggatgggttcccgggggtctcctgctgtccggccccaactcctgttcccagtgcgcccccggagccctgtctctctaaatgaggctgacgtggcttggcctgaaggccctgccccgttact

SEQ ID NO: 58341 - DNA, 122 bp, Homo sapiens
tcctccctctttccctttctctttcctttctttccttccacaaatctttacacaccaccacggcaggccccaccctgctggactgcccgatccattgactgtaggaggccggcaggcagagg

SEQ ID NO: 58342 - DNA, 122 bp, Homo sapiens
tctagtgacagcatgtatatgggacctgtgaaatgtttaatgaatgaatgaatttataaacgaatggctgaacagatgaataacactgtatgtgaatgaaaaactacgtactttacatattt

SEQ ID NO: 58343 - DNA, 122 bp, Homo sapiens
cctcgggaatctgtctgcacctgtctaggtgggatgctgtcatccctcattcagctagtgcgttagcctcataaagggtttacctggatccagacctaacctcttcagtctgtccgttgctc

SEQ ID NO: 58344 - DNA, 122 bp, Homo sapiens
ctgatggagaaagggctcccgcagaaggaacggcctgtaccgtgcgctccggcacaatcgcgtctcttgtgtctcactcacggaaagaaacaacctgaaggccatcccgtcggtctgcacgt

SEQ ID NO: 58345 - DNA, 122 bp, Homo sapiens
agggcccaacgacccggcgagcaacttcacggaaggcactggccgacaacgctccgctgccgccgcgccccgcccctttgtgacaccacctaccaatcgctggacggcgctttcgctgccct

SEQ ID NO: 58346 - DNA, 122 bp, Homo sapiens
gaataaatcccaacaaggccaggattcccatggcaggagatacccaaggtctggtaaagtcgttctgctaaggaaatatttccttttgctgagcaactcttcagtggtagttgaagtccagt

SEQ ID NO: 58347 - DNA, 122 bp, Homo sapiens
ggccggcgggcgggcaggaggcggcggcccgggcctcgggatggagttgcagcgcccaggcgtcagaggcggaggcccgaggccgctatacagattgcggggctggcgggcgcggcccggcg

SEQ ID NO: 58348 - DNA, 122 bp, Homo sapiens
ggcaccagccccagggatgtcaaccttgctcctccattaaacagcctgtggtcttaacatcgtggagcctcagtctcctcatctctaaagtggaaataataatgataatgcccgactcacta

SEQ ID NO: 58349 - DNA, 122 bp, Homo sapiens
ctgtggcggcgcgccgggacgcgcgggcgagggtctaccgagagggcgggcgggcgccggcggaaccctcggctacagccccgagcccctggggccgcccctccccgccgcgtggcgcagtc

SEQ ID NO: 58350 - DNA, 122 bp, Homo sapiens
gcggcccgggcctcgggatggagttgcagcgcccaggcgtcagaggcggaggcccgaggccgctatacagattgcggggctggcgggcgcggcccggcgctctgcatagcggccggcagggt

SEQ ID NO: 58351 - DNA, 122 bp, Homo sapiens
gcgtcctccaggcgtggtggtggggtcgtgggtcccagcccagtggtccaggtcacgggccgcacggccgcggccgccatcttgcccgcgtccgggctcctgcggcgggcggggcggtgtcc

SEQ ID NO: 58352 - DNA, 122 bp, Homo sapiens
gccctggctccaggacagggccgaaggcaggatagacggagcaacgggtccggctgccgccgggatgttgcagcacagggcctcctggctgcctggcctacaggccgcccggattcagccgg

SEQ ID NO: 58353 - DNA, 122 bp, Homo sapiens
aggccccggactcacgtggtgttcgtccctcaccggctgccctgggtccaggcccttcctcgggcacgttcagctcctgatcgcaaccaggggtcgacagctccttgggcccctctttctct

SEQ ID NO: 58354 - DNA, 122 bp, Homo sapiens
tgagcgaggaggctgaagagtcgctccataaactgaggcagaaggagcagccgacagcaacgcctaccgcacccggaaggctcaaggaggcgccctgggcagggaacttccggttgcgggga

SEQ ID NO: 58355 - DNA, 122 bp, Homo sapiens
gggactgcgcggccaggagactggcggctgagaagcgcggacggactgaggggggcgccccgggaggaagctctggagcggccgctcctctcaattaccgagccaacattcagcctctccct

SEQ ID NO: 58356 - DNA, 122 bp, Homo sapiens
aggctgaggcaggagaatctcttgaacctgggaggcggaggttgcagggagctgagattgcgccattgcactgcagtctgggcaacaagaaattaggctgggcgtgatggctcacacctgta

SEQ ID NO: 58357 - DNA, 122 bp, Homo sapiens
aggcggtgagagaggcgggggcctcgggagggtgaaaggagggaggagaagggcggggcacggaggcccgagcgagggacaagactccgactccagctctgacttttttcgcggctctcggt

SEQ ID NO: 58358 - DNA, 122 bp, Homo sapiens
ccaagcgctgcttctctttcagttctttcgaaatgaattcgctgcgaatgtgggaagatgcgctgaaatgccttttgtggctctggcttcgctcaggtatccatccaacctctaagtggaat

SEQ ID NO: 58359 - DNA, 122 bp, Homo sapiens
ggagcacagtgtctgctttctttgcaagcacagtgctgacaaggaacagaatacccacagcgactgcttccaggaaacggctgcagggcgggcgggagcctctgcgagagcagccccttccc

SEQ ID NO: 58360 - DNA, 122 bp, Homo sapiens
gcccaaggcagacccagcaccttcatgccttccactgccgcttgcctcgcctgcctcgctcgcctcgcctcgtggctggcactccgccctctgtctgctgctccccaccttcttccctaccc

SEQ ID NO: 58361 - DNA, 122 bp, Homo sapiens
tccactctcagaaatatacgtctgtcacagttaacggcaaagcctagggcaagagttctacgcccaagatggccagccggaagcgggcttctcgcgaccatgtggcgaagccccattcgtca

SEQ ID NO: 58362 - DNA, 122 bp, Homo sapiens
cctgcctcagttattagtcacatctcgggagcactgattcccttcgggtctctgcatcctcggccagtgattctgatgacatgatctggtcagccaatcacctttcagaaatcctgatgatg

SEQ ID NO: 58363 - DNA, 122 bp, Homo sapiens
tgactcgaccagtatgctcctagcttgacaagattttggaaaatttcacagtaccttctccgctcggcgtcttgagggtctgtgcctggcaggctgatggtgatggaggatggggcacccac

SEQ ID NO: 58364 - DNA, 122 bp, Homo sapiens
ccctcgggggctcgcgctcgcccgtagcacctctcgtggcgctccagaatggcagcccagcgactggggtcctcacaccccacagcgcgtgggaagccgctacgttcacgcgcaggggcggg

SEQ ID NO: 58365 - DNA, 122 bp, Homo sapiens
tggacagacccatccaacccttagtggcgccttttcaccccgtcttaccggtataggcctcgggctgcccccaggactaggaccatgcgcttgccaagtgtgaggtctttttccctatccaa

SEQ ID NO: 58366 - DNA, 122 bp, Homo sapiens
agtgttaatgggcctccttcctgccgtgccctgcccgtgccagctcctcggtgctcatcccggctccctgaaatgctcgcttccactcagggccagcgcactccctccacgtccctggccgc

SEQ ID NO: 58367 - DNA, 122 bp, Homo sapiens
gctccaactcagccaagttctttggatgccatccgcgcggtgtcccataactttcctggccggtgggcacactgcctgcgtgagtgtttgttctctgcatcgaccattccctgctcaggcgt

SEQ ID NO: 58368 - DNA, 122 bp, Homo sapiens
aaatgacatcagaaccatctctcttaaaggtattgtgtggcttgtcctttaaaacaaagacgatatcagctggaatgttgttggaggtctggtctccttctttggggaaggtgatcttggtc

SEQ ID NO: 58369 - DNA, 122 bp, Homo sapiens
agcaattgttgaaggatagaatatttcactgtcaagaaggttgcagtaatttcacaaagacggccgtggcatagcctcctatgagatatccgtggtctgtgttttcactaaatggcatcttc

SEQ ID NO: 58370 - DNA, 122 bp, Homo sapiens
gagaactggaggtgggaatggtaaggaactcccagcagggtagtggagggaatgggctgacgcatctaaggctgatgccaggtctgctccctatctgggtggcctcagcaaatgacgtccag

SEQ ID NO: 58371 - DNA, 122 bp, Homo sapiens
tacgggacctgttgcttctctggggtggatctgcccacgacctcaggtccggggactggccggtgggcgtggtggcgggggtccgcgctcccacctctctccctttccctcttcccgccaga

SEQ ID NO: 58372 - DNA, 122 bp, Homo sapiens
tccagtctctatcaaatgcccctgaggtcccaggggctagaggctgctggggcccttgaacgggcatgccctggacgctgcgcctgtcatcctgtgtccccatgaggtgctgggagaggggc

SEQ ID NO: 58373 - DNA, 122 bp, Homo sapiens
gcaccaaaccttgtttcccagtgcctggctggtctcatgccctgagagacagagagaaagcgaaactgattcccattggtgacttgattcaggacattccccctggtcttcctttccattgg

SEQ ID NO: 58374 - DNA, 122 bp, Homo sapiens
agtctagtcttcataaacactcttgttaacccagcatccaggccttcactgagttgatgccgtggcctgaggcggtttacctggtggatagtgggtggcaggaagcatcagacatcagacag

SEQ ID NO: 58375 - DNA, 122 bp, Homo sapiens
tatcttaaaaagattttgcagtgcatggcctctgtgatgttggtgtttgaatgaacaagtcgtatgatttcttaggattgcaatcaagagagaacaggaagagctctactgggaaagcaaac

SEQ ID NO: 58376 - DNA, 122 bp, Homo sapiens
ccagcccccagcccccagggaggggcctggactgacgggcctgggcgtagctcctacccccgtgacattggccataaaactgacacccgtttgtgctgtgctttcacgtacatcgcacctgt

SEQ ID NO: 58377 - DNA, 122 bp, Homo sapiens
gacggcgaaggcggcagcggcggcgacagctctggggtttgcgtctcggggtgtgtcggccgccgctgctgcttgggcctggtatgtacagatggctggttaggattctcggcaccattttc

SEQ ID NO: 58378 - DNA, 122 bp, Homo sapiens
tgtaatgctagacgtaataagtagcagtaggctggagagtaggccatgtaaaggaagtcccggttggatggcacttaaggcctaagtgttttgaagcctaggggatctgactaagctgattg

SEQ ID NO: 58379 - DNA, 122 bp, Homo sapiens
cgggtggcttcgcccgcagggaaaggtgcgtgtccccatcggtccccagggcccacagtccgcagcccgcagcgtgtcccgaagaaggccctgccctttggtcccagccctgggtggccatg

SEQ ID NO: 58380 - DNA, 122 bp, Homo sapiens
tctacatcaccacggcccacttggctctttttgttttctaatttatagaggcaattgaaacgaagtcaggactaatttttttaaaaagatgatgagctggtcctacactggaaaggctggcc

SEQ ID NO: 58381 - DNA, 122 bp, Homo sapiens
gcaaaatgcctggaggtcatctctaggaggtaatattaatagcacacacgggccacacagcgatggcagagaaacttaaggtggtctctgcagggttgtgaggtccagcgcctcggtccccg

SEQ ID NO: 58382 - DNA, 122 bp, Homo sapiens
ctggaagccagtcaggaatccgggcaggagacactgtgacactttaggtgaggccaggcccggggcccacagcactcgggaggagctgagagagcctctggctctgacagtctctcccccaa

SEQ ID NO: 58383 - DNA, 122 bp, Homo sapiens
cactcgtcggggagtcgaacacgcatatctgtggaccaagccgattgacgtttcactgcacgtaccaaagggaatcgggttccctcatgcatttaggaaaaaagaaagaccacgtgggtgcc

SEQ ID NO: 58384 - DNA, 122 bp, Homo sapiens
gaccccgtggtgaggtgagtgcctctgcggatgccttggccacggtcacctcccttgttgcgttagaaatgcattctttgacggacaagggtttccacggcggctgctctggtagatttgga

SEQ ID NO: 58385 - DNA, 122 bp, Homo sapiens
agggctaggcgccctggctctgcaagggccccagtctggggtttggctcacctgtgcctccgaaaaccaccaccagtttcttgtccaccatgaggacgagaatgggacgaatccggtccaga

SEQ ID NO: 58386 - DNA, 122 bp, Homo sapiens
gacatgccatcttctccagtaaacacaacacaaaagtcaatacatgcccgccccccgagacggaccacggtaccacccaatgggaaaggggaagaaccgaatggcagttctgcagtccaata

SEQ ID NO: 58387 - DNA, 122 bp, Homo sapiens
ccaaagccaggataacttgatggcgggtccttgacttgcattaaggctccatcttgggaccgtttcagcttcaggtggggtgaggatttattcaggggctcatctgtgggaagagctaaagt

SEQ ID NO: 58388 - DNA, 122 bp, Homo sapiens
ccggtctgagcgtccctacccccagcccgggaggtgctctgaggaatcggagacgaggggcggggcgaggggcaggaccgcgtagccgtgcgcgcgccgtcccgccgcctcctgcccgcccg

SEQ ID NO: 58389 - DNA, 122 bp, Homo sapiens
ccctggagctggccatgctggacacagggcaccacgctctgtctcagccggggactggctcgggggaaaccaggttgggctgttcagacatgctcatgtgttactgaggctgctgagtgcag

SEQ ID NO: 58390 - DNA, 122 bp, Homo sapiens
tctgggctgggtcgacccggctcgcggggaggctgtttgccctgggccttcccatccccgcgccttcccatccccgcgcccacgccgcacccaggcgagcaacgtggagggtcggcgcgggg

SEQ ID NO: 58391 - DNA, 122 bp, Homo sapiens
cgctctctacctccctgcagcgccaagccggctccccaacctggtctgctgaacgcaaaccgctgagagtttgctgcaccgccccctggggcccctggctgccgagtcccgctaaggcaaag

SEQ ID NO: 58392 - DNA, 122 bp, Homo sapiens
gatccccgccccgccccaccccgccctgccctgccctgccctgccctcggcagcgggctccgccccctgctgcacgatcctggggcccgaggcttccgcctggcctcccggcgccaactggc

SEQ ID NO: 58393 - DNA, 122 bp, Homo sapiens
agatccagatgtgcatgcgctccagcccagggatgccactcagcaggaaggtagcagaaacgctgctgctgctgtttcccagggatcccagggtcattgtgtgaggagacaagggggaaggt

SEQ ID NO: 58394 - DNA, 122 bp, Homo sapiens
aagggggcaggggaaagtgccacacattttaaaaacaaccagatctcctgagaactatcacgagaaaggatggtgctaaaccgttcatgagaagccacccctgtgatccagttacctgccat

SEQ ID NO: 58395 - DNA, 122 bp, Homo sapiens
taggggtatcaaaaatgtacccgctggccacctaatattgttcccaggcagcctcgcgggcgcctaggggctgggtgctagaataacagtgacattcctggctccgacaaaagctgaggaca

SEQ ID NO: 58396 - DNA, 122 bp, Homo sapiens
ccgagcccttttattggcaggatgcacaaatggaacggctggagaggctgctgcaaggggcgccccgtccccactccccgctcccccgtttctttgcttcccggacgccgtcctttaccccg

SEQ ID NO: 58397 - DNA, 122 bp, Homo sapiens
gtggctcccgttggcgtgtgggcctgtctgggtgggtaagtaagtggctttggtgacgaacgggatgtcggcccttcccccgtgctatgtttagaaaggtgtcagccccaaagtggcccgtc

SEQ ID NO: 58398 - DNA, 122 bp, Homo sapiens
gcggggggaaccgtcggacatgcggctctggagttgggtgctgcacctggggctgctgagcgccgcgctgggctgcgggctggccgagcgtccccgccgggcccggagagacccgcgggccg

SEQ ID NO: 58399 - DNA, 122 bp, Homo sapiens
cccgctctacacgctcatcgacgtgctcaagtacagctacgtgcggcttgtgtgcaaggacgtgcgtgcgcccagccggcccgccgtggggtgcgtgaacctgagccgctgtcctgctgggg

SEQ ID NO: 58400 - DNA, 122 bp, Homo sapiens
ctggccagccatcatctgcctctcactagctgggcaagtgactttacctctcagtgccttcgtttgcccatccggaaaatccccatactacctcacttacgttcacacaaagaaatgtgctt

SEQ ID NO: 58401 - DNA, 122 bp, Homo sapiens
atttaatcttcatcataatctcttaaggacccatcttataaatggggaaactggggcagacgggtaccaagcaacttgtccttggtcacagatctactaagtgatagaaccagactttgaag

SEQ ID NO: 58402 - DNA, 122 bp, Homo sapiens
ggtgtgggccggagggccgcggtgtgccgcggggcagttgcgggttgtcataacggtccccgccggagtgaggcgaggccgcgtcgctcagttctggccgtctagggcccctgtaaggatga

SEQ ID NO: 58403 - DNA, 122 bp, Homo sapiens
agtgccagacagtgggcgcaggccagtgggtgcgcacactgtgggcgagccaaagcagggcgaggcattgcctcacctgagaagtgcaaggggtcagggagttccctttccgagtcaaagaa

SEQ ID NO: 58404 - DNA, 122 bp, Homo sapiens
tccttccttccttccttccttttatccacatttttttcagcaaacatttaagagtgctaacgatgtgtcagcttatgcttggctccaagagattcaaaaataaaaatgtcaaggtctcctaa

SEQ ID NO: 58405 - DNA, 122 bp, Homo sapiens
taaccccaccccaccctagccacacaaaaagtcgcgggatcacccacgcatgacctcgctcgtgcccacgaccacagacggaatctcgctgttgctcctgcacgctccccctcccctgtgac

SEQ ID NO: 58406 - DNA, 122 bp, Homo sapiens
tatagtcaataatactttaattgtacattaaaaattaacttaggtcagcgcgagggagcccgggtggccgccattactgagcctggcgctgcggctggcgctgggagagcggggagggacgg

SEQ ID NO: 58407 - DNA, 122 bp, Homo sapiens
gaggcgtcccatgtgggcagccgttgggacctgccaagcactgcgcctagtgatctccttcgggtttgagccagtccatggggaggagccgtccaccaggcagcctcagggagagtgggcgg

SEQ ID NO: 58408 - DNA, 122 bp, Homo sapiens
cgagccccagtaccagcccggggagaacctctaggcacaggcgggcccagaccggcttctcggcttggatcctgggctgggtggcccctgtctcggggcttgccccactctgcctgcctgct

SEQ ID NO: 58409 - DNA, 122 bp, Homo sapiens
ttgtgggaggaaagtttctagcctataccagcttgcatttattaataatcagaaaggttgcggatgacagacttgctgagcatttactaaatctggtacttgtggtttgcaaatcatgtgat

SEQ ID NO: 58410 - DNA, 122 bp, Homo sapiens
acgacttggactcacctcagcagatcagcatcagtaacgcggaggcccggcaagccctgccgcacagctactactggagcgcgccggctccctatctgggaaacaaagtaagtccacgcttg

SEQ ID NO: 58411 - DNA, 122 bp, Homo sapiens
agaaccgagcctgcgcaatcttggggcctgcagccttggcctcagacggggcccaggttccgagtcccgcagctgccctcggcctctcccacgcggtgttggagggcgtgctaggattgcct

SEQ ID NO: 58412 - DNA, 122 bp, Homo sapiens
ataaattatttctctgctacgttgaggtttcctctgggtgcccaggctgcggggcattctcgcctcggctgcctcacagggcacagctgaggaggcgctgggagtgggagcgccgtcagtcc

SEQ ID NO: 58413 - DNA, 122 bp, Homo sapiens
ccaaggccgcctcctgctagcaagaacagagtccaccctcctctggatattggggagggacggaagtgacagggtgtggtggtggagtggggagctggcttctgctggccaggatagcttaa

SEQ ID NO: 58414 - DNA, 122 bp, Homo sapiens
ttttccaaggatcctggctgagctcctgtggaagctgcttcttacactgatgtggtccctcggctggcaggcccttctgcggccaaccaggtgacacctgccagttatgagggacaggtagg

SEQ ID NO: 58415 - DNA, 122 bp, Homo sapiens
tccccagctatgtagaaatttgagtccattaaacctctttgttttgtaattgcccagtctcgggtatgtgtttatcagcagtgagaaaatggactaatacaggctgcatgcacttgtccctc

SEQ ID NO: 58416 - DNA, 122 bp, Homo sapiens
gaggtctgtgctctggccaaagtcactggttctctatttgcctccctgcatagtgttgggcgctgtgcggcgcggaggagacaggactggggacaggagagccggggtctggggagggaggg

SEQ ID NO: 58417 - DNA, 122 bp, Homo sapiens
ccagtgcggcgccaggagccggacccgcgcccgcaccgctcccgggaccgcgaccccggccgcccagagatgaccgcgaccgaagccctcctgcgcgtcctcttgctcctgctggctttcgg

SEQ ID NO: 58418 - DNA, 122 bp, Homo sapiens
caaacttctgacttcaagtgatccatccgcctccgcctcccaaatttctgggactacaggcgtgagccacctctcccggctcctccatcttcttctgtccctttagtcccgttttctccacc

SEQ ID NO: 58419 - DNA, 122 bp, Homo sapiens
ggtgatccacccgcctcagcctcccaaagtgctgagattacaggtgtgagccaccatgcccggccctctaatacgaaatttaagaacttccagttattatcagttgcgattctaaaatttcc

SEQ ID NO: 58420 - DNA, 122 bp, Homo sapiens
agggaggggcggactcttctgtctgcacagggcttggggaggcatctcctcctcggggctcgcagacagggcttctcgtgccaacgctgcacctcggggcgtgttctcccacccatctgtgc

SEQ ID NO: 58421 - DNA, 122 bp, Homo sapiens
tgttaagagaaaaaaccccacggttactcctgcagtcttgtttttctaaacgggagaatacggatggaggagggtttagaccgataaagcttgcaaaaacttattggactttgagcacatac

SEQ ID NO: 58422 - DNA, 122 bp, Homo sapiens
ctccaaaatgctcatgaaagccgtgtagggcttgctgatgaaagggtgcaggttgccagccgggaaaactggggctggagctatgctttggctcttctggaaccatagctcactgctgtatg

SEQ ID NO: 58423 - DNA, 122 bp, Homo sapiens
gtgctgtcgcaccatcacagccctctgaagccttgaactctaaggcttaaccaatcctttcgcctcagcctcctgagtagctgggaccacgggtgcatgccaccatgcccagttagttttta

SEQ ID NO: 58424 - DNA, 122 bp, Homo sapiens
tgttgtggggtccccagcactctaacccacagggagtacaactcctcaaggaaatgatagcgcagtacatcaaggaggcttctcctgagacaaagggaaccagtgcatgtgcttggcagaac

SEQ ID NO: 58425 - DNA, 122 bp, Homo sapiens
cccatcccaagaacccggggggctccgaggcttaccattggtccgcaggcccctccgtgccgggcacccacctccagctctggctgtgtcgagcgagaagtgagctcagtgctcgtctgcag

SEQ ID NO: 58426 - DNA, 122 bp, Homo sapiens
caacaaacgggaaggaagtgggtgacgaggacaggcagagacccctcccacggggccgcccgcatctcacctgccgtcgcggggcgggcgttgcggccggtgcccagctgcagatccgcagg

SEQ ID NO: 58427 - DNA, 122 bp, Homo sapiens
tacaggcatgagccaccgcgcccggccaaaggcaagcttatctttcagtcactcagccaacgtactgggggacagtttatcaaagttacctgagttcctgtggattctgtctggggagaatg

SEQ ID NO: 58428 - DNA, 122 bp, Homo sapiens
agctgataccaaagccctgagaaccccataaatggcgaatgaggggcccagttaaggagacggattttgctcttctcatataatattgactagtcttccattcgggaaacttggggctctct

SEQ ID NO: 58429 - DNA, 122 bp, Homo sapiens
gggcagaatcgcacggccgttgttgttggtgtgaccgttgttgcaccccagtcgacatgacgttagtttttcatttgccaaattgctggttagttgcaaagcctaccctcggccgcgagcac

SEQ ID NO: 58430 - DNA, 122 bp, Homo sapiens
cggccatgtcacggccaggccacggtgggctgatgcctgtgaatggtctgggcttcccaccgcagaacgtggcccgggtggtggtgtgggagtggctgaatgagcacagccgctggcggccc

SEQ ID NO: 58431 - DNA, 122 bp, Homo sapiens
ggcggctgtagcggcgccatcttgagccccaggcccctgcggcgccagggctgtccacggcgcgcctgaccaaaaaagccccgcggggcccgctattactcatttgcatattatttcctttc

SEQ ID NO: 58432 - DNA, 122 bp, Homo sapiens
aagcagcagagaaggaggtgaggacagttcagaatgaagatgagtgattcaggaaaacaccgacacagataatgcaacttaaatggaagtaaatgtaattgcgaccaatgcaataaacttaa

SEQ ID NO: 58433 - DNA, 122 bp, Homo sapiens
tgcttcagggatgctgggactgttccactccctttctccatcctttgggtgtctgcacatcgaaagccttgtcaggaggtctatctccctgcccaagtacaaaactcagggcttaccaagct

SEQ ID NO: 58434 - DNA, 122 bp, Homo sapiens
cacgcgagccaattggagggcggattagcgggggcccacgtctcccagaggtctccgagtcgcggctctgttggtctgattggcagccgcaacagcctatagctgcttttcgccggaggggc

SEQ ID NO: 58435 - DNA, 122 bp, Homo sapiens
tagcaggtggaaaaaaaacaggcgaggcatcctgggcctggtctctcctggaggtcgggacgttgcagcctttcaggactgcagctgctgtggcctacacacctgggcctgtgtgcctgtcc

SEQ ID NO: 58436 - DNA, 122 bp, Homo sapiens
ctgcaggcaaaacagaactgagagatatgagtatcactcatgatgaggacaaaagggctgcgtgctgggaaacatgaggcgaccaacacagagttggtcactatccactggcctgggtttgc

SEQ ID NO: 58437 - DNA, 122 bp, Homo sapiens
cctcacgtctgtagccaggcgggtggtgtggggcgtctgagcactcaggcctttctgtgacgagtggtgaccgaaggcgccgtggcgttcttctcgactgtttacactttaaggcgcagccc

SEQ ID NO: 58438 - DNA, 122 bp, Homo sapiens
ccgccgggcccagagtcccagagactacctcctccagccctaaacccaatgtccccttaccgtggaacaaggcaaggccggtctgtaaattcttcttgatgtctaatttaaatcccaacttg

SEQ ID NO: 58439 - DNA, 122 bp, Homo sapiens
aaaagaattagtgatctcaatgataggctatttaaaaatgcacagttaggccaggcctagcggctggcacctgtaatcgtggcacttcaaggcagaaggatcacttgagcctagtggtttga

SEQ ID NO: 58440 - DNA, 122 bp, Homo sapiens
cgcccagaaggcagacgctgcggagggagagactcctgggctagccaaacagcagggcctcgggcaggagcgtcacctgcgcatcctcattctgcgattactgtcaggggaccatccatcaa

SEQ ID NO: 58441 - DNA, 122 bp, Homo sapiens
cctttcgggacccggccagggtggtgtgacagccgccccgcgcccgcgcagcggcaagcgcgcccagaggcccaggccgaggcttactgagcccccatggccctccccctccaccccttaag

SEQ ID NO: 58442 - DNA, 122 bp, Homo sapiens
tcaacaacacctaattctaattacagctggtgatcggtgaggtgacggaaataaacggggcgctatggcgggaactaatagatggtctccttagggtgtatgaggtgtcccttgacccttct

SEQ ID NO: 58443 - DNA, 122 bp, Homo sapiens
gagttttttaaattatgatttacaaatgaatttgtcaaaattaaattaaacccccccacacgcacacacacctggaatcctttacagataggtggtatatgaatacaaggcacagattgtat

SEQ ID NO: 58444 - DNA, 122 bp, Homo sapiens
gccctgagggcggcggcgaccgtggtaattgcaactgctcaggggcagggcttgccccagcgccgagtagtggcaacggcgtggttgcgtcgggggtgcctgggagcctggagtcccggggg

SEQ ID NO: 58445 - DNA, 122 bp, Homo sapiens
cgcggctggccgtcgtagaaggccccataagcatagcccgggtgaatctgtgaacctgcccgcactcgcggttggccgtcgtagaagcgtggataagcatagcccgtgtgaatctgtgaacc

SEQ ID NO: 58446 - DNA, 122 bp, Homo sapiens
acttaccatcaccaaaacatggaagcacttacttctttagtttcaaagcaagtacatccacgtttaagtggtggggagcccagtcttggaaaaagttagaatcctttaacctgtaacaagct

SEQ ID NO: 58447 - DNA, 122 bp, Homo sapiens
cggagcgaggccagtgggttcctcggtttggcctgatcacactggaggaggccctgcttgcgtcagtcttggcgctagaacccgagggcctggagccgccaggggagacgcggagctcggcc

SEQ ID NO: 58448 - DNA, 122 bp, Homo sapiens
cggaaatggatgcatgcttctagagggagacttcagtcttttggtgagtcttgctttccacgtggacatgacttgcagtgaatcattgcaaagttcaaacggggcaaggaaattttccaggg

SEQ ID NO: 58449 - DNA, 122 bp, Homo sapiens
ccgccgcccgctgacgcgctgcattattcatgagacgcggctggccacgccccccgagtccgaccaaaccaacagtcgccgccacaccggcaggcagcgcactacattattcaggagacgcg

SEQ ID NO: 58450 - DNA, 122 bp, Homo sapiens
cagcatttgctcatcaaacagatggcataaagtcatttgataaaagtcaacatgcattcacgataaagacaacctcttaacttgcttaacaaactgaacaaactcatgaacgtacttcttaa

SEQ ID NO: 58451 - DNA, 122 bp, Homo sapiens
tcgcgtcggaacgtgactggatggtagtgtgctggccggtctgcctccgggagaaccgagcgcttccggtgcgtgtggtgagcggcgggccccgggctggaggggccgggactgggcagcgc

SEQ ID NO: 58452 - DNA, 122 bp, Homo sapiens
tcacagaggagtaactttctctcatcactcctcctctcacctagtatgctgcattgaacacgataaattctcaccaaatcaatatttactaaacatgtaactcaggtggcccctagattcct

SEQ ID NO: 58453 - DNA, 122 bp, Homo sapiens
atggcgcgtaggtcagcgaggggccgcgggtgcgagggtggtcctgtgagaggagcaggccgtgtttttgctgcagctttcccatgtttcattcacacacacaagtacttgtcactgtgctg

SEQ ID NO: 58454 - DNA, 122 bp, Homo sapiens
tattttgtgtttgtattggttggtttgtttttctcaaggtattccatagccattttttcccgcaaaagcaaaataaatcattaaaagtcttaaagcaagcacacttataattgtctaaggcc

SEQ ID NO: 58455 - DNA, 122 bp, Homo sapiens
cgagtccatgcccagaactcgactcacccgagcccgaacctctccagacaccactggcagcgacaaaacgccgcatccacgtccgaaaacgcttcctattcagacgcgctcctgcgcggact

SEQ ID NO: 58456 - DNA, 122 bp, Homo sapiens
ggtgtctttgccttcctgggtcatccctaggcaaggatttgatccccagtttggctcttgcgggagttgagagggaaacaaggatggttgtttcagtgcaggcggggctgcagaaactgaga

SEQ ID NO: 58457 - DNA, 122 bp, Homo sapiens
ggggctgcgtccttgaggacgggtctgcgcatgtgcttctcgcggggctggtggcccagccggggcggcctcggtgccgtcagctgctcggtgagatgtgaagggccggggctccgcgtggg

SEQ ID NO: 58458 - DNA, 122 bp, Homo sapiens
ggctgtgcgcgtggaaaccgtgatgacatcacactgacaagttaaaccctggagtcccagcggcactggctgtcggccgtcctgcacgtgcccctgggaagacgtggctgcaggcccaactc

SEQ ID NO: 58459 - DNA, 122 bp, Homo sapiens
gtaatttttaaattcattaatgtcaactttaatttagtttcacttcacacacagtatatacggccaggcctggtggttcacacctgtaatcccagcactttgggaggccaaggcgggtggat

SEQ ID NO: 58460 - DNA, 122 bp, Homo sapiens
cctccagggcagggctggggtttcctccccaggtcatttcatcccctgtaaggagggacacgcggccggcttctgcactgcccaggtgagcctctgtccctcacagtgcccttcggggcccc

SEQ ID NO: 58461 - DNA, 122 bp, Homo sapiens
atgcccctcacattctgactttcttatctctccagtaactgcctccccaactccaaactgcgtttgaccatccagctcactgtctcggaattccctttttcttggacaaacttccacatcct

SEQ ID NO: 58462 - DNA, 122 bp, Homo sapiens
cctcagccttgtgatggaggctttgccgctggtgacccatctcctctatcctctctggggcggctgtttctgttcctacatctcactcccttgtgtggttcccaagatccccacatcccttt

SEQ ID NO: 58463 - DNA, 122 bp, Homo sapiens
cgtcgcgcgtgcgcaattgggacacagccggctggggactgctgggagggccggaccctgcgagaacgggtgggcgtgtgcccggtgggcgcgggaggggcccgggctgcacgagcgcgcgt

SEQ ID NO: 58464 - DNA, 122 bp, Homo sapiens
cagggagactcaaggccccaggggatctgggcgtttgaagactcaggtcagactctgaggcgcccgtctaaagagaccggttgtcttttccctaattcaggaggccaggctgtcccttgggg

SEQ ID NO: 58465 - DNA, 122 bp, Homo sapiens
gaaagactgtgttctgtaggatttgaaaaagaatagaatttgtcattggcacatcccacccgtcatagccccacaggtttctttgtagccactggagggtcttaagtgattctggcagtagt

SEQ ID NO: 58466 - DNA, 122 bp, Homo sapiens
taagtactctgcgatgtttgcacaatggcaagtccacctgatgacacatttctcagaacccgtccacatccttaagcaacacgtgactgtattttgtagtgggattactctggcagtatatt

SEQ ID NO: 58467 - DNA, 122 bp, Homo sapiens
aattctcagaactggcaggtagtattgtcaagggacacattcttgtatagaaacccacaacgctgaatcgtcatatattcctagtctagaatctgagatatacacgaactccacaactaagt

SEQ ID NO: 58468 - DNA, 122 bp, Homo sapiens
gtgaccacaggcagctcatgctcccgagggcatgtaaggcctctcttttctgagaaagtccgtggaagcagaggacagtgtatgagtttccatggaaaacctcttgtcaaggattccagcta

SEQ ID NO: 58469 - DNA, 122 bp, Homo sapiens
agtgaagccaccccctctctaggtgttcctgaggctcttgccccagctgctgaggatgcacgttcgcccgctggccccggcagctgtgcaggacacccagtcccggctacagaatggctcct

SEQ ID NO: 58470 - DNA, 122 bp, Homo sapiens
gtatcccaaagacgccagcaaccctcgctcactgggccacggcaggacgttggtccagtccggctctggaatctgatgtttgatgcggaacaggtgactgagctgtcttgggtctggccggg

SEQ ID NO: 58471 - DNA, 122 bp, Homo sapiens
ggtcgcgctttgtgacgttggcgttacttgcagattttgcaaaggtccgggctccgctgtcgaggcctttgctgtcgaggtctcattttggctgcttcgggtcgccacgttgcctgatgtcc

SEQ ID NO: 58472 - DNA, 122 bp, Homo sapiens
ctctctccgcgagcaagacaggctgcgattcgccgagcgcggcgcaagtcaactgcgcttcgcgccgcagtcagcaaccaatcacaagcctccgaagaaacgccgcgccatatgcaaatatt

SEQ ID NO: 58473 - DNA, 122 bp, Homo sapiens
taactgatgaaattacggaggctgttaaacatcaccaaagactatttggaggtcccagaacgctccagaattgctagcttttcctggatgcccttcttggttgcaaaatgaaaatttcagag

SEQ ID NO: 58474 - DNA, 122 bp, Homo sapiens
gtaaatatacgccattttatataaggaacttggacatctgtaaattttggcatgcggcagcgggggtcctggaaccaatgccccatagatactgagagacacatatattcttcagcattaca

SEQ ID NO: 58475 - DNA, 122 bp, Homo sapiens
gaagtgctatttgtaacttagattgaatgttgaaacttgtgtttgtttttcaggcacttacggaacttaactggatgttctatgtgtctagtaatcagctgatagtagatattattctactc

SEQ ID NO: 58476 - DNA, 122 bp, Homo sapiens
cgtgaaaccaaaaccccagggatagcaagggacaattgtatcttcaaagtagacaaatggcgccgggcacggtggctcacgcctgtaatcccagcagtttccgaggctgaggcaggcggctc

SEQ ID NO: 58477 - DNA, 122 bp, Homo sapiens
gtctccctgctctgctgtctggcgcctcgtccaggaggaggcgctgtaggacaagcgtctcgccggctgcggcgggccggggagggcgggagcggagggatcggtacccgctcctcccttcc

SEQ ID NO: 58478 - DNA, 122 bp, Homo sapiens
caagtggagaacaggttggagcggtgcgccgggcttagcggcggttgctggaggaacgggcggagtcgcccagggtcctgccctgcgggggtcgagccgaggcaggcggtgacttccccact

SEQ ID NO: 58479 - DNA, 122 bp, Homo sapiens
gcagcccagtgagtttgggctggccagttccgagcaggagcagcggccgaacggtggacccgctggaggaagtggggctgcagatcggagacgcagccttttcattaaccaaacttcttgaa

SEQ ID NO: 58480 - DNA, 122 bp, Homo sapiens
cagctccctccaccgccgccgccccctcttcctcccccgccccctctccctgcccgcccccgtcacacggagccctggaggatcccccgctgctgcccgccctccctacgccacccccacga

SEQ ID NO: 58481 - DNA, 122 bp, Homo sapiens
attggctccagctgcaggggtgtgtctgtgtccgcggcgaacgggaagtgagcaggcgcgcgggctcggcgcgcgcaggcgcgactagggtgcagcgccaggtccggtgttggggtgtccga

SEQ ID NO: 58482 - DNA, 122 bp, Homo sapiens
caccattgcactccagcctgggcaacaagagtgaaactgtgtctcaaaaaaacaaacaaacgaacaaacaaaaaaagaaaatagggaaagagggtcagctgtagaactactatataagcaaa

SEQ ID NO: 58483 - DNA, 122 bp, Homo sapiens
cggaccggaccgtggccagggtggcgggctgaacggccttcttaaaactccttccgtggccgggaagcccgctggaccagagtagccgtggcctcgggagcgcgccggggccgcgggatggg

SEQ ID NO: 58484 - DNA, 122 bp, Homo sapiens
ctaagcctgctgctcctgggccacggtgagaaaccagctgtggtgactgggtgggttaggcgccttcccacagcctgctgctcaggtggtgcagggcagctacgggctggtagtgacgccct

SEQ ID NO: 58485 - DNA, 122 bp, Homo sapiens
ctggttctacaagctgctggcagtcatggcgttaagagcaggaagagaagcaccagaacccggaagagaaatccagtcctctgctaggccttgcaccgtccctctggcgccctctactgaca

SEQ ID NO: 58486 - DNA, 122 bp, Homo sapiens
ttcaaaccacagcagagagtgaggacctagcgtccttattggtttcattcagtgtgaatgcgcatctgtttccttgcagaaatgttaatgttggtttcctgggtgctgtcccaaaccttgct

SEQ ID NO: 58487 - DNA, 122 bp, Homo sapiens
aggaggccggggaacatcatggtaggcgcgggcgggcgaaataacccttctttcagtggccggagggtaaacgcctcgcttcccgcccctcccgcccccacagtgtcctctctcttgggctt

SEQ ID NO: 58488 - DNA, 122 bp, Homo sapiens
ccctgtacatgtgggagggaggctgcagtttgagctattgcagttacagttttcaggggtcgtttagcagggatgatggtaacagtataggagaatgagacttaaaattctatcaaccttta

SEQ ID NO: 58489 - DNA, 122 bp, Homo sapiens
actgcagcccaggaatgcaccctggaggaagtggttgagcggctcctgtctgtcaaggggcgacccagaccgagccccctggtcaaggcccataaaagcgtccaggccaacctagaccagag

SEQ ID NO: 58490 - DNA, 122 bp, Homo sapiens
agaggtgtccttctctttctggcaaggtttcagggtagaggcacggtgctcggggtcccacggctggtgggtggcccctgtgcttctcgctttgggatttgctgtccccgagctgcccatca

SEQ ID NO: 58491 - DNA, 122 bp, Homo sapiens
gccgtataaaaattactgaggtaaatagtctggcttccactttgttccccaatctgccagcggggtttaaactcagactctgaaggatgtatgtgacatacactattttagtctgttggaat

SEQ ID NO: 58492 - DNA, 122 bp, Homo sapiens
ttgggaaagttacctgacctgtctgagcctcagcttccccatctattacatggggtaatacggcccacctcactgggtcgttagggagctcataggcacaccggtaagtgcttaatattcac

SEQ ID NO: 58493 - DNA, 122 bp, Homo sapiens
aagttagtttgctccacgtgacctatgttccactcaagtgctctctgactcaggctcacccgcaggactcgtcatctggcctgatgtgcacgagagggaagactgaccggctccaaaggctg

SEQ ID NO: 58494 - DNA, 122 bp, Homo sapiens
gtcaaacttctgggctcaagccatcctcccacctcaacctcccgagtagccgagaccacacgtgcatgccaccatgtctggagaattttttttgagacagggttttgccatgttgcccaggc

SEQ ID NO: 58495 - DNA, 122 bp, Homo sapiens
gaagcagaaggctcagaagaccccctacatcgtgctcagcggcagcggcaagagcatgaacgcgtgagtggctcgaggctggtggggtagggtgtggtggggaggggtggcgtggcctgtgc

SEQ ID NO: 58496 - DNA, 122 bp, Homo sapiens
aaataaagcacctttggtcatacccctgatggtacacctgtgttcttggcccatttcctccggccctgctggggccacacatggctctcctggaagcaggtcaagagtgcccagtgccatct

SEQ ID NO: 58497 - DNA, 122 bp, Homo sapiens
cggcggcggctgcatgagggtcggaccccagaaccaggcgttggtgctggactttggcaccggaagagactgtgaaatggaaaaccgtttcggaagctttcgcctaacaaatcatttccgcc

SEQ ID NO: 58498 - DNA, 122 bp, Homo sapiens
cgcaccgcgggcagaaaacgccgcggaccgacttccggttcgctcagcactaccggattccgccccgcccgctgcgatccggttccgctccccacaacccgctctgtggcggggcttccggt

SEQ ID NO: 58499 - DNA, 122 bp, Homo sapiens
gccccagcgggcctggtagtcagcctttcatcagccctgtgtgtgctgcagctgaagccccgccacctgccagccaggcagcctaggatgagcctccgtacctccatgagcctccgttttct

SEQ ID NO: 58500 - DNA, 122 bp, Homo sapiens
ctcctctcagctctccgcgcccaccttcctcaggcagggccctcgtgcctccgcggcccgcgccaggacccagagtgtccacgagtctggactacagctggacccagggcctcacggtgact

SEQ ID NO: 58501 - DNA, 122 bp, Homo sapiens
ctgtgctggggaagtcgtgcagacgtgcagagatacagacatgtggacccaagtcagccccggactgagcagcgggtaccccagaagggatgggcagtggaataaggattacatgtaggggc

SEQ ID NO: 58502 - DNA, 122 bp, Homo sapiens
ggcagaccggatggctttccgcgggaagggtgacaacggggaagtcacagatgggaagcccggccccatcgccgattcgggcccggggcttttacgcgtgtgcgtgcatggcaggtccctcc

SEQ ID NO: 58503 - DNA, 122 bp, Homo sapiens
ctcaggtgatccgcctgcctcggcctcccaaagtgctgggattacaggcataagccactgcgcccagccagaagatgcatgatttcttaggatcatatgctgtttgtagccataaggtaaat

SEQ ID NO: 58504 - DNA, 122 bp, Homo sapiens
ccacctgagggccttctggggtgaggagaccccagagcggagcgcagcggctggtagccacgccctcgccgtttgcgcagcgcccctccgcccgccttcccggcggcgcccctgattggaca

SEQ ID NO: 58505 - DNA, 122 bp, Homo sapiens
gcctgctggagagggaagccaatgcagtatttgaggcaaatgaatgtcctaaagaggaggcgccttatgcacttttgcttatgtcaagggtagaggggtttccaaagacaaagtaacaatgg

SEQ ID NO: 58506 - DNA, 122 bp, Homo sapiens
aacagctgcaacagccatggttccattcatcaacaaagccgattctgctgccctggtaagcgctacagaaatccccttccttgtatctaaacctgtgtttcttccaaagcgctgtattttga

SEQ ID NO: 58507 - DNA, 122 bp, Homo sapiens
actggacacttggctgcaggcccatagaggtaggaacagcttcccataggtctccccaaccggcttccccttccacttgcacagttggatgtgctgggcttctcagactgatggtgggtggc

SEQ ID NO: 58508 - DNA, 122 bp, Homo sapiens
ggcgagtcaccccagagagcggagccgttgtccctagagcagcctcgctggggctggtggcgagggatctcagccccagtgcctgcggagccccaccctgagaagccttggctgcagatacg

SEQ ID NO: 58509 - DNA, 122 bp, Homo sapiens
ctgtgaagaggaggaaaggtaacggccttgcctttcagttccgtacagatattgccaggacggaatacctttccaatgctgatgagcgtcttcgctggcaggccagctccttgcctgctgat

SEQ ID NO: 58510 - DNA, 122 bp, Homo sapiens
catgtggtccatctgcggcccagctggcacagccggtggggggctgggctgcggccagttcgctgacaccagggggacgccggctgtctccaggatccctgagacattactcatctgcagag

SEQ ID NO: 58511 - DNA, 122 bp, Homo sapiens
cttgggctacccgggggaccagtggtcctcgggcttcccctacagctggtggaaaaacagcgtcggcagcgagagcaagcacggtgagggcgccttagaccagccccagcacgacgtccgcc

SEQ ID NO: 58512 - DNA, 122 bp, Homo sapiens
agcaggtagtgtgatttttgtatacatttttatatattgcagcattagataccgaactttcgggctggctgttgattgactgtctttcgtctgtcttgcttaaaatgctcaaatcaaagcac

SEQ ID NO: 58513 - DNA, 122 bp, Homo sapiens
gtttgcctgaacacaccaccttcagatgggaagcttggggtcaaaaacatatgttagtgtcgggattctagtcctgactacaggctgaccttgaggagagtaggctgatggtgtggctacat

SEQ ID NO: 58514 - DNA, 122 bp, Homo sapiens
ctggtcgggccggctggggttccgggggacaggtttgcagggtggggcccgagaggctggcgggcaggcagcagtggagccggaagggtaggcagccaggggagagagagaggagctatgga

SEQ ID NO: 58515 - DNA, 122 bp, Homo sapiens
gggggcggggccggagccagggtcggcttgactcgggggagcagcgggtggatcctgtgacgtcagcgggttcgaaccgccggagctgagcgagaggccgggggtgccgagccgggcgggga

SEQ ID NO: 58516 - DNA, 122 bp, Homo sapiens
caaacgccaaccccatcctggtccagtcatctacctgggctctgcaataacagtggtgcacgagtgaaaaagtgagcagatgcaagctcccccagaacgtttcagtcccagagcagcttagt

SEQ ID NO: 58517 - DNA, 122 bp, Homo sapiens
gaaacgtggtccacctgcggagggcctgtttgcgtttattacacccgagcaaggcccgcacgcccaccagaggggccagggtgcccctgggagccactgagagacgggggaggcacaggctc

SEQ ID NO: 58518 - DNA, 122 bp, Homo sapiens
cctgatgctagccctcccctgacttggaccattaggtcaagttcctgtctgcttcgtctccgcagagctgaggaactgcgtgtggagtcagcccagtctggatgcacaggaggatgctggcg

SEQ ID NO: 58519 - DNA, 122 bp, Homo sapiens
ggaactcctgggcccaagtgatccactcctctcggcctctcaaagtgttgggattacaggcgttagccaccgctcccggcctgttagtgtttttcaaagcgacatcccagtaccaccagaat

SEQ ID NO: 58520 - DNA, 122 bp, Homo sapiens
agccgattggaagttccacaacgaccgtcactacccagggccggagcggcaactccgcagcggagctctgcctgcccgctgcgttcccccaagagactagaccccacaaactcctcctccac

SEQ ID NO: 58521 - DNA, 122 bp, Homo sapiens
cggcagagaccctgagggagatggctcagatgtaccagatgagcctccgagggaaggcctcgggtgtcggactcccaggagggtaggtaacggacatacagctctccacaggtggcctgggc

SEQ ID NO: 58522 - DNA, 122 bp, Homo sapiens
ctttgcagctcagcttctgggcaatcagcctgcagtaaaaccagcaggctgaattgcaggcgtcatgcatgtttccctagcagcagtgtgatgtaatacatggagactaagggctttgctgt

SEQ ID NO: 58523 - DNA, 122 bp, Homo sapiens
aggaggagcgttaacccgtcaccgcggcggtgggcggtgcaaagggcttccgggttcctccgcgctaaccaccccccacgtgcgcggccgcctgtggcctcttcccgctgcggccggcccgg

SEQ ID NO: 58524 - DNA, 122 bp, Homo sapiens
cctggagacccctgagctggattgttggggggggtggggttcgcgggtgcgagccaagaacgccccggggcgcgcagttggaggcacatccccaccgcactctccacccttagggactgcag

SEQ ID NO: 58525 - DNA, 122 bp, Homo sapiens
cccacttcacctatgagaaggcaggatctgcagttccttggcttattcaaattcatgaaacgagtcagcagcagccctaggactggagacatgtttacatgtaatcccatcaccagacctca

SEQ ID NO: 58526 - DNA, 122 bp, Homo sapiens
gcagacgtgtgatggggctttcgcagagggactggcggttttcggactcagcccaggcggcgggtcttagttctggaaacaggagtactaaatgtcttgtgttcactattggtactgcggga

SEQ ID NO: 58527 - DNA, 122 bp, Homo sapiens
gccaaagagctcattgagcatgagcaccagctccttaggggaacactcgctggccagccgcgtgaagcccacgatgtcagcatacagcacgctgcatagggcagactgtgtcagcagggcca

SEQ ID NO: 58528 - DNA, 122 bp, Homo sapiens
tgggggcggggccttgtgagccagtgcttggacttccacgtcataaacggaagggcggtgcgtggagggaactcaaggcctgattggttcctcctaagcaggatgcgatctggttggcaggg

SEQ ID NO: 58529 - DNA, 122 bp, Homo sapiens
cggggtgactttgacgtttagccccacggttagaacagaaaacccgtctgccatgagaatcgagagagtctgaggcatcgctgtatccagccccggctgctgcaaccctcaggactgaccac

SEQ ID NO: 58530 - DNA, 122 bp, Homo sapiens
tctgattccaacaaaaatggcctgaatatgtcaggcaggcaactttctaagagtatcaaccgagatatattctaggatgtacacaggcataattccttcagatatgaaatgtgatactggtt

SEQ ID NO: 58531 - DNA, 122 bp, Homo sapiens
tgctcttccttgtaccaggaaattttgggctgtggtcttccggatatcacggcacagaagcgggcaggcttgccagactgcacagtgacaggctggagctcctgcagaacttggggcggttc

SEQ ID NO: 58532 - DNA, 122 bp, Homo sapiens
cccaggaatgcgcaggcgctaccggaagcgggcaccggaagtggctcggctcgtggcttccggttcctcaccagtgtgccgctgtagcgcaagtcatctcgttgacacttccgctgacccgt

SEQ ID NO: 58533 - DNA, 122 bp, Homo sapiens
ggaagagaaagaaaccacagcttcttttagacttgtctgacaagcctatggcaattttgtcgtccctttgttattttatgtgggagagggaaatgtttcagaaacgaaagatctcatcccct

SEQ ID NO: 58534 - DNA, 122 bp, Homo sapiens
atcctatgtctataaccccaacctctcctactcacccccaagaaaactcaagctgcagagcgtctttgagactaaaccctcccaagtgctgtaatctagagtattttcaacatgagtgggca

SEQ ID NO: 58535 - DNA, 122 bp, Homo sapiens
tcacgtcctgccaattgccacgcaccaggccacgcccccgtcacgcagcgccaacggccacgtgccaggccacgtgccaggccacgcccagcacccatggccacacgccaggccacgccccc

SEQ ID NO: 58536 - DNA, 122 bp, Homo sapiens
tctgggatgtgaggagcgcctctgcccggccgccccgtctaagtgaggagcccctccgcccggcagccgccccgtctaagaagtgaggatcccctctgcccggccaccaccccgtctgggag

SEQ ID NO: 58537 - DNA, 122 bp, Homo sapiens
ggattccggcaatagttgtcgtccagaccttggtcgaggaacctgggggcggtaatggggcgtgaacaagaccctgggactctggcttatctggccccgcccaattgccctacacggagccc

SEQ ID NO: 58538 - DNA, 122 bp, Homo sapiens
ggcctgttctcatcaatctctcaaaaggagcagctggcaggagagcttggaacaatgtcccgtgtccagttctataaggaccgtgttactcagtgagcaggaataaactgccgtgggcgagc

SEQ ID NO: 58539 - DNA, 122 bp, Homo sapiens
ccagctggttctttgttggcagctctggtcaaggtttgctgtgagggaagctgaagtttccgatgagatgagagtgcctttcacacaagctcctaggtctcagctgtgttttccttgaaccc

SEQ ID NO: 58540 - DNA, 122 bp, Homo sapiens
gcgtgcttcaggctcctccctctaaggggcgccatgggaacaggctccggagggagccggcgtctgaaaggcccccgggacctgctgcagtgccagaggggcctctggagcaggcctggctt

SEQ ID NO: 58541 - DNA, 122 bp, Homo sapiens
ctgcaaagccagctctcagcctggcacctctcagccatgtggtgcaatgcctgctctgaccgtgggctgatgctttaaaccagcggtcctgtgttccctgttcacctgtgctgaggaactag

SEQ ID NO: 58542 - DNA, 122 bp, Homo sapiens
tctgcacaaagagaaagcttcattctcttgagcggccattttgatgcctgacccttaacacggccagcacaataactttagcatccgtgtgaaagtaccaatagcggtggtaggcgctggct

SEQ ID NO: 58543 - DNA, 122 bp, Homo sapiens
ttatttactcacttattgcttcactttctatttacttctattaaaaatcttctggctgggcgctgtggctcacacctgtattcccagcactttgggaggctgaggtgggtggatcatttgag

SEQ ID NO: 58544 - DNA, 122 bp, Homo sapiens
aggaccttctgtccagccttcgccttcttggccttggtgtccgctgcttgggcattgctccgtcagtggcagacaccttgcttggcacatacttgacactcagtactctttatgaaaaataa

SEQ ID NO: 58545 - DNA, 122 bp, Homo sapiens
ttggagggctgcctgaacccctccaggcctgtgctttccttacacttttatcttgatcagcgggtctcgaagtatagaaatgcaaattattagacttcaccccagatctactgaatcagaaa

SEQ ID NO: 58546 - DNA, 122 bp, Homo sapiens
gataaagctgctaatgaatgtcggccagaagaggacttcaaggcagagcaatattagctgcgcattgagtcctcactgggtcaccattgtgtccacatttacctaaggaccccagtgataaa

SEQ ID NO: 58547 - DNA, 122 bp, Homo sapiens
ccgcggcgccgtggcggtggcaagagtcacgcggagagatgcacggctgcgtggcgcaggcgcagagaaaaacgccggcgcgtcccctatgggcgcggcggaggcccagagacgcacgccgg

SEQ ID NO: 58548 - DNA, 122 bp, Homo sapiens
ggttgcgcccaattttctctggggcggtgtgaccggcagcccgtaccaagtcccccgactcggactcacgcgggcctgtgtgtcacgcatttgccgcttccttaccagctttttttccctag

SEQ ID NO: 58549 - DNA, 122 bp, Homo sapiens
gaaaatctccccgggaacccaagtggggagcacagactcaagagggagcgaccagagccccggccgtccatccatggtggtgtgaggggaaagggaggggaaccagatggggccacatgggc

SEQ ID NO: 58550 - DNA, 122 bp, Homo sapiens
taaaagttgcggggaaaatggcaagaagagtttctaagagctcctgtacccccttcgccacgctctctacttgctaagttttcacgtttgctccgttgccctctttctcgctgtgaatattc

SEQ ID NO: 58551 - DNA, 122 bp, Homo sapiens
gctacttgaatatagcacagtttctggtgtggggctgctctcagtgagaataagtaggcacgtagctagtttcataaaagggagggccctgtggctcaccgctctccccaggcagcctgggg

SEQ ID NO: 58552 - DNA, 122 bp, Homo sapiens
caggaggccgactttcctcctctggtctgtttttactacttgagccgctcgctcagaaaacggccttagataaagcagtttcaccttcagatcgcctgaggctgcagaagggcggctgcggg

SEQ ID NO: 58553 - DNA, 122 bp, Homo sapiens
atgacctcctgtcatagaacattcagggacattgaaagagttcactggcatgggatacagcgtcatatccaccaccagatggacagggaatcagtgaaagatgattccattaagagaaaatt

SEQ ID NO: 58554 - DNA, 122 bp, Homo sapiens
ttcctcgagggaatgaagagagagaagacagagaaagaaaccagggagattttaaatgctcgatttgtgagcactggttacatggcaaggaattatttgtgttagcttgtttcattctccca

SEQ ID NO: 58555 - DNA, 122 bp, Homo sapiens
tgttcccacggaccaccactgtgggtaggaaggtcgacttcttctctcttaccaacccctcggcccccagcctagagccctctatcttcagaggggagagagcagaccttagcagactctct

SEQ ID NO: 58556 - DNA, 122 bp, Homo sapiens
cagcgcggacaccaggcctacctgcgggaacaggtgtacagggacactagggttcggggccgccggctcggcgtctctgcccggtccgtgcaccaccggctcctccctgcctcgggatcgcc

SEQ ID NO: 58557 - DNA, 122 bp, Homo sapiens
aacatgggggtgtgggggggttcgcggcagccgagtgccaaggcctgggaagcggcgcggcgcgtgcgcagtggcgttcggcgggacccgctgaggcaaagcggagccgcagtgacagaagc

SEQ ID NO: 58558 - DNA, 122 bp, Homo sapiens
cctccaccttcccccagacgttcagcaccaactgccattccccgtcgctgagccccatggcgcagtctgaagaagacaaaaagagcaagtatgggctcactgggtgtcctggccccaacagc

SEQ ID NO: 58559 - DNA, 122 bp, Homo sapiens
ctgtgatctcagccagtgaggaggtcagatcagggccccaggtttgcctggtggaccttccgagtggaaagcagccaatgatttgttaccatgcaggacagccgcctccgggaacccgtgtg

SEQ ID NO: 58560 - DNA, 122 bp, Homo sapiens
aaccccctgaggtgtctgcgccctcacttgagggcttttgcacatgctggtccatgtgcccggagtgctttcttctgcccagacctctcactctactcacaacacaacacaacccccacact

SEQ ID NO: 58561 - DNA, 122 bp, Homo sapiens
gcctcttctagggtaggctctgctgggacctcagatgaggagtatggctctggtctaccccgattccaagagctgacatgcgtggagaaatggtcatcttttctcagcccaccccagtgagc

SEQ ID NO: 58562 - DNA, 122 bp, Homo sapiens
aaggcgatttctcaatcactccttatcacttctgcaaataattgtattattccttatttacgcagcagcggcaaaatttgaggaacactagcgaatgtgtccagagcagctcatactcgctc

SEQ ID NO: 58563 - DNA, 122 bp, Homo sapiens
gctagggagttgatgaaggctgtttggttttggagagagaaagaaattgtctttgtcaaccgttagccattgctgccccggtgtggtggctgtcaggtaccagtcacaggtgagggaattgt

SEQ ID NO: 58564 - DNA, 122 bp, Homo sapiens
tggcgcgggagagaaaaggcgcgcggccagtcgtaggtggagacaccccagctgtgcttccggggaccccgcttggccgctgcgccctgcgccccgcagccgccagagccgccccaccccgc

SEQ ID NO: 58565 - DNA, 122 bp, Homo sapiens
cttcctctccagcttttaaacagccagagcccagggttgggggcgagcggtgagatggctcgggtttcaaggacaataactaggacgttaagcagtgagggctgcatctctgaagccacttg

SEQ ID NO: 58566 - DNA, 122 bp, Homo sapiens
tcacttgtctcctttctgactgtccctgccaatgctccagctgtcgtctgactctgggttcgttggggacatgagattttattttttgtgagtgagactgagggatcgtagatttttacaat

SEQ ID NO: 58567 - DNA, 122 bp, Homo sapiens
cccttccagtaacctgggttcagcgactccaaggaaagcgagcggtcaagggccactggccgggaaccctggcagcccctgaaccttcgagagcagagacccctccccaacacccacacgca

SEQ ID NO: 58568 - DNA, 122 bp, Homo sapiens
caattcctgaggtaaactaagtgtccactgccaacatccttggacgaaaaccaagtcccccgggagaattcagatatttatattcacacatacaatacaacggaattcatcaatgtaatcag

SEQ ID NO: 58569 - DNA, 122 bp, Homo sapiens
agtgcgaataatctccaaataccctggttggagaaaagataacttgtagaaagaatgtgacggggatggccaggtcagataacaagctcgggtgttagtgagcgtaatctgaccgcagaaaa

SEQ ID NO: 58570 - DNA, 122 bp, Homo sapiens
ggggtttatactttctccgtgccagaagccacaagcttattctagtggagatagtgtctccgccctccttctttctttttggattttatgtgtggtggattaaaggatcagatacttattcc

SEQ ID NO: 58571 - DNA, 122 bp, Homo sapiens
catggggttcctgcttttcatctctttcctccagcactttgtcagcgagcgtaaatatgacgaggagctcgggaaagctgcccggttttcctgtgacatcgaacagctgaaggcccaaatca

SEQ ID NO: 58572 - DNA, 122 bp, Homo sapiens
cgtcgggcacggctggctgggcttgcgctccgcccgggcctcgggctggcgggggccgcgcgcccccacctctcagtttgcctggctttgttgccctgggagtccctgggtgggcagctctg

SEQ ID NO: 58573 - DNA, 122 bp, Homo sapiens
ggtggaggggaggctgcgcagcagacactaagcaaggatcagagcgctcggagaagcggacgctaagcgaggatcagagcgctcggagaagcggacgctaagcgaggatcagagcgctcgga

SEQ ID NO: 58574 - DNA, 122 bp, Homo sapiens
ggcgggctgcaggtcccgagccctgccctgcgggaaggctgctaaggctcggtgagaaatcgagcacagcaccgatgggctggtactagtgggggacccagtacaccctccgcagccactag

SEQ ID NO: 58575 - DNA, 122 bp, Homo sapiens
cgtcgtgccagagccggagatttgagtcagacaccgggaaggactgcccgtggaggagggcggctcgtggggctgggggtttgtttaggggtctctcgggtccagagggagggccaggcgac

SEQ ID NO: 58576 - DNA, 122 bp, Homo sapiens
accgcccactcccgggcatccccattggctgcgtgcttctccggctctcaattcgctgtacgtcatccgtgcatggctgcccattggccctctgcaatacttgtcttcatctcaccgcctat

SEQ ID NO: 58577 - DNA, 122 bp, Homo sapiens
caaggattcggagaaacgcccaggcggggagtcggccccacaccggggaggtgttgctggcgctggctccctgctcctcggcgctctgctttgaagctcacccacagagcggctttgtgtgc

SEQ ID NO: 58578 - DNA, 122 bp, Homo sapiens
tggggactagcgccgcgagtgccacctggagggaccccggcccccacccttggctccgcccggcccacggacctgttcgtcccgccccttggcggctcctacacttctgcttttcagccagt

SEQ ID NO: 58579 - DNA, 122 bp, Homo sapiens
gtttgggggaggtgagcagtaaactgatcggcagggctgaagaccagtggaaacgtgcagcggcgcccgaggtggcaggggaggcggggcgggaggcggcggtgcccaatcagcagccgagc

SEQ ID NO: 58580 - DNA, 122 bp, Homo sapiens
atcctgtgggaatttcccattcgtttgcttgtggggagccggaggaatcataagaactcacgagcaagagagaatcgagcctaagtgctttctggaagagtcagaattgtggctcttcagac

SEQ ID NO: 58581 - DNA, 122 bp, Homo sapiens
tttatcagcctccctgccccagggcagaacccacaagggcgcagaccctaaacacaagggcgctgagtgtgtgggggaggactgtatgttaaagatgccgagcaaactcaaccctcagccaa

SEQ ID NO: 58582 - DNA, 122 bp, Homo sapiens
gtgtgtgtttgctttcctttttctgtgaattacctgttggtgtgcaaagacagctgtttacgtggttctctagccagactttccagggcacttcctggctgtgtgaacttgaactaattcct

SEQ ID NO: 58583 - DNA, 122 bp, Homo sapiens
gggaggagtgccattcccaggaggcctcagaccccgtcacctgagatgagagctggatcccggagaagctcaggtctgacccagcattcattgctgtaggaagggctcgtctagactccaag

SEQ ID NO: 58584 - DNA, 122 bp, Homo sapiens
ggccccgagctttaccttgtaggagtcggtggccaggaggatgttgaactcggcttctgccgcaggattcatctcgggccggaggacaggggccgcgcgccgcgagctccctggcgcggctg

SEQ ID NO: 58585 - DNA, 122 bp, Homo sapiens
gcgggacacgcccaaggctcggatgggagccgacgctgagggagcggcacctgcagggagcgcccggagccgaggccgcggcaggaggggcgggcgcgggcgcggccggaggggatgcgggg

SEQ ID NO: 58586 - DNA, 122 bp, Homo sapiens
tgcacaaaggtcagcgactgctcgagggcatgggtgtccctggagcaggtgtccagaatgcgggcgcccagcgtgatgttaggcagcaggtccgggtcgttgttgatgcgatccagggcgaa

SEQ ID NO: 58587 - DNA, 122 bp, Homo sapiens
gtacaaccatggctgggcacagtggttcatatctatcatccccacactctgggaggccaacgtagatggatcacttgagtccaggagtttgagatcagcctggctggccgacatgataaaac

SEQ ID NO: 58588 - DNA, 122 bp, Homo sapiens
gccgccaggtccggcccatggtaggctcgggtgaccctcttcccctgaagcacccgcagtcgcctctgcccaagttggtgacctcagctgggcccatgagaaaccccggccgggccggctac

SEQ ID NO: 58589 - DNA, 122 bp, Homo sapiens
tctgtcaaattcacgcttgtgtgcataaacacttttttttcttatatatgctttctgtgccgaggaaagttcagcatttggactctgcaggttggagtcagcatttctgtttattcaccact

SEQ ID NO: 58590 - DNA, 122 bp, Homo sapiens
tgctgctggtgagtggcgttcctggcggtcctcggcggagcgggagcagtgggacgtttccgggggtcgggtgggtagcggcgagcgctgtgcggtcagggcggggctcctgtgccctgtcg

SEQ ID NO: 58591 - DNA, 122 bp, Homo sapiens
ctctggggggtgaggcaaaaaacccagctgggactcaggacccccagggtggtggtagcacgcacctgctggtaggcagccatcacctgcagagggcggctgtagtactcatccttattaat

SEQ ID NO: 58592 - DNA, 122 bp, Homo sapiens
cgagttggctccgtccatcagagaaccctggcccctgccacgggtagggcatgggcgggacgggagcctgctcaggggtaaggttgcttcttcccttcttcttgtcacagtgcccctggaaa

SEQ ID NO: 58593 - DNA, 122 bp, Homo sapiens
ctgccccgagtcctcacctcctgcagtggccgcgggtaccacttctccttaaagccctggcgtcggttgtccaaatcggcagggaagctccagaggccacccagctccttgggctcccgcga

SEQ ID NO: 58594 - DNA, 122 bp, Homo sapiens
aaaagcatgcacgatgtgtgtggtctgggtccctgcttcctgagcgggaagtcatcagcccgggccgatggctggggtggcgctcgtgtggggtagtggctttgtggtccctgctgttactc

SEQ ID NO: 58595 - DNA, 122 bp, Homo sapiens
caggccggtgttggtgacctcatgcacaccctgggagaggagaggtgaccccacttacgtcggctggggcgaaaacgcagttgtttcctaacttcttggcttgggcctccccacccgagttg

SEQ ID NO: 58596 - DNA, 122 bp, Homo sapiens
tccggggcttgtgcccagagtttctgatatcctggctgtccacgagagtccaggaatctgcgtttcacgtaaaccccccgatgctgcttaagcggggagtccttggctgcacattgagaagc

SEQ ID NO: 58597 - DNA, 122 bp, Homo sapiens
agtcccgggcccagggaggacctggaacattcccttcctccccccccccccccccgcccccgcccatcagcccagcctgcaaggaggcgccaccggacctgcacactcaggagcaggtgagc

SEQ ID NO: 58598 - DNA, 122 bp, Homo sapiens
tgtcagctatggagaaggacggggtgttctcctgagaacaaatgacagcccagctagaggcggtcatctcaggacaccaacgggcgccctggggtttgctcagtgaggtgcgtgggggctga

SEQ ID NO: 58599 - DNA, 122 bp, Homo sapiens
gagccctcgctccgttcccaggatcccatatccagtttgggggacccactcagtgcctcgcgtcccgagtggggaacctccatcagcaccccagtagaaaccgtatcctcttccccaatccg

SEQ ID NO: 58600 - DNA, 122 bp, Homo sapiens
cttttgcagacattcataatacatgggtcagaagccagcagcctggagtaaaggtggccccggaaggttttcagggaaagtgactcttgcctcctctttcctcggggcttccaagaaacact

SEQ ID NO: 58601 - DNA, 122 bp, Homo sapiens
taacctcatgaattcttttatttagggtggaaactctccacggctttctggctctttacacgtgaggattctctgcagcagtgcaaggcagcctgagggtgaggcgccactaataatgatgt

SEQ ID NO: 58602 - DNA, 122 bp, Homo sapiens
aagtcaaatgtaaatgagcctcaagtctggatcacaaaggtctttccctaggtccatgggcgcttctctaggtgtgacaacttcacgtctagtcaaagcagcttcagagctcaatgtttaaa

SEQ ID NO: 58603 - DNA, 122 bp, Homo sapiens
ggaatcctgtcagggagtggggtccagtgcttagccagagcagctgcatacaggaccacacgtgacacagaggcatgtgaggctctgcatgtgcctgggcttaaagcctgcttggctgtgtg

SEQ ID NO: 58604 - DNA, 122 bp, Homo sapiens
ttctggatctactcagaaatccaaggttcacagtatcataattaaacacgtacattttcacgtacaactctaaggacttttactcaggcacttggcagacatatccttgtaatgtgttatgt

SEQ ID NO: 58605 - DNA, 122 bp, Homo sapiens
cccagctcccagttcgcaaacgtgcgcccgggttccccctctggaagcggccaggtgtggcgtttagctctttgccacgggtgcgggtgcgaccaacccccaagcaggctcaaacgcgccct

SEQ ID NO: 58606 - DNA, 122 bp, Homo sapiens
tctattaggatttggggttgccactattactttgaaactgtttaaaagtttacatctcatcgaaatcataattaccctggggaaagattaaaattaagaaattgtgagacacggaaatgtca

SEQ ID NO: 58607 - DNA, 122 bp, Homo sapiens
tctcctcttggtctgtgagcatccagccttacttttgtatccaatcatatttccatacttcgctgaactgtgtttatggatagtttccaccagatctttggatcttcatcttgaaggctgcc

SEQ ID NO: 58608 - DNA, 122 bp, Homo sapiens
cagtttcctcgaaagaggcggcagttccctcatcggctcactgcatgtttgacaagacaccgtcttgctgtcttccctgctgccctctcttcatgtatcacagatggtgctctgcagacctc

SEQ ID NO: 58609 - DNA, 122 bp, Homo sapiens
gctttgtcactgggctgtcacaggcaccccaggctggagccctgaattctctgcaaaccccgttcaggcaaaactggtaccaatctgatggtgctactctgactcttcagccctttaggcag

SEQ ID NO: 58610 - DNA, 122 bp, Homo sapiens
taactcccaggactgggtaaagatggtcgaatctggagccggccttggttccccacagcccgtgacaaggagtgtggagcttcacccgggaggctctttcagcccaaggatcagctgtgggg

SEQ ID NO: 58611 - DNA, 122 bp, Homo sapiens
acctcaggcgatccacccgcctcagcctcccaaaatgctgggattacaggtgtgagacaccgcgcctggccataactcagagagttttataagaaaaagtcctctgtgttttcaccatagtt

SEQ ID NO: 58612 - DNA, 122 bp, Homo sapiens
gggcggagtgggctagctccatttagccccgccccaaggctatgtttatcttcgtttgaccgaattggtttcaccgaaatatggatgatgctggagtggggtgcagggtggctaccttcatt

SEQ ID NO: 58613 - DNA, 122 bp, Homo sapiens
actttcccggtccgcggcgttacttacaaggctgcaacttgaccgggtgcaacttcctagcgagcctccgccccgcccctcgtgacgccgcctgcaggcgggcccccgccggcctcagctca

SEQ ID NO: 58614 - DNA, 122 bp, Homo sapiens
ggcaggtgcaaggtgacagaagtgtcacaaatagaaaccccattaatgagataactgcctcgcaaactcctttcctgtgaaacacacttgcaccaacacaattattgagactatagttagct

SEQ ID NO: 58615 - DNA, 122 bp, Homo sapiens
gagaattgagaatctgcccggcgggtcgtgctttagctgtcgctgtagggcgactcttggcgtgtaatcacagcatgtggcgcgaggacaaagaacatgacagcagagaaggatcagacagg

SEQ ID NO: 58616 - DNA, 122 bp, Homo sapiens
gccttcacccgcgctgggcgcccggtgctccgggccggggtcgggcgggtgctagcggagcgcctgctagccggcctcttataaccgagcccggcgcggctcctcctgggccggcccggagc

SEQ ID NO: 58617 - DNA, 122 bp, Homo sapiens
cgtgtgcctcttaactaaagaactgttaagatacaaaacttggctctttgctgcctttcccgcactgccaagagggaaacatgaattagttacattgccgtggtgctcactgggagttcgct

SEQ ID NO: 58618 - DNA, 122 bp, Homo sapiens
gccgcgtctctcgccgtcccctgggcgcgggccaggcggggaggaggggggcgctccggtcgtgtgcccaggactgtcccccagcggccactcgggccccagccccccaggcctggccttga

SEQ ID NO: 58619 - DNA, 122 bp, Homo sapiens
gctgcttctctgcttgggacgtggattcctttaccctcctcctcgcctgactacttctgacgcgggtcgtcaggactccgcttgggtgtcacccgtccaggaagcctcccttaattaagggc

SEQ ID NO: 58620 - DNA, 122 bp, Homo sapiens
gcactgtgttcgggaaaggagctgggaatgccctatttggtcacattggggtgggacagacgccatttttgtggggcctccttcggaagatagcgggcttttgctgctgatttcacgccaga

SEQ ID NO: 58621 - DNA, 122 bp, Homo sapiens
gcgcaccgtgattggcggagatgtggagtgattggcggctacaccggccactcagcaggccgagctggcgccgcatccggggggccgcgtctggagtggagggaggccgaaggccccgcccc

SEQ ID NO: 58622 - DNA, 122 bp, Homo sapiens
aaacgaacgcgagagtcaccggaaaagctaggagggccacacgaatgaacacagtgatcacgggtacccagagcaaccatgagaggcctgtagccctctgcataagaaggcaccccgtgtat

SEQ ID NO: 58623 - DNA, 122 bp, Homo sapiens
ctgttttttcatctgtgtgcgtgttggcctcgtggcagcccaagtcccgctgagctgtgtcgggcaggctgccgtggagcccggcttggtcagggatgttggtcttgctgaacaggacctcc

SEQ ID NO: 58624 - DNA, 122 bp, Homo sapiens
tctgatgtcagctcttgggtccactggctccactgagggcacctagactctacagccaggcggctggaattgaattccctgcctggatctcacaagcactttccctcttggtgcctcagttt

SEQ ID NO: 58625 - DNA, 122 bp, Homo sapiens
gaagtcctggttctgggggagtcctatggtccctctcctgtggcttcctccaaccctgggcggaccttcactttttctccgtcaacccttcctgcatcctcatcagtgggcccaggttgctc

SEQ ID NO: 58626 - DNA, 122 bp, Homo sapiens
gggagtgcccggtggccttgctggatacttggaaaaaggagagaaatagaagaggatggtcggcttatgtaatgatctcaggctgattaatttggttttactttcagcctctttggtgctag

SEQ ID NO: 58627 - DNA, 122 bp, Homo sapiens
aacaaaaagtccgcgcggtcctaggtgaatctggccgaggcttctgcgtcaaggacggcgcgggtcagctgaggccaagaccgcaggcactgccctaccgctctccagatcacagctccgcc

SEQ ID NO: 58628 - DNA, 122 bp, Homo sapiens
tcctccgacctacagagagacacacgtggcgggcaaggctcagtatccccactgcaccaacgctgaatcctcccacctctgccgagttctgcccagggattctgcagaagccggggtttcta

SEQ ID NO: 58629 - DNA, 122 bp, Homo sapiens
cggtagccgcgagggaccggtggtagccgcgagggacgggcggcgggctcggtgctgtggcgaggcggggatggcactcccccccgccgccccgtggggcggccccgactttcgggcggtga

SEQ ID NO: 58630 - DNA, 122 bp, Homo sapiens
ccggtagatcgcggcggtcagcggtgaggtgagagcgcctgtggggcgggggcatatccccgaggggctggggctgggtggaagctcgggcctccccagcacccccgtggtctgcaggctcc

SEQ ID NO: 58631 - DNA, 122 bp, Homo sapiens
cccgcctgccaggagaccgcacagctcaccgcgaagggcccggcctgccaggcctctgcccgggcccgggagtacacacccctttaccagcagccctcgaaccctgtaaacaaccaggctgg

SEQ ID NO: 58632 - DNA, 122 bp, Homo sapiens
gaggtggggcctggtgggaggtgatcagatcatgggggtggagttcccctgacttagcaccgtcctctcagtactgtttagtgggtgagttctcacgggttgtggtcgtttaagagtgcagc

SEQ ID NO: 58633 - DNA, 122 bp, Homo sapiens
ctcagcaactactacgtggactcgcttataggccatgagggcgacgaggtgttcgcggcgcgcttcgggccgccggggccaggcgcgcagggccggcctgcaggtgtggctgatggcccggc

SEQ ID NO: 58634 - DNA, 122 bp, Homo sapiens
ctcctggtgtgccgtttccgaagcccgtcagaaaagcgcagtattggggtgggagtggcccgattttccaggtgccgtctgtcacccctttccttgaccaggaaagggaactccctgacccc

SEQ ID NO: 58635 - DNA, 122 bp, Homo sapiens
gggaattagaaatatggtgcagagggacgctgttctttccttgaaccacagatactacagcgaagaggaatggcagacaggcagaaggaagtcctgggcacattctaaacattaagctaaga

SEQ ID NO: 58636 - DNA, 122 bp, Homo sapiens
gccctatccgctcaccgcgtgggctctgcgtgggcgttgttctagtcctcggggaagggacgcccgcctggacccttgcttttcccccttggagtccagtgagggctcattggtgaagggga

SEQ ID NO: 58637 - DNA, 122 bp, Homo sapiens
attcccagggtcggctcctgctgactgcatgcaggcctctcaggactgggttccatacatcgcgcccctgaaggagggaacgtgtcagggtttgtccgggcggggtctatgcccctccctct

SEQ ID NO: 58638 - DNA, 122 bp, Homo sapiens
agcaactgccccccaagttctcgtatcagctgcgggaaggagagaatggttctagtcaaccgagagtggaaggagaccaaatttcagcaaatgcacggacttgagtcctcatgagcagggtg

SEQ ID NO: 58639 - DNA, 122 bp, Homo sapiens
tgggactggaggacgtcctagaggctgggacaccctcaccggtgctgggatccgggggcccgacaccccccaggcctcagcctcactgagcggccaccatcgccccgagggcccacggcact

SEQ ID NO: 58640 - DNA, 122 bp, Homo sapiens
gggtccatttggaagatggatatgggagagtccagaagttaagtgacgtgcccaaggcctcgcaacccaagtctagccttaaaccctcaaggacatgtgtaaggcctatatttgcattttaa

SEQ ID NO: 58641 - DNA, 122 bp, Homo sapiens
gctgatgatacattaatgaggaatcttctcaagtcttctatgagaaaatgtttatgttgacgatatctcttccaaaaagggagaaaagaccatagatggaatttcataacctgaggcaggtc

SEQ ID NO: 58642 - DNA, 122 bp, Homo sapiens
caactgcacagatcccagggcgctcatcttggggcgtgcagcgctctgtagggaccctggcgtgacctcatttttgctgcttcacgtttaagatctgactgctgagttgtcctcatcaccaa

SEQ ID NO: 58643 - DNA, 122 bp, Homo sapiens
ctcaggtgatccacctgcctcatcctcccaaagtgctgggattacaggcgtgagccacagcgcctggcccccagaaaatcaagtcttaaaattttgctggtctctatagtagaaggaggaaa

SEQ ID NO: 58644 - DNA, 122 bp, Homo sapiens
gccctgcagcaaatactggagcagcaggtccgaggcgaggtcggccagccgctcttcctgcgccgcggcctgccgcgtggcctccgcctgccgccgcccggcctccacctgcgccagccctt

SEQ ID NO: 58645 - DNA, 122 bp, Homo sapiens
tataatttttactgtaataaaagaataatactccacaaatacttacagtgataatgcctacggcataaagacacaatccagggtaagccattcattgagaggtcaccagaaactgggaagtt

SEQ ID NO: 58646 - DNA, 122 bp, Homo sapiens
gctctcgaagacctgcctgtagcagaactcaccccagaaccctcgggactgcgacgagggcgcccgcccagtgacggccactcctgcggtgaacagtactgcctcctgccaggagctgctgt

SEQ ID NO: 58647 - DNA, 122 bp, Homo sapiens
tgtgaagcctgaagattgtaggaagtgtgttgattatgttgccagtgctcccaaatccagcgacggatgaatcaagtgaacctaatgaaaaacaatcctgtatagagaaaaaactagcaatt

SEQ ID NO: 58648 - DNA, 122 bp, Homo sapiens
cgaatggccaggctccagcgaggctggttgggcctcagctccagtccccagtgaggctggcgaaggcctccctgccctcgatatgggcacacaaagctgcagcgaatgtcccctaatcagat

SEQ ID NO: 58649 - DNA, 122 bp, Homo sapiens
aaacaaaaaagaagaaatattaggtgaaacaatgccagataccatcaagattactacaaacggccaagcacggtggctcagtctgtaatcccagcactttgagaggccaaagcagaaggatc

SEQ ID NO: 58650 - DNA, 122 bp, Homo sapiens
cggaggccgggcctggcctgcctggcccgtgaggatctgcaccagcaggtcggtggccagcgtgggcgtgggctcctcgaagccgatggtcagcagctgctggtagtccccaagcggctgcg

SEQ ID NO: 58651 - DNA, 122 bp, Homo sapiens
tttcctgtaagttcctgcccttgaagacaaataattacacaaaatccatcaagtctaaatcgtttcccaacttcagcagggatgaaaggtagcacagatactgacacactttatttttctct

SEQ ID NO: 58652 - DNA, 122 bp, Homo sapiens
ctgcaccgtggttaatgaccgtaggctggagactgccccatcccacaccttcctcccacacgaacactagggaaagtctagtctgcctgttccagagaaaattctgcaaaaatcgtccccag

SEQ ID NO: 58653 - DNA, 122 bp, Homo sapiens
gcgcgtgggcccgggggccctttcagcagggagccgcggtggccagtgccgccgctgctgcgggatccattggcctaggataccatggaggaggcggcagctggccctaaggaaaagcggca

SEQ ID NO: 58654 - DNA, 122 bp, Homo sapiens
ctgcccactgaggaaacggagaagtgcacggtcaacgaggagtgctgtgagtgggggccccgggcgggcaggcgggcaagtaggtcggggaggcagcaggtgcgactccaatgccgctggcc

SEQ ID NO: 58655 - DNA, 122 bp, Homo sapiens
tttttagttttggctcttggtgctctgagagctaccacttcctgccagctggttcgttaccgcagggaaaatgagggacttttgggggcagatgtgtttccattccactatcataatgcccc

SEQ ID NO: 58656 - DNA, 122 bp, Homo sapiens
cattcagccggggaaggtgaggcgagtagaggctggtgcggaacttgccgcccccagcagcgccggcgggctaagcccagggccgggcagacaaaagaggccgcccgcgtaggaaggcacgg

SEQ ID NO: 58657 - DNA, 122 bp, Homo sapiens
gccggatgcggaggagtgcaactcggatttgaaggtcaccgagcgcgttaatgaaatccccggaagtgtgtctgccaacaatccttttattttggctttacctgctgttcgcctgatgcctg

SEQ ID NO: 58658 - DNA, 122 bp, Homo sapiens
gtccgcccgcaggaagaagcggaggctcgagcagagtcgaaagagtctgcccgagggaggcgcggaccccaggggcccgggagaggcgcgccgtccgcctctgcggcaaggggcctccgggg

SEQ ID NO: 58659 - DNA, 122 bp, Homo sapiens
acacactcagaaggaatgagaacggacacagcttcccctacggtggccccaagctctgtgcgtgcctcagtctccctgaaagcacaggcaccaccacagttaccaagtttattggatccata

SEQ ID NO: 58660 - DNA, 122 bp, Homo sapiens
cgcaggcacggggaacacctgtgggcaaattcacctctccacgtgccaactaccgccggccggacgtgatgatccctgagcgtggagcacacccgagccatcgaacatcctaaccccatcag

SEQ ID NO: 58661 - DNA, 122 bp, Homo sapiens
gcatgcgcggagagaagagcccgggcagcctgaaggaatggctggagtgggcggggtctgcgccgctttaaggtaaaaaaatcagagttgtgtgggccacttatggtggaaaccaaaatgtt

SEQ ID NO: 58662 - DNA, 122 bp, Homo sapiens
tgggtctcgaggttctcagatggctgggggtggggtcaggctgccacccacagggtctcacgacctgggcaccaggacagatgtgcacagtctctacatcctggctgctggccagagagggc

SEQ ID NO: 58663 - DNA, 122 bp, Homo sapiens
agtcctcacgtcactacttactttttcaaatttgtccttgattatcaccaaaatgttggacgacaggagtatttctccctattctaagtctgtttttcccaaaaccagtgaaaatttgttaa

SEQ ID NO: 58664 - DNA, 122 bp, Homo sapiens
tggcccggctcggcggagggtggtgtgcagcggcggggacctcccggagcctcccgagcccggccttctgcctaacggcaccgttaccctgtgagtaccctaccaggccagttccgtccgag

SEQ ID NO: 58665 - DNA, 122 bp, Homo sapiens
acaggtggaagtggccactctttggcctcttctaccctgggagtgacctgaagtaccccacgcactgagcagggttgggaaagtcatgtttgaatgaaagtttcctgttattttcagtggta

SEQ ID NO: 58666 - DNA, 122 bp, Homo sapiens
gtgactccttcctctgtgcctttgagatggctgtgtatctcctacaaaggcaatcaaggacgtaaaaaaccattcctttacaatgtaatcatcaggaaggatagggccagtgtctcccagtc

SEQ ID NO: 58667 - DNA, 122 bp, Homo sapiens
caaggagttaaacgctaccacgcagcccgacctggatgggatttgctcctgggtacaaaacgggacactgatcaaaatcaacttggacaagtgacaagagtgagtcttatgtcggtggatgt

SEQ ID NO: 58668 - DNA, 122 bp, Homo sapiens
tcctgacgcaggaggccctggggcctagtgaggtgtggctggacagtcccggagacccctcgcttgggggcgacatgtgctccgcctcccactttgccctcatcactgcttacggagacatc

SEQ ID NO: 58669 - DNA, 122 bp, Homo sapiens
cttcacctcggggacctgcccggggaccagggggacgtctgggcatccaccctcaggaagcgggcagcgcagatcacacctcggatccttcgtagcactcccaaacccaaagccaccagccc

SEQ ID NO: 58670 - DNA, 122 bp, Homo sapiens
tgattcctgtactaaggcagtggccacaggcagagggactctctaattccctacctagctcggttctgttaagaagagccagatggatatattggagttttcttgacatatgaagaagggga

SEQ ID NO: 58671 - DNA, 122 bp, Homo sapiens
acctctaacactggggtctgtgcccatgttacagataagaaaacaggcataggctgggcacggtggttcacgcctgtaatcccagcaatttgggaggccaaggcagctggatcgccagaggt

SEQ ID NO: 58672 - DNA, 122 bp, Homo sapiens
taactgttgtattcaaacgaggtcttggaatatttctcgagctccttggccaggttggaacgcggcgtagttgtggggacattgtttctgtagccatactgaggaatctccagctgcttcac

SEQ ID NO: 58673 - DNA, 122 bp, Homo sapiens
agtgtattgaccaaatgataattgcataatttttagtaaaattctgagtcattcttgacccgtattacaaccaaggataaatatttagtatggaaaaatgtgaaaatgtgaaatcaagctag

SEQ ID NO: 58674 - DNA, 122 bp, Homo sapiens
cgggagccgtgcgcttaacggcgggatttgggaacccgcttctgacacgggcagcgggaccgggacgccatccctctcaccgctggaatcgattcttgaaccgcattgatcctctgctcctc

SEQ ID NO: 58675 - DNA, 122 bp, Homo sapiens
tccaaagcccataggccgagaaatggcatctgagatctgctgggccacctcctgttgttccgtgatgtcagtcatcagttcatctaccttgtcaatgtccctgagaatgagatagatagcta

SEQ ID NO: 58676 - DNA, 122 bp, Homo sapiens
cgggatgacaggtgtccgccaccactcttggctaattttttttgttctttttagtagaaacgaggttttgccatgttgcccaggctggtctcgaacttctgacctcaggcgatccgcctgcc

SEQ ID NO: 58677 - DNA, 122 bp, Homo sapiens
cctgcgcatcctaagccccaccgcctcacctccagtccccacagcgttcgcgctcccagccggggtaagcggaagaaaacaaaggcccggctccatcagggcaccaatcccgctcgtcggcc

SEQ ID NO: 58678 - DNA, 122 bp, Homo sapiens
gagaggactttgactcagtataattattgcatcttactaaccaccccccacccaccccaccggagccctccaggctaagaacccttttggtcccagactgcacaggcttttcttggcatgga

SEQ ID NO: 58679 - DNA, 122 bp, Homo sapiens
tggctgtaaggggttgcccccccgccagtgccttggatatttctggggtgactggactggcgcccctgggccacctttctggagacagggagggccccacccggggtgggtgggaaggctga

SEQ ID NO: 58680 - DNA, 122 bp, Homo sapiens
cgcccatctcctgccatccttctctggagagaggcgaggtgcttgaagtcccaaattcctcgtgtagtgagaaaacaggggaggcagaaaatccccaagatatcttcagaaacgaaggtgga

SEQ ID NO: 58681 - DNA, 122 bp, Homo sapiens
atcataaacgaaatctgattaacctcatttgaataccgcatctataaatgaacagggcctcggcgggagtgattattttctcaggtgtttgcaacagtgttctaactattaacgctacgatg

SEQ ID NO: 58682 - DNA, 122 bp, Homo sapiens
agcggtcccaggagaacaagagacaggtcctgacaagcagtagagtcggtgcagcgcgcccgggttcggatagggttaaggccaacacctgcagctgaagtacgacccacatgggaagtagg

SEQ ID NO: 58683 - DNA, 122 bp, Homo sapiens
gctgagggtgactgggggtccctgtgatgctcagaggaagtctgtgggtcctccccccaccgagaagcagacctgctcacactgatgcctgtgcatttggaagattggagtctggtcttttg

SEQ ID NO: 58684 - DNA, 122 bp, Homo sapiens
ccctggtcttgcctttgcgaggagggtggtgaggatatcgtgagtccttcgttttgcgttcgtgattcattttgatgctcaaacatcccaagtgcgaccagtgggaggtttcggacacgtcc

SEQ ID NO: 58685 - DNA, 122 bp, Homo sapiens
gtgaaccccttttcggtatcaaattccaccagggaggccgtcttggaggctggggcacctcggggaaggacgccggcatcagcaccattctggggtacggggatggatggtcgaccagttgg

SEQ ID NO: 58686 - DNA, 122 bp, Homo sapiens
caagggctgcctgtcatctgaggctcccactccaggctacccatggctggtgtccaagcacgctctggacccctggtggccgtctctgcaggggcgccctccctggctggctgtgctgcctc

SEQ ID NO: 58687 - DNA, 122 bp, Homo sapiens
cgcgaagaccgggcagggagagtgtggcggcgggcgtggcccgagtcttccctttgtggccgagggggcgtctcctccggacgcggcggcggttcggacccccgagtcgaaaggccgcgggg

SEQ ID NO: 58688 - DNA, 122 bp, Homo sapiens
gggctctccgttggccgagcagacgttttatttgtggaacggaattgctgtcgggatgggcgtggggtcgttagcagcataatcaacacccacatccaccctgggggcagccacgtcttgtc

SEQ ID NO: 58689 - DNA, 122 bp, Homo sapiens
ccatccactggctcctggttttggtgtatcttctggtggcgtttgagctcagactggtcccggaagctcttcccacacacagagcatgaatggggccggtaacccagatggacgcggcggtg

SEQ ID NO: 58690 - DNA, 122 bp, Homo sapiens
agcctttttggcactaggggttggttttgtggaagacagtttttccacggggtggaaatgcgggggctggttttgggatgattcaagcacatttattgtgcactttattattacattacaat

SEQ ID NO: 58691 - DNA, 122 bp, Homo sapiens
gtcccagcgttgagcaacggggtccgggggtccgaaatcaagcgagtgagtataggcagccggtggggtagggtcggccaacagagccggctgggtggggcccctcacctcttcccgtcgcc

SEQ ID NO: 58692 - DNA, 122 bp, Homo sapiens
gagtagctggtttcccctacttgtccttccgggcctgggtgtctcgggggctcaggctgacgggagacctaactaccggcgagtgagaccagcaggagcctggaggggcgcgcaccagggtg

SEQ ID NO: 58693 - DNA, 122 bp, Homo sapiens
ccctgctcactgagcctgcatgggccttgcccccgaccctgtggtctctgggattggggtcggcttaccctgtagcacagacagggactcctgctgccctgggagctgtctcaagcaaaatc

SEQ ID NO: 58694 - DNA, 122 bp, Homo sapiens
ctggacgctgccacatgaccaacaccaaagaccccaaaagagccatggaatccacgctggcgacatccaattctgccacaggccccgtcaccttctcccacgtctttggtcagcagtgccaa

SEQ ID NO: 58695 - DNA, 122 bp, Homo sapiens
cagccggagcctgactcactctgcatgacagtatcactggtgtacagctcactctcgccccggatgcggcggaaccgagggatcttcccattgtattcctgcttccggatggtggaatacac

SEQ ID NO: 58696 - DNA, 122 bp, Homo sapiens
cgcacaccctctgaatctgtgatgaagctgtaccgcctttgatggagtcagaagatgaaacgcggaccgcggtgctgcgaatccctgggagatggggccggcatgcaatatttaaagggccg

SEQ ID NO: 58697 - DNA, 122 bp, Homo sapiens
aatagatctgaaacataagttacttaggataatgacagtgcctcttccgtagggtcactgcgagggtgaaatagatccgaaacgtaagttacttaggataatgacagtgcctcttccatagg

SEQ ID NO: 58698 - DNA, 122 bp, Homo sapiens
tttgttttcagcggtattattatttgtgagtctaacctagcgggtggtcctggctgtcaccggtgcttgggcgggatcaccaccagcggctgcccgtacttgggccgccacatgaggacctg

SEQ ID NO: 58699 - DNA, 122 bp, Homo sapiens
agggagggctgatgggccgtgcacttagctccctccgggctgctggccggggcccttgaacggacagatgccaactggcagatgagggggctgcgtccacccccaccccacccccgccccca

SEQ ID NO: 58700 - DNA, 122 bp, Homo sapiens
aacacatttgtacttcgtttcttcctcatttagtaatagaggtactataactagacctaccggttcaacaaaacaaaacaaaaccctgaagctctgagagttttaagtattgaaccccccag

SEQ ID NO: 58701 - DNA, 122 bp, Homo sapiens
tcgcctgtatataggcaggtgtcaagctggggctcttcttattggacgtgagggccgaggcgcggggggctggtccatcctacctaggacgcccggcgcagcctccatttacataaagcccg

SEQ ID NO: 58702 - DNA, 122 bp, Homo sapiens
cgggccgcagctgtctgcgtgcgggagccgcagcggccgcctcccctcccgggctgtggacgcaccgggttattcctggcagcgcctccccgaacagaagttactaggaggagtgcgcggcg

SEQ ID NO: 58703 - DNA, 122 bp, Homo sapiens
ccacccacctgtcaccctaagatagatcctcggtccctttcaacagcattttgacctttgcgagaggacatttgattgacggccctgcacgctctgccactcagagccgggcagagctgccg

SEQ ID NO: 58704 - DNA, 122 bp, Homo sapiens
gtacttcacatccctattctttgttttccccgcctgctctcccatgtcttctcccttccccgggtgttctaagtgcgccctgctggctctgtgacacatggcagtcccgttgaggggattca

SEQ ID NO: 58705 - DNA, 122 bp, Homo sapiens
ccagtctcttctgctggcagaaagcaaatgtgacctgtgtcactacgtgactgtggcacacgccttgttcttggccaaagaccaaattccttggcatgccttccagcaccctgcaaaatgag

SEQ ID NO: 58706 - DNA, 122 bp, Homo sapiens
gagaaaataactaactttctggaaaacacatttggcttaactgccaaaataaaggctttgcggagaaatgaaaagcctataatcaggatttaggtgtgcaataaaacacagctgacaccaga

SEQ ID NO: 58707 - DNA, 122 bp, Homo sapiens
ttggcatgaggtgtgggaggagcgtagggctttaagccaggagactgggatcgtccttaacgtgatactttctagctttgtgacctttggaaagtcactttacatttggaaagtcagtttac

SEQ ID NO: 58708 - DNA, 122 bp, Homo sapiens
aaaaaggtagtgagtgcagatattccttttattagtcctctcattaattctaaactgtcacgatagagtacgtttgccttttaaggttttattacatttgccctttaaaggttttattaaaa

SEQ ID NO: 58709 - DNA, 122 bp, Homo sapiens
tgggctgtggcctccctgccagcctgaggctccagctcttcagccaatctgtggggcaaccgtcccttccactcagagggcagtgacaggagcagaccaggaaagaggccgccagtatctgc

SEQ ID NO: 58710 - DNA, 122 bp, Homo sapiens
gctgggaatggggcacgggagaggtaagggcaataaccttaagcctttgtttttccgccccgagccaatttatagctctttcaggcccctgtttaaggcagttccaacaatgacagggaacg

SEQ ID NO: 58711 - DNA, 122 bp, Homo sapiens
cagctgactccccgcaggcaccctatgcagggctttgtttcgggggggaacccgcaccagcgcgtaaggggagtaggagagatctacgtgaccctggtgcgcagccgcgccctatcgccccg

SEQ ID NO: 58712 - DNA, 122 bp, Homo sapiens
catcactacccaacaactttgcccatctctgatctacactctgtgtgtgggccttggctccggctctcagtgagcaggcttatttccctcatttccaagttcttgggggacgcctcaacacc

SEQ ID NO: 58713 - DNA, 122 bp, Homo sapiens
aaacgcactgaagagacagctgtaactattagccaattagtttcatgttacaactactagcggaggcctgaaacggattcgtgatacctgactaatagatgcttaaaatgactttaattccc

SEQ ID NO: 58714 - DNA, 122 bp, Homo sapiens
agagagaaatcaattaggagaggcttcacaacgagagctcctcctccctcctcccagccacgatccaccaaggggaacggattaagacagagatgtctggagacagaaaggtttttctgggt

SEQ ID NO: 58715 - DNA, 122 bp, Homo sapiens
cactttgaatattaaatttccttccttaatatttataacaaatgtgttcaaaatgtgtggcgcacacactacagctctacttataatcaagaaaggcttgacaagtggccatttgtgaacaa

SEQ ID NO: 58716 - DNA, 122 bp, Homo sapiens
agcctggctgactgctctcagttcactgaaccacagatattgggtctgcacaaccagccccgatccttgtgggtatgccacccgcacccaagagccctgcccttgcagccactcctgaacag

SEQ ID NO: 58717 - DNA, 122 bp, Homo sapiens
gcgagtctaatccgggagcggctgctgccagcggaggcgacagcagcgttgggagctcctcgatgtcagctttttgtgctggacttggcacacgctctgaaaactgagattttgtcattgaa

SEQ ID NO: 58718 - DNA, 122 bp, Homo sapiens
aactgcacacccgtcccgagaggacaaatccggaagcctcaaggcaattcgagggtccttcgccgcatggaacgcggctccccacacacttgcctgccaagtctctcctttaccgcccgcaa

SEQ ID NO: 58719 - DNA, 122 bp, Homo sapiens
atgaggcctgcagacctgcaggatgggcattgcctaattgctagtagaaatgcagtttgtcgggccccaccccaaagctgcagaatcagaactgccagaggatttctgtccactttgaaagt

SEQ ID NO: 58720 - DNA, 122 bp, Homo sapiens
gccatggttttgggtgggccagagtgctcatcctttgtggttctccttgcacaagttctgcgagccgtgtgtgggaggcccctgtcgtggtctgaggacgtcccgggttagaatctgtaggc

SEQ ID NO: 58721 - DNA, 122 bp, Homo sapiens
ccggagttgagaccttgcttcattttccttggttgttgctgctgtcacgtcttcccgccacgcccactttcctgccggcgcccagtgagcgttgagggagagtgatttgcagccggtcaggg

SEQ ID NO: 58722 - DNA, 122 bp, Homo sapiens
tgacgacggtgtctgagatcggggaccgtcttttgaagagtcagtccctccttagttgcccgcctcagctgaggccgccgccattttcttgctgtccgccgtctgcagagcgcgccaagctg

SEQ ID NO: 58723 - DNA, 122 bp, Homo sapiens
gagagcgcctcgcactccacactgcccagcctcacatgttctcaacgtcttcactctttccgagtctaacgggccccagttacgtccctgttattgctgtttgcagttccctatttaactgc

SEQ ID NO: 58724 - DNA, 122 bp, Homo sapiens
cgcggggccggcccagcccagcagagctgtctgcctggtgtgaaaatgaagattgatcatcgtggaaaggcagccccggctctccagagccagccgggagttgcagaaatacagagcttcat

SEQ ID NO: 58725 - DNA, 122 bp, Homo sapiens
aacaaacataaaaaagcagcgtctgaaagtcccacttgcacgccatgttcacagcagcaccgttcacaatgaccaaaatgcggaagcacctgctgtgccgatggatgagtgagtcaaggaaa

SEQ ID NO: 58726 - DNA, 122 bp, Homo sapiens
atgaggtctcatatgttgcccaggctgggcaatttgttgattagcagaaggaagcagaagcggtacctctgcggggatccctatacatagtgatgattattcttgttcagctctgtttcttt

SEQ ID NO: 58727 - DNA, 122 bp, Homo sapiens
gaacatgagcgcgtggggtgctttttctaaagacgcagaaacgacgtcgccgtaaagcagcgtggcgtgttgcacatttaactgtgtgatgtcccgttagtgagaccgagccatcgatgccc

SEQ ID NO: 58728 - DNA, 122 bp, Homo sapiens
aagagtggaaatcggcatctgatggggcaaaaaaccccactttctattttgctaccatatcgcttaccccttacttgtctttcatttgcagtatattatagcccattagcacctctgctaga

SEQ ID NO: 58729 - DNA, 122 bp, Homo sapiens
actgttgcggtcttgccagtgcaccttaatatagcagtttctccttgtctgaactagtcccggggttctttgtcctacctccaagaaaactaaggagcgtggacacaagggtggggttggag

SEQ ID NO: 58730 - DNA, 122 bp, Homo sapiens
tgcaggttcacccacagccgggcaaggggaggagacaggggccccgcgctcggcagcccccgagaggcagcggcgaagacagggtcagcagtagttcctgttcaccatcctccggggtcagt

SEQ ID NO: 58731 - DNA, 122 bp, Homo sapiens
cttcaggaagccaaccttgaccagaaagctgctgtcgctgtcctgggtggccatgaccaccgagtcatgaagcctctcatcaaagcagacgtggctctgggagtattacaggtcgagaaaat

SEQ ID NO: 58732 - DNA, 122 bp, Homo sapiens
catacagacacacacatataaacattgatcaacactgaaatgtttaatagtcattattttcgggtcgtaaaattcactgttcttcaatgaatacttgtagagcacatattatatgcagtagt

SEQ ID NO: 58733 - DNA, 122 bp, Homo sapiens
agaaggggggctcccgagccccgcccccggccgccccgaaccgccccgcccgtctcgaatcgcccagcccacaaagtgagccccgcccccgccacccaatttgggagcttcgaatgcccgcc

SEQ ID NO: 58734 - DNA, 122 bp, Homo sapiens
acgtccgaggcgacctctgacgctccggacacttcaccacccaccccagacccggcctcccggacgaaccccgacctcatcttgacaagccctgactttgctttgtccacccctgactccag

SEQ ID NO: 58735 - DNA, 122 bp, Homo sapiens
tactcctcgaaagaggaagtgtgcgtaagatctgaaaatcctaaaggataacaggcgcttcggaaacgttattctggttctctgtgtaggaatggcatgggatggcttctgttccctgattt

SEQ ID NO: 58736 - DNA, 122 bp, Homo sapiens
cgcccctcccctcgcctgcgcctctttttttaaaaaaagcgtgggcgtgccttgcgcaggcgcagtactgcgcgagccttagccgcgcaggctcagcgaagggaggctggcggatctgctac

SEQ ID NO: 58737 - DNA, 122 bp, Homo sapiens
tttaagtaatttctttggagtatcttcttgctactgtgttctctgtttctgtcagtgtaacggggaaattgaaagttggctagatatcattttaagctactattcattttcatttccccatt

SEQ ID NO: 58738 - DNA, 122 bp, Homo sapiens
cccagcttccggccctttgctccagggcaggtcgcagggccagacggtgccaggagctcgcgagtcctctgtttactgtttggtttccacggtgacacgtaggcgccgtcagcgactcccgt

SEQ ID NO: 58739 - DNA, 122 bp, Homo sapiens
acgcaattttctaacactctctcaggagaggagagcgtgctggtgacagatataacatcgcgtgaggcatcacaagagttagtaagaaccaggtcactgcccactgcctgatttctatgaag

SEQ ID NO: 58740 - DNA, 122 bp, Homo sapiens
tgcaggaaattccaggccaacatcttcaacaagagcaagtgtcagaactgcttcaagccccgcgagtcgcatctgctcaacgacgaggacctgacgcaggtgagcgactggggccggcccgg

SEQ ID NO: 58741 - DNA, 122 bp, Homo sapiens
tctaggtcgtgtgacccgtctggtgtagtcctggaacaagggttttgctgcggagggaaacggccagagacctcgatctaagaccggggtttggagactggcgggcctcggaacagcagagc

SEQ ID NO: 58742 - DNA, 122 bp, Homo sapiens
atgatatagtaatgtgcttgctttccccattggacagtgagtttctcaaaggccagggcccgaactttccttaaggctgtgcacatagcatgtggcacgagataggctgtccaaaaatattt

SEQ ID NO: 58743 - DNA, 122 bp, Homo sapiens
gcagaacaaactaggagtggagactcttctcctccggcggccccaactccctccgcactccgaaactttcctcccggtgctggactctggcactgcgctgacaggccgtcccctttagggga

SEQ ID NO: 58744 - DNA, 122 bp, Homo sapiens
ctaaaatagagatcaacaagcaatgattctgtgtcgtgcacgcacgcagaaacgcgatgacgtcagggttgcttggtaacagaagggcagaaagccacttgtggattgaaaaagcaaaaggg

SEQ ID NO: 58745 - DNA, 122 bp, Homo sapiens
ttcctattacaggcatggcccccctgctctgaagagccagaaccctcagcctcctgggtgcggccctgcctaaagcagggacgttgacagacgcagttcgcaggagccagctaagcctgagg

SEQ ID NO: 58746 - DNA, 122 bp, Homo sapiens
ccccaggtctgggtcccggcagggctggaaggagcctgagagggatgtgcgcagcacctccgagagtcccgctttagagaaacacgaatcagatcatgagaaagcagacctctgagaagtca

SEQ ID NO: 58747 - DNA, 122 bp, Homo sapiens
ctgggcctctgagactcaggccagtttatacctgtggaagtgtcacgtgccttcacggaccgtggaggtgccacgtgccttcggggaccgtggaggtgccacgtgtcttcatggaccgtggg

SEQ ID NO: 58748 - DNA, 122 bp, Homo sapiens
tccacagccaggggttaggtctgcaggcccgtctgcggtccccatcgagcatcaaggggacgctgtgtgtgctgcaagtgaccccgaaaacaaccacagccgtcacatggtcctcctgaagt

SEQ ID NO: 58749 - DNA, 122 bp, Homo sapiens
gcagccccaagaggacaaagttggcagctttctccttaaaggtctagaaggttgtgttcccggcaactgtctgctccatctctgtgtcagaggtgatgcctgcgagcgccttaggtgggatt

SEQ ID NO: 58750 - DNA, 122 bp, Homo sapiens
tcagaagctggaagaagccaggaaagatcacccgctggagccttgtccggagtgaggccacgcccatgccttgatttcggattttcagcctggtgaatctgggagacaatacgtttctctct

SEQ ID NO: 58751 - DNA, 122 bp, Homo sapiens
gtttgggcaaggtttgctcctcctcattatgctgacttttgtttattcctgtttctttctcgtttccttgatgatccaggtccctcaaccagtggagagtcccaggggtgagaggaaggcct

SEQ ID NO: 58752 - DNA, 122 bp, Homo sapiens
agtttcaggggtatcctggggtgatgaaatccttcttcagtcccccctcccccgaggagtcggttgggttggggagggagggtttcagctcctgtactccagcgttccgaggcccacgtctt

SEQ ID NO: 58753 - DNA, 122 bp, Homo sapiens
agcagactgacagatgcggagtaaagagtttaggcaaaatacctctcgcactcagctctccgccatcatcttgctccccagaaacatgggactttctccggaaatttcaatagaggagccag

SEQ ID NO: 58754 - DNA, 122 bp, Homo sapiens
ctggcagagtcagagccctgaggccagggagaccacatattccaactttcacagtgggtgcgacaggtgaggtgggaggaaggtgggagggaggtggggttcagccctgaaacccccctaca

SEQ ID NO: 58755 - DNA, 122 bp, Homo sapiens
cccggccaagtctccaacttgctcgaggtcactgaacttgcaattgaagaagctacgattcgaacccatgtctgtaggatcccagagccctcattgtcaaatacatactgaagtttcccagt

SEQ ID NO: 58756 - DNA, 122 bp, Homo sapiens
aggtgtctttcagtaggtttatggataaactgtggtacatcctgaaagtgaaatattattcggtgcaaaaagaaatgagctattaaggccgtgaagagacatgggagaaaacttaaatacat

SEQ ID NO: 58757 - DNA, 122 bp, Homo sapiens
agcagccccaccctctctcacccagcactgagaggtaggcgccccggacaacagaggggacgctgctgctgcgcaggacagcctcacactcgtagtagccggcgtcactgccggtggggttg

SEQ ID NO: 58758 - DNA, 122 bp, Homo sapiens
tttcttcttcttttttaaattttctttccacactagagattcacatcacaatttagtgttcgcatttcctcgagactcttactgaattaatatgtctctggctagacattacagatttttgt

SEQ ID NO: 58759 - DNA, 122 bp, Homo sapiens
gagtaggggcgtggagttgtgagcggggtctggcctcggccgggggcgaaggtagatcggcggggccgcgagcggagggagggaggcccgcggcggcgcggcggcagcgaaggccagcttcc

SEQ ID NO: 58760 - DNA, 122 bp, Homo sapiens
ccactcacctccagctgctgccggggcttctggacctgaggtcgcaagcgccgtttttggcgcctgagtctggcagagttcaagccccggcccatggcagcacacacctgctgtgtcccagg

SEQ ID NO: 58761 - DNA, 122 bp, Homo sapiens
ggtccctgcctggttctccaaagacaaggttgccctttcctgcagtgggacccagtgaggcgatgcttgggtgttggagacatgggtgaggccaggccaggtctctgggctcctgcacccaa

SEQ ID NO: 58762 - DNA, 122 bp, Homo sapiens
tactgacccgcagccattggctaattcgcttgatctggatcaggtattggtcagccggggcgccggtcaggaagagtccccaccctctcatgtaggtgagaggcggctgaagagttgctgta

SEQ ID NO: 58763 - DNA, 122 bp, Homo sapiens
ccttttctgtttctactttgcaggtcattacacctactctgagaatcgtgtggaaaaagacggcctgattcttacaagccgggggcctgggaccagcttcgagtttgcgcttgcaattgttg

SEQ ID NO: 58764 - DNA, 122 bp, Homo sapiens
tttgagtccctgaggtcaggccagagcagcctcgtgcccccactacctgagaagtgcccccggcctcccaggggtgctgtgctgggcaaccactcatccctggagcccctcgtatgccctcg

SEQ ID NO: 58765 - DNA, 122 bp, Homo sapiens
tttgtcactgcagtctcacttggtactttaagaaactccatcttgatcctaggtctgggtcgatctgggcgttcctgctaattttctgttttaaaaacctaaagcaataaaaatgttgatat

SEQ ID NO: 58766 - DNA, 122 bp, Homo sapiens
gcattagacgtgtaatagatattaccaaatagatgagctgctgaagaatgttctatttcccgtagaaagaagacgtgaggaggaaacacatccgtctgcacatggaaggggcgctgactgcc

SEQ ID NO: 58767 - DNA, 122 bp, Homo sapiens
ggttgtgaaagcactttgaaggtaaaagtgtctgttgttactctgaaaactccttttaaacggctataatagcatatgccacatgagcaaagcacagaaccttataactatgcttgcttgtg

SEQ ID NO: 58768 - DNA, 122 bp, Homo sapiens
ggcgcccgagacacagccagcgggtgttcagaaaggaaaacgctcgctcaacagccttttcggttgattcttacattcaaggtgtgttactatttgtggcaagcatcttttcatttaaatct

SEQ ID NO: 58769 - DNA, 122 bp, Homo sapiens
gaagcgcgaagggaaatcgcgttgagcagctggggtgggtgcgcctgggggcgtggcctgcgggccggcgggcgggcgggagcctgcggtggaggcgtggcacgagggaggggcgaaaccgg

SEQ ID NO: 58770 - DNA, 122 bp, Homo sapiens
attcgagggtaaaagcacccagtttctgttacatgagacagcagttgccatttttcacggcgggccagctgctgctgtggtgacactcgtccttccgttactcctcattggttgagttttct

SEQ ID NO: 58771 - DNA, 122 bp, Homo sapiens
gtgtgaatgtcaggggcttcaggtttccctaaatataggtccctgccagaggatccgtggcgggaaaagggcaggggtcattagagaagatcggggacacatgtggggcgggcaggagctgc

SEQ ID NO: 58772 - DNA, 122 bp, Homo sapiens
ctcaggtgatctgcctgcttcagcctcccaaagtgctgggattacaggcgtgagccactgcgcccagccagggtgagtcttgttcttgtccttgagtgccacttggctaggctgttgctgct

SEQ ID NO: 58773 - DNA, 122 bp, Homo sapiens
agaaagcccaggctcagggtggtcttctacaccaccgcctctcccgggtccacttggaagcgagtcccagcgaactactcgacctaggaaaccactgggccgccacttccagcctcttcgga

SEQ ID NO: 58774 - DNA, 122 bp, Homo sapiens
gtttgtgcattgggtctgcatgaggttctatgtgcacatgtgcatgtatacctatctccacgtctgcgtggtacccttgtgtgtaccagcatccatatctgtgtgtacctgtgtgtgtcacg

SEQ ID NO: 58775 - DNA, 122 bp, Homo sapiens
atctgctcctggggccgcctgcccggtagcggagattgaatcgcatgttgacgtctattacgatgattaatgttcttgtcattcccgtcactagcaggtgagaggctgggaggcctcaggtg

SEQ ID NO: 58776 - DNA, 122 bp, Homo sapiens
gcagccccgggtgaccggcgtcgtcctcttccggcagcttgcgccccgcgccaagctcgacgccttcttcgccctggagggcttcccgaccgagccgaacagctccagccgcgccatccacg

SEQ ID NO: 58777 - DNA, 122 bp, Homo sapiens
ctttggtagcaaaaattgagttgaaatgatacagttcctgaaatctatgatttcatgtttcggagatatgtatcaggaataatagtgtgggttctcatgagaaaatctggattgcattactg

SEQ ID NO: 58778 - DNA, 122 bp, Homo sapiens
ccttctagaaaggcagatcgtgagcggcacttccagcccatctgatgaaggctgtggcggcgatggccctcggtcagagaagccacagaaggcaggagggagaactgacatagccacctgcg

SEQ ID NO: 58779 - DNA, 122 bp, Homo sapiens
tctcagcctcagccccagctgatccagtgccgccctcaccaggagaccctggacctccctcgcacactcacttgtccaggacgaagtagagatcaaaggctcttctgcaggagggctgctcc

SEQ ID NO: 58780 - DNA, 122 bp, Homo sapiens
tgcccagaatgattgacaggagagacaacaagttcctggcctgcgtttcaccccagtggccgatgcatctgaaatgcctgcagttctcagctcttgaacagaactgaggagtcttgaaagag

SEQ ID NO: 58781 - DNA, 122 bp, Homo sapiens
ggcgctgcaaggggtgcggcagagtcccccgcaggtcgcgacggctgcgggagccggccacgagagtggtgaaggagctgtatttgtacaggtcaaagagcgtctgctctgtgatgcggtcc

SEQ ID NO: 58782 - DNA, 122 bp, Homo sapiens
cgctggcacgcagggggctccgcaggcacgcagggggttccgcaggcacgcagggggctccgctggcacgcagggggctctgctggcacagccaccagagattgtctttttcatgttcccag

SEQ ID NO: 58783 - DNA, 122 bp, Homo sapiens
atccccacctgctcgatccagggcgtctcaccccaatctgcccagtacatgtacctgtgacgggggcagggcaagaggagaagcagctaacacagatctgtttttttgtttttgtccacaca

SEQ ID NO: 58784 - DNA, 122 bp, Homo sapiens
aaacagccccgggggccaccgtgcaggggctgtgcttccctgcggtgagcccacagaggccgggaccacaccggcaggagctgcacccgcctgggaaaaggggaacaggaaaagcatggccg

SEQ ID NO: 58785 - DNA, 122 bp, Homo sapiens
gaggatctcacagatagcaaatctaatagtgtccagtccacacttccctacaaatacatgcggtcataattttttttaccctcttaatctgctgtggctccattagtaagcccctaaaaatg

SEQ ID NO: 58786 - DNA, 122 bp, Homo sapiens
ggtcagtggtgagaaggcagagatcagaggctgttggggtgggtcatacaccatgattcccggcccccctctgggagatacaaggtatcccacagtcttctctcccagttacatcctccacg

SEQ ID NO: 58787 - DNA, 122 bp, Homo sapiens
tctaggaaccgggaatccagtctgaagcaggggcagcgaggggcaaggttgggccagttacggattcacgctgctccccgggcctggggggtccactgagggaataaagtgcacgggccacc

SEQ ID NO: 58788 - DNA, 122 bp, Homo sapiens
taagagagcaggaggagggacctgcgtcctggtccgggactggggtggccggggcagctgcgctcctagcaggcggggcgtggagtctggaggagcgaccgccccgtcctctcggctccccg

SEQ ID NO: 58789 - DNA, 122 bp, Homo sapiens
gaatgaaaatcacattcaagccaatacacgtgattaaactactgttgtatcattgggctgcgacggttacaagtccacaaactgtttaactggacatatgtgaggtggtaaatccctccatt

SEQ ID NO: 58790 - DNA, 122 bp, Homo sapiens
ggcagccccgcttccctacccatagcgccccccgggagatagtccgggacgcagggcccccgaggctgcgggtccaagtctttcagccaacccgggattagcgagccagccgcttcaaaagt

SEQ ID NO: 58791 - DNA, 122 bp, Homo sapiens
ttgagtgctttatgtccataggatgttactcgacatcagttgtcaaacgttacatagcaacggtacccctgtctaaataatgcttatctttcaccagtccatcaatgagcaaattaaaatgt

SEQ ID NO: 58792 - DNA, 122 bp, Homo sapiens
acacactctcacacacacgtgtaccgtgcatgtgtgggcgcctatggatctgtgtatgcgcgcgtttgtgatttaaagtgacaggaccaagaactggctgaagcagagaattgttttgcgtg

SEQ ID NO: 58793 - DNA, 122 bp, Homo sapiens
gccggggtgtgggtgacgtctgaccgggcgctgtggggagcaggcggagtgtgcgggggccggggtgtgggtgacgtctgaccgggtgctgcggggagcaggtggagtgtgcgggggccggg

SEQ ID NO: 58794 - DNA, 122 bp, Homo sapiens
aagaatccccccaaaaacagaatcactggatcaaaaccaagacagtgctatatgcttttccgctatgttccaaaaagcatcttccacccacactggtcctcaactttcactgtgcctcccga

SEQ ID NO: 58795 - DNA, 122 bp, Homo sapiens
taatttttgcctaaagtcctagacagagccttggcctctaaggatggggatcatccgtgtcgccagctcatctgggctcggtagcttttggagctggctgtcttggggcatgcgggttgggt

SEQ ID NO: 58796 - DNA, 122 bp, Homo sapiens
aatcgcctgaaatgtaataatattcattaaagcgcctcctaattatgtgatttaatcaagcgtggtgcgcccgcgctctcggctctcgctggaaaggctggcgatgacggttattattactg

SEQ ID NO: 58797 - DNA, 122 bp, Homo sapiens
gcgtcatccaggacatagcggtggggctggcgcagcccctccagggtctgctccatggtccggctgtcgatgttgacccagtgggcagctccgggggccaggaactgcctaggggtggggac

SEQ ID NO: 58798 - DNA, 122 bp, Homo sapiens
cccgggacccccgactctgggaacgggaattcaggcaaggcagccactccaacacagatacgtttattggcaaaacctattcccaggcatcaaggggaagggtgctagcagagtgaataatt

SEQ ID NO: 58799 - DNA, 122 bp, Homo sapiens
ggccgggaatgcgctccggccgggcagcggcttcgctcggtagctgccgtatctccgggccgtgcccagtgcttagttttctgtgaatgaatcaatgttgagcggaaacttccgtcaggctt

SEQ ID NO: 58800 - DNA, 122 bp, Homo sapiens
tggtgggaggaggggagggggtgggtaaggcctgccctgggtggagctgccttccagatgcggccgccactcctgggtaggacacagcaactctctgaaatgtcctttcaaatttaaaatac

SEQ ID NO: 58801 - DNA, 122 bp, Homo sapiens
cggaggcgcgcgcgcacacgtcggggggttggccaggaggggccattgtgtgtttctaggcggcgcccccgctgcctaggcaaccgcgcaggaaggtgtccggccacctgcgcgcgccgccg

SEQ ID NO: 58802 - DNA, 122 bp, Homo sapiens
gaaggcggtccgtgggcagccgcggggcactctgggactgggctctgggcggcttttttgcgagtggcgggccgactgtgtagtccgctccggcagcgcgctctgcccggcttcctcagtct

SEQ ID NO: 58803 - DNA, 122 bp, Homo sapiens
taaaatgagtcagctctacaacttaaacggaatccttaagaacagtaaaggattctgacgcgaatatccctcccccgcccagaaaaccaccttcgtccctgcccctcgtggccgatggcttc

SEQ ID NO: 58804 - DNA, 122 bp, Homo sapiens
ttagcaggaaacacagtcctgtcccgagcacagggggcccttcttgtattcccttgggaacgagaaacaggaatggcctctgttacaaggaacagaaataactctctggttcttaagctgct

SEQ ID NO: 58805 - DNA, 122 bp, Homo sapiens
tgttcactccaagacctgaatttatattataacaacattccttcattagtggaagtgtcccgtctacaaccgttacccttcctcaaagaactggatttgagacttaatcctgttgtaaggaa

SEQ ID NO: 58806 - DNA, 122 bp, Homo sapiens
gattctcgcctttgtcggcccctggagcccagcgccgctgccccagtcccggaaaggccgcgtcctctgcctggtcctaggatcctgcagaccccacccttgccttaaggtgctgtcgcccc

SEQ ID NO: 58807 - DNA, 122 bp, Homo sapiens
agcgccggccccccttctctgcctgggaggaggtggttagagtcccctgggtgtgtgccccgcagagggagctctggcctcagtgcccagtgtgcagaccaatgagagccccagagagaaag

SEQ ID NO: 58808 - DNA, 122 bp, Homo sapiens
atgcaaataacttgttttttcactctccagaggacactctgtgggggaaatacctgaagccgtggtgctttctcttctcgtggtgtgttcatctcctctgccagattgttagctcctttgag

SEQ ID NO: 58809 - DNA, 122 bp, Homo sapiens
aaggctgctggctggtgtgcattcctgtggaagaggcagcgtcctgcacgcctagcacagcgctcagggctcagcagacgcatctcatcaaatcctttttgaatgaatggttgaatgaacca

SEQ ID NO: 58810 - DNA, 122 bp, Homo sapiens
ccgccaaccccactgtgtccaacgtgttctccacagccgccttccgcttcggccatgccacgatccacccgctggtgaggaggctggacgccagcttccaggagcaccccgacctgcccggg

SEQ ID NO: 58811 - DNA, 122 bp, Homo sapiens
caagatatagaaaggccgtgacagctgccagccctgcacatgctcttgtttcaacagcggcgattgcacatcacgtagtccccacgtgacctgtcgggcctagggcaagcgcaaagctttcg

SEQ ID NO: 58812 - DNA, 122 bp, Homo sapiens
tccttcatgggattcttctctttttatagctggacgccctatagggctcttggcagtccacgaaagacctggagtccgcctccccatttctccggtcggtgagtggcaggaggaaatcgcca

SEQ ID NO: 58813 - DNA, 122 bp, Homo sapiens
agaatcgtacctgattgggacaggtgaccttaccaggaaaacggacaatcttccgccaaacgaactttaccccggaggacccaggcagggcacctcgggagccttcgtcccgaccggggacc

SEQ ID NO: 58814 - DNA, 122 bp, Homo sapiens
tcctacccgccaaggggaggtggggcagggctggccttctgtgctagtcacttcctcttccggtttcatatgaactctcccgccacccgggaacagtggctgccaccgtttgtgttttcccg

SEQ ID NO: 58815 - DNA, 122 bp, Homo sapiens
ctttaaatctgttacaaaaaccgtgcaatactttggtccggggttggagcggccgagggtcggtacagccttttaggagcgcagccccggggtcggcggcaccgcgtcagaggagagcggaa

SEQ ID NO: 58816 - DNA, 122 bp, Homo sapiens
accggctgtgtggtctctaaggtggatgcactccggttgcccgagctctgcacacgatgccgagtctccacgcctgccgccgtctaagtgactgacagcccggagcatcccggacatgccac

SEQ ID NO: 58817 - DNA, 122 bp, Homo sapiens
atctatagacagaggtcgcaacaatcctatgattcacatggtgaacaagatatctaccagcgaacattatttaggcaaaatattggaaggttcatgtcttcagataaagtgactgcctggat

SEQ ID NO: 58818 - DNA, 122 bp, Homo sapiens
ggccagctggtcaaccaggcaccttgctctcctccgttccctgagctcaggtggcataggcgttgccgtgagctgcggagaaatctccacgcagagtcgcctgttgataaccctccagttaa

SEQ ID NO: 58819 - DNA, 122 bp, Homo sapiens
cggggtcagaagctgaggactcagatgttgaattttagggcactcacacggtagtcgatccgctctcctctggaagacggtcgcccttcggggacctgaaaattcttttctcaggtggcacc

SEQ ID NO: 58820 - DNA, 122 bp, Homo sapiens
gcagtctcgtcccaagacaaggcctctctgtgaatccgctgctgaagtgacagctggtcacgacctcccctggatttttaaacaattcctgtcagcagctctcccctgagacagacagcagc

SEQ ID NO: 58821 - DNA, 122 bp, Homo sapiens
taggccctgtgggatcaagtgtctccgaggcggcgggctgagacggatgggcctcctggccgcacacctgagaacatgctggcaaaagcgtttgcttaattaattgactttgagcgagggag

SEQ ID NO: 58822 - DNA, 122 bp, Homo sapiens
caaaacccacaagaaaccagcactaatagatggcaggtcattttgagggatttttctttgcgttcctgtgcttgctctcctggtgagataggaaacctttaataagacttttcctaaatgat

SEQ ID NO: 58823 - DNA, 122 bp, Homo sapiens
aaccactttaaataacaaatgtgttcctaggatagcaagatttgactggaccctgactgacgagattactatacctaaagaaagaacgcattcgtgagaaggagagttctgctcagttatga

SEQ ID NO: 58824 - DNA, 122 bp, Homo sapiens
agagaagagaggagaaacagagaaggagagagaaagggagagacagaaggagagaatgaacggtggcaagctagaaatctagaaggaaagcaatacaaggagagggagaaagacagaaagca

SEQ ID NO: 58825 - DNA, 122 bp, Homo sapiens
cggcctcgggttagcgcagcagtgcgcacccagccctgcgcagggcatgagcgttagaggcgcacaggatcccagaagacccctaacctttactgttaagatcctagctctaccggtttctg

SEQ ID NO: 58826 - DNA, 122 bp, Homo sapiens
cagggttttgggggtgcctggcgtagtgaggcctggggtagtgagggcgctggggacacccggcgtggtgaagaggctgggggagcccagcgtggagagggctctgggggcgcccggcgtgg

SEQ ID NO: 58827 - DNA, 122 bp, Homo sapiens
gaaagggctttattcagctggaagcatcagcagactcacgtttccaaaaaccgagctccccgagtgagcaattcctgtcccttttaagggcttacaactctaacggggtccgcgtgagaggg

SEQ ID NO: 58828 - DNA, 122 bp, Homo sapiens
attgaggaaactcctcccttttaatatcaatgtgtatttattgcaaaaataatgtagcatcgagtggtattttatagcttatccaaaaacctcctgggtttaacgcattgtgatagtcccgt

SEQ ID NO: 58829 - DNA, 122 bp, Homo sapiens
tgtatttgctattgttttgaaagtgctgacaaagtttatatttgtaacatcagccttcctcgcccatctctttccatctgtctcttcttcattaaacacttactgagtatgatttctgtgtc

SEQ ID NO: 58830 - DNA, 122 bp, Homo sapiens
gctctccctcttacgtaaaccaccaggaagaagaagaggaaacacggatccacgtcacatcgaggagcctcctgattgggcgtaccttcccctgccaggtcccctgggacacacgccagccc

SEQ ID NO: 58831 - DNA, 122 bp, Homo sapiens
tgatcactttgtcagcatggtaagatggggcacccgggaagggagcagcccctctcagaacgaggcgtagtgatagacaccctttggatggtgatgggcttgtcttatctgctctccttctc

SEQ ID NO: 58832 - DNA, 122 bp, Homo sapiens
taatgagaggtaggattcaggcagcagggaccccatgggagtccattacacgaatgtaagcgatcatatttgtttagatattcacattttatttcagcaactgtcttagatagggctcccca

SEQ ID NO: 58833 - DNA, 122 bp, Homo sapiens
tgagtgagtcccgtaagtgcctaaggaatggagggtcttaggcagaggcgacagcaagagcgaaggaatcttctggtgtctgaagaatagcagggaaccagaggtgagtcagacctgtgtgc

SEQ ID NO: 58834 - DNA, 122 bp, Homo sapiens
acctctctcctcagctagttaaggcctggaaatggccacttgggggtttccctaagcacccgaaactcagtgagcccccaagtgacctcgtctcccagtccccaactcagagagacccaaaa

SEQ ID NO: 58835 - DNA, 122 bp, Homo sapiens
gttgagtgcacctttaaatgtgcattcggtggggggatgaggaacagtttttgctacagtcgataggagttagaaaagcctcctaaaggctgacattggaggctggataaggttgtttagtt

SEQ ID NO: 58836 - DNA, 122 bp, Homo sapiens
agctgtaggaagtcatggcgaggcggagcacggacggagcaaccctggtctcagaagctgcgattcgcgggaggagcggcgaggccctcacctggcgccttttatgcccgcggccggtggag

SEQ ID NO: 58837 - DNA, 122 bp, Homo sapiens
agcgctgccccctgctccacggctcccagtcccatcgaccacccaagggctgaggagtgccggcacactgcgcgggactggcaggcagctccacctgcagcccctgtgccggatccactggg

SEQ ID NO: 58838 - DNA, 122 bp, Homo sapiens
cactggctgttgtgttgtaggatttttttgttttctgtgggaatatgatctttctttagtcgacgtgctctggatctgagaactcctcagggctgtaaactgggcaatcaagactttctaac

SEQ ID NO: 58839 - DNA, 122 bp, Homo sapiens
cattagggacttgaagttcagagtattattaaatcatttccaacaaatatatataaacagcgtcttccgggcaggtcagggcttagctcaagtcactttcagttgctgtgcctcagggagga

SEQ ID NO: 58840 - DNA, 122 bp, Homo sapiens
ctctcccgcccacaaggacctcggtaatgtcgcccctaaaactgctgcggaacctgcagccggctgtgacgcagaattggcatcccagctcggcccctgcacacccgacgcccggaggggtg

SEQ ID NO: 58841 - DNA, 122 bp, Homo sapiens
acccatcctggcgctccactgcggagcgccgagctcgaatgactgactccccagagccttcgtggtacccatctcctgcatgagagctgagtctcaccctgtagggccggggggaaccgagc

SEQ ID NO: 58842 - DNA, 122 bp, Homo sapiens
gagtgttggtttacttctaaatatggaattgaaatgactttcagaatcacagcaaggtctcgattttcagcacctgattactgatttggtagcctagcacggtggctcatgcatgtaatccc

SEQ ID NO: 58843 - DNA, 122 bp, Homo sapiens
ggcttgtgtggtcagcgactgcgggacccggaggagtagcggggctcttaacaaccgccccgaaggtcacctattgaagtagaccccaacccagtgtcccgacactcttctgggacttatcc

SEQ ID NO: 58844 - DNA, 122 bp, Homo sapiens
ggctcgccgacgccctctgctgtccacggttgggagacctgaaagtcgcaagagcgtgcccgtgacaggaggctgtgcgcaagaagacgtttacagccgttttatttgtaatagccccaaac

SEQ ID NO: 58845 - DNA, 122 bp, Homo sapiens
ccaatgagaagatcacactatccccagaagggcctacagaacatggagcaaaaactacgtcggccaatgagaagatcacaccatccctagcaaagcctacagaacatggagaaaggaccaca

SEQ ID NO: 58846 - DNA, 122 bp, Homo sapiens
agtgtctgaacccaaatggaaaggacgagagcaagtgtgagccatccctccaagtgccaccgtgggtcatgggccagtatgctgttttgaattttattgtggcaggaacacttgccatcaga

SEQ ID NO: 58847 - DNA, 122 bp, Homo sapiens
ttgacctgtctctgtgtcccccgacctgccgagtcccagaagctgggttgaggactctcccgctgctgagctttcccactcacacgcacacgcacacctgcgcgagctctcccaggagggca

SEQ ID NO: 58848 - DNA, 122 bp, Homo sapiens
gtttgtgctgctttagtttatgagtcaaaaggatttccaacatttccaacttgaggctagcggggggcgggggatactgctcatttgccctctgcacactttcccattcaagaccattagcg

SEQ ID NO: 58849 - DNA, 122 bp, Homo sapiens
cgagatcctgggctcaagcaatcctctcggctctgcctcccaaagcactgggattacaggcgtaagccaccccacccagacaatggctgcagattttgagggctgcactggtcagaaacttg

SEQ ID NO: 58850 - DNA, 122 bp, Homo sapiens
tcatctcccgctggataacagtgttggcaggaacttccatccagcactggtgggaactcgcgtccgcagctgctcctggctgagcaagtcaggcgtccttggtactcataagcactcactga

SEQ ID NO: 58851 - DNA, 122 bp, Homo sapiens
tctggtgcacctggagcacggcgggctgcacggggtccccatcggagcgctccgcctcctcggatgttagcgcgtagctaccctcatagcgtaccttctgtgcctgttccagggccactgac

SEQ ID NO: 58852 - DNA, 122 bp, Homo sapiens
gtgttagttttcatttgaaaggtttttttttttttttaaggttttgtgtattgaacttaccggtcttgtattcctcctggactgggagtcatagttcccaaggctttcccgcctctgagggg

SEQ ID NO: 58853 - DNA, 122 bp, Homo sapiens
cctggagccgtgggaggaagaggaggatgccacggagccctgtggaggctgaagccgctgcgtagggagccccttgtccatcagggttctcgagagacgcagaaccaggggtgcatgcacgc

SEQ ID NO: 58854 - DNA, 122 bp, Homo sapiens
acaaaaaaccaatctgtggtcctgcatggaagaataatcttactcctgctcaaagcctgccgaagagatttactcggctcccattttggatatgctactgttggatatctttgcaccgcggt

SEQ ID NO: 58855 - DNA, 122 bp, Homo sapiens
caggaggtggagggaaagcgcagatctgctggcgcggggtctggggtctcaggtctcggccgcctggggagcgacctgcctggagaggcgggttgcgatggcagcgctgggctacagacccc

SEQ ID NO: 58856 - DNA, 122 bp, Homo sapiens
gcttattatcataatgcaaagtctatgtctcccccactagacccgtgagccatgtgagggcggggtggccactgacgccatttgaaatcaggggagtcctcattgaatcattgcttttactc

SEQ ID NO: 58857 - DNA, 122 bp, Homo sapiens
agctggaggagccgtgcacattgaaggcacatagcacgaagcatttctgctataaaaaagcgggatctatttgcaaacacttgtttgaagccatgattttgaatttatgacttaaaattcca

SEQ ID NO: 58858 - DNA, 122 bp, Homo sapiens
agttacagcaacaggctcctctcatcagacggcagtgctggtcgtttcctcactggtttgcggggaaggctgggcagaaaaaggatgcaaccttgttctcaaccacttgctatctcggtgag

SEQ ID NO: 58859 - DNA, 122 bp, Homo sapiens
agcccgggcttgggaaatagatccccggtcgccccagccgctcctggggagcacaggctccggctccagttcttctatcaggtccctaattgggtcaagctgctgcacggagaggcagagga

SEQ ID NO: 58860 - DNA, 122 bp, Homo sapiens
acaggcatgagccacctcacccggccctgtaccgttccatagaaagagcttgtgtatggccgggtatgttggctcatgcttgtaatcccagcacttcgggaggccaaggcagatggattact

SEQ ID NO: 58861 - DNA, 122 bp, Homo sapiens
gcaacgccttttctggcatacatcaaactgagcttctcctggtccctcataaaccgtctgcgcagtcgtagtaggtccgtccggccggccgcacctggagagggaaagcaggcccagttact

SEQ ID NO: 58862 - DNA, 122 bp, Homo sapiens
ctcccccagggcagaggctccacacctctcccccacccaaacaagaactttgcccatacccgccccaggaaaaagtgaggggttgcaggagaatgccataactgcagcccactcctgttccc

SEQ ID NO: 58863 - DNA, 122 bp, Homo sapiens
tcttccatgcccatcttgttattctcctaatatctccattgcttttcactgtatctaactcgataaacttcttgaagagcaaccagaagctttttcctattctatctgtgccttgacttagg

SEQ ID NO: 58864 - DNA, 122 bp, Homo sapiens
gctttgctgggggcctgtgggcagagaggcactggctttaacgccgcctggaattcagcccggcctgtgccccgaggaaggtgggtgggggatggtggggcggtgtcgactgcgccccctgc

SEQ ID NO: 58865 - DNA, 122 bp, Homo sapiens
gttaggggaccctgaagtctgcgaccgccccgccaacacctcagagtgtaacacagtgcccgttacacattcacactccatcacagataacacacagggcctcagggactgcaacacgtgca

SEQ ID NO: 58866 - DNA, 122 bp, Homo sapiens
aggcttgtcaccgggcccctcccccttggtctcaggcctcgcaggaggagatgtccactccggcaaagacccggcatggtcctcacctgctctttgagccaccctttggtacttaaagagag

SEQ ID NO: 58867 - DNA, 122 bp, Homo sapiens
gggcctggggtttccctgtctctcctggggccttgggtgcgagggaggctgggcgccactcgaggccccgcgtccggtctcccgcgccagcagggccggctctgcagtgaggcccctgcgca

SEQ ID NO: 58868 - DNA, 122 bp, Homo sapiens
agaatggctggaggggggctggtggttgccaggaggatcccctctcttttgctaaacctgcgggtaccgggctgccctgtaatcggcgggacttgagaacggcaggcctccgctcctcctcc

SEQ ID NO: 58869 - DNA, 122 bp, Homo sapiens
gtggtggtggttggcagatatcaggggccctgtgcctttcccatgttcaaatgtgttttccgttttggtttctaagacggcgactgccggtttccccaccgcatccacccccggtccggcca

SEQ ID NO: 58870 - DNA, 122 bp, Homo sapiens
ctggctttcgatccctaagtctgaaggcacagcccctcccagctaccatcagacagggagcggcggctaggacagctgtatcacttcaatgttacttcaaccaaaccaagagggacagcaac

SEQ ID NO: 58871 - DNA, 122 bp, Homo sapiens
cttgaagagaaaatttatgtacagcaagaccaagctttctctttttctcctggtcacagacgtataaaccctatttcagttgtgttagagcttgaagggtggttccaccctaagaaattggg

SEQ ID NO: 58872 - DNA, 122 bp, Homo sapiens
atgaagtctccaattcttggaaaaatcttcccttcttagttttcttttttctttttgaggcggagtctcgctctgtcgcccaggctggagtgcagtggcggatctcagctcactgccacctc

SEQ ID NO: 58873 - DNA, 122 bp, Homo sapiens
cttttgattcccaaataacagcctgggcccatctgtgtcggctctgttttctgaggagaccgctaactccagacagctgcgtgggctgcctgcccaacccaaatgcctggacctcccctctc

SEQ ID NO: 58874 - DNA, 122 bp, Homo sapiens
gtccccctgaccggctttttgtccgctgtaggggagggacagagtttgcagaggtggggccgacacgtgtgtgctctccaggcctgcagaccctggatcatcctcggagtttgctgcattct

SEQ ID NO: 58875 - DNA, 122 bp, Homo sapiens
aaagcagatgggttgctcaacaaactgcatatgcgcgtgcgcgtgagtgtgcagtgcaggcgggctcgcaaaagcacaggtcccacaccagacctaaaatggctgagttgccggatgttgtt

SEQ ID NO: 58876 - DNA, 122 bp, Homo sapiens
tgaaggcaaatcaaaaacacagtactcacagcacgcgaaagcgcagcgtctgtggagggccggctgcgggacctcagaacgcacagatgtgggtgtgcgcggacggtccagaaaccgatccc

SEQ ID NO: 58877 - DNA, 122 bp, Homo sapiens
gggtacaggcgaggagccaaggaccagactgtggaacactgtgggtactagcggacgggccgtgacccggatgaagcagaggggcgcctgagttcccgtcacctaagcgacagcctgcgagc

SEQ ID NO: 58878 - DNA, 122 bp, Homo sapiens
tggtacacacggccgtaccccagcctggccctcagtgaggtcctgaaccccaggctctaccgcatatgaggaagccgagagaccctaggggacattgtaccctgaaatcctgaatcagatcc

SEQ ID NO: 58879 - DNA, 122 bp, Homo sapiens
cgagggttcagctcagacagttgccagtggccttgcaccaggctgcagctgcccctgagccgggctgtgcgtggcgctgatgaaatagaaaagggcattcgcttgtcaacgttggcatcggt

SEQ ID NO: 58880 - DNA, 122 bp, Homo sapiens
agagtcacggcagtggtgggcatggggagggcctagcctggtacctccctgctcggctcccgcggctgggggtcggagaggggtggagagcgtgggccgcacagcctcggccgggagaggga

SEQ ID NO: 58881 - DNA, 122 bp, Homo sapiens
tgggggtgccctggcaggcggatgccgggcctcagcctctggctgtgtctgtagggccctcgcagcaggaccctcctttctggccaccctgcacatgggtgaccaagccctggagggcttcg

SEQ ID NO: 58882 - DNA, 122 bp, Homo sapiens
ggtagttggacacttccacatcagaaggcttggacattccggaagtgtagtccaggagggcggtactgttctgtttttcccccaactccagcattctgtgatatgtagtccggagttccgtg

SEQ ID NO: 58883 - DNA, 122 bp, Homo sapiens
ttctggagactttaggggactgggccgggggaaatgcggcctctaagctctccgctgaggcggcttggaaggaatagtgactgacgtggaggtgggggaggtggctggcccgggcgaggccc

SEQ ID NO: 58884 - DNA, 122 bp, Homo sapiens
ctgctctgagccatgtttgcaactgcggcctccgcggccctctgccctccacgcccctgccgcagcagtggcggtagcggtagccctcagagtccacttcactcgcctcagttcgccccgct

SEQ ID NO: 58885 - DNA, 122 bp, Homo sapiens
ccacgaaaccggtccctggtgccaaaaaggtcgggaccgattgccgctctacaacaaatgcgcatcacttcagagcaagaggtgataacaaaggaaaatgaaaagtggctgaggggtaggaa

SEQ ID NO: 58886 - DNA, 122 bp, Homo sapiens
cggtgcggcctggtccggggaggagaacatgcctgccgccggaccgcctttgctgctgctcggtacaccaggatctggaaaaacagcgctgctatttgctgcggccctagaggcggcggggg

SEQ ID NO: 58887 - DNA, 122 bp, Homo sapiens
ggccctgatggtggcaggtgggggagggagcaatggttttaagggttcggtgaacctcctcggccccttggtgccatagcaaccccttcagagacctggtcccgccccctcgccgccgccag

SEQ ID NO: 58888 - DNA, 122 bp, Homo sapiens
gtatgagtgtatcagcagatgcagggtaagaagcacattacactgttgtggtggagggcacgcagacattctgggaagccacttgccccacccctgggctgcttcttcttgagatcaggagg

SEQ ID NO: 58889 - DNA, 122 bp, Homo sapiens
acgagaaccaagcgaccgtgagctgcgatgcacacagtagtgagtgggtggcacggggcccgcgggcacgaacagccgaagagcggagaagactgggagcataaccgctgggcagcgggcag

SEQ ID NO: 58890 - DNA, 122 bp, Homo sapiens
agataagcgagagcggcaggaggaagaggcacacgaacacccagcgctggtggatgagcacgaactccagccccttcaggcgcacccacagcaggaagagcagcgcgcacacggccagcgac

SEQ ID NO: 58891 - DNA, 122 bp, Homo sapiens
cgccggcccaagttcgccgggggggcccggaggaagcttgggggacgcgacgggggaacgcggaaaccccggggatctgcaggcgcgcccgggccgtgtgccttctctccgcgtgtccaaac

SEQ ID NO: 58892 - DNA, 122 bp, Homo sapiens
gccttctagccagtctttccatggagacaactgaggagcctggagtgggcaaaggaccctcgggcttgcggtggccacgggcaccccagagggacggagggcgccataccgcggttgccatg

SEQ ID NO: 58893 - DNA, 122 bp, Homo sapiens
gtactctccaatgtgttatagttatccttaaagctcttcaattcaaggaagtgcttggcacgtttactcttctgactggaggggaggtatgtcacctggatggttgttggggagacctcagg

SEQ ID NO: 58894 - DNA, 122 bp, Homo sapiens
tacaaaccgttcttcaagacgctttcaaattgacccaagacatgacctcaacaccttatacggcgttcaaatctgcttaatgtccctttggaaaagttttctctcgtctctctctaaaagac

SEQ ID NO: 58895 - DNA, 122 bp, Homo sapiens
cctggggaggcctctaaagctgcagacacgatgtgtcgcgggaccatccagttctggccccgtgcaggaggacaggacgccgtctggtcgctgccctgggcgctcaacatgggagctgccag

SEQ ID NO: 58896 - DNA, 122 bp, Homo sapiens
ctggaggatgatctctgaggatctctgcaccgccaagcaccctccgggctgctgacgacacggtcagattccccagtgcgtgagcctatactacagcagtgtagactacagcagttaagagc

SEQ ID NO: 58897 - DNA, 122 bp, Homo sapiens
agtatcagtcccaaagttatcctcatgctttctttacattttcaggagctcattgccaaacgccatacccttcttgtatagaaaggaaagatactttgttggccaaattcccacttttaaaa

SEQ ID NO: 58898 - DNA, 122 bp, Homo sapiens
gcccaaactttccttccgagagcattccattgtgctgaatgcaaacacgccgaggtcctccgtccccccactagactccagagattacgaggaaactgcttgcgttattttcccccctgtat

SEQ ID NO: 58899 - DNA, 122 bp, Homo sapiens
tcaactaaaggcaggaagacgaggcagccgtccacagagcagagcaaaaacccgacgggacgcgggctcgcgtgcacgccagaggagctccagccaacaggggaagatgtgggggaaggagc

SEQ ID NO: 58900 - DNA, 122 bp, Homo sapiens
gagaacgtctcggatgtgggtcagaaaacgtctggactacttgaggcttcagtttcaaaacggcacaaatttcatctcttgattgagaagagatctggggaacaccccggagcggccgcggc

SEQ ID NO: 58901 - DNA, 122 bp, Homo sapiens
ggtgaaaacctctggaagagcggatgcttctgggaaggccccgtaagaagccgaggagtgcgcgggttctccacggctgccacggagactcccgtggaagtgtctgtgtgatgccgtaaagc

SEQ ID NO: 58902 - DNA, 122 bp, Homo sapiens
agtccgagggttctggttgaggtttatgtagtatcctggaagcagcttctgcagaaactccgcttctttatgtcggactgtcttaacaatgaactcatcgtcgctggacacatagaacaggg

SEQ ID NO: 58903 - DNA, 122 bp, Homo sapiens
atagctttttttctctcccaaaaccttattaaacactgaggacctgaagtaactgaagtgcgtctggaaaaaccattccactactttcttctatatgttccaggttaggccactgggagtaa

SEQ ID NO: 58904 - DNA, 122 bp, Homo sapiens
aggtggaggtgaaatgccgaggttctagactgatgtaaatttctccaactaactccagatcgagagcctacaaatccgacaaatatgcccacactttgacagtaaccgcctcccagcacgcc

SEQ ID NO: 58905 - DNA, 122 bp, Homo sapiens
ccacctctgcccgcgcgcctggccttaaagcggtcgtggaattatgcttcctcaggcaggcggtggacgcaccgcgggctttttctgtttgaagactacagcgtcacacagcaacgcgcgcg

SEQ ID NO: 58906 - DNA, 122 bp, Homo sapiens
gtatctccattgtaacgtggccgggcggtgtcaacacaaacgcccccaccctcccctggacgcgcgtaacccgctccccgcaccagccccctgcccacaactgcgcaggcccagcaagcccc

SEQ ID NO: 58907 - DNA, 122 bp, Homo sapiens
ggggtaagagcacagagtgatctaaagtcccctttgcataaagagctgacaattccaaaccgcagccctgaacaccccagtcaagtctaattaatagatgctgttggctttttagagctatt

SEQ ID NO: 58908 - DNA, 122 bp, Homo sapiens
tccgcggacagcgctgagggctccgcggcccagcgggggttgacgcagtgactgggggaacgcggcggcagcgggggccgcgagggctgcagagatcgagacaacgccggtccccgccctcc

SEQ ID NO: 58909 - DNA, 122 bp, Homo sapiens
atggcccgcagcaagggcacggaccgccggctctgagctgccagcatcaccagcaccttccgcagctcattggggccaaagtgctccaccaactccaggcactgtcaaccacagccgcgcag

SEQ ID NO: 58910 - DNA, 122 bp, Homo sapiens
ctgcctctgcaattcccctaacaccctgcaggtggttctcttgcctagccgaaggaaggccggcccgcagcgccctctaccggtgctaggccctcgttccggccgttccgtccgggcgcctg

SEQ ID NO: 58911 - DNA, 122 bp, Homo sapiens
aatcagtccacaacccagatagcaggctgagcgacgtcccattccctccttggctttaagcgcagtgctccgccctgggcctggggacgggagggggataaccggccggctccaagggggcc

SEQ ID NO: 58912 - DNA, 122 bp, Homo sapiens
tcaatctaacgaaaaagaaagcggtggggaggtgaagggatcccaaaaagccctcgtgtgcgggagcttcaccagggtggaagagggtgaggccagtttgtcacctttctctgataagaaag

SEQ ID NO: 58913 - DNA, 122 bp, Homo sapiens
gctgctgtcttgggaacggggcacatattaaagggcaggttccgaccccatctgctctctcgccttcctccttcccctctgccctctgccacctgacgacacagcaagagaccctccagatg

SEQ ID NO: 58914 - DNA, 122 bp, Homo sapiens
tttttctgcctttgcgctgcaaacgtgtctcacaaatgtgaacaaacagaattcctcgggcgtcgcccgttcgccgtcggcccagataccggactcgcgcgcgttagcccgcaagacaggac

SEQ ID NO: 58915 - DNA, 122 bp, Homo sapiens
ctgcggttctgagcgggagctgtgcacatctaggctgagggcctttctggtacagccttccgcggccgtcagtgctgcttctgccccagctcccatggcaggtaacgggctccccttggcgc

SEQ ID NO: 58916 - DNA, 122 bp, Homo sapiens
aataaaaacaaacacaccaaaaaaactcctactagctgaggtcaaaactgcacaggtggccgggcacggtgcctcacgcctgtaatcccagcactttgggaggccgaggtgggcagatcatg

SEQ ID NO: 58917 - DNA, 122 bp, Homo sapiens
gaccagcttagctgaaaagttaagggtttggatgatgaaaatgtccttgctaaaaagggtcgtataaatgaggcttcatggggcaaatttacactaagccagtctggttaagagcttaaagc

SEQ ID NO: 58918 - DNA, 122 bp, Homo sapiens
ttcacctcaaaaacctgtactgcagttttgtctctccttccgtacgatgacccaagatggcggagccgtgattgaaaacccagattcaagatggcgacttcctgcttccccgatagcgtcgc

SEQ ID NO: 58919 - DNA, 122 bp, Homo sapiens
ttcgcagttgccaggggttagagaaaggaggaggaatctgtgtgggataagggagaagcccgagaaaccaagttctctatctggattgtggttgtggtgacacaaagatacacacaaaataa

SEQ ID NO: 58920 - DNA, 122 bp, Homo sapiens
ggatgcaaatacaaaacagcgacgcgggaaatcgatttgtcacaaagggagaggtgtaaacgcagcgcaaaggaattgcttgcccaatctaccagccacactctctcgggaccttgccccgc

SEQ ID NO: 58921 - DNA, 122 bp, Homo sapiens
tttatacagtggagaaactgggatcaaattaacatcactaatgagagacaaacaatatcacgtgcctccaaatgtggtctcttggaaagaatataacctcatgtatgtaatattacaatcag

SEQ ID NO: 58922 - DNA, 122 bp, Homo sapiens
acagtctacagaaatgtatgctcacccaatctgcatgtaaccacacaggcttctgcagttcggagacaaaaatttaatataagaaacatacatttgtgcacatgattttttgcaggaaattc

SEQ ID NO: 58923 - DNA, 122 bp, Homo sapiens
taagggttgtggctctgctctctgtcctgagactttcagattgcactctgggttcctggacgcaaaaactcggagtggctgcgtgatgcagagtgaactgggtcctctggggacgcgtgggg

SEQ ID NO: 58924 - DNA, 122 bp, Homo sapiens
tcatgggccccagggtctgtccttcatgaccattgccccatggagacacccagggccgcccggagcccatgctcagccccgatgttgcattggggaagcagcccctatagagacagtgtcaa

SEQ ID NO: 58925 - DNA, 122 bp, Homo sapiens
ggagacaaaccattcgactcgtggcgtctgcatcaagtctgaaagcagacgcgcaactttcgcagaatccaccttaaaatctctgccttaaactgcaccagcccccaaaaaatccaaggggg

SEQ ID NO: 58926 - DNA, 122 bp, Homo sapiens
catggcggagcctgtgcaggaggagctctcggtcctggccgcgattttctgcaggccccacgagtgggaggtgctgagccgctcaggtgactacccgcgcgcgggagggacagggcgccctc

SEQ ID NO: 58927 - DNA, 122 bp, Homo sapiens
gaggtaggacatggtgggttctgggtctctttcctgtctgctgatcgtggtgagctggcacgcacactgagggtgtgagtcattgttgggtgaaaagttcagtcaatgaacattcgctgctt

SEQ ID NO: 58928 - DNA, 122 bp, Homo sapiens
gtcctccgcgaagtccctcaggctcagagcacagccgtgtaattgtctgcgtctctcccgcgctcaatcaggggcttgctttggaaccccggtgcctgctagtgttctgcatacagtgagca

SEQ ID NO: 58929 - DNA, 122 bp, Homo sapiens
gtcgccggggcccggcgtcgcgtcagggctggccggcggcggaggcggcggcggcggcggcgatggcagcggaccctgagcgagcttgagggctcggacccagctccctcccgcgaaacctt

SEQ ID NO: 58930 - DNA, 122 bp, Homo sapiens
gtaacaatctgtgccaattatcacccttgcttatctatgcctcttgttcacaatcattcacgagtgcattcatcttcaattaaactgtaaactccttgaagagagagatcacagcatgctga

SEQ ID NO: 58931 - DNA, 122 bp, Homo sapiens
ggcgtaactacaatgaatccccaaggttgcttctttctcctgcacaggggactgggaggacgctgcgccggcagaggagcgcggtacccgggactcccttttcagcaccccaaggggcggac

SEQ ID NO: 58932 - DNA, 122 bp, Homo sapiens
tgtgtctcctaaacagtggaaatctacaaaatgggaagccctgcgcagtctgggtttagacggcagtccaagaggaagagtctttcagtgtctttctaggagttgaggagaatccttggttc

SEQ ID NO: 58933 - DNA, 122 bp, Homo sapiens
gttcacctccttccggtctgaacagtgaactccgcatcgactcacgcgttcacctccttccggtctaaatggtaaactcctctgcattgtaagtcagtgtctagagtggtgatttgctttct

SEQ ID NO: 58934 - DNA, 122 bp, Homo sapiens
gggaaagtgagaagctcaaccttacccctgtgggctccaagaagggtagctctgggatcccgggcaggaaattggtgacaaggtgacaaggtgcgcgtgtcacagctgcccagttcacggct

SEQ ID NO: 58935 - DNA, 122 bp, Homo sapiens
gcccgggcatctgcgtctcggcgggctgcactcaggacgaagtgccaggccctgctgttccgggggcgtctggccatggtggaaagaatctagaagaaaacacaggctctgggcaaaggaag

SEQ ID NO: 58936 - DNA, 122 bp, Homo sapiens
cgctgaaacttcatcacacactgagaggccgtcacagccccagaccacccgcttggcccacgcagcagcagagccgccgtttgctgggttgtttaccgagcactgtgacctttctttccctg

SEQ ID NO: 58937 - DNA, 122 bp, Homo sapiens
ccccacccacgcggccactcgcaggagccccccacccacgcggccactcgcaggagcacgcggccactcgcaggagcccgcctcccacacggccactggcaggagcccccgcccacgcggcc

SEQ ID NO: 58938 - DNA, 122 bp, Homo sapiens
tttttcagaaaaaataaagctttaaaagtacatcatcatttaaatttgtctaaaatcaaccgctttcaaaactaccaactagaagtaacacctctctatgatttctttatgcagatttaatt

SEQ ID NO: 58939 - DNA, 122 bp, Homo sapiens
agcgcggcccagcactgctggggcagtttcccgtgcgccggccctcagggcaaagggtcccgccatcctggcttgtcctaccttaccatggctcttgggctaaagccagggacaatcagata

SEQ ID NO: 58940 - DNA, 122 bp, Homo sapiens
cagacagatgtgaaacgtgccaagcccagccctaaattgagctttctaaacaccgagtcgcggtcaggctttccagcactgtcctcaagcctgagtgcgtccggagtgcaaactacaagccc

SEQ ID NO: 58941 - DNA, 122 bp, Homo sapiens
agtgacctgcccgcctcggcctcccaaagtattgggattacaggcgtgagccaccgcgcccggccaatctctattttttgaagaaggtacactggtggcataaatatgacagcatactactg

SEQ ID NO: 58942 - DNA, 122 bp, Homo sapiens
agccccgccctgaaccctgggcagcgctgacactgagctgggctggtgcgagacctggggcggggccactgcacccagcaccctgccctgactgtaaagtcaggcggcctgctcctgttccg

SEQ ID NO: 58943 - DNA, 122 bp, Homo sapiens
aaaacgtgacccggaaattggtcacgagcaggcgccgtgggcttgtggacgcctaacttgcgcgctgagatttccggcgtgggagcagaggtctgagtcttgcgtgggtcctctatataggg

SEQ ID NO: 58944 - DNA, 122 bp, Homo sapiens
tggatttccagtgttcgaggaaagaaaccaccatcgtcaccacggcgcctgtcactccgacgctccactgaagtctcagaccagcgcacgctataagtgtgggtaaggcctaggaactcgtc

SEQ ID NO: 58945 - DNA, 122 bp, Homo sapiens
cactcccacagtgaacccctctaggtgcaattacaggatgattttgtgtctcgtgggtgtcgctgctagggtggagggccacgcctcctcttttgaattctgactttcctgcctaggagtgt

SEQ ID NO: 58946 - DNA, 122 bp, Homo sapiens
gtgagaagggccccccaaatcctgcacgcacgaccccccttccgaccacccagccgcgggcgaaagcccaagtgtgcagggcccggggcccccacgggggcccccagtctcgtggggcgtcg

SEQ ID NO: 58947 - DNA, 122 bp, Homo sapiens
tgaaactgcatctctgaaagttcattttcctgacaagcatctctcctcttcttcctactccgttcccagcccatgttcaggagaaaaggcaatcattgtaaaccaagagaaaattcacccaa

SEQ ID NO: 58948 - DNA, 122 bp, Homo sapiens
ccggcccctaaccggtccaacaggaacttggcgagctgcgagtgcagggagaagcccagccgctccttgaggaggcaccactgctccatgtggccgcccaggcggatgcggcacttgctgcg

SEQ ID NO: 58949 - DNA, 122 bp, Homo sapiens
gggcattatatacaaattcacaaacagaagactctggaaggtggagaaaggagggcagaccggctaggggcctgggcccccagctgacagcacagtgctgagctctctggttgttgtggttg

SEQ ID NO: 58950 - DNA, 122 bp, Homo sapiens
ccagtctgagcaggacacttcctggtcctccgaccaggctgcagccctgaggaacggtggcggcggcgaggacaaagtgtggacgctcctgtcagtcagacaagatgaggggaagcctcaaa

SEQ ID NO: 58951 - DNA, 122 bp, Homo sapiens
aatcacaactgctttctggctctgacatcagcagcagcaccagccgcaccgccgcctggccgcttgcaaactcagctcccgtttggacggtgaagctcccaggaccggcggctggagggagg

SEQ ID NO: 58952 - DNA, 122 bp, Homo sapiens
tactcctgggcgggtgaggagcgttgtgtagcgttttcatgctgccatgcaggaaggaggcgtccagggccagggcagacaggggcacgtcctgggagttggtactctctgcaccagaagca

SEQ ID NO: 58953 - DNA, 122 bp, Homo sapiens
acacagccacaaagtcagccctggacaagttattgatagtgtatgatagaactaaggtgacggttccctttgggacacactctaatcaccagtgaccaccagtcagaaaacaaatgggctca

SEQ ID NO: 58954 - DNA, 122 bp, Homo sapiens
gaagcagatcagtaataaaaatgctccggatgtgcaggagataagggcgagtttggaccccgttccgccgacctcagcccccgtccagcccgttccgcaagcccacctttactccccatatc

SEQ ID NO: 58955 - DNA, 122 bp, Homo sapiens
tcctgcaaaataagtactaaattcattatcgttaagcaaatgtacaatatgctcaggcaccgcagagagctgggcacgggcccatgtgagcatcactttggaagtagggctcttcaacaggg

SEQ ID NO: 58956 - DNA, 122 bp, Homo sapiens
ggtcagataagggaataaaagcagggtgccggcccttgcgccaagaacctgctcgggggtcgtatcccaagatgtggagcgtttgttctttggctgtttgctataaatctagttgttgctga

SEQ ID NO: 58957 - DNA, 122 bp, Homo sapiens
tatttagcttgcgaagcttgcacaaggaaaatccagagcgtctccagaataaggatcccacgagagaacgtggacacaagtaggccctcagccagccttgtacccacaggcccaacaggcca

SEQ ID NO: 58958 - DNA, 122 bp, Homo sapiens
tctcctgtctcccgtctcccgtctccctctccacatggtctccctctccctctctttccacggtctccgtctgatgcccagccgaagctgcactgtactgctgccatctcactgcatcctcc

SEQ ID NO: 58959 - DNA, 122 bp, Homo sapiens
gcgacccgcgaggccctccctacccgggcaggagacccccggcccctccgcgtgccggagcgggagcccccagccccgccacgtccaggccggtctccagcccagtcctctccctggaccgg

SEQ ID NO: 58960 - DNA, 122 bp, Homo sapiens
ctgaagagctgggacagtactagtgcccacctcacagggctgtcctaaggcccagcagcccgggccgcccctcctcccgcctcctgcccgcctccagccaacccaggcccgcacctgcgcag

SEQ ID NO: 58961 - DNA, 122 bp, Homo sapiens
tctcatttatgcagatctcctctttcagaccctgagagcaccatgaaaggaggtaacacccgtgtccccagaactgttaaatacctgacacagaaccagcccactgtatttgttacatgttt

SEQ ID NO: 58962 - DNA, 122 bp, Homo sapiens
tccgagctgctgcatgggagcctgtggcccccgctgctgcctccgctttcctcttcgtttcgtgtctaggaagatgcacctgagccccctgacattgcccaagtgcccaagggcccttctgg

SEQ ID NO: 58963 - DNA, 122 bp, Homo sapiens
gccaacttaggtgaactttgggaatccagccaacctgactttagggagagtatggagccacggatggcattgtgaatccggagggccgacaccagaagaacctgcaacgtggcatctgctac

SEQ ID NO: 58964 - DNA, 122 bp, Homo sapiens
aaaaaatttattctgctctgcaaatttactttggttacaagcaaaagtaagccaccacatcgacgaggatgggattcgaacccacgcgtgcagagcacaatggattagcagtccatcgcctt

SEQ ID NO: 58965 - DNA, 122 bp, Homo sapiens
aaaaaaaaaatcaagggaattggggttgccacaaccaaaatggccggtagaatatgtcgccggttcaatgacttggaaaacaaaaactttatatgtagaggtgaactttgcacaaccaggtg

SEQ ID NO: 58966 - DNA, 122 bp, Homo sapiens
tgctggaacccatgaggcgtgcttgcaggcttcgggcactacgcggggctggaaataccacgcactgccccttcgcctagacccccgctcgggccacgcgggttctgccctcaaagctggta

SEQ ID NO: 58967 - DNA, 122 bp, Homo sapiens
ccagggcagagttggggatgaggtggggctggccgagacgccagctcacctggcccccctcgtgtgcaggcccctatccagcagccccctggtgcgtgtcaaggaggagccccccagcccgc

SEQ ID NO: 58968 - DNA, 122 bp, Homo sapiens
caagtatttgtacaattgttatccacaagtggtagaacagtactttccaaacttggattgcgtaggggctcttgttcaaatgtacaccaattcaggaggcacagggtataccctaacaacac

SEQ ID NO: 58969 - DNA, 122 bp, Homo sapiens
ggctgttgtgtaccagtgtctgggcaaatctccctgccctggctgtcacccacccacctacgccatcaccccctgcttgatgagactcaaattacagccaggctctctggacaacagcctga

SEQ ID NO: 58970 - DNA, 122 bp, Homo sapiens
acagataaacagcccttgttcctcgggataaggactggcagtcccctgacaccctaagaccggcatctgtcgatgttatttccccagcatggccgaaacagaagccctgtcgaagcttcggg

SEQ ID NO: 58971 - DNA, 122 bp, Homo sapiens
tttcctttgtgcgcagtattggcggggccttggactaccactcccacaaggcaccgcgcccgcctcccgcgccacgccccctcgccgctggcttccagtcgccacccagactacatttcccg

SEQ ID NO: 58972 - DNA, 122 bp, Homo sapiens
gaacatttcttaaagtgtctggaacgaagctttaacctcgcctgctccatcagcctgggacggaaaagacgcgaggggcgaagaagaggtggggcacggggagcccgggccgttcggcgtaa

SEQ ID NO: 58973 - DNA, 122 bp, Homo sapiens
cccgaaccttaggatcctctcccacatgtcgtagaatcttggaatcatgacagctagaagcgtgaagctccctcaattccacatactggggaaaaatgagttgtacaaaagggcagagagtg

SEQ ID NO: 58974 - DNA, 122 bp, Homo sapiens
caccagcttccaactcgacccggggccagcaggggcgcctgtctcggtgctttccatgcccgacagccagcaagcagtccctccacgtgtacccggcccccgtccttccggccttacctcgc

SEQ ID NO: 58975 - DNA, 122 bp, Homo sapiens
aggaggcagcacagccagaagactctggggttaacaactttgcgatggcaagcaggcgagcgctgattggctgggagggcagtgtccctacagtctgcactatcccccgctgcccccgcctc

SEQ ID NO: 58976 - DNA, 122 bp, Homo sapiens
actttgggtacggcttgttcttacaataccggtaacaacgggcggggcggcggcccatggcgacaccaggatcttcagtggcacactgaagggaaagagaaattttttgtatttttagtgga

SEQ ID NO: 58977 - DNA, 122 bp, Homo sapiens
tggtcagggggcagcctggccactgcctagctggaatgggaggaagcctgcaggtggcaccggtggccctggctgcagttctgggcagcatcctcccaagcagagaccttgctgaagctcct

SEQ ID NO: 58978 - DNA, 122 bp, Homo sapiens
caagtgatcctccaagtcttctcaagctcacagtagacaaagcatttcaactatttctagcgtaagataaaaatggccataatttctagtaatctttgcaaaaaaaacttgcttgactcaaa

SEQ ID NO: 58979 - DNA, 122 bp, Homo sapiens
gctccagggtccccagggcgctgcacaggctggtgatgggcaccgtgctcaggtcggccacgtgcaggcagaggcgcttcgggttggggcacttctggccagggctcttatcaggacaggag

SEQ ID NO: 58980 - DNA, 122 bp, Homo sapiens
ataaaaaccatccagtgggaggcgagacggcaaggcaaagacactgctgctagaatgtgccgtcttcttgagattgcgaggagaaacgcaatataatgtggttcaaaggacagatgggactt

SEQ ID NO: 58981 - DNA, 122 bp, Homo sapiens
attggaagggtttaagtgctaagacatagcctctttttctcctgccctacctttcccagccggcacctgcttcattgcttaccactctttccctatgttttagccagagatctcatagcact

SEQ ID NO: 58982 - DNA, 122 bp, Homo sapiens
aagcccctcagcaccctccgggctgtggaggacctgattgggaccaacagccgaggggcccggaaggcggaggaccgagaggcgacggccaggctgcgtggccaagctgacggggaaccccg

SEQ ID NO: 58983 - DNA, 122 bp, Homo sapiens
ctccagcctgggagacagagagagacctgtcccaaaaaaaaaaaaaaaaaaaaaaaaaagcgcatttctggttccatctcagaaattcagctctagcatcctaaagggaggacctggaatgt

SEQ ID NO: 58984 - DNA, 122 bp, Homo sapiens
cgctgccgcttgctgccgcgcgcctttctggaaagccgcgtggagcgccaccctctcgtgcgtgcccagcccgagttgctgcgcaaggtgcagatggtgaaggatgcacacgagggccgcat

SEQ ID NO: 58985 - DNA, 122 bp, Homo sapiens
aggcgcgcgagagaggccaacacgtcgcggagggagatgttgttattttttgctgttgtgcgtccctgacgtcacatccacctgctgggtaaacaaccgggctcccagaaaaaaaaaatcgc

SEQ ID NO: 58986 - DNA, 122 bp, Homo sapiens
tggattcctacataaccctgctctgagaaccctgggtggattccttccttacaggaggctcgggtttcaggaaagtttttgttgatagtgttccagagccccagtgtgagagatttttatgt

SEQ ID NO: 58987 - DNA, 122 bp, Homo sapiens
tgcctgcctgcagccgggagctctccgggccgcacacccgcccctgccgcccccgctccacgcctttgctttctgtggggacgagaagccactctagcctttacctacaagtgtgccttgac

SEQ ID NO: 58988 - DNA, 122 bp, Homo sapiens
cagaaaataacctgaaaccataggaaagagcagaagcacaagacaacaacagtggtgggccggatcactgtgcatccctccaggaaggacaaagctgatacaggaaataatggtaactgaga

SEQ ID NO: 58989 - DNA, 122 bp, Homo sapiens
ttacagacatgagccaccatgcctggcctagagagtttctttcttgttggggttgttcaccggtgggaggtgcaccattgtgccgtgctgactatattcatagagttatgtaaccatcactc

SEQ ID NO: 58990 - DNA, 122 bp, Homo sapiens
ttcaaagttcacaaaagtatcaagttttgactatgcaaatgcaagaagcactaagagtaacgataagctagcacctatcagagaggtatttcaaactatttacagctaacaccagtctaatc

SEQ ID NO: 58991 - DNA, 122 bp, Homo sapiens
cagggacaaggtctgcacgctctgctgcgagttgctcaactccgacagcttcttctccagcgccgcctcagagaaggctgacatccctccgacaccacgttcacgccgtcccacgcggtggg

SEQ ID NO: 58992 - DNA, 122 bp, Homo sapiens
ccagactgaattttgccctcctgctcagcctgaaacaaaatcacccccactccacccacccgcacaggggtgccctgaaccttttttagccctgagccagggcccaggtttcaggtttagct

SEQ ID NO: 58993 - DNA, 122 bp, Homo sapiens
ccttgggaaccagaaacttaaacacaaccaggaagaaaaaaaatcagccaaaaataaaagcgaattaagacagttggggtcttattttagaaatatacctttctaggttctggtatgttggg

SEQ ID NO: 58994 - DNA, 122 bp, Homo sapiens
gaagctcatagcagcagagtgcggcaacacaggccctgagggagttggagcacagcaatgcgtgcaccacaccgcccgccctggaagaggcagtcaccccggaagaacaacttagtctgccc

SEQ ID NO: 58995 - DNA, 122 bp, Homo sapiens
tggcgctgccgcccgcgctggtgttacagtccccgctgccaggcattctcgccatattgccgtctctctgccagtcctcgggcagggcgcatgcgctatattggaccgcagcgctgagagct

SEQ ID NO: 58996 - DNA, 122 bp, Homo sapiens
cagtactcctagcagaagaccctctgatgaaatggcccatgacaaaatgaccaccataaccgttccttcagtaagccaggtagacgtgctcacagcttgctgggaagtcttctttcggagat

SEQ ID NO: 58997 - DNA, 122 bp, Homo sapiens
aggaaggtgtaaagggtgggccgaagccagggcagaagaacccaagcagaaggttgagcacgaggtggctgcgccgtcatccgggcgttgcccgggggctacgtcggaccgcggtgggcgcc

SEQ ID NO: 58998 - DNA, 122 bp, Homo sapiens
cgcgccgttcctcacgtgcacatgggtggcttgagcgcataagcatgactgccaatatcacggttggttagcttgtggcccaatactgggcggtgtggtgtgtgcgggaggcggggcgctgg

SEQ ID NO: 58999 - DNA, 122 bp, Homo sapiens
atcaaggcagcattcacgcctgggttctctgactgtaaatctggctgtgtttttttctttcgaattttattatgaatgccttctttgttcattgtcattattatcatcatcattgatctcta

SEQ ID NO: 59000 - DNA, 122 bp, Homo sapiens
ggtgagccgtttgcctttcctcaggactgcggaggtgggcacagggcccagtggtggaaacgtcctccggccctgcagcctgggctcctcagcacagtagcgtcaccttggtgctctgcgtc

SEQ ID NO: 59001 - DNA, 122 bp, Homo sapiens
ccctggagccactgtgtccctcgtggctggtggtcagcattgtctgccattcctgctcctcgcccgccaggtgcgggttccgcctgtgagtccctcccagccggcagctgtgctgctccgcc

SEQ ID NO: 59002 - DNA, 122 bp, Homo sapiens
gcgcgcgcgcgcgcgctctggactaaccagtgggttggttcacctgagcagaaagtcagccgtaagctgaaaccgcatgtggccccctggccccttcgacttttggcttgtgtcccagggac

SEQ ID NO: 59003 - DNA, 122 bp, Homo sapiens
tctgacccccaggtttggcgagggctcctcctgtttgggcagcagctcctcctgagctcccgaggccacgggggtgccaactgtggagcgcccgccgtgccgtttagacgcgagagctgcgt

SEQ ID NO: 59004 - DNA, 122 bp, Homo sapiens
gcagtccccggagcggtggccggcgcgcggggagaagctgcgggctgtgatgtggtgcagcgcttcgccggtgttggtgttgccctgtggtaggcgatgcatcgggcggccgccttgacctc

SEQ ID NO: 59005 - DNA, 122 bp, Homo sapiens
ttccccagtactgctttaatagtgaaaaaaacacacacacatacaaaagaagtttcaacacggctcgtcgttagaattcaaagtcttctcctgccatggcgagagcccaggcgaacctctcc

SEQ ID NO: 59006 - DNA, 122 bp, Homo sapiens
gcactcccaggggaaccgaacaggtcctctggctgaattttccaagtttcatctctctcgcgatcccatcctaattccaagcctccttccctgtgtctgagtctgcctggggtgggccattt

SEQ ID NO: 59007 - DNA, 122 bp, Homo sapiens
gcaggacagaagcgggacctgggccagatccccgagaggtgggcggggcctgggcgaggccggggcggggtgcaaaggacaaggggcccggcgcggaagagaagagtcttgggctgggagga

SEQ ID NO: 59008 - DNA, 122 bp, Homo sapiens
acagcagtgagcagggtccagccatcaggcctcagagcctctgtcatgccacctgcgagacgggctcctcctgtccccactgtgtccccgcttcctcctcttacagcagggggagttggagt

SEQ ID NO: 59009 - DNA, 122 bp, Homo sapiens
agaggggccacttaggcttacacttccggatcctgggcacacagagacgcgaaaagctcccgcgggaaactggggagcgggactacatctcccagagagccccggggctaaacagcaggtga

SEQ ID NO: 59010 - DNA, 122 bp, Homo sapiens
aagctccggagcagcggagggctttggtggcggccagaaccatccggggacagttgcaggcgcaggggcaagatcgggggaccggaagacgccagccgcggccgcggccgcctccgccaggg

SEQ ID NO: 59011 - DNA, 122 bp, Homo sapiens
aactggactcggagagagccaaacggtttccccacttgcacctgccagtcttcgcggcggcgacctggcagcccaggtgcggtcttaaccgcccccgcccctcaccccgtacccgctcctat

SEQ ID NO: 59012 - DNA, 122 bp, Homo sapiens
gtccgagtctgggacaaggtgggcccagatggtaggcagggcttagggctagattagaggcggggctgacttggagggggctggtctatagggtaagctgggcctttagggtcagaaagagg

SEQ ID NO: 59013 - DNA, 122 bp, Homo sapiens
ggcggtaaaagctcggttcccggccctcccggaagttgttgcacagttgtttccgggaagcgggactccaaatgggtcgcagtcgcagccgctctccacggaggggtgagtcctgtagcaat

SEQ ID NO: 59014 - DNA, 122 bp, Homo sapiens
ctctatattcttgcccagggacttaaaatgttcacaattatgctaatatagcggaaagtgcgttggacttggagtcagaaagcttgtatcccatgctgtctttgccacttactggctgtgtg

SEQ ID NO: 59015 - DNA, 122 bp, Homo sapiens
caagcccccctcctcacacttaagtcataccaaatgctgtttggggactccttgccttctcgggtattgccattggcaggaatgtcttttttccttggccttctggcaaactcttcttctag

SEQ ID NO: 59016 - DNA, 122 bp, Homo sapiens
atagggtcaaaggactttttttttttttcttggtctgggttgactcacataccaggtccacgggtgtccaggtcaggggcttccatctcagattcctggggaggagttagcatggctgcctg

SEQ ID NO: 59017 - DNA, 122 bp, Homo sapiens
gattgtgtagcctgcccagacatggggatgtttgagaattctggaagaacgtgggctgggcgtggatagagacgcctgctccaccatgtatgctggaggtgtggattacaacccctgtcccc

SEQ ID NO: 59018 - DNA, 122 bp, Homo sapiens
tgcactagcagagccgggggcggggattagctcggattcaaatttaaagcgggaggcccgcgtgtggctcagcaggtgcctcatgcccggctcccgtggcggtcgtttccgcccctacctgc

SEQ ID NO: 59019 - DNA, 122 bp, Homo sapiens
ggttagcgtgctctccatggttagcgtgctctccatggatagtgtgctctccgtggttagcgtgctctccgtgggtagcgtgctctctctggttagcgtgctctccgtggttagcgtgctct

SEQ ID NO: 59020 - DNA, 122 bp, Homo sapiens
tttagttcaattcagtgcataatagttgaacacccactagtccctgggacccacacagggcgtgtggtcattgcttttaaggagttcatagtctaagttgatgagataccttatattttcac

SEQ ID NO: 59021 - DNA, 122 bp, Homo sapiens
gtggttggctctgaaaagagcctttgggttttggttagcacacattcacaagacaatttacgccctctccccacgaatgcggcgagcaagctggatgtccttgggcatgatagtcactcgct

SEQ ID NO: 59022 - DNA, 122 bp, Homo sapiens
ctcgtcggtgggcgacaccggggactagagctaagggtggggcctcgcggtgagtgcagccggggacgggacccaaggctggcgacgggacccaaggctggcgacgcgacctaaggcagtgg

SEQ ID NO: 59023 - DNA, 122 bp, Homo sapiens
taggggaggccactgctaggggactggcatccaggcccccttgaagcgtctcaataagtccgcgctctcctttttggtgtcttgcaggagaggcagcttccccccttgggtccaacaaaccc

SEQ ID NO: 59024 - DNA, 122 bp, Homo sapiens
tccctaatgcaatgcagtgagggatgaaaaatggaggaaacgcgcacacacacgcgcgcgcgcaggaacagctgactcagcaaggccccagaccaggcttgttcccagagaggagagaggtt

SEQ ID NO: 59025 - DNA, 122 bp, Homo sapiens
ctccgcaaatgcagcagtgcatgaaaggcccaggtgggaatgctggccaagacgccctcccgtggccccccacgcggcagcgcctctcatgccaccctccgaagagatgaacagaagccttt

SEQ ID NO: 59026 - DNA, 122 bp, Homo sapiens
aaccatgaaatgatgcatctgatatcagcaaaggcacaatacacagaattttacagtattcggatgcagtcatgtttcgttttgaagagagagcacaaaacctgtggagaagcatttcctgg

SEQ ID NO: 59027 - DNA, 122 bp, Homo sapiens
ggaggagggagcgagggggcattaatatgcaaatgccttgcgattgattatgcaaagccgcggggctccgtggccagctcccaggcgggctaggggcgcccagggggtgcctgctgccagcc

SEQ ID NO: 59028 - DNA, 122 bp, Homo sapiens
ccccattctccgtgggatagattctcatggggagtgggggagccttcgggtgtggcagaacggcatgatggaattcataaggtgagcagaaactcaaggaaaactgtccaaataccggctcg

SEQ ID NO: 59029 - DNA, 122 bp, Homo sapiens
tgcttgccctctcacctcccagcggcttccgccgccccggccaagctgcacggcgcgtcccgggccctagacccccacccgccaggcaccagccccggcctgtcccctcgcgccgtcagccc

SEQ ID NO: 59030 - DNA, 122 bp, Homo sapiens
ggccgacgtcaggagctgccacagcgcccgggtcctggggggatgaggaacccggcaaggcgtggggaacctgcaaagctccccctgcccaacatcaggccaccagccaaggaggcgccaag

SEQ ID NO: 59031 - DNA, 122 bp, Homo sapiens
cccaccttctaacctcctgcccttcccgaccggaatgtctcccctgctggagggtgggaccgagctatttagagttgtctgttgcaggaagtctgggaggtgagtcactaaaaagcagcccc

SEQ ID NO: 59032 - DNA, 122 bp, Homo sapiens
cctgttattcataaaacttggagagaaagtgcctttttgtaggaaagtgtggggtgctggcggccatttccacctgtggttggacccagactgcctccccgcgtgtggcccatgccccaccc

SEQ ID NO: 59033 - DNA, 122 bp, Homo sapiens
cactgactacaatgcaggctattatgcaacatctgcattagttccattgagctgtgagtacggtaataggtttcaatcagacatcagttaacattttggtaatattcacatagtttgtgtta

SEQ ID NO: 59034 - DNA, 122 bp, Homo sapiens
taggccctgacgatcgtccttttccatctctcagatgaaaatgggtaacccagggtcacacgcttgttacagccagagctagaccttgaattccaaatccaaggctctgctgcgtagatgaa

SEQ ID NO: 59035 - DNA, 122 bp, Homo sapiens
atctgcgtgaggagagagataccgtccaggtttataaactcctgggcaaacgtgacatcccgggagaggctggccaagtccttcagggcttccagcttggcatccatactcgaggactggat

SEQ ID NO: 59036 - DNA, 122 bp, Homo sapiens
aacggccgctgtacttccgaatttccccacactcatcagtacgggaagaactgtgggaggcgcccagggatgctgccgaggcaaggtcaccctgatccccacggaggccacacacagcaccc

SEQ ID NO: 59037 - DNA, 122 bp, Homo sapiens
tccgcccacctcgggctcccaaagtgctgggattacaggcgtgagacaccgcgcccagcccgtccaagtcaatttctagagctagaacttcctcatgctctaaagacaggaccccaactcct

SEQ ID NO: 59038 - DNA, 122 bp, Homo sapiens
ttcctctcgccgcggggctcaaggttgtgcaggccgaccatggtgtaagctgggggacagcgagaattgccatcaggggaggtagagggaccagcaggcttctgtacacctcggaagctgcc

SEQ ID NO: 59039 - DNA, 122 bp, Homo sapiens
taaagccattttggtttcagagcgtgcactaggccaccctgggctgagggctgcagggttcgaatgctgtaacataacggagagagatttgtttgctgaggcaggctggcattttagtattg

SEQ ID NO: 59040 - DNA, 122 bp, Homo sapiens
tgaggagcagagtgcccagttgagccactctggacatgtaacctgagtgaggaacagacccgcgctgtttggagccactgacatttcttggttagttgttactgcactaacctaactcatat

SEQ ID NO: 59041 - DNA, 122 bp, Homo sapiens
tagggtggggagggaccgcataacagaccatctgtagactccttcggaaagcagcagagacgctgcagagggcttttcttagacatcaactgcagacggctggcaggatagaagcagcggct

SEQ ID NO: 59042 - DNA, 122 bp, Homo sapiens
tgaccaagtgattgagaaacagctctctaaacaggtgcgtctgagctgggttctgaaaaacgaaaataagcccacatgtgaagagctaggagatgagcatttcagacaggaaacggcttaaa

SEQ ID NO: 59043 - DNA, 122 bp, Homo sapiens
cgccattctcctgcctcagcctcccgagtagctggaactacaggcgcccgccaccacacccggctaatttttttgtattattagtaaagacggggtttcaccatgttagctaggatggtctc

SEQ ID NO: 59044 - DNA, 122 bp, Homo sapiens
gagtgcttactgagcgctacctcctcgtcctccagagtcgtgtattgagtgcttactgagcgccacctcctcgtcctcctgagtcgtgtattgagtgcttactgagcgccacctccttgtcc

SEQ ID NO: 59045 - DNA, 122 bp, Homo sapiens
acataggctgacacctggatcttaatgctgaagaaccaacttgctgttgaggggctgggtcggtggtgacttctaacgcctttgcccttgtcccgcccctttcttctcctcactgtctccag

SEQ ID NO: 59046 - DNA, 122 bp, Homo sapiens
ggacttagttcctgagcaagactccaaattgcaccacgttcttctgagctctggggcctgcggacatgctcttcctctgcccaacatgcttgctccctctctcctcttttctctgactactt

SEQ ID NO: 59047 - DNA, 122 bp, Homo sapiens
ggggaggggacccttgagttgggtctagtaaggtgactaagaattccacaagcagccgagcgcagtgggtcacacctgtgatcccagcacattggggattgtgccaaggcgggaggattgct

SEQ ID NO: 59048 - DNA, 122 bp, Homo sapiens
gtcgcatccgtgaggaccctggatgacaaacaggtgctgcagcagtgcatggccacgctccgggagctgttcaaggagcaggtgagagagaggaagccctccttgaaaggggcaagccgtgc

SEQ ID NO: 59049 - DNA, 122 bp, Homo sapiens
cttcccttctttgtgccgtcgtctctgcggccagccctaatctccttctcgtggcttctccgtctctgaccccaaataggccttaagggcgtgggagaaatgagtttctggagctggaaaag

SEQ ID NO: 59050 - DNA, 122 bp, Homo sapiens
acgtttattagcatacatactgtatttaaagcatatgtaattagaaaatactgtgaaacgcgatttttgaagcattcagcagaacaaagttaatcttttattaagccgacttactgggacat

SEQ ID NO: 59051 - DNA, 122 bp, Homo sapiens
agagaggctgaaccaccggcccggcgactcggcgccgggcggcggggcgggcgctcacctcgatgagcgagtagttgatctccacgtccgacttgacgaagccaccgcagcccaccacgatg

SEQ ID NO: 59052 - DNA, 122 bp, Homo sapiens
aacccttcccgttttcctctctgtgtgtgtctcctttgccgtgttccatggtggcagcggcggtggcagtgttggtgcatgggcctcccagggcaaggggaaagtgagtatgcccttttctt

SEQ ID NO: 59053 - DNA, 122 bp, Homo sapiens
ctggcctggagccccagaaggagaaagaaaccggccgggcttcctcccattgacccgcctcgacgacaaggctgcagccacagcgacacatgggcagcactgtccctcaccggcaccccctg

SEQ ID NO: 59054 - DNA, 122 bp, Homo sapiens
cagctcccccgagaggtggtcggatcctctgggctgctcggtcgatgcctgtgccactgacgtccaggcatgaggtggttcctgccctggacgctggcagcagtgacagcagcagccgccag

SEQ ID NO: 59055 - DNA, 122 bp, Homo sapiens
gcatcttccgcatgtgcggcttgctctccctttgcacgcactggaagtaggcgcagtgcacgcagcgctactccaaggggagcaagctctgcaggacgcgctgatcccctggcgtctgcggg

SEQ ID NO: 59056 - DNA, 122 bp, Homo sapiens
cacaagtatgcatacaaaggggccaaacacattgagcagcaaaacccccaaagcagacaccgcccgagacccgctggagcgcttccgcaaatctcgcgagatagcaggcagcgatgcctttt

SEQ ID NO: 59057 - DNA, 122 bp, Homo sapiens
caagattaatttaatgtgacaattagtattgttttgctaaaattgtattgcagttagaaacgattggcttcctgttaggttcaggcaattgtaagcacttagagacgtattggagggctggg

SEQ ID NO: 59058 - DNA, 122 bp, Homo sapiens
aatcttctgcacacgaaccagctgtgacaataaggtaatggggctgatttgttaacaaatcgagtttatacatttcaatgagtggcctagtcaaaacactcagcttgaagcatccaacactg

SEQ ID NO: 59059 - DNA, 122 bp, Homo sapiens
ctccaggcttctcttctcagccaggtggctctgaacgggcgagggtcccccacagcagcacggagggcattctggcactgggtctcacctcgcccgcctcccggcagccagagcgctgccgt

SEQ ID NO: 59060 - DNA, 122 bp, Homo sapiens
cccctacaaaataattttgttcttctttgagttcttataacatttgctagcaaaattactcgtttatcatattctgccttcttccctagcctgaaggcccttccctcgatccatgaccctat

SEQ ID NO: 59061 - DNA, 122 bp, Homo sapiens
cttacaggttgatggtgcgctccagggtgaggggcttcgtctgctggatgtacttgttgccgaactgagtgaccccccggggccagccggtctgcgagcgattgggcggtaccacagacatg

SEQ ID NO: 59062 - DNA, 122 bp, Homo sapiens
ggaagagaggcagggcaggtgcgggccataccccgccctcctggttcccgccggtggctccgggtgtagacatttctagaaacgctcccctgcccaaggctggctagaccttcgcgttgggg

SEQ ID NO: 59063 - DNA, 122 bp, Homo sapiens
gtcacaccccttattccccagcttcgatctgttagtaaacagtgtctagtagtcaggaggcgctcggggtctctgattggctactgccgaaagaggcggggagggatgattggaacgtttgg

SEQ ID NO: 59064 - DNA, 122 bp, Homo sapiens
agcagctgggagaatgagccctgaacggttccaggaagctcagcctagtggaagggccaacggaggcctgttatgtgatgagccccactacagtccctcgcaatgcaatcgggcgcggccac

SEQ ID NO: 59065 - DNA, 122 bp, Homo sapiens
cctgctacatgcctctgataagctggaactctgagatgacatgagagcacgagccagagacggctatccctgttctgttatgaaccccactttatatcaaggcaatttaagtacaggaaggg

SEQ ID NO: 59066 - DNA, 122 bp, Homo sapiens
ccggaaaaagccctaaggacgttccctagtggccttgaccttggtgggtgagactcagttcgccatcctgctggcggcgggcgatgacacagcccctcagccaggacgagtatgtgggctga

SEQ ID NO: 59067 - DNA, 122 bp, Homo sapiens
cagtggagacgggagcctgccgcgcatttggcctctgcaggcagctgcttttttatgtctcgctgacagtccgaacgatcctacataaaatggggaggggccggcgagcacctggggaggcc

SEQ ID NO: 59068 - DNA, 122 bp, Homo sapiens
ggatttaacaaatgcttaacaaaccatcctatggagtaatttcacttactgaaacaaactcgaccaccagccactgagcatttccagtgttgctctgtatttacacactggatgttgctctg

SEQ ID NO: 59069 - DNA, 122 bp, Homo sapiens
gctcccgcctcccctccaagcggtggaaacccgccctccgccagactctggcggtgggagcggctccccctgcaggatctgcagagacgcctcctgggctttctgttctggcctcgcgtttc

SEQ ID NO: 59070 - DNA, 122 bp, Homo sapiens
cgctcccgctctcccttgcaccagccaatggaagcgagtatcttcagacggtgggcaggacgtatcctaagatacccaatggtggtcgagaatagttgagcactttactagtcaagccgcgg

SEQ ID NO: 59071 - DNA, 122 bp, Homo sapiens
tcaatagttttccatttgttttgttttccattcattttctccacgagttatcccaggaagcgatcgcacagctacacaaaacttggtttaaatctcatcccttactttatagagagggagac

SEQ ID NO: 59072 - DNA, 122 bp, Homo sapiens
tcagcggcgctctgggcatcggggaagcagtgatcattctcaggcgactgcaggcagagccggttgtcaatctccagcattactaccgagctgcagggacagcagggagggaccagagggct

SEQ ID NO: 59073 - DNA, 122 bp, Homo sapiens
atggctcagcagcacgagggcggcgtgcaggagcttgtgaacactttcttcagcttccttcgacgcaaaacagactttttcactgcaggagaagaggggatggcaaagaagcttatcataca

SEQ ID NO: 59074 - DNA, 122 bp, Homo sapiens
ctgggcagttccctgggagttgctggcgagaaaccttccgtactgcaaaggcaaacagatcgaagtcttgcaaagaccttactgcaggcaggtgaaaggcttcaagttccaccctcagggtt

SEQ ID NO: 59075 - DNA, 122 bp, Homo sapiens
cattatttgctggcagtgtgtgaagtcaacgaacaagactgagtctttgcccttgagacgcgtacactctacccagagacaagttctaagcacaggaaacaagtaattttataagaacatca

SEQ ID NO: 59076 - DNA, 122 bp, Homo sapiens
gactacatcagcaccagaaatgacttctattttactgttcaattgccaaatgactctcttcgctctgaaacaaagacaatataatctttctctcttctggagacttactacactttaaaatg

SEQ ID NO: 59077 - DNA, 122 bp, Homo sapiens
ccttttggcaaagccactgccggctgcgggtttcccctcccccgccaggcgagctctgcgcggcggcttcgcgggcacacgccttcccataccttacatggacaaatgcgtgcaggcaaagt

SEQ ID NO: 59078 - DNA, 122 bp, Homo sapiens
gcttaataaccagtcccagtgccaagttcattataagcagccaataaatattaaatgagccggaatcatgcttgtgatatagatcctggtcataaacaaaagctctggagtcagaccggcag

SEQ ID NO: 59079 - DNA, 122 bp, Homo sapiens
cagtggtgctaaagccatcatcagcaatgacatcatcaccccctcctcctcatggatgatcgtgtgcgcctcatcactcgctatgtcctcactggccatgtgctgggaatgagcagctcagg

SEQ ID NO: 59080 - DNA, 122 bp, Homo sapiens
caaacactgttagatgctaaatacccaaataaaaataatacatacgtcctgttctgcagacgcgtataagtcacagaaggaaacacaagtgacaggacaacagcaggttcagaaggataagt

SEQ ID NO: 59081 - DNA, 122 bp, Homo sapiens
acgaagatgaccttctatcggagacaataaaacagcaaataaataattgcacagcaaggccgggcatggtggctcacacctgtagtcccagcactttgggaggccgaggtgggcggatcgct

SEQ ID NO: 59082 - DNA, 122 bp, Homo sapiens
tgtgcggaggaaagggagaggcggctgggtgctggctgcgctgcggtccgtgagccaggacggagtcccaggctgtacagtgatgggcggagagactcgcagtcctgagaagtattatgggc

SEQ ID NO: 59083 - DNA, 122 bp, Homo sapiens
catcaggggtcgtgggtgcaggcggcggcgcggcttgagggtagggggtgcgggcctggccggcgcggcaggggagggcctcgcgcggatcccgtggtcacggcgggagtcagctgtcctgg

SEQ ID NO: 59084 - DNA, 122 bp, Homo sapiens
agcggggccggggggcgcagatggcggccggtgcgagcgagggctgggcagcgggcagggcgaggccgggcgaggcccctcgggagccggactcccgagccaggctccattgttgttggagc

SEQ ID NO: 59085 - DNA, 122 bp, Homo sapiens
gaacccatgcccctgtcacttgtgagcaggttgaccagtgtgcggggttttctgtggaatcgttatgggaaagtcagggtcacactgtggaagctttagtggcctgacctcctgaccgagtc

SEQ ID NO: 59086 - DNA, 122 bp, Homo sapiens
tcactccaggcttgcccgagcctctgctcaggtttcaactacgcgagttgggataagcagcgccctcccctcccgcccccatgctctcctgaacgtgggttttctctcccctttcgctcgcc

SEQ ID NO: 59087 - DNA, 122 bp, Homo sapiens
tccaggatccttcttatctccctttcccccatagtctggcttagtctctttgtttccgggcgtaaaagcactgggattaatatgttttccaggctgagggaaaacacaggaatgtgatgtcg

SEQ ID NO: 59088 - DNA, 122 bp, Homo sapiens
cagtctcaaactgctgggctcaagtcatccttgtgcctcccagagtgctaggattataggcgtgagctattgcctctggcctagaatctgttattcttgcaccaacctccatcccccatgca

SEQ ID NO: 59089 - DNA, 122 bp, Homo sapiens
caaagtaggaagcaggtctgggccaattgcagcccactctgatgggggcctgcaggccaccggacgcctgaatatctgtccaatccctcctggaaggactgccatctctttagtccctcttc

SEQ ID NO: 59090 - DNA, 122 bp, Homo sapiens
atctgcagtgcactgccctaaagaagcccccggggggtgctgggccagagaagccacacccggtgaggggccgtgggacaggatggggagaaggggctttatttcagcccctgcagcttctg

SEQ ID NO: 59091 - DNA, 122 bp, Homo sapiens
aaaaaatcggttctgagcaaatttcgagtcactgacaaggcggcggtatccagcagagggcgcgccaggcgccagcaccaggcccgaggacgcctggctcatccccaggccggcttccgaga

SEQ ID NO: 59092 - DNA, 122 bp, Homo sapiens
gcaagacgaagtgattgccttgcctctcggattcctctcggcagcgtggaaaatgagccccgggaaggcaacttcaactcatccaccactctccgtgcagagcactccggttccaacaagtc

SEQ ID NO: 59093 - DNA, 122 bp, Homo sapiens
gtggatcagttaattcaccatgtgtacctaagacccaaagaggacttgtaggcaagacaacgacagcacagggctcagtaaatgtcttacaagatcagcctccccaggactcggcagggtct

SEQ ID NO: 59094 - DNA, 122 bp, Homo sapiens
gtgatcgatatatggatgagggtaacagcacacccttacaagaactgtagtaccgggttgcgatctccctccccagaaaatcatttcaagaggaacaagatggaaggcgccaaaaaacattg

SEQ ID NO: 59095 - DNA, 122 bp, Homo sapiens
taggggcaggtgtgagtgtgtttgtgtgtgtttccaggcagatgtgccgttttcagaagccgcgggaccagcctcctccgagccctcccagccgctggtcgggcccggctggggcggtacct

SEQ ID NO: 59096 - DNA, 122 bp, Homo sapiens
gcggcttcgttatggccgcctatctgcagcggcacctgaggacgcacgccccggccaacacgcctcccagcaccacagcccctgccgccggcccccagccccctgctccactggctgctgcg

SEQ ID NO: 59097 - DNA, 122 bp, Homo sapiens
aatggcttctgcgaaaagaaattccctcggctctagaagatctgtctgtgtttgagctgtcggagagccggtgcgtccccaccccaggctggggttcttctccaaagggtgcccctggagga

SEQ ID NO: 59098 - DNA, 122 bp, Homo sapiens
tgcaggctttcaccatacacaacagcatcgctaacgaatgctattacaatattcatttagcgtttaccaagtgcctactctatacaaatcttgagaatacaacgtgaaggtgaactgctgac

SEQ ID NO: 59099 - DNA, 122 bp, Homo sapiens
ccgggaggttgctggcagctccttggcctcctgccaccttccagcctgaccccttgtggacggatggaagcctcatggctgttttgcccatctgctggctgggatcagggacctggaccccc

SEQ ID NO: 59100 - DNA, 122 bp, Homo sapiens
gtcgctgggggcggggcttgcggcccacctgtaggtcccggtgccacctcgtcagtgtcccgagagatccccagaagaacgagagggctgaacaggggaccccactgacgtccggtgggccg

SEQ ID NO: 59101 - DNA, 122 bp, Homo sapiens
gcttggtttacagaaattgtattacataaaatacatagaatcaattccaacccaaaatagcgccaaaaacaagtctccatgggcattcattagaaaataatttggctcaaatttcaaatagt

SEQ ID NO: 59102 - DNA, 122 bp, Homo sapiens
tgctcaccggaagaaccaagtacgtataattaacaaaaccaccaggatatgaggtcagtgcgtctgggtggtggtgatcctggtggcggtgagcggtgacggtgtgttggtgaagctgacgg

SEQ ID NO: 59103 - DNA, 122 bp, Homo sapiens
gttgtgctggttgtagtgctcgggctgcgtgtgccagaagagcatggctggaactcccagcgcgccgaccggggcgcggcagcaagcgcagacgcggggcgcgccgaggacccagcggcggc

SEQ ID NO: 59104 - DNA, 122 bp, Homo sapiens
gtggtttgttctacagccgttcaggtcctttactcggaagctgctcagagggagactgaacgtggcataacaacaaggagtggggcgtccttcccaaaggaagcacaggtgctctccggggc

SEQ ID NO: 59105 - DNA, 122 bp, Homo sapiens
gagaaccacccacggggctttaaaaaatgttggtgcccaacatctccccgaaatagggcccgccctatctcggtcggggagcgcgggacctccgtggccacccagcgccaccgtccgcgggt

SEQ ID NO: 59106 - DNA, 122 bp, Homo sapiens
ctgcccctgtgagtggggccgcaactccttcccgccggggtctgtgctgcaaaaggactgcgggaactggtgagtggggaggtcatcttgggggggacctattgaaggagcactgggccaag

SEQ ID NO: 59107 - DNA, 122 bp, Homo sapiens
atgagattacgctgaagggagtgcttcagtgccacagaaagtgatctctctccctctctccggcttcctatcttttgattttatgtatctctctctatctcagctgacttggggaatttaat

SEQ ID NO: 59108 - DNA, 122 bp, Homo sapiens
ctccatttgtaataattgagtcccactaagtgactgctgttggcccccaggcgtcctgaacgtgggggtttaacttatcagtaacccgctcatgataggatgcacgagataaggggagaagc

SEQ ID NO: 59109 - DNA, 122 bp, Homo sapiens
cagactgctgtgctagcaatcagcgagactccgtgggcataggaccctcggagccaggtgcgggatataatctcgtggtgcaccgtttttaaagcccgtcggaaaagtgcagtattcgggtg

SEQ ID NO: 59110 - DNA, 122 bp, Homo sapiens
ctcttcctgtccttccccggtcacctcacgagctatggatgtatctgtgtctcctcactgcgctataagctcccaggtgaagaaagggttgctttttgtaaatttttgttttaaccgtgaac

SEQ ID NO: 59111 - DNA, 122 bp, Homo sapiens
tgggaaatctgagttagaaaaagtacatggcatgagctaggtataaaggacaggagttgacgtttagtataagacagaacaaaggtatgttgtactcagtgaaggacaaaaggtgtttctgg

SEQ ID NO: 59112 - DNA, 122 bp, Homo sapiens
taagtgttcatttttaggaaatacagcctaagtccttgcagtgaacaatccaagccaattcggtaatttgtacatgttaaaatatttttagtagttattggcatcctccaacatttagcagt

SEQ ID NO: 59113 - DNA, 122 bp, Homo sapiens
tgctgttcacaaatttaaaaatctgtgggtggtaccgacagacaccagaaaggtgacacacgctatgcaaggagccattacagggtgtgatgggagcacacaagacttgctaaggagaggga

SEQ ID NO: 59114 - DNA, 122 bp, Homo sapiens
cttgaaaaatatactgaagttcagagcatctaacactaaaggttgtgctggtcttggtggcgagagtaagtcccacagcagaccacaacagatctagagatcataaggcctctaacatttcc

SEQ ID NO: 59115 - DNA, 122 bp, Homo sapiens
attgtcattttactgctgaagaaactgaggcacactgccatttgccccagaagacagagccggtaaagagaagagctgggatgtgaacccaggcagcctgaccccagagctcctgtttccga

SEQ ID NO: 59116 - DNA, 122 bp, Homo sapiens
agccaagcaatacttggtcattgtttgtggccaaccattctctgaatgtctgaatgacagcgactatgtttaaggtttttttttgtaaataagagaccttaagcaatgcattgactgcatgg

SEQ ID NO: 59117 - DNA, 122 bp, Homo sapiens
acacactgaagtgatctctccctaaagcatccttgtgctcaggccagatttccctgctggcggctgctcccagtgccggctatagagaaggtggggactgtccctgcaagtgggagttcagg

SEQ ID NO: 59118 - DNA, 122 bp, Homo sapiens
tctccatgcctaaggtcagtgtacagaatgacaagccagaaaatgtccattttccccatgcgtccttagcaagcactttaaaggtgacagctcagaagaggcgggggagagggcaatggtta

SEQ ID NO: 59119 - DNA, 122 bp, Homo sapiens
cactgggtttccaaaggctcatccagccaagcgaagtatctatgacctcgtcgtgttcagcgcgcttagggaaggattctatggactgcacttttaccctggtgtcctgcattcttgctcca

SEQ ID NO: 59120 - DNA, 122 bp, Homo sapiens
tgggcagcaaagccccgaaagtcacagatagacctgagctccaattgctctccgcccactcgacctgccaggcacctgaccccctgcatcccggtgtcctgacccacagcgtgaacagggac

SEQ ID NO: 59121 - DNA, 122 bp, Homo sapiens
accactcttcccgagacgatccgctctgtcccttctgacgtggcaaggctggggccggctcgcatctggagaaagttctgggttttcaggaaatcctaaagagtgggggaggcggagcagga

SEQ ID NO: 59122 - DNA, 122 bp, Homo sapiens
tcactccctccctcctaccacctgtaggagaccaggaccaggtccagccggaaaactcaccgcgcggcccgggagtcgccatgatgtggacgcagaccccgccggcccgcggccgcgcgctt

SEQ ID NO: 59123 - DNA, 122 bp, Homo sapiens
ctcggcgtcgcgcaaaccatacctcccgcgtgacggccgtgtccggcctgctcacctgtgcgaggcagccctgcagagcaggtcaccaggccacaggagcaccagaagagaagccacgtcca

SEQ ID NO: 59124 - DNA, 122 bp, Homo sapiens
cccagaagaaccacaggagggccagtttaattctcccagcaacaatgagtgacaacacagcgtgaagtgttgccaatcagggaagctcacctgagacttagcgttataattgaaggtcagtt

SEQ ID NO: 59125 - DNA, 122 bp, Homo sapiens
gaatctcaagatatacgtagcttcatcattgacatttcccagagccaatagtcagcggatcggtcttgtgaacaccactgccagctcctgtgtctacatctcagaggagcccatgtgctctg

SEQ ID NO: 59126 - DNA, 122 bp, Homo sapiens
ctccggcgatcttgtgcggcgatgggatgcggccgtgggcggtggagtccaggcggagtccgctctccacacgcgagggcgcctcctcctcaccgctcgccggcttcaaagctcgcgcctca

SEQ ID NO: 59127 - DNA, 122 bp, Homo sapiens
cccaggcgggagaaagcgttggcatttataaggccagggtctggcgcggtggcctcattccgtcttgaagtagaccctggagaggtcttccaggcttgggctcagcacgcgagcacagggag

SEQ ID NO: 59128 - DNA, 122 bp, Homo sapiens
tgcccccgctccagagtaccagtgccggcagtgcgagctatgacgcaatcggagctcggtcggtcctttgattggctagtcctggccactttggattggccgcgcgggctggtggggacccc

SEQ ID NO: 59129 - DNA, 122 bp, Homo sapiens
ccaggagctttggcagagatgtttctgcttccagagatcgtgggatggagtttttcttaccgtgaagacatcgaccctgtgtacaccttgtgccttcacttgtactgtctccttctcctttt

SEQ ID NO: 59130 - DNA, 122 bp, Homo sapiens
cccatcagtcccaaggcagacccacctgtgctgggaggcactgatgtatatctgaggtcacgctgctcaccttcaagtcacacagttaaatgaaagatgttctatctttaggtgctgggtgt

SEQ ID NO: 59131 - DNA, 122 bp, Homo sapiens
gctactcactggctgcctccatcatgctagcccagaagcggggctgcttgtgcagggggtcgtcgtcggggccgctcagcttgtagacgtgcacgcagggcggcgtgctcacgctgctgtag

SEQ ID NO: 59132 - DNA, 122 bp, Homo sapiens
aacccagaatgagattctactacacacctgttagaatctgggctgcgcaggtggcatcagcgctgctccgcctccaggaaggaacctgggctgcgcgtggctggcggtctcctagcgactag

SEQ ID NO: 59133 - DNA, 122 bp, Homo sapiens
aagttgctttatggaaggctaagaccaagccctagatgcaagaccgggggaactgactgccggaacgtttgtgttgcagcgcctcgccccttgccggtgctctttcgcgaagggaccgtctc

SEQ ID NO: 59134 - DNA, 122 bp, Homo sapiens
agctggagtgcacttgaaggatgagctggcattgactaggctgagaggtaaggaaaagtgcggctggaagagggaagagtgtgatcaaagttacagaggcatgaaatggcatggtttgagca

SEQ ID NO: 59135 - DNA, 122 bp, Homo sapiens
caaaaacttctaaaatgaccagggcaatgcagatctgtgggtaccctggaggggagttcccggtataggacaagggaagaacagagctgtaccaactccccccagatctcccccaacatcag

SEQ ID NO: 59136 - DNA, 122 bp, Homo sapiens
tgcctcacatttaccctgggaatgaagcagccctcagttgctctgaggtagatcgtatttcgttttctgcttctcaagtatcggtgatgtttggctcctcagtttcccatatttaacttatt

SEQ ID NO: 59137 - DNA, 122 bp, Homo sapiens
tcacctgcctgtccaggggctcttctcaaaggctcagccacctgctgggatggaggggggcggcggtgacagcccaagctcagtgttcagtgaggcccaacagtgcaaggtggcaggagggc

SEQ ID NO: 59138 - DNA, 122 bp, Homo sapiens
cctcgagctcttcggtcatcttggaagcaagagcttgaaggtaaccccgggcatctttctcgtcactgaccctggaggagggaacagatgttctatctcacgaagcatggctatcagggaga

SEQ ID NO: 59139 - DNA, 122 bp, Homo sapiens
ttccgtatctacttttttcagtcctcttgttttcccttagttgtgaaggatggttctcctcgtaaaatcccggctttgattgggccaaggaggaatgtagaaagtgaaagtttgcagccaaa

SEQ ID NO: 59140 - DNA, 122 bp, Homo sapiens
ggagacatcaaggaatctgcagtccaggcgcagagtccggctctgagctgctttagatcccgtgtgaggcagagagtggcctctgggcagtagcgggtccccaggtgggggcttggccccag

SEQ ID NO: 59141 - DNA, 122 bp, Homo sapiens
taaacagtaagttagaaaattcatcaagtaaaagaaactcctttcaaaggagggcagaagcgtggctgagtttaaaaaacatagattttggagacaggtcaagttgagtttgccccttccct

SEQ ID NO: 59142 - DNA, 122 bp, Homo sapiens
gggtcaagagagaagacaggaggtcgggtagacgctggggaagacaaaaaaacagaggagcgctagtgatgaggagggctaaagagttaagagtctgcccttgtgccgtggcgcactcagtc

SEQ ID NO: 59143 - DNA, 122 bp, Homo sapiens
actctaccagtttgtaatttccttgaagtaacaggtgtcttcttagtcatttgtttgccacggtatatttatattaaaaaaaagtttttttttgagacagggtctcactctgctacccaggc

SEQ ID NO: 59144 - DNA, 122 bp, Homo sapiens
gcagcaccgtggcacgaagacgtctcagccaacgccggctgacccccggaagtcccgccccgaattccggcccgccgctcgttctatctggggcagcgtagcctctctagatggcgggaggc

SEQ ID NO: 59145 - DNA, 122 bp, Homo sapiens
cccgttccactaccagtacacttgctccctccgaaatcaaggacaaccatgggtaaacctcgctcaggctcgcggagccagtaccggaaaagagggtggcgcctcgcttgcgtcacttccgc

SEQ ID NO: 59146 - DNA, 122 bp, Homo sapiens
gggtgggcagggagccgccgagggggagcgcaaggacgaggtgccagcaggatgcggggccgctggggccaaggaaaggctgctgtagtccctgaaccctgcgtggcctctgcccagcccca

SEQ ID NO: 59147 - DNA, 122 bp, Homo sapiens
tcatgcggcggcagttgtgagaccccagtggagtggcactctatttgtcaccaggattgccgcatcttactacactgggtattttccaccagtcttcccagatccactctccgtccttccac

SEQ ID NO: 59148 - DNA, 122 bp, Homo sapiens
tcttgtgatccagcccgcctcggcctcccaaagtgctaggattacaggtctgagccaccacgcctggccaacaatacaatttctgccattagaaaccctgacatgtagtgggcaatcgctgg

SEQ ID NO: 59149 - DNA, 122 bp, Homo sapiens
gctatggcttcctgctgccagcctcccagatcatccccacagccaaggagacgtggctggcgcttctgaccatcatggagcacaccctgaatcacccctactgagctgaccctttgacaccc

SEQ ID NO: 59150 - DNA, 122 bp, Homo sapiens
tgtgtttcttttatccagtaaaagcagcgcatccagaggtacttgtttcctggccttctgcgaagcccacagataaattaggtctcatttggaaacgtcccatttcgaaaagcctgaggtat

SEQ ID NO: 59151 - DNA, 122 bp, Homo sapiens
cgcggtcccagcctctccaggcgctgctgggctctgattggcggctgcgctgacagcaggcggggcctggaagtcgcggccaagcccgccctcgcgtataagcccctctcagcgctctctct

SEQ ID NO: 59152 - DNA, 122 bp, Homo sapiens
tccagcagccgtgaaagccccaacagcaaactgcctgggagcggggcaggtcaccaacttcgttgctcgaactccctgggtgcccgccgcggtggttacaaagggggtcaagagtgccggac

SEQ ID NO: 59153 - DNA, 122 bp, Homo sapiens
caccgttttggggaccaagaggcggggctccgcgagcagggtgcctattggcctgagggccggcgggctctgggcgctaattgggcggagggcggtggcgctctggcacgcttgcgcggcga

SEQ ID NO: 59154 - DNA, 122 bp, Homo sapiens
tgctcattgctagaaagttgctcccttctaacaaaagccacctttcatgcagcttctctccggtggtctcacctactccttccctcttgctttatacagattaaactctttcctcctttggg

SEQ ID NO: 59155 - DNA, 122 bp, Homo sapiens
gtttggcgcaccctcgaagtttttcaaactttgcatcttcccgtgccccgggcgccgcagcgcgcctaggttttcgcagctggtttctgtcggtgggttgttaataggctgggacgccagat

SEQ ID NO: 59156 - DNA, 122 bp, Homo sapiens
gcgtcactgggaaactggcaaaaactggtagtgagatttccttatactgggtgctgacatcgtagtggcataacctgtaaggtctgcaggggggctaaagaagagagaaactaagttttgat

SEQ ID NO: 59157 - DNA, 122 bp, Homo sapiens
tgaggttgcccaggtggtttttgttgcatgtgtctaactgcaagttgtgtctctgtctatcgaggggaggataaggcccattacattcagattcaataagaatttatcaaatgcctattttg

SEQ ID NO: 59158 - DNA, 122 bp, Homo sapiens
agaggtcctggtcaggtgataatcattcccatgttgcctgaacttgtaaagtatccttaccgtatgagtgaggaggagcttatcccattgaataagtccctctcgactggaggtggaagtgt

SEQ ID NO: 59159 - DNA, 122 bp, Homo sapiens
catcgggcgcctttttcgtggctgcagcgtcagcctgcactgccgggtgtgaggcagacgcgcacttaacggcgtgagaagccagatgtgggaggcaccgggcactgtgggcagtgaggcag

SEQ ID NO: 59160 - DNA, 122 bp, Homo sapiens
cgctgagcaaaaggaatccagaatcagccctcaagcaactcaagacaagttagcaatttccgccgggaagccgtgaacatcggcagccactggcgtttcctccgagtcctcggaactccgga

SEQ ID NO: 59161 - DNA, 122 bp, Homo sapiens
gcccgcggcagaggacaggtcaaaggtcagcgctagtcagcgtggactaacagcttcgggcggacacccgagtcctgtagttccttgtttgatctgaaggaagttgtccagcgtcagcagca

SEQ ID NO: 59162 - DNA, 122 bp, Homo sapiens
tcgaggggacggggaggccgcccttggctgggggcgccaggacggggaggggcgagcctgcgggagccacaggcgccgaggccgtgcgcccttaagcacctccacctcatggcgttaatcct

SEQ ID NO: 59163 - DNA, 122 bp, Homo sapiens
gtgtatctgtaggatgtttctgatggactacattttgcacaggagatgtgttgtaccaaccgaaaataaatcgactaagagttattgtcctaggtccttgaccttttttatcctagcttgac

SEQ ID NO: 59164 - DNA, 122 bp, Homo sapiens
ggtggcagagcctgcggggcagatgccaagttcttatcacaagtgactgcgaggcggcagcggctgaggcagagtcctcccatgagaactgagtgctttttgtgtccttacctggttggata

SEQ ID NO: 59165 - DNA, 122 bp, Homo sapiens
ttctagcctgtggtgaggcctttcttccctcctgaagttccccctaaagctagttctcttcgtttctctcattaacgggttctcccttttcacgtcgagataattagaaatggctttcccac

SEQ ID NO: 59166 - DNA, 122 bp, Homo sapiens
gtgtgcacgaggggttccatagggcccagggatgcttggtacccacgggggagaatccctcgccgaaccctgcgggtctgcggggcgggccgcgagactggcgcgcaaaagcggctccaagg

SEQ ID NO: 59167 - DNA, 122 bp, Homo sapiens
acaggaagctactgggggccaaggagtgaccacctggaagcccactctcttctgcctctacgcacgtgagagacagtgaagagtgaagcatacgttgatgcagtgaagcattctgttctgca

SEQ ID NO: 59168 - DNA, 122 bp, Homo sapiens
aagcaataaaaccaccctaacccagctgggggtggattttgcttggttcagagcctatctcgcctggatcttatattggacttacacaaagggatttactccaggatgggtaactattttgg

SEQ ID NO: 59169 - DNA, 122 bp, Homo sapiens
gagaggcactgaccctctcactgaactgagatgagcagtgagatggctgttaagtgagagcgaaataaacttctgtattcttcaagccacttaaccttacagcaaaaaacagcaactctgtt

SEQ ID NO: 59170 - DNA, 122 bp, Homo sapiens
cgcggttggggctgcaggtttttggagaagcggctgggattttatgtgtggatgctgacacgcagctggtactgtctgcaggctctgcctagcccaacactatggtggaaagcatgtgccac

SEQ ID NO: 59171 - DNA, 122 bp, Homo sapiens
aaggataaaatttcccatcccccatcagcagggatgagccctttttagtgctagttccttcgtggggtgctggggacccggaagctgtccctgccctcagggagctcacagtccaagagaga

SEQ ID NO: 59172 - DNA, 122 bp, Homo sapiens
aagaaggcggcggccgcagctgtgggaccactagggagctgcagaagctgaagcagcaggcgatggagtactaccgggagaacgacgttccgcgcaggctggaagagctgctcaactccacc

SEQ ID NO: 59173 - DNA, 122 bp, Homo sapiens
cgcgaggaggagatgcgccggccccggccgccctgctgcactcacctcagcgctgtcggacgggctctccacagccatcttctgccacgggtccgccagctgcgccagcggcatcttccccc

SEQ ID NO: 59174 - DNA, 122 bp, Homo sapiens
gtggggggctggggtggggtgctggttttgtttgaggtgtttcgggttttgttgaaactgcgaccctccttattggctgtagatttaaatgttgacataccagcggggaaggctggaggctg

SEQ ID NO: 59175 - DNA, 122 bp, Homo sapiens
cgtcatttatttcctcacttaggtccttgtccctgaagggccatggagctaagtgaccagcgtgcctctctgggtcccgtgtgtgtggtaggaatcttcacactgccttgctgtgaccgtgg

SEQ ID NO: 59176 - DNA, 122 bp, Homo sapiens
ttccacctgcactcccatggcggctgcggacgctgggtgggcaggcagcgcgaggggcggcgtggactcacagcgacctggcagcggttccatggctctgcctagtcccctttcgccgggtt

SEQ ID NO: 59177 - DNA, 122 bp, Homo sapiens
gactctcactctggtatcaccatgcagagcaagagcccatccaacgttaggaggagccaccgccttttttagaacaactgtgcaggctctaaagcctcggaaaacctgagaggcgcatcttg

SEQ ID NO: 59178 - DNA, 122 bp, Homo sapiens
gtttgacaggaagaagctactcttctccgaattacacagaggtgatgtgttcgtattgcacgtagacgtgtgtataacaggacctccttccccgcgccccgccaccccgacacacacaggag

SEQ ID NO: 59179 - DNA, 122 bp, Homo sapiens
gcaggtgagcggcgggcggggatggcggagcaatgggagctggacgaggaaggcattcgccgcctgggggcgctgacgctggagcagccgggtagggtctggccgggagggtgtggactggg

SEQ ID NO: 59180 - DNA, 122 bp, Homo sapiens
ttcgtaaagtttagtactgtaggaaaccagaatatgcctccccaaaatgtgaaggattctcgagctgaagacagttaagatgcagtagagctctctgcctaaaagcaggacacagatttaca

SEQ ID NO: 59181 - DNA, 122 bp, Homo sapiens
cttttccgagccgccttagtggccagctgcttgcgcggcgctttgccaccggtggacttgcgtgcagtctgcttggtgcgggccatctcagactacctgaaagaaaaactcagccacttggc

SEQ ID NO: 59182 - DNA, 122 bp, Homo sapiens
gtaaagggtttggaggagggttgccttcaggaagctgagctggctgaaatgtgctgtctgcggaaggaagccgaccttcctcaatgccagcctggcagtgcaagggcaggaaggcagggaga

SEQ ID NO: 59183 - DNA, 122 bp, Homo sapiens
ttttgagccttgtagcaccgagtggtacaggaaaggcaggtggcttgccttatacacacacgttttcttttaagtaaggaacagaagcctcaagctctcccattctgctctctgcatgttcc

SEQ ID NO: 59184 - DNA, 122 bp, Homo sapiens
agagtgaccgcgcatacctgcttccaagaataaaacagttctgaaaagcaaccgcaaagccgggcgcggtggctcacacctgtaatcccaacagtttggaagaccgaggcgggtggatcact

SEQ ID NO: 59185 - DNA, 122 bp, Homo sapiens
aaagcttaaagtattgatcacagcctccttcctgtcatatgtagcacctgttcttctcatcgctggacctataaagtggcattaatcatcaagagtccagcagaattgggaaagtcatgtat

SEQ ID NO: 59186 - DNA, 122 bp, Homo sapiens
gggtgtagtccaccaggccagggctgccgggcagcgagtttacccaggctgagtactgctcgggcccggcctggatcccgaacagcaggtcgttaatggaggtgtgatggccgccaaccact

SEQ ID NO: 59187 - DNA, 122 bp, Homo sapiens
acgcccgtgcgcgggctgccctatgccatgatggacaagcgcctcatctggtgggtgccacgcgggcgccagacggtgcgtggggggggtgctgcgaggctgccccgtcggatggtgtggga

SEQ ID NO: 59188 - DNA, 122 bp, Homo sapiens
cctgggactcaggtggacgatacccttttggtcggtggcagagcttcatgtcacctcttccgctgtgtgtctgctgggatctgtggctcatggcggttgggaagctatctgggtcctgcctc

SEQ ID NO: 59189 - DNA, 122 bp, Homo sapiens
atactgtacatttgtgagtcagtcacgcattacatactctgggcttcatatctcgtaagacgtttaagccactgtttaattgggttttctgtaactatacccgatgtaattctaatatgtcc

SEQ ID NO: 59190 - DNA, 122 bp, Homo sapiens
tttggtggcatggtgtgacagtgcccacgtcctgatttgggcaggtcggtgcaggctatccgggacagcgtccttgtttttaggaaacccacacaggagaatctagaggcactctctgcagt

SEQ ID NO: 59191 - DNA, 122 bp, Homo sapiens
gatccaaggagccgcagcccgtggctcagtttaacccccttgactttccctctttgcctccggagaggcagaatttgcagcctgattattcgtagaaataatttttcaaatcttgcctttcc

SEQ ID NO: 59192 - DNA, 122 bp, Homo sapiens
atgaactattttaatccttcctgcataacactgggtttgctactattcaacccattttatcgatgaggaaaactgagggtcatagagcttttgtaatgtgcctggagaaagaagtaaggatt

SEQ ID NO: 59193 - DNA, 122 bp, Homo sapiens
gcgccttttaacgcgcaggaccccgcggaggggggcggggcggggcgagctccgaaggggcggggcctaggaggcccagacaccgcccaaagccgccccgacccccaccccgaagggtcccc

SEQ ID NO: 59194 - DNA, 122 bp, Homo sapiens
taaaataaacactcttgagagagtcccaaattttaaatattttgaggcggggggtgccggcggggtgagaattgtctgtgataacttagttgtttgaaacttgtttaaaaataagtttcatt

SEQ ID NO: 59195 - DNA, 122 bp, Homo sapiens
gtccagcgcgcacagagttaaaggcatcatcgcagccattagagggaaaagttgcggcgccgcgagcccggcgaagtcctcagcccgccccgcttgcccactccccacttcccgagccggct

SEQ ID NO: 59196 - DNA, 122 bp, Homo sapiens
ctccggtccttgcgttccaggcttcctgggccaaggggttgcccgctgccctgaagatcccgctctgccaggcgctcctccgtccctccccaaacaaaaatcctccagacaggttccaaagc

SEQ ID NO: 59197 - DNA, 122 bp, Homo sapiens
ggcgcgggccgggccttggggagggaggctatggccttgagtgcgcggggagccgactctcggacatgagaggagtcagataggatccgtgagtgcctccctagtgaggaagacagtgggag

SEQ ID NO: 59198 - DNA, 122 bp, Homo sapiens
tgctttgatggcacagctggagacagcaaggttggggagcccacctgggaagttccgccacgggaccggggtgttgacagggacgacccacttgtgtgatgagacccgcggggactcccgcc

SEQ ID NO: 59199 - DNA, 122 bp, Homo sapiens
gacctcacaccgccagcagggctgcaggagcctggtggacttgtggcatgtggggaaacccgaagggaggcttagaggtggcatgtcccctgattcagagctggtgtttggcgtctctgagt

SEQ ID NO: 59200 - DNA, 122 bp, Homo sapiens
gcacaggaaggaaaattttgcaaaatgtgctgctgccgctcctcagcagagtatagtgggcggtttgaagctgttttcttggtgttcaagtggctggggccctggcgaccccggtcagcctt

SEQ ID NO: 59201 - DNA, 122 bp, Homo sapiens
gagggtctctaaggttccccgggtggtaacaagcatttaaaaaggcgatgtggattcagacggcctcctccccacagcatcccagacaaagccgggctaggccccggggcgctcctggtgca

SEQ ID NO: 59202 - DNA, 122 bp, Homo sapiens
aaagtaggaagaagctagaatacaaagttttccatcagttttaccacgtggagctggaagcgttaaatattttaaacaacggaggtgctgcctggggcggtagttcacacctgtcctcccag

SEQ ID NO: 59203 - DNA, 122 bp, Homo sapiens
cctcttccccatcggctttgtgggcaacatcctgatcctggtggtgaacatcagcttccgcgagaagatgaccatccccgacctgtacttcatcaacctggcggtggcggacctcatcctgg

SEQ ID NO: 59204 - DNA, 122 bp, Homo sapiens
gaggaaggactcgggcaccaggaacctgccccccaggaaagtcttcagaactccaggggccggaggggttctgggcagtcccactgcgccaagatggagaagtgctcccgctgccgcagtgc

SEQ ID NO: 59205 - DNA, 122 bp, Homo sapiens
agtactaagccccagtaaggtgttcaggactggtaagcgactgtcatcaagtaaggcccccgtgctgggcaccccccgtgctggccgcgtccccgcctctgcgccctgcgtggaccccgccc

SEQ ID NO: 59206 - DNA, 122 bp, Homo sapiens
tgggtttctgtctcctcccggagggagcgcttacggggtggggtggacctagggctgtcgcgcctgccgtgtggtcctggagaatgaggcttaccaaaggctcaagacagcgtccccatgga

SEQ ID NO: 59207 - DNA, 122 bp, Homo sapiens
gtatcagatgctggtgaacacaggtggacaaagtggttaacagacaggttttgtccatctcgttcaccaccctacccagcctcagcacctagaccagtgttggcacccagtgggcgccaaat

SEQ ID NO: 59208 - DNA, 122 bp, Homo sapiens
ttctccgacccgggcggacgccagccaggctttgtttgcattgagtcaacagggactgtgcgtccgggacccgcgggcaatgaggggcagggaggggagcggacggtggatgggtgggtggg

SEQ ID NO: 59209 - DNA, 122 bp, Homo sapiens
gttgattccacgcgctgcgctgctcggcagctgtcccagaactgaccacggacccctccgcgggtcctgctcctgacaagggccttccggcactgggagttttgtgttagtggaaaggaaga

SEQ ID NO: 59210 - DNA, 122 bp, Homo sapiens
acccaggagggcccctcaccgcaagggacgggcttaggcggataaatgtccggctcccctcgaggggcagagtcagcaccccccacacggtccctgagatggccctgggaccgagccgccgc

SEQ ID NO: 59211 - DNA, 122 bp, Homo sapiens
catgaatatttagcagggctccctcattaactgggtttagagaggtctcccttacaatcacgaagctctaataaatgctggcatttaattgtgctcatccaataggaactaagctgcagggg

SEQ ID NO: 59212 - DNA, 122 bp, Homo sapiens
ccctgacccaggccccaccctgaacttgagtgagtgtgaggcccaccaggggaagtgctccggtgcccacctgcgccatgggggggctggcccagggcccagagcgtggcgacaacgctggg

SEQ ID NO: 59213 - DNA, 122 bp, Homo sapiens
cttgggtggtcgatgggactgggtgccctggagcagggggcggcgctggtcggggaggctcgggccgcacaggagcccatggagggggagggaggctcaggcatggcgagctgcaggttccg

SEQ ID NO: 59214 - DNA, 122 bp, Homo sapiens
aatgatccactgaatgtcttacactagacgcaacgacacaagagaaataaaacgacaatgcggcccagcaatgctggggcccagaggcacggctcagaccaaagcaggatcagagagaaggg

SEQ ID NO: 59215 - DNA, 122 bp, Homo sapiens
ggtcctgaaacagcctcgggggacgaggctgtatgctctgtcccagttacactcaggctccggcattagggaaattggaaaccaggcatggaagcagcgtccctaccttcctcggccaggtt

SEQ ID NO: 59216 - DNA, 122 bp, Homo sapiens
cttgagccccagaggcaaacgctgcagtgagccaagattacgccactgcaatccagcttgcgctaccgaataagactccatctcggaaaaaaaaaaaaaaaagaaagtgcaacgccccacaa

SEQ ID NO: 59217 - DNA, 122 bp, Homo sapiens
ataccaattgtctgtttatttttgactgtggatttagaggctttgcaatttgtcagggttcggaaaaggcagaattgttcttgggaggttccataaataggacagggcattgaaagaaagaa

SEQ ID NO: 59218 - DNA, 122 bp, Homo sapiens
ggccccagcgaccaccacagtgccagccgcgatgagcgcttcaaacggcggcagttgctgcggctgcaggccacagagcgcaccatggtacgggaaaaggagaacaatcccagcggcaaaaa

SEQ ID NO: 59219 - DNA, 122 bp, Homo sapiens
agctcactgcaacaccgggcaaacacttcttccgccagggatgcggttaggacaatgccacgtggcgtcacagtatgctgttatttattccaataaagacctcgtgagcatgggcctgtcca

SEQ ID NO: 59220 - DNA, 122 bp, Homo sapiens
cctgctatctagagctcgcctgtaggtggcgccctgcttcgctcaggggaatttggagggcgaggacacgggtcaccagctgcctcccctgaaggccaatttaagttgtcccctggcttgaa

SEQ ID NO: 59221 - DNA, 122 bp, Homo sapiens
aaactttctccgttttcttgtccataaaaagagtatactaggtaagtcttctgtctacctcgggacttctgtaagtatcataagagatgttttatatgacaacacttcacaaacgtttagta

SEQ ID NO: 59222 - DNA, 122 bp, Homo sapiens
tcaggggacagggaacggtgtccccgacctgtgggaagcgtggggacagaggctgcgtcccgacctgcaggaagcgaggggcagggaacggtgtcctcgaccagcgggaagcgagaggacag

SEQ ID NO: 59223 - DNA, 122 bp, Homo sapiens
gctcagccttccccctcccccgctcccgcttctttctgcgaggccattacggccatctcccggcctgagcctcctggaaccaagccgaccaagaggggtttcctccgtgttgtctcgtcccc

SEQ ID NO: 59224 - DNA, 122 bp, Homo sapiens
tcctggacccagctgccaggacacagtggagaagccactgtgatttgtgattagaagtctcgcaccgagcggcacaatgtatttcctccccaaaccacgggctcaattccctcccccatcca

SEQ ID NO: 59225 - DNA, 122 bp, Homo sapiens
ttctttaactcacaagttaaacatgctcaaaaagtgcaataatacagaaaaagccaaagtcgatttcattgttgaccaatcccagtcacctccccagaggtaactgtgagggatggtttgag

SEQ ID NO: 59226 - DNA, 122 bp, Homo sapiens
gccccctgttagaagcaacttttagtgttccttgtcctgattcaatagaatgtttgaccacgggataccaagcaactacggggttccaagtgcctgtgtgacccacaaagtcatagatggta

SEQ ID NO: 59227 - DNA, 122 bp, Homo sapiens
gcctggaaggacatttatatattttcatctcgacagacttcccttcctggtcccgtctggcggagtttactatgacaaagaagtggcctttgctgtgccctcactgacctggaaggctgtat

SEQ ID NO: 59228 - DNA, 122 bp, Homo sapiens
cccagaaagagagatagttacctggaatagcggcaaacacaagatccctatcgttgagatcgctgaggtgacactgaaaagtctggatcttgacatatttaaaggacagtcaacttaggata

SEQ ID NO: 59229 - DNA, 122 bp, Homo sapiens
agtgtccttctgtcattggtgccaccaactttaacgtgcggtcttgacagttgtggcaagcgggagagaaagattgaggcaaattgcacaggcaggtttttagccagctgggaagtgggtat

SEQ ID NO: 59230 - DNA, 122 bp, Homo sapiens
tactaactcactgggaaacattcctgattcggcctaattgccttgcctttgacatcctaccggtcaaaccagtcagtgacctgaattaagcccagctgtttggcccacattaccatgctaat

SEQ ID NO: 59231 - DNA, 122 bp, Homo sapiens
ggctggaaaccgtccaatcagacacgaagctggagcggacagggtggcttccgggtttggcgggtactttgtctctcgctctagcccgagctgcaggtctcgtcttccctggtctgtgtcct

SEQ ID NO: 59232 - DNA, 122 bp, Homo sapiens
actgaccggtccaacttcttcacctttgaaacgaggtgaggacattattaactccactggcgcagcatcgaggtcttgatttacttatgaaaatgtaatcaatccaaagaacagtggctgac

SEQ ID NO: 59233 - DNA, 122 bp, Homo sapiens
gaggagtgcccccgggagggcaagtctttcaaggcgaagtacaaactggtcaaccacatccgagtgcacacgggcgagaagcccttcccatgccccttcccgggctgcgggaagatctttgc

SEQ ID NO: 59234 - DNA, 122 bp, Homo sapiens
ctagtaataatgattgaaaaggggggattcgtgccttacgtgtaccagtgcgtttgtaaacgttcctggctttcgtaggcattgaaggctgcgtctcagctttgctcccgtcctttgcagta

SEQ ID NO: 59235 - DNA, 122 bp, Homo sapiens
accgatgcaacggcgaccctagcggcggtgacttttttggcggtggcggtgacaggaccccggtgcgttgatgtggggctgcgcggcggcggcggcagcagcggctcaggcccctgcagtcc

SEQ ID NO: 59236 - DNA, 122 bp, Homo sapiens
cactctctaggtggattccctctaacaatattgccctttggtggctccaggctgacattccgagactcagcaaccccagagaaaagaaagcttctctttgcacactattgcagcaagtgctg

SEQ ID NO: 59237 - DNA, 122 bp, Homo sapiens
gtccaacattttatcacccaccagctaccaagtatctaacagcacaatgtcctagctctgcggtgctcttgaaagaaaaagtgaaaaccctgacaagggagccatctggatttgtattcctc

SEQ ID NO: 59238 - DNA, 122 bp, Homo sapiens
cactccagcctggaccacagagcaagactccatctcaaaaaaaaaaaaaaagaattgctacgtactgaatgggatctgagaagcaaatgatgtgtttgaaatgcctggcatggggtctagac

SEQ ID NO: 59239 - DNA, 122 bp, Homo sapiens
gcatcgagggtaccgcaagtgcgcccacccggcactggggcaaccctcgtcgttggcctgcgccctgcaccccgcgcctcgctcccagacggtcgccccgcccctaatccctggcagtcctt

SEQ ID NO: 59240 - DNA, 122 bp, Homo sapiens
gccagcccccaggagtcatccttgttccttcccagggctggggccccgagtgaccaatgccggtgagtctacccactcctcctggctcctgggctgcctgccttgtccagccactatccctc

SEQ ID NO: 59241 - DNA, 122 bp, Homo sapiens
gcaagcccaacccaagggatagtttgtagatgcattgcttgtggggactagggaaacacccgaggtcactcagagttgtcagggtgtagccagacaactggctgaagagagccagaattcaa

SEQ ID NO: 59242 - DNA, 122 bp, Homo sapiens
ttggaggaggatgtgtggctctgaagactatacatagtaggcaaagtgccagctgtgactcggaacaaccaaaatcaggaccaggagcagtttagaagagaaaataattcttggaaaaagca

SEQ ID NO: 59243 - DNA, 122 bp, Homo sapiens
agagaagcgtgaggctgggcacggtggcgcgtgtctgtaggcctagctacgagggaggatcgcttgagcccaggaggtcgaggctgcagggctatgattgcaacactgcactctggcctggg

SEQ ID NO: 59244 - DNA, 122 bp, Homo sapiens
atgacagtgagctggttgtaatgggaactagagcctaggcagatgcattgtctctctggtcggcttactttgctctggatgtggggcccattctcctgtctataaggaagcttcctagctct

SEQ ID NO: 59245 - DNA, 122 bp, Homo sapiens
gccaagcggggaggtggccgggggagggccctgctctgtgcagcctcccctcccccggcccgcagagttgagcacagagggacagaggcacggaacccccagaaatgtccctcctcagaaac

SEQ ID NO: 59246 - DNA, 122 bp, Homo sapiens
gagggtgaccctggttactggactgagagcacgagagtgtgccagacgcgcagggtgggtcggtgcagcccagggacctgtgtctgtctttcagagcgcatcactcaggtgaggaccgacat

SEQ ID NO: 59247 - DNA, 122 bp, Homo sapiens
catggggtattgggggcatcccaggtgaaatgaggctctcaccacctcagaggagccttccgcccacagatgaagcatcccaatgagggacaagaggggcagttggcacacagctcgcaaga

SEQ ID NO: 59248 - DNA, 122 bp, Homo sapiens
gtgatgagattctgagggacccatgaattggattgaggcttgaggggaaatggtgtgagacgaatgggctctggacatatgcctgttgatttgagaagaaatctggctggtttgagggtttc

SEQ ID NO: 59249 - DNA, 122 bp, Homo sapiens
ggacccctggcgggcggcaggaggacatggccagcgacgccgtgcaggtaggcgcacctgcgtctggagtcccggggcgaccggacggcgccggcggaccccgcccgcgcgctgccggggga

SEQ ID NO: 59250 - DNA, 122 bp, Homo sapiens
ccctcttgtcccgctttggatggttctgattgacgccagtctcccgccttgccggggcagcgttcagagaaggaccgacccaggtcccgcgaccctgatttcctagggttgcgattaggacg

SEQ ID NO: 59251 - DNA, 122 bp, Homo sapiens
cagccacgaggcctggcacctgatttctccagcactgtgttcacccttgtgtcctgacagcgtaagcagtttttggtgtctttgagagtcatctttacacagccaaattaaacgaaagaagt

SEQ ID NO: 59252 - DNA, 122 bp, Homo sapiens
ctccgtctccattcatgtgacaatctccacatccccagtggctccactgccgttagaaggcgcacagctggtttgcatactctcccctttagcatggtctgttccccacctgctttcttccc

SEQ ID NO: 59253 - DNA, 122 bp, Homo sapiens
ggcggagctaggctgcctgggcggggccggaatcctgacaggcggagttagagcggggggcggggtcagcgcgcgcgggtggggctctggccatgggcatggggcggggccgtcagcggggg

SEQ ID NO: 59254 - DNA, 122 bp, Homo sapiens
tggcgaggcccggcgccgcttagagacttgttccgggctcgtgtctcactcgccggccggcggtggtctcccactgtcaccgcccgggtttcccagaaacgctggccctaagcacagtcccg

SEQ ID NO: 59255 - DNA, 122 bp, Homo sapiens
tgtcacggatgggttgcaccgggctcagctgagagcactttcagtgccgctgccatcagccgccattccttctcttaaagtaccaggcactgggtaaatcctggaatttccagcgtgaatct

SEQ ID NO: 59256 - DNA, 122 bp, Homo sapiens
ctgtaatctttttttttttttttttctggagacagggtctcactctgtctcagagtctagcgagtatagagtgtatggcctgcctgctgggccaccgcagccttctggtcttctggcctttg

SEQ ID NO: 59257 - DNA, 122 bp, Homo sapiens
tgggggcctgcggccagtccttgtaaggaatcagagtccctggcccatccctccccaaagcgccggtgccaggcgttttggcctctgtatctctgaaacgaggaggtcccggggcatccccg

SEQ ID NO: 59258 - DNA, 122 bp, Homo sapiens
gccgctggccacgctggtggtttggacacttcgaaggagccccgaggacgctctcagggccgctttcgctttgctttccttttgcttgtctttgcttctgggggtggatgccttgagaccca

SEQ ID NO: 59259 - DNA, 122 bp, Homo sapiens
agtgcggttttatatccgcaaaagacagtggcttttctttagatacattcagttgagaggcgaaatgttacaaccttgtgaaatactctgtgatgttcacagtggagcaagaggtgagcaaa

SEQ ID NO: 59260 - DNA, 122 bp, Homo sapiens
agggaagacagtattgatggggactgggactgaccaagtcccaatccctccagggaggcacggaagcctgtttgagctgagttaagacagtggccatcctgtcttctggggctaagcagcca

SEQ ID NO: 59261 - DNA, 122 bp, Homo sapiens
caggttcaagcaattctcctgccttggcctcctgaatatctgggattgggattacaggtgcgcgccaccacacctggctaattttttttttttttttttgagacggagtctcgctctgtcgc

SEQ ID NO: 59262 - DNA, 122 bp, Homo sapiens
ctcctgggctccagccatcctcccaccttagcctcctgagtagctgagactattgacatgcgccaccacgcctagctttcaggttctgatctataggtgtccctagagtcttccccttctcc

SEQ ID NO: 59263 - DNA, 122 bp, Homo sapiens
gcattgcaatagggaacgggtgtaacttcaaaatactgccaaagttcctgtggctttagccgacaccaaggaatgtacaaactcaagcacaattcttaggagacttcattcttttacagtgg

SEQ ID NO: 59264 - DNA, 122 bp, Homo sapiens
ggtacggaggtcactgcagcgacttcagcgtgcagagaacgcggggacctaggaagaggacgctccagcccaactgagcgtctctgattggccgccagctcagcttggaacgctggggtgcg

SEQ ID NO: 59265 - DNA, 122 bp, Homo sapiens
ccctgattcgacacgcgggcagcatctctccacctgctgatggaagcgaggagggctccccgctgacctcccaagctctggagagcaacaatgcttgcctgaccgagtcttccaactctccg

SEQ ID NO: 59266 - DNA, 122 bp, Homo sapiens
cccgtgtttcccgggctgggtatttgcctcgcaccatggcggtaaggaggatggatagggcggggtccgcaccagcaaagctctccaggggctgtgagagtgaaaactgagaaagaacatta

SEQ ID NO: 59267 - DNA, 122 bp, Homo sapiens
agaggaagacagccaggcccagacctgacccccaaccccggcactgcagggcgagccaggcgttgagcctggccacttcggcgtgtgcgtagacagcctgaccagcgacaaggcctcggtgc

SEQ ID NO: 59268 - DNA, 122 bp, Homo sapiens
gaactgttaattctcacctgcagggtccactccaacactgatatttcagatgtttaaaagcggacaagaagtagggagaagaaacagcttcattgaccacctccatcaacaacgtctcctat

SEQ ID NO: 59269 - DNA, 122 bp, Homo sapiens
atcctcataggctccctggagctctgatcctggaacccctccctctgcgccgcagctggacgccacctccgacggacacagccagccccttcctgctgccaaggtggcctgacactgtgcca

SEQ ID NO: 59270 - DNA, 122 bp, Homo sapiens
aggctccagtccccgtcccatcggtcctgagtgacagcggaagccctgggtaacaaggcccggcagaaccgaaatgacctgttccaaccacagattatctaagcgagctccctccctgcgtc

SEQ ID NO: 59271 - DNA, 122 bp, Homo sapiens
tcagctctctcctcatcctgtcggactgcccactgccaaacatggtatcctaaaatagtgcgtccaacatttcactatcctgctcaaacatctgtgattgctctctagtctttgttggccta

SEQ ID NO: 59272 - DNA, 122 bp, Homo sapiens
ggggttctcagacttttccactaacaaacctttatatcagtcaatgtcagtcaagaaaaccgaaaccactccaggtattttgcacatcaggattttaatacagggaatggatcacaaactaa

SEQ ID NO: 59273 - DNA, 122 bp, Homo sapiens
tggaggatggcagcaatggaagacagtgcggggccccggcttctgccgtggtcctctctacggaggacatgccaagcacctggggcccgggctacctcccctgctgcccctggagcttccca

SEQ ID NO: 59274 - DNA, 122 bp, Homo sapiens
gcttaggaccccgggaggagaccgagggggtgggtaaaacgtgactgagaaacttgatcgcgcccatctttggggcaaagagatttggaggccgcaattattcagacagttccacgaagtgg

SEQ ID NO: 59275 - DNA, 122 bp, Homo sapiens
cacagtccagtggacccaggaagaaggcacaggggtctgagtaccagccctagaactcagcgttgccaggtgtgctgccatctgctgttcggcccaacctcagagtgaaggcagggtggcag

SEQ ID NO: 59276 - DNA, 122 bp, Homo sapiens
gtgagccagttccaaaatggcggcaggggtggccgggtggggggttgaggcagaggagttcgaagatgctcctgatgtggagccgctggagcctacacttagcaacatcatcgagcagcgca

SEQ ID NO: 59277 - DNA, 122 bp, Homo sapiens
atgcccagccaggcgcggcgcgcgtttgcccggcactttctcggcgcgctcccccttctgcgcccccagactccgacttagagcggactccgatcgcggcaaaccatggccccaggtgcgct

SEQ ID NO: 59278 - DNA, 122 bp, Homo sapiens
cagactcgggggcttcctcttgccctgctacttcctgggagctctgagggcaggaaatggcgccactcagctcctggcctaacagcttggggaccacaaatgcaaaggaaaccaccctcccc

SEQ ID NO: 59279 - DNA, 122 bp, Homo sapiens
ccgggtgcattcgatctcgtttctctaagctactgtcttgccaaggagacttggactcaacggctagctaaccccgcaaagatgagctcagttctagtcggttacggtagaatgccaataaa

SEQ ID NO: 59280 - DNA, 122 bp, Homo sapiens
gaagataagtttgcttcagattctaaaagttctaagaatacgaaggcctcagccgcccgtcgccgggcgacagcccgaggctctcgttttctcccacagccccgcactccgcctttgaggcg

SEQ ID NO: 59281 - DNA, 122 bp, Homo sapiens
gccagtctttccttagaaatgcctgtttggcataactttaagactcaagatggtttaaggcgcatcctgtttcttccaaaagggaatggacaaaactcaacattcacggagggcttagagca

SEQ ID NO: 59282 - DNA, 122 bp, Homo sapiens
cagccacacaacttcccggatccctgtgaacttgctgggcttcatcccatctttcctgcccggctgaatgacctgtatcccaacagcttccttcactgagtcagggccctggcagggccagg

SEQ ID NO: 59283 - DNA, 122 bp, Homo sapiens
ctcaccgccgccgctctggtaaatgactgtccgcatggtttcaacatgcagttcttcctgcgaagtccactaggtggtactaatgccacggacaggatcactcacaaggaaacccagagcca

SEQ ID NO: 59284 - DNA, 122 bp, Homo sapiens
tgagtgacgggcctgaccgtccccgctaccgcctgctgccatgcgaccagatggctgacccggcccggcttctcagggcccagaccagcctggcctcgtgcccacctgcttcgctcccaacc

SEQ ID NO: 59285 - DNA, 122 bp, Homo sapiens
catactgggagccaggtcggggtactgcatttgctcaccagaatcagatcaaacgagatacgagtcctttggtttgattggattcatcatgaggcagcatgggtttgcacttgtagaaatca

SEQ ID NO: 59286 - DNA, 122 bp, Homo sapiens
aggagtattcattaagtggttcattgtttttttcattctaatttattcattgaggttgagcggagcgtggtaagaaactaggaacgaacaaaaactcctgcttcctaaacagggaatggtca

SEQ ID NO: 59287 - DNA, 122 bp, Homo sapiens
cagcggcgcccgcggggagcgcctggagcgggctctggggggcgggcccgggggcgaaggcggggcggaggggggcggtgggcgcatgtccgggaccccgcagcgcggccggttcatggccg

SEQ ID NO: 59288 - DNA, 122 bp, Homo sapiens
attacagtcagcaaagaggagctttcctcgggggacagtctgtcccccgacccgtggaagcgggacgccaaggagaagctggagaagcagcagcagatgcacatcgtggacatgctgagcaa

SEQ ID NO: 59289 - DNA, 122 bp, Homo sapiens
cgcggggtgaagttgcggggctggcgggcgcgagggtggcggagcgcggagctagagcggcggagcgggcggaggggcgggagccgtgaggagggggaggcgcggcgcgggggccggcggcg

SEQ ID NO: 59290 - DNA, 122 bp, Homo sapiens
cctccaaaaaaacgatgcacgcattttcttaagccactcattattcttattttcacctgacgacgggacgaatctgctcgcttgtgggctgtttggttcagcaaatgcgaaattcatcaaac

SEQ ID NO: 59291 - DNA, 122 bp, Homo sapiens
tctttgtttattcactttgatttggatcattggaaatattaaacaataaataaaacagagcgggggctgaggaaagcaggatcttgctgaagtcattcgaatgcatcccaaccagtgctcag

SEQ ID NO: 59292 - DNA, 122 bp, Homo sapiens
cccggcgggcagccgtcccgccaagtccttcaagttctgggccatgtctgatcttgaggccggcggcactggaggtcagaagggggtgccggcccgcctctaccccgctccggcttaggtac

SEQ ID NO: 59293 - DNA, 122 bp, Homo sapiens
acgggacgtgacgagggcggtcgcctccctccttcaccagcggtttgtggaactcccgcccggctcgggaatgtatgctcgcccagcagtattcacagtaatactgcagacaggtgacgttg

SEQ ID NO: 59294 - DNA, 122 bp, Homo sapiens
aggtgttacaggggaataaaacacaatttaatttaggcacataagattattttagaacaacgggataagttccacaattgaagtattgccaggtgacaaagttgcccaaggaagaaagagat

SEQ ID NO: 59295 - DNA, 122 bp, Homo sapiens
ggcgggtcaagcacctttctcccccatatctgaaagcatgccctttgtccacgtcgtttacgctcattaaaacttccagaatgcaacaggacggacttggagtagggacaaggaacggaagt

SEQ ID NO: 59296 - DNA, 122 bp, Homo sapiens
tccgtgtgtatatcacatcggttacatgcggatccgtgtgtacatcacatcggttacatgcggatccgtgtgtatatcacatcggttacacgtaaatccgtgtgtatatcacatcggttaca

SEQ ID NO: 59297 - DNA, 122 bp, Homo sapiens
ccagccttggacacggaccagcctatagccccaccccctctatctacatgccagcctagccgagggccactgaccgatcaaagatggctcctactcctgctgaatgggctgagttgcggtgc

SEQ ID NO: 59298 - DNA, 122 bp, Homo sapiens
gcgcgggccttgggagcggccgccggagctccctgctacgccgtatcttccgagggcccacgccttgggtcacgactggaccagggctttgaccaagggtcctctgtgtgccccaggcccgc

SEQ ID NO: 59299 - DNA, 122 bp, Homo sapiens
cgggcggtggggtggtgggggaggcggcgggggcgggggtaggaatgagcatttgcacaacgttacacagggatggtcccgctgactcaggagcattccactttgtggcagcgatctcagag

SEQ ID NO: 59300 - DNA, 122 bp, Homo sapiens
cagcaggtcccacagttgccagccaagacctccgctccagaaaccatgggatgctttccccgggggaaggatattgtcttcgccagccacgaagaaatccgtccctgtgcaccttgtttccc

SEQ ID NO: 59301 - DNA, 122 bp, Homo sapiens
tttgctcctggggtgaagtcctatccagacggttggaatcttcctggaggtggtgtccagcgtggaaatatcctaaatctgaatggtgcaggagaccctctcacaccaggttacccagcaaa

SEQ ID NO: 59302 - DNA, 122 bp, Homo sapiens
gccggcgaaaggagggggccctggagggaaaggccgaggccgggagcgccctggcgcccccgcaccaccgttcccgcccgcctccctgcggctctgtggccagctttggggcggagccggtg

SEQ ID NO: 59303 - DNA, 122 bp, Homo sapiens
cgagtgcgaaaaaggcgtgtatgaggggccccaagaccttttcccagcctgaaaagttttcggcgttgcagctctggcgttcctggaccccgggcgctcaggcgcgcacccctcccctgggc

SEQ ID NO: 59304 - DNA, 122 bp, Homo sapiens
tactctgtaatatgaagttatatttcatatgtacacatatatatcccatccacatatattcgatttacatttttgaaaatgacacacatgttcaatcaaattaacaagattaacagaagaaa

SEQ ID NO: 59305 - DNA, 122 bp, Homo sapiens
caaccctgtgatgttgttcataatatcgagggaggaagagtatgatactacttccaatatcgcaggcagtgtacaccacactgcgatattgttcctaatatcgagaagggcaaaggatgata

SEQ ID NO: 59306 - DNA, 122 bp, Homo sapiens
cctttgcttaactcggggctgcacgatggctcagtgccgggacctggagaatcaccaccacgagaagctcctggagatctctatcagcaccctggagaagattgtcgagggcgacctggacg

SEQ ID NO: 59307 - DNA, 122 bp, Homo sapiens
ctttacggagaatctggggtcggaattcacgagcccagtctgctgccaatcactgtaccgcgaatgatcatttatttttatacagaaacattgggtgacaagcttcctgctctccttcaacc

SEQ ID NO: 59308 - DNA, 122 bp, Homo sapiens
cagggaaatgcatgtgtcagcggcaggaaaaacttccatttataaaaccatcagatctcgcgagaattcactgaccttcacgagagcagcagggggaaaaccgcagtcacttcccaccaggt

SEQ ID NO: 59309 - DNA, 122 bp, Homo sapiens
gggaggagggccgacgtggaccacctctggcttagctcaaaccccctgaaatctcgcaaacgcagctagcactcaggctcgagctcctcccggttcccactgacacagagggacccccagac

SEQ ID NO: 59310 - DNA, 122 bp, Homo sapiens
cctcggccttaagatcttgtagtttcttaaataagcgaacacgtgtgcaccccccgactccgttcaagacgccgcgctctgtgggcgcctctgctcctcgctggttttcatgcagccacact

SEQ ID NO: 59311 - DNA, 122 bp, Homo sapiens
acccccaacaagccaagccaaaaaagcagcaatggaaagctagaagaaaacagagatggccgtggctgcatacatcaggggagaccaagtttgcagtctgggcccaggtaagttaactatct

SEQ ID NO: 59312 - DNA, 122 bp, Homo sapiens
ccaccttcccgcaccctgggaccggtaaggctggggcgcggggacttggtaggactttgccggagggcaggagtctgcgcggtgcgtgcggagctccctcccgggacgagactgggaagagc

SEQ ID NO: 59313 - DNA, 122 bp, Homo sapiens
gcgtggtgacacgacgcatgcctgtaatcccagctactcaggaggctgaggcacaagaatcgctggaacctggggggcaaagtgagctgagattgcaccactctccagcctggacaatgaag

SEQ ID NO: 59314 - DNA, 122 bp, Homo sapiens
gggtctgagcgtgactcatggtgtgtgtccctagagcagttcactcagaggcttctcttccgtgctctcaagaataaaagcagggccgccacatcctgataagtcttgccattcagcggtcc

SEQ ID NO: 59315 - DNA, 122 bp, Homo sapiens
gatacactcaagactgcagacagtaaatcaattttatttgtgttcacagaacatactaggcgatctcgacagtcgctccgtgacagcccaccaacccccaaccctctacctcgcagccaccc

SEQ ID NO: 59316 - DNA, 122 bp, Homo sapiens
ctttgttctttcggtgtttgcagcaaatcgtgctgcagttcactctttgggtctgcgtggcgtttgtgagctgtggacactcaccgggaaggtctgcagcttcactcttcaagtcagcgaga

SEQ ID NO: 59317 - DNA, 122 bp, Homo sapiens
ccgggtcgctccctgcttcgccgccgcctcctggcagggccagcgaagccagtgctccagcgcccccgtaacacctcaaagcgcacggagtccgtgttggggaacttggcggcagagtgact

SEQ ID NO: 59318 - DNA, 122 bp, Homo sapiens
tcttgttgccatccaggatgcgtttgagcagctctgtcatcaggggcttgaggtgcatgtcgggtggctggctgaccacccagtgggcatagcggctcagcgtccagcaggcgatggagcgg

SEQ ID NO: 59319 - DNA, 122 bp, Homo sapiens
ctgctgcctctgtctgtgaaggatcgtcatctatacactcagtcctggctcaggctgtcacggtgactgcaggtgtttgaagctgtgggactcattggaaaaataattgaaaatgggattgc

SEQ ID NO: 59320 - DNA, 122 bp, Homo sapiens
cttggcgcattacgaggaactagagaaacgtgcacttttcctaagacatcaggaaaggagcgaggagagacttatccattttgtcccatagcagccgccatatggtggcagacagcaacaac

SEQ ID NO: 59321 - DNA, 122 bp, Homo sapiens
ggcctaccggccagcacccaccctcacgcccagcagctccgagaacagccccagtggagacggaaatccctgcgggggccgccagctgccagcctgccacctgcctcccccacccgccccgg

SEQ ID NO: 59322 - DNA, 122 bp, Homo sapiens
aaacagaaacatttcattctgaaaagtgattcattccttttcttgtgctgttcacaaggacggggctaggcacggtcgtatcattggaaaatgcgtatgaccttcctggaaggattaatgca

SEQ ID NO: 59323 - DNA, 122 bp, Homo sapiens
ccggggcacgcgtggctcggacccggggagtgggcgggtgggtgcccgtgggcggagcggcgccgggactgagtggctggcagctatgtctgcgagagcagcggcatcaccctggatggaag

SEQ ID NO: 59324 - DNA, 122 bp, Homo sapiens
gagcgccacccgctggaggcagggctcatcgcccagcttccgaccgggggctgcaagggccggggtcgaattgaggttacagcccattatggcaaaattattgcatttccctcgcagttcca

SEQ ID NO: 59325 - DNA, 122 bp, Homo sapiens
caaggagggagagaaagcttcgggggcggcccctgagccccggttcaggattgggcagcccggccgggaaggggcggccttccctcccggaaggggcgtggctcttcagaggcggcaaattg

SEQ ID NO: 59326 - DNA, 122 bp, Homo sapiens
ccatcacgcagacaggaagggtgtttgcgcactctgatcaactggaacctctgtatcatgcggctgaattccctttttcctttactcaataaaagctacatcagactgatgctctttctcca

SEQ ID NO: 59327 - DNA, 122 bp, Homo sapiens
acggccccgcttctcagtgccgtcctttttctgcttggaggccaagggctggctggacttcgagctcgactcgctcatcttcccttctctaaggactagttggaaaagtgatggctgggatg

SEQ ID NO: 59328 - DNA, 122 bp, Homo sapiens
ccacacggcccgggaggccttccggctccagtcacccccaccctcctgcccgccgacagacgcaaggcctcactaatcgatggccgcgccccgcccactgaggatcgttgccactggcaacg

SEQ ID NO: 59329 - DNA, 122 bp, Homo sapiens
gcggacgcccccggccaccgcccgtcacgcccccgccccgccccgccccttgggagcgcgcgccactcgggggccagaacgcctggccctggcactggggatccaggacccgcgagccccgg

SEQ ID NO: 59330 - DNA, 122 bp, Homo sapiens
agtctggttgtcaccacatgatctgccagggtttcctaatggatctgctatttcaaatgacgaacctgatttggcaaagccagaggcccctctcatgacctatgtgtagtgagaagctcctc

SEQ ID NO: 59331 - DNA, 122 bp, Homo sapiens
tggaggataaaatgtgaacaacacgaaagttttatttctttcaaatccattgttttaccacgttctattttttcctttttagacatgagggttaaggttagagttcgattacaactgggctg

SEQ ID NO: 59332 - DNA, 122 bp, Homo sapiens
aggcttatagtggtatcttgcaccactctcaggatctctgctttgttccatacaaaaatccgctttcaattcatatttctttctcttgaaatatacttccatatttccatgcttctactcat

SEQ ID NO: 59333 - DNA, 122 bp, Homo sapiens
cgaacctgcgcgcctggggctcaccggggctgggtaggtggctacaagaacctgtcttcccgcggtcaccccatggggttggctgaggatggggcctgagaccccgagggtggctgaccgcc

SEQ ID NO: 59334 - DNA, 122 bp, Homo sapiens
ttccagcagcccccaagctttgggggaatgggggcttcccccatttctgtctttgtggagcgggcccctcccaggacttggggccccaaccccaagcgggagtcccaattctccaacctaga

SEQ ID NO: 59335 - DNA, 122 bp, Homo sapiens
gatggcgagctctacactggaacagtcagcagcttccaagggaatgacccggccatctcgcggagccaaagccttcgccccaccaagaccgagagctccctcaactggctgcaaggtgaagt

SEQ ID NO: 59336 - DNA, 122 bp, Homo sapiens
cccggctctcgcccaggccgtggtagcttccgcgcctagggataaacttgtggtagctcgcgggggacaccgctctcccaggcgctttctacgcgctgtgcaccctcggcctaggccccggc

SEQ ID NO: 59337 - DNA, 122 bp, Homo sapiens
gaaggagaccgtccccatcttatgctctctatgaattcacagctgccctaaggtgaaactcgttggacttcatttgcccaaggacaagggttctgagtggaagcagcttctacagcatcagt

SEQ ID NO: 59338 - DNA, 122 bp, Homo sapiens
gtaacgtttcccagaccttcccctccatccctcccgctcattcggagggatggtgaagcccggttcctgggacccgactcggagggaagtcctcttcggaacctccacagtgccgcacgggt

SEQ ID NO: 59339 - DNA, 122 bp, Homo sapiens
gctccgcgcccccgccaaaacccagtgagaaattatttgcattcctggaggctgcaggagcgagaaatgagctgtaggagtcggtgggcagcaacggcggcaggcggatggaagagagcaag

SEQ ID NO: 59340 - DNA, 122 bp, Homo sapiens
agcctgtacacagatgtgtcgtaggcctgtgcttgcatctgcacgcccacgagtcacacacgcagtcagcatcctgtgtggccgcagacatcacctacactaggaccacacacgcgcatgca

SEQ ID NO: 59341 - DNA, 122 bp, Homo sapiens
tcccgccctccgccccgagccccaccccccgaaggccgcgccccaccgcacctccgcgcacggccaatggcgtgagcccctgacagagtcccgccccctccaaacgcacagccaatggcgtg

SEQ ID NO: 59342 - DNA, 122 bp, Homo sapiens
ttcattcattccgcatgcatgcattctgcaaatatttatcaaggctcactacaagccaggcgctaggctggaggctaggagcataaagatgaataagacacagttccaggccgggcgcagtg

SEQ ID NO: 59343 - DNA, 122 bp, Homo sapiens
cctcggaccagcaacgcagcagacgtcgagcccctaccctcggaccagcaacgcagcagacgtccagcccctgccctcggaccagcaacgcagcagacgtccagcccctgcactcggaccag

SEQ ID NO: 59344 - DNA, 122 bp, Homo sapiens
acccagttttatggctctgtgactttttttctttctcctgtccgatcataatcctgattccgatcccaggaatcagggccctgggaactttttttttttcccccaaatgcaaaggattttga

SEQ ID NO: 59345 - DNA, 122 bp, Homo sapiens
aatcagagtcctcaggaaacagtttttcagggtgttgtattgcattcaacccctgtggcacgtgatcatccacaaatagtatgtacagaaactttagattggattaactagaataccatatt

SEQ ID NO: 59346 - DNA, 122 bp, Homo sapiens
gcctgggctgccgggtgcccccagttctccgtctcctcacctgtgtcaaggagacctccccgccccttccgaggcccctcctcggtgcttcagagccgcctgtcctccagctttcccactgg

SEQ ID NO: 59347 - DNA, 122 bp, Homo sapiens
gtctaggctcacggccgcgctctttatggccgcctgttccttcctccttccctccacctccgctctcatatcagcttagccttgccgctgctgggagctcatcgccctaggccaagaaggac

SEQ ID NO: 59348 - DNA, 122 bp, Homo sapiens
ctaactgggtcttgccggggacgtttggcatggcgctctagcttttgttccttttaattccgcggcctccctctcctctgcccgccgattacagcaccccgaaggcttcctgctaacgtcca

SEQ ID NO: 59349 - DNA, 122 bp, Homo sapiens
gggggagcaccggcggggagggcagaccagctctgtctcaccttgctgtcggagtccacgcgctcatccacagagtaggaatcatagtagagactgaagtcatcacccaccaccgtctccca

SEQ ID NO: 59350 - DNA, 122 bp, Homo sapiens
tcggtttcactacgatcccgatagcttgcagagtctctccggccaccatccttgactcctcgaagccttcggtcacactcatcctgatacatcagattgggattgttggctgaagaagtggt

SEQ ID NO: 59351 - DNA, 122 bp, Homo sapiens
gcctccccacgaccgtcgccatggtcaccgctggcggcggagaggggtttacgtaaaggacgcagcgtcccccggggggcggaggcggccttcgcgccggcgccggcgccctgcggaagcgg

SEQ ID NO: 59352 - DNA, 122 bp, Homo sapiens
ggaagagccagggggaccgcgaggagccgagcgtcctcgggcaccgccctcacacctcctcgagtgccctgggaccactgggccacagatggtcatcaggggaagccaccagggagtcccga

SEQ ID NO: 59353 - DNA, 122 bp, Homo sapiens
cagggagagcctaggggcttgtcgctcgcctggacacacccccatgccaggtcagaaaggcgagggaaccgctgcagcccacgcgagtcccgacgccttcccgcgaggagacggaggccgag

SEQ ID NO: 59354 - DNA, 122 bp, Homo sapiens
gctgtgagccctggggactcgctgcccttttgattaactcgtcttattacgtggctctcccggctctccttggggaccctccatgcccaccatcccagggggcctttgggatccatgcctgg

SEQ ID NO: 59355 - DNA, 122 bp, Homo sapiens
actattccctcctaaatatcattctagaagagtgctgctgaacagaactttgtgcactgacgggaatgttctacatctgctctgtccaatacagcagtccctatcttcgtgtggctattgag

SEQ ID NO: 59356 - DNA, 122 bp, Homo sapiens
aagaaggctatttatgtggtctgtttacagttacccggtttcaacactaagccagctttccgccacgtctcgggcgaacctccggcctgaggtcacagagacgcccgggtggctctcaggag

SEQ ID NO: 59357 - DNA, 122 bp, Homo sapiens
cggcagcgggggtgggagctgcggacggccatgtgcgcggcggagaggccgggtggccaccgaaccttcccgcctgttctgcggtgggtaggagtttggaaactaatgttcctgtgctaacc

SEQ ID NO: 59358 - DNA, 122 bp, Homo sapiens
cccggcacacccgagtcacgcacacccagccctgtccccggctgcccccacatccacatccggataagcgcacactttggagtccaagcgcccacctccttgggttgcacacacagcgccac

SEQ ID NO: 59359 - DNA, 122 bp, Homo sapiens
gatcagagcatacaaagtcactcccatgggaacacccagtctgcacacattccctctgtgcgcccctccctgccctccaggaactcttcttgctccaggattcaaagcactgagcttgttgc

SEQ ID NO: 59360 - DNA, 122 bp, Homo sapiens
tcggtagagtctgaggatagggcagtcttcgctcgcggctgcaagatctctgaagggggccggcgtgcggaggctaggggaccgggaaggaggagttaggcgggatgattcatcctcgcccg

SEQ ID NO: 59361 - DNA, 122 bp, Homo sapiens
aaaaaggtacacatgacagggaatcgtaactggacccaacagaaatgttcaaaccaatcccgttaactcaaaatccgccccgctggtctacaacaggtttcggtccgggaccgggagcccca

SEQ ID NO: 59362 - DNA, 122 bp, Homo sapiens
agggagttggtctgcgcgaagatcgtcaacctgctaacagaccgcacatgcactttgcaccgaccatctacgtctcagtctggaggttgcgcactttgggtaaggagggcccggaacttccc

SEQ ID NO: 59363 - DNA, 122 bp, Homo sapiens
agtgctttgggagactgaggcgggaggatctcttgaggccaggagttcaagaggagcttacgcaacatggcaaaaccctgtctcaagaacaaagaaaggaaggaaggaaggaaggaaagaag

SEQ ID NO: 59364 - DNA, 122 bp, Homo sapiens
ctggctggcatcttcccttttgcacctccgggagctgctgctggtgagtggcgttcctggcggtcctcggcggagcgggagcagtgggacgtttccgggggtcgggtgggtagcggcgagcg

SEQ ID NO: 59365 - DNA, 122 bp, Homo sapiens
gatggggacgaggattcgtggcaggcactgagtgaagaccccgcagcccaggagcggagccggaagagggtcctggtcgttgccgacgtggtcgtacctggtcacgggcccccctttcgagt

SEQ ID NO: 59366 - DNA, 122 bp, Homo sapiens
tcaaactgtctgcatccataccatagttctactatctttgtagtagatgcaatagaaaagcgtaagcaaagctttctaagtctcaccgtcttggtttgtaatgtcagtaatcatagcccctg

SEQ ID NO: 59367 - DNA, 122 bp, Homo sapiens
cacgcgctgagcgccaaggcggtgcagcggcagaaccgagcccgcgagagccgtccgcgccggtccaagaaccagagcagcttcatctaccagccgtgccagcgccagttcaactactgagc

SEQ ID NO: 59368 - DNA, 122 bp, Homo sapiens
ggacgtgggggcagggcaggcaggaaggggtgggtgcactgtgggaccccagaacccagccgtcgcaatagctgatggacattctgaaatcaagttccccctcaaggatatgggggttttgt

SEQ ID NO: 59369 - DNA, 122 bp, Homo sapiens
cacagttctatcatggctctgtaagacagaaaaatggaacaaaatgtatatagctgttggcgatacgagccttgtggctcaaattgcataccaaacatgggatggagtaaggctgatggcta

SEQ ID NO: 59370 - DNA, 122 bp, Homo sapiens
gtccgagtccgtgttgaggtgctggaaagcgagtgcgccgagcacaaagcccgagagcaccgccgacgtactctccccctccatgctaccgccgcctcaggctacacaagaggacgagggcg

SEQ ID NO: 59371 - DNA, 122 bp, Homo sapiens
ctcttcgaagaccccgaagggcctgagggtttctattagcctctgggtgaggaggcagtccgtctccttggggaccgctagactgataggcgaggagacgccgtagcgattcggcggcggcg

SEQ ID NO: 59372 - DNA, 122 bp, Homo sapiens
ggctcccccgcggtaaccttcggtcagggtgtgctctgccgcggttctttccagtctctgcgcttttacatgcacacgcacagattgcgagtggaatctcctgggcttttcaaaagaatgtt

SEQ ID NO: 59373 - DNA, 122 bp, Homo sapiens
cccctccttgctggcgattctggggaagattttaacgctccctggagccgtccccagtgacgtcacgggcgcggctccgctccttggccaatcacgcggccggatcccggggaaacccgggg

SEQ ID NO: 59374 - DNA, 122 bp, Homo sapiens
tgcgggggtggtttctgaacctccactgcacgaacaccacgctgtctggttaataagcaccggtggtgacctgtggaaccaaccgctgcagcgcggttctgtgttcgccgcccctcgtccga

SEQ ID NO: 59375 - DNA, 122 bp, Homo sapiens
agggccccagaagccctccccgtgggattccttcccccactctccaggcccctcctgctacgttgggggcagcgccatcccggccactttgtaactattgctctaggtgtcccggctccagt

SEQ ID NO: 59376 - DNA, 122 bp, Homo sapiens
agtagtgactaacaggggtcaagatgaaggtttaaggatgtcgccaggcgcagtggctcacgcctgtaatcccagcactttgggaggccgaggcaggcggatcacgaggtcaggagatcgag

SEQ ID NO: 59377 - DNA, 122 bp, Homo sapiens
gcacgtcccagtggttagggactgtgcgtgctggtccagctctccatgtcttccaggccgcgcgaccgtgagcaagtcactgatcctctctggccctcttttcccaacctgtaggatagcaa

SEQ ID NO: 59378 - DNA, 122 bp, Homo sapiens
ccgccactgctttgtctgggagggagcttaatgttaacatttatcggcataccaatgaaccggtgatcgagaaagccagtgacaatgagcccggtatagagatgcaagttgagaatttagag

SEQ ID NO: 59379 - DNA, 122 bp, Homo sapiens
aaaaggagtgagaagacaaagccgtcaaagccccaacagctttgtatttctccagcccggcgcagaccccggagctcccgaggcactccctccatctttggaacacgccagtaattgattga

SEQ ID NO: 59380 - DNA, 122 bp, Homo sapiens
gcattgtggaggtactagagctctttagagcccacacagagctgcaaactaggcagacaccgccgagagccaagtttcccgggcaggcgggcaggttcccgccccgccgagagctgccgctt

SEQ ID NO: 59381 - DNA, 122 bp, Homo sapiens
attattaaaaatttatgaagtgtcattctcaaatttccctgaacaacttttgaagcttttcggatgtctccggtggtagatcttggggtcattccatcaattatgtactctatagatattta

SEQ ID NO: 59382 - DNA, 122 bp, Homo sapiens
tctgcttaatgaagctggtggcctcctcctcactcagtgactccttctgggccaggaaatcgaagagctctcctccagacactctgtaaaacaccagcggggggaggggaggcccaggccca

SEQ ID NO: 59383 - DNA, 122 bp, Homo sapiens
tcagcaagtgctgggagtatccatcgccgcccattttcactatgcctgctgactccttgccgcattcccacggaaagatcactttggaataggagagaagaaggtgttgacacttttgcccc

SEQ ID NO: 59384 - DNA, 122 bp, Homo sapiens
agagccaaaaaatctttctgatgaaagtaatgctgaggtcaaaaataaagaatctgaaaacgtgagccaaaacagattgagactgagtagaagagagggataacattgttcggggaactgca

SEQ ID NO: 59385 - DNA, 122 bp, Homo sapiens
caacaggcagggttctcgacagcacagagcctcacgcaatgtgcaggcaggtggtgctctcgctccaccacggcacctctgcggtctctgcagccgtttgcatttcctgaaaccggatctta

SEQ ID NO: 59386 - DNA, 122 bp, Homo sapiens
atacgtgagggaagaatacgtcacgtcataatactgtactttaaacaccatatcggctaacgaaaggctttaggcccacggctgagagaaaagtatcagttcccaagttctaggcggaagag

SEQ ID NO: 59387 - DNA, 122 bp, Homo sapiens
cacgttgggaaggacgcacagtgactagaactctcgttccctactgctgggagtgcaaaacggaacagccactctcccgactgcccagcgaccacactcccgggtgtttacccaagagaaat

SEQ ID NO: 59388 - DNA, 122 bp, Homo sapiens
caggggcgcccgcagtgtcactaggccggctgggggccctgggtacgctgtagaccagaccgcgacaggccagaacacgggcggcggcttcgggccgggagacccgcgcagccctcggggca

SEQ ID NO: 59389 - DNA, 122 bp, Homo sapiens
ttggaggagattctggagagtgagaagcagtgagtccagccagcaggggagggaaagagacgaggaaacaatgtgtccatggcacaggccagggcatgagaagagggcagtggattggaagg

SEQ ID NO: 59390 - DNA, 122 bp, Homo sapiens
agctgccaaagctggtaagaaccagctggctccggagggagggaaaagggggggcagccccgccccgctaccggcacgggtgtctgcaggctgtccaggctgctgacatcaacggtagtggt

SEQ ID NO: 59391 - DNA, 122 bp, Homo sapiens
atctcaggtcctgtgaataacttagtttctctcgcatactctgtttttgagccattgaagcgcaggaatgccaagcaccactcacttttcctcattgtctgagtgggatggaaagagtctca

SEQ ID NO: 59392 - DNA, 122 bp, Homo sapiens
ttcgcccagcgcgctcatagcaggatccacagggccagggggccccccagtgtggaaagccggggccttaaagtgggtgttcatgctcagtccggtctcgttaaagttcctctcgccctggc

SEQ ID NO: 59393 - DNA, 122 bp, Homo sapiens
ggctctgtcctccggtgaccctggaaggggcacccgtggctgcgactgcactccctgtagcggtcacttcgtgaagcccggcaaaccccctgcagctgcccctggcaccctcagacgaccag

SEQ ID NO: 59394 - DNA, 122 bp, Homo sapiens
atcaatgactacctggacatctactgcccgcactatggggcgccgctgccgccggccgagcgcatggagcactacgtgctgtacatggtcaacggcgagggccacgcctcctgcgaccaccg

SEQ ID NO: 59395 - DNA, 122 bp, Homo sapiens
acatttaaataggacatcacaggagcggagctggatcccaggtcagcctgattcctaggccggcgttccttattgattacaacataaggcaaacaagtcgtctttggagagagaggttgggg

SEQ ID NO: 59396 - DNA, 122 bp, Homo sapiens
gtagacatcactgcatgattccagtgacaaggagggaggaaaaaggtttccttcagaagccgtgttaaatagcagcccctactaagcatgtagcagccacactttatctcactgacttaaag

SEQ ID NO: 59397 - DNA, 122 bp, Homo sapiens
gacatgaaaagcagttcctgtcaacacatttccagagtgtgcacagtgtgaaaactgcagcgggtctcccagcggcacagacccgacagaagcgcaagcccctgctggaaggagccgccgag

SEQ ID NO: 59398 - DNA, 122 bp, Homo sapiens
gcgcgcccccgcggccctggacagccaaacaccaacctgtgtctgcgtgaggcccagctgcgcggccagctcggcgcgctcgggcagcgccaggtactgggccttctggaagcggcgctgca

SEQ ID NO: 59399 - DNA, 122 bp, Homo sapiens
gcaggatagtgcttttgaacaagcctatttccattttgaaagtagatttcaggctaggtgcggtggctcacacctgtaatctcagcactttgggaggccaaggcaggcagatcacttgaggt

SEQ ID NO: 59400 - DNA, 122 bp, Homo sapiens
ggaacaggataaacgcccccagtccgatcccgccagcccgctcccacaattaagacaaaacgaaaaaacagcaatagaagcaaacacaaaaaagccccaaacggaaatctgccgggatcctg

SEQ ID NO: 59401 - DNA, 122 bp, Homo sapiens
cccaggcaggagactggagacgaggtcttgcaggcggaactcaggatgctctgagctgcccgcacaacccctggaccttcacccctcgccccttccccgcatccagctgccccagcccctgc

SEQ ID NO: 59402 - DNA, 122 bp, Homo sapiens
accagcccagcagaagaccaagcagaagtaatgtggtccacagccatgcccttgaggagccggccaccagatgctgaatcccctatcccattctgcgtatgagtcccatttgccttgcaatt

SEQ ID NO: 59403 - DNA, 122 bp, Homo sapiens
cgcagcagaagctgtaggctccggagctgcagttgaagggcgggtcccactggcccatcacgtcgtagtagccgcggcagcggtcgcccccctccggggctgtcgtgccgggcgccgcggga

SEQ ID NO: 59404 - DNA, 122 bp, Homo sapiens
ccacaccgctgtccttctcgtgctggttggacaagatggtggctgtatctgtggtcccaccgtcttcgtcgtgcttcttctgcataaacacaagaacaaagggtcacagtgagggaggcctg

SEQ ID NO: 59405 - DNA, 122 bp, Homo sapiens
tcagtcaacaccaaagaccctcaagcaaaagcaagagctcccgggcgtcttcgaaaaaagcgcctttgacaggtgaagccaagttgcatgctgggagcatccctgctgtccaggtttcaact

SEQ ID NO: 59406 - DNA, 122 bp, Homo sapiens
ctggcctgagcggattcggcagaaggcaacatccgggtgagggacaggcggagcgacttgcggtgcctgggattggatcacgggcttgccagttcacggtgggaacagccaatagaagagtt

SEQ ID NO: 59407 - DNA, 122 bp, Homo sapiens
gtctcctatggaaacaatccaaatattaatcaacaaacaaatggaaaaacaaaatgtggtcgctacatacagtgaatattattaagccttggaaaagattaggattctgatacatgctacag

SEQ ID NO: 59408 - DNA, 122 bp, Homo sapiens
gttttcagcttaactctctacatgaagtttctggctgtccaaactgggtttttctgatatcgcagtgaaatgctgggcacagggctctagaattatttcaagcagttaagtatatttaagag

SEQ ID NO: 59409 - DNA, 122 bp, Homo sapiens
gcccatgtgcctgtcctctttgcccggctcacatgaagtgcttggccagggactccaggccggcttgcacataaggttcatgctcgtggactctgaaggaaggagagatccctgaggtgttg

SEQ ID NO: 59410 - DNA, 122 bp, Homo sapiens
ccttgggaagaggatgatcctaaacaaagctctgctgctgggggccctcgctctgaccaccgtgatgagcccctgtggaggtgaagacattgtgggtgagtgcatgagtgagggatgttctc

SEQ ID NO: 59411 - DNA, 122 bp, Homo sapiens
caactttttgccagagtttaatagcaaagctgtcacattttacacaaagagtatccagtccgctagcgaatggaaagaggggacagggaggaggggaccagaggaggcgggctgctgactgg

SEQ ID NO: 59412 - DNA, 122 bp, Homo sapiens
aatcctcctccggcgataggtgagttgtccgcgacccttctcttcccagccggcaaagagcgcggagcggcggcgcctgcgcacagcaggagaaagtgcgtgggggcagctgcccccggcag

SEQ ID NO: 59413 - DNA, 122 bp, Homo sapiens
atcagtgccttgtcagattgaagagccctaacacactgtggggcaggggatgctgtgcctcgccaggaaatcttactttgagaatctttctcagggtctagctgtttcccatccaaagcccc

SEQ ID NO: 59414 - DNA, 122 bp, Homo sapiens
ggatctgcagggatcgcagctctgaccctgccgcacctctgccatccgctggccctgaaccgaggcttcagtctgcatgggggccagagcctccaacagctgaattaatcggcccccgattt

SEQ ID NO: 59415 - DNA, 122 bp, Homo sapiens
gcccactggagcgtggggctgggggcattgagatgcgggcttcagtattcaaagaagagacgcaaacataccatgaggtggggagaggtcccatgaccatgtgcctgcctgggggagatggc

SEQ ID NO: 59416 - DNA, 122 bp, Homo sapiens
ggcttggtgtgtccggctgctctgttgcagtaccgcagaccaggggcttatcggagcaggcgtttgtttcccatggctccgggggctggaaggccaagatcaaggcctccacagattcagcg

SEQ ID NO: 59417 - DNA, 122 bp, Homo sapiens
ctcctggcctcaagtgattctctggcctcagcttcccaaagtgttaggattatagacaagcgtgaaccaccacacccagccctatttttctatttctcatctcccaataagattgcaacctc

SEQ ID NO: 59418 - DNA, 122 bp, Homo sapiens
gcgaataagctttcacacattttatattaaatctacaagtatgatttattcaggcacttacgaatttaatcaaatttgtttctaaatattactgatttttgttatcaaatgtgccatcagct

SEQ ID NO: 59419 - DNA, 122 bp, Homo sapiens
cgcgctgccaccagtccagagagaaccggctcgtgtcacccgcggagtcggacaagatgtcgggcactcccttgcccccgcctcagttcagcccaccccttcccgggtcagctggagccggg

SEQ ID NO: 59420 - DNA, 122 bp, Homo sapiens
agaggcggatgaggtttcggtggtcgagcgagtgcatggcattgacctcccggatgaagtcgtccatggcttctggctggctcaggacatcgggcttcaggcacttcacagccacactcacc

SEQ ID NO: 59421 - DNA, 122 bp, Homo sapiens
gtcgcgggacctgggggacgtaccatgaggctgcaggtgggggcgggaggatgctttgcccgccagtgcccacgggccctgggcacattactccatggggcctgtgtttacagacggaatcc

SEQ ID NO: 59422 - DNA, 122 bp, Homo sapiens
gttgctattactctctagtttcccttcttcctcccaatccacagatgttagcattaactacgtttctctccttggtctttgtggccaagactgctagccagtcctcaaaataattatttctc

SEQ ID NO: 59423 - DNA, 122 bp, Homo sapiens
ctctgcaaggcagcaattcagaatgcagggcaagcaaccttgccagaagccaaacaaaaacgcatttgcaacaggaaaagaaaaaccctacacctcataaacttgtggaatgagtaaccctc

SEQ ID NO: 59424 - DNA, 122 bp, Homo sapiens
aactattatgactgactatattccaataaattgaaaaacctggaagaaatggccaggcaccgtggctcatgcctgtaatcccaccactttgggaggccaaggaaggtgatcacctgaggtca

SEQ ID NO: 59425 - DNA, 122 bp, Homo sapiens
aaacctggaaccagagggggcgtgcctgccaagctcacacagcaggaactgagccagaaacgcagattgggctggctctgaagccaagcctcttcttacttcacccggctgggctcctcatt

SEQ ID NO: 59426 - DNA, 122 bp, Homo sapiens
gccacccctgccgtgtggactgctggggttgcagatttgctggctgttgctgcagcgcctcgttctatttttcctctcagttcccttctaaaagtggaggctcgggggaggaaaaagaaagc

SEQ ID NO: 59427 - DNA, 122 bp, Homo sapiens
atgatccgcccgcctccgccttccaaagtgctgggattacatgctgtgagccactgctcccggctggaaacttaatttttatggccataatttttaacttgtgaatcttttttttttttttt

SEQ ID NO: 59428 - DNA, 122 bp, Homo sapiens
gattacagattggatccacagaaagcagtttggatggttgaaattccctccaccagagggcgactcagagctttcccctgtagctcagagctttgtggaaggggaaccctgctgcctgttct

SEQ ID NO: 59429 - DNA, 122 bp, Homo sapiens
cgggtgacagcacgtgacacggggagattgctggctcgcagccaccgccggagggctccgcgacttgtgccatagccggccaggtcagcctgagagcgacagccgaccccaccacctgccag

SEQ ID NO: 59430 - DNA, 122 bp, Homo sapiens
ggacgctgtttcctgccccgggcgccgcttcccccgcccccgagccgtggcgagcgtgcccggcactccatggacagagaagaaagaagtgctgtcttccccgtgcagtctttatcctgctc

SEQ ID NO: 59431 - DNA, 122 bp, Homo sapiens
ttgatttttagagacagtgagaagcttgttatttccatttcccattctactttcaggatgcgaaggtcatgtcctggtgggattatggctatcagattacagctatggcaaaccgaacaatt

SEQ ID NO: 59432 - DNA, 122 bp, Homo sapiens
ctcacctcctcccatgcatgcccctcaatctccttcccctactcagagccattcctaatacgtccatttcagaaggagaggggatcccagctgtgaaagccagccttgctgtggaaggatgg

SEQ ID NO: 59433 - DNA, 122 bp, Homo sapiens
catggttaacacaggctgtgcgtgaaggggcttttgacttttcccccggctccggcctctcgcgtctctctcctagggctgcggctgctgctgcctggcgggcacaagccgggcggcggtgc

SEQ ID NO: 59434 - DNA, 122 bp, Homo sapiens
aatgtggaccctcaggactaaagcagtgggagaggcctgggaggtggggcctggggagggcgaggtctgctctgaagtcaccaagctcctgatcttagaagagatggtgggcgcaggctctg

SEQ ID NO: 59435 - DNA, 122 bp, Homo sapiens
aggaaggcgggctcgactttctctttttgccagcgggagctgaagcccgtccttagcgcccgggccgcggtttccatcttgagctggcggtctccttgaaacttccccaagtgtctgcacaa

SEQ ID NO: 59436 - DNA, 122 bp, Homo sapiens
ggaacagcgttgatcacgtgacgtggtttcagtgtttacacccgcagcgggccgggggttcggcctcagtcaggcgctcagctccgtttcggtttcacttccggtggagggccgcctctgag

SEQ ID NO: 59437 - DNA, 122 bp, Homo sapiens
agggcaagccggctacgtggtttctcccctcctcagtacaggggccaggctagagaccgccgtggcttcccagggaggcagaagccgagtccgtcgagcctcaggaccagcagtcagagcgg

SEQ ID NO: 59438 - DNA, 122 bp, Homo sapiens
agacacctcctctggctcctcctctctctctccccctcccccagtgccccacccctgctgcggtagaggctgctggcccggcagctgctggttgccatggcaatgaccaatgataagcgacc

SEQ ID NO: 59439 - DNA, 122 bp, Homo sapiens
accatcttggccaggctaatctcaaactcctgacctcgtgatccacctgcctcggcctctcgaagtgctaggattacatacatgagccaccacgcctggccagctctgtcaaacattaattt

SEQ ID NO: 59440 - DNA, 122 bp, Homo sapiens
cacgtggctgctgcagagtgtgacccagctgtccccatctcctgctgtgggtcccttatccggggtccttccgggaaagtggctgatggctcatggctcacttccctcagctccacgcaggc

SEQ ID NO: 59441 - DNA, 122 bp, Homo sapiens
gtgcactcacaacacctacgcatgcacatacaaggacacaggtgttcgcgaaagtgcacacgtgtgcactgacacccaccccctcaggcactgcccgcagaatctgcactgctgggtgtgtg

SEQ ID NO: 59442 - DNA, 122 bp, Homo sapiens
agcccctcccatggtgctggatccaggcagctgatgtgcaggcggggacccctggctgggcgcggtcctgggcgcgtccctgcgcggttcaggcttccatgcgcgctgagactccgctggct

SEQ ID NO: 59443 - DNA, 122 bp, Homo sapiens
tgagagccgccgggcccgccaggagggcagagacagggggaagggcggggcgctgagaggcgaggccggcgtcttcttgacaatgcggtagcgggtcttgatcaccttgctggtgggtgcag

SEQ ID NO: 59444 - DNA, 122 bp, Homo sapiens
tcaccgggtcaccccgcacgggccctggtcaccgggtcaccccgcatgggccctggtcaccgggtcgccccccacgggccctcatcactgggtcgccctgcatgggccctcgtcaccgggtc

SEQ ID NO: 59445 - DNA, 122 bp, Homo sapiens
gagtgcgcgccctgggcgccccgccccagcccccagccccttccctgggcccccgcaaggcgggaacgcgagcgcctcccccgagctgtgtctcgagacctttgtcctcccctcacccctcg

SEQ ID NO: 59446 - DNA, 122 bp, Homo sapiens
aggaccttggcctggggcgcgttgtattgcacaggggccagaaggggcctatggggattccgctccaccccgggccgcctgcagattcctcagaaagggcaccctcaaaaatcgaggacgct

SEQ ID NO: 59447 - DNA, 122 bp, Homo sapiens
aaagcaaagacagaccacagcgcgagatgacggtctcaatctgtacagtactcgtgtaagcgctctggatttaaagaacctagcatatttgatctccgtccataattctccaattagtcctg

SEQ ID NO: 59448 - DNA, 122 bp, Homo sapiens
tcagaaacacgccagggtaaaaagccctggaatcctaggaccatcagaaagtttggtccacgtaatgtcccttggatttgttctaactaaaatcaaggtcttagtttaagtcacatgagccc

SEQ ID NO: 59449 - DNA, 122 bp, Homo sapiens
gacgggatttctccatgtttgtcaggctggtctcaaactcctgacctcaggtgatccgtccgtctcggcctccaaagagctggcattacaagcgtgagccactgcgcctggcctgttttttt

SEQ ID NO: 59450 - DNA, 122 bp, Homo sapiens
ctattgtagatactactattttctctactgtcttgtattgctggattgcactcactgggacgtaaagtactcacacatagacaaaatgatttgctcaaggttatagaataagttaatgaaga

SEQ ID NO: 59451 - DNA, 122 bp, Homo sapiens
ggtgcgccgggggcgggcccggctcaggtaaaggcgcggctgggccggaggccgaggctgcgctgcacccagctcccggcgatcacatccagtcggccagggcccaggggccagggtaagag

SEQ ID NO: 59452 - DNA, 122 bp, Homo sapiens
catttttctctatgttttatgaagaaatcagaatccatgcagttaacaggaacacctggccgtggcgattccgcagacaggcctgaggcactggggttccgccgcgacactccacattctgc

SEQ ID NO: 59453 - DNA, 122 bp, Homo sapiens
acccatcccctgggaactggcacctcttctctgtgttcctccagattccccttatgctctcgctcctaggagctaggactcaggggtctctgtccttccggggccccaccatcctatatgtt

SEQ ID NO: 59454 - DNA, 122 bp, Homo sapiens
catctgagcacggcgccggcctcgggagcgactgcggcagagctcaaacggacgcaaggccgaagagcacccggacaggtggactgtgagatgcctcagcctctgacgtggcccagggcaga

SEQ ID NO: 59455 - DNA, 122 bp, Homo sapiens
cagcaagggaccctaaaaccaagaagcccaagtagcccaagacagagtagaaggcagtgacggagccctcattacactggataatgatgtagccaggcatgaactgagggtccttgtttacg

SEQ ID NO: 59456 - DNA, 122 bp, Homo sapiens
tttctgcggcaatcatttcctcctagacttctgtcctttggggactttcagagtctcccccgcaagagctgaagaggccatttctggggaagaggggtgactgcggcttgttgattgggttt

SEQ ID NO: 59457 - DNA, 122 bp, Homo sapiens
ctcatttttaaaggagaattattaatatattacctcccatgacaagtaagggactgggcacgtgtgggatgtgatggccaggaggtagttatgtgggaggccccaggattctatcttcccca

SEQ ID NO: 59458 - DNA, 122 bp, Homo sapiens
gggaatgtcaccaggttctgttccatccacttggacagtaactattcttggaccgagtctcgacacctagaggtgaagtttgtgtgtgttggagaggaacccaggtaaggcactttccccca

SEQ ID NO: 59459 - DNA, 122 bp, Homo sapiens
ctgctccttggaaccaccaagtgacatccatgaggctggaagcaccttcaccagggaggacggagcagacagacagaaagggtgtgagtccctggctgtatttttgagctgctgcacctgcc

SEQ ID NO: 59460 - DNA, 122 bp, Homo sapiens
ccactctcctcaagaaagcctaggggtttgtgggaggtgggtctggcggcagaaggaaagcgaggtcacggagaccacatccctgaatgatgcctggctcgactcaaacgcaacacgcgtga

SEQ ID NO: 59461 - DNA, 122 bp, Homo sapiens
cttgcatttcatttatcctgataggaataaattcacatgctgctgggctcaaaatcaatgcgttagagaccagggtcaaatgttgagtctttagaagtgacttcctgtgatcaagttccact

SEQ ID NO: 59462 - DNA, 122 bp, Homo sapiens
ccttagttgtacagctgtcattactgtggccctccaaaccctcaagatgttattgacattcggaagaatataccataactgcatttatttgacaagaatgagaaacattctctttcctatgg

SEQ ID NO: 59463 - DNA, 122 bp, Homo sapiens
gggctgccctggcctgggcacacagtaggcgctttgatgcgggctggagaaggtcctgcccggtgggattgcgccctggggcaccgcgcacgggtcggggaagcccggggcagggccgtatg

SEQ ID NO: 59464 - DNA, 122 bp, Homo sapiens
gacgttgccactctggaataacacggtcaccaacgtgtagagaaccctcagcctgcagggcgatcccacaggtcagcatggcttcccactcgtcaaacctcctctcctctctttaaacttca

SEQ ID NO: 59465 - DNA, 122 bp, Homo sapiens
aaaaacatcagaatgatgcaagcgcaggaggccgtcagccgggtcaaggtagaggtgcttcgagggcccctcgcggatgcccgcacactttggggggcactagcaggagggaatatggcggg

SEQ ID NO: 59466 - DNA, 122 bp, Homo sapiens
ctcatttgcaccttacatttatttttaaaatatgaaacatctataatgtgccaggcaccccgttagatgttagaaacacaagatgagtaaataaaaattcgtcaacagtaaaattttgattt

SEQ ID NO: 59467 - DNA, 122 bp, Homo sapiens
tccctccacccacctcggggcgagtgaagacacagcttacagaggcgttcaaagtagtgacgcagtgaggtctgaatgaacacggaggattttattactcaccattaatggtagtgaaatgc

SEQ ID NO: 59468 - DNA, 122 bp, Homo sapiens
gtagaaccctctgtcatccccggggagaggctctcaatggggagtcccatctgcaggctgcgggtctgcggtgcacggctgctgcttcctgtccagctctgcatcctgggggtgcggatgaa

SEQ ID NO: 59469 - DNA, 122 bp, Homo sapiens
ggactaaaaataaatcattttctgacagtagttagacagttccttttcctctgaacagcacggtctgagagatagttaacttcccagcattcttctgtgtattgtgcggcgggtccagccct

SEQ ID NO: 59470 - DNA, 122 bp, Homo sapiens
gacatgtggtcttttgagtctagcttctttctttcttttctgagacaggctcccactctgcggcccaggctgaagtgcaatggcgtgatcgcagctcactgtaacctcagtctcccaggctc

SEQ ID NO: 59471 - DNA, 122 bp, Homo sapiens
tgagctaatgagttggaaatgccagggtagtatttcagatgagggagcgccacacatcaccgtacgtggggcaattagtgttcctgccaaatagttatcgtggtttcttctctaattacgcc

SEQ ID NO: 59472 - DNA, 122 bp, Homo sapiens
atctgataaccaagatggctattaagtgactaacagacaggcagtgtatatagtgtgcagcgctggacaaagaaatgattcacatcctgggcaggacagagttggccagcatgagattttat

SEQ ID NO: 59473 - DNA, 122 bp, Homo sapiens
tccctccaggtgtaaccactatgcggacctttgtagaatttcccataaatagaatcacagcgggttcccttttgtgtctggttcccttcatcatcgtcggacacgtgaggcgccccacgctg

SEQ ID NO: 59474 - DNA, 122 bp, Homo sapiens
cctgaagtgttaaggaaccccaaaggcccagcatcctcacactacattgctgcaggcactcggggaaagggcgtgcagcattatccttcccagggcactccatgtgccccaccagcacaaaa

SEQ ID NO: 59475 - DNA, 122 bp, Homo sapiens
attaaatagaatggaatgagcgctcctccgcattcctccccgagtgactggtttggccgccggcccactccatccccgagtgggactggaccacggccctggctgctgccactgatgttggc

SEQ ID NO: 59476 - DNA, 122 bp, Homo sapiens
agaaataaacctattatggtcctgccttcctgctccagccagagccggtgcggcaagcgacgtgtgctcagccttccagaggccgtggctggtctggatttaatgcactatcctgcctgtga

SEQ ID NO: 59477 - DNA, 122 bp, Homo sapiens
ccgtggacaaaagctgggagctcctgtgcccagtcaggagcccctacagtccaccagctgcgcggccgggtccaggggcccactgtggtgccagcgagtttctcaaaacccagggcccagcc

SEQ ID NO: 59478 - DNA, 122 bp, Homo sapiens
caaggacacgctgacctcagacctccgcgctgtgcggacataaatgtctgctgttgaagccgcccagtctgtagtatttgctatggtaggctgagctgatatcctaactcaacaataagttc

SEQ ID NO: 59479 - DNA, 122 bp, Homo sapiens
cctcagcgctgaggtgaccgcctccgggcagccttcccggactaccccaggacttgggggcgtggctccacagcgggcctagttccgcccgtgtgctggcctcttccacgaccggcagtctt

SEQ ID NO: 59480 - DNA, 122 bp, Homo sapiens
ggctttgcagacgggactgcaggtgcaggaaaacaaatgcggctatccaggaaacagcagcggctcgtgacccgccagaaatggccccggacaccacacttgccaccaatcatgtggacaag

SEQ ID NO: 59481 - DNA, 122 bp, Homo sapiens
tgagatagagttcaaattttagaataagaactcttaattcaaactacaagtcttaactgacgattcaagaggagagactgcagcagctctgggtttcgaaggaaaccgatacatcctgccct

SEQ ID NO: 59482 - DNA, 122 bp, Homo sapiens
tcggctgctcatggtgcccgcgggcgcagaaaggctcagggcgcaggtccgcccgcccgccgccgcctggccttgtatccgctgccgcctggttgtgcctcctgggccagatgttggtcccg

SEQ ID NO: 59483 - DNA, 122 bp, Homo sapiens
tggtcaaggagagacacctgaaggtgaagggacaaagcgagcagggtaagagctcgagcccgacccctctcaaaaaatatagacccggaacgcgcgcctgcgcagaacgaatcctcccgcgc

SEQ ID NO: 59484 - DNA, 122 bp, Homo sapiens
caagactagagagatgcagagaacacaattcctgcctgccctggaacactagagcacatccgtatttattcctttggcccctctctttttcccctgttcccaggatctgtcctctcctgcca

SEQ ID NO: 59485 - DNA, 122 bp, Homo sapiens
ggactagctagtggccagtgctaacaaggaggtgcttgtgacctgctatggacctggaagcgactagggctgagtacaaagggggcaaaggaatttgggggtgatggaaatgttctgtatct

SEQ ID NO: 59486 - DNA, 122 bp, Homo sapiens
tgctacagacaaggcaggggcctgggaatcggggtcgtggcagtgctgtggggggctggacgaagctcactgtggccctccacgaggcacattttcacttctagaaggtcttgtccccattt

SEQ ID NO: 59487 - DNA, 122 bp, Homo sapiens
cggagctgcaattgttcagatctgacatgatctcaactgctcttttacttccttgtgtaccgtgcgtttcccttactggcctctgacccttgaaagcagagccttacatccggggaagacga

SEQ ID NO: 59488 - DNA, 122 bp, Homo sapiens
gctcggtttgcagatgaccagctcatcatcgattttgataattttgttcggtgtttggttcggctggaaacgctattcagtaagtggatatttggggaatgactcatttcagttctcttggt

SEQ ID NO: 59489 - DNA, 122 bp, Homo sapiens
tgtggaagcctatgtgggtgtatacagtttgtcatgttatgccacctgattattaatgggcgaagttccatcatatcacctttgacatgcagcagaagtaccgttttagaaggaaggagtgg

SEQ ID NO: 59490 - DNA, 122 bp, Homo sapiens
tgtgggggaagcaagggaaaaaggaaggagtctaggaaactgcccagcttgggtaactgtcggaggtgatatagactgtgaattggaaaatcagagaattagcaaaattggggatggagctg

SEQ ID NO: 59491 - DNA, 122 bp, Homo sapiens
tttgcatcccagtctgtcctgcaagcaagggctagggctttaaagagttcctgcacaggccgggcacagtggttcacacctgtaatcccagcactttgggaggccaaggcaagaaggtcact

SEQ ID NO: 59492 - DNA, 122 bp, Homo sapiens
cgtggattcctcgcccggctgcttccgcttccattttgtcccctcctatttctcattcggcgcctcagaatgacgtctgaaatgagcgccgacgctgcccaaacaggagcctgcgcatgcgc

SEQ ID NO: 59493 - DNA, 122 bp, Homo sapiens
tcaagataattagccctagtcactggacaattagccagtgattgctcattagcaagatagcgtgtttagtatttatcaaaactatgcatttaagctgagacttttgtctctgatgtaaattc

SEQ ID NO: 59494 - DNA, 122 bp, Homo sapiens
gagcctcctgacttggcctcccaaagcactgggattacaggcatgagccacaatgcctggcgtccaaggacactcctacacagccaagtaaggagagagaaactgtgcacgactgcttttcc

SEQ ID NO: 59495 - DNA, 122 bp, Homo sapiens
tacgcagcgggagcagccgcggcaacgcgggccgccggggccgcaggagccgtaacgaggcggctggccttctttgttgacttttaggtcccgggctcaacaggagatttattcgctaggaa

SEQ ID NO: 59496 - DNA, 122 bp, Homo sapiens
atctttgggagttgagcagaaccagctgttactggagaagcagagaaaaaagatgctgcacgtcccagccataatggtctgggagggacctaccccagagcgggaaccagggtggggaagca

SEQ ID NO: 59497 - DNA, 122 bp, Homo sapiens
tatttttggcatgttgctttgctgactcacagtaaccttgcagtcaactaggacctttcacgtgaactattatgaagttagatttcattcattgtgcagataattgcatgacttgaagtgta

SEQ ID NO: 59498 - DNA, 122 bp, Homo sapiens
cacggaaatgggcaagcccctgcagtgtacccctgtcataactgtgagcagctgcagctccggaacaataaatcccttccgcaaagacagcgacgcaggtcttcatctgggcagggcgggcg

SEQ ID NO: 59499 - DNA, 122 bp, Homo sapiens
aggcaacacatggttagagttggggggttaatctttaacctcaggcctggtcagtggcgtcggttggttttgccactggctccattcctgttgtttttcagcttttactccctcctcctctt

SEQ ID NO: 59500 - DNA, 122 bp, Homo sapiens
gagaggactcgctagtccagtcaggaggctagtgcagcagtcaagagatgagagatgtcacggatgaaattcaagtttctgctaaaaatagaagtatccttgagtcaggaagggaacaagtg

SEQ ID NO: 59501 - DNA, 122 bp, Homo sapiens
gaggaggcattggcacgagttactataaactccctctgaatctcaagacttctgggacgccgattccgctcctggcctggggcaaggcgtgggagcttggaagccagcgctgcgctccccgt

SEQ ID NO: 59502 - DNA, 122 bp, Homo sapiens
gcgctggggagccgggtgcgccaggctggggaccttgcgtggggcagggcttggctcagccgaggggccgcggctcagcccccctcaccggccttaaaggttcccagagacgcaaagtcgga

SEQ ID NO: 59503 - DNA, 122 bp, Homo sapiens
aaattaaaaacttttgcctggaggcactgctgcgcacagcctgtggctagacgaggttcccgtgggtttgcctggaggcgttgctgcacgcagcctgtggctagacgaggttcacgtgggtt

SEQ ID NO: 59504 - DNA, 122 bp, Homo sapiens
gcaaacactcccctctcacagcaatggtttcttccctcaccggctcaatctacctgattacgttcccttctaatcagtaacctcagttcctctagaaataactgtgtcgtctgctttatata

SEQ ID NO: 59505 - DNA, 122 bp, Homo sapiens
aggcactgcccgcagtgcgggacacgcccaaggctcggatgggagccgacgctgagggagcggcacctgcagggagcgcccggagccgaggccgcggcaggaggggcgggcgcgggcgcggc

SEQ ID NO: 59506 - DNA, 122 bp, Homo sapiens
gagtggcctctccatgacacagatgtcagggtttaactcagacctgccaagtggagcctccgcagcaggcccaggaaacccagagaccggccctgttccccgtgaggattcaggcaccacgg

SEQ ID NO: 59507 - DNA, 122 bp, Homo sapiens
ccagggggtgcacacattataccattaggtcccaatgaatgagtggcacatgcgtgcacacgcacacaaacatgcacgcttgcacaagcccactctcacccctcccagggccacacgcacac

SEQ ID NO: 59508 - DNA, 122 bp, Homo sapiens
gggcacactgtcccagggcaggctcatgacaggaagtgacccgttaaggaagcagcacatcgctgcattcggctggttttcagggtcttgttcccaatcagtttccagccaacaccagggtg

SEQ ID NO: 59509 - DNA, 122 bp, Homo sapiens
caaaaactgcttctgactgctggggcactgaacgacatgcccttcatcagagagcaagtccggggggtgcggatcctcaccggagaggtcatggggaagcatctttggtcttctcttgctta

SEQ ID NO: 59510 - DNA, 122 bp, Homo sapiens
tgcccctaatgcgccggcctctcgcaggacctgggggccctgaagatccccgagcagtaccgcatgaccatctggcggggcctgcaggacctgaagcagggccacgactacagcaccgcgca

SEQ ID NO: 59511 - DNA, 122 bp, Homo sapiens
ctgcacagaggcaggtggtctgcgttggttctgaagccagccagacctgcattcacattccggctccaccattcaactcttacgtaagcctggtcaggttgtttctcccacccacagcttct

SEQ ID NO: 59512 - DNA, 122 bp, Homo sapiens
ccctcccttcaggcgcccggccgcgcccggccgcactcaaccgcggctccgctcgtgcctcgcctttcctccgcaagtccctgtgagccgcctacaggaacgagtgaatcagagaatgaatg

SEQ ID NO: 59513 - DNA, 122 bp, Homo sapiens
gcagccgcgcagccgccccgccgagtgcgccctgaaagttgcgcgcgggactccgggtggcgctcacccacctgccccgagggccccgcgaggtgcgctcactccggcccggctcctgcggc

SEQ ID NO: 59514 - DNA, 122 bp, Homo sapiens
cgatgcacgtcggctagggcaaagaccgcgaaaaagcgcgtacacctggctctgggagcgcgcgcctaacgccagccagcagcaggaggcgcgcgaggcaccacggcctggcggccgagagt

SEQ ID NO: 59515 - DNA, 122 bp, Homo sapiens
gcatgctactcagaggttgcactaccttcagctgtccctcaaaccaacggttcctggtggcgtcgtagaagtacagatcgttgaagaactcgcccgacaggctctcctcctcttcctcgtca

SEQ ID NO: 59516 - DNA, 122 bp, Homo sapiens
tgtcagcactttagccccggcagggctggagcgggaggtggggaggcggcaatgagagcacggtaaggagctacccctttaagggtcaaaacagatggccctccagcaatttgggcacttac

SEQ ID NO: 59517 - DNA, 122 bp, Homo sapiens
cggccgctgcagggctcctctaggccagattacatcccagaacgcccaggcaggacgctccggctcagattgtgaaccctgggactctgcgtccaggaggggcccctaaaccctgcgctaaa

SEQ ID NO: 59518 - DNA, 122 bp, Homo sapiens
ttggcactccccaccggccgcagccaacatcctcgagaggaagccgtgggcctcacctggcgatcttgtccgtgcaggacatggtgatcagctgctcccccagcaggacgccgtcccaggtc

SEQ ID NO: 59519 - DNA, 122 bp, Homo sapiens
gtccctaatgtagaacggtgcctgacatgcaacttactcttgtattttaagaagctcaagcgtctaggttgccattacaggcagaaaaggaaatagagtggggcctgtggccactcaaaaac

SEQ ID NO: 59520 - DNA, 122 bp, Homo sapiens
aactgggtgcattaagcacttgtagtatattaagcctgggagactgaagtttcttttcagcgttcctattaagtatatggtgatggaaatttttcaaaatttttaatggaaaatgatgtccc

SEQ ID NO: 59521 - DNA, 122 bp, Homo sapiens
ccgctaaaggtcccaggtcccagtacagccaggggcaagacaaatgcacacatgctgatgcgcacgcacacacacacacgtgcactgggacggttagtgctctgctttcccacacccccaac

SEQ ID NO: 59522 - DNA, 122 bp, Homo sapiens
ccccatgatgtcccacgaagtcgaccgccggagccctgacaccagcatcaccctctcgtgcggtctcccaacagccctgcagagccagaaccatgatcgtccccactgcacacctcggagag

SEQ ID NO: 59523 - DNA, 122 bp, Homo sapiens
tgcgaacctaaggaagaggtctaagaagagaaagtttgattggactaattcgaggggagacgttgaagatttagaaaattggaaactggagaaactaaaccatatggctggtttgggaggtg

SEQ ID NO: 59524 - DNA, 122 bp, Homo sapiens
ctggacgtgcgctgtccgcagactctggacgagctgggcctgggcgctgcgcggcggaaccgaccctgtcctggaccgcaggcagcagctgaccccgcgccaccggcctgcgggcgagacct

SEQ ID NO: 59525 - DNA, 122 bp, Homo sapiens
cgactgggcggcgggcaagctgtaccagggccaggtggacttcgccttcttcatgccctgcggcgagctgctggagaggccgggcacgcgcagcctggctgacctgatcctggaccagtgcc

SEQ ID NO: 59526 - DNA, 122 bp, Homo sapiens
caggaaagctgggaggttcaactacgggcgagaaaattggggcactttccacgtctctcccgaaaataaaagaaaggatgccgggcacggcggctcacgcctgtaatcccagcactttggga

SEQ ID NO: 59527 - DNA, 122 bp, Homo sapiens
aaagagtagtgccccagacatggtgagcactaagacagacagcacctctgagtgacactgcggaaaaaccaggctcacttgtccaagcacgttcgcaacagagtcagttacttttcctccac

SEQ ID NO: 59528 - DNA, 122 bp, Homo sapiens
ggcctctgcatacctgggatcggggtgaaggacctttgcctcctagaggcctgcctgagccggggctggtggtggaaggctgctgcggcggccccacggtgccccacagcaggtctgcacac

SEQ ID NO: 59529 - DNA, 122 bp, Homo sapiens
actacggcagcccccgacccgaagccagcaaagcccctcaaccggagctcccttcacaggcgcaggtggtgggagttcaccgtccgctcatcatcccaacagtctgaggacggcgcagcagc

SEQ ID NO: 59530 - DNA, 122 bp, Homo sapiens
aggcgagacgttccgtggaggcggagtttacgatgtatccaagtctgacggccccagaaacgggtgtgcagggcgcccattgggtccgcggtatgactgcagaaagagcctgggagatcgag

SEQ ID NO: 59531 - DNA, 122 bp, Homo sapiens
ggtgagtgttacagctcttaaggccgtgcgtctggagttgttcattcctcctggtgggttcgtggtctcgctggcttcaggagtgaagctgcagaccttcacggtgtgtgttacagctcata

SEQ ID NO: 59532 - DNA, 122 bp, Homo sapiens
tggcaaacccctgagcgggctgctgaatgcgctggcccaggacactttccacgggtaccccggcatcacagaggagctgctacggagccagctatatccagaggtgccacccgaggagttcc

SEQ ID NO: 59533 - DNA, 122 bp, Homo sapiens
tcctactgtgccttagtccaggaagcgggggactgggtcctctggtgccatagtccagggcgcaaggggctggatcctctggtgccatagtccagggcgcaaggggctggatcctctggtgc

SEQ ID NO: 59534 - DNA, 122 bp, Homo sapiens
gcgcctgggctcaggacaggggtgggggggcccgggtcagtgttgggtgcggctccgtgccgaacccccaccaggtgccgcacacaccagaaggtgccagacgagcccaacgcaatggctct

SEQ ID NO: 59535 - DNA, 122 bp, Homo sapiens
aaagatcataaaaataaatagtatgcaaataaaacaacgttagtaaagtctagctagaaacgttctctttgttaagaaggggcatcatttctacacccatgttgattgtagcattattcaca

SEQ ID NO: 59536 - DNA, 122 bp, Homo sapiens
tcaatttgtggtccagaaatctaagatggaattccaaggaagccagtctcacctgagctgcgtaggccgagtcctgggccgtgggcgtctcctgggattgacacctcctagggttctgaagc

SEQ ID NO: 59537 - DNA, 122 bp, Homo sapiens
ggttttacatgccagatgtaggcctgccccggtgcctgcctggagctgctggcgtggtcacgccgcgaccctgtgcgaattgaggcgaggtgatgagttagcgggttgccatggcaacaggc

SEQ ID NO: 59538 - DNA, 122 bp, Homo sapiens
cagtgactgccgccatgccgagctggacggaagtcacttctgagaagggcggaagtgtctcgggctccttagagggaggacaccatattagtgccagtggggaagtcaccgggtggaattac

SEQ ID NO: 59539 - DNA, 122 bp, Homo sapiens
gcccagagaccgtggaggaggcagcagagaggtcacagagcacagcaggcgggagaaaaccgcctcccgcgaggtccaacagaaaccacggagctccggacactcgggatcccgggccgcgg

SEQ ID NO: 59540 - DNA, 122 bp, Homo sapiens
tcccctctgccacccggcggccgcagacagcgctgcgccggcctcgcgtttttcgttttccgccagacccggcctcgtaactgagagcatctggctgaagccgttgctctccttctctttcc

SEQ ID NO: 59541 - DNA, 122 bp, Homo sapiens
acccccacccacgacaccatcaccaatgctggagccttcctccacccttgatgataacatcgcatgagaatgcagcagaaccttccgaccttactctgcccattcccctcatcaagcctcag

SEQ ID NO: 59542 - DNA, 122 bp, Homo sapiens
tcctcccgaagcgtcggagggcctgaccccacccccgggaccctcggccgcggccaatcacgaacgccgcctgaaacacgacttccgcaccccgctcacgtgaccagggcatatatctctct

SEQ ID NO: 59543 - DNA, 122 bp, Homo sapiens
tgccagaaaatccccagaagctaggcaagagatatggaacagactccctctaacagcccacggaaggaaaacagccctggcaacaccttgatcttgacttctggcctccagaactgtgaggt

SEQ ID NO: 59544 - DNA, 122 bp, Homo sapiens
ctgttcttcttcttgtatctgagttctggtctccaagtctccaatctcctctaggacagccgtaggagttactttttctgtcattgtcctcacaagccctggggtggcccctgcacacagga

SEQ ID NO: 59545 - DNA, 122 bp, Homo sapiens
ctgcctctgcagcgaggcggcagggaagggtgcgtgccctttcatgaccttcatgagcagcgtgatccactgcggggagctgagggcgccgcacacctgcggcgtgagagcgatgctccgca

SEQ ID NO: 59546 - DNA, 122 bp, Homo sapiens
atcctcttcccgcagcctgctgagggatgcccaagaagttccagggtgagaacaccaagtcggcagcggcccgggcacgtagggcagaggccaaggcggccgctgatgccaagaagcagaag

SEQ ID NO: 59547 - DNA, 122 bp, Homo sapiens
cgagcctgcctagccccccggcgtggcctgacgtagctgatcggcccggaagtgctcacacgtgtgctccctgccctgctcctggccccttggccggccgggctgtttctggccatgggtcg

SEQ ID NO: 59548 - DNA, 122 bp, Homo sapiens
ttgtcctgcaagcccagttcccatcaacagctcattctagggagggtggaggcccagtaccgcaggcttgctgcatttgggtatttccaggtggctcaagtcaaacttaagagcgcgaccca

SEQ ID NO: 59549 - DNA, 122 bp, Homo sapiens
catcaggtagacgacggggttgggcagccaagtctgcgatgacagtgctggcatgtggcgcgggggcgcagggtacacatccttgtctcagctgtcccacatggcagcagtgagcgcggact

SEQ ID NO: 59550 - DNA, 122 bp, Homo sapiens
ttcatttctcagacttttcactgagtggtttccatgccttgggttccagaatgtcagaggcgaattaagtggtgtcagctttttgaagtgcttttgtataggagaccgtgagagaatccgca

SEQ ID NO: 59551 - DNA, 122 bp, Homo sapiens
ggtgcagccgccgcagcccctcgggctcagccttgcggtcctcacagaagtagaggcgcgcggtgaagatcctcagactgaggttggggttccctcgcagaaagtcggccacatgtcgggca

SEQ ID NO: 59552 - DNA, 122 bp, Homo sapiens
tctctaccaactttaaccctgggctgcaactaacggaaaaaccctagaaaacttcagatccgtaatataaaaagaaaattgaaaagaatactctcattgcaagggaccacagttacaattta

SEQ ID NO: 59553 - DNA, 122 bp, Homo sapiens
ctctctttcttgccccactaatccacataacaatatgttgtccatattgctttgcagcatcgtgaaagtgctgactcatgtttcacaccagtaccaactcactctaacactcacaatctttc

SEQ ID NO: 59554 - DNA, 122 bp, Homo sapiens
gagtccagactaagtgactgtcaccagagaaggatcatcaggagcagccagggatgcccccggcacacagggactaggtctagtgagaacattagagggcggtgtaaatggatccccatgcc

SEQ ID NO: 59555 - DNA, 122 bp, Homo sapiens
aagaaaaaatgacagagatatttctactctttcttgggaagcagtctaggctcataatttcgagctcagacagacatgggttgtattcctgccatcatccccaagttacaaacagtggggcc

SEQ ID NO: 59556 - DNA, 122 bp, Homo sapiens
cagagctgtgcctggtccctgtgggagcaggtcagaccagtgggctgggcagggccaggacgagacaggcccagtggatggtgagcaggaaaagccaccagaggcccacccgggtctcctcg

SEQ ID NO: 59557 - DNA, 122 bp, Homo sapiens
actgggctgttatgtcccttctagtggcaaatttctccctgctgtggcaggaggacggctcgggggagctctgaccacgatttcatgcaaagatacggtgagaccctccgctcaacagtggc

SEQ ID NO: 59558 - DNA, 122 bp, Homo sapiens
cgcaggagcccacctcttggggcccccatccacctgctcagcccagcacgctctgccgctcgcctgtgctgggcagcacccacctgagtggtgtggaggggcccacagacttgctttgcccc

SEQ ID NO: 59559 - DNA, 122 bp, Homo sapiens
actacaactcccggcgtgcacagcgcgggccagtgcctccggggcttgtggctgtgcccgcgagcgcgctggggtctccagccagtgggtaacgcatattgactgatctttcagagacgttt

SEQ ID NO: 59560 - DNA, 122 bp, Homo sapiens
gtttcacaaagatccacttggctaggattttttaagatgctaaatgcttggccgggctcacgcctgtaatcccagcactttgggaggccgaggcgggtggatcatccgaggtcaggaatttg

SEQ ID NO: 59561 - DNA, 122 bp, Homo sapiens
tacccctctgcaaaaggagggaaattaataataataataacaataattcctatccaggggcgaatccacgtgttgtggggcttgaaactgaaacaactgtgagtagaggtggcgaatcttca

SEQ ID NO: 59562 - DNA, 122 bp, Homo sapiens
gacacaaagacagttgtgggtggcttcactcttcacagggctgtggcagtctgtccacatcgatgacctccggagatccaccctcatggtttctgatgtgaccaggctgcagcatgtcacca

SEQ ID NO: 59563 - DNA, 122 bp, Homo sapiens
tatggagacgcaggccggagcaacggcacacggaccacgcacacgcggcggacgcaccaacgcctacgcagaagagaacaaaagtcgcttctaactgggcacaaaccctctgcacccaaata

SEQ ID NO: 59564 - DNA, 122 bp, Homo sapiens
aagaaatactattcctttgtatacccaatgtataatacatttgtttatccattaaccagccgatggacattcggattgtttctatattttagctgctatgagtagcactgctataaacattc

SEQ ID NO: 59565 - DNA, 122 bp, Homo sapiens
cctctcctgctcggaatcccccgctgccctcccccaggccctggtctctgatttcagactcgcctctgctctgtttcacgtctcctgcaagcagacaagcatgaagcctgccctccgaggct

SEQ ID NO: 59566 - DNA, 122 bp, Homo sapiens
acaggtcaaagggaggctgtggccttcccgccaaggtgacctcaggggtcacagaaacctcggctccatgctgggtcccacttacctgggggccatggcacaaggagatcctgctggtttct

SEQ ID NO: 59567 - DNA, 122 bp, Homo sapiens
aagctggcagactacaaacgttgtccctacactgcctgcttggaactgggtgggtggtttcgcagttagttgtccttggcttcgaggcagagcccctggctcggatcccattccccagtccc

SEQ ID NO: 59568 - DNA, 122 bp, Homo sapiens
ccgctcccgtttgtcctgcaactgcttcttcttctgcttcacgctgaatggcttcttcctcggcatggcccggaccagtcacctggcccgccctccgccgagctcccgccgcctcaactgac

SEQ ID NO: 59569 - DNA, 122 bp, Homo sapiens
cccaagcttcccctcctgcttcttcacaggaaccacagcagccaagtcctatactatgcccgcccctgctgcagcagcagccatttttggctcagccctgctgcagtcccagatgaaagcca

SEQ ID NO: 59570 - DNA, 122 bp, Homo sapiens
gctcagagagataacccagctggaaacaggtgcagctgggatcctggccagcgctagctacgcgattgctcattgtgtagagggcttgagaagatggggcctggggtagcacttcactcacc

SEQ ID NO: 59571 - DNA, 122 bp, Homo sapiens
atgaggtccagaaaaacacagactgatttaacgtgctggtcacacagcacaactttgaaacgtgccttggcactggggggccaagactcatttggggctgtttgttagcttgagtcatttca

SEQ ID NO: 59572 - DNA, 122 bp, Homo sapiens
ggcctggacaaggggcacgggaagcttgtcactgttttgggccagtcaagtgtttgtcaccgccaaattggctctaaacgttgtggcttccaaacacttcagggacatttatccttaccgag

SEQ ID NO: 59573 - DNA, 122 bp, Homo sapiens
ctacaagtgataggtagtatcagtccttgtacacagggtcctaagcaattttgtgggggtcgctggcaagatttttgtcctttgaagagggaactgcctggaaaaacactatgcctcagtcc

SEQ ID NO: 59574 - DNA, 122 bp, Homo sapiens
accacagttaaatgactgaattcaaacatttgaacgtaatttaccaagatgaaatacacacgtgagtaaacccatgacatacaatcccaatcttcaaacggttcactgtcaatccaagcaga

SEQ ID NO: 59575 - DNA, 122 bp, Homo sapiens
ccgcaaatataaacaccgagagcactttccagggggatactgtagacctcaaaggttgagcggtagagaaatgaaggcttagggtggtgggctgcagggagcccgtttgaagggactctgcg

SEQ ID NO: 59576 - DNA, 122 bp, Homo sapiens
ctttttcaaaatgtgtttaagaccttctgtgttccagcaaccagtgatctttttgggagccgatgtcactcatccacctgctggtgatggaaagaagccttctattgctgctgtgagtgtta

SEQ ID NO: 59577 - DNA, 122 bp, Homo sapiens
gagtggcaaagtctccaagtcccagctcaaggtgaggggcacccgggacccgggggaggacggcagatgcaccacaccagcccctgccgcctgggagccaggtgtggacactgtgccactcc

SEQ ID NO: 59578 - DNA, 122 bp, Homo sapiens
ccccaggcgaacgtggttggaacaaacagctggcagacttgtgacccggccctcgggatccgcgaagcccccgctctcagccttgggcagcgacccaggtgtccagacgcagggaaggggac

SEQ ID NO: 59579 - DNA, 122 bp, Homo sapiens
agctttctgatgtttgcaggcaaaacaactttactagcacagaaccctagctcaatcatacgacacacacctgtacactttaagctggtttctcaatctcggaactactgacatttgggcaa

SEQ ID NO: 59580 - DNA, 122 bp, Homo sapiens
ccgacgccgcccgctcacgcgccgccccctccgcatacctctccttcccgcggccagaagcgcgggttgtagatgaagaaactcagcagcgccggcaggaactgcttctcctgggccgccga

SEQ ID NO: 59581 - DNA, 122 bp, Homo sapiens
ggtgaagactcctttgaggctggagggttcggggcgtccctgccctttggtaggacactgcggctcctgcctgggactcggcgccggcgagcccgtgcttgggccgcgggtctcaggcgtct

SEQ ID NO: 59582 - DNA, 122 bp, Homo sapiens
gtggctgtttcccttaatgttttgtttgctggtgagtttctgctgtcagtttcctcattccgtctatcacctgattgagacttggagcatgtatactgatagctgtaagaatttttttccag

SEQ ID NO: 59583 - DNA, 122 bp, Homo sapiens
ctttacaacagcaaaaaagaggaatcagttgctaaaaacacaattgaaggttatttcccccggtagcaattgtcttcgctgctgaggcttatgttagcataaaaatgccaggagaatgctgt

SEQ ID NO: 59584 - DNA, 122 bp, Homo sapiens
attgaaagcagactcactccaaaagaagtagctctaagaattgccatggcttttgccactcgagtgaggcaccagcgaggaatgttctgtctctccacacctctgatgggagtgggtgaaag

SEQ ID NO: 59585 - DNA, 122 bp, Homo sapiens
ctgttgtttcgaggggagtgaggcccggggctgagttaagtttcactggtgagtggccggcgggcacaaaggaaggaaccgctgggggaggggaggccgcagagctggagggctgggacaaa

SEQ ID NO: 59586 - DNA, 122 bp, Homo sapiens
gcctctgcagagaaccaagaggtaaaagccagccaacatgaggcccagcctccagactcccgcagcctcctccttggggtacagagtaggggtgactcactcaacctgagatgaggtctcca

SEQ ID NO: 59587 - DNA, 122 bp, Homo sapiens
ggtgtacaacattcttttaaatagtaaactgcccaatgattacaacattgattcaactgacgaaaaatacaacttttcagaccacgactaaacattgtggcagtagaaactatttttttttt

SEQ ID NO: 59588 - DNA, 122 bp, Homo sapiens
gacatgactcgctagccaggaaagataacgacatccagtcctggagctgctggttaaaaacgaacgtgtcaccgggtcccctgggtctgaggccacgcggcacgcggcccctccgcgatatt

SEQ ID NO: 59589 - DNA, 122 bp, Homo sapiens
atgccatgtgagaaggtgcaagtttgaagaatccagccaccatcacactttcctcttgttcgctgccatccgtgacttaagcatgggactggaatgttcatgagtcacaggctgggtttctg

SEQ ID NO: 59590 - DNA, 122 bp, Homo sapiens
cccgtgggccgagaccacctggatttaccacgacggcgaggacaccaagatgatcgtaggcgaagagaagaagttcctgctgcccttctggctgcaggtgatcttcatttcgctgctgctgt

SEQ ID NO: 59591 - DNA, 122 bp, Homo sapiens
ttgtataaatgtatcatattttccactctgttttattcaaatggcatcatgttatacatacgtttgcaccttgatgctaaagactgaatatgtcttggcaaaattcatgtgttggagcccta

SEQ ID NO: 59592 - DNA, 122 bp, Homo sapiens
cgtgatccccccgcctcggcctcccaaagtgctgggattacaggcgtgaaccaccgcacccggccgctggggcgcttcttaatggccagattaaaaatgcacacacctggccgggcgcggcg

SEQ ID NO: 59593 - DNA, 122 bp, Homo sapiens
ccgcctcagcgggggcctggccacttgtctggtgcgggcagagctgcccctggcctggttcgggcccccagcccccgctgcgccacccacggcccgccgcaagtccccggacgggctggagc

SEQ ID NO: 59594 - DNA, 122 bp, Homo sapiens
cccgtctcccaggaagccgcccgtcagccggcggcgccaaccgccaccgccgcacttacccgggaaggcaaaagtggccgcgggcacccaaccgccgtcactcccttcagggagctgactag

SEQ ID NO: 59595 - DNA, 122 bp, Homo sapiens
cttgtgtgtcaaactcaacaagtccaaaactgagcctctgagcttcctgacacctgctcccgccacagcctccccacctcagtaagattacaactttttttttttgagacggagtttcgctg

SEQ ID NO: 59596 - DNA, 122 bp, Homo sapiens
ttcgcctttacgaaaatattgaggcccgttgcaaccctagatgaggttgtctcattttctcgctggagaactgtcagggaacacggaaaacccacccgcgacccggcttcatgcggcgccgt

SEQ ID NO: 59597 - DNA, 122 bp, Homo sapiens
gtccctccacttgctgggccgtcctgtggactgtgcggtcccctgcagattgtccagtaccgagggcagcaaaaggttgacgctgagagtgagagcggggcaggcggctggtggtggtgctg

SEQ ID NO: 59598 - DNA, 122 bp, Homo sapiens
gtattggactctcttttgaatgcataaaaaataaagagcttagtgtaatccctaatggggcgtgtgttggtttttcatgcctgtttgtgaactgtagttgtggtttcccatttcattgccat

SEQ ID NO: 59599 - DNA, 122 bp, Homo sapiens
tgaagctgattaacttctacatagagagaagatgggtcacgtatatctccttgaaatacccggagtggggagaaagctttgaacctgacatcagatgatgcacgagacattccacccacact

SEQ ID NO: 59600 - DNA, 122 bp, Homo sapiens
ggactctgtcagtgacactgtgcctgacagtcctttccccggagcacttggcagagacaccgggactgcagggcagcaggaggggggtcccggggttgattttggtcagtcctgcttccctg

SEQ ID NO: 59601 - DNA, 122 bp, Homo sapiens
gaggattgggcagcagctcaccttcctccactccttcttttcttccttctttgtgaagaccgtgtggacccaccaaatcttggtgaacatggaaccgtagcccagactaaagcccaggccca

SEQ ID NO: 59602 - DNA, 122 bp, Homo sapiens
gatgggttaatgcaacccaagtcacttccttataaggatgtaaccagaagctgttcccatcgcttctgtttatattatactagccagatgtttgttagtcactttcctggcagcaagagccc

SEQ ID NO: 59603 - DNA, 122 bp, Homo sapiens
tcgcacttatctgatttctagtaaaaatttcacccaggaaatgtaaataataaacaaaaccgcctagatgagcgggcagagtggggccaccttggggcggaggttttgcgtctgtggcgttc

SEQ ID NO: 59604 - DNA, 122 bp, Homo sapiens
tgacgccggacttctctcacgctggtctttcttgcttctaacgatgggtctggaggcaatcgtcagtgatatttttgtggctgaggctggtttctggccgagtctgcctaattacgtgttgg

SEQ ID NO: 59605 - DNA, 122 bp, Homo sapiens
tgcgggcggggaatgtccccgacggagcttgatgagaggcgcacgctgctggcagggcaccgctgtgtgagctgggactggctcgcagccctccgagatggcccagcagtcggacaaggccg

SEQ ID NO: 59606 - DNA, 122 bp, Homo sapiens
ccagatccaggtggaaggacagcagcgggtcggcaggcgagggcgctgcggactgcgggacggcgggcggcggcggggagcgcggggcccccgcggggggcgcccggggctcggggggcggc

SEQ ID NO: 59607 - DNA, 122 bp, Homo sapiens
gtctctgaagggggacggcggggtgagagccaccagctcctccaggtctggcttggcggccgcagcctcgggaccggccgcggggctctcccgggccgcgtccccagccgcctgcgcccctg

SEQ ID NO: 59608 - DNA, 122 bp, Homo sapiens
gggacgggacgcagggagtgcaggggcgcagggggtttcagggaccactggggctggcctcggctggcaggcgctccctcctctggaaggggagcattctgggagcggctgggggcctcaga

SEQ ID NO: 59609 - DNA, 122 bp, Homo sapiens
ctggcagggtcagcaagctgtctgagatgacactcaccgagccaggcgagaacaccatcccgcccacgtgaacctgtgcattgtacacatacagacgcacatggatgcacacaggtgtagag

SEQ ID NO: 59610 - DNA, 122 bp, Homo sapiens
aaacagaaagtaagtttctgccgggagctttatccagcccatatttctatttccatccaccggagaacaaaatgtgttttggttttattttaaaaagaggatccaagcctcaatctcccagg

SEQ ID NO: 59611 - DNA, 122 bp, Homo sapiens
tttcatcccacacccaccacccccctctccgttcacggtgtcccgggaggctgcgacctgcgtagatgatttagcagactgcccctgcccatgctcctgctcctgctcctcctcctcctctt

SEQ ID NO: 59612 - DNA, 122 bp, Homo sapiens
ccacgggcacttcagaggcagctacggttacaagtggcattcaagtcatccgagcccttgcgttcttcctctgggccccacctcccatgaaaactgaacccagcagctccgggatccggtgt

SEQ ID NO: 59613 - DNA, 122 bp, Homo sapiens
attcaaaacagctaaattccacccttctctttcctctcaaaaacaaatgactgaaagagacgtgattatagggataaacctgaatatattctaacttgtttttttttttttttttttttttt

SEQ ID NO: 59614 - DNA, 122 bp, Homo sapiens
tactcctacgtactctataatcaagtagcaataaaataaagatgctgcttaggagaatggcgttagataaatctctactgaacatgaagatgaactttaacactgaaatgaacatgatagcc

SEQ ID NO: 59615 - DNA, 122 bp, Homo sapiens
cagccgggaaggaggcgccttcagggtaatgtgccccggcccctggggctcaggacagctcggtgcgcggcgttacctgagcttcgcatccaggggtagatccggaagttactctcggccgc

SEQ ID NO: 59616 - DNA, 122 bp, Homo sapiens
atctcggcggggcaagtccggattccaccagggcaggtccgggaggtcacccagggcagacgatccgaggcagagcgctttaaaatcctgccgccgcacgcccagtcagagcgccgagcgcg

SEQ ID NO: 59617 - DNA, 122 bp, Homo sapiens
ccactatgatgaaagatgttgatggtggaggaggctgtgcccgtgtgaaggcaggggttacgtgggaaatctctgtactttatgttcagtgttacgtgaagataaaagtgctctaaaaaaat

SEQ ID NO: 59618 - DNA, 122 bp, Homo sapiens
cgggagttctgagagccttagcaggccgcgacaacactgggagacgtgtctgccaatcaccggatgggggcggtcctggggggggggtcatgcaattggctaagcacggagaagctctcgtt

SEQ ID NO: 59619 - DNA, 122 bp, Homo sapiens
tagtgggtagaggccaggggtgctactaaacatcctaccgtgggagcacagagaagcccacgcagcaaagaattgcccggctccgaatatcgaagtgcgcggtcgagaaggcgtgggctgcg

SEQ ID NO: 59620 - DNA, 122 bp, Homo sapiens
ctcatggcgctcgccccgttccaggcctccctggtgcccgctgctccgttttctgggcctcgatcccagtcctgcgtgccagccagcccgcccgcctgcccgccggcctgctgcgcgctgcc

SEQ ID NO: 59621 - DNA, 122 bp, Homo sapiens
tgccataagcaacaggtacatgttagggcacttatactgtgtcatgggtgttcttcccaacgaaagacccttgagggaacagggtgtacagatgctaaacagatgtttgttgaaacaatgaa

SEQ ID NO: 59622 - DNA, 122 bp, Homo sapiens
cctgtcactggggtggaaggaccacacacttcatctgcagagcacctggacccaggtggacgcaggtgggctgcgggcaggcgctgcctcaggacctgccttccagcgcccactctcagtga

SEQ ID NO: 59623 - DNA, 122 bp, Homo sapiens
gctcaaagtggccctccagtctcatgaaattgttttgaagtctcagctttaatttaaatacgcttgtcaactttgcattttactccataaaatcttttgatatattaaatcttatcagtttg

SEQ ID NO: 59624 - DNA, 122 bp, Homo sapiens
tgtcaccaacttgagcaccagtgtgccagagatgtgccaggggccatgcttccccaacctcgtaccatgctggccctgatggagctgggcacagccactgactagtcagggctgcaggcctc

SEQ ID NO: 59625 - DNA, 122 bp, Homo sapiens
acagacagcaatagcgccacgttccctggaaggcgcacgggacggaagcggaagcagtaacgctggctccggctgcccggcggccaggaacggaagcggaagtggcggcggcgccggcctgg

SEQ ID NO: 59626 - DNA, 122 bp, Homo sapiens
ggcaccagtgaagcgtctaagggaccatcttggttgagggcggaagtgaggactgtgtcgcgctggaggagcccacagattctcccggacccacgtggaagcggcactcaagatggtaggag

SEQ ID NO: 59627 - DNA, 122 bp, Homo sapiens
caactctaatgggaaacttcctcatcatggttacagttacctgtgaatctcaccttcatacgcccatgtacttcctgctccgcaacctgtctattcttgacatctgcttttcctccatcaca

SEQ ID NO: 59628 - DNA, 122 bp, Homo sapiens
ggcactcagaaatggtagttcccggcctgactggaaccagacttagaaccagggtcctcgcgggaggctagggagagttcaaggctggggttctaggccgggcaatggttcacacccgtaat

SEQ ID NO: 59629 - DNA, 122 bp, Homo sapiens
tcgggtttcctcatctgtgaaacgggaacggatgtggcttcttaaccattacgctgtgtccgtcacagtcattctcacttctcgagtacccagttggtgggagttccagtatggcacagaga

SEQ ID NO: 59630 - DNA, 122 bp, Homo sapiens
gaaagacgcccccggccgtggctgcccagacgtatttggcgtcgcagtagccgacaatggcggcctcctggcagcagccatcgcacatcaggttatccacgtagctctgccaaccggccatc

SEQ ID NO: 59631 - DNA, 122 bp, Homo sapiens
atttgtgatatttaaaatgtggaaccgagctttcagctgcctctggctccctggaggatccggggtaaagaaacataaaatgggtggagtttggctctggtattctcagtgggatgggatgg

SEQ ID NO: 59632 - DNA, 122 bp, Homo sapiens
cacactatagttgaatcccctgaggtccagggttgtggctatataggtccttgggcctgacggtaaggtaaggtgctgcatatgagtattctctaacctctaagaaagccccaggaaggcag

SEQ ID NO: 59633 - DNA, 122 bp, Homo sapiens
ataacagcaaatgtgaagtacaaattactaaatagcaatctccagcagtacatatgtttacggggatacttgaatagtatgtctctcagcaaccactgactgtttttcagatttgcagagta

SEQ ID NO: 59634 - DNA, 122 bp, Homo sapiens
ctgtgtccaggcaaaggggaagcgcaaagtcgaaatgtttcctgggcaaggggccggcggcgcctaattccaccttgtgtgccagtgcagttcatagcccagcagtcacccggggtggggtc

SEQ ID NO: 59635 - DNA, 122 bp, Homo sapiens
gctatcccctcccgacgagacccttcctgttcctttaaaatgggccgggcagcagaaagacgagtgagtgacagcagacaggccaatcagaagcggccccgtctcgggcccaccccgaggcc

SEQ ID NO: 59636 - DNA, 122 bp, Homo sapiens
gggtgagtgctggcagcggggaagggggtggcggccgcagaggccgaggaggctccggtccggccgcctctgcggacccccgcctctgtgtgtgtcacggtctctatggagatctcccgcag

SEQ ID NO: 59637 - DNA, 122 bp, Homo sapiens
cccgtgacataggccagccgggcctccatttacacctcaaagcaaagtcacagagggatccgcccctttcctggctgcctacacagaaagcagccatgggagacttgccgaggactttgtcc

SEQ ID NO: 59638 - DNA, 122 bp, Homo sapiens
cccaaatcccttagtctcccgagaaactttcttcctaagtcaacacggtagtggggcctgcgtgaaggagagggcaccccggttggaactctgctggctttcatcccctgccagaagctgct

SEQ ID NO: 59639 - DNA, 122 bp, Homo sapiens
agacggagcatagggactcgaactgccgttttcctcgcctccaagagtacagggacgaaccggtgagcagaaggcctaagaagtcaggcacaagaggtttctgcccaggaggcacagaatga

SEQ ID NO: 59640 - DNA, 122 bp, Homo sapiens
ccacgtggcagacgggggcggggaccggtcgcgtggccgcggccttggctcttgcgcctgcgcgctgcctcccgctctaggacccggatttaaagagacaggcgctccaaccgtcgtgggct

SEQ ID NO: 59641 - DNA, 122 bp, Homo sapiens
cccggagatcggagtcggtgctgctgctgggggaacctcgcacgctgtgtggctcagcctcgcgcgatggaaacttgggccttcctgacgcagacccggatgcgcactgcaaagccaattat

SEQ ID NO: 59642 - DNA, 122 bp, Homo sapiens
gacccttccccgggtgcacagcggcggctgcgccagcgggggcaggatgggccgtccgagcgcacctccatccgccctcgcgacgcccacgctggcccagacgcgggatttggggtggagga

SEQ ID NO: 59643 - DNA, 122 bp, Homo sapiens
cgttacaatggggcgctgtgacgacagccagggcacgcgcagccccggccgtgggcggcccggacagcccgcagctgcctccccacccagacccgccgggccgtccccgcctcccctcgaag

SEQ ID NO: 59644 - DNA, 122 bp, Homo sapiens
ccttcaccaccaagacagttgcaccatgggcttctcctcttctgtaaaatgggtctgtaacgcccctggaaaagagtgtgcacttaatgttaccattaacatcatcataatgactgccccat

SEQ ID NO: 59645 - DNA, 122 bp, Homo sapiens
cccagggtgggtggccagggtctgacagtagtcccccagggagtgaccacatcacccagccggggtccaggaagcctggcctgagacctgcccattacactgagggtgcacctggaacccac

SEQ ID NO: 59646 - DNA, 122 bp, Homo sapiens
taaccgcaggtcctaactcagagcagcctccggcgcgggtggcgcggataccgaggcctgcgggggacatccgccgcctggaacgccccgcccggtcagccagcccctcaggggcggcgagc

SEQ ID NO: 59647 - DNA, 122 bp, Homo sapiens
gtggcaggtgaacttgcaatctgcagagaggcctggcggtgaggcggaggagctccaggtcggggaaatgtcccggagattgaagggaagccccagggagagggccgctgctcgccaggctc

SEQ ID NO: 59648 - DNA, 122 bp, Homo sapiens
cgagggtgcaggctgcgcagatggtgtggtcctgcgccccgagggccgcagcagctcatccggcagctcccaccccaacaacctggaagggggcgggacttccgtttgtacccggctgtggc

SEQ ID NO: 59649 - DNA, 122 bp, Homo sapiens
tgaagactgtgctgcaaagaccactgagcctgatccagggcccgccaggcacggggaagacggtgacgtcggccaccatcgtctaccacctggcccggcaaggcaacgggtagggctgacac

SEQ ID NO: 59650 - DNA, 122 bp, Homo sapiens
cacagtccacattccccaccaggcgctcagagatatggaatacgttcccggtgggcactgcggtgtgtgtagtcaaggaccaccgcggagtccaacgcttcccgctgaagagtgagattata

SEQ ID NO: 59651 - DNA, 122 bp, Homo sapiens
acccgcacactcggccacgagttgcctggccctgcctggccgcccttcctgcgtggactccgctacttgcaccctctcaaggtaagtcacaagccctgggacttgagaggcggatcttaatg

SEQ ID NO: 59652 - DNA, 122 bp, Homo sapiens
gcggtacttgtggggagaggccaggaatgctgctaggcacccggcaacgcacaccactgtcggctacaacatagaattatccactccgagtattaacagtgccacagttgagtaatcctggg

SEQ ID NO: 59653 - DNA, 122 bp, Homo sapiens
tgagcaacccttaaaacaagcttagggctggccagaaaaattttagagtgctaaagacagcgtgtgcatggatagtagccagcagtcaggcggtcacaagaagggtcagctatgaagagcta

SEQ ID NO: 59654 - DNA, 122 bp, Homo sapiens
aggtgcgtttcccatgacgtgttcacaaacaagcacaaggatgttcaaggcagttttgttcgtaatacaaaaaaaatgacacaactaaactgcccgtccaaaggcaaatgaacaattctaga

SEQ ID NO: 59655 - DNA, 122 bp, Homo sapiens
aaagaaactggtacaaatggttgggggacaggtgtagaaggctcactttctggctgggcgcggtggctcacactttgggaggccaaggcaggtggatcacttgaggtcaggagttcaaggcc

SEQ ID NO: 59656 - DNA, 122 bp, Homo sapiens
ttttctgaaagccttgatttctgtagacagaactatggtttttggcatgttgggtcaagacgtgtttctataggaaatgcttgcacgtggcactggcttggtgagtcaagcttcctgagctt

SEQ ID NO: 59657 - DNA, 122 bp, Homo sapiens
aattctattttcattggctgtcactgctgccggcctttgtaagggggcgctctgattggtcgataaggtgggggcgtcgagggtctttgagtcctaaggcttctaattggttagatgagata

SEQ ID NO: 59658 - DNA, 122 bp, Homo sapiens
agaccctgagcaaactcctctccaggccatgcggcatcctgggctctggtttcccaggcacgcaaggcacgcttttctctacttcccggggacgctggcctcaggacttagaactcctgtat

SEQ ID NO: 59659 - DNA, 122 bp, Homo sapiens
tcactttctcgtggaagatggactccatgtttatttgtctggagccaacggcccccacgccgaaccaccccctccagctccgccccctgcccctctcctccgcccaccccgcccctccccgg

SEQ ID NO: 59660 - DNA, 122 bp, Homo sapiens
gcaagtggtcagaaggccttgggcctgtgttcaagtccaggcgggccgttgtcgctttcccgtctgtgaaatggcagcagcaaaagcatcttcctggtggggtgaaaaaagttgaacctcgg

SEQ ID NO: 59661 - DNA, 122 bp, Homo sapiens
cccaggacagtagcagctcccgacacccttgcttgaggcccagcatctgcactcccagcccggccctcctccaagctggcatttctgctgcacccacgggacgctcctgtgcttccgcagca

SEQ ID NO: 59662 - DNA, 122 bp, Homo sapiens
gattaatgaatcccccctcctatcccgcacttcctgtggaaacagtgtcaggatgtggcgcggacctatgtgcgtcccttataccaggacttgccttcaacgctgaaggtgaaccctgggtc

SEQ ID NO: 59663 - DNA, 122 bp, Homo sapiens
accctgaccgaagccgggcagggacagcggcagcgggcctggggctctggctctggctgccgggatggctgtccttcccgctctggtccgctagggtcccggtagagttaccttgttgaagc

SEQ ID NO: 59664 - DNA, 122 bp, Homo sapiens
aggagccggcatctcactccttcccccaccagcccagccctcactgcctgaccctcccctcgccctgcagacagaggctaaaaataccctccccacgtggccaccagaccagccctgccccg

SEQ ID NO: 59665 - DNA, 122 bp, Homo sapiens
ccagccacccgcagcccacactccagccgcccaggcccccctgcctcccctgcctgtgcccggagctcaccgtgatctggacagccagcaggccctccccggcgtcctttgcatcgatggtg

SEQ ID NO: 59666 - DNA, 122 bp, Homo sapiens
cgtcctcggttactatcgcccaagatcaaagccaccctggttttctgattgccgcaactgcggctccaggtgctgagtgcacagccactgcggcactgtccgcagctgcgcgccgggctcag

SEQ ID NO: 59667 - DNA, 122 bp, Homo sapiens
atctgggtttcagtttctcatttgttcttttttaaaaatgatgccaaattaatgggtcaccgaagcctggttgaattagagaaagccctccctccaaatgctcctgtcaaaaaaagaaacac

SEQ ID NO: 59668 - DNA, 122 bp, Homo sapiens
ggagggcgatgtccccgctaaagttatgggactcattctgacggtagtcggggtgcacaacgacacggtggacagggtggttccccagtttcagcatctcatctatggctgtgtggcccaag

SEQ ID NO: 59669 - DNA, 122 bp, Homo sapiens
tcctgtgaaaggctcttgggactcccagaatccgggtcagagagtttggtttttgagaagcgcagctgtaattcatcaactgtaattaataacaaccaaattctatccccatgcttatataa

SEQ ID NO: 59670 - DNA, 122 bp, Homo sapiens
accgaggaaggaggaaaggactcagccgcacactttttcaggacctgggaatgagttactcggccccctccagcggctcaccgtcccaaccacaagtcccagcggcctctgagcctcagcgc

SEQ ID NO: 59671 - DNA, 122 bp, Homo sapiens
ttcaagatttccaacctgctttgatttcctctctaggtagttttttattttgtgtttcagcgggcatcaactttgcaatatcaggaaaaaccagagccaggcttgaaaataatgctgagaca

SEQ ID NO: 59672 - DNA, 122 bp, Homo sapiens
gggcaccaggcacagggaaggactgcttggctaggcccctgtccttggcccttgcccaagcggaggtgcccaagggcctggggagatcaagcacagggcacctctgtcccattggaggggca

SEQ ID NO: 59673 - DNA, 122 bp, Homo sapiens
aagcagcaggcctgagggctgcagtggcagaaatgcccccaaggaatggcactcacatgccgggcaactgatgctcagagtaaccttcccacagcagccgcgatcttcagtgcatgtgtgtt

SEQ ID NO: 59674 - DNA, 122 bp, Homo sapiens
cgccgccttcctgctgaccctgctgttgcagcttctgccgctcggcctgctcctgggccgcgcattcttccaggacctgatccgctttgggaaaacaagtgttggggggcctccgcgccccg

SEQ ID NO: 59675 - DNA, 122 bp, Homo sapiens
gaccccggggctaaagcagcctctggaagagagtggccgccctgtcacttcagcaccaggcgcagaatctgtgctaaacctgaggtgagggtaaggaacccccgacaccgcacgacaaccag

SEQ ID NO: 59676 - DNA, 122 bp, Homo sapiens
agccgccttgccccaccatcccaaaggaatttaaacaggaaaagacaaagtcagacttttcgtgtaaagaggcttttgtcctcaggatagagagcaaaccagaagtggggatgactaagcag

SEQ ID NO: 59677 - DNA, 122 bp, Homo sapiens
accagagcggcaactgcactgagcacttccagactctgcagtctgtgactttagtgagtacgaagcctcaagcatgctcttttagcaaagattaatagcaaatacatttctgtgatgatttt

SEQ ID NO: 59678 - DNA, 122 bp, Homo sapiens
agcggcagcgtcggtgctctggaccggcagccatgggaatgtcctagtcggcagcagtgtcggtgttctagaccggcagccgtgggaacgtcctagtcggcggcagcgtcggtgctctggac

SEQ ID NO: 59679 - DNA, 122 bp, Homo sapiens
cccatgggcttgggaatggctgggggcaaggtgctcttgcctcttcctctagggaacaaccggtgggacctgaacctcggaaagcgggcgtccaggcttgagggtgcgaggaccacccagta

SEQ ID NO: 59680 - DNA, 122 bp, Homo sapiens
tcctaccctggctgccaggcaaatacccccaggggagcagacctattgctgggccacctccggaccaagcatcctttcccgctgagttgggcaggcctgtggctgggcactgcagggctgac

SEQ ID NO: 59681 - DNA, 122 bp, Homo sapiens
ggcatcacccctctctccaacacctacttgagggcttgagggagcgataggggagacacccgccaaaggccttatctcaggctgcaaggctggctgtgctggcctgtctatggagttaacac

SEQ ID NO: 59682 - DNA, 122 bp, Homo sapiens
gtctctgccctgccgcccatcgtctgagatgtggggagcgccgctgccccgccgccccgccgccccgtctgggatatgaggagcacctctgtctggccgcgaccccgtctgggaactgagga

SEQ ID NO: 59683 - DNA, 122 bp, Homo sapiens
gactggcgagctgcagggggcagccagggacaattgtatggaccagtttaacatggcttccggagggatggcagcaggaatgctgtgtgtctgtgtgtgtgtgtgtgtgtctgtgtgtgttt

SEQ ID NO: 59684 - DNA, 122 bp, Homo sapiens
ctgcttaactctcggttcctgccctttccgggcagggaggcccccgggctgggtttagctcgcagcgaatgagggctggaaaactggagcgcattgggagacctctagggcccccctaaaac

SEQ ID NO: 59685 - DNA, 122 bp, Homo sapiens
acttatggcaagcgcgtgcatgcgaattcatcagatggaaacacaggcatgtgtagcctgcgctctaacttcttttccaccccaaagattctttttttctacagcctaacctgtcggggcat

SEQ ID NO: 59686 - DNA, 122 bp, Homo sapiens
ctttggggatccacacacaaaggaaataaccttggcctaggcagccagggcaggcagccccgtcccgcccccgatctttccggccctttttgaagatggagagaaggcgcgttttacggttg

SEQ ID NO: 59687 - DNA, 122 bp, Homo sapiens
ctctcctatttcctccttggatttctgtctctcaggttctgtctctcaggttctcctctccgtaaatattctctcctctccctctccgggatccgtcccctcccccacgtggatctgcctcc

SEQ ID NO: 59688 - DNA, 122 bp, Homo sapiens
cgatatttaaactgacctcaaaaagacaaggctctcaagttacactcttttgtgtgtctgcgagtcaaacttgtagcgcctactggggaccagtggaaacgtgatggtcgccccctgcggga

SEQ ID NO: 59689 - DNA, 122 bp, Homo sapiens
gaccctcagtgagcccagaagaagatggcgcccactgcccctccggtccggacaaacggacgtacggtttatctgcccatgcgctctgcaggcgcaacccaccaccaagcttgcgcacgcgc

SEQ ID NO: 59690 - DNA, 122 bp, Homo sapiens
accttcaggacacccctcttttcagaacttcatgagtcccaggtgctagactcatgtctgcggaggcctttcccgtgcctggtctttctttctttcttaaaggagttggacctctaaaggcc

SEQ ID NO: 59691 - DNA, 122 bp, Homo sapiens
ctcctccgaagggctgggggcggtgtcagtagtgcctgtgtctgccggcacagtccctggcgcagagcgcaccttcactaaccggcttttttgtcctccttggaacccctgccctggatggg

SEQ ID NO: 59692 - DNA, 122 bp, Homo sapiens
aagttaagatctagctttaccaagtccaggccctaatgaagatgattgcaaagtcaaatacggctgcctttccctaaagcaaagagtgaccccaatgtgggctttttcaacaatggccctgt

SEQ ID NO: 59693 - DNA, 122 bp, Homo sapiens
gggggtaacggagcctggagtggtcgcccattggatgggcatcggaccaatggcgggctgcgaaacgggaggggcgggcctcacagcggggcggggcgcgcctgtgccgtgtcgcgtgccga

SEQ ID NO: 59694 - DNA, 122 bp, Homo sapiens
cttttgcctgcagtggatcatcctcagcttggagtggctcagccttggcctggagggccacgaggagaacagcagtgaggatggtgagggttctcatggctagggtcgctggaggagagaga

SEQ ID NO: 59695 - DNA, 122 bp, Homo sapiens
cttgacttgagatctgccatgtggacctaaaagatggaattgtctatggctcttttatttcggttaaaagaaagcagcatttgctttgtttaaaaaagaaaatggggggaggggaatgtatg

SEQ ID NO: 59696 - DNA, 122 bp, Homo sapiens
ccaggccatgggaggagacctctctccaaacaggtctcctgctggaagccacatcccagccgcacttcccaggagtccccccagccctctggggccaagagaagtcaggagccatgctgcct

SEQ ID NO: 59697 - DNA, 122 bp, Homo sapiens
cctaaggattaggcggggtcgggtcacgctctaagctgggggcccgcccctcggtatccccgcgctccgagcgccgcccacccaccggagtagccaggcatcccagtgctcggggttcggga

SEQ ID NO: 59698 - DNA, 122 bp, Homo sapiens
caggcagcggccctggtgccgagggggcaggtgcagcgctgtagtgatgcccagtggcctcgtcctcagccacctgccccccaacacctgctagatgcccaggcggggcaggcccgaggtgt

SEQ ID NO: 59699 - DNA, 122 bp, Homo sapiens
gcagtcgccacagacgacctaacggtaggaaaatcttacagccaccaggagagttccaggcgccgcggcagggggactgggagaggggactgcgcccagaatgaaggctcgggacaaaagca

SEQ ID NO: 59700 - DNA, 122 bp, Homo sapiens
ggcttcgcacaccttttggaagactcagggagaagcgggggccgccttcggggggaaaggcgggactggggagcccacaggccatggctcctcccacaggatccccaggccggaggcgggat

SEQ ID NO: 59701 - DNA, 122 bp, Homo sapiens
gcgccgcaaggcactgtggggtatgtaggccagagtcatttctcctgaggcgactctccgcgtcgggactacaattcccaggacgcaccgcgcgacaactcttcgcgcgcgcctgagaggcg

SEQ ID NO: 59702 - DNA, 122 bp, Homo sapiens
gcatggcacggaagaactgcctggtgaagaacctggaggcggtggagacgctgggctccacgtccaccatctgctcggacaagacgggcaccctcacccagaaccgcatgaccgtcgcccac

SEQ ID NO: 59703 - DNA, 122 bp, Homo sapiens
accactggactctagcctgggcgacagagaaagaatccgtctcaaaaaaaaaaggaggagcgacctcagctagcatgctcagccccttcactgtgtgataccctgtgctaccttgggactct

SEQ ID NO: 59704 - DNA, 122 bp, Homo sapiens
gactcatcaaacttttactaagagactttaaaagtgcctggcactaaactatgtgctctgcgcacatcttttaatcctattaactcagtgaggcaagcattacatcaacttgcctgcgtgtt

SEQ ID NO: 59705 - DNA, 122 bp, Homo sapiens
caccctcatccacgcgcaggccccaccgcccggtcctctcctctgatccccgggccattgcgaaacacggagcgaacaggtcctcgccagcagccgtcatttcccgggaagatgggaaccca

SEQ ID NO: 59706 - DNA, 122 bp, Homo sapiens
caccgccgcagaggacaatcgggagccagcgggctcggcaccgccgcggcgggcgcagaacgcacgagcccagtgggagcccggcccccgcctccagcccggctagtaaccaacacggcccc

SEQ ID NO: 59707 - DNA, 122 bp, Homo sapiens
agggagaggcgcgggcgggaacctgggctgctcacggtgcttgcgggccagcgtgagttccgggtgggcgtgggttccgcgaaccccgtgctccaagccaccagccggccccaccggccccg

SEQ ID NO: 59708 - DNA, 122 bp, Homo sapiens
agtgggaaatgcctggaaattcacatcctctgaggtggccaatgtctgccagagggatgccgactccagatccagcatgacctaccctgtttcctgagtttccaactcggtcaaatctgtga

SEQ ID NO: 59709 - DNA, 122 bp, Homo sapiens
aatgggtctgccagaccagaccaggtggctcacatttgtaattttagcactctggaaggccgaggcaggaggattgcatgagcccaggagttcaagaccagcctgggcaacatagtgagacc

SEQ ID NO: 59710 - DNA, 122 bp, Homo sapiens
caggtggaattcccagccgcccagcgcgaggccagcgagctggggccttaggaagtctgccgccacgtggaggcggtttacattctccaacaattcacttcggcagggaaaatacaaaagac

SEQ ID NO: 59711 - DNA, 122 bp, Homo sapiens
ccttcctagagaggagacggtagtggttattagccgaggcgcggactgctgacgtcacgccggctgggcgcgtccgggacttactcctttccgcagggcagcacccagggacctgagtgttg

SEQ ID NO: 59712 - DNA, 122 bp, Homo sapiens
taccccctactgccagttgaccacagctttccccagccccagacccttctggtcccaggccgggcacccgactctccagggcagcacctaggacagcagctgcagtaccgaagcggcagctt

SEQ ID NO: 59713 - DNA, 122 bp, Homo sapiens
acagagcaagaccatctctaaaaataaaaaaaaataagagatgccaacaggttcagtgtccgacgagggctctgttcctcattgatggtgacttgttgctcccatggtgggacaggatggtt

SEQ ID NO: 59714 - DNA, 122 bp, Homo sapiens
ctgggcaaacacctgcctcaccccgccctggccaggcccccgtgccttttccccatggcccggcagggtgtgaccagggaaccctccagctggcgccagtgcccacagtgggttcagggtca

SEQ ID NO: 59715 - DNA, 122 bp, Homo sapiens
caaaaattactaggtttctccagaatttaatttgaactttaaaagtcaacatgagccctacgcttttctcctttctacatccttctcttctctccatgtcacaaggaaaaacaacaatcatg

SEQ ID NO: 59716 - DNA, 122 bp, Homo sapiens
tggccatctccaagttcacttcctttgtggggaactgtgtgggttgttgtgagtattaagcgacattcacttgcaaggctgtgttgtagtcagagctcagtcatgcagccgttactgtggct

SEQ ID NO: 59717 - DNA, 122 bp, Homo sapiens
ccggtgtgggacatgcctgtgaccccccgccgccttgcaggtccgctgcgcagcggtcttcgcccttggcacgttcgtgggcaactctgcagagaggacggaccactccaccaccatcgacc

SEQ ID NO: 59718 - DNA, 122 bp, Homo sapiens
gaacatcccatcttacagataagcaaactaaggctcagaatgtttaaggacatctactaacgaaaggcagggtagggaatccagcttaggtgatgtgcttccaaaatccttgttctcactgc

SEQ ID NO: 59719 - DNA, 122 bp, Homo sapiens
agcgcggcgctggggactggctgggtaccgcccgaggcgcggagaagcggggtgacggcacgggccaggggcggcagcggccggggggcgcgctcctctacgcgtctccgcagcgcctgccg

SEQ ID NO: 59720 - DNA, 122 bp, Homo sapiens
cagtattctgcagctatgctacacagggtctggccaaggaaaacatggttgaaatcttcccgagagtgcacatctatctgctccctctgacttccttcactatgggtttatcaagaattcca

SEQ ID NO: 59721 - DNA, 122 bp, Homo sapiens
agccactgtgcccgctgagtcacttgagaggccagggcccagctcgtgtttttccagggacgcgtcagtgataacaaaactggcaaagaacgaggcaggggcctttgaacccccatgttcag

SEQ ID NO: 59722 - DNA, 122 bp, Homo sapiens
cggccctgtaactttaaacctggcctgagatcatcgttttggcgccggccaaacagagcccgagggcgggcctagcgcgcccggacggagaccaccttgcggccgaccccgctcccccgcct

SEQ ID NO: 59723 - DNA, 122 bp, Homo sapiens
gcagagcgcaaaacggcggcggagttgagccaatgacagcccaggatagcaacacttccgcgcacgcgcagcgcgacgggccggaacttccggcgtcctcctcgtggcggtcattttggcct

SEQ ID NO: 59724 - DNA, 122 bp, Homo sapiens
gctctcctggccccacccaacggtttcctggagaaattctaggggagtttgccctccagccgcgctccggaagcggaggctgcgttgggagcacgtggtttgccccgtcgcccaactaatct

SEQ ID NO: 59725 - DNA, 122 bp, Homo sapiens
caggttcaaagcctagcagcccccacaccagcatggggataggaggtggcagggagcacccggccctgctggctagagccccctgggtccttcctggttcgcacttggactcccatgggtgt

SEQ ID NO: 59726 - DNA, 122 bp, Homo sapiens
agcgccagcagctccccgcggcggagcagcagctcccagcgctccgactccgcggccgcgcgctccagccgatggccgctgccgccgcccacttcccagaaccggcctcggccctgcggcgc

SEQ ID NO: 59727 - DNA, 122 bp, Homo sapiens
gcctcccccggaaagaggcacggggcggaccgcgggcgcgggtgggcagggaagcccgggcggtggcacctcaggtgacacccacagtctctccagcgagagcagccccggggcggtccctg

SEQ ID NO: 59728 - DNA, 122 bp, Homo sapiens
acatgagtttaggagggcccggccgtgagctagcaggccttggggagcttgtgtggggcccgggattgtggggaagaagaacagagaggtgggggaagggaagggaggctgttttctcaggc

SEQ ID NO: 59729 - DNA, 122 bp, Homo sapiens
tacctccacctgaggcccttcctccacctgagggccttctggggtgaggagaccccagagcggagcgcagcggctggtagccacgccctcgccgtttgcgcagcgcccctccgcccgccttc

SEQ ID NO: 59730 - DNA, 122 bp, Homo sapiens
gagccttctgtgccttttcagctaggggtgtgcacagacagcaatgtgtcgtctgaactccgtgtacactttgtctacaagtcccagagatcttctcttagaacggttagagataccttatg

SEQ ID NO: 59731 - DNA, 122 bp, Homo sapiens
gaattcgttgtagtcaagcttcggggagggactcccctctgcaccttctatctcatgaatcgctaccggagccgctgacggttcggacgtgcagttctccctgcttatcctgtagggcgtcc

SEQ ID NO: 59732 - DNA, 122 bp, Homo sapiens
ctcctggagagcaagaatgctgactttctcactcctatatccccagtgcctggcatggctcgttggtatacagtaggccctcagtacttgtcagctgaataaatatagagcaaagcatgaca

SEQ ID NO: 59733 - DNA, 122 bp, Homo sapiens
ctttccagacttctttgcaatactgcctcatgcactgaatccatttctcgcatagcctggcgcttggcaggcaggctggcgttccctggctctgccttccccatctccctgtcttttctccc

SEQ ID NO: 59734 - DNA, 122 bp, Homo sapiens
caggtgacagaagacctagtagaacttagcccaaatttaaataatgacccaaagtccccacggggctcagacgttcccacaccctaggcagaaatccccactcacacgagcacgcatacaca

SEQ ID NO: 59735 - DNA, 122 bp, Homo sapiens
tccagatccgacatccttttccctttcctcaggaagacttggatgcgcgccagcccagcccgggtctccaggttcagctgcggaagcttcccacatggtgcccgtcgcttgggatgcggcta

SEQ ID NO: 59736 - DNA, 122 bp, Homo sapiens
tgagacagattcttattctgtcatccaggctggattgcagttagctctcactgcaacttccgcctcccgggttcaagtgattcttgtgactcagcctcctgagcagctgggatttttttata

SEQ ID NO: 59737 - DNA, 122 bp, Homo sapiens
ggggtgctggcacaggagggcccacggaccaggggccacggccgcctgtatggtgctggccgaaggcggcccccgcccgtcctcttcggatcagtgattggcacctgcagtaatcttgcttg

SEQ ID NO: 59738 - DNA, 122 bp, Homo sapiens
gggtacgcgcgggcccgctcgtcctgggactaacgaagcaaaggcgggaggtgcctccatcgccttctgcctgatcctggccttcgtggagacccaggcaggccaggcagttcagacagccg

SEQ ID NO: 59739 - DNA, 122 bp, Homo sapiens
ctctttcttggcagtagaaagaacatgggccttgcagaaagacaagaattctggcctaatcgctcactacacttactacagaggatagaattctggcccaaggatgtttcaccttgaccaaa

SEQ ID NO: 59740 - DNA, 122 bp, Homo sapiens
gagccggtgcaagtggagcaagacacggacgtttcaggagagatcacgctgctgccctcccgggacaacccccgtcgcctgcgcgtgctgctgcgctacaaagtgggagaccaggaggagaa

SEQ ID NO: 59741 - DNA, 122 bp, Homo sapiens
ctagcccggggtgtggacctggggactccccagaagggcccgagggggaggctcacggagcgtcggcggaaggcacacaggatgttaaagctttacaacggcctctcggaaggggaggcggt

SEQ ID NO: 59742 - DNA, 122 bp, Homo sapiens
atcggtctcccgcaggctggcgagagccacagtgagaacgaggaaactccagacggcctccgggcaggccccttaccagcctggggcgtcttcctcgataatggaactgagaatcagtccct

SEQ ID NO: 59743 - DNA, 122 bp, Homo sapiens
cagcaaagggcttggcaaacccattggtcccgtttgtcatttacccacgagggccagagacgcatgacaaagacactagcaaaggagatgagaccattaggaaaatcaagctggccagacac

SEQ ID NO: 59744 - DNA, 122 bp, Homo sapiens
tgagcccacagctaggacgagttggcaagccagactccttagtaactgcccctgggggcccgtgcctgggtgaggctgttcatggcgtggccccaggaggaccgcccagggcgggttgggca

SEQ ID NO: 59745 - DNA, 122 bp, Homo sapiens
tactctcggcggtgctaccatggcaactggtgatgtcagggcggtagcgtcgtaacatcgcgcgagaactctctgcgcggttgactacgcttatcaatccatcgtattcctttgtcttcttg

SEQ ID NO: 59746 - DNA, 122 bp, Homo sapiens
ctccacaccatagcggtgcgggtctggaagagccttgtgacttggagcagacacacacagcgtcacgcggctgccccggctggcccattcccatcccagcgccagggcttgctccttccctc

SEQ ID NO: 59747 - DNA, 122 bp, Homo sapiens
agcaaaagtttttcttaaactaacaatgccagtgtaaggaggtgctcgcgcctgattggccgggggaattttgcaggtttgattccttgattggacaggaggtgttaggggtggggagagag

SEQ ID NO: 59748 - DNA, 122 bp, Homo sapiens
gatatcaacacagcatgagcagcaggtctgaccttggggagtttcctgccagccagtccacgatccctatgaccctcctctccctcctcggctgtgctgggcacacctcctgcactgcacca

SEQ ID NO: 59749 - DNA, 122 bp, Homo sapiens
gggggtctcggagaccacttgcacaacacctaggtcccacataggggccacagggggtctcgggtcaacagctgagggcctgagcccacctggtgggggggtggcttgtaatccttgagaac

SEQ ID NO: 59750 - DNA, 122 bp, Homo sapiens
cgtgttaacagcaaacgccttgagtgtagcgctcctactcctaacccccggctctctacacggcaatcacccgaacccactctgcctgccctaacaggcctgagctgcccggctcagactcc

SEQ ID NO: 59751 - DNA, 122 bp, Homo sapiens
ctctggcccacccatgcctgctaggccatgcttcttcagaagtggccacaactctcctgacgtctccagagccggtcattccacccagggggacttcagctgccactggacacttcaattgt

SEQ ID NO: 59752 - DNA, 122 bp, Homo sapiens
gtcaccgtgcagtcgcacagccaggagtcaagctacagggatgtagctctccgcccgctgcgtcttgctgttctaacagaggctgtatgaaaacttggtaatcctagaaactgctcagatgg

SEQ ID NO: 59753 - DNA, 122 bp, Homo sapiens
tgaacacgctgacggtgaagtcgctggtctccgagccatacttgttcttcacaaccagcccgtatttgcccgagtcagcggtgctcacgccgttgatggtgaagtacgcggtcctcccagcc

SEQ ID NO: 59754 - DNA, 122 bp, Homo sapiens
tgcccggccaggaccctgagtggttcacttatacaaggatcttcttcctcttctgtcacccgagacagcaagactaccccctgcctcctcctcagccttctcaacgtgagaacaaggatgaa

SEQ ID NO: 59755 - DNA, 122 bp, Homo sapiens
caggtgctctgctgctggtaactactcgcagttaaagatcttttgactctttccccgacacgctatttgtcagtgtcgttttccaccacagagccaggtatttgccccgccggccacggtga

SEQ ID NO: 59756 - DNA, 122 bp, Homo sapiens
gccccgcggcgagggtgggcacgcccctttcccgcaaccttcgagggaccccacggcaggcggagaccgacttgggaccagggcactgcacccgcccagctagagggtcccggccgaggctg

SEQ ID NO: 59757 - DNA, 122 bp, Homo sapiens
cgtggcgtgcgggtccgtcgggggagacggggggaaggacaggtccccgggagaggagagcgcacccgcttaccgccctggcctcattctgcaggcagccgagagaccgccttcacccacgc

SEQ ID NO: 59758 - DNA, 122 bp, Homo sapiens
gcatgctgacatggttatgcatacactgtacattttcaattatctggggtagtgcgtgatcgggagggcacagataagcaaagcccatggataatggtaaaatctctctgtaaccagtactt

SEQ ID NO: 59759 - DNA, 122 bp, Homo sapiens
caaactgcctgggggcattccttgaaaagaagaattctgcactttttggtgggaacctgccggtggaacatcctgtttagaaatgaggacatccaaggaacactgcaatgtgcagagactag

SEQ ID NO: 59760 - DNA, 122 bp, Homo sapiens
gatagacgagagggaatggtagttctggggctaggtggtagctgatggtgaaacctggctcggtctcaccctttggggactgtgtttgtgtcctaagatggtggatgtgtgggtaactcgag

SEQ ID NO: 59761 - DNA, 122 bp, Homo sapiens
ggagggtccccccaacacccgggtccccaaggctcttaccgaccagtaagcacagcacgtcgagcagcacgaagacccacctccgctgcatggtccccgcgacccccgacgccggtcccagc

SEQ ID NO: 59762 - DNA, 122 bp, Homo sapiens
ttgttccagtccaagttgccacttcggttccagctccttcccctcccttagcacctgtcccggctctggctccagcgccaccgtcagtgcccacgctcatctctgactcgaaccccctttct

SEQ ID NO: 59763 - DNA, 122 bp, Homo sapiens
ctttatagtgtgagttctgtgaggacagaaaccttccctatttattactccaaggccaggcgagcaataggcacttaagagatttttgtcttttaaaagcagccatgagcgtggaatctccc

SEQ ID NO: 59764 - DNA, 122 bp, Homo sapiens
catgttgcttgctgtcctacttaggttggggggtcaggccggcgggaagctcgggcatggcgggctgcaggtcccgagccctgccccgcagggaggcggctgaggccgggcgagaactcgag

SEQ ID NO: 59765 - DNA, 122 bp, Homo sapiens
taggtagacctggaaccccagtttgctgaaggccgggcccttcctccaggggcgctgctccgccctgtctgcttgagctgagtcaggactggccgttctagctgcggcagccacccttactc

SEQ ID NO: 59766 - DNA, 122 bp, Homo sapiens
cttattttgtcccctaatcagataaatttcatatctgttgggatctgaaatttttatgtccgtcattattactacatttggaattaccacttcatttcagagtaaatttccttctgactgaa

SEQ ID NO: 59767 - DNA, 122 bp, Homo sapiens
acagcaaatgcacaggacaaacgttatccactccacgcccatggatcaacctcaaagaaccggaaacatgcatccaagcaagcatttgttcgtgaatgtccacagcagcactgtccacaaga

SEQ ID NO: 59768 - DNA, 122 bp, Homo sapiens
catcacaagactctcagcacagagttgggatctactgacatccttacaagtctcaataaacgaggtcatgctgaggggatctggctgacaacaaatgtggaaaataacccaggtttttggat

SEQ ID NO: 59769 - DNA, 122 bp, Homo sapiens
agagagaatgcctaacaggaactgcagtcagagaaaagcagccgctgctaggaatgtgaccgtgcagggagagaaaatgaatacatctcctcatctctctatcctcccaccgtctcatctcc

SEQ ID NO: 59770 - DNA, 122 bp, Homo sapiens
gaggctgaggcaggagaatcacttgtaacacgggaggcagagactgcagtgagcagagatcgcaccactgcactccaacctgggtgacagagtgagactccatcttaaaaaaaaaatgctat

SEQ ID NO: 59771 - DNA, 122 bp, Homo sapiens
agaccacgagcaagtaagcacgttaatcaaagtgaaaggctcacccctcacgtctagctccgtccttctccagcctgtgcctgccagattatttcgggttcctcgtgtttgactcgtcaaag

SEQ ID NO: 59772 - DNA, 122 bp, Homo sapiens
ccaggccacgatctgtctggagaaaccagtgtgcacttggtgtaatcctgggacacccttcgctaagattagacattaaacttggcaagggatgggggattcggcagcgcagggagaccttt

SEQ ID NO: 59773 - DNA, 122 bp, Homo sapiens
tggcgtgggggcagggggacggtgggggagccctcgcccccgactctcggtcggcctccccgccccaggcgtcactcagtgatcacgggtaaagagaactgtttcaaaaagcttccttgttg

SEQ ID NO: 59774 - DNA, 122 bp, Homo sapiens
tgaagaatctttgagtcctttgtagagttgaaccaaagtttgaatgtctctttgtggactcgtgtcctagggataccactccaaagggaaaaggggaatatcccttacatatctttgacttt

SEQ ID NO: 59775 - DNA, 122 bp, Homo sapiens
attctactatccggccaaaaagataaaaacaaatcgtcaacatcgtttgctattaagtaacggaacgcggacgcacacactaacactcgacactccgtgactgcagcggaacctaattaaaa

SEQ ID NO: 59776 - DNA, 122 bp, Homo sapiens
ccgcgtttatgctttcaagctttgacagacaaatcattgccctgggcttcctggcggccacgagctccggctcacctcccgctctgaggagccgcggaccctccagcagacccaggtctgtt

SEQ ID NO: 59777 - DNA, 122 bp, Homo sapiens
gagccccctgaaatgtcctctatggatgtagatttctgtgactgtggaaccatgccaaaccgagcctcatgttccttgctcctagtacagaatctggcacacaaggagtactcagtagagga

SEQ ID NO: 59778 - DNA, 122 bp, Homo sapiens
gctggcccggcaccgctcgctccagttcccaggagcggggatgcagatgctgcagctggtcggggtgggcgccgccgccgccgccgccgccgctgctgctggtttttctcggactgctcgtt

SEQ ID NO: 59779 - DNA, 122 bp, Homo sapiens
ccgccacgggctccttacccgtagtagcggaaggcattaatgatcttccagaagtgctcacgctcaagcctctcctcctcctcctcggtgctgcgcgtggccgccgccgctgccgccgaaac

SEQ ID NO: 59780 - DNA, 122 bp, Homo sapiens
tcgtgcttgtgtgagagggtgtgtgtttctcattcctggtatcctcagttccgggcgtggcgtgtccctccgtgtgagtgacggtgggaaggtgaggtgagagtggccagggcggggtggaa

SEQ ID NO: 59781 - DNA, 122 bp, Homo sapiens
tgtcctctcccccaggccgcgctacgtaggagtttgtgtctctacggccttcacaccgcacgagcgttcagaacccgctgactcttctgggctgagagcagtgtttcccaaagcataggatc

SEQ ID NO: 59782 - DNA, 122 bp, Homo sapiens
aactggagtcttatctctctctgagccccagtctctacaggtaggtctctggaactaccccgaaggggtaaggctgtcaagcccccaaggcatcaaacagttgtcagcctggatcattgcct

SEQ ID NO: 59783 - DNA, 122 bp, Homo sapiens
cttgcttttctctcctctgaaaggaaagcctgcgtttttgctgagactgaacactgctcacgtggtgaaagccttctttttggtgatgcaggattcaactctggttcctggaagactcaaaa

SEQ ID NO: 59784 - DNA, 122 bp, Homo sapiens
ttcttatttgttcattagaaatgttcagtctcttccctttgagggaataacaaggggtagcggagtggagaagacctgagttatgaaccagggcacctgtctcagccattattcagcttatt

SEQ ID NO: 59785 - DNA, 122 bp, Homo sapiens
gcaggtcttctcagtacagcatggtggctggggcaggccgagagaatggcatggagacgccgatgcacgagaacccggagtgggagaaggcccgtcaggccctggccagcatcagcaagtca

SEQ ID NO: 59786 - DNA, 122 bp, Homo sapiens
cttgagtctcaggccttagtcccggccatcgtttagcgttgcgcgaaccctcagctggtgcggccgctctcaatacccactgcgcttgcgctacagcttcgtctcgacgggtttgctcctct

SEQ ID NO: 59787 - DNA, 122 bp, Homo sapiens
gctgcgattggctgtgccggccactgggcggggccccgggcgcttagagcccgcgcgtgacgcagcccagtcccaacccgtctcaggtctgggcgcgcctacctcaatacaccctggctgcg

SEQ ID NO: 59788 - DNA, 122 bp, Homo sapiens
gccttggggctgcctgagtgctaggcagggtgtggtcctgggcatccttgggcctaccagcgagccctgctcagggtgtcgggcgccggcgggcagtactggcgggggcggccgcagtcccg

SEQ ID NO: 59789 - DNA, 122 bp, Homo sapiens
tcctgggccaggtacacacctttactgagctctgttatgaagggctctgcctctgaaggacgttatacaaccaaggttagaggcattcagaactggtgcaagtttcagtctgtccttgtgag

SEQ ID NO: 59790 - DNA, 122 bp, Homo sapiens
aacaacctttatattatctctcattctgtgggctgattgggctcagctgggcagctcttccgctccatacaacatgggctgggccaccatcatctggagcccagctggtccaacacattcaa

SEQ ID NO: 59791 - DNA, 122 bp, Homo sapiens
caaacaagccacctcctctccaccaaaacaggctgtgtaaaaagtccagctatagacgaccgccgtcgacttaatttcgaaaaagatacactttgtcttctattgtgttctgctcctactcc

SEQ ID NO: 59792 - DNA, 122 bp, Homo sapiens
tagatagtattactattttcagataacattgaataagcttaaaaacctcatcaaatccaacgattaacataagttcaataggaaattttgtcaaagaaccttctaacttctgattctgactt

SEQ ID NO: 59793 - DNA, 122 bp, Homo sapiens
aaaaaaaaaaaaaccctgaggtcaaaataagtgaacaatgcatttaatcatgtcaaggtacggatatgtctgactcatgtgtcaagtcaggccatccaattacttgagagattctcccaccc

SEQ ID NO: 59794 - DNA, 122 bp, Homo sapiens
cttggaaaaatgcacacgacagcatgcattatggccatgttgtaacagtgagacctcatccgtcacatacttcaccgagggaggcttatttctcatcctgtctctaccaagctcccaacctc

SEQ ID NO: 59795 - DNA, 122 bp, Homo sapiens
tggaggcagtaaggagattaggccccatctgcacagagggcaagatgggagctgcccaagcgtcaccatccagggggagccagaagccagcagcaaggtggctcatccccccaaacactgtg

SEQ ID NO: 59796 - DNA, 122 bp, Homo sapiens
tttgtagtccaccgacaaagtgggcggactgcgtgcctttcccctttctgcctggcaaagcgcttgccgggacctgggaggagctgagagtggggtggggtggggtgcgctgaagagtcagg

SEQ ID NO: 59797 - DNA, 122 bp, Homo sapiens
tgcgtcccctttcccggactggggtagggtgacttaggctggcaaagctcagccgaggcccggctcttctccctccggctctggacttgccgctggttttgtatgggtcttagcaaagtgga

SEQ ID NO: 59798 - DNA, 122 bp, Homo sapiens
tatcacaagtttctgtgagagccaacgtgacagatttttagcaatgaaaaaagacacactcgccaaatcatctcaattgccaacgcagaagcgttttatatatatgtatgtatatgtatgta

SEQ ID NO: 59799 - DNA, 122 bp, Homo sapiens
ttgccccacgcggagagggcagccggagaggggcgcggtgcgggaggcgggggtagggggcggaacaactgggaaagatactgacaactaaccctggagcccgcgagactccgaatctagtc

SEQ ID NO: 59800 - DNA, 122 bp, Homo sapiens
aacaagcatttctttctacctgtcattgaagtgaatcatcagtataagtagcgagctgggcgcattccttctcagttgtgttaaaacttgctggtattcccccggtatcagcagaggtgtgt

SEQ ID NO: 59801 - DNA, 122 bp, Homo sapiens
ccctcgctccctccctccgcccgcccggccccgcccctcgcagcccctccgccggctcggcgcacacaatgggcgtgcggcagcagggaggcaagcccctctcggctctaggtggccgcagg

SEQ ID NO: 59802 - DNA, 122 bp, Homo sapiens
cacatgagacttcacatagtcaagaaacccgtggaatgtcggcagtgtaggaaaaccttccgaaaccagtccatccttaagactcacatgaactctcacgcagggcagaaactgtacgggtg

SEQ ID NO: 59803 - DNA, 122 bp, Homo sapiens
cgcactccagtggtttccatcacactccagtggtttccatcacactccagtggtttccatcggactccagtggtttccatcggaccccagtggtttccatcacactccagtggtttccatca

SEQ ID NO: 59804 - DNA, 122 bp, Homo sapiens
gtctcgccgtcaggggtgacagtggtggacgcaggtgatgagcataacgttgtgcattcccgccgccgcgccctcgtcaaggcgcccacggcctccgagcgggtgactgggaatggcggggg

SEQ ID NO: 59805 - DNA, 122 bp, Homo sapiens
tgaaccccgaaacgacgaggctttaagacccttattcacccactgagtctatgccctggccgttctgccaacccccgccgcgcgctgcaggagtataagccagccctgctctgcgcttccag

SEQ ID NO: 59806 - DNA, 122 bp, Homo sapiens
cctcacaggccttggcttcggcagagatgctgccgtggatgcctatgttgacctgggcctcgacagtcaggcagtcctccacctcgttgtccgtgagcccttccagggccagctcgcaggtg

SEQ ID NO: 59807 - DNA, 122 bp, Homo sapiens
gccaatttactattaattgtaaattgtgaactacacatcctttatgtcagtaaaacttaacgacaaatttttgtacctatatatgtgcatacattcccgttctccccccagagagctggttg

SEQ ID NO: 59808 - DNA, 122 bp, Homo sapiens
gggcgtcagcgtttttggttccgtaacgtcggcgtgcaattgggatttagagatttgaatcggtttacgatcaccaccaaattgatctggaaaccagtacttcccacgttctgggtcctaac

SEQ ID NO: 59809 - DNA, 122 bp, Homo sapiens
gtgacatctcacatctcacatttctgaacattaaacccagccttgatagccaaagatgctcgccactgaaggatccaggtagtattgagggttctgtggggattatccaaagagaactttct

SEQ ID NO: 59810 - DNA, 122 bp, Homo sapiens
actgagggcgcagcccctccaccgcagccctgctgcttctgaggacttaggtattttaagcgaataaactgacagctttgaggaatggttcctggtgtctgtttgggcctatccacaaagcc

SEQ ID NO: 59811 - DNA, 122 bp, Homo sapiens
cttttcctttcttcttcctcttttttttttttttttttaaacacatttttttcctggcttcggacctcagactgctgcagccctaaccttcccagggctcagctctttggagctgcccattc

SEQ ID NO: 59812 - DNA, 122 bp, Homo sapiens
aatgccactggtgcttccgtgcgatgatcatttctgccggcagggggcaatcttgctcgccgcattctatattgacgcttcctccagctgtctgaacgtggcgctcaacaaaattaaggtaa

SEQ ID NO: 59813 - DNA, 122 bp, Homo sapiens
agaagccaatggcatttattaaagccaaactcaaagaaagaggagggaaggacattttgacggttactaaatgtaattatttgagccatgaagtgttctctgtagctgctctcatcgcaaat

SEQ ID NO: 59814 - DNA, 122 bp, Homo sapiens
tgggaggaaggcggggaggtagcgagctgcgccgcgaccgaaggggactcggtggttgtccggagggggttagggaccgaggcgcagcgttgacctcggctccccttccctcccctgggttg

SEQ ID NO: 59815 - DNA, 122 bp, Homo sapiens
ccccaagttctgggcccagaaccctcaggacccctttggggaaaccactaccgcagtgctcgcagggtggggtggcaagtgcagaggcaaaggctctcgcccagattctcccagctgggagg

SEQ ID NO: 59816 - DNA, 122 bp, Homo sapiens
ttattttcctcctcgtgacatatgtacactgcttccacaacttgatacgaaaactcctgacgccgcgtaggcaactcgtctccacaggatagacacccaaagggccgcagcgccgcccgcac

SEQ ID NO: 59817 - DNA, 122 bp, Homo sapiens
tgggggaagtcgctgtgcctaggacacccacgtgcgaaggccaacaccagcgctgcaggacgccagttggtgtcggccacagagagagggctcaagtgcattttccacaccaggggtggctg

SEQ ID NO: 59818 - DNA, 122 bp, Homo sapiens
tcagtggtgagtacggaacaggtggaaattctaaagcacgcttgcttatctacttggtttcgaagtttgttattaagggcctcagaggagttccatcttgggaatgatacggtctaggctct

SEQ ID NO: 59819 - DNA, 122 bp, Homo sapiens
ggccctggggactggacggaatcccagttggtcagaggagaccctgggggcggggccgcgcgagttgccgttaggacagttaaaaccgttagctgcctgtcgtggcggggcggggccctggg

SEQ ID NO: 59820 - DNA, 122 bp, Homo sapiens
atctcttcccacaccctgcctgggtgctttcaagaatcccggcaaagaccctggggcgcacggcgcgccaccttggacatgtcgcctgggatcggctaccgggagctccttttcccgccttc

SEQ ID NO: 59821 - DNA, 122 bp, Homo sapiens
tgtgaaaggggtaagggttgaaggaccttatttagctgggggaccgtcttgtattgggagcgggcagcctaggccttggaaagaccagaaaatctgatctgtgcggaggcaggtgaaggctg

SEQ ID NO: 59822 - DNA, 122 bp, Homo sapiens
agggccagaggccaggctagagaaggtatggatgtgtgcgagggcccaggcacactgacgcgctatgcatccggacctcctgcagagagagaaggggccagagcagcaccccagggaccaag

SEQ ID NO: 59823 - DNA, 122 bp, Homo sapiens
gtggcatgcactggtagtcccagctactccagaggctaagatgggaagatcacctgaccccgggggtttgaggctgtaatgagccaagtcatgctgctgcgctccagcctgggtgacagaac

SEQ ID NO: 59824 - DNA, 122 bp, Homo sapiens
gcctccaaccagggtcctgggccccagtctgagaatgactcctgggtttttctctccaagcgatccgcaggctctgacaggccaggagtcgcgcgcgtccgggagactccttagcgccccct

SEQ ID NO: 59825 - DNA, 122 bp, Homo sapiens
cgccatatttcttactgtacagggttctctttggtttgccctcctggcagtcatatagcacgatggagtcgtcgttgctgcttgagatgaccgtctggccgttggggctgaaatcgaagcag

SEQ ID NO: 59826 - DNA, 122 bp, Homo sapiens
tggaagagccagtttgcagccagccggtcgcctctcgggtccaaacccgaggctggcccacggcgagtacccgggtggggccctaaaccacaggaggggccacctccaaaagaaaagagaaa

SEQ ID NO: 59827 - DNA, 122 bp, Homo sapiens
ccgagtggatgtgacacttgggtcctggatacagctgtactccaccccgggcccactccccggtcacaccttcctgggacagctccagctggaaggtggcactgcccccctcactgatggtc

SEQ ID NO: 59828 - DNA, 122 bp, Homo sapiens
gggagaaaacgccgacaggactcctggcaatgtcaggagctgtggaggtcctcactagtccgcgctgggccgcagctttccggagcgcagaggaagctggccagcctgcagatagcactggg

SEQ ID NO: 59829 - DNA, 122 bp, Homo sapiens
aattaattagttaataaaattaaccccatgtttacattcttaaacgtgttccttggagatcggtttaaccaacagccagtgaaaaaacttttcagcgctgtctttagcaactttcacctcct

SEQ ID NO: 59830 - DNA, 122 bp, Homo sapiens
caaataatgaagacgtttgcatgccattttagattttgcagctccctactgcttatcttccggaggcccgtggcgtccagtgttggtccaccagttacacttggcaggtgcgagtgtttgag

SEQ ID NO: 59831 - DNA, 122 bp, Homo sapiens
agtgttttcactgtcaaccagggttctttttcttattttgaacccattttcatgatgcaccggaatgctgaagttcaaaattgcctacggagaattttaagactaaaaccacactaagtttc

SEQ ID NO: 59832 - DNA, 122 bp, Homo sapiens
tgccctttagcaccagtgccctcccgtggtccaggctgcccagggatgtgaggaactggacgccagcggctggaccctgagggacagctgtgggggccaagaggacacgtggaggtttttca

SEQ ID NO: 59833 - DNA, 122 bp, Homo sapiens
tctgaccttactgtagcaagttctctgggcttcccctcctctggaatgaggttacaaatacggagaagcacttacctaatcttgcaggagcccactcttcttttagagctgaaacttgcact

SEQ ID NO: 59834 - DNA, 122 bp, Homo sapiens
agagcacagaacggcatggcaattacatggaacgcgctgagaggcaagcgtggaatgctgcggcacatgagtctgcagcagcctggaaggattgagcccttggtgcctgcatctctctgagc

SEQ ID NO: 59835 - DNA, 122 bp, Homo sapiens
cccatccctccctgccagcctcccagttccggtccggttaggccacatcccccttgggcacgcatctctgggataccttttattatattcaagggaaaatggaaaggaagaaccataatggc

SEQ ID NO: 59836 - DNA, 122 bp, Homo sapiens
cctcgctggccccgtctctgtggctcagtctctgctggctccagagcgtggcctggcctgcgcgtcagtggacgtctgttcccgtgtgggggtgttcttgtgggcgggtgggctctgctgtt

SEQ ID NO: 59837 - DNA, 122 bp, Homo sapiens
ttagcacacctccttgcccgtgctggtgcccggcaggatgttgagctgcgtgagctgcgccgcgtgctccttggccttgagcctcagcgcggctatgctagaggcgcgtctgtctgcggccg

SEQ ID NO: 59838 - DNA, 122 bp, Homo sapiens
cagaccagacccgggtctccgtgcccactgcgcccccagtggagaccgtgtggtgcacagcggttctgtgctgggcagtcggtgcaccttggcatccccacctgacgccaggcaccaggcca

SEQ ID NO: 59839 - DNA, 122 bp, Homo sapiens
tcctgacacagactcggtgagggcgggaagtggtgccgtggggctgcagcctggcccgcccgctccatcggcctagggcggccccaccgccctccgggccttaccttgagttcgggctgcgg

SEQ ID NO: 59840 - DNA, 122 bp, Homo sapiens
caaagcaggaagaagtagcgtccgagcttttctgctgcgtgacaggctatgccacgtgtgcgtcagtggaactgtatccatcaaaggaccacaggcacgtgactggcaggcgtgctcatgtg

SEQ ID NO: 59841 - DNA, 122 bp, Homo sapiens
cccgttcagcacagcctcagtgtctggctgctgccgcaggagcccctccgctggcccaggcggcgggaaacttttgaggaagctcatagcagcagagtgcggcaacacaggccctgagggag

SEQ ID NO: 59842 - DNA, 122 bp, Homo sapiens
gggacgacctcctaagaggctgactggcaggagcccagctaactgctggccagggcaggccgtgggggcgcgttacctgattgtctgaggaactggctggcgcggggactgacgctgactcg

SEQ ID NO: 59843 - DNA, 122 bp, Homo sapiens
atgataaaaagtcatctacagttgtttgaacacttcatgggtgccaggcactgttctaagcgctttactgggattagctcatttttgtctccagatgtgcactacacactactccactgtta

SEQ ID NO: 59844 - DNA, 122 bp, Homo sapiens
tgacgagataaatgtaatgctcccttcttccagacaaaggtgattttaaacttactgtatcgtgaaatcacaaaatcttaaaaggtatgtgtattttgtgtgtatgtatatatacatgcaca

SEQ ID NO: 59845 - DNA, 122 bp, Homo sapiens
ggcagcagaaacaggaaggaatgtctggcaacccaccaagggtcagatgccacatcagcccgagcgaaggtgccagacactagctgttccaatgacaattagacattcttgggaaggtggag

SEQ ID NO: 59846 - DNA, 122 bp, Homo sapiens
catgaggccttgtggcctgcctttgctccacccaaagttcgtgcccagccaaggggagaacgtacaggagcttctggccctgttgatgccacgggaggctctgctcagtggcctggcctcca

SEQ ID NO: 59847 - DNA, 122 bp, Homo sapiens
tggccgagccgacttgttggaccccggtcctgctagattccttgtctgaatgggaaatgtcgccctcgcggtttcactcagatcctcactccagactatgtccagccagaaccctgcccagg

SEQ ID NO: 59848 - DNA, 122 bp, Homo sapiens
cgggccggctggggcggggcagttagcaaaataggctgcgcgttcgcttctgctagagggcggggccggaggtttcgattagttgtctctgccgctggggaaggtaaagcggcgacggcgtc

SEQ ID NO: 59849 - DNA, 122 bp, Homo sapiens
gctgcggcgccagctccaagggcggatccaggcgggaggggcctcctcggagaagcggggcgcggtcccaactacgcagaggctggcacgccgaccctccacacctcaccacgcccccatct

SEQ ID NO: 59850 - DNA, 122 bp, Homo sapiens
gctagcccggcgcgcgtgactgtctaatggggccggcgccagcgtcccacaccgcgaactcgggcaagcgaggacagaaacggtttctccactcacaaccgctcctttgcactcacatcccg

SEQ ID NO: 59851 - DNA, 122 bp, Homo sapiens
atttcaggactgctgtaaatacccattgttcccgtacagtgagcggcggaggaaaacatgcgtgtgttgtcggggctttgttggcggtgctggttgcttagactcggatgaatgctccaccg

SEQ ID NO: 59852 - DNA, 122 bp, Homo sapiens
gcacaatggagcaagaatatggcaaaacccagcagggcaatagtcatggtggaaaactcccgaaaccctgggcagaaaataaaagacagggtgcaagttagggggaaaaaatggtttctact

SEQ ID NO: 59853 - DNA, 122 bp, Homo sapiens
cagcagactgaggaaagtttggttatggcgcccggagagggggctctgcctgccttcccccgccccacccccacccttccagggctcagggcagcccccagaacatctgtgcctctctctag

SEQ ID NO: 59854 - DNA, 122 bp, Homo sapiens
agaaagcaggaaacacctttatttccctgctgtgctgagtgaatcttttagcagacttgccgaaacaagaaatgagccaggtttctttgtttttgtttttgtttttgtttttgttttgaaga

SEQ ID NO: 59855 - DNA, 122 bp, Homo sapiens
tcgaggaggtaccgcagcggggggaggtgatcatcactcaggccggggacggccgcacggcgtcaaggggtgtttacagtgttctagtgtgctcagcgctgctttgcttggccactgaacac

SEQ ID NO: 59856 - DNA, 122 bp, Homo sapiens
acctcgtggaggggaacctcccagacctaaggagcggggacctcaggccggaccccggggcggtgcagcccctagacaggacggctccaggtcgacccgagatcatggcaccggtatttttg

SEQ ID NO: 59857 - DNA, 122 bp, Homo sapiens
tccagtatcacttgaatgcccaccgggttccggaatcacgagtctccagagctgtcccttcgccccacggctcacattccaggtctgcccctcagtgacttctgcaacaacacgcgcttctc

SEQ ID NO: 59858 - DNA, 122 bp, Homo sapiens
cagggggcaggcctcctgagcccccagcaggattccatttctccaccttccactgccatccgacttgctgatgcccaggcccccagaggaggaagggctatcctgttgttatgagaacaaat

SEQ ID NO: 59859 - DNA, 122 bp, Homo sapiens
cttgcgcagtcaccgtcgggtcccgtctccagccccgcctgcctcctccattccccgccccgcggacagtttggcatagtagggagttttctgtaaagcaagggttaaatcaggttttccgg

SEQ ID NO: 59860 - DNA, 122 bp, Homo sapiens
cggccgcggcgctccggaggcgcccggggacgctcacctaagctgggagaggcggatacccgcccggcctagccccgctacctcccaagagaccaacacgacaagcgcgcgcccaccgcatt

SEQ ID NO: 59861 - DNA, 122 bp, Homo sapiens
agccctggtctgaacaagctgaatatgagagacagcaagaggggacaacaccaaagaacacgctagcctggatgcacaaatctagaaggtctctgaaatctgcatctatgagtcttcacaag

SEQ ID NO: 59862 - DNA, 122 bp, Homo sapiens
gcaactccagtatcggttactgcaacaccagagcagatcggaaataaatgtgcccccaaacgcacgccagcagccaggaattagcaatagctaacacgagatgctgcagcaggggtatcatt

SEQ ID NO: 59863 - DNA, 122 bp, Homo sapiens
caggtaattctcttagcccatttcctcaggatgacctccaccgacaggccactcttcttccgccccgctgacgccccaggtggagggagcatggccacctcccaccccaacaccaccgccac

SEQ ID NO: 59864 - DNA, 122 bp, Homo sapiens
ccgggcagccccactcgggagcttggccgcgcggtctggcctctgcagggccgggccccacgctgtgggagtcctggtacctgccgtcctatcgcacacactctgtttcccaggaactgctg

SEQ ID NO: 59865 - DNA, 122 bp, Homo sapiens
cagcccccaaggcagctcgtgatgtgaatggttcagcaccgcagacagctcaagcctcgccggacagccctgctggaagtggttcagcaccacggatagccccgctaatatccatcagaacc

SEQ ID NO: 59866 - DNA, 122 bp, Homo sapiens
ctgtgggggaggctgggaggccactgcagtgacagaggcaagggatgtttaagaccaggtcgaaatggtggctgcagaagctgttgggtaaattcagtatgcttgcaagttgggcctctcca

SEQ ID NO: 59867 - DNA, 122 bp, Homo sapiens
aaaaatgatgccccctatattctgagactgacctgtatttccttaaccaggcctgtggcccgggatgctgaggaccatcaggtgtgaactgagcttaaaaataaattccatggctgcttttg

SEQ ID NO: 59868 - DNA, 122 bp, Homo sapiens
ccactgcctcctcccagcctccttcccttcctcgctcctcaccgcccccgggcgggcgggcggccaggctggcctaggccaaagctcctcacctggcggtggcggtgtaactcccggctagc

SEQ ID NO: 59869 - DNA, 122 bp, Homo sapiens
tgggagaagtcgaggggcaagcacccactcagtgcccactcagctgctgaccctgtgctgcgggctgcctttcttgcagagagtaaaggagctctggtctggtgatggagggggatgtgcta

SEQ ID NO: 59870 - DNA, 122 bp, Homo sapiens
cctgctgtgtgccctggccccttcgccagcctgcaggcggaaaggagtttgcacggaccccggaggcagcacatctgcaacagctggaaacagccgtggccttcctggccccacccagcctg

SEQ ID NO: 59871 - DNA, 122 bp, Homo sapiens
ctggtactactacaatatcctcacagtgacacgagcccccacaaaatcctcctgtccccgcgggagtcactgagtcccctcttgctgtctctggctagttctcctgctgatactatgatttc

SEQ ID NO: 59872 - DNA, 122 bp, Homo sapiens
cagaacgtgcaaagacactgagctgagaaggcggtgagggccaggcattgcattggtcctcgccttctcggggcgccgctccccacgcagtctccctgctcgagctcgggaagaggagacac

SEQ ID NO: 59873 - DNA, 122 bp, Homo sapiens
aatggacaggacaaaggcagatagcataaggagacaggcccttagcaaatagagtccatgcgaataagtctgtgtggactcagaggacaaatgtaacaaactcttacatgggccagccttct

SEQ ID NO: 59874 - DNA, 122 bp, Homo sapiens
aacccagccgctcctgctgcagccagggcgcgcactggcccgcgtcctccccgcaccaggcgcactaatttagacagaaatgtctggagctgggataggagagggagccaaagtctttgggt

SEQ ID NO: 59875 - DNA, 122 bp, Homo sapiens
tctaacccttacagcagtaatacttcaaggacgacagcgtgaccccaattacagatgtgacgtggaggctccaagaggttcaggaacatgtctcaagtcactcggtgacagagaacaataga

SEQ ID NO: 59876 - DNA, 122 bp, Homo sapiens
cacgacactggggacccgccccggccagacccgtcccctaccgagaccttgtccccgccccgcccccggccggggccccgccccgccagccccgcccccgccagccccctctcctaccgaga

SEQ ID NO: 59877 - DNA, 122 bp, Homo sapiens
atcttgcctaatggttacaaacatgaggacaggtcccagcttgggccaaacttttggaagcgtggtctcagacaatttttggaaaagactaacatagaagaaatggtcttgattcttctgat

SEQ ID NO: 59878 - DNA, 122 bp, Homo sapiens
gagtgaccccccggggccagccggtctgcgagcgattgggcggtaccacagacatgctggcgagctccggcgctgacggcgagcagaaagtggcaggcagggtagactttccccgtgcggga

SEQ ID NO: 59879 - DNA, 122 bp, Homo sapiens
tggggtcaggaacctcttctggcctcagcccaggttggcagacatttccctgcagggatccgggtccaggactcaggaggagggacagtcccacgggggtgctggggggcaggaattcctgg

SEQ ID NO: 59880 - DNA, 122 bp, Homo sapiens
gcgtcctgaagcgctggagttgcagacctgggtctccagtctaacctcaactgacactcccgggccccacccacgaaccttgacctcttcccggctcccgcgactttcacctgctgagcgtc

SEQ ID NO: 59881 - DNA, 122 bp, Homo sapiens
tttctgtcatctactcatttaatacagaatatgtcctgctagccccggaggacgagtggacggaacaactttctcacccctcgcggagcttagtctaacggaggagacagacttgtttcaac

SEQ ID NO: 59882 - DNA, 122 bp, Homo sapiens
ccccctggccagttcccaggaggtcgcagtgaagaccagtgcagccgtagaaccacatggcggccactcccgctttgtgtttcggggccagcggtgcttaccagggacatggcgcaggaacc

SEQ ID NO: 59883 - DNA, 122 bp, Homo sapiens
ctcgtcccgcccctgcgttcccggtttccaggggacttgcgagtcggtcttttctgccttcgaactcttgagtagctagcagaacccggaggagctctcagaaccccaggccgttgtcatgg

SEQ ID NO: 59884 - DNA, 122 bp, Homo sapiens
tcttccctccttccagcattttcaccagactcaatttcatggattcctgcctgttctggacgctgtgaagaaaacaaaacaatggactgtcttttaatcgtccttaaatagctcagtaaaat

SEQ ID NO: 59885 - DNA, 122 bp, Homo sapiens
cctggccctgctgcagaagcagccgccccagcagccggcagccaagatctgagctcaggacggcccgaggccttccatggccaacaaccatgtcagacacagcacctcaggccgctgctcag

SEQ ID NO: 59886 - DNA, 122 bp, Homo sapiens
ggaaaccccaggggcaggggtggagtgcggagcatagtcccccgcacgctccaacccacccggcatttgtttaaattagcaaattcttcgttgggggggatgcaaacattcctggtggcagc

SEQ ID NO: 59887 - DNA, 122 bp, Homo sapiens
ccgcgaggagcgcgcggcgggcgcggcggcgacggcaggaggaggggccgggagcccgggcgccgccgaaggacgccccgtcctccacatgctgccacttggctgagccgggcgccggcgag

SEQ ID NO: 59888 - DNA, 122 bp, Homo sapiens
tgcaggcgccctcacttcgccgtcgggtgtggggccgccctgacccccacccatcccgggcgagctccaggtgcgccccaagtgcctcccaggtgttgcccagcctttccccgggcctgggg

SEQ ID NO: 59889 - DNA, 122 bp, Homo sapiens
ctgagtcccaacgaggttaaaaagtttaaccagccaggatcgaaattcaggcctggccgtcgacaaaccaccttatcaggctgcctacaaaagatgtgaatcaagttgatagtgacacaaaa

SEQ ID NO: 59890 - DNA, 122 bp, Homo sapiens
gggaggcagcgccggcggagcagcggcgcgcgggtgccggcgcggggagcagctggtgttcgctgtaacaaacaacttgccactcaaacgccggtccccactgcgcatgcgcggtccgcgcg

SEQ ID NO: 59891 - DNA, 122 bp, Homo sapiens
ccgccagggggcggagcttccgaaccaggcgggattccaccgggtatttgcctgcggaggcgggacttcgggcttgatgggcgttgggggtggccttcctgcgggcaggctctctgtgtcgc

SEQ ID NO: 59892 - DNA, 122 bp, Homo sapiens
gatgcggtgtgtgcatacacacacacacatctaagtaaactagacacgttacataaaatgcgtgcccgcagcagacgcggtgtgtgcacacacacacacacatctaagtaaactagacaagt

SEQ ID NO: 59893 - DNA, 122 bp, Homo sapiens
cttgctgtctggaattgctgtttgagttactccgtgccttctttattgccttcttacccccgctagacacccagagcactggggcccggatcagcgatcttctccgcacctctggtacccgc

SEQ ID NO: 59894 - DNA, 122 bp, Homo sapiens
cgggtgttggggagtccgggatgatggggaatccggggctcgccctagtcgcggggacaccgccttccaggagctgtccccaggcaaactcacagacatcttcaaagagccttcttggacat

SEQ ID NO: 59895 - DNA, 122 bp, Homo sapiens
aggtagaatataggtctgcattggtttactctgagaatcttagggaagtaatagtagaagcgatgatatgctatctgggacatgcatgtaattgtaaagggaaagaaagcagagaaatctgg

SEQ ID NO: 59896 - DNA, 122 bp, Homo sapiens
acacgccgcatccgtcccggctgggcgcggggacgccaccatggcgctcccggcccgccgcggctccagccgcaatcgcctgccatccgttcggccaaaaagctccatgccccagaaaggcg

SEQ ID NO: 59897 - DNA, 122 bp, Homo sapiens
ccctgtttccaggacaacctactgtagataatgccagtgttggctgggtgtggtggctcacgcctgtaatcccagcactttgggaggccgaggcgggaggatcatgaggtcaggagatcgag

SEQ ID NO: 59898 - DNA, 122 bp, Homo sapiens
attcaccgcctcctccatcctttcctcctcggtgtgagcagcaggacttgcatttgttctcgcctgcctagtgtcttccaagggatagatgccgtttcctctgctggtctctgggggtgacg

SEQ ID NO: 59899 - DNA, 122 bp, Homo sapiens
ctcaggtgatccgcccaccttggcttccttaagtgctgggattataggcgtgagccaccacgcacagcctgatttcctgatttaaacggcacacaggaccctgactcgtcttccattcccaa

SEQ ID NO: 59900 - DNA, 122 bp, Homo sapiens
gcctgcgacctcgcaggcgacctcgctggaccctaagtccaggccacagtcagggaagggcgctgagaggcgagcgtgagcccagcgacaggagagtgaggtgggggccctggggagggata

SEQ ID NO: 59901 - DNA, 122 bp, Homo sapiens
tagagctgtagtactgcctcctcagaggctggggccttggatgctgctcttggccaggcccggaggacgtcagggctcctgatcctggccgtttggacatattgggctgggcagtgctatgc

SEQ ID NO: 59902 - DNA, 122 bp, Homo sapiens
taaaaacaaatacacatttatacatacacaaggcccatctcaataaaagaatgtaactgtcggcccaaacattttcaagatggtcagaaaacagacttttttcctctttttattgtcctttt

SEQ ID NO: 59903 - DNA, 122 bp, Homo sapiens
ccagcttgttagttgtacgcctgcaggactacaatctcagcacaaagcaggattgtagggcggtgcggatccctggagggagacagcgcggtgcgctcctgccggccatgctggctggggtg

SEQ ID NO: 59904 - DNA, 122 bp, Homo sapiens
atacgataaattacttcaacctatgaccacctcaagctgaatataagtagccgcagacaccgtttgcatgacccaggaaccacaaacacggagcgaaggcctgccgggaccacgctgagctt

SEQ ID NO: 59905 - DNA, 122 bp, Homo sapiens
tttgcctaagcctcagtttctccatctgtgaaatggggacgttggcaggagtgcctgtctcgttgtgctgcccgaggggtgaatgagaaaaggaaagcgttggactactgtcaacgcgattt

SEQ ID NO: 59906 - DNA, 122 bp, Homo sapiens
aggaaacagaaaaaaggtccctgcccttctggagatgacaactgagtggggaaaacagaccgtgaacacaaaacatcaagttccacacacgctatggaatggttatgaagggaagcgagaag

SEQ ID NO: 59907 - DNA, 122 bp, Homo sapiens
cggggctctccgtctgcggtcccttgtgaaggctctgggcggctgcagaggccggccgtccggtttggctcacctctcccaggaaacttcacactggagaggtaagggcgattctaaaatgc

SEQ ID NO: 59908 - DNA, 122 bp, Homo sapiens
attacaggcgtgagccaccgcgcccagccaggactaatttctaagagtgtgcagagataccgaaacctaaaagtttaagaactgctgattgctgggaaactctgcagtttcccgttcctctc

SEQ ID NO: 59909 - DNA, 122 bp, Homo sapiens
gacagtcttgctccagttcatgctcttattcacggcactgtgctgacctctcagtcaccacgctatttactttacatacattgtcttatttaatcttcacacagtgtatgttttattattta

SEQ ID NO: 59910 - DNA, 122 bp, Homo sapiens
aaaggtgagaagtcagcgtggacaagctggggtgaccatcactgcagagctacaggccagcgtcctcttcgtgtcctagggctcgttttgttcctggtcctgcaggacagcctggggtcacc

SEQ ID NO: 59911 - DNA, 122 bp, Homo sapiens
taaacttaattacctttttaaaggacttatctccaaatatagtcacaatgaggattagagcgtcaatataagaatttgggggaacacacttcattgtgttatataatagaatagatttcaaa

SEQ ID NO: 59912 - DNA, 122 bp, Homo sapiens
accccgccccgccccgctccgccccatccaccctgtggcagaggcttttcatggcagctccgagaacaggaggacagtcacctccagcatttgctctgagtctgttccctggcgaggtgagg

SEQ ID NO: 59913 - DNA, 122 bp, Homo sapiens
agggtaccgcctcagccattaggctgagaccagtgccagcccttaagaggctcctgctctcgagggacgtggagttccggctcggccctcccagctcggccatgctcgccaggcttttcggg

SEQ ID NO: 59914 - DNA, 122 bp, Homo sapiens
ccaaccgccacagctccgggaaggcggccaggaccggctagagccggttagaaccagtggcgcccgcccacgagccagcgcctcacaaagggagggcggctcacggccctcgcgtatccctg

SEQ ID NO: 59915 - DNA, 122 bp, Homo sapiens
aacacaaaagtagaaataacttgcaaagtcctattttaaatgtgagatggcctcatcttccggcccagaaatcctcagaatatttttggaatgtcatgaatgtggcaggctctacagttaaa

SEQ ID NO: 59916 - DNA, 122 bp, Homo sapiens
gctgcgaacctcgcgcgatatcaccttggacgccagaggaaggggcgggcggtcgggtggcgaacagttctgcgcgtgcgcctcccgcccagcagcccggaacccaaggtgtccgacccttg

SEQ ID NO: 59917 - DNA, 122 bp, Homo sapiens
ccacccctgaactcccagatgacatttcgtgatgtttggagacatttttagttgtcacaacgggaggggggtggttgctactggcaacaagtgggtagaggccaggaatgctgcaaaacatc

SEQ ID NO: 59918 - DNA, 122 bp, Homo sapiens
ggctgtagctgggtatggtgcccatatccaggtcatggtctgtgaaagggtcgacccgcgcgcacagccactcgtgcctgtcctggtacatggtgtcacggacgtgcacaacatcgtcacac

SEQ ID NO: 59919 - DNA, 122 bp, Homo sapiens
atattatttttgctacaaaagaaaattatctttttaaaatttgctgaaattccccagagtcgctacaaaagacaaactactctattccacttgatggagtaagtgtacttttgaaatacata

SEQ ID NO: 59920 - DNA, 122 bp, Homo sapiens
acggaattcgagtgactctggggaagtgtctctggcatctacagtgtacggagccatcaccggtcactgagcgtgtcctggagagttgagaccagtgctgcccacctctccccagtatcgcc

SEQ ID NO: 59921 - DNA, 122 bp, Homo sapiens
cagcctgcagcgcacgccttggcccccagggagcagagaggcagagtacccccctgcatccggagcatagcaagcatgccccaggctgaggacctgcgacttggtgggacttcggtgcccgc

SEQ ID NO: 59922 - DNA, 122 bp, Homo sapiens
atgctaatgtagtcattcttgagaggagattgtttttttgctttgctgcctctttttccacgaaagcatcattttcagatgaaagttagggccttgactcttgtgcctggagtttcttcctg

SEQ ID NO: 59923 - DNA, 122 bp, Homo sapiens
ggtccgccaggtggggagcgggtccccggcctctggcggggtttctcttccaagatcagccggagggttcagggctttcagtttcatatttcaggagggattttgtcaatgaggattaatac

SEQ ID NO: 59924 - DNA, 122 bp, Homo sapiens
cttttcccaatccctaaaagggacttggcctctttttctgggctcagcggggcagccgctcggaccccggcgcgctgaccctcggggctgccgattcgctgggggcttggagagcctcctgc

SEQ ID NO: 59925 - DNA, 122 bp, Homo sapiens
aataaaaacgtggggccctttgttcaaaaacaactaaaactttgaagatagcaacaccagcgccttcttggcacagggccctgtgcaactgtgcaggtggcatgtccatgaagccgaccctg

SEQ ID NO: 59926 - DNA, 122 bp, Homo sapiens
cccgctgtgcccagggccagactccttccgtgtccctggctttagcgcccgcggtcctggcgagcgttttcccagcgggcgtttgcggcgcttctcctactgagaaactgttgctgtggagg

SEQ ID NO: 59927 - DNA, 122 bp, Homo sapiens
taagtgggagcgtgggtttgctcacagcaaggattagacaaggcaatgtttgggatgtgccggtttgtcatggagaagccttccctgctagaacagcagagccggggggggctatgggagat

SEQ ID NO: 59928 - DNA, 122 bp, Homo sapiens
cgccctcccgcgaccctcacctcccaccctcctccctgcctgagccccctccaccccacccgggcccacgagccagcgcttctgtccagatacctggaaaccaccgcagaaattcctgttag

SEQ ID NO: 59929 - DNA, 122 bp, Homo sapiens
cctcatctgccctcaccacccacagcccctcctacctagccctctcccgcgccgggcccgcgggctccccacattccgccacggctagccctccccgcgccccggccccctcggcctcggcc

SEQ ID NO: 59930 - DNA, 122 bp, Homo sapiens
gtcaggcaagtggcggagggaagcgccgggcctgggccgaggcggccagcgggactggggcgcaaggcccggcggcggggaacggggtgcggggagctgccggggtccgcggacagcgtcac

SEQ ID NO: 59931 - DNA, 122 bp, Homo sapiens
cgttatagagagccaggtgctgtgtgtgtccgtgtgtgcaggtgtgtgcgaataggagggcgtatgcacgtgtgtgcatgtgcctgtgtggccatggaagggtgaaggtgggtaggcgacat

SEQ ID NO: 59932 - DNA, 122 bp, Homo sapiens
aaaatacaacatggaaaggggtggggaaaacagctgtatggtggagaaacttggcaagtacgacctcagccagttcatccaggtcaacaccagtagtggtaagtcgtgctcaccgtatgtct

SEQ ID NO: 59933 - DNA, 122 bp, Homo sapiens
acaccataaaggctacccagcgcactgtaaaataaacagctggctatggcttatgcacaacgccctaaatcttccgaagacaccccacccccacccctcagctttgggctcacagacatata

SEQ ID NO: 59934 - DNA, 122 bp, Homo sapiens
aaaagggcttatttcactgttacaccattccacttgctttggtcagggcggtaacaatgccgaagccaagcagatgccagtgtcctaagacactgagttgtaatggtccttcaaccttaact

SEQ ID NO: 59935 - DNA, 122 bp, Homo sapiens
tttccaggtgaagctcagagaggtgaagtcacaaacagtgcagactgcttcagaccagaacgagggagagtggggatcatgaggagatggaagtagaatctgcaaggtggtggggaggtggg

SEQ ID NO: 59936 - DNA, 122 bp, Homo sapiens
agaattctcttaagttggaagtatacatacccatgggagataggcatgccacctctcccccgaggatggaacagacaagtaattgtttctttggttgaaaagcaggtgaagaattaacttaa

SEQ ID NO: 59937 - DNA, 122 bp, Homo sapiens
gggacaaagagtgccaagcctgaggcttcaggtgagtggtcaatgactctccatccagggcgtcagcctataggtccataagtagaaactagcaggcatcagactgaagggacactggaccc

SEQ ID NO: 59938 - DNA, 122 bp, Homo sapiens
cgggctgcggctggctcagagtggcgcggggggcgtggggcggtgctgaggagctgaagccgtggccagctcgacgccggacagtccagcgagcagcacggcgggaaccggcagccggagca

SEQ ID NO: 59939 - DNA, 122 bp, Homo sapiens
tccatttttcacacgtcctcatgactttttttcattttccttttagtgtgtggctctcttcgtttcaacatgggtaactgatttacttccagccacgtgaatgttcagagtttactaagaga

SEQ ID NO: 59940 - DNA, 122 bp, Homo sapiens
aaagagagctaaatggcatttgtataatgaaagcactccagaaggagatgctcacagaaccgacccaaactgtaacatactgattcaaaaatgagcttaagttatgaggagagtgacatgag

SEQ ID NO: 59941 - DNA, 122 bp, Homo sapiens
ccgtaacttctccatgttgactcctggctaacagcagcttcaaaggtggttttgcgcacgcgcggaacctccgcttccctcattcatgtgaagtcccaaaccccgaaaaagggcggtgctag

SEQ ID NO: 59942 - DNA, 122 bp, Homo sapiens
taccagagttctaagttctgttcgtgtggtcatcatccaggaagtgaggtcgcttctttacggttctgtcccctagtccccttccttccataagacctactcaggactccactgggctgctg

SEQ ID NO: 59943 - DNA, 122 bp, Homo sapiens
tcttttgtaaagacggggtcccactatgctgcccaggctggtcttgaactcctggcttcacgcgatccttcctcctcagcctcccaaagtgctgggattacaggcatgagcggctatgaccg

SEQ ID NO: 59944 - DNA, 122 bp, Homo sapiens
tgccgcatggccggggacacagccagctccccccatgagctggtggcctcgtcaggaagacggccacagggcgctcttgggaggacccttgggacagtgggcaggcgctgggcaagccacaa

SEQ ID NO: 59945 - DNA, 122 bp, Homo sapiens
tctggcctcagccctcaatgctgttgtaaaatctggcctttcatttcacctgccagataccgacatggatcagttgtgaatcaatacttgttcctccagcacagccactgagccagctgaag

SEQ ID NO: 59946 - DNA, 122 bp, Homo sapiens
caaatccagagacatggcaatgggacccagggaattacagcctcacaggcgtccgggagtcgcaagacgagctgaaaaaggaggcaggcactgaaggacaaagcgttgttgactttcctcat

SEQ ID NO: 59947 - DNA, 122 bp, Homo sapiens
ggggtagatgaattgggctatagaaatataccaatacatggagattatttccagagacatcgtgtggacttctataatgtatctttgagtccggaagtgaaaatgtaaaatgacttaatcta

SEQ ID NO: 59948 - DNA, 122 bp, Homo sapiens
caaactcttgacctcgagtgatctgctggccatgacctcccaaagtgctgggattataggcgcaagccaccactcccagtccctgtcgttgcattctgagtccctgcctctgaccttgtata

SEQ ID NO: 59949 - DNA, 122 bp, Homo sapiens
agagatcctccggcctcagcttcccaagttgctgggattattggcgtgaggcactgcacccggcccaatctaaaaatttcatacaccaacccacaacctgatgtcccatgtccctctgtcct

SEQ ID NO: 59950 - DNA, 122 bp, Homo sapiens
cgtgcaggacgctggctggctccaaggtctgcacgcaggaatcagctcgccaaacacaggcgtgtgagtcgccggcgtctggctagtaattaatgttttgcaacggttgagatcgtcctcag

SEQ ID NO: 59951 - DNA, 122 bp, Homo sapiens
ttggaagaggttcacattcccgcgtgccgagattgattatgggccaccctcggtctcattcgttgacttccaataaagcattggctggtggacctctacatcagcattgttttcattggata

SEQ ID NO: 59952 - DNA, 122 bp, Homo sapiens
tctgaggccgagcgcacgatctagtcagctgcgtgggtcgcgttcactggcttttttccccggcaagtgagatccggtgaaatatttcctgcccactggacattttaccatctcggcagata

SEQ ID NO: 59953 - DNA, 122 bp, Homo sapiens
agccagagatgaggctcaaatggcgcccaccgaaagggaaccagagcctcgcttcggtcacgtccccaccagcctgctggcctttggagcttcagtcactgagcctttcccgtgccgcagcc

SEQ ID NO: 59954 - DNA, 122 bp, Homo sapiens
gattggatgtcagtgtccttttgttatggcaaaggtggatcccggtgctttgagattggacgactggggtgaggcgggcagctaatgcgcaggcgtgtattctcgagtcaggattggcgggc

SEQ ID NO: 59955 - DNA, 122 bp, Homo sapiens
gtaatgagaaggctggggacactacccctgagacctggaggagcttttttttaactgagacgagtcctcatgctagctagctcattcctaggtaacctggcctctagagtcacacattaaat

SEQ ID NO: 59956 - DNA, 122 bp, Homo sapiens
ccagagtggcaccggttttgtgagagcgcccaagcttgacctcgggctacgctcagcgagcgacagagcaacgtcgcactgcattcttaccaaacacccaggtgaacgacgcatccaacgat

SEQ ID NO: 59957 - DNA, 122 bp, Homo sapiens
aaggctgagccactgggctgtgggggaaggggtcaaggccatatcccaatacgtgtagggcgagggtccctgctggcacattcaggctgtgctgggaagaagagacctgggcttggaaggaa

SEQ ID NO: 59958 - DNA, 122 bp, Homo sapiens
attatgaaaactggcatgaaaacatttatgctgttaataattaaaataataaaaatgtaccgatgtgtgtatagcaggcttcttttcgatgctgtaaaaaaatctgtggaatgaatgaatga

SEQ ID NO: 59959 - DNA, 122 bp, Homo sapiens
cgactcacctctgctcccggcctgcggggccagagtagccaggatcccgcgcagctccgacgcggagatccgcacacgctccagcccttccgccatcttcgcggctgctgctacagccgtag

SEQ ID NO: 59960 - DNA, 122 bp, Homo sapiens
caggccaaggaggcgggtttggtgcggccactccaaggccaaagcgagaaaatcttactgcgcacgcgcaatagacagccgatggagccaccgatggagccgtccggaggggagcaagagcc

SEQ ID NO: 59961 - DNA, 122 bp, Homo sapiens
cacagtgaacacaagtaggctgttgttttctatcttcttcacagcctactcagtggtcagcggaaacttgatgataacatggtggtcaagcttatttctcctgggggtgctcttccaaggat

SEQ ID NO: 59962 - DNA, 122 bp, Homo sapiens
tccctacccccagccccagccttcgtaggagttaggctttgaaatgaagaaatctattgtcgctggggagcacggagctaaatcacaaatcccagcagagcggtgacgctgaaaaccgccct

SEQ ID NO: 59963 - DNA, 122 bp, Homo sapiens
ggcctcaggctttagcggagagacagcatgataggcctggagttcttcaagaggcctcctcgcacatccttaccacccggagagcctcagtttggatttgaagccatcgcaccccaaaggag

SEQ ID NO: 59964 - DNA, 122 bp, Homo sapiens
catctcaaaaaaaaaaaaaatgtgcccagggtccattataggcctgcactcgtagaaatacgagggttgagatttcaaatgctcatctgcaggggagacaacatatcacacgtgtccaggtt

SEQ ID NO: 59965 - DNA, 122 bp, Homo sapiens
aagtgggaaggggggacagctaagcgccttggagagcaaccacccttatttgcctaataccgagcttcgcacccagggggcactcgacacctactgtagtttggacgccaaggaacgatagg

SEQ ID NO: 59966 - DNA, 122 bp, Homo sapiens
ccgctcctcctggtggtgtcaccctggtcctgggcattccccacacgtacacggtgtgagcggccagcaccttgccaaggactcgagaagaagccggcagactcccacgctctctgcgggca

SEQ ID NO: 59967 - DNA, 122 bp, Homo sapiens
tccgccaccgcgtgcgccccttaaagacccctgcccgccgcccaggacggatggcgaccccggccctagcctgtccccagaccctggaccaaggccccggccctgccccgaacccctcatcc

SEQ ID NO: 59968 - DNA, 122 bp, Homo sapiens
tcacaaatgttatatattttaccacaataaaaaattaaaaaataaaagagtgagagactgcgtgcctggcatacagcaggggacaggagccgattgtctgtcctacagctgggaaatgatcc

SEQ ID NO: 59969 - DNA, 122 bp, Homo sapiens
caaaaagctcagaataatcacatacacagggttagggtgcctgagggtgtttactgggagcggaggtcttagaggccaggcctgggttgatcacacttttctggtgatgcttttgggggtgg

SEQ ID NO: 59970 - DNA, 122 bp, Homo sapiens
gaacgtggtcgcgtagatgtttatctgattttctgttgcgctgctgctcaaccgccactacggaagtgcacactgccaccttatggacgtcttgagaagttacacttacacgttattaatta

SEQ ID NO: 59971 - DNA, 122 bp, Homo sapiens
gggcgagccacccgcgcggaatttgcatccatccgcacgagaggttcctgagacgctaagcgttctcgcctaccagaacttggaaacaatggaccatccccagaatgaatgaatgaaatttt

SEQ ID NO: 59972 - DNA, 122 bp, Homo sapiens
acgggccaggccgtggatgatggtggatgatggcgtgctcgcagtgaattaggaaaaacgcggagaacctgctgttaggaggcggtggcactgtttggaaggaaatcagtcgagttggcgtg

SEQ ID NO: 59973 - DNA, 122 bp, Homo sapiens
cttactgcgccccaatctgacatggactgatcctacagacccagggtaacctggctggtgcgccaacactccggggcttttgcggaaaagtcgcccgtggactaacggaagcaccagcaatc

SEQ ID NO: 59974 - DNA, 122 bp, Homo sapiens
tgcaggaaagagatgctggtaccactggagtaaccacgggctcagtcctggccaggaaaccgaggcccactgctgctcaggcggcagagagacagatagccatgggggttcagcagggaccc

SEQ ID NO: 59975 - DNA, 122 bp, Homo sapiens
aattgagattttcatgtgaaacctcctgatttttaagtgtacactcaacatttctgaagccgttgtacgagtcaaataaaacattgcggggtggggcggcgaggccgcccaagagctgcagg

SEQ ID NO: 59976 - DNA, 122 bp, Homo sapiens
atggccactcaggagcttagattcaagttgccttgaatatacactccaattagcagcagtcggagtaggtttttttttttttttttttttttttttgagacggagtcttgctctgtcgccca

SEQ ID NO: 59977 - DNA, 122 bp, Homo sapiens
cttttttgagacaaagtctcttcaatctgtcacccaggctggagtgtagttgttcaatctcggctcactgcaacctctgacccccgggcccaagtgattctcctgcatcagcctcccaagta

SEQ ID NO: 59978 - DNA, 122 bp, Homo sapiens
ttaaggggacacaagcataccctacagggcctgaacggagcagcctccagcagtgattggcggggttctcattattcctctcgcgtgtgctgctagagagtttaaagcaactttggtaccgc

SEQ ID NO: 59979 - DNA, 122 bp, Homo sapiens
ttatttgtgttcgaaagtccgctaattcccaatgtggagggttggggatgtttcccttagcgcctctgggacgctgtccctaaggccttattccatgttgaatctgacgctctcaatgtcca

SEQ ID NO: 59980 - DNA, 122 bp, Homo sapiens
tgctgtgaaatgctaaggcaagtgatataaatagggagaagatagaacagaccagtaattcgagccaaaaccatccatgaatccagaatggggcccagaaagacatcactgtgtattctggg

SEQ ID NO: 59981 - DNA, 122 bp, Homo sapiens
ctctattaatgcctgcacgaatgttagagactgctccaaagcataggtgtccctagagcacgtgtcgaggatgcggacacccagagtgatgttggaaaggagatcagggtccttgttaatct

SEQ ID NO: 59982 - DNA, 122 bp, Homo sapiens
aaaggatctctattctaacgtctagcatgtctatccagcaaatatctaggttgttcaaaccgttaaggagactaacaaatcaaaacaggagttgatgatacatagctcaggggctttttttt

SEQ ID NO: 59983 - DNA, 122 bp, Homo sapiens
cttctcttagctacctcagagctgcccagtctgcacccctcccaacaaatgccaatcattcgatgacttgctaaaaagagagcacacattagtgagggtaggaaggccaagggaaatggagt

SEQ ID NO: 59984 - DNA, 122 bp, Homo sapiens
gaaggttggggcgcggaagctcaactccgtgctgattgggctccaagttttctgcgccctcgcctcgtcccgagtgcccgcgaatcccccggacgcccacgcagaccacccagccacaccac

SEQ ID NO: 59985 - DNA, 122 bp, Homo sapiens
accagctctaccacttcatcagcacaactgtctcggggcggcctcagccagcaggcccggcgccgcccacttcctgcgaccaaataaggccggggaaggcgtccttaaacctcaggcggcgg

SEQ ID NO: 59986 - DNA, 122 bp, Homo sapiens
aggcccgtgtgcagcgaggcctgatgctggcgcccgtcagacggttcctaacagcacagacgtccaggattgtgtctgccaagcactggcactgtgtgtctgcaggtctgttctctagcctc

SEQ ID NO: 59987 - DNA, 122 bp, Homo sapiens
gagcccacaatcatcttggctctggcacctgcagcaaatcccatgggaacagacaggcagcgtggccatgggtgaatggagctgaggggctctgggctcctgacatcctgctctgacccttc

SEQ ID NO: 59988 - DNA, 122 bp, Homo sapiens
tcctggcgcccgcaccgcgggggaaagcccagctccaagaggcgctcggcagccggcgcacgcctcattaacttggggcctttccaaagcccgctgcgtccacgccctccagcgtctcttgc

SEQ ID NO: 59989 - DNA, 122 bp, Homo sapiens
gttctttcctaatggcagaaacagtcttacaacaatgagctttactttaagccaaagacacgggttcaactcttgactctgacttaacttattatacctcctacctctccagccctcagttt

SEQ ID NO: 59990 - DNA, 122 bp, Homo sapiens
ttggtggcagcctcctaaccttagccagaactattcctgctaagttcttgcacgagttgacgctttgctgagcacagccgatacccagcctttgcagcaaagatccttggtcaaagggataa

SEQ ID NO: 59991 - DNA, 122 bp, Homo sapiens
gtctctggtcccattaaagccttttagctctcagctgaggaggacagaccggcctcacctcggatggtgccatctccagctgcattgacaccgctgccccgggatacaggccggcgggagtc

SEQ ID NO: 59992 - DNA, 122 bp, Homo sapiens
gctactatgagaatctaatgccgctgatctgacaggaggcggagctcagcttgctcagctcgtctccggctgtgcggttcctttacaggccaccgacacgacgggccgtggcgcgacccctg

SEQ ID NO: 59993 - DNA, 122 bp, Homo sapiens
cctcctgtgcgcgagcgctttggtgagcgcagtgcagccgccttcttggttgctggtggacgttcagccctaataccctgctctctcgcccgcagccccgtctgaagcccctgaaatttgaa

SEQ ID NO: 59994 - DNA, 122 bp, Homo sapiens
tgatttctccaaccgtaagcgagccgcggtgtgggtgactgcagtagggcaaactcggtgcggtgaaggcttggttcaatcacccctgcctgtgctcttgatggaaccttcaattcaggtat

SEQ ID NO: 59995 - DNA, 122 bp, Homo sapiens
agtactgggtgcagcctgatggcgcaggaggtagacacggcacagggcgccgagatgcggcggggcgcgggcgcggctcggggacgcgcttcctggtgctgggccctggcgctgctttggct

SEQ ID NO: 59996 - DNA, 122 bp, Homo sapiens
cctgcgtccactgctcaggtctccctcaatgtcggctcctcttcttgtcccaggggcttgcgacgccccggggaggccgcttctcgtccagcaggcgtggagccgtcagcaaggggaggcct

SEQ ID NO: 59997 - DNA, 122 bp, Homo sapiens
ttggaccttcacaatagatccaggatctaaccatttctcatgaccttcccagggatctcccgagctggcatcgggactatgactataacgcccacatgctctccgtggtctatgtgaggggg

SEQ ID NO: 59998 - DNA, 122 bp, Homo sapiens
tatagtagttccacttcgtgagagaacaggagaggctctgggagtcctcgattttaacatcggccaaaataggatgttgttgtgtcaagaatataaagatctacagaaaatgatgaaagtgg

SEQ ID NO: 59999 - DNA, 122 bp, Homo sapiens
aagttcaaactggcccacttaggattctgggtctcatagtccacacagtgggcgttcccacgcatgttttggatcgactgcagggccatggcctcgctctggctggtcagctgggacttgct

SEQ ID NO: 60000 - DNA, 122 bp, Homo sapiens
ctttatgttttggagaatgacaagtaaattgaacgaagcagtgtgtaacatctttaagaccggcttcactcagcacagtgtctctgagattcatcttagatgctgcgtacgtacaccagtca

SEQ ID NO: 60001 - DNA, 122 bp, Homo sapiens
gtaagggtacctggacttgcggctttttaggtcggcctggctccgctccttccgcggtgacgaggtcccccggcctcctagggttgggaagagctgctttcctgactctcgttccctgcctc

SEQ ID NO: 60002 - DNA, 122 bp, Homo sapiens
ccaaagtgttgggattacaggcgtgagccaccgcgcccggccttcagtttcttcctaggccgttctgtcacccaaatagctgctacccagaggggcggggttgacctaggctgaatatccac

SEQ ID NO: 60003 - DNA, 122 bp, Homo sapiens
gccgcccgcgcccttaggcccggcccgaatgctggaaagcccgccggcccgccctcggctcggtgagcctcggctcacctcagctgccggtcgtacttctgctccttgagcagctttcccag

SEQ ID NO: 60004 - DNA, 122 bp, Homo sapiens
tggggtgaccacttcgctccatgcctcagtttccccatttctaatctaccttctgcaggccgaacacctgcatggctgacttcctgctcacaggatggggcaggtagtggtggtagctgctg

SEQ ID NO: 60005 - DNA, 122 bp, Homo sapiens
gtgggctggaggggatacgggggtctcccaggtcagcagtgggctccagccctgagatgccggtcggtacagtcgaaggtgcatgcagcagggcacgggatccccactagggccgcctattt

SEQ ID NO: 60006 - DNA, 122 bp, Homo sapiens
tggccttcactgagcccgatgtgtccaaggttcatctgcgctgtggtgttgtcagtgcctcgttccctttatggccgaatcataagccaacgtgtgggtattttccatatgccagcgtgtgg

SEQ ID NO: 60007 - DNA, 122 bp, Homo sapiens
tgcgctgaattaacttctcccgcctcttgtaatgctctggtgggttcttgtttgggaatgcgatattttgtggctggtttagctagagagtgaactctcaaaggtatcaaaactgtgcttcc

SEQ ID NO: 60008 - DNA, 122 bp, Homo sapiens
gcggcggttcttaaaccagacctgttgcgcaacggaggacaaaacagttcagatcaaaggcgcgcttcccccagtcccggggcacccggggagcttggtgtggcggcgggacaccccgcgca

SEQ ID NO: 60009 - DNA, 122 bp, Homo sapiens
ctagggacaggggtccaaggttcagcgcctcagcagcgtgggaaagcagagtgagtgcttcgctaaacgagaatccatattctcggtgccatccggacagtcgagggtgccattccacagga

SEQ ID NO: 60010 - DNA, 122 bp, Homo sapiens
aatttaaaactctgttccttagctgcaccagtctgctgtcaaccgttcagtggcacatgtcgcgaggggctgccatcacggacggtgcagatgtcccatatatctagcattctagaacattc

SEQ ID NO: 60011 - DNA, 122 bp, Homo sapiens
ggggaggcggaactgggcagacagatgggcggccacaattctccagcggcagcctacctgcgctagggaaaaaaacttctggaattagggtttgcttcacccacaactacgaagactggggt

SEQ ID NO: 60012 - DNA, 122 bp, Homo sapiens
tcccctggaggagagaggacaagctaaaattaaggcggcctagatgactccagatgaagccggggaggccgagcccctgacagctgctcacctcctggggtcacggcagaacccaactgaac

SEQ ID NO: 60013 - DNA, 122 bp, Homo sapiens
tgagttgtggcgcccacaatgctcccatgacaaggagctgacaagttccattttccgtcgcgggcatcttggaatcatgactcccacaatgccttgggcacttggtcgacagtggggccgcc

SEQ ID NO: 60014 - DNA, 122 bp, Homo sapiens
gctcaggtgctacttttcccgggtggggtttgtgaggggtgagctcttcgtccccggaggcgagcaagtctgtcagtggctcatcacagagagctgttttggaaagcgttccacccacctca

SEQ ID NO: 60015 - DNA, 122 bp, Homo sapiens
cgccgcctcctccgccgcgcttagcttcctccctcctggacgcacttgcccttgcctggccgctcccggcagccccacaccccggtctctgttgaccaccgagctgtgggtgggtgcatctg

SEQ ID NO: 60016 - DNA, 122 bp, Homo sapiens
atcccccatcctctcgtgagcagtcggctgggtcaggctggctccaccggctctgggattcggctgcagcctggcccggatgccgccggggtcaccgccatctggagtgaggggctgcagcg

SEQ ID NO: 60017 - DNA, 122 bp, Homo sapiens
tctctttcattctgtcgcctactgtcacggtgttaacctccctctctgtctctctgagtgcgttctctcgcccgtcacccctcttcctttctcggtctcctcctctcccttcgtccgagccg

SEQ ID NO: 60018 - DNA, 122 bp, Homo sapiens
tgattgcagacattggaactcatatgtcatttctgttcgctctggtagactcgggtgcctcgggaaagcccagtgctttcagaagcaattcatttagcactgagcgacatctgagctcattc

SEQ ID NO: 60019 - DNA, 122 bp, Homo sapiens
cattaatgtgttgggaaaaaggcctctgtcccggaagagtcatgggaggtgaaaggggcacgtttgaagatgcgagcgctatcttcacatagttctccagttgtatggagcctcttctgcca

SEQ ID NO: 60020 - DNA, 122 bp, Homo sapiens
gcctgccacagggtgctgggcagaggctgacaggctcctccaaaccaactgccactgcaccgacagccacgcctaccagcaccccagcaccttccaggggttcccttcgtttgtgggctggg

SEQ ID NO: 60021 - DNA, 122 bp, Homo sapiens
tcagactctctggcgggggtggggggacagccgccccgtctccacagctctcccaggattcggatgcagctggagtttggggaccactctgtgagtcatctggagagcacgctgataactca

SEQ ID NO: 60022 - DNA, 122 bp, Homo sapiens
gcagcaagctcttcatgttactttcctttccatttagacccagttaatgtatctatattacgtatgtttaatgtgtatggacacacacacacacacacacacacacacacaccataaaagat

SEQ ID NO: 60023 - DNA, 122 bp, Homo sapiens
ctggctggagtacagtggcttgatcatagctcactgcagccttgaacgcgtaagtcctcccgcctcaacctcacaaccagctgggacctacaggcacatactgccatgcttggttaattttt

SEQ ID NO: 60024 - DNA, 122 bp, Homo sapiens
ggattactcacaactatccgccagagtttgctccgccctttctttttcctgtttaaaatccgcgggctcttagtgttctcggttcctagatttcctgttctgattctcgcgacagttgcgag

SEQ ID NO: 60025 - DNA, 122 bp, Homo sapiens
gaccctccctcacatctcattacctgataatgcaacacagtctttaatcggggcgaatttcggggtggaaaggactagataatgctgataagcgtcatcatcccatatacacagcaccccaa

SEQ ID NO: 60026 - DNA, 122 bp, Homo sapiens
gcaaactacaattcccggcggggagcgcggtgaagcgggggtgggatctgaacatggcggcggtggtagctgctacggcgctgaagggccggggggcgagaaatgcccgcgtcctccggggt

SEQ ID NO: 60027 - DNA, 122 bp, Homo sapiens
agcctggcctgttcacttctgtcctcatggctctggatgcctaaggatttctgggcttcccgcccaggcactgaccccttcttcccaccaccctatctccaggaaggcctcctgaatgctcc

SEQ ID NO: 60028 - DNA, 122 bp, Homo sapiens
actctggtctctgggcaaagctgatgcgtcaatggtgggggatgctgacagtgtggggggcggtgtggagggtagcaggtagacaggaattctctgtaccttactctcaaatttgctatgaa

SEQ ID NO: 60029 - DNA, 122 bp, Homo sapiens
actgtcaggcttctgccccaaacaagaatggctacccacgcccacaaacagagccactcacgtaactaaaaatggttggctccgggttccaccactggagtcactttctgcccaacttcaaa

SEQ ID NO: 60030 - DNA, 122 bp, Homo sapiens
gaagctgcagacctccgcgatgagtgttacagctcaaaaaagcaatgtggacccaaagagcgagcagcggcaagatttattgcagagaacaaagtttccacagactggaaggggaccccaac

SEQ ID NO: 60031 - DNA, 122 bp, Homo sapiens
ttcctttccctccaccaacggagtgagggaattcaccctactccacaccagagatgtggccggaatgcagagatgaagcactgagcacagtaggtatggtcttacccttgagaagctagtgg

SEQ ID NO: 60032 - DNA, 122 bp, Homo sapiens
aaaagagcaagactctgtctccaaaaaaaaaggaaagatagcctaagccaggcactatcacggaccactgccaaacatagaatcaaatgaggagagaaaagaagggagttaatgaatacaga

SEQ ID NO: 60033 - DNA, 122 bp, Homo sapiens
aactgaggcctgtggcaccgtcctgtgtctctgtgactggacagttgccatcacactggacgcggggcggtccacgctgctgtggggcctgcttagtgtgtgcccacggagggtcagggcat

SEQ ID NO: 60034 - DNA, 122 bp, Homo sapiens
ggtgacttccaaaggccccccgagccggcagtgccccccaccacccctccagcgactctgcggtgccagtgccttgttggcttttccggctacgcaccctgcagtcactgagctctcggtct

SEQ ID NO: 60035 - DNA, 122 bp, Homo sapiens
ggccgagagattgacgttcgaattgatagaaacgcttaagcagttgccttttttaaacatcgatacgagacctctgaatttgtattttttcttgttaaccattttaatttgttggctggatg

SEQ ID NO: 60036 - DNA, 122 bp, Homo sapiens
acatttcccagaagtcctcgcgccgctcctttagaaacggcctgaggtttcagcgccgttcggtagttagttcccagatgcaccgagtgcaatactgcaattttattcgttagctgaaataa

SEQ ID NO: 60037 - DNA, 122 bp, Homo sapiens
gcgtctccaactccgcaggtgctggacggaagtcagggttctaatcctctgcgcgctctgcgaccttggcaagccctttgcccactctgggcctcaggatccacctcggtaaaatgggagcg

SEQ ID NO: 60038 - DNA, 122 bp, Homo sapiens
cccagcggtggtcccgggcgccgcctccgccccggacccagcgccaggagccacagactccgcgcaccgcccccaggctcctccgcgccctgcagcacaaaagtgcacgccgccgtagacgc

SEQ ID NO: 60039 - DNA, 122 bp, Homo sapiens
gaggcgccaggcagttcagtgctgggcttagctgggggctgagccttgaagaaggcgaaccgtgcagggaagtagtagctgtggggtctcacctcccgctccgccctgctgcactgggtctc

SEQ ID NO: 60040 - DNA, 122 bp, Homo sapiens
caacaatcaatcttctctaaaccaggagctaatcctagaggaatgcaggaacttgttgcacgaagcattggttagtatgtgcttattaaacactcaatggttgcctaagacagacaggtaca

SEQ ID NO: 60041 - DNA, 122 bp, Homo sapiens
aaggcctcccgcactggaaggagtgatttgcatattccccggaggggccttactccagagcgcagtgattagcatatggcgggggcaacctgagcaaagcgcatgcgcgcagggactgcaga

SEQ ID NO: 60042 - DNA, 122 bp, Homo sapiens
gctttatgcgggaggcagggcgtgtgtgtgtgtgtgcgcgtgtgtgtagctgctcgcgtgcgaatgcctgtgagtcctaagtctgtccccgaatgtgtccctagatgcatggctttgggtat

SEQ ID NO: 60043 - DNA, 122 bp, Homo sapiens
cttcataaattacccagtctcaggtaggttcttatagcagtgtgagaatagactaatacacgcatcatctacggatgtgctgagagaagactgaagcctcaaagtcacccaaaactctgttg

SEQ ID NO: 60044 - DNA, 122 bp, Homo sapiens
cttcccaatgatagcatcggtgacacgcactgaggaccacaccttgtataacacgggtgccgggtgaacagagctcctggggccactgaacccaacagcccggcacgtgactaaaacttatg

SEQ ID NO: 60045 - DNA, 122 bp, Homo sapiens
attcgaacccgacttctgagatacaggccggtgccccgcccgcgggacctgcgggaccctcgggacaccgctccagccgcgccccgactccagaggttctccagcccactgcagacgacaga

SEQ ID NO: 60046 - DNA, 122 bp, Homo sapiens
actttggagtgtaaatgctggcttaaggtgtttggctcatacttggaagtctgttagaaacgagttaaaattctctgaagaatgacttaggtgcatatgctaggaaacttttgaaagattgg

SEQ ID NO: 60047 - DNA, 122 bp, Homo sapiens
ggttgtgcttccggtgaggagggtccctttcccttttgtgtatcagtgcactcgaaaacacgccgggcttaatcttaagcaccgcgcctcaccgcccgtgcttcgtaatttgttttaaccta

SEQ ID NO: 60048 - DNA, 122 bp, Homo sapiens
cctgacccagaggcaggagtggcctcccaaggcttgcggcatcctcaggccatgctctgccggccctagcctaggaagtgcctgtaaagatgactcttgcctaggaagtgcctgtaaagatg

SEQ ID NO: 60049 - DNA, 122 bp, Homo sapiens
aggggcactgggggaacttcaaatgctatgataatagatgttccctgagtgttcaccagccgggtgaacttgaccaaggaccctttgtgtgccttagtttttttctttttttttgagacagg

SEQ ID NO: 60050 - DNA, 122 bp, Homo sapiens
gccctggaaagggccaggacgcgggcgagctcgggcttccgggcgacgcgggaacctccccggccccgagccatttcctgagagaccgcgcccagggacaagcagcgccccgggccccgact

SEQ ID NO: 60051 - DNA, 122 bp, Homo sapiens
aggtggtctgctcctgcagcaagaggggctaacttccggccctggagacgctgtagccatcgtgatgttaaagcaaaatctctgacagatttagatcgtgtgtcagaggtttgtgtcagctt

SEQ ID NO: 60052 - DNA, 122 bp, Homo sapiens
aaaggccgtgatcaaaaatgcggacatgtcggaagagatgcaacaggactcggtggagtgcgctactcaggcgctggagaaatacaacatagagaaggacattgcggctcatatcaagaagg

SEQ ID NO: 60053 - DNA, 122 bp, Homo sapiens
gtggacacactccgaagagctccgtggagttttggaaactacattatccagagtgcagagcgcaaaacggcggcggagttgagccaatgacagcccaggatagcaacacttccgcgcacgcg

SEQ ID NO: 60054 - DNA, 122 bp, Homo sapiens
aatatacacaagggatttagtcaaacaattttttggcaagaatattatgaattttgtaatcggttggcagccaatgaaatacaaagatgagtctagttaataatctacaattattggttaaa

SEQ ID NO: 60055 - DNA, 122 bp, Homo sapiens
ataatgtagtccctgcgggtgcccctaccaaaaacaaccacaggatctcagagcatggaccgtgtctgcccagctgatccctggggccctcccacaggagatacagctctctttttctccag

SEQ ID NO: 60056 - DNA, 122 bp, Homo sapiens
gaactcctgttctcttcagatcgtcttggcgtatggctttgtgcaccgtctgcagcaagccgagacccttcccgccagatccaggccgggccttggatggccattcgccaacgaatcagcga

SEQ ID NO: 60057 - DNA, 122 bp, Homo sapiens
aggcgccaagaaaagtttttttttttttttttccagtgccccacccccacccccatcctgcgcccagctggggtgggtttgggtccattggtgaaaaaagtcacacgttcccatcagctgct

SEQ ID NO: 60058 - DNA, 122 bp, Homo sapiens
gcttaatatttgcatatgcaagaacattctggtgacaggcaagaggagagccgcctactccggtgcaacaagagacagcctacgtccatggtactgtcatgcagcaacagcagccctggatt

SEQ ID NO: 60059 - DNA, 122 bp, Homo sapiens
cgcaatgctcagagggcgctgctctcctgcactcccaccttgccaagaccaggtgtgtggcgacacacggcagtattgcccctgcgcagctgctgctgggctagcatcgcccgggtctttgg

SEQ ID NO: 60060 - DNA, 122 bp, Homo sapiens
gctacccccgcccccggcgggcggtgcggtggggccggtcccgggtgctcgggccaatggcgcttcgcccgctccccgccccggcccgccccggcctcctcgcccggcacacagcgcctgcc

SEQ ID NO: 60061 - DNA, 122 bp, Homo sapiens
tctatctgacccagagttttcccagacgaaagtgggaagacggtgcctaccccaaagcgtcgtgggaatgaaagtcaatgaagtgacataggaaaggtgcctagcacatggcaggtgctgag

SEQ ID NO: 60062 - DNA, 122 bp, Homo sapiens
gagtgagccaccgtgcccagcctgtaatttttttaaaatggggccaggcatggtggctcacgcctgtaatcccagcactctgggaggccgaggcgcgtggattgcttgagctcaggagttca

SEQ ID NO: 60063 - DNA, 122 bp, Homo sapiens
agtgtgtgtgtgatttcctgaaaggaggcactgctgccttaaatccccagcactcagggacgggagggtgttagggtctgaacccagggcatcgcggggacctggattcagaaaaatgggtc

SEQ ID NO: 60064 - DNA, 122 bp, Homo sapiens
tggagaccctgcaccaagccagagggcattttgaaggggctgtatttcaggccgacttcccgcatctggctggttgttccctgcctcaccaggctctcacttgtctgtggttaatgatccag

SEQ ID NO: 60065 - DNA, 122 bp, Homo sapiens
gaacacactccgtggtgttgctgctgcccttcaggcgcagctcggcctctttgtagagagcgcagagcttggcgtcgctcgcccctttgggggcggtggggggctggggcgtctgcgctgcg

SEQ ID NO: 60066 - DNA, 122 bp, Homo sapiens
cgggactacgcgcactgtgacgtcatgatgcggagcgggctttatgacgtcacacaagagcgggctcctgatttgtgatgacgtccctggagggggcggctcctggagatcaggccaaaggg

SEQ ID NO: 60067 - DNA, 122 bp, Homo sapiens
cttggttgggcgtcccggggtaggtggctgccgcggcgatgtgggcggcttgcgtgtggccgatcggggtcgctgctgagccccggagagcggagggtccaggctaggctgggggagcgaga

SEQ ID NO: 60068 - DNA, 122 bp, Homo sapiens
ccccaatcctggttccaaacagcatccttcccggttctcttcttaaggagcagagtctttcgtcccttcgccccaaatcgctcaagtcattcctaggaaatcccgagaaacacttcacctca

SEQ ID NO: 60069 - DNA, 122 bp, Homo sapiens
agttgaacagagaaagaaacatgcatgcatgtcaggaggcggcgcagcgcggcgaggccacggttctctcctgcgcgtcagaaggcggcgcagcgcggcgaggctgtggttctctgcttgtg

SEQ ID NO: 60070 - DNA, 122 bp, Homo sapiens
tcctgaggcttagtccttcacaacacagtgtccttatggaggctttctggctccttctaccgccttctctcctgcattccttgtctggggatgggcagagtagacactgggtactcagtgtc

SEQ ID NO: 60071 - DNA, 122 bp, Homo sapiens
cctgacctataactcaaccttcactggaagcctccctaagggccccatttctcggcctaacgctagatgtgagctcaagatgccatccatcgcaggcgaacaacaggaacgcccttactgaa

SEQ ID NO: 60072 - DNA, 122 bp, Homo sapiens
aaggacgctggcactgaagcctggggggaccctgaggactctgtggccagtgaaggaggccggcaacaaagggcgtgttccgtgactccgctcctgggaaacacctggagcaggcaaatctg

SEQ ID NO: 60073 - DNA, 122 bp, Homo sapiens
cgggggcgtgtgtggctggggacccacggagaggtggcagggagggccggcgtgtgcgcgcgtggggtatgtgtgcacctagctgtgtgtctatttctcgctgactgtccacagggcagcag

SEQ ID NO: 60074 - DNA, 122 bp, Homo sapiens
atacagtaagagctcaattaatgcagaggctgtgcgatccttttggcctctctggggcctcgatttccttacctactgaagagagcaactcatgggtttctaggggtgctgggatgattgca

SEQ ID NO: 60075 - DNA, 122 bp, Homo sapiens
attcagtccctccttaaaaaacttcaaaccctgctgagtacaagaaggcatatttaatgccgggcgcacacccatcggggaccacttcccagaccacagcttctcccttcctaattaaagtc

SEQ ID NO: 60076 - DNA, 122 bp, Homo sapiens
ccttggcggctccttcagcagagctgaccttccccttgggcatcctggcggcagggagggcgcgtgccaggtgtctgcgggccgcggcatgctgacagcctttgcgaaactgtgctgcctgg

SEQ ID NO: 60077 - DNA, 122 bp, Homo sapiens
cagtctttgcggatgagaacatgcctctctgccagtgttatccacagtcctaattttaagcgacagtctggatgatattaaattgaggtttatctttgagtgaccagagttatttttgtttt

SEQ ID NO: 60078 - DNA, 122 bp, Homo sapiens
ggcctcgctgccccgcgtctttgtgctgcgtgccctgcttatggtgctggttttcctgctcgtggtctcctactggctcttctatggtgtgcgcatcctggatgctcgggagcgcagctacc

SEQ ID NO: 60079 - DNA, 122 bp, Homo sapiens
tctggtttagctaacgggtgggtggaagggaaccactctcagagcgatgctgcatcctcccgctggcgactaccccgagcccacctggcggtcaggtagcagatcctcacctgccccgagag

SEQ ID NO: 60080 - DNA, 122 bp, Homo sapiens
cttggggtcgccgctgagccctgagtcccagcagccgaggctcggcccgccccctcggcccggcgctcattatcccgaatagcccaagaggcctaacacggagcatgcgcgccgcggagcag

SEQ ID NO: 60081 - DNA, 122 bp, Homo sapiens
tcttgctcgcagcgcaggggaacgagcctcacctttgaccttgtctcagcagcgccacctcgtggtttccaaaaggaacagcatcatgctgggcgcaggggccctgccctgcggtgactgaa

SEQ ID NO: 60082 - DNA, 122 bp, Homo sapiens
ggcagcgggcctggggctctggctctggctgccgggatggctgtccttcccgctctggtccgctagggtcccggtagagttaccttgttgaagcgcgctagcccctccagggacgcggcggc

SEQ ID NO: 60083 - DNA, 122 bp, Homo sapiens
tgcccgcccaccaccggccagggctgagctgtacccaactcaacttgactcacttgtgaccggcccctcccccagccctgaggacggtgggggtgggggtgggggcgggctgggcaggcggg

SEQ ID NO: 60084 - DNA, 122 bp, Homo sapiens
gtgcaggtaagggattcctgcacccaggtctgctttcctcttcctggatgttttggggctcgacctcacttttaacgcgaattcaccattacgcgccccccaccccgttctttttccaggag

SEQ ID NO: 60085 - DNA, 122 bp, Homo sapiens
tccaaatggtggtgacgtcatgggtttaattctgaaattgttcttctttggagaaaaatgcgagatttttcaaatgactttcagagcagtggaatccaaagtttcacttttggtactttttt

SEQ ID NO: 60086 - DNA, 122 bp, Homo sapiens
atgccgtttccatgtgatgcccgataccttcgccgtcttctgtaccaagtcagccacaaacgcaggcccgttatctgagctgatccgtaagggcagtccaaatctaggaatcagatctcgaa

SEQ ID NO: 60087 - DNA, 122 bp, Homo sapiens
cgggctaggagcagggcagggcagggcaggggccggccccgtgggagcgcagcaccggggcgctgcccgctcgctagcctgggaggcgtgggtcctgcacacagcctccagccggcggacag

SEQ ID NO: 60088 - DNA, 122 bp, Homo sapiens
aaacaatgtttatttgtaaagtttcttaatttctatggaagaatgtttgctttcctgactcgtatttgattatgacggtaaattgtcttgcctattttatcaacagagtatgagttctctgg

SEQ ID NO: 60089 - DNA, 122 bp, Homo sapiens
ccgtgcccactgcctgcacctcggctacgtgggtcgctgggggtcatgccaagagggccgcgcccaccggttgccctcggctacgggggccactgggggtcatgccgagatggtcacgccca

SEQ ID NO: 60090 - DNA, 122 bp, Homo sapiens
aaatgtcgatgtagttgggtctgatgcccagcgactttgcctcgaccacatctgtgacatcgccgtccagcatgcggatgcctgaaagcacagaggaggctcggtgtcggcgcccaggctcc

SEQ ID NO: 60091 - DNA, 122 bp, Homo sapiens
ccagggacagggctgaggttgggcgcggggggagcctggccgtcactctgctgctttgcccgcaggagacggagaggacgacgagacggaggagggcgcaggggacatgagccaggtgaagc

SEQ ID NO: 60092 - DNA, 122 bp, Homo sapiens
aattgagaaagagctatcaatctgtcaatcctgtccgtgtccaggctgggtgaggtttcccgtgttgagattgcagtgagccaagattgagccattgcactccagcctgggtgacagagtga

SEQ ID NO: 60093 - DNA, 122 bp, Homo sapiens
aggcctggccacttgacctcccaggtgccctcaccacactcatcaccgcccaacgcagcccggctctgggctgggcaaacatcttccgtaaaggaccgggcagcaagtgttttcggcttcgt

SEQ ID NO: 60094 - DNA, 122 bp, Homo sapiens
caatcattcttgtgtggacacttcctctctcacctctccagtgaaagtagcataccagtgcgagagttgaccaaggcttatgttgagggggaatttatggaacagaaaatgtcaatgtagtt

SEQ ID NO: 60095 - DNA, 122 bp, Homo sapiens
cagtcatcgcagaaaactttctgagaatgcttctgtctaggtttgatgtgaagatatagacgtttaaaacgaaggctacaaagtggtcaaaatagacacttgcagattctactacaagggtg

SEQ ID NO: 60096 - DNA, 122 bp, Homo sapiens
gcttggcaaacgagcattttcccgcgcctatcgtgaaagcgcgagaacacaggggattatcgcgaggttccgtgctcctctcccgctccctcttccccagctccctctggcgcgggttccgc

SEQ ID NO: 60097 - DNA, 122 bp, Homo sapiens
gggaacacagccctcatctggtttctctctttggtgttgagggcggttttccgttgctggcgacctagacattgctcaatggtgtcatctctgacctggcaccttcttcatacatttataaa

SEQ ID NO: 60098 - DNA, 122 bp, Homo sapiens
gggccggggccttggttgagtccaggatggaggccccaggtgtcctgggacgacaaagggcgggagggtgccgagagggagcgggaaggagcgtggctcgaggggccggtgcgcccctcacc

SEQ ID NO: 60099 - DNA, 122 bp, Homo sapiens
cacaccccgcccccgcacgcaggcacaaacccccacaacacgcacacccccgcgcgcaggcgcaccacacccctcgcgcaggcgcatcacagacacactcgcgctcagcgtggcgcctgcgg

SEQ ID NO: 60100 - DNA, 122 bp, Homo sapiens
ctccccatttcctgtcttactcttggtcttgttctgtttgttactatatccccagcacctcgcgctcctcccagcaacctcacagtgttcaatagaagctcctaggacaaattctcacccag

SEQ ID NO: 60101 - DNA, 122 bp, Homo sapiens
gggggattccaaaccgttactccgcccgccggggtggggccagcgcaacggccgagcctgcgcagccagccggctccgggggccccgcgcactacaagtcccagaaggcagctctccgcggg

SEQ ID NO: 60102 - DNA, 122 bp, Homo sapiens
aaaggtcgcagtggggatggctcctcccttcccgtcttagagcccttcttaagcagagcccgccgagctcgctgagatgtggaaagtcacagggttctttcccatccggcacgggcacttga

SEQ ID NO: 60103 - DNA, 122 bp, Homo sapiens
ctcccgcatctctcaggcccaggcagaacgggagcgggggaggggagctggggcacaggacggcagaagggctgctggtcgtttcttgttacattttccccaacattctctgactctaccac

SEQ ID NO: 60104 - DNA, 122 bp, Homo sapiens
tgtgcctttaagactcagttgctatccaaacagaagtaaacagagtggaccattagcagacgccgggcgcggaggcggagccagggcgctgagggccccgcgcggcggcgggacgcccgccc

SEQ ID NO: 60105 - DNA, 122 bp, Homo sapiens
aatagcaaagggtcccggtgttgcacacacacaaagcagcagcagccgctggaggtcttccgtgtttggtaaaggtggctacggactcccgcatggagacgcggcctggagggtgtcactgc

SEQ ID NO: 60106 - DNA, 122 bp, Homo sapiens
gcatcctgtctgcactaggtgtacgtattacctattgcttcacagtaaaattccccaaaacgtattagattgagctggtccaccttctaggctgggctcaagtgagccattcttctggtctc

SEQ ID NO: 60107 - DNA, 122 bp, Homo sapiens
ttaaccctccttacttgcttctggctggtaagctgcatctctcgttccgtgatctcccggcggagatggtccacttcacttcgcagttgtacaatctcgtcgttggcgccagaagcctcatc

SEQ ID NO: 60108 - DNA, 122 bp, Homo sapiens
aaaatcaaaacagcacagtagaagggccccgggatgcggctgggcttacgcacctggtcgcgcagctctccctgaggtggtttgctcggctcctccagccggggctccctgcgtgagcatga

SEQ ID NO: 60109 - DNA, 122 bp, Homo sapiens
cgccagcgtgggcagccgggagatggccgaggccttcgccggggagatccctaaggtcctcgtagccgggtatgtgccgggctcgtgccgggctcctgctgaagatgtgctgctttcatgcc

SEQ ID NO: 60110 - DNA, 122 bp, Homo sapiens
ctgccggggaacatcctccatgactgttttaaatctcaaagagatgttcactccagttttcgacccaattccattgcactttctccagcgttgagaggggagtgtgcggcagcgccagggaa

SEQ ID NO: 60111 - DNA, 122 bp, Homo sapiens
aatacataacaaggtattttattctcaaaatgtgtcaggataagaagcacttctgtaaatcgacctttttaaaatagatataattagatttgcagttgggggcagtaaagaaagggtctgaa

SEQ ID NO: 60112 - DNA, 122 bp, Homo sapiens
ttgtactcgccgaagcagcgctttttgccctggtatggagtcaggccctcgcctttggggcgtgcctacagggcaggaagcaaacacaggggattggagtccaaaggccaagatgatgcccc

SEQ ID NO: 60113 - DNA, 122 bp, Homo sapiens
acctttgttacatagcactgaggctacaagatcgtaagtactgagggaagaaagaacaagcgagcgattgaacgttaaaaagatgccttagcatgcactccacctctgaaccttcctgtgtg

SEQ ID NO: 60114 - DNA, 122 bp, Homo sapiens
agagggctctggacagctcctggaagggcacgtgcacatggctgcagtggacctcctgatcggtggcactgagaccacagcaaacaccctctcctgggccgtggtttttttgcttcaccacc

SEQ ID NO: 60115 - DNA, 122 bp, Homo sapiens
gaaggacatttcataagggttagttggactgagcagtatggacatttgcttttttcattacgtactgttgtttttccttgttaggtgtgctttggtggttttaatattattgtgccagggat

SEQ ID NO: 60116 - DNA, 122 bp, Homo sapiens
gcataaatgaatcaaatccttatcggttgagcacagatctgtgcacacgcgagcactacacgtgcattttaggattgtcttgagcaggaggcgtgcgtcacctatccccacccctggctcct

SEQ ID NO: 60117 - DNA, 122 bp, Homo sapiens
tttgtggcttcgagtcccagcttcatcatccctaaaatgggtataattccattacttccccgggtcacttgagaaaataacagaatcagcgatgctgagcgcccctcccagtacttggaacc

SEQ ID NO: 60118 - DNA, 122 bp, Homo sapiens
gaagagcagcccgcaagcacccaccacatccattaacaaagactctcagggtgcggggtccgagtccccggcatccgctgggggaggctgcgggctccggagcgggagcgcagagacccgaa

SEQ ID NO: 60119 - DNA, 122 bp, Homo sapiens
cccttccttgcactgtttctgcagacgtgcctggtaggctggacttcccctcctgagccccgagaactgtgttgtgtctgttgtcatggaaacgatggcaaagccacagagtcaatgctgcc

SEQ ID NO: 60120 - DNA, 122 bp, Homo sapiens
ctgggcaagctctgcagagaggtgggttttcctggggctgtccagctctggcagccagaacggcttcatgcaggtgccactgaggacagcccaggcagcccagcacaagcgattctgcaggt

SEQ ID NO: 60121 - DNA, 122 bp, Homo sapiens
caccctggggctcccatcgtccactcacctgtcaccccgatggcagacacggggcccacacgctggccaccgtggaagccgtacaggttcatcttgtacttgttgtctggctccaggccgga

SEQ ID NO: 60122 - DNA, 122 bp, Homo sapiens
gtccgcgagccttgggtatctccagcttttttccgccagagctgtttccgttcctctgcccgccatgccgttcctagagctgcacacgaatttccccgccaaccgagtgcccgcggggctgg

SEQ ID NO: 60123 - DNA, 122 bp, Homo sapiens
taggccttaccggcttccaccatgccactgcacagcttcaccagctgtgggccagcggggcgtggtgagcacagtgggcactggcgcctgcactcgccaccacacacggccactcagaggca

SEQ ID NO: 60124 - DNA, 122 bp, Homo sapiens
ggagattgaggttgcagtgagccgtgattgtgccactgcaaccctatctgggtgacagagcgagaccttgtctctcaaaaatagaaattttaatattttgcctgggcacagtggctcacatc

SEQ ID NO: 60125 - DNA, 122 bp, Homo sapiens
tcaccctgggatcttggggatttacagaacatgctgctcctattcaccttcttgtctgaccgttccaggacatttcgagtccgatccttgtcccgctgtcgaacccgctcagcaaaggcatc

SEQ ID NO: 60126 - DNA, 122 bp, Homo sapiens
tgcgggccagcgcgagttccaggtgggtgtgggctcagcgggccccgcatttggagtggccggctggtgccactggcctcaggtagtgaggggcttagcaaccaggccagcagctgcggagg

SEQ ID NO: 60127 - DNA, 122 bp, Homo sapiens
ttagattccagatcccagttcctccatgcacctcatctgtactgtaatgaggatcctagccgccaggatttagtgagcacttactgtataccaaggttcttcaccaccctcggtgggcacca

SEQ ID NO: 60128 - DNA, 122 bp, Homo sapiens
atggacctacaaccttgaaacagagtgtttggaagagctgaccttggagcagagcattgccgagtatctgaaagatgtcaatgaccctcgctgctgctcggagaccttggggatgacctgca

SEQ ID NO: 60129 - DNA, 122 bp, Homo sapiens
aacattcctctcattctctagaaaaggtagcaaaggcccagagagcttgtgtgtcccctccgtcccagtcacagagcaccctgcaggttcagctagagcccagagccctgaaacccataaca

SEQ ID NO: 60130 - DNA, 122 bp, Homo sapiens
actgctattaagttatgagtaaattaagcgaaagacgattgagcaaagagcagtagcacacgggatggttaggaagcaaggttatcgattaattataggcacagtctgaggcccaattaaaa

SEQ ID NO: 60131 - DNA, 122 bp, Homo sapiens
gcgcccgatttcttggccctctgctccagggtccgctggtagaggctcacggtgtcccggcgctccagctccagctgctccacctgagcctgctggtacctgttctcgcagttgacgtggtg

SEQ ID NO: 60132 - DNA, 122 bp, Homo sapiens
actcgcttcctcggcaaagatcggcgagggaggcttcgctggcttacagcggcgcgggtgcggggcggagggaaagaccaaaggcgaggtctggcttgcgagagtcctcccctgcggcccag

SEQ ID NO: 60133 - DNA, 122 bp, Homo sapiens
gcctactatgtctctcttggacatctaggagttccttttggaagatacttaattttaggccgggcgcagtggctcactcctgtaatcccagcactttgggaggccaaggcgggtggatcatg

SEQ ID NO: 60134 - DNA, 122 bp, Homo sapiens
gtgggaaaaaaagctttatttagtttcatattcattcattacacatcaaattccttagtacggtctgaggaaaacagcagtgtatcagacaatatgctagaggccgcagatgcattgtttct

SEQ ID NO: 60135 - DNA, 122 bp, Homo sapiens
aacagacttgtcttcaagtttcagataaacacagtcataataagagagacagcgaaagcgcgaagagactgcaagctagatgggcatgtatggcagctacagcttgtgagtgacccccttcc

SEQ ID NO: 60136 - DNA, 122 bp, Homo sapiens
cctagcgctgttcccgggtgtggcgctgcttcttgccgcggcccgcctcgccgctgcctccgacgtgctagaactcacggacgacaacttcgagagtcgcatctccgacacgggctctgcgg

SEQ ID NO: 60137 - DNA, 122 bp, Homo sapiens
aactcagtcatccaggaacgcatgtttcttcttcctccttgaggccagtttaaacacgcacgcgtaagaaaatcctccaagcaaacaatttgttgtcatgtgtcatctctgaacacaccact

SEQ ID NO: 60138 - DNA, 122 bp, Homo sapiens
cttccagacttcgattctgcataaaaacaaacatctgccacgagacccctgctcggcgtccgcctgtctcagcagctgccctgggacgtctttctctgacttggttttgaggccagccgcgt

SEQ ID NO: 60139 - DNA, 122 bp, Homo sapiens
cactcaagtgatcggtgaagaccgggccccaatatgcagtgtccctgcgactaatgtgaccgtggaaacctcttgttggtactgacacacagggtaggggccccacggaagttcattttttt

SEQ ID NO: 60140 - DNA, 122 bp, Homo sapiens
aaagtctccaggtgggggctccgcattaccagtcttggtcgcaaaagcagccctttcaatcgcaccgaatttcccctggtgtgaaaaggcgccatcgccagcattttgccggggtttatgcc

SEQ ID NO: 60141 - DNA, 122 bp, Homo sapiens
ctgaggcttggtgagaatttgagcgcaatgtcggccggcgggcactcctggggcacccgtcgcaccctccacagctgctggcctgagtgctacgccccttaccacccggggccggtggcgct

SEQ ID NO: 60142 - DNA, 122 bp, Homo sapiens
aggctgctccgtccttcacagacacagtccaatcagagtttcccaggcacatcgatgcaccgcctccttcgagaaacaaggtaactttcgggttctggttgtctccaaagtcatccgaccaa

SEQ ID NO: 60143 - DNA, 122 bp, Homo sapiens
cttccttccatcacaatcatcagattgtgctactaaacgtcagtgagttcctgagagattcggagtcagtgcaagagaccagggctcttttggaatactggggtcatttattttttgctctt

SEQ ID NO: 60144 - DNA, 122 bp, Homo sapiens
gctggcaaggtcagcactctctctgcttatcccatttctagcttcagaaaaaaattatcccggtgatccctgagaggcacaatcagctttccttgcctcagatcattgacgttagggaaggt

SEQ ID NO: 60145 - DNA, 122 bp, Homo sapiens
atcccccgaccccggccactccgcaccccctgccaccagctcccccaccccactcgcgcccgggagacctggtccccaagttggcaccaccatgtgcccaggatcgcccaccccctcgcatg

SEQ ID NO: 60146 - DNA, 122 bp, Homo sapiens
tcctcagaactaagcagactccgccctccggtccgcgaagtggcgactgcggtattaagtcgacctcgcgatttctcaaatagtgcaggaagaagacattaaatagcgaatgctagagactg

SEQ ID NO: 60147 - DNA, 122 bp, Homo sapiens
gcgcggagcttccctctgcctccaggctttcccagcgagagtgaaattaaacttgaaactcggatcaactggcagtcgttgttggtagaacgccctaaggacccctccccgcgggacggagg

SEQ ID NO: 60148 - DNA, 122 bp, Homo sapiens
gaaagcagaagatgggcacaatgctatggatccagcaagacctcaggtacagggtgtccccgaccagttctccaagtccatgggtgcctggtaggagacagggggatgaatgtgaacccctg

SEQ ID NO: 60149 - DNA, 122 bp, Homo sapiens
gtgctgggggatgtcctgaagcagccacggcggaagcgctggccttgcacctggagactgcgaggcgcccgagctgcaggagcggcccgatgtcatcagtgcgtctccctcctcctgcgtct

SEQ ID NO: 60150 - DNA, 122 bp, Homo sapiens
atcctctttggatgctcagcttaaatcccacaccagctgaacagaatttcttatctctttcgaaatccttaatattaattgttggaaatacttattttatgctaactaggggttgcccttag

SEQ ID NO: 60151 - DNA, 122 bp, Homo sapiens
catgaggggcggggctacagctgcgctcgcaacccacaggttcatgaggtcacctccccgcgcctggacccaaccctcattccatactctggctccagcagggctgatccgggatctcgatg

SEQ ID NO: 60152 - DNA, 122 bp, Homo sapiens
ggagactttctagaaaaaaacaccagttgtcaaccttggggcaggcaggaatcctgaagacggacggcactcctcctcctgctgcctcaccctctggcagcccgtgagaagtaccggaagcg

SEQ ID NO: 60153 - DNA, 122 bp, Homo sapiens
tttaagtgtctgtgagtacactctatgatgtttgcacaacaacgcaattgcctaatgatgcgtttctcagaacatacctctttgattaagtgaggtatgactgtgcttgggcgtgctattct

SEQ ID NO: 60154 - DNA, 122 bp, Homo sapiens
agtttctccagaagacagctgaccgaaaccgcagcagttgccaaggcggctggaggagggcggagaaaaggcggtaactggcaggcaaggggcgtaacggggtggggctgtcctaagggaag

SEQ ID NO: 60155 - DNA, 122 bp, Homo sapiens
tgtcttgtcctgccatgtatgaaacggatcaatcggaaagtgctctgcaagagggcacatcgacgttttggtcatctggttgccgggagaaaccaggggagcataggtaatatggaggaatg

SEQ ID NO: 60156 - DNA, 122 bp, Homo sapiens
ctccacgccaggagcagctattttagttttcggctccgctggttcctggaagatcctcctcgccgccttgctggccaggatgcgagttccgctcagggtcgagggcgtgttctccttgttgg

SEQ ID NO: 60157 - DNA, 122 bp, Homo sapiens
cggggaggcgccaaggccgcggcgagggacgtgcgggggtccagcagcctggggcggggacgcgcgctccgggccgtgcaggtgggggtccgagcggggccggcccggcggttcgcgcgcgc

SEQ ID NO: 60158 - DNA, 122 bp, Homo sapiens
gggacccctcttcgcccagccaagcccggggcggggaggaaagtccccctcagccgcactcgggcccccaacccggccaaggggtcgccaactcgcggcactttctgcctgtttgttttcgc

SEQ ID NO: 60159 - DNA, 122 bp, Homo sapiens
ggaacctgcctatgcttgcttccttgagtagcagaggttggtggctgctctacctgctcccggtgcacccctgcaaaggtggctggttgctctttgagccagcttggccttgcctggcatgc

SEQ ID NO: 60160 - DNA, 122 bp, Homo sapiens
caggttaaggtcctccctagggtttgcaaaaccctcatgggatcatgagccatacagaaccgacctgtgtgtctccagagtctgtaattaacacaggcattttgaggaaatgcgtggcctca

SEQ ID NO: 60161 - DNA, 122 bp, Homo sapiens
aacagcagccactggaaatcaaggaaacttcactaagaatttaacagatcagcaaaacaccgcctccttcccattttagcacgttcagagtggactcagtgaggagtgagaaggctgttctt

SEQ ID NO: 60162 - DNA, 122 bp, Homo sapiens
caacaccgggcggagagcgcccccaccccaaccctaccccttccctccggaaactgccttcgccccaggaaccagagacagaccacttcacccacaaatctttattgtgcccccaagcccac

SEQ ID NO: 60163 - DNA, 122 bp, Homo sapiens
ttcctttccaggttcttccagttcttttaacatgtcaaactctggagatttgttcatgagcgtgcagtcactcaatggggattcttaccaaggggcccaggttggagccaacgtgcaatcac

SEQ ID NO: 60164 - DNA, 122 bp, Homo sapiens
tgcccaggctggtctggaactcctgggctcaagcaaacctgctggctcagtctcccaaagcgctgagattagaggcatgagccaccatgtttggccaccaatctttttagaggccagttagg

SEQ ID NO: 60165 - DNA, 122 bp, Homo sapiens
gcgttgtgcgcctgcgcagccgccgcaaacccgcgttgctcagcgatggagtttggggttcggcctccttcggctggactcgggcatttccgttcatggagatgacgcttcggcggccttgc

SEQ ID NO: 60166 - DNA, 122 bp, Homo sapiens
tcgcctaggtgggcaggctccaccacctcgcgtggcctagtcggcccgcagcaccaagtccgccgcggctcacggccaaccgcgagccctggccaccctgaacctctccacaactccactta

SEQ ID NO: 60167 - DNA, 122 bp, Homo sapiens
gacatcgcagcagccaggagagacgggcgctgctgccttggaaggacgaggaaggagccacgagccaaggaacgtgtgagctccccaaaagctggaaaaggcagggagacggcaagactctc

SEQ ID NO: 60168 - DNA, 122 bp, Homo sapiens
aaaaaccctagctatataccctcacaccctacaaaacaaaacaaaacaaaattagccaggcgtggtggcgcatgcctgtaatcccagctatttgggaggctgaggcaggagaatcacttgaa

SEQ ID NO: 60169 - DNA, 122 bp, Homo sapiens
tgaaccaaatagaaaaagttaagctctacagtgaaaaagcatgactatatataaaagcaccgtaatgcccaatcagttttcctatgattgtcaaccctcacaagcctgccagtgtgggaata

SEQ ID NO: 60170 - DNA, 122 bp, Homo sapiens
ggggcccccgcggcgtgtgtccgcgctggcagcagggagagggggcttgtccgtgagaaacggccccaggaaattcccagggcaaggtcgttttcggagaacaaagtcctctcgccccctcc

SEQ ID NO: 60171 - DNA, 122 bp, Homo sapiens
atgaaattaagcctatcaataattcatatatgttctgcaaagatccctaagcaatccagacgtttggccactagtaagcttaaggatcatagagccggaacatccaaatcaaaatgggcagt

SEQ ID NO: 60172 - DNA, 122 bp, Homo sapiens
tgaggcaggagaatctcttgaacccctgaggcagaggtttcagtgagtggagattgatcgcgccactgcactccagcctagggacagagcgagactctgtctcaaaaagaaaaagaaactat

SEQ ID NO: 60173 - DNA, 122 bp, Homo sapiens
ttttaagtgagaaagtcgcctctctcaggagggaacttgcaaagggctgggtctggaaggcgggcagtgtagctgggctagggaggccggcaggaactttctaagaaactcggctgaaatgc

SEQ ID NO: 60174 - DNA, 122 bp, Homo sapiens
ataaaagtcattctccagattcacatttattttcctaccactttctgcatgttgacagaacgggaggaacgactgggtgttgtcaaggattctgctcactcacccccaactctaacccaggt

SEQ ID NO: 60175 - DNA, 122 bp, Homo sapiens
tcctctccgccaggtctcttctggggacttgcccaaggctctgggcagacagagctgacacgccgccatctagccgccggaagcagactcttgacctgtgaagctggcggcggcactgctct

SEQ ID NO: 60176 - DNA, 122 bp, Homo sapiens
gaacaagtacctgcccgaactcatggccgagaaggactcgctcgacccgtccttcactcacgccatgcagctgctgacggcaggtaagggggcctcccgtgtccctctgggtcgcccggcca

SEQ ID NO: 60177 - DNA, 122 bp, Homo sapiens
aagacagtatggtgcctgggctcctgtatataagagttcttttgatgacgtcacgacgcacgctcccggcagcgtccgcttcggctcctccccctaacctccctcaatcttcctctcatcca

SEQ ID NO: 60178 - DNA, 122 bp, Homo sapiens
tctttttgtgcagctgagtcatggagctttcagccccagcacatggctcctccttaactgcgtctgctcaacctccctcagccctgtgaacagcatccccgcacacagacgcagagcaggac

SEQ ID NO: 60179 - DNA, 122 bp, Homo sapiens
tgggaaacgcagcaaggcgcacagtgcatgcgcactatgtagagcgtaggggctgcggggcggtgtggggagaggtcacggccaccgtgcgtgcgaggccggggaggctgcgggggatcgca

SEQ ID NO: 60180 - DNA, 122 bp, Homo sapiens
agggcagctgagaggctgggtggctgggcctgggagacacacagaggccaggccttagcgcggctcagccatgagcaacaggagtagcttttcccggctcacctggtgggtatcactgtgcc

SEQ ID NO: 60181 - DNA, 122 bp, Homo sapiens
tggccaggctggtcttgaactcctgacctcaagtgatctgcccgcctcggcctcccaaagcgctgaaattacaggaagaagccaccgcgcccgacctaaagccagttttattccatagcttc

SEQ ID NO: 60182 - DNA, 122 bp, Homo sapiens
attgggaaacaaggaaataaatgtgaaagccagcctccaaagtgacctgatgccccctcccgatagtcatgttcttataaagcaacctgctatacacacacacacacacacacatacacaca

SEQ ID NO: 60183 - DNA, 122 bp, Homo sapiens
cttcctccctgttctccagcgccccagccccagacaccagtcccccagcgggcgaaagcccgggagcgccttccccgaaagacatcagggtgccacgcggcccctgccctgcagaagcatcc

SEQ ID NO: 60184 - DNA, 122 bp, Homo sapiens
gcgtctgcccgggccagtgtttcccgggatgtaggtctccgcccgccccaaagaagaacgcggcagggggcaagagggaagggatgagaactcctcctagactagttagaaaacctaggcta

SEQ ID NO: 60185 - DNA, 122 bp, Homo sapiens
ccgcgagctgctcaggggtgagcgcgccttagggtgtgtgcgccagggacctggcgcagccgaccacgtgggagtgcggcgcgtgtacgggcgcgggcggcagcggcagcggcagcggagac

SEQ ID NO: 60186 - DNA, 122 bp, Homo sapiens
tatttttattttagagataagaaagcagattcagggagctgaagtgaagtaaccagcctacgcaagctagcaagaagctgagctgggattcccccgaggcagtgacttctggattgtgttct

SEQ ID NO: 60187 - DNA, 122 bp, Homo sapiens
atataagaaatgaatgctgtgcctctgaaatgtgcctgtgagacaggatctagaactcagcggctcagcttgcaacaaacagggcaaactaagcacagagatttgctaccatcctttccctg

SEQ ID NO: 60188 - DNA, 122 bp, Homo sapiens
acaggaagcagttccggggcccaggagggtcacagtcctttgtggctagcctgggtaccccgccaccacgtacaacttttcgtccgtgggaaacgaagtctccttccggggccctcccacaa

SEQ ID NO: 60189 - DNA, 122 bp, Homo sapiens
ctccaagcccgggcgcgcctagggatggaaaggctctcggggctgggtggggaggcggggcggcgagactgggggctcccttcagccaaggtgaccgcggaaaccaacagccgccccatgct

SEQ ID NO: 60190 - DNA, 122 bp, Homo sapiens
agaacccaccaattccggacacactaagagctgaaggatcttttaaaaacaatcagaggccgggcgcggtggctcacgcctgtaatcccagtactttgggaggccaaggcaggtggatcacg

SEQ ID NO: 60191 - DNA, 122 bp, Homo sapiens
caggctccacagagtcagatcacggcttcacaccagtcgttctggtcacttaggcgttcgcgtgagcgctcaaccccttaccgccacctcatcgtcactctacaccattctgagcgcaaaaa

SEQ ID NO: 60192 - DNA, 122 bp, Homo sapiens
gtgaatgctggcattaagcgcaagggacaggcagtttaggttaagcctggaagtttgaaccggcccattatctttgagatacactggtgttttgaaactctcttgctgaggatattgtattt

SEQ ID NO: 60193 - DNA, 122 bp, Homo sapiens
agtgaagggagagggactgagcccatgctgagggtttttctctggtttctcagacagctccggggccaagattcggggagacattgagacagagcgtttgatataaaagaagggggtaagag

SEQ ID NO: 60194 - DNA, 122 bp, Homo sapiens
cttgctggacaggccagggtgatcagacatcacctgggggatagtggtggatgaggaagccgatcagaccttgagggtgaggggttctttctaaactgacctacctattcctcggccgcctc

SEQ ID NO: 60195 - DNA, 122 bp, Homo sapiens
tagattggtaatagaagaacgtctcaagtgagcatgcgtataactcccgtaaacacactgcgcatgcagcccttcccaagcactggtagggcactgggcatgcagacagcccaccagaaggg

SEQ ID NO: 60196 - DNA, 122 bp, Homo sapiens
agacagggcagggtgggctcatcctccggatcaccgcggggacactttcagtcgggaaggcgtccccgtcccacggccccatctggccagcccgctggacagcctggacagcggagggggcg

SEQ ID NO: 60197 - DNA, 122 bp, Homo sapiens
gctggtgggcggatctgggggctggcggggcggggcctgctaagggtcgcagccgtgccccgtcgatgagcggggctgggggcgggccctgtgatcgggcggggcggggcctgctaaggggc

SEQ ID NO: 60198 - DNA, 122 bp, Homo sapiens
tcgttcctccccgtgggctcatgggctcgctggctccaggagtgaagctgcagaccttcacggtgagtgttacagctcttaaagcagcacatctggagtcattcattcctcccggtggggtc

SEQ ID NO: 60199 - DNA, 122 bp, Homo sapiens
tcggtcagccggagaatgcggcgaggcgcatgcgaccaagtagcacaatgaaagcattttcgggaccatgaggtccttggaggagatttgagcgagcaagggccagcacgagctctccacgc

SEQ ID NO: 60200 - DNA, 122 bp, Homo sapiens
tgaatttcttcattttgaaatggcccccagacacgcctgggcgttgtctttgaactttctcgcggaggcggagcccagtggatcctggggcttgtagtccatctaccctttgccttcgtgtc

SEQ ID NO: 60201 - DNA, 122 bp, Homo sapiens
aaaatatctcctttgcctggagcatggtgaaagtctgggtgagggagtggcattgtccagcgaatgtggctgatggcatgtccatcagggaatttcaaatgggacatagtcctgaatggagg

SEQ ID NO: 60202 - DNA, 122 bp, Homo sapiens
aaatgttaaagttattgccaggttttctttagttagtttgtttgtttgagacactgtcaccgaggctgaagttcagtggctattcacacgtgtgatcatagctcactgcagccttgaacact

SEQ ID NO: 60203 - DNA, 122 bp, Homo sapiens
agaagtaattaatgttgatttatttcatctacaagcagttggtccctaagtgacaggctccgcttcaaaaaaaaaagttggagaaaaattttcatgttcttctgtgaagcttatttggtaca

SEQ ID NO: 60204 - DNA, 122 bp, Homo sapiens
aataagcccaggtagctcctccctgggaaagggcaagattgcccaacactcccgagagctcgtcctcagccccaacctgggaaagcctgcagggcctgagggttgtgtctgcaacatctaga

SEQ ID NO: 60205 - DNA, 122 bp, Homo sapiens
cagctcgagcacggggccatccagattcagtgagcggtgcccatggcaccaggagcccctcgccggctccgcctacggcccggcccccacgcgccctgctctcacggcctcggcacaggcag

SEQ ID NO: 60206 - DNA, 122 bp, Homo sapiens
ggtgttgtacacggtctggatgagcacggcctccaggctctgcagcacctgcagcagctccgcgcgctgcaccggccggccagactcatggacccagtgctcctgggtatgggtgaaggtgg

SEQ ID NO: 60207 - DNA, 122 bp, Homo sapiens
tgacacacgacgacacccagtcaggggctgtaagcacagctcctgcaggaaggggttccacgcacgggcaaacaagccgagtcagcccacgatgagcgatgttggccaagcaatatggagtg

SEQ ID NO: 60208 - DNA, 122 bp, Homo sapiens
ccctgttctcagcagctgggtgtgacatacccgctatgtgcctgatatacccactatgtgcgagacatacccactgtgcacctgacatacccactgtgagcctgacatgcccattgcatgca

SEQ ID NO: 60209 - DNA, 122 bp, Homo sapiens
cagccaggattcaggtgacactgggggcaggatgcagtgagggtcaggcaggtgcagcatcgagggtggtcacgtccacatatggcaatttgatgtggggtgtgtggaactcccacgtggag

SEQ ID NO: 60210 - DNA, 122 bp, Homo sapiens
cctgtggccccaagaggtgggttcccatggtacaaggatgatctcagggccaacaattcccggggtcacacagctgggacgtgaccccgcctcttgggggtggtcgcgtgttgctcagtgct

SEQ ID NO: 60211 - DNA, 122 bp, Homo sapiens
gtcttccaccccttgcccatgtgccttcaagacccattatgcagaaatacacagctgccccggcaaaatcaggagtgggtggaccacattcatggataggaatttgcacagctttctccaaa

SEQ ID NO: 60212 - DNA, 122 bp, Homo sapiens
ccaaagccactaaactctgtaatacagtcattgtactcagaacaagtctgtgctaccagtcgcactctccctggagtccaggaggcagttctgggtacacactcggagggagatggacaaat

SEQ ID NO: 60213 - DNA, 122 bp, Homo sapiens
gccccgtccagcgggcgcgccgcggggcagcccaatggccgcgagggggagggcgaggggcgaagccgaacctcccgccttgggcgccggtgcctgcgattctcgaaaccagcccgactccc

SEQ ID NO: 60214 - DNA, 122 bp, Homo sapiens
tgcctgccctcgctctccccggctctggaatgcaacagtttctggtagcattatggccatcgcaagaactgcaagcaagcagatttttttttttctatcatcaaacgcttttctacctctat

SEQ ID NO: 60215 - DNA, 122 bp, Homo sapiens
gaagaagaattacccagccagagggcacagctaaatgtgtcccaggcaaaggagtacacacgacagaacatggcatggtcaaggaattgcaagtggtcatttacaattgaagttacggtttg

SEQ ID NO: 60216 - DNA, 122 bp, Homo sapiens
ccctaaccacctacacctgtacctgtgacgcgtttagttaagttgcaagtcaagcgcatgcgccatttggggcatgagtttttagcagaggggtagtcagtttcgcattattaataataaaa

SEQ ID NO: 60217 - DNA, 122 bp, Homo sapiens
cactccggtgcagtgagtgtctggggtgagcgtctgcagcaatgaggccccaagggagggcggtggggtggctcgggcactgacctcttcccgtgtttgtccttcccggaaggcgggggcag

SEQ ID NO: 60218 - DNA, 122 bp, Homo sapiens
cataaatttgtcagccttgtttctctcctgaaggagaggtaaaaaagaaagataaccttccgcagcttgggtcagccggacttaaattgaaggggtcgttaaagcaaatatatgaatgtttg

SEQ ID NO: 60219 - DNA, 122 bp, Homo sapiens
cagtagtcacacctgcacccgaatctctgaccgagagctgcaggtggctggccgggagggcggtatccacactcagcgacgctatggaagcatctacacattaaggctggaccccagcgccc

SEQ ID NO: 60220 - DNA, 122 bp, Homo sapiens
aagggtttagattttttgtgggattttttttttcctcatttttcttaaatccaagttggccgttttattagtatgtttcaaatgtgtattaccaatgtgggtgtaaatttttaaaaaatgat

SEQ ID NO: 60221 - DNA, 122 bp, Homo sapiens
gttgaaaggaaatgattaattcccaataagcaatataaggacaccaacatttgggagaatcgcggcagcgtggcagcaagggacacaggaaaccaaactgtgctgttctccctcaggatgga

SEQ ID NO: 60222 - DNA, 122 bp, Homo sapiens
gggaattaactgtacactatttaatccaccagttccggttcattagaaaaatgcagttctcgccggacatggtggctcacacctgtaatcccagcaattctggaggccaaggtgggcagatt

SEQ ID NO: 60223 - DNA, 122 bp, Homo sapiens
ttatccatggtggtaccagcttgtgcgaaaagaataacttcactcatcactttctaatgccgtaatacatggaccacagctccatggttgctccttccaccacacaaacaagaacgccacaa

SEQ ID NO: 60224 - DNA, 122 bp, Homo sapiens
atccgcggggtttccgacccccgcccgcggccggctcccggcggttcaagtttctgcgcccggaggacgcggccttagccaatcccagggctacagggcgcttttaaaatgcaggtacggct

SEQ ID NO: 60225 - DNA, 122 bp, Homo sapiens
tcgtaaaaatcttagcagtgttaccaactctacgatatatatataaaaaaataattaaaacgttacaaagcgacagctatggtacatttgttttgtgtgaagctaaccggacctaacttcct

SEQ ID NO: 60226 - DNA, 122 bp, Homo sapiens
tagcacttagcaagacctagttcatcccattgcctgaactctccaccaggtgcccatgtacgacaggtgcccatggggcggctcaccaggggtgttttgcactccaaattctgggttgtgga

SEQ ID NO: 60227 - DNA, 122 bp, Homo sapiens
ggagaagagggtggacacacactcccccacacacgtgctgggggcagtcacagcaggcagcgcgccggagaagagggtggacacacactcccccacacacgcgctgggggcagtcacagcgg

SEQ ID NO: 60228 - DNA, 122 bp, Homo sapiens
gggattacaggcgtgagccactgctcctggtctcatattcttttggggtggcttcaactccgaccttcgtccccagagaaaatacagctccttatccttagcagcaattggaaacctttcta

SEQ ID NO: 60229 - DNA, 122 bp, Homo sapiens
gggggcccggggcgccccgccgcccgcgccccccacccccgctgcaggcgccctccccgccgccgtcccccgctgcgcccagctccctcgctgtcacccgctcctgctcgcgcgctctgccc

SEQ ID NO: 60230 - DNA, 122 bp, Homo sapiens
gctgctccgcgcgcctgctcccggggctggcaggaggtccggggcccgaggtgcaggtgccgccatcccgagtcgcgccgcacggccggggcccaggcctgctgccgctgctggcaggtgag

SEQ ID NO: 60231 - DNA, 122 bp, Homo sapiens
ggcagtggaaggtatttacttgttgccttacagagtaaagaagaagataaaaaaaacttacgatgtacatatcctgccaaaatactgaatattgtgtgttttggattaaggacattgtctct

SEQ ID NO: 60232 - DNA, 122 bp, Homo sapiens
ctaacgcagcaaattaggaaagatgttcacagatccctaagaggggctccacagtggctacggacatcgttttgttttctatcctcatcaagacaccagcccaagagcagtgaatttcaaag

SEQ ID NO: 60233 - DNA, 122 bp, Homo sapiens
ctcaacaaagtcagagcagggctttccgttcgagaggctccagtaggagggcacagggggcgggaggcagggtggtcagagcgggtccacagcagaacccaaggaaacagacgtcagagtgc

SEQ ID NO: 60234 - DNA, 122 bp, Homo sapiens
accgactctggcacctccagcctgtatcttgacagtaggtcctgggacgctgtggagaaacgagggtcagcccagcccccactgtccctctcttcatttgcccatagcaggggcagcagcat

SEQ ID NO: 60235 - DNA, 122 bp, Homo sapiens
aagcatgacactttggtcagggagctggattagtcgcctatctaccaggctccaagcaaccggacggtcatccaggccccgcttacttctggttccgcagactagaatggatgggagtctga

SEQ ID NO: 60236 - DNA, 122 bp, Homo sapiens
gggagagggagaccgtggggagagggggagggggagggggagagggagaggacgttcttacggttcatggcaagacctcaaccaaatactccatatttctggaaaggggtcagtgccccatg

SEQ ID NO: 60237 - DNA, 122 bp, Homo sapiens
tgctttcgtcttcttccgcttcagccaatagcggagctgttccctgctccccgcccactgcgccccaccttcctgaaggtcgaggcacgctttcccaacatgctctgcagagaaatcaaaga

SEQ ID NO: 60238 - DNA, 122 bp, Homo sapiens
attattagatggtttcaatacaggattagagaatttagcataattcttccccagctttgccgcagagcccctgcattcaaggtattgttacactgagtgagaaagactgttgtgagaaggag

SEQ ID NO: 60239 - DNA, 122 bp, Homo sapiens
aaacgctggagaagacgcagcattccgtttggaacctgaatccctaacgggcaaccggagcgtaccactgcggagccggctgcggggggagttaggggacgcgggcacccgtaggcctcaca

SEQ ID NO: 60240 - DNA, 122 bp, Homo sapiens
tgaagcaagtgaaacttgactgaaatgtactaacaagtgggagtcgacagagaccagtgacgtgtcctgcagtccaggtaggagccaacttccagaaatacctgagctccaagctgcctatt

SEQ ID NO: 60241 - DNA, 122 bp, Homo sapiens
ccctcgggcccaccggtcccaccccggcgatccccgcggcctcaccttggcacgagcgcacgggtactggaagagatgcactttgcagaagtcgtcggccaccgccaccacgcgctcgttgt

SEQ ID NO: 60242 - DNA, 122 bp, Homo sapiens
cccgcccctcacgcgggggccaatgaagtggcgcgccttcgccccatgtgggagaggctgcggtggccaataggcgcgcgcgtcggagggcgaagggccggccagggtgccgcagacgcggg

SEQ ID NO: 60243 - DNA, 122 bp, Homo sapiens
atcccgagctaggcagggagtcggcgccaggctgggtggtgctcggctacgcggagtgggcgagcgagcacgcgcctgcggtggccggcggtcccgcgctggagggcgctggcgacgtcgcg

SEQ ID NO: 60244 - DNA, 122 bp, Homo sapiens
gacaccaggtcagggggccacaagtgtgggtgccgggcagctgcccctcagctgagctgccgggccacccagctcgtgtccctcccctgccaggctgcagctgggatggtcacccgggcagc

SEQ ID NO: 60245 - DNA, 122 bp, Homo sapiens
ttctttacattttcctgtatttttcaatttaaaataattgttggtgttacctgctgcccacgcactcctccgtctgcagggggcgcaccggccgccaccgctcactccttcaggatgatggg

SEQ ID NO: 60246 - DNA, 122 bp, Homo sapiens
ctgcccagccccagctgctaagctcacacctcctgtcaaaaagtcccaggacatgcacgacgagaggagcaagctggtgaatgagtatgcgtgtcgagtgctggaacttctggggatggggc

SEQ ID NO: 60247 - DNA, 122 bp, Homo sapiens
ggccctcgcccggcgggtggcgccaggacttcaggtgggaacgcgcgcttgggccgggggcgcgtggctggcgtggacaccggatcggggcccgccgccctggcccggaccgcgcacggccc

SEQ ID NO: 60248 - DNA, 122 bp, Homo sapiens
gctgtgcaccacgttgaccacgccgtggttggtgatctcccagcaggagagcaggcgcagcgtgtgcgtgctgtggccctggcgcgccgtgaagtaggccagcgccgtgtccgtcacgtggt

SEQ ID NO: 60249 - DNA, 122 bp, Homo sapiens
ggattaggctgttttctgagttcagacccggtgtgctctgctttgcatccgtatttcagacgccctttcctgttgactaggatgattggggtcagggcatctgttaccttctcaagtttgga

SEQ ID NO: 60250 - DNA, 122 bp, Homo sapiens
ctgacttagcatctgctgagccacaattcacatgtgacgctctgcacttcttcccaggtacgtttcagctgcaggctctgtattattttggtgtgttatctgtacacagacactcacggcaa

SEQ ID NO: 60251 - DNA, 122 bp, Homo sapiens
gcgggcgcttccatcctgcccaggcctgtggccaccggcggccacctgcccgcgtctgggcgctcctggaagacccagcagccccgcctcgagttccgatgggctccgcgtgaaggtggggg

SEQ ID NO: 60252 - DNA, 122 bp, Homo sapiens
aagacctggagcctcctgggaaagaaaggaacagggcatgacaggcgcgggcgctgagagcgcgccccagagtgatgggagcctaggaactgggaggaagtttctctggaccttcccgcctg

SEQ ID NO: 60253 - DNA, 122 bp, Homo sapiens
tcttcaaagccacatcatcgcggtcaaagtagtaagacagggacaggtaaacttaggaggcgtagtgctccaggttgatctggcggttgatggcggcctctgagtactggtggtagttctgg

SEQ ID NO: 60254 - DNA, 122 bp, Homo sapiens
aatggttgctgtcagggcccgattgctgctgtcagggcccaagcccactcttgcagtagtcgtggttgaatcagaaattctcctgggtcccttctgtctttggactctcatctctctcacag

SEQ ID NO: 60255 - DNA, 122 bp, Homo sapiens
ccatggctttttaggacaggaagcgctgcggggtagtgcgggcaggcaggcacgtcacaccggacagcgtcgagattgctgctttcggttccccagcgggtggtgaggcagaaagtgcaggg

SEQ ID NO: 60256 - DNA, 122 bp, Homo sapiens
tgcggtatgtggctgagtaaagacagattgacagggtcttggccactgcccttcgcgggccgggcttcctccttctgtaaccttctgtgccggggaggatatttgcatttaagcagaaagtg

SEQ ID NO: 60257 - DNA, 122 bp, Homo sapiens
taggtaagaacatagtggatcctgactgcaaaaatccagctctaccacttactgtggtctcgaacaaagtacttaacttctttgtacctcagtctcctcatctgccagatatggataataag

SEQ ID NO: 60258 - DNA, 122 bp, Homo sapiens
tgtgggcaactgccaggagcctcctcacgctggtcctgtgggcacacagcaagagggcggcgtcagcagggtatcttgacctccagtcctaggctccgtctgtagctacactgagtgcctgg

SEQ ID NO: 60259 - DNA, 122 bp, Homo sapiens
cactgacaactagcttaataagactacagagaactagctttaaaactggggatgtcaggccggtcgcggtggctcatggctgtaatcccggcacttcgggaggccgaggtgggtggatcact

SEQ ID NO: 60260 - DNA, 122 bp, Homo sapiens
gaatcactgggcaggtggaagctgtctcgctgtctccctgttccccaaagcagcttcagccgtgccgcggacactcaccggcaagggacgagccctcctgtttcccccctgcaagcacctgg

SEQ ID NO: 60261 - DNA, 122 bp, Homo sapiens
tggggacaggcagaggtggagagcagagcttccctggagattctcgggcctcatcacccccgtctctcctggcacagatgggaaaacacaggcctcccgggctggtgggaagatccaaaaag

SEQ ID NO: 60262 - DNA, 122 bp, Homo sapiens
ttttaacaaagtctggtaggacatggtggctcatgcctgtaatcccagtaatttgaaggtcgaggtgagaggatctcttgaagccggaggtttgagaccagtctaggcaacataatgagaac

SEQ ID NO: 60263 - DNA, 122 bp, Homo sapiens
tgaagtagataggattattacaagcagagtacaaaggtagatgggatatactaaaaaaggcgcaatatgagctagaagcttgtttccaagagtgagcatgatttgtttcaatcagatggaag

SEQ ID NO: 60264 - DNA, 122 bp, Homo sapiens
agcagctgggatctaagttcatttgcatcagggccactccagctcagttctgctgggaaccgtaccgggatgggtgtgggacggcctcgaattcagatccgggtgctgttttttctaggcag

SEQ ID NO: 60265 - DNA, 122 bp, Homo sapiens
atggacctccaggacccttcaggtgtgctgtgggcagacctgactcaggagtgaggaagccgcctgcatgccaggcttgttgaaaaattcactgggttgccagttagggaggaatccattct

SEQ ID NO: 60266 - DNA, 122 bp, Homo sapiens
gcagacaccgtttgcatgacccaggaaccacaaacacggagcgaaggcctgccgggaccacgctgagcttcactactggcagccaactcacttccgggggtgcactcagcacagcagtggcc

SEQ ID NO: 60267 - DNA, 122 bp, Homo sapiens
tgtcatctcacacttttgcacactctcaccttgcatggctgttggggaggcagagctttgcggggagggaggcttttgtttgcagggaaactgaggcccagagagggtgagcaggcagcttg

SEQ ID NO: 60268 - DNA, 122 bp, Homo sapiens
gactgctgtgtagctgtaatttgtcatgtaattgaagactgagaaaatgttgggtccagtcgtgcttgattggaaattgttgtttctaaatctatatgagaattgacaataagtatttttat

SEQ ID NO: 60269 - DNA, 122 bp, Homo sapiens
gcctttcatgcaaataaagaattcaaaatatccagctctgattgggcaatgtgttagtgacgcatacatgtaaaatagccttcaccttatttcctttctaattggttggctcgtcaaagaac

SEQ ID NO: 60270 - DNA, 122 bp, Homo sapiens
ctccagcagttttgatacagaaagaagcggtcgtgcccaggcctccggggtgctccgtgccggatctggccccatgccaggggcctaactcagcagcagtgactgcaatgtcacaagtgccc

SEQ ID NO: 60271 - DNA, 122 bp, Homo sapiens
agtatggtgtttgtcctgttttctagaaactccttgatagcaggcttaagtctggttcatcgatgtggccctggcatctggcacgtagtaagcactcaacaaataactattgaatgaatact

SEQ ID NO: 60272 - DNA, 122 bp, Homo sapiens
ccgcggcagatgcccggccccggcgggcagcgtggcctgcggccctggcctccgctgcagcgctcgcctggcccggaggcaatgtgagtcaccctcacagccccctccccttcactttccgc

SEQ ID NO: 60273 - DNA, 122 bp, Homo sapiens
gagtgaagtttcactattccctcagctgaagatgttcaaagatctggttcatgtgtaatacggaatatttgcatagtattttacagttttcacagcctttctacttacattgtgtggtcaga

SEQ ID NO: 60274 - DNA, 122 bp, Homo sapiens
cattgggctcccggaggctgacagccagcaccaaggcctgcaggagaccaaagaggcaggcgaagtgcaaagggtgggcagtaagtaggctcagaacagcatggagcccatgcagggcagcc

SEQ ID NO: 60275 - DNA, 122 bp, Homo sapiens
cagtccaagagggggaaattctggcagaatgtcccccaggtcctttccagcatctttagtcggacagaacgttccttcctttgcagaactcagctcactctatgttctggggtgcttccacg

SEQ ID NO: 60276 - DNA, 122 bp, Homo sapiens
aaacctcccttccgaggcgtgcccctcccagccttggggcgggggatccaggaccgcccccgcacctcagtcttggtaatgtaagacttagaaacaggacctttctgttcctcagtttcccc

SEQ ID NO: 60277 - DNA, 122 bp, Homo sapiens
tcttaaaggagacgtacccaggtttctaccgattgctgtctgccagtgtttgtttggagacgtgtcatttcatgtgttcccagaggcacatatccagatgcacatattattacatacagtca

SEQ ID NO: 60278 - DNA, 122 bp, Homo sapiens
cacccggcctacggcagacgtcttcagcctggcccaggtctctggccttctgctgctggacgcggcgctctacggcctcgccacctggtacctggaagctgtgtgcccaggtgggccgtagg

SEQ ID NO: 60279 - DNA, 122 bp, Homo sapiens
taagcacccagggcctctccgctctagactgctcctcctccccagtcctaccccatggtgcgacagcaggttcaacacggcaataccatgtccccaagggtcacaagatctcacttgccatc

SEQ ID NO: 60280 - DNA, 122 bp, Homo sapiens
tccaaattctgaaattcgaaatattaataatagctagctgcgatttggcctgcatcgccccggcgctgctctatgggcgacggggcagcctcccgggctgcgagtttcctgaacgtcacccg

SEQ ID NO: 60281 - DNA, 122 bp, Homo sapiens
tctccgagtgtgtgcgacgcgtgtgtgtgtggtgggttgtctgtgtgcatatgtcctgcccgtgtatatgcacccacaccatgtgcccgtgcacaccagtgactacgcagtcccccctttct

SEQ ID NO: 60282 - DNA, 122 bp, Homo sapiens
tgggattactggcgtgagccaccatgcctgggtgacttgtgagtttttgagacaaagtctcgctctgtcacccaggctggagtgcagtggtgcgatctcggctcactgcaagctccacctcc

SEQ ID NO: 60283 - DNA, 122 bp, Homo sapiens
aatttataggaaaaacgagcacagaacatgttatactaaatcaatcaacaaaatccagaccgtaaactttacaggacaattgcttcagcctcttcaaaattcaatttcaataggtagagaga

SEQ ID NO: 60284 - DNA, 122 bp, Homo sapiens
gattttccttggccagctgtgaagtcctcactgcggtgttgcctgctgccgggctcagggcggcgtcatctccccacgggcctctaagccctgttgcccccgcactctgtgtgtccacaggg

SEQ ID NO: 60285 - DNA, 122 bp, Homo sapiens
ggaaggaggatttctgcctccagaccgcaacatcgaaattcgacttgagtttccagcgttcgcgcttgaaaatgcaacatcaactcttcctgaatttccaggctgccaacctgcctgccctg

SEQ ID NO: 60286 - DNA, 122 bp, Homo sapiens
tgactctcacaaagtaagcaggaaacaaatcaagagaagggccatcctgcccacttggggcggctgcatgagaaagagccatttggatttctcagcacccagagggtgcagtccccagagga

SEQ ID NO: 60287 - DNA, 122 bp, Homo sapiens
aaggcctggccacactgcgtgcaaggaaagggcctctcgccagtgtggatgcgctggtggcgcacgaggcgcgagggctgcgcgaaggccacgccgcagtcagcgcacttgaaaggcctctg

SEQ ID NO: 60288 - DNA, 122 bp, Homo sapiens
ccacagcatcacagggcagagactgtgtcaggcttgtttactgctccgcacacagtgaggcgcctatagcagacatttggtaaatatttattgactaaagttgagttgaatgggatgatgtc

SEQ ID NO: 60289 - DNA, 122 bp, Homo sapiens
gtaggcggcggagcgtacttaagcttcgacgcaggaggcggggctgctcagtcctccaggcgtcggtactcagcggtgttggaacttcgttgcttgcttgcctgtgcgcgcgtgcgcggaca

SEQ ID NO: 60290 - DNA, 122 bp, Homo sapiens
tttcgccctcagggcagcccggatgacagctaatgcgcctgggcaaggcgttctcaactgcgattcccggccttaaatgtcctctcaacttttaaaagttatttattcaaagtgcatttgct

SEQ ID NO: 60291 - DNA, 122 bp, Homo sapiens
tagatatgtgataatataatgattgattagtttcatggctcccaagattgttgcccataacgtggtggttcatttcgtttgctccatgaaaatgatagtgcgtcttattttgcacctgagat

SEQ ID NO: 60292 - DNA, 122 bp, Homo sapiens
gcccctgcagagcccaccagcacccctctggagtcgttcccaaagcaggctctgcatcctcggcaaaaaagcacctgtgaccacccggacagaaatccagtctgctgagacctctgcacttc

SEQ ID NO: 60293 - DNA, 122 bp, Homo sapiens
gctacataatcaacttgactcttatttacaaaggacttcaaagcttagtagtgacttaagcgctattagagaatgtttcggtgcatatttgagtatcagttatgattttcaatggaaataaa

SEQ ID NO: 60294 - DNA, 122 bp, Homo sapiens
gagactaccttaggctgattgttttccttgccttctccaaaagagtacacatcacctctccgaggcggctcacctctggggtctgaagttgagccacgtggaggaacttgctcaatcggctt

SEQ ID NO: 60295 - DNA, 122 bp, Homo sapiens
tttccttagccccgcccactccggcccctgagaccccgagggtgggcctggcggagacaccgccaactgaactccagctgagtgctctcgaggccgaaccagcgggcctggcggtctgtgag

SEQ ID NO: 60296 - DNA, 122 bp, Homo sapiens
gaacgccccgctcccaggatgcccgggtagggtcccctgggcctgaggaaccagagcagacggagcgggagcctggggaggaggtgggagccgtggaattcccgtgcaggtttgtctcgtgg

SEQ ID NO: 60297 - DNA, 122 bp, Homo sapiens
gcccaggcctggtaggatgagtgcatgaatggagcaaccacagtggcaggcatgaggctccgtaaggggccagcagcactgacttccccacaccaaggcagatccagctgctgccacctctg

SEQ ID NO: 60298 - DNA, 122 bp, Homo sapiens
ctttcagaagtagagcagttccgtatggtgacaaggtctagggtgtggctgtgggagtagcgtccttgggattgaagaaatgaaaaagtgaacaatccatgaaagcatagggtgttgaatga

SEQ ID NO: 60299 - DNA, 122 bp, Homo sapiens
cgcccagattccatgttccggaggtcttagagttgagtatgcgccaaccctctaatcttccggaggaggaaacccaagctcaggaaggtcacgtggtagccgtcgggatgagactggggcct

SEQ ID NO: 60300 - DNA, 122 bp, Homo sapiens
gccggcaggtcccaggagggtcccgcaagaaacgctgccccctgctcctccctgggtgctcgggctcgcagaacgtctcttgcagaatttcccggtccccaggcgtccctgccgcggcgctg

SEQ ID NO: 60301 - DNA, 122 bp, Homo sapiens
ggagtcttgcccggcaggatagagaggagcggctctgcccctgccctggaacaagagccccggacgtgggtgcagagcccctcacatgaggaccgccccatcctgcctctgctgaagggcag

SEQ ID NO: 60302 - DNA, 122 bp, Homo sapiens
cgttcgcgccctggaattgggatcttctcacgtgccctgtgggttttgatctcaggtgttcgtgggcctcctcccacgctccgtttcgctggccacgtgggtggacggctccctctgacctt

SEQ ID NO: 60303 - DNA, 122 bp, Homo sapiens
ttagtccaaataaatctcaaagtctagtgtgggcaaacataattacagtttatccgtacacgtgcacgcacacacaaatcctctacggaaaattatctttctcaccactcacccgaatacaa

SEQ ID NO: 60304 - DNA, 122 bp, Homo sapiens
gcaaagggtcacccagcgagcccccagcagcagatccttcccttttgctcctcctgatagcgccaatcttcgccgccactgccacactgcgcgcccgctatccactcaccgcacagcgagaa

SEQ ID NO: 60305 - DNA, 122 bp, Homo sapiens
cccttttcctcaaaaataaaaaccaaaaacaaatcacaggagcatgagaataaccctggccgggctggagagggtgacagcaacatgcaagaaggtacagacatgctgatgtcatgaggtgc

SEQ ID NO: 60306 - DNA, 122 bp, Homo sapiens
ctagaacaaaagagacttgttccaaatgagatgacgcatgtgaagcgcttacccagtgctcggcaaggggaagcactctctaaacgttagcaaataccatggtaggacacaaggcccctgac

SEQ ID NO: 60307 - DNA, 122 bp, Homo sapiens
taggagcagctggatccattttccagagcgtcaagttgaggatgagaaagtctcgagggccgggcagctgtgcgcgcagaacccccgccccatctgcttttagatttcccgggtgcggctgg

SEQ ID NO: 60308 - DNA, 122 bp, Homo sapiens
tgcctggtcctgctggcccccttttctcaggcccccctcctctgaaacgggatgtgaacacgtgggccacagccctaaggactcctgacagaccacatagcccacaactggccctgctcatg

SEQ ID NO: 60309 - DNA, 122 bp, Homo sapiens
aggttttttaccaaatcaaaatttcaaccattgactaacacaggggttgaaggaagaggacggggaagttcagtgatggatgggaacaacagtcttagatgatagggataattaagagggca

SEQ ID NO: 60310 - DNA, 122 bp, Homo sapiens
gcccaagaggcccatctgactctctgagaaatcaaagcaaactcactcggccaagcctcccgcagatcttccctaggcaaggcccatggcagccccggcccgggaggcatcacacagctcct

SEQ ID NO: 60311 - DNA, 122 bp, Homo sapiens
cgctggatccatcaggtccagtagcactgcccatttctcctgctccaaggcatctgccctcgaaagcccccaggccacacccgaggacaccacccagggttctaggacacctcgagggcgga

SEQ ID NO: 60312 - DNA, 122 bp, Homo sapiens
gcatacatttcaatgatagattctgagctccctcccaacactaccaaaccagaatcttgacgtggctggagcctgggaatctacagtaaaaaaagaaaaaaaaattatacatgccatttcga

SEQ ID NO: 60313 - DNA, 122 bp, Homo sapiens
ggcagcagaagctcaagcactcagagggaacaagaaaccgtgcaaggaaactgtttatttcgaaaggattttgcaataaacatagtgaataggctccaggcagctgctttattcttctccct

SEQ ID NO: 60314 - DNA, 122 bp, Homo sapiens
tgctggggggcttcatcttcatcgccggcggcagcttctcacgggacaacggaggggatgcggcctccaatcttctttataggtatgacccccgctgtaaacagtggatcaaggtgagatta

SEQ ID NO: 60315 - DNA, 122 bp, Homo sapiens
ccctgccctggtcagagctagtccccttggcaaggccgtcccggccctggcctctactgccgcgttgctttcctgcacccctgccctggcccacgttgctgctccgtccttagctgttgcct

SEQ ID NO: 60316 - DNA, 122 bp, Homo sapiens
aaggtgcttagtacatctgtgaagttctatggaaatgctaaagcgcattctataggggcacggtagaatagtagaaaaagtgataaatgtggaaacagaagacctaagctgaagtcttcact

SEQ ID NO: 60317 - DNA, 122 bp, Homo sapiens
tatcatccaaaaacacacctttgtgacctagagattgaagatctcctcgtcccacctaaacgtgttaagcttaaaataaaattgtgcaggtttccaaggtccagatgttcacagacactttg

SEQ ID NO: 60318 - DNA, 122 bp, Homo sapiens
tctctccgcctgggatgcgccagggcgctggagacgcgggaccgtcctggaaagcgcccacgtccctggagaggggggagtgtctgctggttttccgcttgctttcctaccccctgcgtgag

SEQ ID NO: 60319 - DNA, 122 bp, Homo sapiens
gcgaaggcagcctcctcgacccaagcctgaagcctgactaacccacaccgccctccccggcgcacccagtgcgcggttacctgctaatgcaggcgccgctccgccgcacttctccgcgcgcc

SEQ ID NO: 60320 - DNA, 122 bp, Homo sapiens
ggccgagatgcggcagcgcattgccgagctggagatccaggtgatcggcggggccggggtcggggggcgggggcgggggcagggcccggggcaggagcggggccggaccccaggcccagcat

SEQ ID NO: 60321 - DNA, 122 bp, Homo sapiens
ccctgctttatttttttcctttacacttactatcatttcacaaattttacttattacttacggttggtatctcctcattggaatgtaagctctctgaggcggcaaaattttgtctatttgtt

SEQ ID NO: 60322 - DNA, 122 bp, Homo sapiens
tgcctgtgcgggaccatgggtgtgcgggttccgttcggggtgtgcctgggtgtgggactccgtctcggggcggcccgcggcctccgtggctgcgcgagagagggtgtccgtcctccctccct

SEQ ID NO: 60323 - DNA, 122 bp, Homo sapiens
actgagatgtgtatcggcttgggtatggaaacatccacgtgcccatatgggcacagtgtgcgggtaggcacacaggctcagacacatacatgcatgcatgtgctcacagacactggcacacc

SEQ ID NO: 60324 - DNA, 122 bp, Homo sapiens
cctcagcttgtggctatttgttggctttacctcctctgatgaactgtatgctcctgaggacgatgaccatgccttatccttctgtgtgtccttcaaaatagccagattgtgtttaatgcatt

SEQ ID NO: 60325 - DNA, 122 bp, Homo sapiens
tccccagcacaccctcccctggagcctccggccccagcccccgcctgcacccccgccccgcggccgagttggcagccgctctcgcagccactttcccgcctcattggctcccaaatgtattt

SEQ ID NO: 60326 - DNA, 122 bp, Homo sapiens
aggttcttctttttaaataggagttaaaccctctagctagaaagccgattggcctgcgctcgagcgaggctgccttgtgattggttgacaacaaacccgacgccttgagtcgcgtttaaggg

SEQ ID NO: 60327 - DNA, 122 bp, Homo sapiens
ccttggacttgatcctgttggcgatagccttgggagtaagaaaatccgacttccccatggcgaccacggcagcgatcactttctggaccccagtactcagccagccggaaacggaaccgggc

SEQ ID NO: 60328 - DNA, 122 bp, Homo sapiens
agtgccctggaattccgccccctcgtgattcacctccctgtctgtgccccgtctgtggcgcgcagctctgtcagtcaagtggactctaggaagggattggcccctagagatccgcttgctgc

SEQ ID NO: 60329 - DNA, 122 bp, Homo sapiens
tagcactcgtgacgtcaggtccaaatgagaaattgactggcactccgggccaatgggaggcggcgagagcggccgcgattagcataatagtatagaaacaaggaaacttttcggagctgtca

SEQ ID NO: 60330 - DNA, 122 bp, Homo sapiens
ctacatcaagcagttccaagaggccagggaatattaaagagactgggatgaggtggaggacgctgcctctggttctggagcacacacgtgctgcactgacgtgccgactggcgccgagacct

SEQ ID NO: 60331 - DNA, 122 bp, Homo sapiens
gagagacaagaggagatcaacctttcccaaaagctagtttatgagctcaggggttcattacgttggcacacgtagagggacatgagatgaagtttccttaggaataattattgtatttattt

SEQ ID NO: 60332 - DNA, 122 bp, Homo sapiens
caaaccaaacccaagccgagggatgactgaatgactggacctctgcctcccacctgcgtgcggttactctgcgagtccacaccttccctggcagcctcagttccacccaccaccttcagcct

SEQ ID NO: 60333 - DNA, 122 bp, Homo sapiens
ttagggcgccaccccctaatgccctgagtgacagaatatgtgctcagcggctgggctgaacgtagaaagagtgaaatccaagctgcagggttctcagggaagggcttcctccctgaacggac

SEQ ID NO: 60334 - DNA, 122 bp, Homo sapiens
cacacacacacacacaatgacaatttctgggagcctggatagggctgaatgtagtagccacgcagggcagggcaggtctatttgggcagagaaggccccatgggaggcagggatggttattt

SEQ ID NO: 60335 - DNA, 122 bp, Homo sapiens
attcacatcctcagaaaaaggcacgtgtccgtatccatctgcggatggatgaacagagcccggccccgggacagagcagcctggctcacccgaaccctcagcccgcaattctgcgtgggagt

SEQ ID NO: 60336 - DNA, 122 bp, Homo sapiens
aactgaatcctgcaattagattaattaaacaggctgccgcaaggcacccccacctctccccgcttgctcatctcgccatctctccgtccccccaccccctttcccagggtaccttctcgctc

SEQ ID NO: 60337 - DNA, 122 bp, Homo sapiens
ttatttttggttttgttttttacatgatgtggggaggtgttggcttccggagttaaagtccgtagtgctgaattagagggaggaatatggagaaaaatgttttcaacacaatggaactttca

SEQ ID NO: 60338 - DNA, 122 bp, Homo sapiens
tgctccgccaccaccagcactttgaggagtggcacagccgctggctggaggacaatgtgacggtggaggcggctagcctggtgcaggactggctgatgggtgaggaggacgaggacatggta

SEQ ID NO: 60339 - DNA, 122 bp, Homo sapiens
ggggagaggtctcattgcactggcttctggggtggctgatggtctttccctggctggcaccggagctactggccctccagcccccgtgggcaggaggaggcagcctcagccccacgagattc

SEQ ID NO: 60340 - DNA, 122 bp, Homo sapiens
tgctcgggtgccttttctttttgtcctggaaggaatctatcagtacaggaaatgtcttcacgatccccgtccccgactcttcacagagcccaccctgtgcccctttctgacccggtccggga

SEQ ID NO: 60341 - DNA, 122 bp, Homo sapiens
aggctgtggggcctcgtgccctctgccccccgacgccgtgagaggccggcagccaattcgcggcattgtctgaaacccctgcgtggtgccattgccgccgtctttcatcccttttggcaaag

SEQ ID NO: 60342 - DNA, 122 bp, Homo sapiens
tgtagctcccagctaggcaggggccaggctgcaaggggccctgcctcagctcctgcaggccgcagaggtaccgactggtcaacagaagcccgggggtcgaaaagggacctccccatgcctgc

SEQ ID NO: 60343 - DNA, 122 bp, Homo sapiens
ataaagtttacacgaagcagtgcatcattttcatcaaaagaatcaggttctgacactatccgtgtgaccttggacaagtcacttaacctccttgagcctaggcttctttataataagatgca

SEQ ID NO: 60344 - DNA, 122 bp, Homo sapiens
caggcgctgcgtcccggcgcgttggcagttggcgacccccctcgaatcccccctctgctgcgggctccccgtggcctttggaggctcggtgagtcggctccaaatgttttccatatttgttc

SEQ ID NO: 60345 - DNA, 122 bp, Homo sapiens
gaggccaaccagcgcagaaagggcctggcagccattactgtagcgctggcggctctgtcacgcccctgaagccgctggcccgcgggtgtgttcagctcaggagcggccctgcgtgtttttcc

SEQ ID NO: 60346 - DNA, 122 bp, Homo sapiens
gggctgcctcctccctcctcctccccgggaggcatcacttcgtcccgacccggaggaggacgcgagccccttgcgggcggtcatcacagcccagcctcggggctgccacagcgcgttgcgcc

SEQ ID NO: 60347 - DNA, 122 bp, Homo sapiens
gctgtttacactttacttccagtagtccatgaacttcaaacattaactgatcccttactacgtagcagagtgtgagccagaaattgtgaggaatgcaagagcgagcattcaaggtttcagtc

SEQ ID NO: 60348 - DNA, 122 bp, Homo sapiens
gccagggtgcagggaggtgggcagttttgcccttcaggttccgcgtttcctggggtcgagcgagagccgacggcgggcctcggaggggctgagcgaaggaatgccagattctggcgtggaga

SEQ ID NO: 60349 - DNA, 122 bp, Homo sapiens
tacatacccatctttgaacccagatcctcttacataaaaaggatttacaactcagccaggcgtggtggctcacacctgtaatcccagcacttttgggaggctgaggtgggtggatcacctga

SEQ ID NO: 60350 - DNA, 122 bp, Homo sapiens
ccagggcacggcctggagaggagcccatggctgacgcgagttagtgggtcagtggggagccggcgcggctggagcagaggccctaagcgggagagaggcagtgcatgaaggtggaaagaggg

SEQ ID NO: 60351 - DNA, 122 bp, Homo sapiens
ccggggctatataatagagataatgaccacaaactcaagataaattcttatgcgcccagccggtcaattcttttttatttaagagagtgagcctgaagggtgagcctcatcccctcccctcc

SEQ ID NO: 60352 - DNA, 122 bp, Homo sapiens
ctgttatgggttaaaatagcttttaaaaaatgtttcggagaccgcagtctattgtggccgcggcccctgccaaagaaaacgcaagcttgcttattttctccatggggcgcaacagtgcctat

SEQ ID NO: 60353 - DNA, 122 bp, Homo sapiens
cggggcccctcctgtggcgacccggctgctgcccctgcgctaggcgccgggcggtggatgcggcctggactttgggccaccaccgactcgggggagcccccttccgcagctgcctgccgact

SEQ ID NO: 60354 - DNA, 122 bp, Homo sapiens
ccttatcacagggtaaggggtccaccagacccggacaagcgctcctagctggaggagggtcgcgttcctgccggatgtggaaaggaagtccaggaatccccttcctgtctttctggtttctc

SEQ ID NO: 60355 - DNA, 122 bp, Homo sapiens
cgccggcgtgaggtcctcacacccaggcggctcagtggaggcgcagcagcccaaggagcgcggcccccagcgcccgcgcccatcctggagaactgcatctgcgcaggcccagagcgtcctcc

SEQ ID NO: 60356 - DNA, 122 bp, Homo sapiens
aggaggtgcataaagaacatctgggaataacatccccaccatgagatggtcttacgttctcggaggaaatctacaatcatcttaggggtagcaaaagaagccaggatcatatcaatgcagga

SEQ ID NO: 60357 - DNA, 122 bp, Homo sapiens
taacaattttacatttaagattttctactcattttctgagtttctacagtcatgctcctgcggaaaatattcttttgtcagtgccttgaagaaataacctaggatctgagtttattcacaac

SEQ ID NO: 60358 - DNA, 122 bp, Homo sapiens
tctggctggcagggggctcaccggaaacgctgggtctgatggtgtagggggcctgcgtagcgccgggcggatgactggtagaggtgggtgagcagcgcctgccccgtcttctgacttgggtt

SEQ ID NO: 60359 - DNA, 122 bp, Homo sapiens
cgtcctgaagtctcgcgtgctgcagccagattgcaggggatcgcggatggagagacaagtcggggggactttacccccaggatggggaaaagtcacccacaattcaagcaaagatgaccctt

SEQ ID NO: 60360 - DNA, 122 bp, Homo sapiens
cagcagctcccagagcagccagcgccatgtccagtggcctggggcctgccccggcgcgggcgaggagcagccagcgtgctcccagccgtccctgcccctcacactgccatcccccagccacc

SEQ ID NO: 60361 - DNA, 122 bp, Homo sapiens
ctgccacttaagaatgccggcaacatcccaaaagcaccagagtcctggggaggtggggggcggggctggttactgcatttggcaaataagcggtcgtgactgaccacagaatacaaaatgtg

SEQ ID NO: 60362 - DNA, 122 bp, Homo sapiens
agcgatccacctgcctcagcttcccaaagtgctgggcttatcggtgtgagccaccacacccggcagagtttgcctctgcttaataggaagttttggttatagcctattattatacctgaaga

SEQ ID NO: 60363 - DNA, 122 bp, Homo sapiens
agtgatccacccaccttggcttcccaaagtgctgggattacaggtgtgagccactgtgcccggcctgtgatatattcttaatatggcagcagagagaagctgtcagattggagatgctgatg

SEQ ID NO: 60364 - DNA, 122 bp, Homo sapiens
ggcctgtttttcatctatttgcaacttcatttcctggtggcctataatggatctactcttcggactctcctttgaactggttgtaacatcttactggttccctcattacctagtaagctaaa

SEQ ID NO: 60365 - DNA, 122 bp, Homo sapiens
ctggggcttgcgggctggctggccgctccgagtgcggggaccgccgagcccacgcccacccggaactcgtgctggcctgcaagtgccgcccacagccccggttcccacctgcgcctctccct

SEQ ID NO: 60366 - DNA, 122 bp, Homo sapiens
cttggatgtgaaactagggcactgggttgctcttaggtaatacaaggagatgaaatgcagcgatgcgatgatgagtgaagtagagcctgacctggtattgccattgcttcactgttggcttt

SEQ ID NO: 60367 - DNA, 122 bp, Homo sapiens
cggctgagatctgctcacctagagatgctgctgggccagcccccagttggagcctccaaacgttaattctgacaaattgctggaggctgagggtggaccagcctccaagtgagactgctggg

SEQ ID NO: 60368 - DNA, 122 bp, Homo sapiens
ccagcccggccccaggccggccgcatggatgctggccccgtgcacggcagccccaggccacgcaggctcccggtcccttcctagatcatgccagccagccagggcggcaggaagaggcccac

SEQ ID NO: 60369 - DNA, 122 bp, Homo sapiens
tcagacaagcttaactgttggctttgagaaccctacagttagcttcaccataaataacaacggctcataataatctaaaccccactgacatatataatctttacataaagatatgtatatct

SEQ ID NO: 60370 - DNA, 122 bp, Homo sapiens
cgctatgggcaccagcccctctgagctgtgtccagcccctacccctatgccctgttcttccggacaacaagtccaggcctgacctggttctgcccctacctggaaagagggaagacacagaa

SEQ ID NO: 60371 - DNA, 122 bp, Homo sapiens
gctggaaccttgcccagcacaggtcagttcgtctttctctgctcttctttggctcggcttcgaagtccattcatgagcaaggaaaagtggaggcagcgagccacctgcagacgcaatgcagt

SEQ ID NO: 60372 - DNA, 122 bp, Homo sapiens
cgagttctctttccagtgccgagcggattccttccaaatgtgcagccttcacgacgtaggcgagccccacctgcaggaagttcaggttccagagaagtgagatgcggagggcagtctgaaca

SEQ ID NO: 60373 - DNA, 122 bp, Homo sapiens
acaccttgtccaccgcggcccgctcctgctccaagaagtccttatagttgttccagtcctcgatgctccgccccagctcggtcaccgcctggaactccccaacgtcgctgtcgaagcgcccg

SEQ ID NO: 60374 - DNA, 122 bp, Homo sapiens
tgcattgggcaccggggcattttaatgacctctcccctcctgcagagctttacagggccgcggccccgccttcatgagaacactcccacacactgggtcccagcctcggccccttgccttcc

SEQ ID NO: 60375 - DNA, 122 bp, Homo sapiens
tctaaaaaccacagagctactccagcagcagcccctgactctgctgatttgcatcatggccgctttatccagcaaggggataagagaggcctgggaggaacctgctcagcctgggtcttggg

SEQ ID NO: 60376 - DNA, 122 bp, Homo sapiens
cgttgtcactcatggctggcatggaacaaagttaaatgtcttcagcgtaataaatatctccgactttgtcatcatacatgtacatttccaccatgtgcagctgaaaagtgaaaatattttta

SEQ ID NO: 60377 - DNA, 122 bp, Homo sapiens
atcctgcacaaggaatgagaggagcagagtaactaagaatctggcattggtgagtgggatcgattgtaccaggtgcgctgttcacaggcgcgtcagtccacgtactgcaacgctaggaaaca

SEQ ID NO: 60378 - DNA, 122 bp, Homo sapiens
gagatgtggagggagaggcgcaggtgggaacctgggctgcgccaggcgcttgcgggccagcgcgagttccgggtgggcgtgggctcggcggcccggcactcggagccgcgccgcacctggca

SEQ ID NO: 60379 - DNA, 122 bp, Homo sapiens
cctgtgcgcagccgggattgtctcttttctttctttttggctaggtggtgtagctttggtcgcggcagctctgcggagtgcaggagccgcggagagaaaggggtgggggaagggggtgggga

SEQ ID NO: 60380 - DNA, 122 bp, Homo sapiens
tggggagacgccggccagcgccaaaagccttggcgggtgtgagcctgagtccagcggagacggtgggtgctgggccgggtggaggtgccgggggctgtgtctcttggaagagaggctgctaa

SEQ ID NO: 60381 - DNA, 122 bp, Homo sapiens
atagctaagatgcttttggagttacgggttcattacactcctgcctaattaaaacccagccgatgctctggttatttcctcttttctcccttatacaattccacccacaaagtccttctcag

SEQ ID NO: 60382 - DNA, 122 bp, Homo sapiens
agtggctcaccaacagatggcaaattcaaggactcagtattgtcttccggattctaatatcgttagtttggctgtggcaagtgactcaaatgtgtgggtttgaatttccttatctaatacgt

SEQ ID NO: 60383 - DNA, 122 bp, Homo sapiens
ataataagagcaggaggaatcttttggaggtaatggatatgtttatatcatagtttgtggcgacggtttgacaggtgtacacttatttccaaactcatcaagttagatatgttaaatacata

SEQ ID NO: 60384 - DNA, 122 bp, Homo sapiens
tacaattaacttcattacagaccacactcggatttaacctgttgggtatgcagtcatgtgcgtgtgtgtgagtgtgtgtgtagttctatgaaatgttgtcacctgtatagttcccacccacc

SEQ ID NO: 60385 - DNA, 122 bp, Homo sapiens
gcggacggctgtggtgttttggcgcatgggcggagccgtagttacggtcgactggggcgtcgtccctagcccgggagccgggtctctggagtcgcggcccggggttcacgatgtccgacgag

SEQ ID NO: 60386 - DNA, 122 bp, Homo sapiens
ggaggaaaccagcgggcggggacctagcagcgcgggcctcccggccccgcccccagccggcgctggcaggactcggtccgccacccctcagggcttcgccttccgctcccccagccactgta

SEQ ID NO: 60387 - DNA, 122 bp, Homo sapiens
ttttagttacagatactgagggtgctcaaacatccatgcagtttgctgttcaccgtaacacgcaacccagaatggccgtttcggtccctcgtcggttacctgaaaaccagtcttactgagct

SEQ ID NO: 60388 - DNA, 122 bp, Homo sapiens
agtgagggtgggtgtgttggggagtgcgtccaagtggacagtgccgtacagtaatgtctacggggagttccaggagagctcggctactcctgcgcaggataacctctcccccaccacccgag

SEQ ID NO: 60389 - DNA, 122 bp, Homo sapiens
atcccccccgccagcttcttaccctggaatagtccaggctggtcatagccgggttggagtcgacatgggccctgacgagggcactgatcagactcaccgggggcgaagggggagagggctcc

SEQ ID NO: 60390 - DNA, 122 bp, Homo sapiens
gctgggattacaggcgtgagccactgcgcccggctaggagaatttcttgaacccgggaggcggaggttgcagtaagccgagatcacaccactgcactccagcctgggttacagagcgagact

SEQ ID NO: 60391 - DNA, 122 bp, Homo sapiens
gccccaccctcctggggccgaggaggcgggggccagggtctcagccaatcgtgggccacccgtttggccaatcgcgcagggcgcggctccacgcccggccccattgaggaagcgcgtacgcg

SEQ ID NO: 60392 - DNA, 122 bp, Homo sapiens
cgtaaggtaaagatgtggcttcttcgcaggctgccagggtgaggccgcatcaggaggctacgtctgcggagccatcccaggagcaatgggcagcgtctgtgggtctagtggcgaggtctcta

SEQ ID NO: 60393 - DNA, 122 bp, Homo sapiens
gatgggtggggtgggacccacttccaacttgtctcttggacaaagtctatacttctcagccggatattcaaggctttccacatctaggtatacaagcgttctcctatcctcttttcctatca

SEQ ID NO: 60394 - DNA, 122 bp, Homo sapiens
gcccgaaagccaagccccacccctttccctagtagggcgagagcaggcccagaagccgggcgtcaggtacgagccccgccctatgcgatgacgcaaggagcgaaaaaatgggtctggcgagc

SEQ ID NO: 60395 - DNA, 122 bp, Homo sapiens
gcagtctcctcccaggtggggagcgtggagcctgtcactgcagcctggcggcctgagcgccgagcctggggctggggccgcggtgctgaggacgcaaatgtggtgagcacgcgatgcgggtg

SEQ ID NO: 60396 - DNA, 122 bp, Homo sapiens
gagagaggaaatagctgtcagccccagtgcatgtgtgtttaggggtggggttgggggaggcggggacagctggagagtgagttgccacacagatgttcaaatatcatcaatttccatcaatg

SEQ ID NO: 60397 - DNA, 122 bp, Homo sapiens
ttcttgtgagtggatgaactgaggaaggtgcctaccaaaggtagttaaatcaggaaagcacgaacccaggacttgtgggaagtagagccaaggatcattccttaatgccccgcatgctgtca

SEQ ID NO: 60398 - DNA, 122 bp, Homo sapiens
aatgaggtctgcccagttctcaggccagggcagctgctctaatattttcatcccatagtacgacctcatactcaatcacaaagcaaacctttggcccggcacagtggctcacgcttgtaatc

SEQ ID NO: 60399 - DNA, 122 bp, Homo sapiens
cattatcctctgcaaagctttttttctgctttcctcctttccccaaccttcagttttcaccgaggacccacataggtatttctccagctcacatctatccactgagcttccaatgcatgtca

SEQ ID NO: 60400 - DNA, 122 bp, Homo sapiens
actgcgccctgaggagaacagcggagaaggtccaccgagcctggcgaaaggtccgctgagcgggctgtcgtccggagccactccgggctgcggagcacccagtggagaccgcgcctggctca

SEQ ID NO: 60401 - DNA, 122 bp, Homo sapiens
gacagacacccctgacctgtttaccctgatcctctgctctcaggattaatcacaacttgtcgaagggggtggcttccagtggggtggaccgctctgtcaatgccagcgtgtgtctagcatct

SEQ ID NO: 60402 - DNA, 122 bp, Homo sapiens
cccgctccagggtggcatttagagttccaggcaggggccgctatctttagatcctggggacgcccccagcagctgcctctccttatatggtcgggagagcagttgagaggaagagagaacat

SEQ ID NO: 60403 - DNA, 122 bp, Homo sapiens
aaaaagcgaggtagattttgaggtcagcatgtccaagtatctatattcctgcaaacatgtcgagcagcctctactttacaggactctgtggtgacgatggtaaatcgctatcatgccaacat

SEQ ID NO: 60404 - DNA, 122 bp, Homo sapiens
cacgggggagcagggcgccataccccagaaagaaacctctgtgcctgggagtgagggactcgctgagtaaagtgaggtcgaagagggtggagaggggtagggtcccagtcaccactgtcctg

SEQ ID NO: 60405 - DNA, 122 bp, Homo sapiens
aatacccacatgtcaataataaatcaaactattcttagagtcttgctattattctctcttcggtcatttgcaccttataaggaaggaagttcttttttattttggtaattaaatgcccatgg

SEQ ID NO: 60406 - DNA, 122 bp, Homo sapiens
ctagttattaagctaaagaagagatactgccacttagcctttaggctgctccttcaaaatcgtaacagctgtttaaaataataatcataatcatgatgcagtaagttataaagcaaaagatg

SEQ ID NO: 60407 - DNA, 122 bp, Homo sapiens
tttttgttcacggttgaactccccatgcccagtacctgggatgcgtgggtgctgtctaagcgctggctgaattcacaggggcatggacggatggctgagcctttctctccccattctgcacc

SEQ ID NO: 60408 - DNA, 122 bp, Homo sapiens
caagagaatggcacagtgctactaagttcttggctttcagaaaccactgcctgacttccccgccctccatttcaactatggggaaataaggttgttttgttctgagttaaatggacattgta

SEQ ID NO: 60409 - DNA, 122 bp, Homo sapiens
caactacttagaaatcactctcggcacatctgcacccgacaaccggcctgtggccttctccgggggtgcaagccacagacaaagttgaaagaaggcgttctcctccggtgcccaatctcgat

SEQ ID NO: 60410 - DNA, 122 bp, Homo sapiens
tagtgcagtgcagtctttcttatccattctctttttacaagcaagttgccaacacttgtccggtaacactaaagtacacttagaattatgcatttcttcaagggaagacaggtgagccatgc

SEQ ID NO: 60411 - DNA, 122 bp, Homo sapiens
gggtcagacgagagctccgtgaggatcccgcaccttcactaacaccggcaccgttctccccgtggggacgccacacctccgctaccaccagcaccgttcacaccatgaggacaccgcacctc

SEQ ID NO: 60412 - DNA, 122 bp, Homo sapiens
ccccgcacctcgtcctccaggagcccgaacacctccaccgcgcaagttgccatttccgaacgcttccagcaaaccggacgcgctcgcccccgcccagggcaggcaactgtggaggaggagga

SEQ ID NO: 60413 - DNA, 122 bp, Homo sapiens
gagcagcacagatactcctggcaccgagggcttgtccgtggagaggggtggggcggacagcgcatacctgcctagccttacagtgtgggtatgtgccaacggccctctctcactcaggtata

SEQ ID NO: 60414 - DNA, 122 bp, Homo sapiens
gtcctcattccattatttgtactcaaaagagataactttgagggatcaggaaggaaaacacgaaccattcctcactacttgctgaattactcaaagtcactatgggagactggaataacagt

SEQ ID NO: 60415 - DNA, 122 bp, Homo sapiens
tagtgttagttttgtcttaccattaaggtgtgaactttcaggatctcagttgaatgtgtccggtatttagtgaggcctctgtactctggctggataaaatacaaatgtcttctagctccctg

SEQ ID NO: 60416 - DNA, 122 bp, Homo sapiens
cctagaccctagcagagcagatttgggctgtggaggcctggactagggcctccaccatgccgcttggtggctgtgtgttcatagactggtagttctcctaaatcttgtttccctcatctata

SEQ ID NO: 60417 - DNA, 122 bp, Homo sapiens
ctcttcctgttcctcgagatggtgaccccagaggaggacttgcattgggcccactgtccccgggccagtggccatcagccgggtgcctagcccctgttgcactgaagctcaggcccttcctg

SEQ ID NO: 60418 - DNA, 122 bp, Homo sapiens
ttgttgtgctcggtgcgctgagctccgcggctccgcgagccggttccgtccccttcccgccgccgccatgaagtggatgttcaaggaggaccactcgctgggtaagcacttggtcgtcggcc

SEQ ID NO: 60419 - DNA, 122 bp, Homo sapiens
gagatattacccccaatatagtaaacaggctgtgagtccaccgtggatcgtaatcactcgcgggggagaggaggtggctcttactccccatatcgcggggggtgcctccaccccttccgatg

SEQ ID NO: 60420 - DNA, 122 bp, Homo sapiens
agcgggcaccgcagccccgcgcccggggacgcgaacctgcaggctggggactggaatccccgccttgccgcttacgcgccatagattcctcatctgtcagcaccgcagaaaggccccctcct

SEQ ID NO: 60421 - DNA, 122 bp, Homo sapiens
aagcatccccaggaccgacgcaatcccatggggagagatcacgatgttgtcatgaggcctcgacttcacaatctgattgaaaacctggatccccgtgttggagcctagttcctcgagagaca

SEQ ID NO: 60422 - DNA, 122 bp, Homo sapiens
attgcaggcatgaaccactgctcctggcccacactttcttttttacattattgtatcgtacgattacatttttatatgtttaaaaactaatattcctcaatgcaattctaccttatttttca

SEQ ID NO: 60423 - DNA, 122 bp, Homo sapiens
agcgcagctttctgtaggtaagttctgtcttaccggtgcaccggcgcactgaggaacagccgcagccggtgtaggggctcattgttagcgctggtcggtgaggggtggggcgaggtgggggc

SEQ ID NO: 60424 - DNA, 122 bp, Homo sapiens
ctgccagcatggatctcctgcgcccacactggctggaggtgtccagggacatcaccggaccgcaggcagccccctctgccttcccacaccaggagctgccccgggctctgccggcagctgca

SEQ ID NO: 60425 - DNA, 122 bp, Homo sapiens
caagctaccgaagttggcttcatctcctccctagctccgcccgaagccaaaaaatctgcccgaggtgtttattccaaacctgactgatcatgaaaatcacattggaggagggggcggttaaa

SEQ ID NO: 60426 - DNA, 122 bp, Homo sapiens
ggaagatttaatgaggaggggaccagacaaagacagaagatggaaatagtgccccaagcgcgtgtccccagacaccacaatctggcgatgggatccagtccatgctatttctctcaaagata

SEQ ID NO: 60427 - DNA, 122 bp, Homo sapiens
ccccgaggaggccagcggaggggaaaccccaccccacctgccagcctctgccgcccatgccgggagcgctggctccactccaaagccactctgtgcagaaggcgctgcccagtcccgggagc

SEQ ID NO: 60428 - DNA, 122 bp, Homo sapiens
gggcggacgaaaccatcggtagactccacaaggtaggaactttggaagatgcctggctcccgacacgtttgccaacagttaggcaactggaagtgatcataatgacagccacggttgggaag

SEQ ID NO: 60429 - DNA, 122 bp, Homo sapiens
ccgaaagccccatcgggcaggggaggccccctgctgcctccccaccgcagcacccctaggcgcatgctggactccaagtcttccctgctggtccccagtaaccaccctagcaccccatttct

SEQ ID NO: 60430 - DNA, 122 bp, Homo sapiens
ataataaaatgaggcaggcataaaatactccggtattatatacaatattaaattttagttcgtgattagaggaagtcacaatttaaaatgtataaaatcagtgacaaggcaactaggaatat

SEQ ID NO: 60431 - DNA, 122 bp, Homo sapiens
gtatcgtcgtcccgctcatgacacccatcctccttcgcacagctggcaaacactctcgaccgggggctcaactgctcctccagccgcatgaggttcagcatgtccgagtagtttctgtccgg

SEQ ID NO: 60432 - DNA, 122 bp, Homo sapiens
tgggtggtggtgccctcttagtgcctgtattccagtggtagctcatgctttctttgctgtcggtattttggtctttgcctctggcacatctgtagctcttagcaacatctgggcttctccag

SEQ ID NO: 60433 - DNA, 122 bp, Homo sapiens
gttgggctggagcccaaaagtgctcatcgaagccctggcacccgcttgcctgcgtgctcccgctcccacagagagtttgagcatggtggtggccaagtaagtaggccacacccctgtcgcaa

SEQ ID NO: 60434 - DNA, 122 bp, Homo sapiens
cacgatgttgctgatggtcagggtggagatgacgccctcctcggtgctgatggtctccaccgtatagcgccccgatgtgcccgactccagaacgttctccttccaggaccaggcctgcccgg

SEQ ID NO: 60435 - DNA, 122 bp, Homo sapiens
tctctcactctatagggagtggaatgaccccaggggcagccggcttctctcccagtgctgcgtcagatgccagcggcttcagcccaggttactcccctgcctggtctcccacaccgggctcc

SEQ ID NO: 60436 - DNA, 122 bp, Homo sapiens
ggcctagctgtccgtactccccaaacgcaaccttccagtcccaaacccaggcgttctaagcgctcaggacgacgatttgcgctcacgccaggaccctagtcttcattggacccttcctcatt

SEQ ID NO: 60437 - DNA, 122 bp, Homo sapiens
gttgcacctgttgcgattggttgccgtggatccagtgacattgtgcctgttgcgattggccgtggatccagtgacgttgctcctgttgcgattggttgccgtggctcctaatgtagaccaca

SEQ ID NO: 60438 - DNA, 122 bp, Homo sapiens
gcccgcgtgcgctgcgcgcagcccggctcctgcccgtgcctctccctccacacttccccgcgagcagagagccagtccggcctcggccagccacagagaggggtccccacagcacagcggcg

SEQ ID NO: 60439 - DNA, 122 bp, Homo sapiens
aggagacttccagggctgctttgcctgtccccagctctcttaaatggggagctagtcagacggtacctggggaacagagggaggagggagagcacttactacacatcaagaaggtaaatata

SEQ ID NO: 60440 - DNA, 122 bp, Homo sapiens
cgctgcgtgaccgggtcgccagctcacacccacctggtgctgggtgtgggggttgctgcacgagggggagcaaatcactgcgtccgctccccacggccggcggcgctgtctcttctcggcac

SEQ ID NO: 60441 - DNA, 122 bp, Homo sapiens
tgggccagggtctctttcctttcgcgggcacagtgaggagactgcgaggtgaggtgcgtccgggtggatcccgggctgcggcgactgtcacattctccccggccagaccggaggtggagcag

SEQ ID NO: 60442 - DNA, 122 bp, Homo sapiens
tggttctgcaacatggataggaacaagtgtcatttcgccatcacctgtgctagatgtagacgctcttctgagctgattcctgagccccctctgcaactttcacctctggagactctgatggg

SEQ ID NO: 60443 - DNA, 122 bp, Homo sapiens
atatgtaagatttaaccaaattcagtcaaatccctcaatagtgatcatgaaacaggcaggcggaaaaatgcactgaccatggtaaaaacacttcaatcagctatagaaaacatgaaaaagga

SEQ ID NO: 60444 - DNA, 122 bp, Homo sapiens
tttcttattttaaacaactttattggacaggacggagctattataagcggagcgcaccatcgcgaggcaggggctggatgcgttagggcaagccttaggtgccagtgggtgaaggagtcttt

SEQ ID NO: 60445 - DNA, 122 bp, Homo sapiens
ttttgcagagatggggttttgacatgctgcccaggctggtctcgaatttgtggactcaagcgatctgctcgcctcggcctcccaaagtgctgagattacaggcctgagccaccgcgcccggc

SEQ ID NO: 60446 - DNA, 122 bp, Homo sapiens
agaggttcggccctggtcacagactgggcataaaatctgcatatttatagcagggtccgccgaaagcctaaaacaacagtgagtttcagggcaggatctctcttgcttgtgttgcattggtg

SEQ ID NO: 60447 - DNA, 122 bp, Homo sapiens
aaacattgaggctgtcccaaccttcctcctgatggtcagcacagaacctctggaatagtgcggtggagagctgggcgagtttgtctttggacagaaggcccgaggaagatgcgtgttcccga

SEQ ID NO: 60448 - DNA, 122 bp, Homo sapiens
catgatccctggctgagagtagggataccgaagaggtcccagggattcccaaggattgatcggaggattagctgagcacgaggaagcccctgagagaaagactctggcctggattgggtcga

SEQ ID NO: 60449 - DNA, 122 bp, Homo sapiens
atcctcccttctctcatgaggtactcgtttccccaagcagattacacttccaacagcactcgaatcaatgcaagaatcccgcagggtaaagtaacccacagtttgtgattctatgcagtcgg

SEQ ID NO: 60450 - DNA, 122 bp, Homo sapiens
caagggagtgttatctccctgagcaacctgtggaaagccgctgagcaacctgtggaaagccgctgagcggttatcctctcggggcataaagacaaagaaggcaataaggagactttgctcct

SEQ ID NO: 60451 - DNA, 122 bp, Homo sapiens
acgcaattatgcaaaagtgtagataaggttctccgaagcagaaagcagcagcgcgggacgcgggtttccccttctctggcgagtaccagtgctgggaggctgtttatctgtgtcctggtgct

SEQ ID NO: 60452 - DNA, 122 bp, Homo sapiens
gtttctggcaggacttctgatatcctgtgccagactgaccacaagtccctgccttggcatcgtagtgccaatataaaagccagggtaaaatattatctttcaaaatgtaaggctccagtgac

SEQ ID NO: 60453 - DNA, 122 bp, Homo sapiens
tgcggctcctctgctgcgttgagtccgtctgtgcactcagatggcctgtgcttcgcctttcgcccgcgttcttgggaggccttgccgcgtcccgggcctcccgcccttccaaggttggcttg

SEQ ID NO: 60454 - DNA, 122 bp, Homo sapiens
tactcaggaggctgaagcaagagaactgcttgaacctgggaggcggaggttgcagtgagccgagatcgcgccactgccctccagcttggacaatagagcaagattacatctcaaaaaaaaaa

SEQ ID NO: 60455 - DNA, 122 bp, Homo sapiens
tcagcgtgagggggccgggcaaggtcgtagggagtttgaagtccatcttctgtgtaaagacggcaaatctgaggttctaagaggggcagggttttgctcaaggtcactcattttttgtttgt

SEQ ID NO: 60456 - DNA, 122 bp, Homo sapiens
tgtccgtcctgggggaaagtggttccaagctgttaaggatggagcgctgactctgccctgcgtcttcccagccccctagttgtagttgttggaactcccagtagattccagacacccagctg

SEQ ID NO: 60457 - DNA, 122 bp, Homo sapiens
ttgctgttgtaaggcacccagtttgtggtacattgttacagcagccctagcatacagatacgcccaacgttcaggctttctctgggcgtatctgtgtgctagggctgccatagcacagacac

SEQ ID NO: 60458 - DNA, 122 bp, Homo sapiens
gtgccacactcaggcccggcgggtggtgtgggggccgcatctcatggaggtctccgtccacgttgcccccattgtgaccgcagcgggcgcctcttggtagcagccaccggcctcttctggga

SEQ ID NO: 60459 - DNA, 122 bp, Homo sapiens
gttcactatatagagagctcagtgagctgatcgcggagaagccacttctgccagccccggcgcctataaatcgcattccctcccgcgcccccctttttagcatatttgatcactttgattct

SEQ ID NO: 60460 - DNA, 122 bp, Homo sapiens
acccgggaagtggaggtcgcagtatgctgagattctgccattgcaccccagcctgggagacgagtgagactccgtctaaaaaaaaaaaaaaaaaacttcatgaaaacagaaattcaaatttc

SEQ ID NO: 60461 - DNA, 122 bp, Homo sapiens
gcatattgtcactgtactgagtctctgtacaaaaggctagtggggcagaaatccagcctgcgctgtactcgcccagcctggagccctgaccctctcttcagaaggggtgcctttatctaatt

SEQ ID NO: 60462 - DNA, 122 bp, Homo sapiens
taagtaacataatgacttagagaaggcttagcctagtgcctggtagataggagaccctcacgattgagtgaatgatggtgagaaataaactctgactcattttcttctcatgtgaaattagg

SEQ ID NO: 60463 - DNA, 122 bp, Homo sapiens
ggaactggtggtgcaggtggatggccaatggctgatggtgaccggacagcagcaactggacgtcagggacccggaaagggtcagttaccgcatgtcacagaaggtgcaccggaaaatgctcc

SEQ ID NO: 60464 - DNA, 122 bp, Homo sapiens
atgttaaactttcacagtgttttcttctcaaatgttggtgctgagcaaattctaaggctacggaaaagcctctactatccagagaacttggatagtgagtcatcttgagggaccaagttttg

SEQ ID NO: 60465 - DNA, 122 bp, Homo sapiens
acatagcaacctccaatgcatgaaggaaactccgtttacacatgctcgtaggatcccctgcgtggaaacagcagcttgtctctgactacccggaggacatggagcaccccaaataggaactt

SEQ ID NO: 60466 - DNA, 122 bp, Homo sapiens
gcgcgtggagcgcctgcagaagatccagaacgcctacagcaagtgcaaggaatacagtgacgacaaagtgcagctggccatgcagacctacgagatggtgagggcggggcgggggccatggc

SEQ ID NO: 60467 - DNA, 122 bp, Homo sapiens
ggtttgctttttccggagaggagaggcctgcatccctgcgtgagaggggcctacagggtgcggctgcagtgaaccagggcagtgcacaagtgaagaaacagacactgcaagagagtaagaaa

SEQ ID NO: 60468 - DNA, 122 bp, Homo sapiens
gcgcgagggaggggcaggaccggggcggctgcctcgcgggcccggaacgggaactggctgcgactacagccgcagccgcgcccctctgttggcgcgcccaagagcctgccggctgctgggag

SEQ ID NO: 60469 - DNA, 122 bp, Homo sapiens
gaagggcactcccatccagccaggaaaccgccggactacaacgtggcccttcagagatcgcggatggtcgcacgatcctccgacacagctgggccttcatccgtacagcagccacatgggca

SEQ ID NO: 60470 - DNA, 122 bp, Homo sapiens
cacccacacggccccgcacctgtctccacccacgcggccccacacctgtctccacccacgcggccccacacctgtctccactcacacggctccacacgtgtcctctgttctccattcaacgc

SEQ ID NO: 60471 - DNA, 122 bp, Homo sapiens
aggcggtgactctcggggccactcctgaggtgggggatgtgggctagcggccaccgtgggcggcaggtgtgcaagcagtgctcccgttttccactgggctgcccttcaccggctgtgggtca

SEQ ID NO: 60472 - DNA, 122 bp, Homo sapiens
cataaattcctctgtgtgtgtgtgtgtgtcggtgtgtaaatgcatgtccgcaggtgtacacgtgagtgattcagcctggggttcacaatgagcgtggcacccgtagtgcaatgaaaaggaca

SEQ ID NO: 60473 - DNA, 122 bp, Homo sapiens
ttctctgatccgtaagagcctcctgcccgttcatccatcaacagcctctggggacaccttcggcagcaggaatcactggtgttgggtactgagtttgaatttctgtgcccacctttgcgctg

SEQ ID NO: 60474 - DNA, 122 bp, Homo sapiens
caggagaatatctgtagtcacctattctgcccggggccccaaatgcgccaccagcagtgtcgccccgttttttcattgtctcaggtgtccagaggatgatgaccaggtctttgaagttgtta

SEQ ID NO: 60475 - DNA, 122 bp, Homo sapiens
cccatgaggtgtaggtgtgcttcacatcagcagccggaggcatgctgactacattatggtcgttgggagagaaatagccagtcacgttggcccggggacgtggagccaaaccagcataactg

SEQ ID NO: 60476 - DNA, 122 bp, Homo sapiens
gattacaggcagtaagctactgcacccagccaaaagagtcttttaaaaaattaaattagccgggcacaaaggcacatgcctgcaatcccagcacggtgagaggctgaggcaggaggatcgct

SEQ ID NO: 60477 - DNA, 122 bp, Homo sapiens
acggagttctgggtcacggtggtcacctgcagctcctcccccagacggggttttgggggacgctttgttccagtatcatccatagcactccgggcttctgagatggagacacggagaggaaa

SEQ ID NO: 60478 - DNA, 122 bp, Homo sapiens
accgggtgccccatgtcgcctccgggaggagtggcgcgccttgggctcagcctggggtcacggtgtctctctgagttccccgcacttcactgccatcctggggcagcccctgggcgcgagcc

SEQ ID NO: 60479 - DNA, 122 bp, Homo sapiens
gaaaggatgggaacaaccctgcaaaaaaccgagatgcctctacactccagtcccagaaagcggaaggcactggggatgccaagtgaaatgtacatttttgagagctctgtacttatagtgac

SEQ ID NO: 60480 - DNA, 122 bp, Homo sapiens
ctacacctcagtcaccatcacagggacgaggggcgtgcgaggccagccctgggcccacgtcgacacctgcccccggaaccgcagttgtaaacgcaccactctggcgggcagcctggcgggtc

SEQ ID NO: 60481 - DNA, 122 bp, Homo sapiens
tcatcttgtggccacacctaattatctcattaaaaacaaaaccaaagcactttgggaggccgaggtgggcagattgctcgacgtcaggagttcaagaccagtctgggcctctctactaaaaa

SEQ ID NO: 60482 - DNA, 122 bp, Homo sapiens
gagccaggtgctgccccgagaaggatgcatttatggcttcatgaagtctttcctgacccccgatgctgctgactataggtaagtctgagcaaatctggcggagcctcatcttggcatgagaa

SEQ ID NO: 60483 - DNA, 122 bp, Homo sapiens
ggctgggtaacatgataaagcagggcccaattgtgctttaaacatgccattcctagtattcgttattattttgctgcaaattaagcagatttagataaacagggaggaggagattaatctag

SEQ ID NO: 60484 - DNA, 122 bp, Homo sapiens
ccttttaaatgtacctgcttcttgaaaagattatttcttcagtcttttcccagagagtgtcgacacaggtgtgatgtaattaagagtcaggagagtaaggagagtaacttcgaggtctggag

SEQ ID NO: 60485 - DNA, 122 bp, Homo sapiens
ggttgaggccggaagacaacgctcatcgtcattggctgagcccggctgtcagtcctttcgcgcctcggcggcgcggcatagcccggctcggcctgtaaagcagtctcaagcctgccgcaggg

SEQ ID NO: 60486 - DNA, 122 bp, Homo sapiens
gccagaggacctttctgagctcgctagttcactggtgttggagccttgtgctgctgccaccgcgtgagaaatgttatttaacatcacagcgagtatcacttcacctattccaagttttcagg

SEQ ID NO: 60487 - DNA, 122 bp, Homo sapiens
cctgaaccataaaccgattcgctgacaaaacaaaccctccagttcgcaatcactgagccccgccaaaggacaacaccaaagacaccagaatgtgacttgggcactcagtagcggatctctag

SEQ ID NO: 60488 - DNA, 122 bp, Homo sapiens
catcagagacatgcgcagtctgcttgtcaactttcaacaactcttgtgtgttcccagcaccggaaggtctcagacttcatattccagcataaacacagtgctcccctcccccaaaaatccaa

SEQ ID NO: 60489 - DNA, 122 bp, Homo sapiens
agaggcagccacctgtcaatgatggttcaagcacagagtaaaatggccaatgggagagggcgagacaagaagagccgcgccggcactcacagccaggcagagctggagaaagcgctggaaaa

SEQ ID NO: 60490 - DNA, 122 bp, Homo sapiens
ggtctccaggtctccttagtctcagttctatgctcttatgtgtctcttgcattcttccaacgacatgattaatattccaatgtgcattattaatttcctacatggttacttttttttgtatc

SEQ ID NO: 60491 - DNA, 122 bp, Homo sapiens
gtaggacaaatatcaccagtatattgtaggtacaatcagctaaactctttttcccacaaacgctggataaattttgtgatcacaattactgacataataatagttttcctttcactgggaaa

SEQ ID NO: 60492 - DNA, 122 bp, Homo sapiens
gattggtctctggcccagcccagtctcttctcaggggcagggggtggaggttggggtcaccggcctgcttggcacccccatctgaaagagcagcacttctcagctattaaaggccccctgga

SEQ ID NO: 60493 - DNA, 122 bp, Homo sapiens
ggtggggccgtgttgaggggcctcggatgcgtcgtgcagccttcactctgggaagtggcgcgcttcctctctcatcatctcagaggccgccatgggcattgatctaaaagcccgattttgat

SEQ ID NO: 60494 - DNA, 122 bp, Homo sapiens
gacctgtggttccagctacttgggtggctgaggcaggaggatcgcttgagcctgggagttcgaggctgcagtgaaccccagttgcacccctgcactccagcctgtacgacaaagcgagactc

SEQ ID NO: 60495 - DNA, 122 bp, Homo sapiens
ttctgagacccaggcgtttcctttagagggtgtggagtgcagggctccttattgcgcaggcgcaaggactgcccggtaggacgagcggtctatcaaggggagggaagatgaggttgaagaga

SEQ ID NO: 60496 - DNA, 122 bp, Homo sapiens
ctgcttttacccccttaccattaaggggggaaaacaatctaacccagaccgagtcacaaacggagtgtcaggtttaaccttgagttctctgctgtcaattcctgactcaacttcatcactta

SEQ ID NO: 60497 - DNA, 122 bp, Homo sapiens
ccccccacaccctccccagcgcctgcagacttcggtgcgcgcagttcctaagcccacatgcgcagttctcaccttgcgcgcagcctcacgtacagcccccgacaggctcccagccccactgg

SEQ ID NO: 60498 - DNA, 122 bp, Homo sapiens
tgatctctttctgcatgcggtcagcgatcccagggtacatcgtggtgccccccgacatgacgttgttggcatacaggtccttcctgatgtcgatgtcacacttcatgatgctgttgtaggtg

SEQ ID NO: 60499 - DNA, 122 bp, Homo sapiens
gagtgggggagggggcacgctgccgggtctgttggaggtgggacggcgtctcggtgggggcgcccggagactctggggtgttgggtggggccttggttgccgaattccgtgccggtgcctcc

SEQ ID NO: 60500 - DNA, 122 bp, Homo sapiens
agagcccgtcccaattctggcagcctttggatttggcttccacgttttccagatttccctcggcctctagctcgcttgcgtcagaggggccccgaggggcggcccacccgctagccccgccc

SEQ ID NO: 60501 - DNA, 122 bp, Homo sapiens
acaagcagggacgaggccatgagggccggtgaactcgccagcccggggcacgttcaagagcgtattttactactccatcaccgggtggacgtatcactgtggtcaatgtgtggttcatggac

SEQ ID NO: 60502 - DNA, 122 bp, Homo sapiens
caggctaagagtggtgagcaccttgctcttcctagcacctccccaaccagtgctctggggcgctcttcatcagagccctgtgttttggagacagaactcatgggtcagaattcttgcacccc

SEQ ID NO: 60503 - DNA, 122 bp, Homo sapiens
cgggcttccccagctcttgctgcttcgggcctgtgacttctgcaaccccgggctgggggccgcggggtctcagggccggtgacgccgcactgggagccgccccaaagaggttactcacctcc

SEQ ID NO: 60504 - DNA, 122 bp, Homo sapiens
agaccccattcaggctatgtcctgcaggcaagccaccttcttcctatccctggcacatgtcgtcccccactgacctgtgaaccaccaggggtgacatttcaggagagagagtcccatatctg

SEQ ID NO: 60505 - DNA, 122 bp, Homo sapiens
gcagccaggcggtggcgactgaggtgcaccgctcctgtcagccaacaaatatccattgagcgacacctgtgtcccaggtgctgctctgggccctgggagaagtgcatcagtgggcttggtag

SEQ ID NO: 60506 - DNA, 122 bp, Homo sapiens
cttccagggcctgctcacttcagggagcgcccactcgcccagccacgggccaagagcgcacggacccaggcgggcggcagcccacccgccaccacgcagctccacttcgctgttccacagcc

SEQ ID NO: 60507 - DNA, 122 bp, Homo sapiens
attaacccgaacgttcggcccggggctgggaagccagaaggacgatgctgagccatggatcgcggaaggcgtcctctggcctcaggagccacccagagcctcacaggctgagttcttgcctc

SEQ ID NO: 60508 - DNA, 122 bp, Homo sapiens
gagctggtatcaggcttcatcctcgcagggctaaccccaacagtggcactgaacattcaacgcaccaataaacctaggcaaagactgtttcactgagctgagggaggggccggggctgaggc

SEQ ID NO: 60509 - DNA, 122 bp, Homo sapiens
aagctttaggatcatagtgtctctattggccttattgaactaagggggctgcaatgggctcggaaagccttgagtgtatcattaaagagataagtaggagatagcagagacaggatttgatg

SEQ ID NO: 60510 - DNA, 122 bp, Homo sapiens
ggccgcgaacccacaagtcaagattcgcaggtgcgcgcgctaaggactgagctattggggcgatggagagagtctcgctctgcgtcagggacggaaggacgtgtcccccaccagaaaaagga

SEQ ID NO: 60511 - DNA, 122 bp, Homo sapiens
ctgttcagacgttgattggcccaaagcatcgtgaatattcatgacagcagccacaaaggccggcgccgggtggcatcttgcggcagctccttcaccccgcagtagacacccgtgcgtctgta

SEQ ID NO: 60512 - DNA, 122 bp, Homo sapiens
agttaagtaacttgcccaaggccacagggctagttaaggacaggtaagcagaacagctggcgtgtcccagcacctgcgcacttctctctctctctctctctctctgagacagcgtctcactc

SEQ ID NO: 60513 - DNA, 122 bp, Homo sapiens
tcgcctgcctcatgccactattgtggatcaccggccccaggtaccatctcatccttctatcggaggcctcctgcctcagggcaaactatgtacacctgtgtcctttattccagcaccgttgg

SEQ ID NO: 60514 - DNA, 122 bp, Homo sapiens
tcaccatggctccaaaggttcagccgcgagaaggggtgacaagagccactgaggcctctccgcccggagccccgttacctctcacttcacccgcgcatacacccactctcccgtctctttgc

SEQ ID NO: 60515 - DNA, 122 bp, Homo sapiens
ctgtgaagactgggatgtccatgggcacgcggattgagtagggtttgttcagccgcaccccgaagttccgctccccgctcagaagcagcaagatgaagacaccaatgtgcatcaggcccacc

SEQ ID NO: 60516 - DNA, 122 bp, Homo sapiens
tgtgtgtgtgtgtgtgtgtgtgtgtatttgtgtgtctgtgtgagagagagggagagagcacgcaaaagatggagagactgagaaaaagaaggccaaaaaagagaaggtgctcgcacacgccc

SEQ ID NO: 60517 - DNA, 122 bp, Homo sapiens
aagccgccagctctcgggctgagccaaagtcatccacatgcacgaaggcgtcagccggcacgaaggcctcataggtggcccgtgggggccccagcaccactggcacagtgccagccaccagt

SEQ ID NO: 60518 - DNA, 122 bp, Homo sapiens
cttccctccaatcctcaccatgtctccattttgccaaagaagaaactgaggttaaggtcgcgatgctctggccagcatcacaggtgggattcgaacgcagatggggtttggagcggctcttg

SEQ ID NO: 60519 - DNA, 122 bp, Homo sapiens
ggggacagtgagagggcccctctcctggctggttggagatgcagatatggagactcctcccggaagcccacctggctgtgagccgagccggagcaggactaaccttgttgccggggccttct

SEQ ID NO: 60520 - DNA, 122 bp, Homo sapiens
catgatcccctccagctctgcaggagacaagacctgtctcccagcattcctcattgttcccgggtctgcagagggcgtgagctatgctgcaggcgggctgccccctgaagcctgcgcacccc

SEQ ID NO: 60521 - DNA, 122 bp, Homo sapiens
gccagcccgggagccccacggggtgacggccacggccgagacctcaattttggggggcagcgcagtggcaagggtaagggcaagggcgagagcgggttcacagatcccgagagcttcagctt

SEQ ID NO: 60522 - DNA, 122 bp, Homo sapiens
ttaggctggttccccacttctgtaggttattatgctggacataaagcctgcgtttgctgtcgagccgccctctttctgtgtgtgtgtgtgtgtgtgtgtgtgtctttctttaacccttgcct

SEQ ID NO: 60523 - DNA, 122 bp, Homo sapiens
gactttctccgaggatgccccattcacaaaattccgtcctggaccctcaccgttgaggaacgctgaggaccactccccccgggggacacaggatgtgtggggagcgtaggccaccctgaaat

SEQ ID NO: 60524 - DNA, 122 bp, Homo sapiens
gctgaggctggcagggctgaggcagccggtggctggtggacttccccaatcccagcctggcgggggactgggtgcccctagcctctactacagagcctgggggctgggcagcgggcaggcag

SEQ ID NO: 60525 - DNA, 122 bp, Homo sapiens
aaataaaacaaagattcagcaattctctgtatcttgcagaaaaaaggaaaagcgcaaaaacgccctgcttgactgtcacttgtgttaatacacgtagccttcgttgtaggggtgggggttgc

SEQ ID NO: 60526 - DNA, 122 bp, Homo sapiens
ctggggcctgcaaattattggagagtgagtgaggggcaacgaaagatagacataaaagggcgcgtctcgaaaggtaactgtcaacatgcactccacgtttatagaacgattcagtgggcgcg

SEQ ID NO: 60527 - DNA, 122 bp, Homo sapiens
cccactcgcaggaggcagtgggcggctcctctcagccaggcgggtgagggtctgtgccggcggggcatgcgacccgccaggcaggtgtcggagccctcacaatggtgcacctggcgtgggcg

SEQ ID NO: 60528 - DNA, 122 bp, Homo sapiens
tttttagtagagatagggttctgccatgttggccaggctggttttgaactcctaacctcacgtgatctgcctgccttggcgtccgaaagtgctacaattacaggcatgagccacagtgccca

SEQ ID NO: 60529 - DNA, 122 bp, Homo sapiens
ggtttgtcctggtcccgccccggggcgggagcgctcctacgcggagatagtgctccgctacgtgttagagctgctgaggaccttcccttgggctaaaatggtccgtggaagatgtaagcagg

SEQ ID NO: 60530 - DNA, 122 bp, Homo sapiens
tcgcgctgcctcaaggggtttatttttatttctatttggagctacttcggccttagccgccgcccttacttttcctccgaaattgtgagaaggtgccttcatggctggagtttggtttcacg

SEQ ID NO: 60531 - DNA, 122 bp, Homo sapiens
tattccctccaccaggaatattcttttttccaaacattgacattcctgtgttccttcactcgcttcaggtcccacctaattgtcactcccttggagaggactttcttgactaccttctataa

SEQ ID NO: 60532 - DNA, 122 bp, Homo sapiens
gttttttcgagggtgaggctagcagcttgggtcagaatcaggacttcattttggagaagtcgtggacttctttgaaaaaatctaataaaaccggccgggcggtggctcacgcctgtaatccc

SEQ ID NO: 60533 - DNA, 122 bp, Homo sapiens
tcgagagtaagcgcattagcccgagaaagcgttctgtggaacggaacttccttatcctatcgtttccacacggaaagattttaattcaccggaatcgactggcgttaaagggcacagtgaaa

SEQ ID NO: 60534 - DNA, 122 bp, Homo sapiens
cacggctttctaccttcccaggttagccgcggtcaacttctgccaggcggagcgagaaatcgcattttgtcaggtgaggattggagggagtgagagagatgtgaggggaaggcttcgggtag

SEQ ID NO: 60535 - DNA, 122 bp, Homo sapiens
cgggtggagctttggaactgatggagaaggcagagtcctgaccaggggccgccatcagagcgcagggacggtcgggggggatgcgcagggaggagggaagggaaggaaggaggtgccaagcc

SEQ ID NO: 60536 - DNA, 122 bp, Homo sapiens
ttatcttgctttgcatcttaaacatttctgtatggcaatttccgtgtcttcctatcatctcggccatcttagtgcaaagatacaaaattgtgtggcttattaagaaaaattacagtaagcta

SEQ ID NO: 60537 - DNA, 122 bp, Homo sapiens
gtcgtaggtgcggagagcagaacacggcagcttcaggggctgcatgggggtgggtgttaccgtgccactgccctatgtctttgtgtgtttgtgtatgtgcgtaagtctctctcttatttctc

SEQ ID NO: 60538 - DNA, 122 bp, Homo sapiens
ctctaccaaatccacgtggaggcgcaggccagaggcgcaagttaatgacgcagccatgcgcgttggtggcagttcccgccccttaaagacccaagagcaaattcagctgggctgggctgggc

SEQ ID NO: 60539 - DNA, 122 bp, Homo sapiens
ttggtaaccgcggagctgcgaatgtgttgtccccacgcggtggcggggaggtaccaagatcgccccaggcgcggcgtatcagacgctggggtgggggcgggggtctgtggccatcagcccca

SEQ ID NO: 60540 - DNA, 122 bp, Homo sapiens
ggtgcggggtgccgggacacggcgttgaaggcgctgagcggagggatctcagggcgagctcgagcggcgacggcgcgctctgtgattgcaccgcgagcgcctgaggtgatctcggcctacat

SEQ ID NO: 60541 - DNA, 122 bp, Homo sapiens
tttcagcaggggaagtggaaaagttaaaactccaagcgagctgcacattgacgtcagctccgagtcatgttgtgatttagtcagttcctttccgctttgtaaaatgctgctgacagatttag

SEQ ID NO: 60542 - DNA, 122 bp, Homo sapiens
agcgggcctgggcaaggggcgggaggtggtccagacctcctcagcccgtcctcttcttcccgcagctggacaacctggttctgattaacaagatcaaggagcagctgatggccgagaagatc

SEQ ID NO: 60543 - DNA, 122 bp, Homo sapiens
ggcttgctgtgctggccctccagtgtgggtgggctgttcttgggaatcaggaacaggacgcgcatggggtggaggtcagagtttggaggctcccccttggccagctcgatggctgtgatccc

SEQ ID NO: 60544 - DNA, 122 bp, Homo sapiens
accctttcctgtgagattcttccgccaagtggaaggctcatcttcggtcgacagcctacgcggttgaagaacaatccagtaggcacttatagctcagggtctcgccattcagtcttatctat

SEQ ID NO: 60545 - DNA, 122 bp, Homo sapiens
tcagagcacgaaagttttctgctgcctttggaaccttgtctgcaaacggctcgaaggacacgcggcccaagggcttgccgtcgacagcgatgtcgaacacggtggggttaaccatggctgat

SEQ ID NO: 60546 - DNA, 122 bp, Homo sapiens
cacttcttctccctggaaaattcctgatgtggactccatgcacctttcctaatgagaccacgtggactccgcgcacctttcctagtgagaccgcgtggactccgcgcacccttcctagtgaa

SEQ ID NO: 60547 - DNA, 122 bp, Homo sapiens
tggttgctaggaaacagaaggcctagagcccaatcagagtagagggttctgggcaaactccgcctctcccggttttctgccttcttctctatttcaacttcttcccgggagagggagggaga

SEQ ID NO: 60548 - DNA, 122 bp, Homo sapiens
gcggttcgggaaggagagcgggaatgcggcgaccaatcagggccgcgagctgggagttggcgggcgcggggcgggggaggcggggcggccgggtgcctccgcgggaagctcgggcgggcggg

SEQ ID NO: 60549 - DNA, 122 bp, Homo sapiens
gcctcacgtgagaacaggtggagaatcagcgctgtggcggccactagcggcgttatctcccggatgtgcatgggagagagatggcagcttctggacagacaaggatgacacaggttctttgc

SEQ ID NO: 60550 - DNA, 122 bp, Homo sapiens
cccgctgggaggataattaaagcgccaaacggcggagcgggcgggcagcgttcccgggggcgcatttcatcggggctgattaatgaggccggggagttaatgaggagaaagctaaacgcagg

SEQ ID NO: 60551 - DNA, 122 bp, Homo sapiens
aggaagggccataaacaaagcacccggcaaatgatagagcaggacgccgtgaggagccgtcgtgggctgctccagggaccaagtcttatttcacatcttcattagtgatctggaaggagcca

SEQ ID NO: 60552 - DNA, 122 bp, Homo sapiens
ttagcgcccagcgggcatttgagcctagcagatgtgggagagtcaggcaggggctgcttccgaaggaaaggacaggaagggcggctcaggcggtgctgggctcaaaacacccgcttccgttc

SEQ ID NO: 60553 - DNA, 122 bp, Homo sapiens
catagttcccccattaacctgctcctggtttcccaccaggattaaaccctagagagtgaacggagaccagtttaaggctcacagcgggcgccgcgtgaatgagggaataaacattcgcagaa

SEQ ID NO: 60554 - DNA, 122 bp, Homo sapiens
gaagctggagaaggagggcgcggccgggtgagctgcagaagtgggctgggcagtggggggcggggcgtgataggcagtggggggcggggcttgatagttggcccggcagaggcgggaagacc

SEQ ID NO: 60555 - DNA, 122 bp, Homo sapiens
aagacgagttggcaaaaactctagattgactgatggagggaaaaagggaaggtccaggtacgttaccattttcagggatgggagaggagtgttcacaggtacagatggtgcagatagtaacg

SEQ ID NO: 60556 - DNA, 122 bp, Homo sapiens
ccattctctcccttccgcttctctagtggataattcctgctggccatttaacactcaagccggagtgctgggaaaggaagagcacggtccctttaaatgatacggaagccgggaaggaaagc

SEQ ID NO: 60557 - DNA, 122 bp, Homo sapiens
gctggaataggcggtgcggctgtagcccgcgctgtaatcgtaggacacctgatggggcggcggcggcgggggcagggcgcagtctggaaagaagggggcgaaagaggccaaatggccccgcc

SEQ ID NO: 60558 - DNA, 122 bp, Homo sapiens
ccccgtaaggatggttcagcccggtattgaggctccttgagctggctggatggttgcgcccgccctaccccggaatgtgggcctttggagcgagcgaagtgggagggaccgacgcaggaggt

SEQ ID NO: 60559 - DNA, 122 bp, Homo sapiens
ggagcgaataatcatacagtcatacagataatcggagggcacgttcccataggtgaagcccgacaggagacataagactttgctggtatgtgtgggtgggagtataacggtcgagatctgtg

SEQ ID NO: 60560 - DNA, 122 bp, Homo sapiens
gatggagtgagggcctattttccaacagctcttcgcagacccaagagcttggcacatttccgggttagggtggaatgggctttgcagggaagagggccccctgtgcacgcattccacagcct

SEQ ID NO: 60561 - DNA, 122 bp, Homo sapiens
gagccgctggtccggctggcggagatgtgaccgcgggcccggccggcctgcctcaggcgtcgcgtcagctcccgtgtccgtgcccttaacccacaccgatggcgggatccggctgcgcctgg

SEQ ID NO: 60562 - DNA, 122 bp, Homo sapiens
tttgtccagctcggacgtgtggccctgccgggtgtaggggggacacccatgcctccaacacgcataagggggtgactgtatgggggtcgtggggcgccctcccccaaggggcacagctagag

SEQ ID NO: 60563 - DNA, 122 bp, Homo sapiens
ttgtcccgatctatacagccctcctccctgcctcttgggagcccaagctccacctgcccccgagtcccgtgggcctcaggcccctggccccagacgtaccagttctcagggaagccgtgcag

SEQ ID NO: 60564 - DNA, 122 bp, Homo sapiens
ctaaagttttgttttttgttttttggtttttttcctggaagaccaaaaatgtaataatgtcgtcagcaaaataagtaagttatgtgattggtttggggctcgcaatagaagaaattaagtgc

SEQ ID NO: 60565 - DNA, 122 bp, Homo sapiens
cctgggccccccagaggccagctgtttcacccaccggcagcgccgttgcccagggccacgcggctggctcacacccacagatcctcagggactcgtaaccttcacctcggctttccagggct

SEQ ID NO: 60566 - DNA, 122 bp, Homo sapiens
ctgcacatcaccctggcctgagtcggcgatggtaactgtggcggtgggctgttctgtagtcggggaggccagaatggacacagggaggtcatgcacaggctgggcctccaccccactaggtg

SEQ ID NO: 60567 - DNA, 122 bp, Homo sapiens
gcaagtttatggaaaattattgagccccctcttttcatgatcactgttcgctgtgtgtcccgagggcactaactcagagtgtcctttgaccccttcatcagtgtgtcacccggccaattcgc

SEQ ID NO: 60568 - DNA, 122 bp, Homo sapiens
acggggtttccaccctcctcggcatcaaccagtgtctgggacgggaactggcggccgctgcggcctggcttcccagctgccgcccgggtctgcccctcccacactgcagccccgtacacccc

SEQ ID NO: 60569 - DNA, 122 bp, Homo sapiens
cgcaggtcagacggctcccacgcaggtcaggcggctcccacgcagtttaggcagctcccgcgcaggtcaggcagctcccgtgcaggttagacatcttttctgccatcatgggctctgattcc

SEQ ID NO: 60570 - DNA, 122 bp, Homo sapiens
aatgcttggcacgtgccaaactgggctccagcgtttgctgttcatccggcgcacaaacagcgttccacgaatgtgcacagaagcacggttcctgggccctaaatttgtcaaggctctgacgg

SEQ ID NO: 60571 - DNA, 122 bp, Homo sapiens
acagcgggtttagacagatttgtgcacccttccgggttcttctatttttattaaattatacgtatacattgatttttaaaactagtgcttaaataacccggaggctttaacaaagaaaaatc

SEQ ID NO: 60572 - DNA, 122 bp, Homo sapiens
ccaaggtgacagtgccaggctgcacatcaccctggcctgagtcggcgatggtaactgtggcggtgggctgttctgtagtcggggaggccagaatggacacagggaggtcatgcacaggctgg

SEQ ID NO: 60573 - DNA, 122 bp, Homo sapiens
ctgccgcacctccctgcagaggacacaatagccgtcagcgcagccccaggcgggaggggacgctcgtgggtcccaacccgtgggtggcaggaaaggaaccagccttcgtacggctccgggcc

SEQ ID NO: 60574 - DNA, 122 bp, Homo sapiens
ccccctcagtagagagaggagagacgcgatctggtgcatattagcatgaggaagcctggacgggacagccagcagtcctctttatatggtgccatcaagcacggcaaagtggcttatccacc

SEQ ID NO: 60575 - DNA, 122 bp, Homo sapiens
gaagcacactaggaggttccagccgatctggtcgaggggctccacggaggactccatttacgttacgcaaattccctaccccagccggccggagagagaaagccagaaacctcgcgaccagc

SEQ ID NO: 60576 - DNA, 122 bp, Homo sapiens
cttaatcgtgggctcctctgcgccccagcggcctctcaggtaagggtggtcggatactagcgccaccggccttgcccagcttcgaacaaatcgtggccgcgcggtggttcacgccgggaatc

SEQ ID NO: 60577 - DNA, 122 bp, Homo sapiens
tgggtgaaccccaccgcctgctttctaacgggtccaagccgcgggcaggggcctgtgttacggagccgcatgacacaccaggcctactgctggaccccaacaagcctagcctctgtgaatcc

SEQ ID NO: 60578 - DNA, 122 bp, Homo sapiens
cacttcataagtcacaggcattcacaggcaaggttccaggacatgctatgctcctgggagcgcagtactggcattgtaaatcagaccacgaggtcaatgtcatggcgtttcccatatgaggg

SEQ ID NO: 60579 - DNA, 122 bp, Homo sapiens
ggccctggtacctttcagccgcggccggtctcacggcctctggaccctgagagtcgtgggcgttcagggccgactctggcttttggcctcagagtacagtcctccgcctcctcgcgacccag

SEQ ID NO: 60580 - DNA, 122 bp, Homo sapiens
ccagatgaaccagatgcagtgcctggcctctgagaagtcagaattgacccagggggcagacgcaagtgtgtgtgaaagtattaagggatgccaaaaagtaggaggtgctttgagaatgtgta

SEQ ID NO: 60581 - DNA, 122 bp, Homo sapiens
cttgatagaatcaagaatatttgttacaatggggaagtacagtttttggatgaggagctacgaaagactgctgatctgttaacttaaggtccagctgctgcactgcctctgatgaaaagcat

SEQ ID NO: 60582 - DNA, 122 bp, Homo sapiens
atgaggtgtttctaggcccccaagtcacagaaaagcaggcgattgggaacaacggaggcgcggcgggcccccgggccgcgggccagcgccaccttctggtggatcttccccgacgcgagtct

SEQ ID NO: 60583 - DNA, 122 bp, Homo sapiens
gggtgggaaagcgcaccgctcccactgagggagcaggctccgagccggcggggctggggacgatgccgcagtgggtattttgaaggggaaatgatacatcccgatggcctgaatgcagtgag

SEQ ID NO: 60584 - DNA, 122 bp, Homo sapiens
cactttacagtacaagtgaatcgagtggaaagcttcataatggcagtgagggcataacctcgtgtcacagaggtggacatattagagattaggacactttctaaaatatccaacacttcatc

SEQ ID NO: 60585 - DNA, 122 bp, Homo sapiens
tgtaacctgaaacttccctcgcatcctaaccgggacctggtggagaggtctgggcgggggcggagacacccggaggccgaccttccgccgaggcggtgcaggaaggaacgggagagggagaa

SEQ ID NO: 60586 - DNA, 122 bp, Homo sapiens
cagtctccttcctaagtgtcaatgatgttgtcgaggcagagggagcaggctaaagagacgcggcagcggactacaacacacaggctggggtttccttgagctcctgaaggacatgataggaa

SEQ ID NO: 60587 - DNA, 122 bp, Homo sapiens
atgtaaaccttgccattttaacttttttaaagtgaatatttcagtggcattgggtccattcgcattatcgcaccaccatcgccaccgtccaatttcaaaactgtttccatcctgcagaactg

SEQ ID NO: 60588 - DNA, 122 bp, Homo sapiens
ccgggcacaggggcctgaggccccatggtgagaggcgcaaggggtgcagggccccatccccgcacagcatccggcggccctgcctccgtggccagcccaaccgcgcgctctgggcctcagtt

SEQ ID NO: 60589 - DNA, 122 bp, Homo sapiens
cccagcaccggctgagcagggacggggacccttcccctgtgatgccgcgagccaggccttcgtgagctcaggggtggtgaacctgacaggccccaggggcaccagcagcctcttcgtgggtt

SEQ ID NO: 60590 - DNA, 122 bp, Homo sapiens
aagaagcgagggcgcgtcagtacagaccgtgggctgcgtgtcacgtcactgctgagcgaccgcgcggttccctgctatttgtaccgcccaaggcagtcctagctccgcccctttacgctcgc

SEQ ID NO: 60591 - DNA, 122 bp, Homo sapiens
tgctcaaaccactaggggaagcatgcagacgggcaggtcacggggagcgtttttgggcttcgaccccatggcagcatctagggtgagtgtttccagctcgcgaagccccagtgggcgtgtgt

SEQ ID NO: 60592 - DNA, 122 bp, Homo sapiens
ctctgtgggttcgtctttcagccagtctttctctgcttcagattcttggtttcttgctcccggtagtccctgaacctctttcactctttaaaaaaaaatggggaggggcggtgaacaagcaa

SEQ ID NO: 60593 - DNA, 122 bp, Homo sapiens
cgcgggcagaagagcaggacaggcacccgctggccgggaggtcattgactggcagaacgacgcggaatttggctggagcagtcggaggagagcccaggacgcccagcagcccgactccagaa

SEQ ID NO: 60594 - DNA, 122 bp, Homo sapiens
ccgtgagttcatttatcaggctcagccatcactttcaggagtcatgggggactgcagccccgcccttagtaaaccgggtaagtccgggctcggctcgcctatgcaggagtgccatctagtgg

SEQ ID NO: 60595 - DNA, 122 bp, Homo sapiens
gcctccgcccgccctgtgtgtcgatttgcaggcaggcggggcagcggaggtgaatggacccgcaggtagcgctagaacaaagcggctagacgcaggcggcgcgcttgcgtaggacctgcagt

SEQ ID NO: 60596 - DNA, 122 bp, Homo sapiens
ccttgttcgacacagctcccagcagctgttccctgggcccaggcagagagcccggcttggcgcgtctctggctgaggccgatgagagaaaacaggttaaaagttcagcccttgttctctcca

SEQ ID NO: 60597 - DNA, 122 bp, Homo sapiens
cggcgcagccgcggatcgctgttgcatgctgatccggggaggcggcggtggcgagcgctccgggcggatgctggcactcaggcttcgctgctctctggatgctgctcaacttctagcccaag

SEQ ID NO: 60598 - DNA, 122 bp, Homo sapiens
gcccgtgtgtggcagcgtgcgcgcgccggggtgtgcgcccgcgagtgtggggggcgtgggcgagcgcgctccccgctccccagccgagagcccgagacccagccccgcagccggctcctgtg

SEQ ID NO: 60599 - DNA, 122 bp, Homo sapiens
tcaatctcttcaggatctctgtagaagcagagatcaggcatgacctcccatgggtgttcacgggaaatggtgccacgcatgcacagtacttcccgagccagcatccaccacatcaaacccac

SEQ ID NO: 60600 - DNA, 122 bp, Homo sapiens
ccgcccgcagcgcagaacaaagcgacttgaccttcagggcagtgggcggcagggcaggggcgcaccgggtgctgggaggggccgctccaggccccaagccccaggcccgccgcggcggcgct

SEQ ID NO: 60601 - DNA, 122 bp, Homo sapiens
ccagtgattgcacctgagtgtgccttgggcaggtgtgtctggtcttcaggactcctttgtcgctagagtctgacgctggggccctctttttgtttgtttcgaggtaggtacaggtgacacat

SEQ ID NO: 60602 - DNA, 122 bp, Homo sapiens
aggcaatgcgcaggggagcacgggtaagagggcaggtgttagaatcgctggaaaggcgggcgccctttgtttcaagaccattggctattggaggggcggtacatgggaggccactggccaat

SEQ ID NO: 60603 - DNA, 122 bp, Homo sapiens
gcgcacggggtgtggcgcggagtgaccagccctgcccgctcctttcagcagcaggtgaagcggctgcagcgcgttctttaactttcccagaaagacctacagtttgtaaagcgcgcgatctc

SEQ ID NO: 60604 - DNA, 122 bp, Homo sapiens
aaatgtccatcaaccgtagaatgaggctggatgcactggttcacacctgtaatcttagtgcgttgggaggctgaggcaggaggattgcttgaggccaacagttcaagaccaatctgggcaaa

SEQ ID NO: 60605 - DNA, 122 bp, Homo sapiens
ctgggcaagggagagcccagcttcccccggaggaggtcagccatgagccacaggtctccccggacttagctgggcagggcagggttctgctcctgtcaaaccgagaatttggagaagctcct

SEQ ID NO: 60606 - DNA, 122 bp, Homo sapiens
ttcttccgtgcaagttttgcatcctctcaccactgcctgcgttacccgagttgtaaagggcggctccctgtgtctgccccgctgcaccgatacaccgagctgcgcacggtgcccagcgcagg

SEQ ID NO: 60607 - DNA, 122 bp, Homo sapiens
ggtgcgggagccgtccgagcgcgtcctgcaccgcgaggagagccgggcctccctagctctcgcaagcccaggaacacagtccgagtcctacaactccgaggtctgactgggaagcaggggcc

SEQ ID NO: 60608 - DNA, 122 bp, Homo sapiens
atcattagggataaggatgaatgggagatagatttctgttcaaagaattttccaaaattgcggactcaccacagaatggtctggaagtctgcttagggaaatgctgggatccaagcatctga

SEQ ID NO: 60609 - DNA, 122 bp, Homo sapiens
atattgttatacacctcattcctcaacacagccagccaagatccatcagaacatactttccgtacattaatgggcactacctctgaattccctcatctgtatgattaaatgcagtttttctc

SEQ ID NO: 60610 - DNA, 122 bp, Homo sapiens
gggttgcatccttttagttgttgtcgttgtttagtcaaggtctccctctttcacccaggccggagtgcagtgatgtaatctcagttcactgcagcctcccctcccgggcttaggtgatcctc

SEQ ID NO: 60611 - DNA, 122 bp, Homo sapiens
ggaccggggaagggggcgactgaacctatcagattgggtccagagtgggtttcctgcccgcgcggatccgcctgcccaccgcgcgtgccccgcctctctcccaagagctacgcggcggcggc

SEQ ID NO: 60612 - DNA, 122 bp, Homo sapiens
aaagagccttaactagcactctgtctactataggatcaagttcagagtcctcatgaaagacgagacctttcctgattagtctcatctcccatcacttccttgtgcatcctgcactccagtgc

SEQ ID NO: 60613 - DNA, 122 bp, Homo sapiens
cacactctttttggaaaagaaaagggctttaacctgcaggagtctaacccgtcaagacgtcgaggacctttacagaatgtgctggcaagaaaggagagcacaggcaagtcacacacacatgc

SEQ ID NO: 60614 - DNA, 122 bp, Homo sapiens
gccccatacctgaagtggaacagtgggaacaggagagaagacccaagaaacaggtgcaaccggctatccagcacacccatgctgatgccccaccttatgccagctcggtgtagtctatgtgg

SEQ ID NO: 60615 - DNA, 122 bp, Homo sapiens
tcagaccaacctcactctcacctaatttagaagtggagctgtttctggcttcccctagtccggatgagctgacatgtggattccctattaactgttgctgcctgtgatttttgtgatttaag

SEQ ID NO: 60616 - DNA, 122 bp, Homo sapiens
ctagggcccaggtcccatgagtaagccagaatggttgatagtgggggaggatgatgacgacgctgcctttgcccctgtcttgtgtgaaacaactgcctgtgggtttcctgcagcgcagtggg

SEQ ID NO: 60617 - DNA, 122 bp, Homo sapiens
gacagccttcagtcaccttcccttttccagtctcccaaaagcaatggcgccttaaatgtgcggtaaggatgaggtgagtcttgaggtagcctaggccacagctgccccttcaaggcaaggcc

SEQ ID NO: 60618 - DNA, 122 bp, Homo sapiens
cctccacattccctgggccctcctggtggccaattccatggggcagggcatttcccaagccggaaggagggcctgccctcccaggagacagttaacctgccataaggaggcctgctggagcc

SEQ ID NO: 60619 - DNA, 122 bp, Homo sapiens
acaaatgaaatgtttctctaggttgctgaatctaaccaattaacccgctgcctgtggtaacgtcagtggttgctaggcagagtttcactgatgaaagccctgtgcagtaggagcgctcctaa

SEQ ID NO: 60620 - DNA, 122 bp, Homo sapiens
gtcactgcacccagccgcaagatttcttaagtaaaacacacacaaaacctaaccataggccgggtgcagtggctcgtatctgtaatcccagcacttcaggaggcttaagtgtgaggattgca

SEQ ID NO: 60621 - DNA, 122 bp, Homo sapiens
tcaggccatcaaggtaggttctccactctaccacttactggtgatgcgatcctggtgccccgcagactccctttacccatatgtggaacgggacacttacactctcttctgcagagggtggc

SEQ ID NO: 60622 - DNA, 122 bp, Homo sapiens
ctgaccccgactccgtgagtcaagcctggcctttcagtccagcccagcccgtcgaggccccgcccctgttgttatggcccgcctccaggcaccgcccttgatcccaccttcatgagtcaggc

SEQ ID NO: 60623 - DNA, 122 bp, Homo sapiens
cacttgcctgcgcgaaatgcctgccaacttctgactggcaggcagtctggcaaatcaaatcgcgacctttgaaagcaaaacactgcagcatcttggcagctctgaattgggaagggatgaag

SEQ ID NO: 60624 - DNA, 122 bp, Homo sapiens
aattaaaaaataaattatttttcaaaggatgaaaagagctatgaagatgatgtaacagtacggtcctagttacaatagtacattgtgactaggattgaggaggagctgttttagataggggc

SEQ ID NO: 60625 - DNA, 122 bp, Homo sapiens
cctggacgccagaaagggaaccccacgcgtcaagccatggtggcagcgcggcggttggttcgaggccaggctggggtttcagggctgcagacagagctgcaggatacgatgagtgcccaagg

SEQ ID NO: 60626 - DNA, 122 bp, Homo sapiens
ttgttcactgagcctaaactggctaataatccattaaacacaatctcctcagaaaaagcacgaagattctaactgatacacagggtttcctcattcaaataaaagtagatagaccaactaac

SEQ ID NO: 60627 - DNA, 122 bp, Homo sapiens
ctagttttcatggcaatgtcaaagaaaatagttatcaattaccaatggtgacacatcttccgaaaagctgaaataagctgccccatacctttagaggtttaaaatactgcctcaaataacag

SEQ ID NO: 60628 - DNA, 122 bp, Homo sapiens
agggatctaggtcattggcccgggatttggcattaattcttctcatacaagcacagggaacgatcaatcagtgttgacagctctaatgccatcgttggagcagaagatgagccaaaggaaat

SEQ ID NO: 60629 - DNA, 122 bp, Homo sapiens
ttccatttagtcttgtgcttaaggctaattgcattcacgatttgctcctgatctaccattcgttaatttaatttttattgtttcttagcacactctccagccaggccactcaactaacagtt

SEQ ID NO: 60630 - DNA, 122 bp, Homo sapiens
cggaactgtatcaaccggccctccgcagagaactgctagtcctttaccaaaacagtcctccgaccgcagccaccctacggcacatcagttccggcgtcacaaaggttccgccaggggcggcg

SEQ ID NO: 60631 - DNA, 122 bp, Homo sapiens
aatgaaaccaccaggacctctgggatgcctggcggaagagaggcgctctagttccgaatgcggtccggaaaccagaactagagaactctatgacccacctgagcttccgctcccgccccgct

SEQ ID NO: 60632 - DNA, 122 bp, Homo sapiens
ttactttggaccaagcatgttggaaactgttttcagctgagtccaagcactcgaaatctgcgtgtgcccttttagtaggtcacaccctccaggccacagccacactgggctccctttagccc

SEQ ID NO: 60633 - DNA, 122 bp, Homo sapiens
ttggtggccgcgcccgtcgctctttttacataagacgcacatggaactccatgttcacctcgtcggttcctcaatggagacgcggcgcgttcgtgctacccgtcgtcctccctagtggtctc

SEQ ID NO: 60634 - DNA, 122 bp, Homo sapiens
acgccgcgcccagcccctcgcgcatggcccggctccttaggcgcagctccgctggctccacgcgcctcccagcgcccgcgctttatcgctcggagcctgcagcccccgccccgggggcgggg

SEQ ID NO: 60635 - DNA, 122 bp, Homo sapiens
ctcttgcaggaagccagttgagggaagttctccatgaatgtacgtcacaatgatgatgaccgaccaaatccctctggaactgccaccattgctgaacggagaggtagccatgatgccccact

SEQ ID NO: 60636 - DNA, 122 bp, Homo sapiens
gtgctggcgtggcaggtccagagagctgcaccctgcacggggcaccgcaccgcttccctccgcgcagctcttctgcctggttttcggaggccaggctgctgggaagcttccgtgttcctgtc

SEQ ID NO: 60637 - DNA, 122 bp, Homo sapiens
ttcttactacctccctgtctcccaacaggagcagccaatccccagcctgctctagagccacgccatatatggagaggttggaaagaaacccgagtaaatgcaggagcgaacacacacacact

SEQ ID NO: 60638 - DNA, 122 bp, Homo sapiens
cccaaaggtgaccacagtagaggcaaccaggatgcagtccaaagattgggatatcccactcgcttttcctggagccggatgcagtcttcccgacttccggtggagatccgggggtggggggg

SEQ ID NO: 60639 - DNA, 122 bp, Homo sapiens
atcgggtcgatctctgcgtttaggcttgacccagcttcctgggaccctgtcctggcttttcgcccttacctgggtcctgcttccagccaggcagagccggggcgagaaggcggcgcctgagc

SEQ ID NO: 60640 - DNA, 122 bp, Homo sapiens
agggagcgagagcccggacagcgggagtcggaggcaggaccaggagctgcagaggggccgcgggcagagccccagcgagcgcgctgccctggcgcggagcccaggggccgcccactggcggg

SEQ ID NO: 60641 - DNA, 122 bp, Homo sapiens
cccccaccgctctgtcgtggtagtatgagagcagccgcaggcacaggtcacggaggggcgcggctgtgttcagtagggcagcattcatagaaagaagccagcagcgaccgacgggccctcgg

SEQ ID NO: 60642 - DNA, 122 bp, Homo sapiens
agcttcgggcggacacccgagtcctgtagttccttgtttgatctgaaggaagttgtccagcgtcagcagcagccgccgccgtggtggtagcagctgcagtggagctaaaggcagcagggccc

SEQ ID NO: 60643 - DNA, 122 bp, Homo sapiens
ggaaactccagttgtgtcttatgatttttttaaagctttctctttttctatcagctctttcggtaagcttggaggaagaagggtattgttgctgggaagattaggtgatatattagttctta

SEQ ID NO: 60644 - DNA, 122 bp, Homo sapiens
ggagtgggtgagaatgactgcgagtggcttttaggtggggaggttcctgcctggccactccgggaggggacgtggggctgaagggtatcaggtgccgtgctgagcagtttggccttgatcct

SEQ ID NO: 60645 - DNA, 122 bp, Homo sapiens
tgcatgcacgtgtgtgcatgtgtctatgtacgtgtatgggtgtgcctgtatgtgtgtgcgcgcacgtttttaagcacgtgtctatgcatgtgtatgagtgtgcttgtacgtgtgtgtgcaca

SEQ ID NO: 60646 - DNA, 122 bp, Homo sapiens
gcctggactacgtttcccagcagcccgtgctcaagactacgggtgcctgcaggcggtcagcgtcgtttgcggcggcgcaggcgcggtgcgggcggcggacgggcgggcgcttcgccgtttga

SEQ ID NO: 60647 - DNA, 122 bp, Homo sapiens
cagagagaggctgagggggctcttttgggagcagccatagaaaacttctctgagtgacgacgttagagacctcaaggaagtgagggaacaagcaagtgttgctggcgttgggaacggcaagc

SEQ ID NO: 60648 - DNA, 122 bp, Homo sapiens
cgcagctggagatgctgcggccggcagggctctggcgcttatgtcggcgaccttgggcggcgagggtcccagcggagaatcttggccgtagggaagtcacctctggtgtctctccccgcggt

SEQ ID NO: 60649 - DNA, 122 bp, Homo sapiens
tttagaaaatctgcctttggctcccctctacccttcccaggagacgtcaatggaactctccgggggaaaaggcgagcagaaagagagtccacagagtgcagcttctttacttggtagtgaat

SEQ ID NO: 60650 - DNA, 122 bp, Homo sapiens
ctaattttgtaatctgtcacaggactccataagtattcttgggctgggctctgtggctcacgcctgtaatcccagcactttgggaggctgaggcgggaggatcacttgagctcacgagttcg

SEQ ID NO: 60651 - DNA, 122 bp, Homo sapiens
ctcttcattaccctaactcatatttctgcttaaagctccctagtaaacaaatctctggtccgataataattactttgcctcattaaaataaaaaaaaaatctcgaatggttaaagggccatg

SEQ ID NO: 60652 - DNA, 122 bp, Homo sapiens
atgggggatgtaaagtcattcagagctgcatctgtcagtggtgctttctaccactgctgacgactgggttataaaaacattcctgaacaattgtgaacattggcagaccataaacaaaatgg

SEQ ID NO: 60653 - DNA, 122 bp, Homo sapiens
ggcattagaatgaatgagtgaatgaaaagtgaaagccagcctgctgttgagaatacaaaacggtagagaatatagatactattccttttacgactttgggaagcaatttatgattcctgagt

SEQ ID NO: 60654 - DNA, 122 bp, Homo sapiens
accatctccctggagatggagcggcagaaacgagatgcccagagccggcaggagcaggaccgggtagggcaggctgggcagctgggcctctgtctcatagagaggcacatccctggctgagg

SEQ ID NO: 60655 - DNA, 122 bp, Homo sapiens
cttcccgggagtagctggtgccagcgggtttggtcactcccaggccctgctgttgcacaccgctttcaagacctgtccctttggtcaccctcctcagagaccctgtgacactcattccagta

SEQ ID NO: 60656 - DNA, 122 bp, Homo sapiens
ctgcctctggagaaaagaaaagtagttgaagcatttttggttatgtgtagaggtgtatgtcgaaaggaaaagcccattgacttggagcttgttttgctagtgatatcattgatcttacatat

SEQ ID NO: 60657 - DNA, 122 bp, Homo sapiens
cggccacgccgtagtacacatcctgcttgcccacgccatagcccggaaagaggtacccgccgtagccaaagtccccgccctgctcacccaggcgtggggcctcaaagccagagtccactccg

SEQ ID NO: 60658 - DNA, 122 bp, Homo sapiens
aaggggcgtggtggggtggggaggaagcgggtccccgcgccctgggttccgattctggcccgaggctcagctaggatggccccagatcccagagaacgtcctacctagtgcccgtttctaca

SEQ ID NO: 60659 - DNA, 122 bp, Homo sapiens
ttttgttgattcattgtggtcacaatggccttggctgatgctgtgctgtgaaattgtatacgtttaaccagggaaaaccatggtccagttgtgagtttcaggccagctccaggctttcaggg

SEQ ID NO: 60660 - DNA, 122 bp, Homo sapiens
ggtttcgcttcccggtacgctgcagggtcagggtcgcggcccggaacgtggggattggtccgggcttgagctcctcggccttccacgccgcctcctcccacagctgccacctccgtacggcc

SEQ ID NO: 60661 - DNA, 122 bp, Homo sapiens
agacctggactgtgggcggtggctaccgcctgaaccacctcggttcctggggcttctggccgcagcccctcggtgcgctcttacccagagacttgagcatttaaggatgccttcctagtcca

SEQ ID NO: 60662 - DNA, 122 bp, Homo sapiens
cgggcgcggcgcgggggcgggacgcggggcggggacgctggagctggggagcaggtggcgcgggcgggggctgcggcccagcccggcgggtccccaggggctgcgcggcgctcgcctcgcgc

SEQ ID NO: 60663 - DNA, 122 bp, Homo sapiens
agcccaactcgggcagcgataggctttcggagacgccagtctctgccaggcccagtcagtcggccaatagacccggaacctgagggatcggaatcctggtccactccgcagaggcccgagcg

SEQ ID NO: 60664 - DNA, 122 bp, Homo sapiens
caaagcagcaaggcttcctagactctgtgccaggattggggctttttcccaggggggcaacggtgagaaggaagaaccccaagccagtagaaccccaagccggtagaaccccaagccggtag

SEQ ID NO: 60665 - DNA, 122 bp, Homo sapiens
ccacactggggagtatacagatggtctccagcttaagataaggcttgactagtgagctttcgactttatgatggtatgaaagtgatatgcattcagtacgcacctcaacttatgatgagatt

SEQ ID NO: 60666 - DNA, 122 bp, Homo sapiens
gcgaagctacgccctttcattcccgcagaacattggcatgtagtctggagcactttacagcggttacatgaggcgcgagggcaaagccacggcctcgcacgcccgcagaacaggagcacgtg

SEQ ID NO: 60667 - DNA, 122 bp, Homo sapiens
ctgacgcacccccccgggtctgtctccttttctgaattccctcagcatggaccatgtgaacgtgggcagaagggagtgggttttacattcactccgtcttagtcttccccaaaaccctgtga

SEQ ID NO: 60668 - DNA, 122 bp, Homo sapiens
aaagggatgaagattcctgccttgtggagtttccacttcagctggagaagactgaccatgcgtaataaacataatgagtaggttcccgggggatgagcattattgggagtcaagcagggtaa

SEQ ID NO: 60669 - DNA, 122 bp, Homo sapiens
agggatcccaggctgtggctcagggatcccaggctgtggctctgggatcccaggctgtggcgctggggcggtgcgctggccgtgggtcgagaggtcgctgcgccctgcattcctggccgcgc

SEQ ID NO: 60670 - DNA, 122 bp, Homo sapiens
accaccttttagccaccacacgtggcacagccatataagaattagcagattgtggctgggcgaggtggctcacgcctgtaatcccagcactttgggaggccgaggcgggcaaatcacaatgt

SEQ ID NO: 60671 - DNA, 122 bp, Homo sapiens
gttgcaaatttcctccttctgtagcctcttggtctttgtgatatttctacaaaacagggacgatgtgtgtggctttagtaatgtggcaactttacagttttggctaagatgattaaaaataa

SEQ ID NO: 60672 - DNA, 122 bp, Homo sapiens
tcccggtctcaaggtgtctcactaccctgatcccgactgcccaccgaccctacccaaacacggactcactaaccttggcttttgacactgcccacagacggacccccacagcctgactaccc

SEQ ID NO: 60673 - DNA, 122 bp, Homo sapiens
cgggaggccttggaggcgtagggggcgggggtacggctcgcctgctcgcaagatggcggacgaggacggggaagggattcatccctcagcccctcacaggaacggaggtggcggcggcggcg

SEQ ID NO: 60674 - DNA, 122 bp, Homo sapiens
gaagggaacaacagagagaagggaaggggaggttccacactcttttaaacaaccagctctcgcttgaactaccagagcaagaactcactcattacaatgaggatggcaccaagcaattcatg

SEQ ID NO: 60675 - DNA, 122 bp, Homo sapiens
ttctcctttttcaatctctcctgtctggccttccattgttattcagcctgctcattgctgcgggcagcccggacgtactggccatcatctgaaaccacaaacgacagcgcgcaataagctgg

SEQ ID NO: 60676 - DNA, 122 bp, Homo sapiens
tcgcgtcgagctcgacgagggccggagttgcggacgagacgggacggagtggtgtccttgcgggcggtgcctcctcgggccggcagtgcccgggcgcggcgctcgctgattccgcctaagcg

SEQ ID NO: 60677 - DNA, 122 bp, Homo sapiens
aacattctcaggcaggagtttggtggatgtgctattttgtgcaattagtgtcttctacatcgcggtctgtacctggggcggcagcaccctggtgagaccaagaaaagtggtgagaggaaggc

SEQ ID NO: 60678 - DNA, 122 bp, Homo sapiens
aattcatgtttctgggtttgacatactgaacaagcaacacctggtctcatcctaaccctgcggatgtatttttcacccaagaaatttcggatttcaacaaaagacccattctcccgggtaac

SEQ ID NO: 60679 - DNA, 122 bp, Homo sapiens
aataacttagtaaactatgtcctttaaacccttgccacaatggcaaccttaacatatcctcggtgctatataaaaactcttacaggactatcaaacaatgaaattctttggacagaaagaac

SEQ ID NO: 60680 - DNA, 122 bp, Homo sapiens
cctttggtcaaccaccttttggctaacattccttactattttaggttgaattctcttacccgcccctgattccaggagatggacatgacagccacactttacctgaagaatggaagtatttg

SEQ ID NO: 60681 - DNA, 122 bp, Homo sapiens
tccggttactgactctgtggctgctgcctcccacaacgctgtgcttgcagaccccaggagcgctggctgtcccttcacttcctgaacatgtggatgtgtgctttgggttcttgacctcagct

SEQ ID NO: 60682 - DNA, 122 bp, Homo sapiens
gctccttcgaggccctgctcggcttcagggagcacgcgcgccctgccgtgctctgattggcggagctgcacgcccccgctgcagtctgattggcggatccgcctcgctttagaaggtcggcg

SEQ ID NO: 60683 - DNA, 122 bp, Homo sapiens
tgccggcttccgcagtgatggatcaccgttttagtggcatttaaatccccggcgctccgccgtctaggtgacgcgcagtcgcccccccaggcagcctaggcggcggcagctgctgcggcgac

SEQ ID NO: 60684 - DNA, 122 bp, Homo sapiens
gacagtgcgggaggcggttccttcccaccgtgggcttcccgtctgactttacagcaaggccgcttccacacgggggtctccaagcccaccctggtgccttgctgcacgcaggctgagcgctt

SEQ ID NO: 60685 - DNA, 122 bp, Homo sapiens
gttgtcaaagcggtcgggcctggaggggttcccagatgtccttcccgcctggtcagtgaccgcccagcggggtcaccatgcactcctccaggagggacacgcttgtcatgttggcgcttgtc

SEQ ID NO: 60686 - DNA, 122 bp, Homo sapiens
ggggcgcggcgcaggtgtcaggttgctggagaggcgggcctacagggcggaaaccaccggcgcgggtgaccggaagccccgcccccaacatggccgtgcccacaggtctcgttggaggccgt

SEQ ID NO: 60687 - DNA, 122 bp, Homo sapiens
acttcaccagcatccactcttcttgactgaagggaatcaccagccttcccatgacaggggcgggtgcagctatgggcagatgactcattgcccagcaatggaggcttctggaagtttccttg

SEQ ID NO: 60688 - DNA, 122 bp, Homo sapiens
aacatggctgcgcccttgtcagtggaggtggagttcgggtgagtcacagagctggggcgccgtggggatggattgaagtcgtcgggcccagaattcctttccttctgccgtggggcctgaca

SEQ ID NO: 60689 - DNA, 122 bp, Homo sapiens
gtgtcattgacaggggctagcaggagataaatccagcaggaagggggatgggaaggatgacgtgcatctgggcttgccagggacagccccagtttttgcctgttgccctggcataactatta

SEQ ID NO: 60690 - DNA, 122 bp, Homo sapiens
aagtgacctgctgctcaaagccacgggcctggggttgggagcggactcagcacttttgtgcgaggatctagtgcctggtagaaggaaatgttccgcatattctcagacaagtcccttcctct

SEQ ID NO: 60691 - DNA, 122 bp, Homo sapiens
gggccttttcatggggcttagaaatggaaagagacttttgacagcctcttcatctattaccgtggttattattctgtgaggatgtgtcatttgagtgtgtcatatagtgcctctgattctca

SEQ ID NO: 60692 - DNA, 122 bp, Homo sapiens
tctttgtatagccccgttaagtgcaccccggcctggagggggtggttctgggtagaagcacgtccgggccgcgccggatgcctcctggaaggcgcctggacccacgccaggtttcccagttt

SEQ ID NO: 60693 - DNA, 122 bp, Homo sapiens
aagcgagaagtcgcgggcccagcccacagcagggtaagcacctttgttcggggtctgaatcggggcgaatatccccgcctcctgacctcgattttcctgagctagaagggacctttcgaccc

SEQ ID NO: 60694 - DNA, 122 bp, Homo sapiens
ggtcccgggtgtaagttctgggtcccgggctggctccctggtgagcaaagccgcatcgctcgaattccagaaacccttctcgccgagcgcctgcctggctgctgaaagcctggagactgcgc

SEQ ID NO: 60695 - DNA, 122 bp, Homo sapiens
cccaagaaagttagggaacaaaacgaacttttttcctggttgagcattaactgacaatcacgacagtagaaccgttagagtttagtttttaatattatgtgtgttatctttcatcagttaat

SEQ ID NO: 60696 - DNA, 122 bp, Homo sapiens
tccccacacttaacaatgaaggttcagaaatgatgttgagaaatctggggtcacagaggccgaagcagtggtctgtgtccaacaagatgggaggtaacggatcccaagtttctatctgacaa

SEQ ID NO: 60697 - DNA, 122 bp, Homo sapiens
gagttccaggctgcctgggttagttctgagtcttcacgtgtggtcaagcaccccggttcccgcccctgccctagccactccttccttagcccttgccccctgcccggacccgtgtgccgctg

SEQ ID NO: 60698 - DNA, 122 bp, Homo sapiens
aggtggtgggtggaaccaggaggcctcataagctagagcatagtacagaggaggctgggccgggctggtcgggagccctgtgcaagctggaggtgcaaccaaatcctttcctccctgacccc

SEQ ID NO: 60699 - DNA, 122 bp, Homo sapiens
gggagaggggggcgacagtctggactgggagacagctttctgggagccctgtcccctccccggagaatgcaaattccggagggaggtgagtttccacaagaaccttatcccagagacattgt

SEQ ID NO: 60700 - DNA, 122 bp, Homo sapiens
tccccagggctgcctccactcctgtggctgcttcgagggttgccagcggcggggcagaggcgccagtctatggtccggcaccaggctgttaaatgcctattcaaggatccacattccctgag

SEQ ID NO: 60701 - DNA, 122 bp, Homo sapiens
caaagacggagtctccattactcacttatctccagctggcgctggatgcggcctttgctccgctcccgaaacagagtctgtgcctcattgtactccgccatggcttccacaaacttccgaga

SEQ ID NO: 60702 - DNA, 122 bp, Homo sapiens
aatacatatatgttggtgtgggtggggatgtcccggagtacgtgggggcgagggtgcctgcgtgcctcctgatctgcaaggatctatctagtgtgtgtgcctgggagtgtgtgtgtgtgtgt

SEQ ID NO: 60703 - DNA, 122 bp, Homo sapiens
tggcagctagcccagaccagtggagtgtgcacaggtctgaaggcagaacaccagctcagccgtgggtggggttgctatgcaccactctgcccccaccttcggtctgcttgggttgctggtca

SEQ ID NO: 60704 - DNA, 122 bp, Homo sapiens
ctccttccggcccccacctctggctgtttgagaagagcatgggctttggacctgggcttgcgccatcaactaaaccatgtaacctgacaccaaccccccccagcctatttgctcaccagtaa

SEQ ID NO: 60705 - DNA, 122 bp, Homo sapiens
ttttgaaacgtctgtggcccgaggtcaagtgcagtgcgtaggatggggccggtttctctgcgctgtttttggttgtccacaaactcgacgacagacagggcgtgtgtgtgtgtgtgtgtgtg

SEQ ID NO: 60706 - DNA, 122 bp, Homo sapiens
tctcagggtctcaggccccgaaggcggtgtatggattggggatgccccgccttagggattcgccacctccgcagtttctcttcttctcacaacctgcgacgggtccttcttccttgatactc

SEQ ID NO: 60707 - DNA, 122 bp, Homo sapiens
ctagcgcttcccgacccgcaaaccaaggcccagtgaccgtccccgctgcgcagccgcctgcgtcgccagccaaccacgcgcggccgagtagccccgcccctccacatggccaatggccgcgc

SEQ ID NO: 60708 - DNA, 122 bp, Homo sapiens
gctcattttgctggtaatttactctcctgcttttgggctgctccgcctgccgctgccgcccgcccgggctgcctgttccaatattagatataaacaagtaaactgtgtaatggatcacatta

SEQ ID NO: 60709 - DNA, 122 bp, Homo sapiens
ggcaggaggctggaggctcgtaggcctccgggaccctggatttcgttagctcttagtccccgtgtggattctaaaccctacagccctgtccgcctgaccctgaagcttctggttctagactc

SEQ ID NO: 60710 - DNA, 122 bp, Homo sapiens
actagggctgtttgaccacccaggaactggaactagctggttgttacacccaaatctcttcggatgctgggctcctaaacgtgtcactgtgcagatgcagttgggagtaggcaggtgaagag

SEQ ID NO: 60711 - DNA, 122 bp, Homo sapiens
ggggcagaggggagaatgccagggtcacagaatactccccaaaccctgctcagccctgcccgcccagactgggaggaaaaacagcccgcacctcctaactgggggagccccggcctagtcac

SEQ ID NO: 60712 - DNA, 122 bp, Homo sapiens
gtgatattacatgtaagttaataagagaaaattattatggtactgtttttgatgtggtgtcgttagtgcttactggaaaagaaaaatgttttatttaactgttactcatcatcactggtttg

SEQ ID NO: 60713 - DNA, 122 bp, Homo sapiens
ggcacacaccgtaattcccttcccagagcctacagattcccacaaacaatgacatcactccgccgccgctggcctgattacagctggggggattttcctgggcgcgcggcgggccaggctga

SEQ ID NO: 60714 - DNA, 122 bp, Homo sapiens
ctcaggcttgttccccaagcaccagcccggacactgggagaggctacatgaaggcttccccgccacgcgcggcccctcaacctctgcccaggcgtcctgagtcccagcaattcccaccgcag

SEQ ID NO: 60715 - DNA, 122 bp, Homo sapiens
taggactcactgctggaggaggacttccctgacacccagaggatcctcacagtcaagtgacgaggctggggctgaaagcagaagcatgcacagggaggagaccacttttattgcttgtctgg

SEQ ID NO: 60716 - DNA, 122 bp, Homo sapiens
gttccgggacaacagagagggccgcaccgtttccgagtctctcggaggctcagttctcagcgcaccattccccacagctctcctttttactttacccctacccgacacttgaccccggcagt

SEQ ID NO: 60717 - DNA, 122 bp, Homo sapiens
aaagacaatttattagccgtgcataagagttattcagagaaacataaccaatggaatgcacgcacacacacacacacacacacacacacacacacacacatatacatagatagaaaggaatt

SEQ ID NO: 60718 - DNA, 122 bp, Homo sapiens
agacctgcccagaggaatgtttgctcaaatctctgtgtagcgcacagccagtcaagccgacgcctggaattaacagatcaatggtgactgaagtttcagactggcctcacaccaaccctgat

SEQ ID NO: 60719 - DNA, 122 bp, Homo sapiens
aacattcaggtcacaccttccctcaccccacagttacagagaccaggggtccggggctcccgtggggcctcacagaacctggagcgcccagaagacttggagcagggaatctccagggaaaa

SEQ ID NO: 60720 - DNA, 122 bp, Homo sapiens
tcggggcctgccgctgggaagatctcggctgctgcgagagtacccagccccaggcgaggtcgggacggggaccgcgctcacgggaggcgtcctctgaaccttggggaggcgccgctgcgccc

SEQ ID NO: 60721 - DNA, 122 bp, Homo sapiens
aatcaaggagaacacagcgtaggggaaagtggctcgttatacggagacaaaaagtcacgccggccgcagatggactaaaggggaaactgacaaacacagcagggaggctaggcagggctcgg

SEQ ID NO: 60722 - DNA, 122 bp, Homo sapiens
ccgcccactcacgcggctggcacctggaggccgcagggacctgccctttcctccccttaacggttttttcctgctggcggaggtcattctaggaggtgggtcccaagctgacctcgctcagc

SEQ ID NO: 60723 - DNA, 122 bp, Homo sapiens
tgtctgagctcttgcgagagcctcttcctgagtttccctcctccagtctctcctctactccgttgactgccagattgtcttacagcatagatgaaaccacgtgacttctgtgccccaagact

SEQ ID NO: 60724 - DNA, 122 bp, Homo sapiens
gtcaccctacagtgaggtctgaggagagcagtcttgttcttccccaggcctggtgactcacgtatcggaaaggcagcagcaaggctgtgacagccgccaggtcagccagagtgggggcctcc

SEQ ID NO: 60725 - DNA, 122 bp, Homo sapiens
gttctcctcctcagcttcctgcgtgggttcctggtaagtgagtcgaacccgccggatgcgcgcgcgcctgcgcctccgcccaaaaggatcagtttccggctgtggactacatttcccagaag

SEQ ID NO: 60726 - DNA, 122 bp, Homo sapiens
gaactctatcgtcagatgtgcagcctccttattgcctgatagagtcaggagttacctcgccgatagccagatgctttcaaacaaaccaggatgtacccaaaagtcagatgagaacaaatcta

SEQ ID NO: 60727 - DNA, 122 bp, Homo sapiens
gatacttttacaacatctttctgagaacacagagtacatgaaggctctgtcacccagctacggctccctggttccattttaactttgagcacctcagttagtctcctgggagtcattttttc

SEQ ID NO: 60728 - DNA, 122 bp, Homo sapiens
gagcctggatgtctctaacacactgtgccgggcacacagtggcctggtgacaggcctgggcgaggggcatatgaggccaagagtcggaatgagcaaaggccttgagggctttcccatgcctt

SEQ ID NO: 60729 - DNA, 122 bp, Homo sapiens
ggcctgaaacaacatgaagtagaaaatctacagattgcattcagtatcaccaataagtaccgcatttgactactgctcataccatttggaaaccagtcctcacatgacgactggcctgacac

SEQ ID NO: 60730 - DNA, 122 bp, Homo sapiens
caaagggcattcgaggcttatttgtgtggcacgatctttactggggcggaaaacacgcggcgggggaggagcgggcacagacgcagccgggcggggagagccaggaatgttcctcccggcgt

SEQ ID NO: 60731 - DNA, 122 bp, Homo sapiens
tgcttgaggtaatggatcccaacgaccctgatttgatcattccacactgtatgcttgtatcgaaatatcacatgcaccccacacatatgtatgattagtatgtatccataaaagcttcttaa

SEQ ID NO: 60732 - DNA, 122 bp, Homo sapiens
ggagactcacacgcacacttctgccaatgctggaaaggtttcaacacggttcgatacctgcgttccacgcttaaaatgtacacacacaaccgctctcgacagaaaccaacatgcacttccct

SEQ ID NO: 60733 - DNA, 122 bp, Homo sapiens
caggtaattcgcctttttctcccaccggcgcggtaaaaattaccctccccctccccgttccgtgtgtattcccagtttcagcgcagcgagctcggcgtctaacccctccgcggcagggtccc

SEQ ID NO: 60734 - DNA, 122 bp, Homo sapiens
gagagggaagccccggcggtgagagtcggcccaaaaagcggcggccgttggaggtggctgcggcagctggtgagggggaggaatgggttgagagtgttggggtcctgggggctagtaccaga

SEQ ID NO: 60735 - DNA, 122 bp, Homo sapiens
agaccactccctgcctctattgctccatttctgagttggtctcactttccaccccactgacggcgcgctgcgtgaggggcggggcatagagggaggggaggggctatgcgaaagaaggcggg

SEQ ID NO: 60736 - DNA, 122 bp, Homo sapiens
gcgtttcctcatctgtaattgatggaagagctgcctggttttgaagaccaggctggcagccgtggaacaccccggcgctcttccatccggtgtctgccaatgcgcgccgcagagccgtgcgt

SEQ ID NO: 60737 - DNA, 122 bp, Homo sapiens
ttccccaatagacaccttttacacatgtgaaatgacatgtacaaagttattccattgcaacgttgtttcaacggcaaactattggaaacaacacagatgtccatcattgtggtgcctccttc

SEQ ID NO: 60738 - DNA, 122 bp, Homo sapiens
ttaaagtcctcagttatttcgtcttcagcgacagatgatccccgacttaccgtggttcagcgtttgagttttcgagctttatgatggtgcagaagcagcctacgtgcagtagaaactgtacc

SEQ ID NO: 60739 - DNA, 122 bp, Homo sapiens
ttcaggtgatttaactgattattgaataggcccgcaggaggtgtgtcctgcccatggggccgaagcctcggaggacattatctggacttagtcccttccccgcgatgccatcaagctggaca

SEQ ID NO: 60740 - DNA, 122 bp, Homo sapiens
attcgtgaaacacgccgctttttagaatgcctctgaaagaacaaagaagtcactggcactcgactataatatgctaaaaagtttctggttccaacagcacacagccagcatcaggtgttttc

SEQ ID NO: 60741 - DNA, 122 bp, Homo sapiens
cacatactgtcccacttttaggggccaggaaggcgaggaatgaggtgggggttaaaagtgcgatgaaagtatccagatattgttgaaaggtgtgtttgcccttgtatcttcagcacaaagtt

SEQ ID NO: 60742 - DNA, 122 bp, Homo sapiens
ggaggctgaggcaggagaatcgcttgaacccatgaggcggaggttgcagtgagctgagatcgcatgccactgcactccaacctggtgaccgagcgagactccgtctcaaaaaataataacaa

SEQ ID NO: 60743 - DNA, 122 bp, Homo sapiens
tgagtactctggtaaaataaagagcatgaggtttggaataaatagggatttctcttgcatcgtgtcttcccacaatttacatgaggttggagaaatgtaaaatttaagcctccaggaaaggg

SEQ ID NO: 60744 - DNA, 122 bp, Homo sapiens
tctgtcagatgggggtgggaacgtggtccagtgccaggcacagggagcagtgcagtggcccgcacaggcaggagttctgccgggtggcgctcacagcaggcaggcccagggaggcccatcct

SEQ ID NO: 60745 - DNA, 122 bp, Homo sapiens
cttccctgatgggtagaatggtagggattttaaggcttcagtggggaaggagaggaaaaccgtaaggaagaagaaaaggtcatggcaaaagcatagggggttcacatcacacaagccatgaa

SEQ ID NO: 60746 - DNA, 122 bp, Homo sapiens
acgggaaagggagccgtctcagcaagccctggggtccctgcaaacctccaggatggagtgcggtcccaccagccctggtggggacactcacttatccttcattttattcacgtagagctcca

SEQ ID NO: 60747 - DNA, 122 bp, Homo sapiens
ggattatccatgtctaaagcttcttgtagttgatcccaaactgatgcacactgaacagtgcggagaggtagaaattactgaaatttgcctttttctactctcttccttgatattattcaaag

SEQ ID NO: 60748 - DNA, 122 bp, Homo sapiens
gctagtgagtggcagaggcagggtttcaatgggacagtccgtggcggagcacactggctccgccgccagcccccctgcggtacccatccgcgctcgccgcctgggaccgccagcccggggcg

SEQ ID NO: 60749 - DNA, 122 bp, Homo sapiens
tgagtggagggcacagggtattggctctcgagcagagagccagtaggcatgactggtgttcgattcctaactcccctgctccctggtttcatttggaaccaactgagacagacacatgaatc

SEQ ID NO: 60750 - DNA, 122 bp, Homo sapiens
agtagctggccgtaggtcgcagtggcaaagccaaaagacaacagtcccagaccaaacctacgcgtccccatacccgcgctcagcagagtaagtgtgagccacgcgatccagcagtgggcttc

SEQ ID NO: 60751 - DNA, 122 bp, Homo sapiens
agcagttcagcacacccaaacagatatgggctatgaaaggaggtctggacccatgacaaccgtggcttgcttctactcactagtgctgggacaaagggcacctgcccttcatctgctcgttc

SEQ ID NO: 60752 - DNA, 122 bp, Homo sapiens
ttcaggtgttcctaagacactgaacaaccaaacccatggactgaccggatatgaaattgacgtgggaggagatcaggcaggtgctggggctgcctggcgcaatgcacggagccagaagtgct

SEQ ID NO: 60753 - DNA, 122 bp, Homo sapiens
gctcctctgcgcaggaccctggactagccgggtggtacgcgcgcgatgggctgggggtcccgggggaggccacggccagccaaggtcagagccaaggtcacagtctgttcctcctccccctc

SEQ ID NO: 60754 - DNA, 122 bp, Homo sapiens
tccaacagcctgcgcgaggacacacggaggccgttctgcctcagctctgcctgcagctcccgcagctcaaagggctggtacagcagcaccttctggtacagggccggcttggagcggatgta

SEQ ID NO: 60755 - DNA, 122 bp, Homo sapiens
tctgatcctgcagggcccggcagagggcttgcatgtcagccagccccggaggagcccactcgaacctgacctggtttgaattcctgtcggagtaagtacacagatctgcttctggggagggc

SEQ ID NO: 60756 - DNA, 122 bp, Homo sapiens
gagccccctccccttgcagtcagacctcccgttaatttcgttcccagtgtgcctttagttcgctcctcatttgctggtccaccttaattgacaaactgtacgcccaacgaacggccaaacgc

SEQ ID NO: 60757 - DNA, 122 bp, Homo sapiens
ccccctccgtcctttttttcccttcccaggacttagactccaccaagtttttattgcctccgtagctgggtcctgtgctaggcgccctgggaaatcgaaatggaagacaagacttctcgatt

SEQ ID NO: 60758 - DNA, 122 bp, Homo sapiens
gacaggttggaatgtttgattaagagaagcctcagatagagtctgtgaataaaataaagccgttctaagtgtctcagggctttgccctgcgtaagtctgcattacaattccactccaccttc

SEQ ID NO: 60759 - DNA, 122 bp, Homo sapiens
tttgtctttcagtgggcattgcactcggaacatatttttgataaacaatttttgccttaccgtactatgccagggagtatggcagatactgtggacatggcactgacaaagacatgatgtcc

SEQ ID NO: 60760 - DNA, 122 bp, Homo sapiens
aaaatgaaacataaatgatatattttcttagctcaaccgttaaaaagccaattacctactcgtgaacgtttgccacatacaataatactttgaagacacttcatgatcagaagtgagaaact

SEQ ID NO: 60761 - DNA, 122 bp, Homo sapiens
gggtgtgtctcggtagctgtgcgtggtgtggagtgtgtgtctttcctccctgaagctgtgcggagcgaactggcgcctccgagggacgcggctcccggggcagggcagccgtcacccctgcc

SEQ ID NO: 60762 - DNA, 122 bp, Homo sapiens
cctggacttggagcaactgcaagtcccattattttgaatgccctcacagtggggttggggcggaggtgggggaggaaataaaaaaaacaaaaccaaaacaaacaaacaaacaaaaaccaaaa

SEQ ID NO: 60763 - DNA, 122 bp, Homo sapiens
ctgtttttgtttttctgctcagaaaggcggcctgggcgctggagccctgcaaggtgtcaccgtcccaggggctacggagcccgcgggaggctgatccaggccctgggtggctcccacaaaag

SEQ ID NO: 60764 - DNA, 122 bp, Homo sapiens
acctaagtgccacaaggataggtttttaaaaatacacagttggcggggcgtggtggctcacgcctgtaaccccagcactttgggaggcagaggcgggtgggttacctgaggtcaagagttca

SEQ ID NO: 60765 - DNA, 122 bp, Homo sapiens
caggaggagaaacaaaatagactgagggaaaaaacaaagtttgttatgctcacaggtcctcggaacagcaggaacagcaccatgcagttcctcacagggaaggcacaggtgtggtcagcagc

SEQ ID NO: 60766 - DNA, 122 bp, Homo sapiens
ggcgagggagggtgctgggatgggggaacatcacctttgttcgtcccctcgcgagatcagcgtttctttggctttactgtcaagccctgaaataatgctgagtgctgtaatgctgagtccct

SEQ ID NO: 60767 - DNA, 122 bp, Homo sapiens
caggtgcccggcgggtgcgagggcgctggagatggcggctgggagacaccagcagagtcccggaagcccgagacgtcccaggcacttcggttgcgctcccagccggcagaggcgcgcctgga

SEQ ID NO: 60768 - DNA, 122 bp, Homo sapiens
ctctttgctgaagtcagagatgatggcagcttccagattctctggtgcctgtgctgggctcgtgctggtcatggtcttgggtccaggattcattctggagactctcagggaagtttcccatg

SEQ ID NO: 60769 - DNA, 122 bp, Homo sapiens
agagagaaaaggtctcattaagggcttcttagcctagggtatctggaccccttcaagttgcgtgcagcaatgtgtatatgtatatgcttttctgtggggggatgcttctgtagcttcagctt

SEQ ID NO: 60770 - DNA, 122 bp, Homo sapiens
gacttgcggccagatagcgcctgcgattgtttgttaccgttttaatcctattaattaaaacgttaacctgattgggtagaaagcgctgtcccaacaggcgagtcttcttcataataacctac

SEQ ID NO: 60771 - DNA, 122 bp, Homo sapiens
ccgcggaagacgcggagacatacacagaacctgactcttccggcagattgccctagtaaccggaagtctcctgcagaccccgggaaggaggaatctaggttatgattggtcaggactcctgt

SEQ ID NO: 60772 - DNA, 122 bp, Homo sapiens
ctcctgggcaggcaggggctgccagatgtgagtgggggccttctgggcctgccaggccagcgcctgtgtctgctgcacctcctggaattccattgacgttggaatctcgtgtggcaccgggg

SEQ ID NO: 60773 - DNA, 122 bp, Homo sapiens
gagtagaagcttagaagtgttaatttgcaaaaaattggatgcagcacctggaaatagaaccgaaagagccaggttaacctgactttgagcttgttctacttttatgaggtggctgtactttt

SEQ ID NO: 60774 - DNA, 122 bp, Homo sapiens
ccgagcactccatccttgtcctcctggctgccacccacctgtcaccctaagatagatcctcggtccctttcaacagcattttgacctttgcgagaggacatttgattgacggccctgcacgc

SEQ ID NO: 60775 - DNA, 122 bp, Homo sapiens
taaaatgcactgaggagacagatttttgagagttaaaaggaccctctcaaaaaccgaccgcggtcctccactgggtagggggcgctccaagacagggactcttctagcctgttgcctctcca

SEQ ID NO: 60776 - DNA, 122 bp, Homo sapiens
gcctgcagtgaggaaggagtcatgtgcaattctgaagacaacatctccggggtggcaatacgaaagagagggtgccacccacggctcggtgtctctgccctgggtctagggtctgagttccg

SEQ ID NO: 60777 - DNA, 122 bp, Homo sapiens
tgttggagggcaggagtctgctccagcagaggcaaagatgcatgacgaagcctgggctgccggggagacgatgagtaattcagggcagtcagccagtaatggcaggaaacccgtgcactggt

SEQ ID NO: 60778 - DNA, 122 bp, Homo sapiens
ccgtgcccgccccgggagttcgaagggtgctggggccgaggggaaggctctggtcggcggcgtcagcggcagctcccagacgacctaggactgcaaagggcccaggacggggggcggggcgg

SEQ ID NO: 60779 - DNA, 122 bp, Homo sapiens
cgttcggagtatcccggagctgttactcattcccggcctcccgcggtctcgagcgctttccgggttattcatcgcggccccaacaccctgtggccacccgccctgactcagttccttctcga

SEQ ID NO: 60780 - DNA, 122 bp, Homo sapiens
tttcaagctctttctcctgcctggcatatcaaaggagatttgtgggtcaccgagccgggacgcagcatataaagtcatcagcctggccggcaccacctcgatcatttgccgcattgttcttg

SEQ ID NO: 60781 - DNA, 122 bp, Homo sapiens
aggcttaggagtggtggcctgttgggaaagcacctccaggcctctgggaccatctctctccgggtgcgggcatagtcccaatcgagaggagcggtggggaggggccgggtgtggaccccgag

SEQ ID NO: 60782 - DNA, 122 bp, Homo sapiens
tttcggcttcccctgaccccgtaacagagcggaagaggcccagagacgccagaggaggggcgtcagcgggacactcaggccaataagctctgactcccgctgtctgcaaaaatgaccggatg

SEQ ID NO: 60783 - DNA, 122 bp, Homo sapiens
tcgtttagaaagagagagagggaaagaaagaaagagaaaaagagagcccgcgcgccggggcgcgagccgctgaccctgcaccgcctgggaaccgcagtcaaagttatcactaaagcggttcc

SEQ ID NO: 60784 - DNA, 122 bp, Homo sapiens
tcaggggcgctaaagggagaccccagctcttaactcacaatgctcaggattgagaggatgcgtttacggaaaaccaacacaaccccaaggcagaaagcggccaggactcagccacaggagga

SEQ ID NO: 60785 - DNA, 122 bp, Homo sapiens
agctggcaagtgttccctgaattcctgcctccctgcttctccatcggcagcattgctcaccgcattcttgttgtaacctgtctcggctgtgagctctgggcgtttgcttccttcctgggtag

SEQ ID NO: 60786 - DNA, 122 bp, Homo sapiens
ctcctgtgggcctcggctctggagagctgagagaccccaggcccacttccctcggccactcgtggccgtgctctgtgctgactgccttacatggattatttcattacattctgcaaaacttc

SEQ ID NO: 60787 - DNA, 122 bp, Homo sapiens
gggtttctttggtgctccaagcactctgtcacatgggagttgtagtctgccttgtactgtcggctatgggccgaagacgtgagaagactacggttcccagcaggaactgcgactagccggtc

SEQ ID NO: 60788 - DNA, 122 bp, Homo sapiens
cctagggaggggaaccaatctacacacacacatacacacacgcacgcccgcgcacacacacgcatgcatacatggacatgcgagcctcccaggctgcacttctccctgcctgtggggcccta

SEQ ID NO: 60789 - DNA, 122 bp, Homo sapiens
tggtcccggtgggaaatttgcacacaaagacccggggtccgcgccccccccacccaggagcgccgccacaaaaccgggcctggcctccccccggcccgcgcccctgcccctccgctccccgc

SEQ ID NO: 60790 - DNA, 122 bp, Homo sapiens
actctgcatttcgaatcatggataaatatacagccacgctggattctcagggcactatagcgccgagactgaagagagctctgaaaacgtttgtgtgcagggaggatctgggttggaacgtt

SEQ ID NO: 60791 - DNA, 122 bp, Homo sapiens
ccgcagctccacgattagccgcagtcgtgggcggggattggggcttggatacgccttttgcgtctggtccccaagggacgctccccaaccctcggcgcgcgaggcgccgcgtgaggccggct

SEQ ID NO: 60792 - DNA, 122 bp, Homo sapiens
attaacagcacactgtgtactatagttaattttatgcagttacggtttcagactgcatcccgacattggtttacatttctcttgactgagaatggtgccacgtgtggtctgtaagtaggtaa

SEQ ID NO: 60793 - DNA, 122 bp, Homo sapiens
ccgccagctgggccgccggatcccacccgccgccgccgccttcctcccgcctcggccgcccgcccccgctcacttttacgcggttgagtccggcctccagccggagctgttgaaccactttc

SEQ ID NO: 60794 - DNA, 122 bp, Homo sapiens
cggggatttatccgcagcccccggatctgagagccgtctgggccttggggtttccgggcgcgccccgacaacgtcacccgcagaccggccaatcccgccaggccgcggcccagtggcgccgg

SEQ ID NO: 60795 - DNA, 122 bp, Homo sapiens
ggccggatctgggaattcatttttccccactgatcctgggaaccgaagctttatttaagacgtctgaccaccctacttgccccgcgatgggcgccctgaccggcgaggggccctgggagagg

SEQ ID NO: 60796 - DNA, 122 bp, Homo sapiens
tctggcaccactttttgatcctctgaaggggccttggaaatcagacgaccccaatcccatcgaggctttctatcttcttgccaaaaggaacttctttaaggtagttctaagagctgtcttag

SEQ ID NO: 60797 - DNA, 122 bp, Homo sapiens
gggcgggaacagatgtccgagtgcgacagtattggtcggcttccccaggaagcagccaatcggaataggcaagcttccggcgggaagtgagccagggcttggcgcggcggccgtggttgcgg

SEQ ID NO: 60798 - DNA, 122 bp, Homo sapiens
gctgctgcagggcttggctgaggtggccgcgagcggagctgcacgcgcgctcctggggggcgtggttgggatcggcttctgggagcccctccagcagcgctgtctctgccggcatgtgagtg

SEQ ID NO: 60799 - DNA, 122 bp, Homo sapiens
tgctagaggctcagggtggtcaagactaagaatttaaaactccagggggtcagctgggcacggtggctcacgcctgtaatcccagcactttgggaggcctaggcagggagatcacgaggtca

SEQ ID NO: 60800 - DNA, 122 bp, Homo sapiens
acagcaggactgttattacgagtattcagggagagagaataggaagcgcaaaagagattccgcagcatcctaaaaatatcagtaacatgagaattgcctgcccagcaaggcaaggatctgga

SEQ ID NO: 60801 - DNA, 122 bp, Homo sapiens
ttgcaactgcacactcttccggtcagtgtttgttaccgctcgagctgagttttcgctcaccgtccaccaccgctgtttgccgccatcgcagacccacagctgacttccacccctccagatcc

SEQ ID NO: 60802 - DNA, 122 bp, Homo sapiens
gggggcggaacaccaggcctcctgactgccggggagtggggcgcagagggagcgggttcgcgcggagggcaactcacggaggagaagttgtgcggcccgcagagctcgccgcggtacttgca

SEQ ID NO: 60803 - DNA, 122 bp, Homo sapiens
gctgtagattacattagcgtgaacattcagaatgttaacagtattcatttttcactcagtcgacaaaattttactgagcatctactttgtctcaggcattagtctaagcactaagcagtagt

SEQ ID NO: 60804 - DNA, 122 bp, Homo sapiens
gcgcgcggcttccggagacgcgtgcagcgccgtgccgagcttcgctaaggccggggctctcgaaggtccttctcggagagctctagagatgcggcttctgctttctgccgtttcctgcccct

SEQ ID NO: 60805 - DNA, 122 bp, Homo sapiens
agcattcttggtagaaagccatcgctgtgttagggagtgttggctgtttattgaggccatcggtgaggcaatgcaagacagacaaatgtggcttcagtactactaatatgacagcagacagc

SEQ ID NO: 60806 - DNA, 122 bp, Homo sapiens
gaaaccgggctcctgtggaaaggtttatttgctccattctctgcatatctccccagcccccgccacttcttcatgtcacttgctcccctccccaagctatgtcatttaccagggcccaaaga

SEQ ID NO: 60807 - DNA, 122 bp, Homo sapiens
agcagtcactccccatacaatatgtggtcttttttgtctgacttctttcacctaccataacgttttcaaggttcttccatgttgtaagcatggatcagaacttcatttctttttatgtgtga

SEQ ID NO: 60808 - DNA, 122 bp, Homo sapiens
gcacacctccattcagggtttcaagggcgtaggagcctctggggcccgggctctgccccacggggttccggctctgcacccagccccgccctgctctgtggcccacacggcggcgattacct

SEQ ID NO: 60809 - DNA, 122 bp, Homo sapiens
atcaagcagaaagcatctgctaattaagtgtattctatgcatggcctgtctgtattagtacgtaatttccatcttcataaaattcctttgtggtaaatagtaaatactaatctcattttata

SEQ ID NO: 60810 - DNA, 122 bp, Homo sapiens
ttacgtcctgtggtggggcagggaaaaccaccatctccgccatgctttccctgaccccctcggcagagcagacggcatttaggatgagcttgaaggaaatataagtgtctgtcaagtgggtg

SEQ ID NO: 60811 - DNA, 122 bp, Homo sapiens
gcattcaggactggcttagcgcctttgctgagccgtttttcaccaatgggaaccccatatcgctctggctagggcaaggacgttggaaggggtaaaccagggagggccagtcacgtggctca

SEQ ID NO: 60812 - DNA, 122 bp, Homo sapiens
tgcccgaaaaggcaggtccatcctctgcctgcagtcagaactcagggggatccctgaggccggcagcagagccacgaggacgcagtggcctggcggcgggtggggcagcgcgggagctgctt

SEQ ID NO: 60813 - DNA, 122 bp, Homo sapiens
cccccagccgcgcgagcaacgccaggcactcgcccggccctggcccgccacccttgggttcgcctggggtcccccgccagtcttccgaacgggtcctccgagctgcctagagcgcccggaaa

SEQ ID NO: 60814 - DNA, 122 bp, Homo sapiens
cccagtgtctcgcccacccccgccgggcccgtccgactccgcgggtgagcgcgtggttcccggctgggcaccgccgcctgcctctctgcagaccaccccggacccgacccctcggccacttc

SEQ ID NO: 60815 - DNA, 122 bp, Homo sapiens
ccctgcccggcctgccggggtggcccgggggtggggtgggagccctttgtctgcgtgggtcgcctcgcgtctctctctcccaccccacctctgagatttcttgccagcacctggagcccgaa

SEQ ID NO: 60816 - DNA, 122 bp, Homo sapiens
agccatgaaatggaagggaaatgtgccagcttttgttgatctgataggaaaggagatcaccgggcctgcagctgctactcctcagcagtttgcaaggctgggaggagaatccaggtggcccc

SEQ ID NO: 60817 - DNA, 122 bp, Homo sapiens
tcacctcatttcttacccacccagcttgaattctcccatttatcagtgcagtcactttaacgtattcacctttatttttttgctcctcttgcttcatcattcacacaaccttgattaaatcc

SEQ ID NO: 60818 - DNA, 122 bp, Homo sapiens
agacacagggcttgaaagtcatgagtgtcagggacaactcactgtgtcagctagcccagccgggctcatgcccagcacccattgatcacacacaaagctccattgtggccaggatagcctca

SEQ ID NO: 60819 - DNA, 122 bp, Homo sapiens
gtcctccccttctcctcgtcttcctcttttcccatcttatttctttcttttcctgtgggacggagctacagtgagtgccctgcaggcaggattcagagatacaggagcaggccagtggaaac

SEQ ID NO: 60820 - DNA, 122 bp, Homo sapiens
ttttagattaatcacttaccttaaatgggtatctgccaatttcagcctccaactcttctgcggtaaaaatcttgcctatgaatcttttggcatcatatattgtgttttgaggatttgaatct

SEQ ID NO: 60821 - DNA, 122 bp, Homo sapiens
agggtggttagtgatcttaggtcatttacccaggtgagagtctcccagaagtgtggttcgcgggaaaagatgaagttagatgcctattcacaagaatctctggccctccactccaaactttg

SEQ ID NO: 60822 - DNA, 122 bp, Homo sapiens
gaggctgaactgcgcgattttacctggcttctccagaagggtaaggcggccagttggacccggtccttgtgttcggagaacagagtcacccaggcctcgaacgcctgcgatggtcggcgtct

SEQ ID NO: 60823 - DNA, 122 bp, Homo sapiens
ggaacggtggtggcggctcggctactgctcgtggaggggaatacaggttgtcaatttatacgctattaatgccgccgtggcccagtcttaaccgagtcaggcagagctagtttgacggtgga

SEQ ID NO: 60824 - DNA, 122 bp, Homo sapiens
cgcaccgctcggctccactctcgccgctacacaatagggggcggacccgcctccccgcctcggatgccccgagcgcctcccgtcgccctggagaccgccaatccccctcccgcggcggccaa

SEQ ID NO: 60825 - DNA, 122 bp, Homo sapiens
ctttaactaattagcaaccagacatcactaaatacaaatgttagaatggaacccttaactcgaaggcttctgtaagcatatatgtaaagctttgttttattactttaggtcaagtttaatag

SEQ ID NO: 60826 - DNA, 122 bp, Homo sapiens
caagccatacgctggtgcagaccttatcagggagagacagggaaaggtcataatataaaacgtgtgcccagggtgggaaaatgtaatgcaagaaaaggagacaattctctgatgctgagtat

SEQ ID NO: 60827 - DNA, 122 bp, Homo sapiens
agccggtcccatcactgagtactgacctttccttgcagccattcgctgaaggacgtgttgcgggtcccatcaccgagttctgagctttccttgcagccattctctgaacgacgtgtctgttt

SEQ ID NO: 60828 - DNA, 122 bp, Homo sapiens
tgcatggcaatgagtccgagcaggagccctctggctgcggttcagcactttttccgtttacgtatgcggggtgaaagtcggcttccaggcgttcgatctccagccttccagctcacagtaat

SEQ ID NO: 60829 - DNA, 122 bp, Homo sapiens
gtgcacttttgggtatgtttgttatacctcaaccaaaattttacatctcaaagaagtcaacgctggcctttgtcacctacctctgcacaccataaaaagtgtgattaaggctgggcacagtg

SEQ ID NO: 60830 - DNA, 122 bp, Homo sapiens
acacgttccgcctcccttctcccaaaagcaaaagcgtgcatggcacttgctggggcttagcggccgcggggcgcatcgccggccgccgccgaaaacctgctgcgtccccgcaggctctgcct

SEQ ID NO: 60831 - DNA, 122 bp, Homo sapiens
ctcataggcctttccaatgtagtgtgtccagtaagaaactcttgttttttttctcctaaacgtagtctgccccaacacccacccattatttcctaaaaccagagaactggggatcattcctc

SEQ ID NO: 60832 - DNA, 122 bp, Homo sapiens
gggcgcccccaggcggaagcaccgggcctggggcgacaggaagggggcggggcagcgagtcgcgctgtacaccccaaaaccctgtcccgctgacgattcggggtgcatctcagcccgcggcg

SEQ ID NO: 60833 - DNA, 122 bp, Homo sapiens
acgggcggggccgggctccggcgctaactgcatccactaggtttggtcaacacagagccgcgccaactctctgaggctgcgccaagacctgaagcggcggaccgagagcccgggtctgagac

SEQ ID NO: 60834 - DNA, 122 bp, Homo sapiens
gagctctcgcgacagggttcccggggtgactgcctgtaaggggccacagctcagtgaggtcgagaaggagttcagccttaatgccacaaccttgatactcagggcacctgctgggctcctcc

SEQ ID NO: 60835 - DNA, 122 bp, Homo sapiens
aacgagtcagtgccgcctcatccgcgtcaccacatccctgtaggatgcagtgtcttcattcgtaaaacaagggtgttggactactgtatcttgagggtcccttggcgctgaatttccatctt

SEQ ID NO: 60836 - DNA, 122 bp, Homo sapiens
ctgataaataaaatcaacaggtacaaaatgtttcaaaattccaaccaaaaaaaacacacacggacagtcggcagacaagacaaatggacagaacgggagggcgctaaacgcaatcacaggaa

SEQ ID NO: 60837 - DNA, 122 bp, Homo sapiens
agtatggtcagggactagccagctctctgagcccccggcgcccccatccccagcgtggcccgggaacccagtgctgcgcacctcagcatgggatactgccctcaatccgatgccatctttga

SEQ ID NO: 60838 - DNA, 122 bp, Homo sapiens
ccgcccctccccggacacccctctgaggcgctggccacctcagaggatttgcaagaagcacgtgggtcagctggatgccctgagccctggcctcccctccaccttgggtagctgctctcgct

SEQ ID NO: 60839 - DNA, 122 bp, Homo sapiens
ggccggtgaccgggacagtccacctcgcaggcgcgccggcgcggagcccggacctcagcccgcaatgactcagcaagggccggtgggattctacatggtcctgcgatatccaggcgacggag

SEQ ID NO: 60840 - DNA, 122 bp, Homo sapiens
tcacaacagtgcatggctaaaaataaagatctaacaacgatctgtgaaactgcactgcaacgtcaaggttcgttcttccctgaccctcccccgtataatcaaatgaatatcccctttaaaga

SEQ ID NO: 60841 - DNA, 122 bp, Homo sapiens
aaattataatacataaaagttgtcagggcggagagcaagacattactcttctcggattgccggttcgctcgcgagacttgagcgttgctaggagattcggcaggcgggcggagccagactcg

SEQ ID NO: 60842 - DNA, 122 bp, Homo sapiens
atggcgtcgtgtctagttccctctcacatgttgccgtgtctagttctctatcacacatagcgtcatgtctagttctctctcacacagagcatcatgtctagttctctcacatggcgccatgt

SEQ ID NO: 60843 - DNA, 122 bp, Homo sapiens
cgcggccccattaggttacgcgcccccggggactccgccgccgccccagcccgcgccccgcggtcccactcactgttcttgaggaatcgctcctcgtgcagcactgcgatggcgttgacgca

SEQ ID NO: 60844 - DNA, 122 bp, Homo sapiens
ctgccaccctaagtatcatgagttcttgatttcctttattccttgaaagagccctcatagcggtggatcctactgtattccatcttatagagctggattctcaggttcagagagcttaaata

SEQ ID NO: 60845 - DNA, 122 bp, Homo sapiens
gggtagagaagacccctttgggtgacagtactattgagatcttaaaaatgaggtcgaactcggccgggcgcggtggctcacgcctgtaatcccagcactttgggaggccgaggtgggtggat

SEQ ID NO: 60846 - DNA, 122 bp, Homo sapiens
cgccctccccacgcctggccttgtccatctctcagactcggcaatgattggcttccgcggcgccaatctccacccgcagtctccgcctcccgcacctgtggtccgggcctcacggtttcagc

SEQ ID NO: 60847 - DNA, 122 bp, Homo sapiens
gggcagacctgaattttaaaagaccctcagagtcacacagcaaatgagccctcaaatgcccgtgtcccgcctgcgctccggagaacccctgccctgcctcggggactcgggaggtgggtgtg

SEQ ID NO: 60848 - DNA, 122 bp, Homo sapiens
gaatctgctcagcttcttttgtacagctttagaacatggtggagaaggtcagaaaggaagcgagcacatgcaaaggggaaccaaccctgatgtgcatcctgactttatagccacccactctc

SEQ ID NO: 60849 - DNA, 122 bp, Homo sapiens
ctgccctggaacgattttcctgtcccctcctcccaggcgtggctggcagaagctgaaagtcgagtccttagcaaccggggagacagcctgagccggcacgcccggcctcccgacccccccgc

SEQ ID NO: 60850 - DNA, 122 bp, Homo sapiens
tagttttaagttaaaaacctgcctgtgctgacacacagttctctaaggaaccaaggcttccggattgctgggaaatggggcagccccagaatagtgcccggagcgtttccaacagagcctgg

SEQ ID NO: 60851 - DNA, 122 bp, Homo sapiens
atacatatagaaagtgatagataacacagcctatagctcataaggattagttgtgataaacgcatgctaggcgtgcactcacagaaacagaatgaagacgattattatcacccacaccatcc

SEQ ID NO: 60852 - DNA, 122 bp, Homo sapiens
atgctgatgccagtgtcctggagccgcatgcccaaccacttcctgcaggtggagacgaggcgtgccggcgagcggctgggctgggccgtgcagtgccaggagccgctgaccatgatggcgct

SEQ ID NO: 60853 - DNA, 122 bp, Homo sapiens
ttcccaccgcctcggacatgggactctgaggccgcgcctcggaacgtgtccagggccccgcgaacaccctggggacctctgttatccagggccgcatttcctgtagggatagccgcagccac

SEQ ID NO: 60854 - DNA, 122 bp, Homo sapiens
actcccttccccagcaggcctagggagctgcgcgcgggggcagtgcgtgacctggagacccgggccctggtggattgggagtcgggcggggggagcaggtcatgctagggtggtctccggcc

SEQ ID NO: 60855 - DNA, 122 bp, Homo sapiens
tcaggagtcaggagctagagccgggaccttaacttaaggccctgggttccaggaacttcccggagtccttggcccctctgaaactgtaggctgatttgcgcgactgtgtgcaatgctaatat

SEQ ID NO: 60856 - DNA, 122 bp, Homo sapiens
agttcgggtgcccggcctgctgcacccaggggactgtggagcgctgaggggggcactccccggaagggtggaataacagagtctctgctgttgtagtaaaaaaggaatcacagattcagtaa

SEQ ID NO: 60857 - DNA, 122 bp, Homo sapiens
cctacagtcttctgtcttcacccatcctttgagatgcaaatgagatggctccaggaatcacgcccacaagccttaatccatgagacagatgtattggttttctcacttctttgggtcacttt

SEQ ID NO: 60858 - DNA, 122 bp, Homo sapiens
tagcagggtttctctaccaagccaggtagattacctctgtaaatcttattaacaaggatacgagttgcactactaaactgctgagaagttctggaatggctcccttagtgccctcctagtca

SEQ ID NO: 60859 - DNA, 122 bp, Homo sapiens
cccagagagcatcagataaggccactagaaaacaggcaggttgggagtcttgcacctgcacggggctgggcccagagcagctcagtggcagcctcttccttcccagatatttttccttgggc

SEQ ID NO: 60860 - DNA, 122 bp, Homo sapiens
atcgtagctcagctgtcagccggtgcaggctcagcacatctcctgggtctggcaggtgaacgagctgggagtctgtgtctctgtgtaagcccctctgccggccggcttgctttaattaatgt

SEQ ID NO: 60861 - DNA, 122 bp, Homo sapiens
acgctttcctggcccagccttgaccttagcatcggacacttcattatgtagcgatcactccgctccaaccccatcacccctttctgaaatattctgatttccagcctgtaatttgctttctg

SEQ ID NO: 60862 - DNA, 122 bp, Homo sapiens
atctcctccccctcgtgcgatttgagaaattaacccttggcgagggagtgtgcgaaagagcgcgacctctctccgcccgggggggacagttttgtttacagcgaaggtggttggaagagtgg

SEQ ID NO: 60863 - DNA, 122 bp, Homo sapiens
cgcggctggtaccccggaagcagtcgctgcaacttccgggaggtgcttgtgtgcctggtgcgggagctacggggcccagggattgtgtttaaagtagtgcttctaccaacatgtcccgtggt

SEQ ID NO: 60864 - DNA, 122 bp, Homo sapiens
ggggcggggcgcggggcaggcagcggggtaggctgcgcccaggagagtggggcggggctccgggcgcgggcggggccgggggcggggcgaagagcggctttccagggtgacttcgtgacgtc

SEQ ID NO: 60865 - DNA, 122 bp, Homo sapiens
taggaaatttcggaatgatgaactccaaacaggatatgcatctgtagcaagggctacctccggagagaagggtaggggaatgaggcggtctttgaccttgacagtaatttatggtttttaac

SEQ ID NO: 60866 - DNA, 122 bp, Homo sapiens
cacgaatcctacggccggctgggcacctactgctgcagagggttgcgcaggcgcaggcgtcgccgtggctccgccgagccctcagagtcggggttgggccgggcctggggtcaagggcaggg

SEQ ID NO: 60867 - DNA, 122 bp, Homo sapiens
gcctccccgagtgtgcaggcatccttagaagtcgcatttccccgggacaggaatgtccctcggtggcaatgccgcttcccgccagaagcctgactccgggacagggcgtggcaggcgcgggg

SEQ ID NO: 60868 - DNA, 122 bp, Homo sapiens
tccctttttcccccccacaactcgctctccattcaccgttttacgacagccggtgggaggcgggagaaggaagaagaggaagcagagcttcctttacggcggcctcttcccccgggcgtgat

SEQ ID NO: 60869 - DNA, 122 bp, Homo sapiens
catcgccgccgagggctgagagaatagggcctgtgcggcgaatggcaacctgggctcaggcgcgcgggcctggggagcgcaagaccggccccctcggccgccgccgccgcctcagcgtcccg

SEQ ID NO: 60870 - DNA, 122 bp, Homo sapiens
attcataacttgatcatttattccaagtcgtgttgggcttggacctcgggctctcgggagcggccgtgacggagctcagacccagcacttctcctgcagagccagccgctcgctgctggcca

SEQ ID NO: 60871 - DNA, 122 bp, Homo sapiens
ccagcatccagcaacccatctgacatggagtagatgctcaaaacatgcagagcagccaggcgcagtggctcacgcctgtaatcccagcactttgggagtccaaagccagcggaccacctgag

SEQ ID NO: 60872 - DNA, 122 bp, Homo sapiens
cctgcaaaggcgctggcctacccctgagtagccataaatatcctcgaagtagcggaaacgcgccacgcggccccgggccccagccccctcctctgcgccgccaccttctgctttcttcttgg

SEQ ID NO: 60873 - DNA, 122 bp, Homo sapiens
tgtgcgtaagcgaccagatttccgggggagccgggggcgggacttcagcggaggccggagcgaggcgtcgggatgcagcgccccgggcccttcagcaccctctacgggcgggtcttggcccc

SEQ ID NO: 60874 - DNA, 122 bp, Homo sapiens
tccaccaggcccagcagcgaggccagcccgtgcagcagcacggccgcgtggtcgatgtagcggatgctggtgttgctgtggctctggagacggctcatctgctccaggatggggcagagtgg

SEQ ID NO: 60875 - DNA, 122 bp, Homo sapiens
cgggttgcagtccatcccttgcaaccgtccaacctggccctagcagaggaaaggcgtcctcgtagctccgccattggaaatcggcttcatcctgccctttgtggcctcctgagagatttgta

SEQ ID NO: 60876 - DNA, 122 bp, Homo sapiens
tcggggccctgcagtacccggctctgacgggtggtcatgttctggggtcggggcgtgtggcgttggggaccccactgctctgtggttggtgcttctcttcattcccatttgtgtggtctgga

SEQ ID NO: 60877 - DNA, 122 bp, Homo sapiens
gagcgagcgagcggccggcaggttgggaggagcggccgaaggtgagtgacgcggcggggccgtgccgcgccccgtgccgcggcgaggttgtcccggagcgcgaggcccctacccctgcctcg

SEQ ID NO: 60878 - DNA, 122 bp, Homo sapiens
gccccccaggaatccgacttcctccgcagctgtcaccagaggccggcgcggggcccgccccgctccattcataaccaggaccccagccgttgcagcccacagcgccgcccgcccgccgggct

SEQ ID NO: 60879 - DNA, 122 bp, Homo sapiens
ccagcatggagcggaagagcccgactgctttctggtactcgctcgcgcggaaggcctcgtcgccctcctccaagcgctgggcgattggcttcccgcagcagcagcccgtcactggggcggcg

SEQ ID NO: 60880 - DNA, 122 bp, Homo sapiens
catcttcctctagctcaacagtcttgacttttcagggccgtgacccagaagggaggtgcccgtgcagaaggcagaacaggaagaggttcttagcacccactgttttctcttcctgcacagcc

SEQ ID NO: 60881 - DNA, 122 bp, Homo sapiens
catttacaagtaagaaaaatgaggcttcaggaagtctgtttccccagtggcctgcaggctcggggatcctcagtgcaagcccaacatctcacatcgccaccaaataaaatcaatgcacgtgg

SEQ ID NO: 60882 - DNA, 122 bp, Homo sapiens
gcgggtctgatcctgggttgcctgccctgggagctgcaggctgggggtccctggtgtggccgcctggtccttaccaagcacctggtgtgtgtctctgagggtgtctgtgtgcgtacgtgcat

SEQ ID NO: 60883 - DNA, 122 bp, Homo sapiens
ccatgcctgctgggatgatgatgcctgcaagtgtgtgagggctcccagctcaaccgtctgcggtgtcgtcactgagagtcctggatggccaccacgtggagacagatgcgggtggtggcggt

SEQ ID NO: 60884 - DNA, 122 bp, Homo sapiens
gagcctccctcttgcattagatatacttgaagtgggcttttttggctagtgctagatctccgtaagtttgaattttcagatgagtgttaaagtaataaaatgttctgccattggttcaaaga

SEQ ID NO: 60885 - DNA, 122 bp, Homo sapiens
gcacgaggaggcgcttgaaccctgcctctaaatgctgtttcttctgaagctttgctgcaccgtgtatgtttagttacaaacacactagtccatgctccaggtgaagaccgaccaccgccgtg

SEQ ID NO: 60886 - DNA, 122 bp, Homo sapiens
gagtagagagccctgggtgggggtactcacagagtagccgtgtgtggcggtgcagggccccgcagtctaggcatggttggcagtagaagggtgaactgctgacacattggctgacctggcac

SEQ ID NO: 60887 - DNA, 122 bp, Homo sapiens
gatacaagatcaacaaacaattggttttatttctatacactaacaacgaacaatctgtaacgaaattaagaaaaaaatttcatttacaatatcaatagtaaaaatactggggaatctggaca

SEQ ID NO: 60888 - DNA, 122 bp, Homo sapiens
gcgccccggtcggggggctccagcaggctctccgagttctccaggatctcctgcagcagccggcgcttctgatattccggacctgccagggcaacacagggaggctgggctcgaaccccgca

SEQ ID NO: 60889 - DNA, 122 bp, Homo sapiens
agaggcggcagcaagactcaagacgccaacggcgccgtcttcctggggccccagggcctgcgccatccctgggctgccggggcaccgcctctccacgcccctcgtccggcggcggctgcgac

SEQ ID NO: 60890 - DNA, 122 bp, Homo sapiens
ttgtggaaaggctttgttagctggaagccatctcaagtattattctttataccccaatctcgatttaggcctctaggtaaccaaattcaaagtaacacctcatcatcatgatggttgccaag

SEQ ID NO: 60891 - DNA, 122 bp, Homo sapiens
ttctctctagaggaagatctgcgttttgtctgcactgtgggccgactctctagtggggagcgtcagaccctctaaagtggctgcctctcgggaaagcttccacacctgtcatcagattctcc

SEQ ID NO: 60892 - DNA, 122 bp, Homo sapiens
agcttgagatctccatgcaaggcactgcccctcctgatgagtgccttaatctctttgcaacgtctggcagaggtcacaaacaacacgctctcctatctgtttctgtggttcacctgctcctc

SEQ ID NO: 60893 - DNA, 122 bp, Homo sapiens
taattaaaggctcaaattaacaccaggaaaactttcatgtcacaaaatcttcagtgcctccgtggttagaaagagctatatttttaataccatgatgataaattaaaattcaggaatgtctt

SEQ ID NO: 60894 - DNA, 122 bp, Homo sapiens
agtctgattttgttgcccaatttgttctcgaacgcctggcctcaagtgatcctcctgcctcgtcctcccaaagtgctaagattacaggcgtgagccagcacacccagcctggaaattctttt

SEQ ID NO: 60895 - DNA, 122 bp, Homo sapiens
agaatcaggaaatacgatgacttgtctactcaggcacatacttaaagaaagtacccaaaccgaaggaactagaaagactttcgcttcttttgaaaagaagggaagtggtgagtgagcttcgg

SEQ ID NO: 60896 - DNA, 122 bp, Homo sapiens
tcgcacaggcagcgcccttcctcacagcggcccctcccgtggcagttggaggggcaggtgcggatgctgcagtcctcactcacgtagccttcccaacagatgcacacaccgtcctggcacac

SEQ ID NO: 60897 - DNA, 122 bp, Homo sapiens
acagagccagagaagcttccaaggagacggctcaccccaacacagaggcatagatttgggcgcagggagtcagaaccaggatggagtttagagctcatctcgctctagagaagacgaccaag

SEQ ID NO: 60898 - DNA, 122 bp, Homo sapiens
cgtagcgctcggcctgctcggccagcttggccttctggatcagctcagtcttctccatggcgggcgcggggccggggccggggcggagggcgaggagagcgagggcgagcgccgacccgcag

SEQ ID NO: 60899 - DNA, 122 bp, Homo sapiens
cagacgtggccactctttgaccagatggatcaagacaaaaacaagactccttcgtaatcacgtgggaatgctgaaaaaacgtaaacattgtccaaaccacaaaaatgaccaaacatccccta

SEQ ID NO: 60900 - DNA, 122 bp, Homo sapiens
ggaaggcactgggctttggcctcctggggcagaggagctgcagatgggaaagtgaggccccggagcatcaaccatgagcagtgcattctgctttcgggggatggtgtttgactctaaattct

SEQ ID NO: 60901 - DNA, 122 bp, Homo sapiens
gtaccatcttacatcccaccagccccgagtgagtgaatgatctccaacccatttcccaggcggctctaccatctaacatcccaccagccccacgtgagtgagtgatctccaacccgttttcc

SEQ ID NO: 60902 - DNA, 122 bp, Homo sapiens
gcatcgggcccggagcaatggaagtctcatccccatcctgagcggcctcttttctaggatcgagaggaccacactccagcccaggacaaaagccccacggtagcacattgtccggcaggaga

SEQ ID NO: 60903 - DNA, 122 bp, Homo sapiens
agaggctgcaggtcggcgcgagaggctgtttgcatctcggcccgggcgtaggtcgcctagcgacctaacgccgagggctcggggaagggatcccagacagagccaaaatggaaggcgggaca

SEQ ID NO: 60904 - DNA, 122 bp, Homo sapiens
agaccccagcagccagcggcaccctgctcacccctcccgggccaccctgcgccggctcctcgcagtagcatagcctccggggcagcgagaactttataggtccagtccccaccctgctcagg

SEQ ID NO: 60905 - DNA, 122 bp, Homo sapiens
gataaagcccagcaggtgccaagtgctgggcccaccgagcccacgcccacccgtaacccccgcacacccagaacccgcgcctgccccgcgagcgccacgcacagcccctgctccctcccgcg

SEQ ID NO: 60906 - DNA, 122 bp, Homo sapiens
gctgccctgcctccctccttctccctttatccccccgcccccccccatgctctccctccgcgggaatcacgtgtcgccatcatactcattgggagtctctgcctcgcctgtcgccacgtttc

SEQ ID NO: 60907 - DNA, 122 bp, Homo sapiens
acagatcattggatttggttctgcacttcttgaagaagttgatcctaatcctgcgaatttcgtgggagctggaatcatccacacgaaaaccacccagattggatgcctgctgcgcttggagc

SEQ ID NO: 60908 - DNA, 122 bp, Homo sapiens
gtggcgccccagccgtggcaggtaagaggccgagagggcccgggcctgccagtcccctgtcgcccagccggtggggcccgagcccggcgtgcaggccgcgcggggcccccagcggccgccgg

SEQ ID NO: 60909 - DNA, 122 bp, Homo sapiens
gtgtccaaaagcagccgcaggggccgcgggagcatggccgagtgaaggaatcagcggggtcgggccatgggggcgcctggggagagacggggtggggtgggggtggagagtcaggcaggcgc

SEQ ID NO: 60910 - DNA, 122 bp, Homo sapiens
gatttcaagcatacactgttgtgcatctacttcaacttgctctctataagaatcttctatcgtaggatcgtatttttctacaaaaattccttgaacaaattgtacagtcaaagcagactttc

SEQ ID NO: 60911 - DNA, 122 bp, Homo sapiens
ctatcttaggctgacacttgactccttgcctacatctatagcttggcacagagagattcacgcaccctcaagagtgtgggtgagacatatacagcctgttagacctgaaggtgagcccaacc

SEQ ID NO: 60912 - DNA, 122 bp, Homo sapiens
cggggctgggaggtgaggtgctcagcacatagtggggtcaattgccaggggtccccaagccgtgcgcacaggcctctcactggcaacccttcctgtggttcagcttttcctggaatatcttg

SEQ ID NO: 60913 - DNA, 122 bp, Homo sapiens
aacgccggcgccttgttcagggctggtggggctggggcgcaaggtgcagctgacaatgcccgagaggagccgcagcctctggtggagttcggtcgggtgtgggggtagtcaaggaaagaagc

SEQ ID NO: 60914 - DNA, 122 bp, Homo sapiens
ttgcatctggtagtggacctcctgaggactgaaggccactgccactgattcctgcaggagcgggggcacccgagccaggggcctgcacaggcttgaaactgcaccccaaaacctgggctccc

SEQ ID NO: 60915 - DNA, 122 bp, Homo sapiens
acaggcggcaaggccagaggaggtgagggcctggggggcggaacttagccactgtgaacacgacttggtgtggaccctgctcacaagcagctaagccctgctcctcaggccaggcacaggct

SEQ ID NO: 60916 - DNA, 122 bp, Homo sapiens
ggggcggggttgggggtggggaggtggcggctgttccaagcgcaggattctggagtccaccggcgcttgggcaggtagcaagcagagctagctgcacgttgccccggccggcgttttcaaac

SEQ ID NO: 60917 - DNA, 122 bp, Homo sapiens
ctcctaaaaccagcttctgaaaacagcatacaggaagatacatgtctcagaaagtatcaacgtcctttccttagctccttccagttcagaggtcactgggcaggcgtggctttgggatgaag

SEQ ID NO: 60918 - DNA, 122 bp, Homo sapiens
cctcaccctcaccccccaatgcttgcggtttgtacagctgggatccagagaagcgtccagcgggccctagaggggcagacacctcagcaggcaggtgctcaggttgataaacaactgaacgt

SEQ ID NO: 60919 - DNA, 122 bp, Homo sapiens
ccagctgtactacgagtgctactcggacgtttcggtccacgaggagatgatcgcggaccgcgtccgcaccgatgcctaccgcctgggtatccttcggaactgggcagcactgcgaggcaaga

SEQ ID NO: 60920 - DNA, 122 bp, Homo sapiens
cgttccaaacctttcttgcgcagcagccgcgcacccctgggactgacacccggaaggatgcgaggactgggtccccgcatccccctggcagccctggcaggaccccatcctcggccccgcgc

SEQ ID NO: 60921 - DNA, 122 bp, Homo sapiens
ccctctcttctcccctctcctagtctgaacgtgggccttgactaaaacttgagatctgggcgcggtcggcagcgtttctggaccccagcctgtgtttgtcgcttgtggtggtggcgccagac

SEQ ID NO: 60922 - DNA, 122 bp, Homo sapiens
tcggcctcacccttcctactccacttctagcccccataactccatcaatataagcagtaccgggatcacatccacagcctgtgggctgtcagcgtcctctggagcagccccatcatctgaag

SEQ ID NO: 60923 - DNA, 122 bp, Homo sapiens
aggaaaacctagtttgcgaacagacctggacagcagcctcctcccaaccagcctgtctcccgggggcacttttgccgcttccatggagcagcagaaatctcagtccagccaaccccggcctt

SEQ ID NO: 60924 - DNA, 122 bp, Homo sapiens
atttaaattcatccatttctacacatgttgagtccattaaataaaaaagatgatctaaagcggttgcctgtgtaggtgtctatagacagatgtgtgccatagtcatagtttttgttttgggt

SEQ ID NO: 60925 - DNA, 122 bp, Homo sapiens
ggcgcccgagtccccagctccactgtcctccgcctctacactcggggattctggagaccacgtcgacccgcaatgaactggaataaagattccagtctccagcccctgggggaaggcaggag

SEQ ID NO: 60926 - DNA, 122 bp, Homo sapiens
ctgaggtgggggatgtgggctagcggccaccgtgggcggcaggtgtgcaagcagtgctcccgttttccactgggctgcccttcaccggctgtgggtcagcgccccccactgaggctcaggct

SEQ ID NO: 60927 - DNA, 122 bp, Homo sapiens
tccgcggcagtgtgtctctgtctctttatctccatcttcgggtcgcgtgttcttggcccccgtgcccgtggcgggaggcccttcttacctgagttgagcctggtgcgcgcccgcgggagggt

SEQ ID NO: 60928 - DNA, 122 bp, Homo sapiens
tctatgaattggggatgctacctgcctagtctactccataagattgttctgaaggctccacgtcacattagatgtaaaagtactttaaaatatgttaaattattgtaagtggcaagtcatca

SEQ ID NO: 60929 - DNA, 122 bp, Homo sapiens
ttttctgagaaatgtatgtaaattttattcagaaatagtaaagttttaaaaatgttatttcgatagtttctgtggaacaggtggtttttggttacatggggaagttcttcagtggtgagttc

SEQ ID NO: 60930 - DNA, 122 bp, Homo sapiens
ggggcctagggtctccccgtagccccccgggacggaagcagccgcgtgggggaggggaagcggggaggacgcatgcccagagggctccactcggcctctagctcacctgggagtcacggaac

SEQ ID NO: 60931 - DNA, 122 bp, Homo sapiens
accagagaggcgcctactgggcgagcccgccgcccgcaggttgggtggcagcacccgccgcgaaccccagccacgctccccagtggacccaccaggcaaaggcacctgctgcctgccctcca

SEQ ID NO: 60932 - DNA, 122 bp, Homo sapiens
aagacacaaccagggagcgagtgcacgcccgggccgaccagggctgcgggcatcatatcccgctcagccgctgcctgccctccacgcgcccctggctgcctctctcagcctcggccccctcc

SEQ ID NO: 60933 - DNA, 122 bp, Homo sapiens
gttcccggagccaccagtgtctccacgcctgtccccagccgacagccactcaccgacgctcggagcaaccgtcctacagcagccgccatcttcagtgcactcgggcgccacggggcgggcag

SEQ ID NO: 60934 - DNA, 122 bp, Homo sapiens
gtggacaaaagcagaatttccaccagaaggagcaagaggggcagggacaggtgatgcaaccgggaatattatttacaccaactcaggaccaaaggagaacattgggttccaccacatataca

SEQ ID NO: 60935 - DNA, 122 bp, Homo sapiens
atcccttcccccaactatcccagacgccccagccccgggggacgcggtgcagagaaagaccgcagcacccgccagccagccagcagcgtcctccagccgcgaatccccgcaccccagccttc

SEQ ID NO: 60936 - DNA, 122 bp, Homo sapiens
gcggccaccgcttcacagacgaccagtggctgaacgtgcaggccttctctatgctgcgggcgtggctgctgcacagcggccccgagggcccgggcaccctggacacaggtgtgcggggtggg

SEQ ID NO: 60937 - DNA, 122 bp, Homo sapiens
cttggagcgggtgtctgggaaacacagtctcacttgtctcctcaaggggctccggggcaccgtaacagcgtgcagagcgcagtcaggctgccgtgctgctgctttgcgaggtgtgactgcag

SEQ ID NO: 60938 - DNA, 122 bp, Homo sapiens
ttacagccctagtgtgcgcctgtagctcggaaaattaattgtggctatagccgcctcgatcgctgtctccccagcctcgccgcggccgctccgggacgcgcccgcccgccgcccggctctcc

SEQ ID NO: 60939 - DNA, 122 bp, Homo sapiens
cccccagaccttcaccactcagcgcccgctgcacatcaacaaggcgggcagcagccagggcgacactgagtcgccatcccacgagaagctggtggactccaccttcaccccgagcagctact

SEQ ID NO: 60940 - DNA, 122 bp, Homo sapiens
taagagaaagtaggaacctacaatctcttaatctaagcacaagataagcaaaaagggaagcgccttagaaatgcagattccccaaccccacccctgagattccagtggaggcgggggatggg

SEQ ID NO: 60941 - DNA, 122 bp, Homo sapiens
ctcccagccccctcccgaagccccgccccgcctccgggtctggaggaggctgggaagccccgcccctccacgctagcgccgcccaggctggcacaaaggaggaagcctagtcccgcccctgc

SEQ ID NO: 60942 - DNA, 122 bp, Homo sapiens
tgtcaggcatctcaggtgtcttgaaaagctccaaaggtgaaacagaaaactctcccggtgcgattttcctatttgatcttttgtctcatgtgttccccttggggatgaacaagaaatacttc

SEQ ID NO: 60943 - DNA, 122 bp, Homo sapiens
cagctttctcttgacagatgggagggcagtgagcactccctctttaaaacaacatttaatcgccgttttctgttcttggacatcaaagctggggcttaggcgctgtgctggggtcgcggcgg

SEQ ID NO: 60944 - DNA, 122 bp, Homo sapiens
tagagggcttccaacccctaggaccactttgctcttccctgcaggaagctctcagatgggcgccttagcccggtggtgcacccgacggccctccccggcgctccctgtgttcagtaccagta

SEQ ID NO: 60945 - DNA, 122 bp, Homo sapiens
aggctgaggcaggagaatcacttgaaccctggaggtggacgttgccatgagccaagactgcgccactgcactccagcctgggacatagagcgagactccgtctcaaaaaaaaatccagagat

SEQ ID NO: 60946 - DNA, 122 bp, Homo sapiens
aatggatccttgaagcacaataaacagatagtatttctgcatgtgtcactctgagtatgacggcagtaatcttgaaactccccttgaccacctggcactctggagacggaactccacagcct

SEQ ID NO: 60947 - DNA, 122 bp, Homo sapiens
tgcctctgagtcccaggcctgcctcctgctggttgggagactttaaacaaaggattcagtcgccctgtgcttcaatacctcagctgtgaaacgaagacaataataggtgtacctcacaagtt

SEQ ID NO: 60948 - DNA, 122 bp, Homo sapiens
caccaggtccgcgcagccgcagagacccttgggaagtgtggtcttcgggtgccggcggttcgcggcttccgggacatttgtaccgcagggggaggattctgggaaatgtggttcgccgtggg

SEQ ID NO: 60949 - DNA, 122 bp, Homo sapiens
taggaaaattccaacaaaaaacccacggtgctggagcaagatctcaggctgtgaccttctcgaggaaagaagcactttctgttgtctgaaagaaaagaaagtgcttcctttcagagggttac

SEQ ID NO: 60950 - DNA, 122 bp, Homo sapiens
catagtcaccaggtgacccctagggccggtgtccacaggaccacaggctccctctgcaaacgcagaaccaagttgtgagtggggcacactgtgggaagcagctgcctccatcagccagccag

SEQ ID NO: 60951 - DNA, 122 bp, Homo sapiens
gtgttaacttctatttcttctcagtaatcagcaacaaaaccttaaaaggaaatgggcctacggaaagtgaggagtcagaaaaactgcattccattccacagacagccttgtgaggagatgca

SEQ ID NO: 60952 - DNA, 122 bp, Homo sapiens
acttcattgagaaagtcagagcattctctaactaccacccctccaaaagaaaccctagaacgtactcatctgcctactattattacatttatcatcctatctgaattcataccttctttttc

SEQ ID NO: 60953 - DNA, 122 bp, Homo sapiens
ctctcccccctgcagtgacctatacacagagacaccatcttcatggacacggacatgacacgcgctctgggcagcctggctagagctctgcccacggcacgtcagcccctccacttccgtct

SEQ ID NO: 60954 - DNA, 122 bp, Homo sapiens
tgatgccatagtgattccataccagaaaataagaaacagtatctaaaactaatttgcaggcgatcgatttggcaagtatcatatgactttgcaagaggactgaaaatttagaagtatgagaa

SEQ ID NO: 60955 - DNA, 122 bp, Homo sapiens
aagagccacagccaggccttgagaggcccggcagactggccctgggcggcgccggcggtgcgtgtgctgttagtgattcaccagcacgagtgagttgctcacctgtgtgattcaaactggag

SEQ ID NO: 60956 - DNA, 122 bp, Homo sapiens
cacagttccggccgacagagacttttacttatgtgcacagattagggaagctgcccacctcggcctccggaaggcagcgtgcggtgtctcgcaggccctcggcgggctctgctgggtggtca

SEQ ID NO: 60957 - DNA, 122 bp, Homo sapiens
ggagatcgcccggcggctgcggtggtggcactgccaggggctgtctcgtcccgagggcaccgcgacccgggacgccccgcgctccccaaggcctcggcacctggggtccggccggctctggg

SEQ ID NO: 60958 - DNA, 122 bp, Homo sapiens
tcagccccatccagctcaccgagaagaagctcaggatctcgggtctccgccgggacatctcgtctatgtcactcagaacctccagcagatctgacacagagagagggccagaccagaactga

SEQ ID NO: 60959 - DNA, 122 bp, Homo sapiens
acaggctccggctgctaaaaattaatgcaaccaatagtaacaccagccaacttttatggacggttttactgccagccagggtggcaaccccatgaagtaggtgctgttatgccctttacttc

SEQ ID NO: 60960 - DNA, 122 bp, Homo sapiens
attgtgggatatagatttttacagggaaaagaatgtaggctttggggttagatcaagtcccggcatggctgctaactagctatgtgaccttagacaaatgatctaacttctgagcatatgtc

SEQ ID NO: 60961 - DNA, 122 bp, Homo sapiens
cacacaggcatacacacgcacacgcacatccacacacacacatgcgcacacacacgcacacgcctgcactcacacacccccgtcggccccaagcaggaaggcgcccccggcacaccagcccc

SEQ ID NO: 60962 - DNA, 122 bp, Homo sapiens
agcgggaggcgcgggctctctctagcagggggctgcagccatgaagaggctcttagctgccgctggcaagggcgtgcggggcccggagcccccgaaccccttcagcgaacgggtctacactg

SEQ ID NO: 60963 - DNA, 122 bp, Homo sapiens
cctgccttccagtggtcttagtctggtgggagagacagacatggaataatatctgccaagcgcttcctctggattatctcacgaaatcttcacaatgactctgtgaagtgggtaccattgtc

SEQ ID NO: 60964 - DNA, 122 bp, Homo sapiens
cactgcagccctcgtcttcaaacacctaaacaatgcacctaggaccttcatttattattccgtgcccacccacaccctaaaaatcgctctcttcaccccaattgctcgaaatgcctgtcact

SEQ ID NO: 60965 - DNA, 122 bp, Homo sapiens
tgggggcaattcaattgtcccccactgcccggccccctcagggcctggctaagaacatgacgggaaggaatctcactggctgagccaataaaccagagagccctttggatggacggacagac

SEQ ID NO: 60966 - DNA, 122 bp, Homo sapiens
gcaggtgtagtgacagatcatcccactttgctctctggatgcacagcagatttgcatgggcgctggcacgcatgcgcagggcgtcccccctccccttttcaccgcctcccgctcccccgccc

SEQ ID NO: 60967 - DNA, 122 bp, Homo sapiens
cagctccaggctcctccccggcggggtcagcgccagacttgctgcggcgtccgggccccgcgtaattacaggggctgtagccaggcctggccgtaaaataggaggatgaaacggcctgggaa

SEQ ID NO: 60968 - DNA, 122 bp, Homo sapiens
gacttacctcatagagctttatagagatcaaagagataatgggtcaaaaattgttagtttcgtgctcgcatataataagggctcagtgaatggtagctattattagggatgtcaaaagggtt

SEQ ID NO: 60969 - DNA, 122 bp, Homo sapiens
cagggatatactttgcttcgttatgtatccccagtttctgtgcactttggtgaatgaatgcgtggatgtttcataaaggattacactggctatttggagaatggaccatagaaaagctaaga

SEQ ID NO: 60970 - DNA, 122 bp, Homo sapiens
cagacagtctgggcagcttccagcagcagcacacggccctgcaaggccccctggcctccgcggacctgggcctggcgcccaccccatcgccaggactggacagaaaggccctggccgaggcc

SEQ ID NO: 60971 - DNA, 122 bp, Homo sapiens
agcagccttctctggggtctgtaggttggtctcagaagctctgcagtgggggaagaaaaccgtgtaccactaagtagaagagcggctttatgcagatgcacagacagtggggctgttttctg

SEQ ID NO: 60972 - DNA, 122 bp, Homo sapiens
gtcataaaatcaatccaaacttttgttgacatgtgtttctttctccatataccaggttcccgcttcgtattagtaagattgaaattgaaataagtctattgctggtggatgaatttgtcact

SEQ ID NO: 60973 - DNA, 122 bp, Homo sapiens
gtgggaggagtggggagcagttctcaaacctgcctgctctcttctctttttcacccaccccggggaaaagtctctttgggacatttttgctatctctcacctggcttttgtagtgcagcata

SEQ ID NO: 60974 - DNA, 122 bp, Homo sapiens
tgattgacagttctcacaatccccgccccctcatccctgattggatagtgctccaggtcccgccccttggtggctgattgacagaagaagcgatctcacagtgctgagtggagccggatgaa

SEQ ID NO: 60975 - DNA, 122 bp, Homo sapiens
cggtggcccctccccctcccctccccccgccggctcctgggagagaaaagccccagcacacgacctaagtacacagcgcgccagccgcccgcccgcggccttctgctccccgcttcttcccc

SEQ ID NO: 60976 - DNA, 122 bp, Homo sapiens
gcgctgaactgtcgggagcctaggccatggggcagcctgggccttctgcagtgtgaggcgcggggcctcccgcgtcgctccgctgacaggctgcgggcgggcaggcgggaggcgtagtgtgg

SEQ ID NO: 60977 - DNA, 122 bp, Homo sapiens
tgccgtctgtcacagcttcccttggttaggaaagggaattccctgacgccttgtgcttcccgggtgaggcgataccttgccctgcttcggctcacactcggtgcactgtacccacggtcctg

SEQ ID NO: 60978 - DNA, 122 bp, Homo sapiens
cagacctactgagggtgggcctgggaagggaccgcggcctgacctggctggggccacccacgtccttgcacacgactttgggaaacgcgagaaagtaaactctgcctagcacggcgccacgc

SEQ ID NO: 60979 - DNA, 122 bp, Homo sapiens
gactccagttcgcagtctcataatcttgtcgaattgtctcaaacgcttggaaaaggaactcgctaggcagataaccttttgttcattaacattactgggaaacaagatgagaggcctcaaga

SEQ ID NO: 60980 - DNA, 122 bp, Homo sapiens
gtgagccaccatctgtcctaccattccccgtcactctaaagactggctgatggccgctctcgcccctgctcatcaggtggtcagtgcctcctccagtgtcattactccctgacgctctaagt

SEQ ID NO: 60981 - DNA, 122 bp, Homo sapiens
atcggccgcctaatcaggagcgagctgtggccttacgcctgcgcagaggggagacgcgagcgccgcgtggacgctgacctcggtccgcgcctgcgccttggtttcttcccggcgattggttc

SEQ ID NO: 60982 - DNA, 122 bp, Homo sapiens
cggacctcggaatgggacgatgcgacgggcggggaaggcctggcccggccgaggtgccctcggccccgccctccaccgagggcagggaggcactgcctccgctccgtccactcgtaactggt

SEQ ID NO: 60983 - DNA, 122 bp, Homo sapiens
ggcaacaggcccgggaggtggtgcggttcaacgggctggaggaccgggtgcacgtcctgccgggaccagtggagactgtagagttgccggaacaggtggatgccatcgtgagcgagtggatg

SEQ ID NO: 60984 - DNA, 122 bp, Homo sapiens
cttccgccattcagaaagtgtttccccgcccctgacggccccagcttgatgtttaccttgcgcgcttagttaggattgctctttctagtacggcctttattatggcagaaattgagccacta

SEQ ID NO: 60985 - DNA, 122 bp, Homo sapiens
gtggaggaagcagaataaaccaaatcgcgacacgttcctgcgcccttcttggcgcagtggcgcagacacggtccatggcgccttgcgcaatagagtcggtctgcaccccgtctttaagtcgt

SEQ ID NO: 60986 - DNA, 122 bp, Homo sapiens
cgccgtttctccacccccacttcgagcgaagccgagacagattctgtctaaaggagatcgcggctcaacaggtaaggactcggctgggttcaggaatgtggaaatacgactcggagcagcta

SEQ ID NO: 60987 - DNA, 122 bp, Homo sapiens
gcgaaagcatccatcgataagtggaaacgcaggctgtgctatgtccaaagacatgcctgccgcccagcaataaagccaggactcggcgcaaccgtgctttctagaaacggctgttgagtcac

SEQ ID NO: 60988 - DNA, 122 bp, Homo sapiens
gaggaatcgaattatccacgtcatgactttctctgcacctggatgttctcatctacacaacggagttaactgtcccaccttgcagagctgttgtgacactcataaactccttggccccacag

SEQ ID NO: 60989 - DNA, 122 bp, Homo sapiens
cagcggccgccctgcgaatcctccgtaggcggggccgggactgctgtgagctaataggaacgggggccgggcgttcggtctcgccgctgcagtcgcagagcaaccacgcggctttgaccgtc

SEQ ID NO: 60990 - DNA, 122 bp, Homo sapiens
gtcctgggagcgcgctgtgccatatcccacatcgggtctcctgtaaatgagccgccgagccgacatgcgtggctgagggcttagctctggacactgtgcctgagagtttcgtgttgagaagg

SEQ ID NO: 60991 - DNA, 122 bp, Homo sapiens
ggcgctttccctctgcttctccaattcccttacgcgagaggaacacaagccccacgttagcgcggcgctgcccagcttccagccaacacagcccctcccgtgctggacccgagcccagcaaa

SEQ ID NO: 60992 - DNA, 122 bp, Homo sapiens
ccacctgggcagcctccacccagttgctgtacctccctgagccggtttcctctcatttagcggggatgagaccttaacctgcatggttacagctgtaaaatacctggcaccaagctgatgct

SEQ ID NO: 60993 - DNA, 122 bp, Homo sapiens
ttaccttggtgctgtttttatgctcgtcttggcagccgttttgaggtgctcctccctcggcgccggcttcagatttgggagcaaatgtgattccgcacgaagggcaggtctagaagaaaaac

SEQ ID NO: 60994 - DNA, 122 bp, Homo sapiens
gcagctgctcctttccgcgcccgcccgcctgcgctcccggccctggagaccatgaggttccgcatctacaaacggaaggtgctaatcctgacgctcgtggtggccgcctgcggcttcgtcct

SEQ ID NO: 60995 - DNA, 122 bp, Homo sapiens
cggcccctgcaagacttgtctccatctagctcagcccaagccctggaggagctgtttccccgctacaccagccttcggccagggcctccactcaatcccccagattttcaggggctgagaga

SEQ ID NO: 60996 - DNA, 122 bp, Homo sapiens
gcctcgctcacaactcacaggcacacatcaacactgccaaccgagggagcccaaaatcaccgcaagcgaaaggctccggcggcggccacgggccacagcccgcctccgcgcacacgcagccc

SEQ ID NO: 60997 - DNA, 122 bp, Homo sapiens
ttgatagatagcttcaatgatggggaggatgatggacacatttaaggtggaagagtcaagcgatgctattcgtagatgtagcaaggagaagaaaagtcagtgccgagcacactgatgtgaga

SEQ ID NO: 60998 - DNA, 122 bp, Homo sapiens
aaggacccatccactgcctgcggccgcccgcgggcctctgccgatgcgtggctgcccgcccgggcccaggtgctgactggccgccacgcagccaatcggaactgaataataaataccccccg

SEQ ID NO: 60999 - DNA, 122 bp, Homo sapiens
ggtgtctaagtcagtttacttggttcacaggttcggaggcccacccacatacctagaattcgcctccaggatgggaccagaaatctggttttgcatagaaatggctagcagcaggcaccatg

SEQ ID NO: 61000 - DNA, 122 bp, Homo sapiens
ccgcctctcctccctctctgctggcgccaccgcagcccccacgccctaggtgggcccccacgtcgccccacaaggctcggcttccacccgcctcggctgccgccttctcctcctcacgaccc

SEQ ID NO: 61001 - DNA, 122 bp, Homo sapiens
cctggtccgtgtaaaaacccatcttggaatcttcgctggcaggaagggcccctcacagatcgctgttcctcaccctgggatgagcccctacccagggtcctctcaaagtccctctctcccac

SEQ ID NO: 61002 - DNA, 122 bp, Homo sapiens
ggaggaggtcccgggacagagctgagagccagagcatgacatggagtgtgaacctgcccccggagcatgatgacccgggagaggtgcatcctcgctctaggtgagagtgaggacacctgctg

SEQ ID NO: 61003 - DNA, 122 bp, Homo sapiens
cggcgaggcgggcgggacccctgagcggcctgggagttgtagtttcaggagggaagagctcggctgcacgtgggctcaggtcgccccctcgtggacctctgcacagccaagcgtggaaaggc

SEQ ID NO: 61004 - DNA, 122 bp, Homo sapiens
tcaaagccgagctgttcgccgccctcgaggcccaggcgagcctggaggagggaccgggtgcgctcagatggggcccttggtgactggcgaccccatgagcacccaccctccagcctggggcg

SEQ ID NO: 61005 - DNA, 122 bp, Homo sapiens
ttgggcagggtcagggctgggaagtgttgcaaaaacttaactgccctcggaacttgcacgcgccgtgaactgggcggtgttcctaaagggcttcggtttgctggttttgttttggtcctgtc

SEQ ID NO: 61006 - DNA, 122 bp, Homo sapiens
aagacaactactgaggctggaaactgggggtggggaggacatcaaacatttcagaaaagacgagggaagtgtaaaaattaaaagaaaaatagtgatggtgtagaacagagaaaaagcagtgt

SEQ ID NO: 61007 - DNA, 122 bp, Homo sapiens
gaatcgaccacgtttctctccctctgccagttgggttcacagacgtgtccccgggttgaccgcacgtgcccaccagcaggacagtgttcttcccctgtggataacgtgtggtacgaacaccc

SEQ ID NO: 61008 - DNA, 122 bp, Homo sapiens
gacttcttccctgcatgctccctcccagtgactttccttccctttcacatgaggatctgccgttcatgttgctttctcctttgtcctcttggacttgagggcattgtgaaaagctttgctgt

SEQ ID NO: 61009 - DNA, 122 bp, Homo sapiens
cagaagttcttccgagagtgggcccgagacagcctcccgcccgaactaaactctccgcagcgcttccggcccttggccccgaagtctagaaccctgggccggccgcaaaggaaggtctgccg

SEQ ID NO: 61010 - DNA, 122 bp, Homo sapiens
ccaagaatgggcagcgccagccatccgcccacctggagcaccatgagaactacaccggggcgtgtggatgccagcttggcaagctgtgaaagccttgcaggtgtttccatcagatcccacag

SEQ ID NO: 61011 - DNA, 122 bp, Homo sapiens
gggtctggccccgagcccgggaagggagagcagagctggccccgggacccagcgcgcggtcgccctctgtcttgacccctgtctctgcgaggctctgggctcctgagtgactgaagagtggt

SEQ ID NO: 61012 - DNA, 122 bp, Homo sapiens
ggttctgtgtgctctccgggggtattgtgtcaggagatgcaggctggctaccatgtgacgcggtccaaagctgaagggattggccgaggcagcgcaggcggtgcagctcggccagcttgccg

SEQ ID NO: 61013 - DNA, 122 bp, Homo sapiens
atgcccctccccgcgctgacgtcgctccgcccctccgtccccgccccgcaggtggggctgcgctgccgcctggtggccgggctgctgcactactgtttcctggccgccttctgctggatgag

SEQ ID NO: 61014 - DNA, 122 bp, Homo sapiens
agcagtttgttcaaaggtaaggcctattaaataacttttctcagcttccccatttgcattcgtgtcaaaattgctttgcaagagactacacttcagattcaaactagtagagacaacacttt

SEQ ID NO: 61015 - DNA, 122 bp, Homo sapiens
cccgcctcctccatttacttccggaatttaaagccggcttccggaagccgggacgatgtccgcatgacaaccgacgttggagtttggaggtgagagtgattgacgaggagtgggttaagtga

SEQ ID NO: 61016 - DNA, 122 bp, Homo sapiens
atctgataatatccgggccgccggttgccgggaggtgaaccgaggtaaactcgccgcgcgcggggcgcagtgtacatagtaaccagccctgagtaaacgttcgtcatattcctatgagctgc

SEQ ID NO: 61017 - DNA, 122 bp, Homo sapiens
tgagtttctgaacatttgaaaatgaggagcaggctcaggatccacagggtgtaaccatcccgtgaggccctgcctgagcagccagccagtcagtgaggctcttcaccttacttccatttctc

SEQ ID NO: 61018 - DNA, 122 bp, Homo sapiens
tctcccggagctgatgtgtactgtgtgcgccggggaggcgccggcttgtactcggcagcgcgggaataaagtttgctgatttggtgtctagcctggatgcctgggttgcaggccctgcttgt

SEQ ID NO: 61019 - DNA, 122 bp, Homo sapiens
gaaggtgttccagagcagcgccaactacgcggagaacttcatccagagtatcatctccaccgtggagccggcgcagcggcaggaggccacgctggtggtgggcggggacggccggttctaca

SEQ ID NO: 61020 - DNA, 122 bp, Homo sapiens
atggcggggagtgctgtcagcaggctcgggagcagtgaggtggtgtggtgaggaatgcaccggagaggctgacactgcccgagctgtcagaattcacattgccggaaatgcaggaatgagtg

SEQ ID NO: 61021 - DNA, 122 bp, Homo sapiens
tccactgcaccagcagcccggtacgaacccggccgcgcgctggccttgtcctcaccccgccggctatcgcggtctccgacctatggccaggacccgcaaggacaggccccccggggacaggg

SEQ ID NO: 61022 - DNA, 122 bp, Homo sapiens
gactcgctggacacgctgagcaacgggccggagggctgcatggtggcggtggccacctcacgcagtgagaaggagcagctgcaggcgctgaacgaccgcttcgccgggtacatcgacaaggt

SEQ ID NO: 61023 - DNA, 122 bp, Homo sapiens
ccggactccggcactgctggccctggcgctgcccctggccgcggcgctggccttctccgacgagaccctggacaaagtgcccaagtcagagggctactgcagccgtatcctgcgcgcccagg

SEQ ID NO: 61024 - DNA, 122 bp, Homo sapiens
gggcatgttccagttctcatgtcctcagggctccttggtgagtcgagggtgaggaggacacggaggcacaggaggccacggggcaggtctaggtccactcagcctccagagttcagccctcc

SEQ ID NO: 61025 - DNA, 122 bp, Homo sapiens
ggaaatggaaagtccccagccagagtgcaggccgcacagcctcaaccaggctgcacccgccggcctctgggcaagtttcacatgtttagttgtgaaagagaaagttagggcagagagggctg

SEQ ID NO: 61026 - DNA, 122 bp, Homo sapiens
cgtcccgggactgcccgcaccgcgggggtgctccgagctgcggcgctgggctctggcaagcgcctcgcagtccgtgagactgtctgttcacctggatgcaccaggccttcacccgccgtttc

SEQ ID NO: 61027 - DNA, 122 bp, Homo sapiens
tgcagagttagaggtgggtgggtatttctgagagaggaatgttgactgcatttggatatacgctgagaattgtgtgtggatgaatcagtaggcaaaatacatttggggtggcccatcatacc

SEQ ID NO: 61028 - DNA, 122 bp, Homo sapiens
cgggcaatcgctaggttctgcttgtaaaataacctctgaacaagtgtcatctgccttccgcgccaatcccctgccgcggtagaaggttcggattaccgggcagcggtgtgatttcggaaacc

SEQ ID NO: 61029 - DNA, 122 bp, Homo sapiens
atccagagcaacgatccggggaagctggcctggcctcatgaataattaatgtgccagagccggtccgcaggcggggtagcgatggaaggaggcgggggcgccattgggcgcctgcgcagtag

SEQ ID NO: 61030 - DNA, 122 bp, Homo sapiens
ccctgaccctcgccccggaagtcggggtgactcggaagttccggctcagtcgctaggaaacgagcgagcccgacgccaggggcggagctctggcctcctcgccgagttgggggaggcaggtg

SEQ ID NO: 61031 - DNA, 122 bp, Homo sapiens
aaatcgctggcggggccgctgctttgggccccagcccaggatgtcttcccgccatccactcggcccctggagcttccccagcgctcccaggaggtgctgggaatgaacacaaatggaccctg

SEQ ID NO: 61032 - DNA, 122 bp, Homo sapiens
ggaaggactcaaggttcagtgcaagcccacccatcctgtgaggcgatgcagagcgccaggcggatgcaaagaccccttgtctgcatcgctagagacaggagatgctcttgcacttgtttcct

SEQ ID NO: 61033 - DNA, 122 bp, Homo sapiens
ggctggagttgtaaccctaactttattgtaggggtgagatatggtctggctctgagataccgtcaatgttttactctttgagatgaataagctcttctggtttaaggaaatgtgggcggaat

SEQ ID NO: 61034 - DNA, 122 bp, Homo sapiens
cttgatctcctgaccttgtgatctgcccacctcggcctcccaaaatgctgggattacaggcgtgagccaacacgtcagccaggtccgcctcttaataccaacacactcaggattcgatttca

SEQ ID NO: 61035 - DNA, 122 bp, Homo sapiens
atcgtgagggcgctggctgcattgtgaatttgcggcggggaggctgggtgggcaacatggcggttctcaaagagaccacgtccttgtactggcgcccgcccccacccatgcaccagacccgc

SEQ ID NO: 61036 - DNA, 122 bp, Homo sapiens
atcatggtacccaggaggagcttgatggagtcctcttgccttggcttgtgcccacattggcgcggaacacctcgtgtgcagaaagcgtcggtgactctggatggagaaggcaggggcaaaca

SEQ ID NO: 61037 - DNA, 122 bp, Homo sapiens
cctcctaaggctccagcaaacgccgtggccccgattttccaggcgaggagcatcggagcccgtgaggctcagggcgggctcgaggccacacagccactgctcctacctggagtcagaccctg

SEQ ID NO: 61038 - DNA, 122 bp, Homo sapiens
taaagcagtaagtaacaagtaagatttggttcccggtttactttctgctgctaaaaaccacgtcagtgacaactgctctctgtattatagcaatcttgaatggaaacatttctgtcaagttg

SEQ ID NO: 61039 - DNA, 122 bp, Homo sapiens
tccctgggtggggcagggcctctgattggaggaggcctgccagaagggtggggcgatgggcgtggctaacgggataactgccagagcagaagacagttggcagttatttcgcaaccttcatc

SEQ ID NO: 61040 - DNA, 122 bp, Homo sapiens
tctcaaagtgttgggattacaggcttgagccatcaccgctggcctaatctttctctttaacgtagagtgaactagtacctagaaatcttaagttctggtgtttaatttatacaattactaga

SEQ ID NO: 61041 - DNA, 122 bp, Homo sapiens
gggacctatgcgttcaaaggagtgcaggggcgcgtgtcgcctgcagtctgtgagcagccacgtggggagatcccgtgattggccggtgcgggggccaggacacggaggacccacagcagcgc

SEQ ID NO: 61042 - DNA, 122 bp, Homo sapiens
catcgcgccccggtcgtgagtgcgctcacacgcagcctgagactcgacgggagggggtcacgtggaagtatctgagagaggcgtacttggccactaggaaagcacctccccctttccaaaaa

SEQ ID NO: 61043 - DNA, 122 bp, Homo sapiens
ccagcgtcccttaggatgggacaggacagacgagaccatggtgcatggtacaggttgaatcgtgtcccctccccgcaaaattcgtatattgaagtcctaacccccagcacctcagaatgtga

SEQ ID NO: 61044 - DNA, 122 bp, Homo sapiens
tggtgagagactgcggggaacgggagttgggggtctggggtgggggcacggtaggggcgccgctcgtacctccggcatcggtcagcacctccacgcggccgctgaacatggctttgagcatg

SEQ ID NO: 61045 - DNA, 122 bp, Homo sapiens
cctttctgagcggaacctatcctgaaaggctgggaggttccctgatggtcccaggaagggcgtgatgcagagcaaagagcaaaacccgctggctcctttttcatcaacttccgaaagatcct

SEQ ID NO: 61046 - DNA, 122 bp, Homo sapiens
tggacccactggggcaaaagcagcccacattgtgagcctaacgatgtggattctgacattcggaggtggtcaccaaggatcagcaaggtcaggggaagaaggcccagctggaggagcacgga

SEQ ID NO: 61047 - DNA, 122 bp, Homo sapiens
cccgctaaacctctcccaaagggttacacgttggtaaaggagccgccccgtgagagagaccggaccaatcacgtttgctgtgaggtcactttggaggcctgagattggtgctcgtgtctaaa

SEQ ID NO: 61048 - DNA, 122 bp, Homo sapiens
agccccggagccccagagccttggggactcttcggagcgtccaccgccctcaaggttttgcgcgtccgcccctatctcttccctttcctccaggaagcctgccttgacccccaccccaccct

SEQ ID NO: 61049 - DNA, 122 bp, Homo sapiens
tctaggaaggccggcgtgtgggcgggctctgccttcccttcctcactgagttgtgtgaaccgggaacggcggccgggccggctaatggctgcaggccgccgcggggtggccgcttgcactct

SEQ ID NO: 61050 - DNA, 122 bp, Homo sapiens
ctacccgcgccatcgccccgtggcccaggacggggacctccccttagtccgtcctcccaccgccgggccctgccccgcatcccggccttatgcactgcccctcccacccggccccgcccagg

SEQ ID NO: 61051 - DNA, 122 bp, Homo sapiens
cgcaggcgccgtggccggactggggactttgttctccgcggagaaacccaagggcggtgccggtggctggctgcgcacgcgcgccgcctcatttccggtgctctctctcgctgggtcgctcg

SEQ ID NO: 61052 - DNA, 122 bp, Homo sapiens
tgtgcgaccaaaaggccgtgatcaaaaatgcggacatgtcggaagagacgcagcagaactcggtggagtgcgctcctcaggcgctggagaaatacaacaaagagaggaacactgtggctcat

SEQ ID NO: 61053 - DNA, 122 bp, Homo sapiens
caaggagagacatgtccttccctggctggctctggaatcacagccctgtgggcacctacccgccccctacagttaggtctctgctgaggctccatggagtggggagactgtggcacaaggga

SEQ ID NO: 61054 - DNA, 122 bp, Homo sapiens
ggcgcccgcgcgcgttttcaagcctgcggcccggagttcactgcgaggactgagatcacccgttaccccgccctggtctacaagtgtttgctgatatagaaacggaataacggcgctgtggg

SEQ ID NO: 61055 - DNA, 122 bp, Homo sapiens
gccaggtgcctgtgctcgggaggggccttgcccagcacgcattctagaaggaagcggccccgcgcctcctccctcgcaattaccgccgggtcggaggcatccgggcggtgcgaagtcagcac

SEQ ID NO: 61056 - DNA, 122 bp, Homo sapiens
cgtccggctggaaaggggtggcccatcccgagtggggactcatttcccctccgtgactgacggctccggggctccctgcgggtctccggctttcgaggacaggaagaaggcagccagggcag

SEQ ID NO: 61057 - DNA, 122 bp, Homo sapiens
attccctcctgggaaagcaaaaggcctggatgccatcatctctaaggccctacaagcatccggcgtgttttcagggcggcatcccggcccccaagcctgggtgaagatgtctcaggagtcag

SEQ ID NO: 61058 - DNA, 122 bp, Homo sapiens
ctcccccgttcgtagcagggggctgccactgggacggctctgacggggcatttcccagcccggctccaaacacacacaacgctgggcccagtaaataagttttgttttttcccagggaaaag

SEQ ID NO: 61059 - DNA, 122 bp, Homo sapiens
tgctcaggtgctctccctcactgagatatactggcgaggcttccctggccgcaacgccgccgtaagtgctgctcccacgcgcggtatccccgcgtactgctcagtgcccaactccgacgggc

SEQ ID NO: 61060 - DNA, 122 bp, Homo sapiens
ccagatcagtggagagaaacgcagatttaggaccctgaggagtctttttcacccgtttcccgtcactcgctcaggcgcgccgagggcagtccttgtggggtcctcgtggccagccaagatgg

SEQ ID NO: 61061 - DNA, 122 bp, Homo sapiens
agcccccactccccctgtggactgtctcctcagcacggtcagacctgagacacccacgtccgcttctgctcctgaggacccagtcacccacaccgcagcaggcgcacgccctgccatgggag

SEQ ID NO: 61062 - DNA, 122 bp, Homo sapiens
caggctagaaacgcagcttccagagcaggagagcctggtatggaaacaattagctttctccgcagagcaccccttgcaacgctaggattcgttattgatagtggtgagcgctgggaatgagt

SEQ ID NO: 61063 - DNA, 122 bp, Homo sapiens
cctctcgctccctctcactctctctccgctcacacacacgcagaggtgctggggcgaaatcgggagcttaccagagaattccttgggattgttggggggcatctcccctccgctgctgtgtg

SEQ ID NO: 61064 - DNA, 122 bp, Homo sapiens
tcagacattgagaaacattattcaacactggttacccagtgactcagctcactccttaaccgcaggcttccacatcctgctgtcccttaaaattgccttcacaaagggcagccaagagccca

SEQ ID NO: 61065 - DNA, 122 bp, Homo sapiens
atttaacctctaaggtgccagaagatccggatccctcgcgggcaggcctttggctggctccgggctaggctgggaccccagatcccagtgccgctggcgagcactcggcgtgcagatgtctg

SEQ ID NO: 61066 - DNA, 122 bp, Homo sapiens
ttgcgtggggaccaggtgacccaagactctgtagggaaggagtccccactgctacctttccgaccttggagtgtgtccacagcttcttcccgggaaagtcaagagacactttgagctcagtt

SEQ ID NO: 61067 - DNA, 122 bp, Homo sapiens
gccaaagtctctgacttccaggttcttctgtttgcttactccctatccgggggcccaaggcgctgtctccgccgcccaagccccgcgtaaacctgggtgacctcggagacatccgttggagc

SEQ ID NO: 61068 - DNA, 122 bp, Homo sapiens
tgccaacgccctgctagaagagctgtctgcagattccaaagccgggcgttcagggactcccgggaaggagccagcgttacctcagcctctccgagggacacgcgcgccctgaacactcccct

SEQ ID NO: 61069 - DNA, 122 bp, Homo sapiens
ctgactgctggggctccaggccacagacttgatgcccagggaccactcgtaagcgctgtacgtggacaacaaccggccatccaatgagtacagcagaatcttgtactgcagatgagacattt

SEQ ID NO: 61070 - DNA, 122 bp, Homo sapiens
gtggcctggtgctgggtgacaccaggaacagcagggacaggggacagtggctatttcccacgctgccacatgtcacagaaggagcagagcagaaattagctcaggagtggggagacgcatca

SEQ ID NO: 61071 - DNA, 122 bp, Homo sapiens
tccaggaccccagtgccctggcctccggcctcaggcttctcctgcctctgtacaatgccacgttgatacgcccagcagctgtgactcaggcctggccccctgccaggcccagcacttctact

SEQ ID NO: 61072 - DNA, 122 bp, Homo sapiens
aaagcagcgtcggagcccttgagaccgcatcccagatgctggggcaccatctgttcccatcggagaaccccgtgtgggaagacgcacgccctgctcctctccccagaggcctggggttgatg

SEQ ID NO: 61073 - DNA, 122 bp, Homo sapiens
atccatttcggagagcaagttgtacgcgcgcgacactcagcaggcagagaaaccatcagccgccatcaccaccggcacatcgtctgcttcctaattacaccttaattagatcagggataatc

SEQ ID NO: 61074 - DNA, 122 bp, Homo sapiens
gaaacatatccaggcatatctagagaactgtgcaaggctgaatgctttatttggggaagacgcttaataacattgagacaaccccttggtaaaggagcaagcagtgagagtgacatgcagga

SEQ ID NO: 61075 - DNA, 122 bp, Homo sapiens
aagcacagggttgattgtacacgctccccgccagccacaggggctgacaactgcctgccccgtgaaactccagtggagacgtttcagctccacaccattcagtatgggagacgccagcccca

SEQ ID NO: 61076 - DNA, 122 bp, Homo sapiens
gcggtggcggcggcgaggccgggactcgggcttagggcctgctgtggaggcagcggcggacgccgagctaagcagtgggtatcgggcacattcctttcccagaagggagggttgcagcgccg

SEQ ID NO: 61077 - DNA, 122 bp, Homo sapiens
agagcattttgcttgttttcaaacacaagcatcctctcccgcgcctgggagggcgaggtgcggatcttttcgccttggcagtccctcgctcaaatgtgcgtctctggcaagtcctgtctgct

SEQ ID NO: 61078 - DNA, 122 bp, Homo sapiens
atggggcggccgggcagaggcgcacctcacttcccagacggggtggcggtcggggagaggcgctcctcacctcccagatgatgggtggccgggcagaggcactccccacctcccagatgggg

SEQ ID NO: 61079 - DNA, 122 bp, Homo sapiens
gtgcccctgcctgggctggggggagcgctcgccgcagccattcgcatagccctgggagtccgccaggccgtagggggaacactggcggcggcgcctcctccagcacctcccacgtctcgtcc

SEQ ID NO: 61080 - DNA, 122 bp, Homo sapiens
cataaattgggtcatttttaacctcaaaaccgaaccgcagcctggggaggcctttaggaccgaggggagccatcccttcctctagtcgggcagcaaattcctgtcctcctagtcccccgcag

SEQ ID NO: 61081 - DNA, 122 bp, Homo sapiens
gatctgaatttaaaatgaacaaaattggcttagcagcagaagacagccagtaaagaatttcgcccatgtctgactcagctaggaaaaggtttagcattctagagttaagcaaatactctggc

SEQ ID NO: 61082 - DNA, 122 bp, Homo sapiens
ccggaaaaagcaagtaggactctttccagaagttcgggcaagattttccctggatcagggcgtgggttctccagtactcgtccctcccggtcaccgagatgctctgagtttccggtctgaac

SEQ ID NO: 61083 - DNA, 122 bp, Homo sapiens
aagacagaccccatctctacaaaaaacaaaaccccaaaactcagctgagtgtgtggtgcacgcttgtagtcctagctccttgggagtctgatgtgagaggtttgcttgagcctaggagttcg

SEQ ID NO: 61084 - DNA, 122 bp, Homo sapiens
tccattagtattcagattttgtgatgtgattttagtcgtttgtgtgttcctcggtttccccgcttgtgaaacattttcattatgaccgtctgttaataacatgccacatgtttccaagaaag

SEQ ID NO: 61085 - DNA, 122 bp, Homo sapiens
ggcggggccagggcgcggtctggaggctcacgggagagaggctgtagccctgggcaatcccgggggtcgttacaggaaggtaggaaaatgccaccctcagggcactggttgggctaaaggtg

SEQ ID NO: 61086 - DNA, 122 bp, Homo sapiens
gaggaaggggaggaggagcaggtctgatgaggacatgaagagttccatcttggtaaatgccgactttgagatattagcaagacatcttggtggataccagcagcagtggttaggatagactg

SEQ ID NO: 61087 - DNA, 122 bp, Homo sapiens
tcctcgacgcgagggattctgttcactgtcacaggactcagggcaggtttagatgtgaagcgtgttggctcggcgctcctcttgctgcaggcgggccgtggcactgaaatggcgaggcaccc

SEQ ID NO: 61088 - DNA, 122 bp, Homo sapiens
tttattatggaacctctcaaagatgttaatgggcctggtggcccttcaggaagcctattgcgagcatttcctacacttaaccacagaacttttttggtctcaaaatatgtctcaagactgct

SEQ ID NO: 61089 - DNA, 122 bp, Homo sapiens
acctccctggggagtcgggggattgggttgtgggcagtccccatggccgcctggagaagccgctggggcccgggggtgtggggcggtgtggcgggcgcacactgtatgtacctataataaac

SEQ ID NO: 61090 - DNA, 122 bp, Homo sapiens
gtaccgggagccaccccttcctctctgactgtgaacctgattggacagttcccaccccagcgcccttaatggatagagctccaggctccgcgccctcaggccttgagtgacagaagacgcga

SEQ ID NO: 61091 - DNA, 122 bp, Homo sapiens
cttcttcgaggtgggggtcaaggaagacattgaaaatgaaccaagccttctatattcgttcgcagcctactttagggaaaagagcaaaggtgaagcaagcagagagaatagtatgagtagag

SEQ ID NO: 61092 - DNA, 122 bp, Homo sapiens
agcggagggttccctaccttcccagccccgcgactgccagccgggctggggctgacccaccgcgccctcactgacccccacgccctgcgcccagtctccgcaagtcctcccacaacaatgtc

SEQ ID NO: 61093 - DNA, 122 bp, Homo sapiens
caaggagatggagcgctgtgtgaaagagctgggctttcccggggtccaaattggcacccacgtcaacgagtgggacctgaacgcgcaggagctctttcctgtctatgcggtgagtagcgggg

SEQ ID NO: 61094 - DNA, 122 bp, Homo sapiens
atagtctgacaagtacaaatgagtcaagattccctattgctcccatcccaggacagatcacggggccttctcctttctcctctttctttctggctgcctgtgcctttctctctgctccggct

SEQ ID NO: 61095 - DNA, 122 bp, Homo sapiens
cagataagggtgagcgggacatctgagcctagaaggtatagcacagctgggaagacacggcgggagaggggattgaccagatgacagggacaacttcctagtggtatggcaccacctttgtg

SEQ ID NO: 61096 - DNA, 122 bp, Homo sapiens
agtcaaagaaaggggtgaaggacgcacctggagaatcgggtcactcccacccgaatactgcgcttttccgacaggcttaaaaaatggcgcaccacgagattataacccgcacctggctcgga

SEQ ID NO: 61097 - DNA, 122 bp, Homo sapiens
ttgtgcttatcagaaaggtatataagcatccgatagccaagcaaacgaaagccatttctccgagatttaaaaccttgatattgcctctctatgaaggaaaaatataacattttaactttatc

SEQ ID NO: 61098 - DNA, 122 bp, Homo sapiens
gggcccaggtccctccctttcagggcaggggtgaatcccagtgctgctgaccatggcccccggctggacccagtgctcggggagtttccactccgctggtgggatgggaaggtcatgggagg

SEQ ID NO: 61099 - DNA, 122 bp, Homo sapiens
ctcccccagaacgtgtaggcagctgggtggagcctaaagccgagccctctcctgtgacctcggctgaaaagaagaagccagtgtttgagaaaagcttcgtggtctgtgttctctagttgttc

SEQ ID NO: 61100 - DNA, 122 bp, Homo sapiens
aaccacttccggcttcctgcaaacctcgctctagggagccagaagcgcggaaaaggtttgcggggtctgcggttgcgcagaagcccagcgactgcagaaccctgccccaggcaccctgggcg

SEQ ID NO: 61101 - DNA, 122 bp, Homo sapiens
gcgacgcctctgggtgggttcgaaccaccaaccttttagttaacagccaaacgcgctagccgattgcgccacagagacatggctgagctcctaatttcgttctataagagggtaagctgtca

SEQ ID NO: 61102 - DNA, 122 bp, Homo sapiens
aggttttctgattgctaataaaccccattatgcacacaagatatcttcacttagctgtgtcgtttctaaaaaggcaacagggcccagaagtttcagtgagccagtcctggcaaacccaaatt

SEQ ID NO: 61103 - DNA, 122 bp, Homo sapiens
agccagaccagcagtgcctcacaccttgtcctcttctgctctggacagatggctccataacgacagcttcataatggcagtggatgggaccctcgtgtacatcagagtcactcttctgctgc

SEQ ID NO: 61104 - DNA, 122 bp, Homo sapiens
ttttctgtttgttttgatcaaatcctggaccagcaaccgacaggagagcatctgggggtgcgcgtgggacgtgcctagcccctgccagcccgggcagactccgcacatctgcaggacacact

SEQ ID NO: 61105 - DNA, 122 bp, Homo sapiens
ctggccagtctttgaggacacagtgtctggctccagttatttctacctgcagtacagtctcggggccctgagtcaacaggcgggtttgagaggacttcaggtcttggccccaaaaaagtgca

SEQ ID NO: 61106 - DNA, 122 bp, Homo sapiens
ggagagcagggaggcctgttagggcaatgcggctccgccacggagagactggaccccgtgcgatgggagacagtgaaacgggttaaggaggattccgtgacagatgaacacctcagctcaag

SEQ ID NO: 61107 - DNA, 122 bp, Homo sapiens
tggggagagagagggatcctccagttattgccatagagaaccaggaaagttcgcagcctccgggtcgcaagtgggaaagttgactggagattgcggttagagggggtgggtgcaaactcagg

SEQ ID NO: 61108 - DNA, 122 bp, Homo sapiens
aactaaggcttctgtctcggtcagagaaatgtgtgttaccaaagagtcagcaaatggaggcgacaaaacggtgacctcctaggacaaattatccagccctccagtgctgactgaacgctcac

SEQ ID NO: 61109 - DNA, 122 bp, Homo sapiens
cgaagtccggttcttccagttgcccagtggccccagaggggtcgggatgccagtgtcctgcgcgtttcgccgtcccccttcccccgtggaccccggcctggctgcaacagtagagatcttcc

SEQ ID NO: 61110 - DNA, 122 bp, Homo sapiens
tctcagaagcaaagcataagcaacttctgcagaacatagccatacctttctggaagacctcgaccatatatttctcttttccatttagcttcattatcttctgctctttgttgctgcatttg

SEQ ID NO: 61111 - DNA, 122 bp, Homo sapiens
caatattacttttccactaagtttgccagaggtacccctttctaacatttgctacctgttcggatggtcacctcatgtcacatttttctcttcctgttccgcccaccctcagcccttgtcgg

SEQ ID NO: 61112 - DNA, 122 bp, Homo sapiens
ccgctgagcctcgatcaccttgtcctgctcgagccaggttggcatggactggaagaaccccgcggcggcgggcgggaggtgctggggccaggggaggccccgagggaccccgccgcccggtc

SEQ ID NO: 61113 - DNA, 122 bp, Homo sapiens
tgacccgtgcgagggcccacaggcttgcccgagtgtgacctcggtactagctcaacatctcgaggtctgcttctattcctgcacatcgggactcaggatccgggcaacctcgcgccaagctc

SEQ ID NO: 61114 - DNA, 122 bp, Homo sapiens
caggggtgaccacgtgcgggagcgttgcgtccctggcctcgctccattccccacttttaacggtcactcggccttaagccgtcctgggtgtatgtgaggctgaaagggaaggaggaacaggg

SEQ ID NO: 61115 - DNA, 122 bp, Homo sapiens
tattgcagagtcttctgacacaggttcaggggattaagaccagatttagtgccctggtgtcgacaaagcacctgttcatgcttactagccccttaagaacaacgccattcccctgttcctaa

SEQ ID NO: 61116 - DNA, 122 bp, Homo sapiens
ggtaacccctccgcgtatgggaccgagctgggccaggtctcctggccgggccggggataccgtggggtatgcccagtgatgccagcagcttgtggcacctgggcgcaccctccagctcgggc

SEQ ID NO: 61117 - DNA, 122 bp, Homo sapiens
cagctcccacaacaaaggcaagacgggagggagcgtgtgctcccgccaaaccttcagcctcgccttgggagcacatctctgtggtttagttctctgttatattaatgcttggccgagagtta

SEQ ID NO: 61118 - DNA, 122 bp, Homo sapiens
agatgagaagagggtggaacgcacactcactccttggtcctggatataagcaggttctcacggcagtgtgagcagcagtcagggagagaagtgccttccaggatctgtggtctgatgctcct

SEQ ID NO: 61119 - DNA, 122 bp, Homo sapiens
gtccttcagtatctagtttgccctattctaatgataccctgccatgtcccctaaaggaaccgtataggcttatatatcattgttattattttcaaggacataacattttcagttctgttgta

SEQ ID NO: 61120 - DNA, 122 bp, Homo sapiens
acatcttaacactccagaaagtgtgagtaaggaatacctgctgcccctgaggggctcccccgaactggtccagccatgtctgcttggcagttgtggggcacaggcagatgcagctgcccaag

SEQ ID NO: 61121 - DNA, 122 bp, Homo sapiens
tttctcttggcggctctgaccaagccccttcaccctcctccagggtttccagcgcccacgcggactcccctctgggcctctgcattcaccgctgccgctgcctggaaagctctccccgtccc

SEQ ID NO: 61122 - DNA, 122 bp, Homo sapiens
gccctctggtggccaagcagtggtcatgaaagtccagccgctgtcacatccttgaggaaccggcgtacctccgcctacagcggcagctgggggcacccacgtggcccggggctgctctgacc

SEQ ID NO: 61123 - DNA, 122 bp, Homo sapiens
ccgtggagccgcagtccgggcagcggcctctgcctggcatctcacaaccggccccaaagccgcggaagccttcagagactcctgggtctgcaacagcaaccgtgaggcagcaagaagtagga

SEQ ID NO: 61124 - DNA, 122 bp, Homo sapiens
cttggccaggcgcgggagggtgggcaggcgggcgggcagccacctacacggtgatctccgcgtcggtgcaggcagcgccgctctcccgggagacctgcaggagccagcgtagaagcacagca

SEQ ID NO: 61125 - DNA, 122 bp, Homo sapiens
cttggtggctggctccgaacctggtcccatgggaggtgcagctgcgcaggagaaggagctcgcccctcactgtagcccatggcttttagccctacatgagtttgggacagcaatcacatagg

SEQ ID NO: 61126 - DNA, 122 bp, Homo sapiens
agaccaagttccacttctgagctcttccacacgataacctcacctgaagtgttcccaccccgtaaatgcattgtcaccctgtgtcttgcgtgttttttttatgggcctgtgatcagccaccc

SEQ ID NO: 61127 - DNA, 122 bp, Homo sapiens
tcgcacagtgggcctggccctgacagactgcagaccagaccggggcattgttctctttctcggccttccccgccgtggacgggccccccacctggtttgtgaaacctgcgcccaggctgagt

SEQ ID NO: 61128 - DNA, 122 bp, Homo sapiens
gggggctccaaccagaccaaatgtgatatgagctgagcagagggagtggggtttggtgagcgggaaagcagtgaacaccctctgttggttcagttcaggggtcaggcccagcttccccaggg

SEQ ID NO: 61129 - DNA, 122 bp, Homo sapiens
tactttgcgccgtgcacaggcaagccctggtgcgcattggccccttcggccgccgtcggccggtagttactatggaaacccagctgccatcgctatgtctctgcaaaagacccctccgaccc

SEQ ID NO: 61130 - DNA, 122 bp, Homo sapiens
acaaactcctattttctcccctcttgtacaatcaacttcgcaaaccattctctccagagtcgttcaagtctcctctctcaagtcagacttcccccaagtccttctttcaggcaatactcagc

SEQ ID NO: 61131 - DNA, 122 bp, Homo sapiens
cgctgcgggatggtctggtccggtcaggtcctcacagtggcgcctgagggctgaggctcccgctccagcactgctccgctccggccgcatccaggccccgcccaagggcggagtctgtgttc

SEQ ID NO: 61132 - DNA, 122 bp, Homo sapiens
agaaattccttgaattttcaccatttatccttctcagacctcagttactcaagactgctccgcatagtaaaatgctgaaagcaacaatgcacagtagttgtattaaaatgcactaatactca

SEQ ID NO: 61133 - DNA, 122 bp, Homo sapiens
tcccctccaggatttgttgttgtcctgcttgcggtagtccgacacaccttcccttgtcaacgccctgcacgtgcggccacagtgacctacgtatttcacgagctatatttccaccccttctc

SEQ ID NO: 61134 - DNA, 122 bp, Homo sapiens
tttgggacattagagaagatttgttggaagtccgtctgagcagggactgtatgggctgttcggcattcaatagctgtcctataatggtgtccccagccatggaatgttaaaatcacagcgtt

SEQ ID NO: 61135 - DNA, 122 bp, Homo sapiens
ggttatagttggttactgcagtgacttagagatgctcattttatagttattaaagcacaacgtgaaccaagttggcagagagataacaaggtaaaaatagcataaggatatgtcctaacaaa

SEQ ID NO: 61136 - DNA, 122 bp, Homo sapiens
tgctcagtcagatggtgcttcatcttgaactttttgttgcacacggggcagtcaaacggccgcagattgaggtgcatgttcacgtgccggtcccgcatgctcttgtgggagaaggccttccc

SEQ ID NO: 61137 - DNA, 122 bp, Homo sapiens
gaagcccgccctgcccgcccgccagtgtcagtggtgttggcatcagcttgggcaggtgtgcgggctcaggatggggcggccgtggtgaggaaccctggactctcaggtaagcctttcccagg

SEQ ID NO: 61138 - DNA, 122 bp, Homo sapiens
agaacgagatggctgtgtgcgcaggcgcaagactagcgctcttgggaccggaagttaaggcgttcgcggcgtgtggtaagtgaggggggcgggacgggtgtaccgggttgtggcggcgatgg

SEQ ID NO: 61139 - DNA, 122 bp, Homo sapiens
caccagtcaatatttctcataccttcctctatctactagtacctctgccctcccttctcccgggttttcaggattcctttgtaaacttttggctgcccgaattccagtgtttggatgcttca

SEQ ID NO: 61140 - DNA, 122 bp, Homo sapiens
cccgccggaagctgaaaggcgtgtccgaccccgcccccgggcgcgaccaatcagcgcgcgcgactcatgaatagtgagcgcgctggcaccgccccgcccccgcctcccgcggcaccgcccgc

SEQ ID NO: 61141 - DNA, 122 bp, Homo sapiens
cttgctgggcagagggtccgaggccgggcccgggagccacgtggcttgccctgtccgcagcgccgtggggaagacatgcttgctgatcagctacacgaccaacgccttccccggagagtaca

SEQ ID NO: 61142 - DNA, 122 bp, Homo sapiens
ctcggaggtgagtacagaaagtggacgcctggcgtcggactcacctgaactctctgccttcgctgtaccgtctactggaggagaccctcggggcagctgtctccaggagcagcttctgaggg

SEQ ID NO: 61143 - DNA, 122 bp, Homo sapiens
caacatcttagccttaggagtagtaaagtggccactcgtccacggcacacaggatttggacggcctggctttgcctcaagctctggggcctcaggtgtctctggagatgcaaacaaagatgc

SEQ ID NO: 61144 - DNA, 122 bp, Homo sapiens
ggtggggaaggatattaatccccatatcgcagaatgtgtacacccccctgtaatattgcccgtaacatccagaaggggaggggatgacattacttcccatattgcaaggcgtgttcaccccc

SEQ ID NO: 61145 - DNA, 122 bp, Homo sapiens
tgcaagctttgatacggccccagttggtgccccaacacccaaggacagaaagtacatcgtcgctaggataccatgcaggaaaaactggcaagaaaattatttttacatttacctcctgggct

SEQ ID NO: 61146 - DNA, 122 bp, Homo sapiens
tgagcaacctgtggaaagccgctgagcaacctgtggaaagccgctgagcggttatcctctcggggcataaagacaaagaaggcaataaggagactttgctcctcagaggccacccgtggctt

SEQ ID NO: 61147 - DNA, 122 bp, Homo sapiens
cagctagaattggcaactcaagcccttttggtcaggatcctttgctgggtggaagctcctcgcctactaatgcgggtgccctgtggctgaatctggtgaatccatcaggtccaggttgaaaa

SEQ ID NO: 61148 - DNA, 122 bp, Homo sapiens
ttgtctcacctcatgggacatattggagggtatcagaggagctggtcctaccctagcctacgtgtttttccagcccagtaccatttcatctcaccaatactcacactgaccccaggacatcc

SEQ ID NO: 61149 - DNA, 122 bp, Homo sapiens
tccggcccgaggcgcgcgggcgggaggtgctcccggagtctgcaccgccagagctaacgccgcctcctccaggcaacctaggcaggtcccaagctgcacttccgaacctccccgccgttcct

SEQ ID NO: 61150 - DNA, 122 bp, Homo sapiens
attcagggtgttagcaggctgtgctcttgcctgtttgaagtggtggctaaaggagagaggcgtgctttttcctggatgaagcaggatctctctcagccagttttcatccttacttagcacct

SEQ ID NO: 61151 - DNA, 122 bp, Homo sapiens
aagcaggcggtttgggttttttttcctttcatgaggtagaggagtttgaggtggagaaggcgtcagggagattctggtattctcagttttcttgtgctgctgtgcaagctgttcactgcagg

SEQ ID NO: 61152 - DNA, 122 bp, Homo sapiens
ggggcagtgcgtgttcagagtgtggaacaggcccggggtggggcagggaaccccaggtcacgccgggagtctgcggagcctgaggtgcccccagagccctgccaccagccccttgacggagt

SEQ ID NO: 61153 - DNA, 122 bp, Homo sapiens
ctgtgggcaagagagtcacagagtggctagagcttgagctgggtggagtttagttacatacgtcacctacacgtagcccttggcagtctccaagtactttcaggccgttggtcgtcccagga

SEQ ID NO: 61154 - DNA, 122 bp, Homo sapiens
ccgctgccaggcagaggggaggcccagaggagagggaagctgggcaaaggggatggaaggcgtccagcccgaccttaccaaaccccttgggcctcgtgggaaggggcctcttggagaggggg

SEQ ID NO: 61155 - DNA, 122 bp, Homo sapiens
cctgtgcgctgcacagatgctccgggcagcaacacggctggtgccacggcccggggaaggcgtgcggctgcagcagctcccagcaatgtcaggggaaacgcagtgagaggctgttgttttgc

SEQ ID NO: 61156 - DNA, 122 bp, Homo sapiens
gggttgctcgcgagcgtctgtgggaacagcggcacctccgcgatggtggcggagccgcggcggagctgctgcaccgacccgccgcccactccccgctcgggcccggcccacctcgcagtatc

SEQ ID NO: 61157 - DNA, 122 bp, Homo sapiens
cacccccagtggggaaaggcggatgcccatgggggccatggcgtgggaagccgggcgctccgggctgcggctctcacaggcctccagcgcccgccgccgccgccgccgcagccgccgcgctc

SEQ ID NO: 61158 - DNA, 122 bp, Homo sapiens
tgggcgcaggcgggcaccggggcccagggtctggtcctcctccttgtggcgggtccagggcgcggccgcctcgcccagcccctaggcgcactcgtcccggcgcggaggcggcggcgacaagg

SEQ ID NO: 61159 - DNA, 122 bp, Homo sapiens
ctggagatccaagtcaattttagaggtttatacttcttcaccaaaaggaagtttggccctcgtgtacaaggtggaatgtgtgtgattagcagaactccttaccaggttgcaagaatggctga

SEQ ID NO: 61160 - DNA, 122 bp, Homo sapiens
ctcggccgtgcgcggggcggggcggagcaggaacgccccgcccaccgaggggggggtctccggccagctccgcccactctgggcccgcggcgctcccagcagtctctgactaggatccggct

SEQ ID NO: 61161 - DNA, 122 bp, Homo sapiens
cgtggtgactctggatcgtctaggccctcccggattctgactcaggaactagggttctggcgttcttcacctttgggaggtggcggaaagttgcaggtttttcatttgtagggcctttgttg

SEQ ID NO: 61162 - DNA, 122 bp, Homo sapiens
tgcagtggaggggcgggagaaaggccagggtaggacgggcaggctgtgcaggaaccaccgcggagtgatggagaaactggtctaagacaagcgacagcgttttgttatccgccccggtggcc

SEQ ID NO: 61163 - DNA, 122 bp, Homo sapiens
tggtgcagacctaggacacaaaagtggtcaaaactcttttcctgtgttccctactttgctcggtttccaggcctactcagtctaaaaagctgaagagaaaaactgacactgcgttggccggg

SEQ ID NO: 61164 - DNA, 122 bp, Homo sapiens
gagggaaaacgcgggaagagggtcttgcagattccaaacttaggaagggtcgcggctccgcgcacgtgctctcggggtcaccttccccgcgcctgtgagggtgccaggagttcgtctccagg

SEQ ID NO: 61165 - DNA, 122 bp, Homo sapiens
cttttcccacccagcccttggagcgtgtctcctgggatcctggggccgtgtccatctgtccgtctgtgtgtcagcctctgcctcccgcctgcctcttgctgtggtctcattaaatgctcatc

SEQ ID NO: 61166 - DNA, 122 bp, Homo sapiens
tggccctctggctacctccctttctccaggccccaggacatcctccttggttggcacccgcggccccaggcctgggtcccgcccgcgcgtcccgcagacccctgctctcagcgcctggatcc

SEQ ID NO: 61167 - DNA, 122 bp, Homo sapiens
cttggcacagcgccccaagcagggcccgggggtcccggctctgcgagagcagcgcttccgcgagcacccactccatttgccgagcgcccgcgccaccggcccgggctcccaaaggaaggcgc

SEQ ID NO: 61168 - DNA, 122 bp, Homo sapiens
ggagagaagcggaagtcgagcgccaccgcggtgttggcgagtgtgaagagagaggaggagcgtttgcggcctcagcgtctgtcaacaggtgagcgtttcctggagcttttctgagtggctcc

SEQ ID NO: 61169 - DNA, 122 bp, Homo sapiens
tacacagaaggtgtcacactctgggatctgttccgcagggaggccacaggtgccaggagacgcgggagagactggctcctgccaagaacatttctttgcattgttcagtgcggttttttatt

SEQ ID NO: 61170 - DNA, 122 bp, Homo sapiens
accgctcttattccatctctgatttgtttgcttttaaggccgactaaagacttttcctctcgcctcacgtcgtctctccctctcacacacacacacactcacacatcctccgttccctctct

SEQ ID NO: 61171 - DNA, 122 bp, Homo sapiens
gcggacccgctgaggaagaaaaggaggcagggaggggtgggcggagctgtgcgcaggcggcgggtactcactcgctggcgcaggccgctctgtagaccttctccgggttgccgggggtcgcg

SEQ ID NO: 61172 - DNA, 122 bp, Homo sapiens
gtacagcagcagaaggtaagcaggggtttggcgtctttcagtcctaaagatgcgggatatcggaactgagagagacctagaacccaagccgggcagtttgcctgctctcacctctcttgggg

SEQ ID NO: 61173 - DNA, 122 bp, Homo sapiens
catgtgcttcaccacacaggcaggaaactgcaggcagagtgccaagagctgaatagagcccgttaatactgggccttagatttggagttgggtgcaggctgggtaggaaggagagggagaag

SEQ ID NO: 61174 - DNA, 122 bp, Homo sapiens
tgcagttatctctcgcttccatccacagtgtgggaacatattctatctcaaaatagggctcgtggagattgcttttaacttctggggactctgagacgggggaggtgtgacaagcagcggga

SEQ ID NO: 61175 - DNA, 122 bp, Homo sapiens
atatgtcataacagtagcaaggaccttatctccttattggcaggaactcaagtcgtgtagcggagaacacacacctctgagagatgatatcacaaatgaagtgctcacgttgtttctaaata

SEQ ID NO: 61176 - DNA, 122 bp, Homo sapiens
aggaggtaggctttctgagctcggccatccgcggcgtgggctgagggagagacatgacagcgaatggaaaggatctgtccgagtcccggcggggctccaatcccttaataggcggttccggg

SEQ ID NO: 61177 - DNA, 122 bp, Homo sapiens
gtgtcttaccagacccgccctccacgccccagcctagcaggttcggtgggtcgcccaggtcgttaactcccagacccgttagaaccggtcaggagaggaatgtactgctcgatcctgattgg

SEQ ID NO: 61178 - DNA, 122 bp, Homo sapiens
ggttgcaagggactaggagagccgggcgggccgggcgggggcggggggcggggccagcgccgggggcggagtcccggcctcacctggttcacctccttaaagggacagtagggcaggaaaga

SEQ ID NO: 61179 - DNA, 122 bp, Homo sapiens
tgtggccggtcggagagacagggacgacacttttacgacggcccctgaagtcgggtttgacgcagactcgaggagtggcttccggcccgcttcccggaagcaagcgtcacgacgtgaaggga

SEQ ID NO: 61180 - DNA, 122 bp, Homo sapiens
gtagaaagtatgagtcaaagtcaaatcatgggtagattccgtcactaacaaagtgagccacgccagaacacattaaaaacaactttgtgtgatatgaatgtttgaagcagtaaagcttgctt

SEQ ID NO: 61181 - DNA, 122 bp, Homo sapiens
ggggggacagggggcaaaggacctgaacattttgcaaataagacatacaaatgccaggcacggtggctcacgcttgtaatcctagcactttgggaagccgaggcgggcagatcacctgtggt

SEQ ID NO: 61182 - DNA, 122 bp, Homo sapiens
caggcattagaggagccattcgaacttttaagagatccactaaaatgggaatggcagtcccgtctgtgcaagagcaccatctgaagcttcctctccacacaggaactgtgatatccatgagt

SEQ ID NO: 61183 - DNA, 122 bp, Homo sapiens
taaaaatactttttgatgatggagggagtggaaattgagcaacaccaactgagtgaaatacggaaatgataccaaatggcaccgaagcagcagagcaggcagcccacctggcctttgatccc

SEQ ID NO: 61184 - DNA, 122 bp, Homo sapiens
gctgtcactcagcacggaggaggcggggcctggcgccccatccaatcaggggtgctggggcggggccctgtcaactgtccatccggggaagggggaagggacagtcgccctccgtccattcc

SEQ ID NO: 61185 - DNA, 122 bp, Homo sapiens
gctctccattatctctcaaattagtgggagactccagggcttggcattcaaggactgccacgatcttatcccaaacaacttccaagccactcttgcgggcattgggtgtttagatcctgcta

SEQ ID NO: 61186 - DNA, 122 bp, Homo sapiens
ggcatcgcctcactcaggaagcgcaaggggtcagggagttccctttcctaatcaaagaaacgggtgaaggacggcacctggagaatcgggtcactcccacccgaatactgcgcttttccgac

SEQ ID NO: 61187 - DNA, 122 bp, Homo sapiens
aacgccccaaactgttgctgtcacagagagcgagcgtccctgtggtgttttccagggagccggggcccaggtgagtggcacgttgtgctacagaatcagcgagctccacactgcttcccttc

SEQ ID NO: 61188 - DNA, 122 bp, Homo sapiens
tccggtgcccggtgtccacatttccggtgcccggtgtccacatttccggtgtcccgtgtccgcatttccggcgtctcgcatgtgacactacttcacgcctgttcagccccggcatggatggg

SEQ ID NO: 61189 - DNA, 122 bp, Homo sapiens
ggacctgcgcctccgcctaactccggccgccggagacgccgtgcggaccccaagccagtgcgcggaagacaccgtcctaccctcggcatggctgcctcccacccggtcacgtcggtccccgc

SEQ ID NO: 61190 - DNA, 122 bp, Homo sapiens
catagatgaagagcagtggaacaaagcagacaacagacttaacccaggaataagggaaagcggagaagataaactcctgaatggtggttcgattggggctctccatctccaagttgaaagtg

SEQ ID NO: 61191 - DNA, 122 bp, Homo sapiens
ctacaccagccacgtgagcttctgagccggcttccgcgcaggcgcagtggatctctcttgcgccattccaaacatggcggctccactagggggtatgttttctgggcagccacccggtcccc

SEQ ID NO: 61192 - DNA, 122 bp, Homo sapiens
cctgggagatctcttcatccaagtttggagggtgcagtgggaaatccctgctccctctgacggcctggcctgtgcctcacagtgtggcgtccagaacttcaaacgccgagagaagtgcttca

SEQ ID NO: 61193 - DNA, 122 bp, Homo sapiens
catggtttcgaaatgagctcccggaagaccccaggcttggggaaccgggtgtttgtttcgcgcgggcttaaggagaacagaagcacggcggggcggggcggggcaggactggactgggagct

SEQ ID NO: 61194 - DNA, 122 bp, Homo sapiens
aagagtttggaccagactggtgccgggataacctgacctttttgagccttaacttcttctcgaagggatcgttcccatcagcatataaacatgtaatttcccccttcctgagaaccctgtgg

SEQ ID NO: 61195 - DNA, 122 bp, Homo sapiens
cattcaaaaagcagaacgagtgagagggcggggcctggagctttacccaatcagtggcgtcggagtggaaatcctccaatcgggagtagccggagagcaggggcggcttccgggatttggcg

SEQ ID NO: 61196 - DNA, 122 bp, Homo sapiens
tcccctttggaccccttgaaccctcccaggacccccgctcagccccttcccgcccccaaccgactcttcccgaacgtcccttaccaaccgcgagagccccctactgcgctttggccacaccc

SEQ ID NO: 61197 - DNA, 122 bp, Homo sapiens
atactagaaaagagctctagcagattactggactccttgaatttcaagtcaccaagctttcgcacaatggtttgccattatacaaaaattgaaggaatcttttttattattttattttattt

SEQ ID NO: 61198 - DNA, 122 bp, Homo sapiens
ccgctggagggaggtctccgccaaggtgagagagcccggatgcagggggccagagctggccggggacacggcggggagcagagggggctttaccccaaagtgacaccagccgcgtcgcctcc

SEQ ID NO: 61199 - DNA, 122 bp, Homo sapiens
ttttccacaaaagaaaatttcctacatttttcctttttcacccctcccagaggtacaaagcggaatagaccaaatgggtgagtgattacataaggcagttcttgcctattcagtggggagaa

SEQ ID NO: 61200 - DNA, 122 bp, Homo sapiens
gcttcaggaacaggcaaacctggctgaggggcgaggtcggaggggcgtgtcggggcggggcggggcggggcgagtgtggtcgcgggggcgtggccggatagggcatggcggacagggcgtag

SEQ ID NO: 61201 - DNA, 122 bp, Homo sapiens
acagaccaaatcccatccctggtaccatgaggctgttcttggaatgcaaccatttctgtacgttttcccctagagattccttataccaaaggccctcataaaaagtgtttcagggtgcctga

SEQ ID NO: 61202 - DNA, 122 bp, Homo sapiens
gaaaccactcagaggctaacactgacttggggttaaccagatgcctggcattgttctcagcgtaatgcccttcagaggtatttagcctttgtaatccttaagacagccctatgaagttggta

SEQ ID NO: 61203 - DNA, 122 bp, Homo sapiens
tcccacgtcccagctgccccctcgcatccctggaccgcccacaacccgccagcccccgcgcgtcccggaccacctgcatctcagctgcccccgcgcctctccagaccgcccacgtcccagct

SEQ ID NO: 61204 - DNA, 122 bp, Homo sapiens
cctgatgccacaaggggggtttcagagctgaaaccaaagctcaggccacacagagtatgacgacaggtcctgctctaatgtgcgcactagaccccagcctctgcccacagaagatgggcagg

SEQ ID NO: 61205 - DNA, 122 bp, Homo sapiens
agcacttgctgcatggtaaacacctagaaaatgtcagcttattaccgtattaccgattctcgaggaaatcacaaacaagtataggagacagacataatagcttcttatgtgccatgctgtaa

SEQ ID NO: 61206 - DNA, 122 bp, Homo sapiens
attcttttatctgctggcaactattttaagtctcctgtgcaaggcagattccgatgacctcgggaaagtcacaggacctcagtttcttcaatggtaaaagcaaaggcagtggtttctaccgt

SEQ ID NO: 61207 - DNA, 122 bp, Homo sapiens
aacctcgcgcttctggtttctacgtgattcacaggccgtgagtcaccgcagtgttggcaccggtgggcccccgcaggagaaagcgggatttaggcgtcgtgcccagagccccgggacccgga

SEQ ID NO: 61208 - DNA, 122 bp, Homo sapiens
gttaagttttttgacccaacttttgcagagagaaaggataatgccaggttgtagttagaacgctggaatcagttgttttgttgttctcaagtacaggcagatgattgctcacaagatgagga

SEQ ID NO: 61209 - DNA, 122 bp, Homo sapiens
gaaagaggaaaggcatgagtcaaagccctttggttttgtttgaccattcttttttctccacgttttcaaattatctcggcctgttgacttgtcacagagttgattgtggactttgctactgc

SEQ ID NO: 61210 - DNA, 122 bp, Homo sapiens
ctcctgcagctgcacccagggcgccccacagtgatctggggattaggacgctcaggtgtccgggccctgcccacagcgcctgggcgggagctgctgtcacacccagcaggtgcgggccgagc

SEQ ID NO: 61211 - DNA, 122 bp, Homo sapiens
cctgggctcgcacaggggtcgcgagtgaagctcccacggctgcgggacgccgcaaaagcgcgcccagcatgtgcaagtcacaagcttaaaacgcaaagggctcctgagtctggtgcgaaatt

SEQ ID NO: 61212 - DNA, 122 bp, Homo sapiens
aacgcgcgcccattaatacccttctttcctccactctccctgggactcttgatcaaagcgcggccctttccccagccttagcgaggcgccctgcagcctggtacgcgcgtggcgtggcggtg

SEQ ID NO: 61213 - DNA, 122 bp, Homo sapiens
aatagaagtataaaggacttgacttgaataagggaagcagcttctttatgtgaaaaacggcggggggaaagcgtaggcaggacttgtaaaagaccacacagctgcaattgaggatgctttat

SEQ ID NO: 61214 - DNA, 122 bp, Homo sapiens
tcggggagcgcggagtggcgcgtaccattgcgggcgggggagctgggcgcggggctcctgcgcacctccggccggcctggcagacccggcgcgccgaagccggacgagggagacctccacct

SEQ ID NO: 61215 - DNA, 122 bp, Homo sapiens
ttcctgggagaaaattgtagcctagaaaagctcatctttcccctgggggttcctgtattgcggcagagaggagggggtaggggaagggggtcctgtgtgagtgctgcaaggccatcgattgt

SEQ ID NO: 61216 - DNA, 122 bp, Homo sapiens
gatgggtgttgataaagattggagggtaaatggcctcccaacttaccccttggcacccctcggatgccaggtggtagggtgtgaaaatgaaccagacctgctggttgaagacctgctaatta

SEQ ID NO: 61217 - DNA, 122 bp, Homo sapiens
aatgaggaggtggcaacagcaggggagtcaccgggaggctgctcgggtccagctcaaaaacgccaggcccgcccccgccccgcaggtccgcgggaaggaaggaaaaggcgttggggatgcgt

SEQ ID NO: 61218 - DNA, 122 bp, Homo sapiens
gcgctttgttacctgtttccgatggtgtgacctgactgctttgttacctgtttccaatggcgtgacctgactgcgctttgttacctgtttctgatggcgtgacctgactgcgctttgttacc

SEQ ID NO: 61219 - DNA, 122 bp, Homo sapiens
cccaccagaaggaagaaactccgaacacatctgaacatcagaaagaacaaactccagacgcgccaccttaagagctgtaacactcaccgcaggggtccgcggcttcgttcttgaagtcagtg

SEQ ID NO: 61220 - DNA, 122 bp, Homo sapiens
gatggcggacggcaaccaggcccagctggccatgagccacctgaactggcacaagctgcacgggaagcccatccgcatctcatccgtatcacgcccttgaagcaccagaacgtgcagctgcc

SEQ ID NO: 61221 - DNA, 122 bp, Homo sapiens
cctggccggctgcaaaaggaacagcagaaaactttgcttgaagttcccagttgcagccgccgggccgcctggcgtaggcgctgcgcggtccccgccgaccccgagcagcggccgggcccagg

SEQ ID NO: 61222 - DNA, 122 bp, Homo sapiens
agcgacagccacgcggtgagccggtacaaggccctctaggcttcagcgggtctggatactcggtggcattaacccttccctaccgccggggaagacagcagtttctctggcgaggaagtagg

SEQ ID NO: 61223 - DNA, 122 bp, Homo sapiens
ttgccccattggctcctcagccaagcacgtacaccaaatttaatggtttccacgtgccagcggaattcccaagtgctgaataccttggggcctagggatgctaacttagtaggttagggacc

SEQ ID NO: 61224 - DNA, 122 bp, Homo sapiens
ggctattgtcaaggcttcgcgacaatgactgggagagggagacttccattgcgagagacccggggtaggaaaacgggctgacacgttgtctttccaaaaaagagaaacaaactctgggaaga

SEQ ID NO: 61225 - DNA, 122 bp, Homo sapiens
ttccctgacttcttcacgcgggtagccctctacgtggactggatccgttccacgctgcgccgtgtggaggccaagggccgcccctgaaccgcccctcccacagcgctggccgggaccccgag

SEQ ID NO: 61226 - DNA, 122 bp, Homo sapiens
ggcagctggtctctgctcacctgcccagccagagtctgcctcctgtgcttggtccccaaccgactcagaccaggcttcctcactatgagcttcagaggtttttgtgggtttttttttttttt

SEQ ID NO: 61227 - DNA, 122 bp, Homo sapiens
atgtgctaggcactgcatatacagaatcctgctccttctctgggtaattgtcatacagtgcgacaagtgcattaacaggtggattcagggaaacatggccctgggcaaggatttctccaggc

SEQ ID NO: 61228 - DNA, 122 bp, Homo sapiens
gcccgaggcttccgcctggcctcccggcgccaactggctctcacacctgcccgtcaaagacgttcttccgggggcgttgggaagaacacactcggtcctgcaaatcaaatcaccccggtttg

SEQ ID NO: 61229 - DNA, 122 bp, Homo sapiens
gcacatcagagatgggggtgagggaggtgccgaaaggtgaagtgaccgcacacagccacacggctaaatcctgctcgccgtgctaattttgtcagactcaagttgcaatgaagatttgtcta

SEQ ID NO: 61230 - DNA, 122 bp, Homo sapiens
tgcagctgccgccagcgcgcggctcccgccagcgcgctggcaatcaaaagtcggagaaagcgcgaaacctccaggcacctcccactccgcccagctaccgcgcagctcctccctagcctcca

SEQ ID NO: 61231 - DNA, 122 bp, Homo sapiens
ggccgacgcacctcggataggcgggggcaggggcaggggcagctctcctttaccctagagcggcgacagaagctcttcgggggatcagtggccaagggggcggacagatttgcacggcggat

SEQ ID NO: 61232 - DNA, 122 bp, Homo sapiens
cccttccacacgcacagcgcctccgcgggcctctccgcccctcccgcggcggactctccgcgcttttctcccgcgcagccgagagatcgcctctcgggcctcttgcgcaacgtcctcggcct

SEQ ID NO: 61233 - DNA, 122 bp, Homo sapiens
ggagtcggtcgggggagcggcactgcacagcttttctccaatcagacacctcaaggctggcgcctgatccaatctcctcccctggagggtgggaacgcgaagttcctacctgcacctgtggc

SEQ ID NO: 61234 - DNA, 122 bp, Homo sapiens
acacgcccgttccgcgtccgtctctggctccgcacttgctgccctctcgccgctcacattcgcaaagggggacagacactcatcggataatgacacagctggacgcagagccccggagagtg

SEQ ID NO: 61235 - DNA, 122 bp, Homo sapiens
cggctcctaattgtctctacaggataaataaccacctcccccctcctccgcagtctcccccgcccacgagttcccctctggtggcagagcgcctactagcaacagtaagccctaggaaagaa

SEQ ID NO: 61236 - DNA, 122 bp, Homo sapiens
cactaaaatgtgggaagctgagtgtggctggactaacctgggagagctttggggaggaggcggatcaatggggaggactggaaaggctctaggggaaaaggaaataaacttgttgggggagc

SEQ ID NO: 61237 - DNA, 122 bp, Homo sapiens
cggcccaaagctgtggccatgagtctccgaggctgcggacgtgggtggcagttgccgggccggaggcttctcggccccttctcggggtcacccctctctcccaggtgtagtgggagctgcga

SEQ ID NO: 61238 - DNA, 122 bp, Homo sapiens
acttggagcctgtagaggggtatactgaggcgccctgcggccccctgggctgggtgtccacggccggccgcccctcctgtgcgaccttggggaagtcccctttcctccccactcctgagtct

SEQ ID NO: 61239 - DNA, 122 bp, Homo sapiens
cgatatatatttaccgcgggggcgggggtgggggtgcgcggaggctgcagggcggggcagcgctaatgagagcaagcccggcttgtggttggttctggagtctggtacccacagaggagcag

SEQ ID NO: 61240 - DNA, 122 bp, Homo sapiens
gcccaggcccgcatgctcccataaggtttgtggacaaattgcctcctctcagcctctctgcgcctcctaataagcccatgggaaggtttatggttgctaaaggaaccgctaaaacaggtcaa

SEQ ID NO: 61241 - DNA, 122 bp, Homo sapiens
aagctgctcgagctttatttcttcggtgcaaccaactcagaatgaattcctccgcccctgcgtgctcagtgagtcggcaccctagcagtgaactgcatttaaaacctcaggaattgagcgaa

SEQ ID NO: 61242 - DNA, 122 bp, Homo sapiens
tctcgtcagctttgctgtccctgcaggaggctcctctcctctggaccccacccgagtgcccggtgctgcggtccgtctcctgggctcagcaagcacactcaccatcgccaccccgtctccag

SEQ ID NO: 61243 - DNA, 122 bp, Homo sapiens
aataaactattcattaagtaaataaccaggaaggcaactgccagccccaagctgatccatcgccctgctctgtctatcactttcattgaggtgctaatactctcagaatccccgtgctggga

SEQ ID NO: 61244 - DNA, 122 bp, Homo sapiens
agccggctcggaggtgcgcgccgagaggatcgctatggagacgcgagggcgcggccgggacggggactggggccctactccccggaggcctccccacccagcctcccggtggggcggggccg

SEQ ID NO: 61245 - DNA, 122 bp, Homo sapiens
gcgacccctggttaacagctgcctcctcacctagcctggcagctcattcagaatagggaccgtatttgcattactcacctgctactcccagtgcctgattcagggaaagtgctcagtaaatg

SEQ ID NO: 61246 - DNA, 122 bp, Homo sapiens
aggctgaggccgaaggtggtggtcaggattgcgggcacggtgaggaaaaggaccgggtgccggctcacacacaagcccagcctgtggccgatggactggagccctctgcgaagcacctgccg

SEQ ID NO: 61247 - DNA, 122 bp, Homo sapiens
gcttttctatttgggaacttggttccatcacagtaatgcttggaatgcccctgtggacctcgttcacctgaaaaggaggagaacatcccttctgaaccaatcagagctagtgctgccctagg

SEQ ID NO: 61248 - DNA, 122 bp, Homo sapiens
aagagaagccaattctgtgggagatactttcccaaaaaactcgggtttgggcccctataccgtgaactacaaacctccgcaggggtaggcccgggctgcccgcctcacaccgcactcgccag

SEQ ID NO: 61249 - DNA, 122 bp, Homo sapiens
caagcaactggccaggggccaggctgcagcaagaggctccctggcacctcctcctgctctcgttcccagctggtaaacagcagagcaggagtcagccatgccacagcctcgtgactcgccca

SEQ ID NO: 61250 - DNA, 122 bp, Homo sapiens
tggccacagcctgccaccagtggtagatggtgaagatgaagtcctgtctctccttgtcttcgtacaagattcccaggagtgctgcaagcaggcagtacagggcaggcaggggagaggtgtca

SEQ ID NO: 61251 - DNA, 122 bp, Homo sapiens
tgccttcttggagccgcgccagcaccagaaatcgcccgggctcggagtcccaattagaggcgatggtatcgttttacattcctagcatcagtgtacgaggcccagttcctccacatcctcgc

SEQ ID NO: 61252 - DNA, 122 bp, Homo sapiens
gagcccagcatttcgaggctgcagtgagctttgatcacgccactgtactccagcctgacccgagcagcagagtgaggccctgactcaaaattgaacaaacaaatgaaacaacaacaacaaca

SEQ ID NO: 61253 - DNA, 122 bp, Homo sapiens
aagcgcaggctccgcccaatcccacccgggcctggcctcgcctcgcctctcagctgcgcgcgcagtttcctggagacccggaagcagattacgtggagtgacggtcatgctgcggcgtgtga

SEQ ID NO: 61254 - DNA, 122 bp, Homo sapiens
ggaaagccttatcggtcgctaagattcagtttaagtgactcttctctgggaggccttttccgaatgctgcccttgaccaaaagccagcccctccagggctgtattcccacagccccctcccc

SEQ ID NO: 61255 - DNA, 122 bp, Homo sapiens
tattaaacctgaatctgcttatcttctcagctctgtgtccagaatagtccccaggaggcacggaacatgttacttcagaaccctcaactggcttatgctttgctgcaagcacaggtagtgat

SEQ ID NO: 61256 - DNA, 122 bp, Homo sapiens
cttcaggcaggagcagggggcgggaagagtgcagcacccacaggtcagttttattgcgttcgaaaccaagctcgtgcctcatttggcgtctcttcaggtgtggccctgcagccgaggatgga

SEQ ID NO: 61257 - DNA, 122 bp, Homo sapiens
gatctggaccgattccagagcccttggggaaaggccctcacacttagggggtcacgggatcgtccctctaagggggcagcattccctgcctggatcttggccagggagtagatgtcagagag

SEQ ID NO: 61258 - DNA, 122 bp, Homo sapiens
caagtcaaaacgggtttcctcatagtcctctaaacatcaagctgctggcatccttggactcggcccacattctcctcctaaaccaacttctctctgggcacacacgggccctgttaaccttc

SEQ ID NO: 61259 - DNA, 122 bp, Homo sapiens
cccacgaggggaagagcccctacaagagcacagccagcgggcaggagcacgcagggagaccgacgtgcagggacaccaacgtgtagagagactgacgtggagggagaccgacatggagggag

SEQ ID NO: 61260 - DNA, 122 bp, Homo sapiens
ttgaacttgctgtctttggcagtcacatccttgtcggccagggacaggtccccctccagccgtgcaccatccaacttggctcctggggcctcgacatccacctccatgccgggctgagacac

SEQ ID NO: 61261 - DNA, 122 bp, Homo sapiens
ggagggtctccgaggagggccggggtcccagggtctgtgggggtctctggcaggcggggtcggggtgtccggagtccctggggtctgagggtgtctctggggtccctgaaggaatctgtggg

SEQ ID NO: 61262 - DNA, 122 bp, Homo sapiens
ctcccagccaatgacaggcctccgaggggaagcccagtccctcgcggatatgtcaatgggcgagccctgggaggaatggaagtcacggatctcgcgaggatgcccccggcgcccctcaattc

SEQ ID NO: 61263 - DNA, 122 bp, Homo sapiens
tgaggacaagaaataaacctcagactacttctgtacagcgtgtgaagtgtcccgcaagcacgtataaccttaaaatagcaacaagggcagcagcaacaacgacaacaaaaatgataatggca

SEQ ID NO: 61264 - DNA, 122 bp, Homo sapiens
ggcgtgttccagggcgcagttccaggaggctgggcaggcctgcaagttttggggcgtcaccgatctcccctaaactcagtagcgctaggcggcttagggtggggccctcaatttgctgggcc

SEQ ID NO: 61265 - DNA, 122 bp, Homo sapiens
tgcgcttttccgacgggcttaaaaaacagtgcaccatgagattatatcccgcacgtggctcggacggtcctacgcccacggagtctcgctgattgctagcacagcagtctgagatcaaactg

SEQ ID NO: 61266 - DNA, 122 bp, Homo sapiens
tgtcttctcctggggaggaggcgtggctcggagcagacgtgacttctgttttctgggctgcgatttgcaggctggtgacttagagcaagtggccccagaaggcagatgtcactttccccgta

SEQ ID NO: 61267 - DNA, 122 bp, Homo sapiens
tgcgattacccgagccctaagtggaaggtgtgcaaatccttccttttaacccgggcaccccggagccatgtgccattctggagagctcactcacaccccaacagcttgtcccggcgcctgaa

SEQ ID NO: 61268 - DNA, 122 bp, Homo sapiens
cggggcgggcgagggggcgccggggcgcgggtgggcctcccgccggccgtacctgtcagacggatcttgatgctggagccgttcctgcgtgtcccggggttcgacatctcccgccaacgatc

SEQ ID NO: 61269 - DNA, 122 bp, Homo sapiens
catcatccacaaaatcaggaaacagatttatttgtatctgttgtagttagtgcttttgcccgtgggtttctggtgggaggagcgagaactaggcagcctttgtacctgtgactcaaaggaaa

SEQ ID NO: 61270 - DNA, 122 bp, Homo sapiens
ggtgacagggacctagggcctgggctgggaggaggcggggctagtccaggaagggacccgcgccacccaagtggcccctgcaggggcctcctgaggctcctgggtccttccccagctcccat

SEQ ID NO: 61271 - DNA, 122 bp, Homo sapiens
cgctcccccaccgcagccagtccgggtgcgaagccgcgatcccgggagcccttgccgcggcgtgccggtgatgttgacccaacacacggttaggcctcccctgtcatgtgcgagggctgcgc

SEQ ID NO: 61272 - DNA, 122 bp, Homo sapiens
tgaggctgcctctggtcccctcggcccccaacataccactcttcctcatgaccagaacatcgccgcactcatcctcgatgggcaggaagatctcagggaccacgatgaggatcctgcgcttt

SEQ ID NO: 61273 - DNA, 122 bp, Homo sapiens
ggggcgttcctgtgtggggtccccgtatcagctggtttgatgcagcctcagagctcccttcggggatctcaggttcagagcatggaggtgctgccaagtgggccgcgtcggggagcccggag

SEQ ID NO: 61274 - DNA, 122 bp, Homo sapiens
ggcagcggcgacgagaacggcgagcgaggggtcgagcgcggccggggcctgaggaggctacgcgaccatggtggtaagggtcccacgcggccgtcagcctgtccgtccggatgtcagtctgt

SEQ ID NO: 61275 - DNA, 122 bp, Homo sapiens
agaaccagcctcctccaggtggcctcccaaccctccgtggggccttcttggggccagggccggaccctgagggcctgctacccacttgccccgggtgtaggaaagcacagcgatggtgcctg

SEQ ID NO: 61276 - DNA, 122 bp, Homo sapiens
ctcagctcggcggccctcacggcccgcgcccccgcccccacccccggagctccacagaggcgcccctcagagaggccgcgtcgcctcacagacccgcccaggagctcgagcgcgccccgcag

SEQ ID NO: 61277 - DNA, 122 bp, Homo sapiens
atcggagagagaaggtgagaaccctcgtggcccgtacggggatcgaacccgcgaccttggcgttattagcaccacgctctaaccaactgagctaaccggccacccggaaaacagttgttctt

SEQ ID NO: 61278 - DNA, 122 bp, Homo sapiens
ttttggctggggaaagagcgtggtgggggacccgcggccgatggaatccctggggcagcgcggcccgcaccgtggaggttggggaagcgcctcggggaagtgtttcctgtgttcccagaaaa

SEQ ID NO: 61279 - DNA, 122 bp, Homo sapiens
gccggtctgcgtggtgctgagtcccgcaggccctgcctcccagcttgtgagaggagctgtcgctgcccagaaaacgtctaggccgaggtggggcttgagctgagccgggggacacaggaggc

SEQ ID NO: 61280 - DNA, 122 bp, Homo sapiens
ggaaaaaaaatgttgggattttcccgggtttctaagctgggtttttccgagttccaaacacggcacagtgtatcagtttctgtgctggttacaagcctactggttatccctatcgagtatgg

SEQ ID NO: 61281 - DNA, 122 bp, Homo sapiens
cgccgccgctgaggcagccgccagggggcggagccaacgtgctcccggccacgccccgaacgcaactgatttgttttcttacaaactcgctactgtgtagcggcaccgcgttgcccggcgcg

SEQ ID NO: 61282 - DNA, 122 bp, Homo sapiens
aagtggcatcacagtggctcttatcagctctacccaggtaaagtcccttgtccccatctgcgtaccttgtcgcgttgtcaggggcacactgacttatgtggtcttcaggtatgtttgccgca

SEQ ID NO: 61283 - DNA, 122 bp, Homo sapiens
ctgttggagggtggtatggggttacttggtagagcaacactcaaagccttcctttttaaacgagtacagacaggtagcagtcaagataaaaaccaaaataaagaaatcaaaaaagcccagag

SEQ ID NO: 61284 - DNA, 122 bp, Homo sapiens
tgctctggttcatggcttacctcctgcagctgaacttggggttgagtgccccagaaaagccgatacaaactctaagttgaggccaactcagtttgcctggggatgaggtggggtggtatggg

SEQ ID NO: 61285 - DNA, 122 bp, Homo sapiens
cttcgttgcatgaggaaagtcactactgtcaatgcagggctgctggtctccacctcggaacgtggcagtgcacaatccatcactgccctgtgttcgcaggtcacagagaaaagaaatgcttt

SEQ ID NO: 61286 - DNA, 122 bp, Homo sapiens
gcagtccctgccgccaccgtccacgctctgcgttgtagagaagacagtgggtcggaagagcgccatcgccgccagtgtatgtggggccctttttatcaggtactgcatctacttttaccaca

SEQ ID NO: 61287 - DNA, 122 bp, Homo sapiens
gctccacccacgaaggcaagtgctgaagcttcccctccgtctgttctgagtctcaggtgtcgcctccactcgcatcgtcgcctccacccacaccgtggagcccgtccctcagccccgctcac

SEQ ID NO: 61288 - DNA, 122 bp, Homo sapiens
agacaccagcgatgcagctggtgccttccaggaacttctgcaagttcttggtgacctcctcgatggaggtcaggccctcccgcagctgcagcgccgtggcctcgtccatgacctgcgagcgc

SEQ ID NO: 61289 - DNA, 122 bp, Homo sapiens
ttctgccggcgtggacctgatgagagtcggtcgtcgtgagggacaccctctgttccctaacgtcccccgctgcttatttttaaacgctcggttggcgggaacccctgtgccagctgaaactc

SEQ ID NO: 61290 - DNA, 122 bp, Homo sapiens
ggaagcaggtgctcaaagatgggcaacagaatcacagagagcaaaaggcgtctgcggagccgacagccccaaccaggagccaaacccagaccccagagggaggtggccaggcccgggcaggc

SEQ ID NO: 61291 - DNA, 122 bp, Homo sapiens
tgctgcagcaaccacaggtccttccagggccttcgccccggcccagaaagagggggcatccgccatgcaccccaggggctctgggagctgcagctgtgggcagactcccaggccctggcagg

SEQ ID NO: 61292 - DNA, 122 bp, Homo sapiens
ttcatggcattttggggaagcaggatggagatcattacctccatctgagcaagatgatggcgaggcttggaaagctggctcaccctgtgtagtcacctcaagctggctctggacacaggctg

SEQ ID NO: 61293 - DNA, 122 bp, Homo sapiens
atcttgggatcttacactctggtcatcagagctgtgctttgtattccctctggtgctggtcgaactaaagctttctccacatgtgggtcccacctaatggtggtgtctctattctatggaac

SEQ ID NO: 61294 - DNA, 122 bp, Homo sapiens
cttggcaggcctcgggtgttgggttgccagagcgcgggaggggtcggcgggtcccacggtcggtctgaggggcggggaaggggcgggcactgcgagcccagagcaggcaccggcgaggcgag

SEQ ID NO: 61295 - DNA, 122 bp, Homo sapiens
gcagcttcagtggaggggagcagtgcagagagaggggagagtgtgtggggcatggttcctcgggaagaagggataatttgcctctctggagaggaataggtaagaatagaagcttgtgagtc

SEQ ID NO: 61296 - DNA, 122 bp, Homo sapiens
cataccttatcagtcacaactacttcttcctcctccttaattagcagtgtttgggtaaaacgtaattatgtgaagttttctatatggaccgcacttttactgtcttgtatttaaatataaaa

SEQ ID NO: 61297 - DNA, 122 bp, Homo sapiens
taactgggcgggagcctgacagtttaagagacccaaatagaactaatctccaagcgggcacgtaagaacagctcacagcatggctgccccggctccttctcacctgggatttctcctggagc

SEQ ID NO: 61298 - DNA, 122 bp, Homo sapiens
ctgctactgccgccgccgctgcagcagcagcgtcagggacaagcctgatccgtgagcgagcgagcacccagcagcaaccaccactttgggcaacttgcgggtttcctgctcgcgggtagcga

SEQ ID NO: 61299 - DNA, 122 bp, Homo sapiens
cttccagtcagctttcccggctttgaaggctgggagctgctgctaacacttcaaactaggcggacaagaagggagccgggcgatcagctccggagcctcccctcctcccttacccatcccca

SEQ ID NO: 61300 - DNA, 122 bp, Homo sapiens
agggctgtacttttgtaatgcttgatgagttctttacgtacctgcggtcgttttacaccgcgccaaactagggctgtcagattgagaagtctctgcagaaagcataataaataagttcgaat

SEQ ID NO: 61301 - DNA, 122 bp, Homo sapiens
cgctccaagtgcctcacagagacccccactaagtacctccggtggctcaaccagcaaacccgctggagcaagtcttacttccgggagtggctctacaactctctgtggttccataagcacca

SEQ ID NO: 61302 - DNA, 122 bp, Homo sapiens
gatgctggcagggaggagctgagggcaaaactctagtggaaatttcccaggtcggtcccacgccccggtgacagggtgaaccctgagaggagcccccaaactggaggcaattgtctttgagg

SEQ ID NO: 61303 - DNA, 122 bp, Homo sapiens
tccccccgatattgatggaaacccctgagtgcacgcccgtgctgggcgcaggggaaacagcgacgcacgggacaaaacaagcttgcagaacagcagggggcagagaggctgtaaacaagcca

SEQ ID NO: 61304 - DNA, 122 bp, Homo sapiens
gtcccagctacttgggaggctgagttgggaagactgcttgaacccaggagttcaaagctgcgatgagctaagatcccaccccagtattctggcctgggtgacagagcaagatcctatctcaa

SEQ ID NO: 61305 - DNA, 122 bp, Homo sapiens
agctaattctgatgtaaagagtagagaaaaaattcaagggatttagtgtttgggctggggcgtgtatgaaaataatagctggagagaaagatgaaacagcaaaccatttccctgaataacag

SEQ ID NO: 61306 - DNA, 122 bp, Homo sapiens
gtgacaggacaacagcaggttcagaaggataagtgcagatacgtaggtatacacaagatgcgaccaaacagcacatcagggaaggcttcctggggaacagatggcttcaatgtaggcattca

SEQ ID NO: 61307 - DNA, 122 bp, Homo sapiens
caagtacagcggatctgcggcgagtccccttcgctctccgtagtgggcggggcttcaccccgcgtcctttaaaggaaaggtgatgggcggagccacgtttttctactgttgggattcagttc

SEQ ID NO: 61308 - DNA, 122 bp, Homo sapiens
gctgtcctgtcgcctctgaccctgggggtgggggctgtccacttggggcccctgatgagccgagattctcccacgaaccctcgggctctggggctcatctgcttgcacgggctctgaggacc

SEQ ID NO: 61309 - DNA, 122 bp, Homo sapiens
tgggcctcctcctgtgtcaggggcccgtgtgttttggcgacacccgattgtcatttccttcggaatcccaagtggaggcaggtgtgctggccactggccgctgcccggcgccttgagcagcg

SEQ ID NO: 61310 - DNA, 122 bp, Homo sapiens
gggggtgggggaaacggccacagcacaaaccacaagtgacccaccaggccacctgtggagcgtgcgccggacttccccggcgccgggccccgcgggctgcgcgctttgcgcccagcaccgca

SEQ ID NO: 61311 - DNA, 122 bp, Homo sapiens
taagacttggctccagctcagcctgtgaaggaatcacctctctgatccccacctctgccccggagtgctagacccagggaggaagagaccccatggaccagccagaggccccctgctccagg

SEQ ID NO: 61312 - DNA, 122 bp, Homo sapiens
aagcggaggtaggctgtcggcagtcggcttggcgctgacttgtaggaccccgggaccgggcgcctgggccaacttgggaccgctgggagtgcagaggggccccagcgcccgagccttccggg

SEQ ID NO: 61313 - DNA, 122 bp, Homo sapiens
ggcaaagtgcctagcacatagtaggtactcagtgactggtggatcaatactattagaaatcgagagaatgattggcacgtgtttgatctttcctgtcctttgcccagatctgctttcttgga

SEQ ID NO: 61314 - DNA, 122 bp, Homo sapiens
tttgaagtgaataaaatgctaattaaaaaaaactggttatttgttttctgatctataagtcgaggaaaaaatctgagtttttattccaattgatatatgttacatagtcgatttattacagt

SEQ ID NO: 61315 - DNA, 122 bp, Homo sapiens
aaagatcttccactcaagcctcctgaaaagtagtccctgctaaccagtcactgacccactcgtgctccttttctttctgcatctgtggtgggagtgactatggcctggagtttccgtgcaaa

SEQ ID NO: 61316 - DNA, 122 bp, Homo sapiens
tcctattattagccccattctatagatgaggaaaccgaggctctgggaggttcagtaactcggctgagaccacacagtggagtgacgcatccaggagcccagcccatgtctgccggcctctg

SEQ ID NO: 61317 - DNA, 122 bp, Homo sapiens
tcttttcttccttcctcccttccccaaaagctcttcatccgcttcgggtgatgccactgacgcacattcaatttgccccagcagctctgaggaggtcagaccaggccgagcaccttccaaag

SEQ ID NO: 61318 - DNA, 122 bp, Homo sapiens
tgcatgtttgctgaatatgaatgaataccaaggcagctggtctcagtcaaactgcagcaacgctgggcatgcagctcaacatcctctgagactctgtcctcattttgcgaaattagggacaa

SEQ ID NO: 61319 - DNA, 122 bp, Homo sapiens
ggtacccagaggcccggcctggggcaaggcctgaaccttgagctggggagccagagtgaccggggcaggcagcaggacgcacctccttctcgcagtctctaagcagccagctcttgcagggc

SEQ ID NO: 61320 - DNA, 122 bp, Homo sapiens
cccggcccggcagccactcagggctgcggcggagggcgggtgggctcgaggagccgccgccgcccggagaacagggggccacgtacccgccatcttgtggtcgccccctcctccgcggccgc

SEQ ID NO: 61321 - DNA, 122 bp, Homo sapiens
gctttaggggtctgtggcctgtggaggggccaacaggtagagaagcaaatacacacagtgcgtgtttgcggcgggggcttccatagacgtgcagacggcaggtcctggggtgcttcgtgggc

SEQ ID NO: 61322 - DNA, 122 bp, Homo sapiens
cgcgcgtcctacaagccggtcatcgtggtgcatgggctcttcgacagctcgtacagcttccgccacctgctggaatacatcaatgaggtctggcaggggacacctgggtgcagggcgttaga

SEQ ID NO: 61323 - DNA, 122 bp, Homo sapiens
ctgaaacaaggatcccagtgcaaagagtttattggggagatgaccccagatgacagcagtcggtgaatggggaatgagccaggggatggaagaaagctgaccagaatgcatccaagagcttg

SEQ ID NO: 61324 - DNA, 122 bp, Homo sapiens
cccgagaccttcttattcccctgcgtcaccatccacataaacaagagagcaccctgcttgcgccgctgtgggccactgcggagacccctagagtgtgatgggggtgggggctgttaaagtgc

SEQ ID NO: 61325 - DNA, 122 bp, Homo sapiens
ggtaggaagcaggtgtgcccaaagggccaaattacgagacaaatgaggttccctcccagccggcacccaggaagccaggttttctatcaggccatgccttccccaggaggcctgcctggccg

SEQ ID NO: 61326 - DNA, 122 bp, Homo sapiens
tacggccctggattcagagcgggacgccacccaccctgccagggcaccctcctcctcccccgctgcaggggctgctcagacccccgccttgcctgacctgttagctctaaggttgaaatctg

SEQ ID NO: 61327 - DNA, 122 bp, Homo sapiens
tctacgaggaagaatattgttgggactttattcatagactcacagcagttccggtccctccgccggagccccgcctctccaccgtgaccccgcccccgaggcgaggagtttgcggcggcttc

SEQ ID NO: 61328 - DNA, 122 bp, Homo sapiens
actccatccacctgcctgtctgggaggcagcagaccaaggtctagaggcccggatgtggccgggctgcaaagggcaggcctattctcagggctgcctgggaacctccaaggccttcggggac

SEQ ID NO: 61329 - DNA, 122 bp, Homo sapiens
gggaagagccacttttgtccaggttgctgggagcttctgtggctcatggtagtccaataacgatgactccaggtgacctctgtcaccattttctattaggcaatgtttcctgcccattcctg

SEQ ID NO: 61330 - DNA, 122 bp, Homo sapiens
tccattcctcaaggtccattttaccggcgaggaagccccggctccgggaggggaggagcgcgcccaaggtcaccagccagttgagtgagtggcgggcggatcccaaccccgagcgacgccca

SEQ ID NO: 61331 - DNA, 122 bp, Homo sapiens
ggagccaagcctgtgcctgccaccatttcctggcagtgtgcttagctgtgacagtttctacgtctgtagaatggggatgaaaacagcacctgctgcccagtgtgggctttcgcggtctcatg

SEQ ID NO: 61332 - DNA, 122 bp, Homo sapiens
cttattcataatttttaaaaataaaaaacaaactaaacatctaataataggctatgtaatcgtccagtagctctagtggatggactattacattattataattattcaaattaatattttcc

SEQ ID NO: 61333 - DNA, 122 bp, Homo sapiens
tgattcagattagctgtggttcaagactgcctgtgtggcacatgtggatacgtgcaaggtcgctgaggcagtgctgtgcccttaaagtttatctgcttttccaacccaaaagcagactccct

SEQ ID NO: 61334 - DNA, 122 bp, Homo sapiens
cccagaaccgggctctctctcgctgcattcgtcgtctagggattgaagccccgccccgcccgtggcacatattgggtagtggatgttttggaaacgaatgttgcacaacactagtggggggg

SEQ ID NO: 61335 - DNA, 122 bp, Homo sapiens
gaagaaaaaaaaaagattctactacagagtgtaatccagttctatcattatcccgttcttcgagggctatcactccagtgaaagcaatcttgtgaaggttgccagtgacctccacgttgccg

SEQ ID NO: 61336 - DNA, 122 bp, Homo sapiens
cccagaagacttcagtgtcacccttagtgagtgacaggcccacagccagtgccccgaggccgatggcaccttgtctcagactctggggcctttgaaccggccccaaccctccccacctcttg

SEQ ID NO: 61337 - DNA, 122 bp, Homo sapiens
taggaaaccacggttacctggtggataataagtgttgccttgcgggaaacccctgttacccggtggataataagtgttgccttgagggtaaccactgttatctggtggataattagcgttgc

SEQ ID NO: 61338 - DNA, 122 bp, Homo sapiens
tcggcaagcgcggccgcggagacccgggggtggaggacgtctttcgccctcagggcagcccggatgacagctaatgcgcctgggcaaggcgttctcaactgcgattcccggccttaaatgtc

SEQ ID NO: 61339 - DNA, 122 bp, Homo sapiens
ctgatgattgttagtccactgtgaattgcctcacaagaaacaaatttaaaagttcaaaagcggctgtcaccttcgtgaacagacttctggtgagtttttggcttgtttccatcacactctct

SEQ ID NO: 61340 - DNA, 122 bp, Homo sapiens
agagcgagtctgtgaatgaacgagtgacaaaacctggaatctcaaaacgcgaagcaagtacggagctcgctgccgctccacaaggatgagaacattccaaggactgaaaaagcctttttgcc

SEQ ID NO: 61341 - DNA, 122 bp, Homo sapiens
tatgaactgtaacactcaccgcgaaggtctgcagcttcactcctgaagccaacgagaccacgaacccactgtgaagaagaaactccagacgcgccgccttaagagctgtaacactcaccggg

SEQ ID NO: 61342 - DNA, 122 bp, Homo sapiens
agatgcaggtggctaggaaggtgccaggcgaggggcacctggggcgaaggctgttcccagcgcatgaaagcgtttcagcgccagatgtctctggaggtcagacgccagccctaggggcagaa

SEQ ID NO: 61343 - DNA, 122 bp, Homo sapiens
tcccgggccggctggagccaagcgcgggttttcgtcactcggagcccggattgaacagcgcgcgtgggtttcccgcagccctggcgcagacgcgtgggctccgtggcgatgcggggtgagtg

SEQ ID NO: 61344 - DNA, 122 bp, Homo sapiens
ctacaggctgtttgacgtcggaggccagcgatctgaacgcaagaagtggatccattgcttcgaggacgtcacggccatcattttctgtgtcgcgctcagcggctatgaccaggtgctccacg

SEQ ID NO: 61345 - DNA, 122 bp, Homo sapiens
attccttcctgagatgggacactccacaaccttgattccatatttgggtcttctaaggcccgtttctggacttaaataacattcaccctatttgagtactttctacttactgttacgtttta

SEQ ID NO: 61346 - DNA, 122 bp, Homo sapiens
cccgcgacgctaggcgctgcgcttcgtttcacagactcacttcccacgccagggcgagggcggtcacagacaaacccgagctggggtcccagactcaagggaagtgcggcccagctgccccg

SEQ ID NO: 61347 - DNA, 122 bp, Homo sapiens
ccagagtgatcctcccacctcagcctcctgagtggctggaattacaggctcataccaccacgtctggcaccatttgaagtgtacaatgcaatggtttttagtagattcacagaattgtgaga

SEQ ID NO: 61348 - DNA, 122 bp, Homo sapiens
aggcccagagcctagatgaggctgtgtggaccagtgatacaatggagactttaattttctcgattagtgcagaggatgaagaaatctcagcagtcatgctgtattcaaggtgcagggtattg

SEQ ID NO: 61349 - DNA, 122 bp, Homo sapiens
aagaaatgctaagcccttctcggcgagtgctggccggctcgcgcgtttcaaaaggcgatacggggtgaaaaatgttaaacttgcaggtgaggcgagctctgcagatcaggaggctgcggaag

SEQ ID NO: 61350 - DNA, 122 bp, Homo sapiens
gatgttcttccagagctcctggggggtcatgacagcccaggctgtgttatctgcagcccccgggggccggtttttcctcctcttattccgcttcttggagaccagctcgtcggcgggcaggt

SEQ ID NO: 61351 - DNA, 122 bp, Homo sapiens
gatggcacctgtcgggaactctttcccgatggcaaggtttgcaacttccccgggaaccagcgcccgatcccagatagccaagccagacatgctccccacgaaggcctcggagctgtcgaatc

SEQ ID NO: 61352 - DNA, 122 bp, Homo sapiens
aaggccttgggcatgaggaggtattctccacccacttcttccacagggcagtggtgaccccgccccacagcccacagcctccaggttatttatagctggtcccagacagctgctgctaccca

SEQ ID NO: 61353 - DNA, 122 bp, Homo sapiens
gagcgagaacagctccttcccttgatcatgctgccctccggaggtcagtttaggtatcgccgctccctttcacgctgttttgtctcttcaccgtctgttctggatcatcctgtccagagaga

SEQ ID NO: 61354 - DNA, 122 bp, Homo sapiens
cgcccggagctggggttcggggtcccactccatttcggcaggagcggggcgcgagggtggcgcgggtagtggcgaccgggactgccaggggctccggcaaaggaggccgcgggttgggaggg

SEQ ID NO: 61355 - DNA, 122 bp, Homo sapiens
ttcctttcgctttttgcggggtccaggtctgttacccacaagcacttggttttggggcttcgctccttatgtttctctttctttgcttggaaacttccgatccccaggaccctgcaaactgc

SEQ ID NO: 61356 - DNA, 122 bp, Homo sapiens
ggtggagcagatgcttttgatgcttcatagacatcccatggccatttctgatttcagctgcggctgcaggggacagatttgtgcaggttgacagcatttctcaagggccctctgggtctctc

SEQ ID NO: 61357 - DNA, 122 bp, Homo sapiens
tggtcttataggcccacctggggaggattaatgaccaaggcagacaggcagatgaaagtacgcggggaaagagagaaaagaaaagaaaagaaaaaaaacaaaaagaaaatagagaaggagac

SEQ ID NO: 61358 - DNA, 122 bp, Homo sapiens
ctaatatccaggttacccatcccaagctgctattacattaaaacctccagacctcagcaccgattggcatccaacccactgactgcaacattttccagcataccaattgttcttatagccct

SEQ ID NO: 61359 - DNA, 122 bp, Homo sapiens
gcaacacattcttgctccttaaccaaacaggtcggcaacttctttcaagaattcagctaacgtttatgagcttccattgtggacaaaatccaattctaggtgtttcagggcttgggaggttg

SEQ ID NO: 61360 - DNA, 122 bp, Homo sapiens
acctcgtgatccacctgccttggcctcccaaagtgctgggattacaggtgtgagccagtgcgcctgggctggcaaattgtaaatattattgccatcctgatctgagattgcttcaccaacct

SEQ ID NO: 61361 - DNA, 122 bp, Homo sapiens
tcagtggaggctggctcggtgctcatttgcatttgaatgcttggaacattccctgcgagacgagatgtgcagaacattccgccgccgcctcacccagcagacaatgctgatgtttgtgctgt

SEQ ID NO: 61362 - DNA, 122 bp, Homo sapiens
aagatggctctggatatagaaatcgctgcgtacaggtacgatgcttactacgtgcgtggccggaacactaaccgcagtgcagaggctgttccggcagagcttccaccacttaagttaaagca

SEQ ID NO: 61363 - DNA, 122 bp, Homo sapiens
ttagtgtctgtctctcaccactagaggtcagtcccgtgagggcgggcacattcattcgagcgaccacagctgtactgccgacatcaagcatagccccccagctcatcacggggcctcatgac

SEQ ID NO: 61364 - DNA, 122 bp, Homo sapiens
cagggcccgagtctcccgccatcttgggccctagcggtatttttccagctctgggaagagcggcctgacccgcagcagagattcttggtaaaccccagctccgtttatgtatggttagcctg

SEQ ID NO: 61365 - DNA, 122 bp, Homo sapiens
tcctccactcagcttttgcgtccgtcacactacagaacacaaaacgggagggattcccggcgcagtgggctacgtgtttcattttagagacacaagactgttaagcgataaggagtttcaca

SEQ ID NO: 61366 - DNA, 122 bp, Homo sapiens
agttgctctggcaacaagacacactgggaggaagaggggaataagctttactggggaccgcgtagctaaccagaggtatccggctctctctggtccttctgagtcctggaagatttaacggt

SEQ ID NO: 61367 - DNA, 122 bp, Homo sapiens
tctaatttgtcattcgcgtgcgtcgctttccttcatcttggctatacttcctctcatctgcggtgttttatttcgcgcaagatgcgctgacagaggccatttcaaacgaatttatctttcac

SEQ ID NO: 61368 - DNA, 122 bp, Homo sapiens
aactcacgcaggaaccgaaaaccaaataccgcacgttctcactgataagtgggagttaaacgatgagaagacatggacgcatagaagggaacaccacccactggggcctgtcggagggtgga

SEQ ID NO: 61369 - DNA, 122 bp, Homo sapiens
cacactaaggcaagatgctagtagggggaagtgtgaagtgtgtgtgcgtgtgtgtgcacgcgagtgcgcaggcctgagtatgtatggcaggggtgctatatgggaactctgaacttcctgtt

SEQ ID NO: 61370 - DNA, 122 bp, Homo sapiens
acaaaaatacttgaaacaacaaaaaagataaccatcagtttcagctgcttcccacagcaacgcagaaagcctttctcaaattacattccactttcaggaagtatatccaaagatatactttg

SEQ ID NO: 61371 - DNA, 122 bp, Homo sapiens
atgttcatcaatcaatctcttgctggggttcccctaggaggaggtgaaatgaccccagctcgctgttcctcacatgggtgctgccgtgtcactggctcaggctcagttgctgggtcaccagt

SEQ ID NO: 61372 - DNA, 122 bp, Homo sapiens
gagagattctcaacagaacagggctggcagcagcgccgcagcctctcagggaaaacctgacgatcccttcccgggcgcgccgaccgagcgtcacctccgcccgccccgcgcgccgccaggga

SEQ ID NO: 61373 - DNA, 122 bp, Homo sapiens
caggctgccaaaaaccactgttttgatccaggataattggaagtgaactcttcctcctgtcgtcagttggccagcacttttggtcgcttcttgaggcctctcctggaatatccttcatttgc

SEQ ID NO: 61374 - DNA, 122 bp, Homo sapiens
gaagcagcgccctcaggctacctggcctgtgagttgttcaagctatttctcagtcaggtgcgaagttctctttctggaggttattttgtctgtggttttggacactaatgcccccaggcacc

SEQ ID NO: 61375 - DNA, 122 bp, Homo sapiens
gtactcttcacacctgcaggggcgtctacactgttcgtctacctggtggcagggtctgagcgggaggaggagggaaagagtgtgttctgagctggacccagcctcttgttcgagaataaaaa

SEQ ID NO: 61376 - DNA, 122 bp, Homo sapiens
gggctgccccctcctctgcagcccccagcctgctgctagccggggactctgcttcatcaccgccgccttgccggaccgcaaagagctgagccagcctctgtgttcttgtttgcatttcattt

SEQ ID NO: 61377 - DNA, 122 bp, Homo sapiens
taacttgcaaggctggggcgggagaatcgcttgagctcagaagttaggattgcaccactccgctcccacctgggcagcagggccaaacccggtctcaaaagcatttcaaaaattaaaattaa

SEQ ID NO: 61378 - DNA, 122 bp, Homo sapiens
tgtcaccgccgccgccgccgcgcccgccccgcccgccgccccctgcacgcgccttccccgcgccctgcacacgctgctcctgcacccgcacccgcagggcaccggcgccctgcatctgcaca

SEQ ID NO: 61379 - DNA, 122 bp, Homo sapiens
cgctcttaggccggcggctcctcggcggccgcggtctcggcctgtctcggacggtgtcctcgtcaaccattaacacgcgactaagcagctctgggccgaaggcaaaaaccggggtttcgatc

SEQ ID NO: 61380 - DNA, 122 bp, Homo sapiens
tgcgggggatgggcgggagccgtgcagggtggttgggtggtctccccatggctagtttcacgcttctggggctggaggagccacttgatggcggggaggccttctgactgcggggttccccc

SEQ ID NO: 61381 - DNA, 122 bp, Homo sapiens
acttgtacttgcgggagggttccaggtcagggatagtgacctcccgctgatctgcagccacgggcaccacctggggctgcccgtccctgtccttgtactgaaccacaaaggagtcgaattca

SEQ ID NO: 61382 - DNA, 122 bp, Homo sapiens
ggaaaacgagcctgaggggcccagcaggccttgagtccaccattgacagcccctggcaggcgcatgtgggggccgtgcgtgtcctaggctgtgacctcacactcgtgagcagtgtgtctgcg

SEQ ID NO: 61383 - DNA, 122 bp, Homo sapiens
agaagagtcaaacaaagcaaaattagcggcagaaagcacccccttgcttctctgtacacacgacccaggtgtatcgcagagcaaacacagtgaaagtgtgcacgctcgggaaaggcgcagga

SEQ ID NO: 61384 - DNA, 122 bp, Homo sapiens
aaagagaccttccagattgcaaactgaagcacgtgaaacatccaacatgcgaggtgctggcgacagccaacatgcacacacagctccctctgccaagcggggctctcgccacagaggcggcc

SEQ ID NO: 61385 - DNA, 122 bp, Homo sapiens
gtaggcaccacattttaggttttgttacaagcaaatgtcaagttagttcatattttattccgcttagccgcataaaacctaggcaacacatggaagaagtaagcacatatctctggtttgta

SEQ ID NO: 61386 - DNA, 122 bp, Homo sapiens
cccccgctgcgtgtccaggtgaccgggaaaggttgcagaggcgtgcttggggtttggatccgtccccgtcctgggacacctgcgccgcctgcactctcgttgcggtgcgccccagcctgcgc

SEQ ID NO: 61387 - DNA, 122 bp, Homo sapiens
ttgctgtttgcatctttttatttttcctgtgaaatgcctatttgcatcctttgccgtttacggtctagtttaaatggctggtgatcagttctagatcttggtgggaagatccaaatctcggg

SEQ ID NO: 61388 - DNA, 122 bp, Homo sapiens
tggctcttgctgcacatgctgaggtcagcacggaggcgccctcgggcaccagcatgccctcgggtttgcagcttgtcaaatatcccatgaaggcaacctgaccaaatgtgctctaacaccac

SEQ ID NO: 61389 - DNA, 122 bp, Homo sapiens
tcacccagtggatcccgcaccggggccacgggtggagctgcctgccagtcctgtgccatgcggtcacactcctcaacccttgggcggtcgatgggactgggcgccatgaagcagggggcggc

SEQ ID NO: 61390 - DNA, 122 bp, Homo sapiens
tggcctctgatctttgaacatttccatagtgcacccgacacgtcgggcccggtcatagcccggcgcagcccctcgctcactcaggaacatctgctacagcatttaccacgttaatagattag

SEQ ID NO: 61391 - DNA, 122 bp, Homo sapiens
gtacctgtcctaatgtcaggctaggaagcagtaggaccaagaatcaaacccagcatggttcgactgcaaaggcttgcaggttctccatccatcttggttgttgtaaaatgagtgaatgcaca

SEQ ID NO: 61392 - DNA, 122 bp, Homo sapiens
gaaagataagtttaacctgagatactagatgcaataattacatcctaagaaagatagtggcgcattgtaacatgacgttcaaagcgagcctatagcacagttaattccccttttctcatttt

SEQ ID NO: 61393 - DNA, 122 bp, Homo sapiens
ccggcgcgcctgctgcttcgagcaggggaggctttgcactcccatcgcacttttctcgtccgaagatacgaaactccgtccgggcgtcgcaaataattcgaattcggctctctgacacctac

SEQ ID NO: 61394 - DNA, 122 bp, Homo sapiens
ccaccccgcaggttcaagcgattctccaacctcagcctcccaaatagctgggattacaggcgcccactaccatgtccggctaattattgtattttcttagtagagaaggctggtcttgaact

SEQ ID NO: 61395 - DNA, 122 bp, Homo sapiens
ctccagccgagggcgggaggcgcctcgcccctacacccatccgctccctccaacccaggccggggagggtacccacatggttccaggcaagtaataacaaaataacacggcatcccagttaa

SEQ ID NO: 61396 - DNA, 122 bp, Homo sapiens
gaggccggagtgttcaagagcttggcgatacagaaatttctgctggtgttggggcgggtgcgggaactgaagacgggcgagtgcgagccgggggcgggtgctggggaagggtaagcgggaag

SEQ ID NO: 61397 - DNA, 122 bp, Homo sapiens
ttagccaaaatcccccttaccctgatgtttcctcttagtaattatacattcacttaccaccgctccttggctataaatctccacttgcccatgctgtatgaggagttgagcccaatatctct

SEQ ID NO: 61398 - DNA, 122 bp, Homo sapiens
atatccccatgatgttttttgttatcctatatataaacaagcattgatctagggtgggcacgttactcctcttacttttgggaacaccctactgtctacggagtacctactctttcaccact

SEQ ID NO: 61399 - DNA, 122 bp, Homo sapiens
ccagacagcggggcagccgtgaacgtgcagtgggggcgtgggccgcatcaggcacagacacggctgagcggcaggtgctgtggaggcagccaatcaatgagccagtggactttcacatgaac

SEQ ID NO: 61400 - DNA, 122 bp, Homo sapiens
cgccgcctggccttgtatccgctgccgcctggttgtgcctcctgggccagatgttggtcccgccccgacgggagaggcactgggcctgccccgccccgcccagttctctcctcctctccagg

SEQ ID NO: 61401 - DNA, 122 bp, Homo sapiens
cagagtgtggagcgtggagcgccgggactgtgcacgcttgaccggaagcccagaccagtgcggtcctagccagagagaaaggacatttgccaacaatgagacacgaagcgcccatgcaggtg

SEQ ID NO: 61402 - DNA, 122 bp, Homo sapiens
agccgcttgggcgagaaggagcccttcttccccttcctcaccgtgtacccgcctgcccctcgtgccaggcctgtggactccaccggcctggtggctacctgtgtgctctgctaccatgacct

SEQ ID NO: 61403 - DNA, 122 bp, Homo sapiens
tctaccactcaccaactgtgtgatgttggatacaaacttaaccactttgcaactcacttccgcatctgtaaaataagggtgataataatagcacctggtttagagagttgtaaagataaaag

SEQ ID NO: 61404 - DNA, 122 bp, Homo sapiens
tcctacttgtcctgcttctctggagagccttgactggcacatgactgtctgctggaggaccggcatcttgctgctggaaggggagattctggcgttggctacaggctcccctgaacccagca

SEQ ID NO: 61405 - DNA, 122 bp, Homo sapiens
gctccagtgggccaattgctggtgggatggctgcaatagctggagctcccattggtaaaccgggtataggttccgccttctcttactttggtgcttcccattgggtagggccgggaaacacg

SEQ ID NO: 61406 - DNA, 122 bp, Homo sapiens
taaaaaataaaggcatgggtttggtttcgaataaagaccttgaagtgcttggcaggtgtccgctcccggagcgccgcgggtcccctgctcctgtcggcgcccgtgcctcaggcggtcccgat

SEQ ID NO: 61407 - DNA, 122 bp, Homo sapiens
gacacagacgttcatggcccgaggcgcccgaaagcagaaacgggcagtggtggccagcctcgcgggcgagccggtgggccccgggcagcgggcgctgtggcagggccgggcactgcggatcc

SEQ ID NO: 61408 - DNA, 122 bp, Homo sapiens
actcgtgtggaaattataaaggcagggccaggcaggcgggcggccaatcgccactgggctcgtcacgacagcctccttcagctccaacccggctaattaatccccactcatggatataggca

SEQ ID NO: 61409 - DNA, 122 bp, Homo sapiens
ccttgggggctcaaaaatgaaagacacgttccctactctcaggaatttcacaggctggtgcggggagacacacagataagtagaccattcaaaagtaggtttatgctagagtgagaggggct

SEQ ID NO: 61410 - DNA, 122 bp, Homo sapiens
caggctggagtgcagtggtgggatcacaactcattgcagcatacaactcctgggctcaagcgatccaatctcccatctcagccctcccagtagcttggactataggcatgcaccaccacgcc

SEQ ID NO: 61411 - DNA, 122 bp, Homo sapiens
actagaaattacccggtcactatagtgcctgtcccttctccgcgacaaggggacccctagcgtgcttccccgctgcgctcccagctcctacaacagtgtctggcccctcaaagcgactcaac

SEQ ID NO: 61412 - DNA, 122 bp, Homo sapiens
gagtaatatcttttttccctttttctgggttgataacagagagactggcaaggacaggctcgcccttctgtagagcctcgcattggccaccaggaggcagtgttgtctgcctctcgaacttg

SEQ ID NO: 61413 - DNA, 122 bp, Homo sapiens
gcgcggtccattcgcaggaggaagttgacgttgagggtctccccgggtctgagctctgtacgtagcactgagagatgcaggtaattgttggagttgcccacggtgctgtagggcagagcctg

SEQ ID NO: 61414 - DNA, 122 bp, Homo sapiens
ccgtagcacgccgctgtacatgaagtcaatgagcttttgcactgactgcactgacaccaccgacgggatctcgatgtcgctgtagccaagcagcagtttgtcctggaagaaggggctgccgg

SEQ ID NO: 61415 - DNA, 122 bp, Homo sapiens
taaatacaaacaccacctagaaacatgttaagatcgtttacatgattaacccatttataccggaggttgaaaaatttttttgtgaaaaatcagaccttggcgatgacgttgagcagtaggat

SEQ ID NO: 61416 - DNA, 122 bp, Homo sapiens
caaccaccatgctttgtgaaatccaagccacataaaaaggttacattaggcagtgagctacgcccccaagccaatagccagctccatccacttagccatgtcatgagccatctcatacattt

SEQ ID NO: 61417 - DNA, 122 bp, Homo sapiens
tgacataactttttttttttgttccgcctcggtccgctcctctccccttgtcatctgtagcgaccacaaagaggaagaaactgagagcagatgtctgtgtgatagggcaggcggacccaagt

SEQ ID NO: 61418 - DNA, 122 bp, Homo sapiens
gggaagagctgggaaatacgcaaagcgcctttttctccactttcggagatggtacgtgcgcgcttccacgcagtggcggctgctgcggcgagcacgtcccctgcgggacccacgcggggagt

SEQ ID NO: 61419 - DNA, 122 bp, Homo sapiens
atcctttcctttgaaaggccaccagtctccctccttccctcgagcaggaggaccgcagagcgcaccctgacggaagcgttcacactcaagtgtttatggttgcgtgtcttcttgcacaggga

SEQ ID NO: 61420 - DNA, 122 bp, Homo sapiens
ccacaaaggaaggtaagctgcaacccctgtgggaagggggctcaagggggctcagccatccgggggactcagcaccaccagacctgtccattccccttggtcagcctcagccatccgggggc

SEQ ID NO: 61421 - DNA, 122 bp, Homo sapiens
gagaaggtcccctacaaggtaaagagagggtactttgcaaattgaaggcaccttgaggaccgaggccaaagccttgagtccttgcatgctcttccccatgatgggcacacagcaggtgctca

SEQ ID NO: 61422 - DNA, 122 bp, Homo sapiens
gggaaagcggctttgaaaaagagcttcttggcgtcgggcggacgcccaacacatgcttgtcggccaagtacaggataaggttaaagggaactaaccaatattcagcactaactgtgataagc

SEQ ID NO: 61423 - DNA, 122 bp, Homo sapiens
agaaacacttttagaacagtggagccgcatgcaaccaggggtcgcacatatgtgcgcagacggtctggctcgtcaggtggcatgggtgggggtcacgctttcactgcctgctttgggctctc

SEQ ID NO: 61424 - DNA, 122 bp, Homo sapiens
tcctcaaggttgggaaggcgaggatggggacagcaggtgatgggggcatggaatcgagtgcgtggaatcaagtgccacttgtgttgagatgcccactaggtggcctggtggagagggttagc

SEQ ID NO: 61425 - DNA, 122 bp, Homo sapiens
ccccgctcgcgactacgcctgcgactgtcctcgcgctgcgggggctgtgcgtggagcccgcggtaagctggaatatccaagccagctgcaagtggccttccgttccccacacgcctcctgcg

SEQ ID NO: 61426 - DNA, 122 bp, Homo sapiens
gaagatcaggcatttgttgttggctggcatgtccacctggagaaacactttgctggaggacggccctcaacccctagagaggttgcctgggcccccgctcccccacctaccatcctctccag

SEQ ID NO: 61427 - DNA, 122 bp, Homo sapiens
tgaccagcgaccggctgcccgcaggccgctgcatcttctatgggatgattgcagatggcacgcacaccaaccccgccgccctgcggatcgcccaccgtgcccatccccagggtaagctgcgg

SEQ ID NO: 61428 - DNA, 122 bp, Homo sapiens
tatggcagggattgatgctggtgattcattgagtggcaaatctttctttagagtcatttccgaattgatgttccaggactgtgtctgtaaatgtgtgcttgtgtgtgtcaaggagaatagct

SEQ ID NO: 61429 - DNA, 122 bp, Homo sapiens
gacagtccccgctgcaatgaatccatcccaaatggcactagtgctctggttgagaaactgcgtttaatgaccctcagaaaagccagtgtggctggaacgctgggttgggcgggggttgagcg

SEQ ID NO: 61430 - DNA, 122 bp, Homo sapiens
agtcctcggtgccggccccgcgttggcgcgcccccgccccacgccgacccggggccctggcgcagtgccatcaacatcctgcctgatggacttaaagtcccattcacacctggcggggactt

SEQ ID NO: 61431 - DNA, 122 bp, Homo sapiens
acacacactcataaacacatctgctttggcaaaggagcacatcagaagggctggcttgtgcgcgctcttgctctctgtgtatgtgtattatgttttatgttactgtaaaagatgtaaagaga

SEQ ID NO: 61432 - DNA, 122 bp, Homo sapiens
gggggaagatggagaaaccgtctccgccgcctctaccgccgcggccgcttctctgttacccgggaaatcccgcccactcccccgaccccgccccgcagagggaagactcagcttcgttccaa

SEQ ID NO: 61433 - DNA, 122 bp, Homo sapiens
tttctaaatcgcctttgtaatcatcacatacatgatggtgattcattcaatacatgttgccgtgttgagaaggctgacatttttcttaccactattgtaatttctccataaagccctggtac

SEQ ID NO: 61434 - DNA, 122 bp, Homo sapiens
gtcataggaatctgttgagaaatttactgtggcttgtaacacctcctcggtacccgttttcgtgttggctatgttggctaagcaaaaaggagttcgtgaaaagaaaactggaccacagtgag

SEQ ID NO: 61435 - DNA, 122 bp, Homo sapiens
aagggggtgcccagcctcgccccgcccagcgcacccctgcagcagcccgggagggcaggccgtggctcctgggaacacggcgcccagctgcaatccacattgctgctagtgaatatggacaa

SEQ ID NO: 61436 - DNA, 122 bp, Homo sapiens
ccttctgaaaggacctttggtctagttgctctgctcttcactaccccactggcagagtggcggaggccacagggcactgctggccacagcatcacctgtgtcccagccttccccagccccct

SEQ ID NO: 61437 - DNA, 122 bp, Homo sapiens
cgaaacctatcgggggggatttgttggcgggggatacttctttgcgcatagagtgactggcggtgccctggagacccaaactgaataaagtaagcattattttcaaattcgccaagaccttg

SEQ ID NO: 61438 - DNA, 122 bp, Homo sapiens
agggctcctccctgcctctcagcagatcgcttcatgcctatcagcctgcagcacattcctcgcattctaggattgagatacacagtttggttcttgtgagggcagccagggctggggaggag

SEQ ID NO: 61439 - DNA, 122 bp, Homo sapiens
cgtgcgggtccctctgctaggaccgcgccttcaacgcggaatcgctgacatgagcccagacggagaaggggtttcaactactgagaaggcataagttggagaaagttgtgggatttttccta

SEQ ID NO: 61440 - DNA, 122 bp, Homo sapiens
tcacggggagggtgtgctggcgggatgggtggaagggcctggggccccggcagcccattgcggaggttttctcgggagatggtgggtatgggactaagggtgaaagggaagttgtgagttgg

SEQ ID NO: 61441 - DNA, 122 bp, Homo sapiens
cgctgcatgcccgctaggccaggtttcccctcatccccagccccggggtcgtcgcccccgcgctgccatctgagacccggtagtaccgcccatgctgcagcgggaaagagaacagagagtcc

SEQ ID NO: 61442 - DNA, 122 bp, Homo sapiens
ctgcgggcctgggccgagggtagccgaggggcgctggggctgaggcgagcgagccgctaccgctgccgaggcccgaagaaggctgacgccgcagcccgagtccgagaggcagggggagggga

SEQ ID NO: 61443 - DNA, 122 bp, Homo sapiens
gtcctcaggcgtctctcacgtgtcctcaggcgtctctcacgtgtcctcaggcgtctctcacgtgtcctcaggtgtctctcaggcgtctctcacatgtcttcaggcgtctctcacgtgtcctc

SEQ ID NO: 61444 - DNA, 122 bp, Homo sapiens
ggcgcagcggggccccacctgcacctcgctcctttttactgcgtccctcgccagctgccccgctattagggaaacacacctctgaatcacccagttcactcggacaccctgggcccccgatc

SEQ ID NO: 61445 - DNA, 122 bp, Homo sapiens
ttggactgaaagaaaagggggctggatgcattggggagggtttgggctgtggcgggagcccggggctctgaagcacttattccagctcaatcctagtacaggaaggacaatttccacacatg

SEQ ID NO: 61446 - DNA, 122 bp, Homo sapiens
gcctgaaggagaggggtttctggaagttccaaggccgccccgtctggacagcccaaccatcgcgcggggatttttgcgatggatccgggtaccgtaattctgggcggataacgcgggtccta

SEQ ID NO: 61447 - DNA, 122 bp, Homo sapiens
cactttttcatattcccgctttctgcctggttgcccacacaataaacccactgcaaaatccgcagccagctttcttgcctacagcttccatcccagcgacctccgacgctgaacaatagtct

SEQ ID NO: 61448 - DNA, 122 bp, Homo sapiens
tttacctgctggttacctcgtgaggcgcctcaggtctgtgtgtcttgtaaaggccgatctcggaatttaactctgaaccttactcagaaacagggcagggagagctcttacgatgtgatttt

SEQ ID NO: 61449 - DNA, 122 bp, Homo sapiens
cgcccaccaggggaggaagacatatgaacaggagaagtttcctaccgcgcagggggcaggcggggaccccagtgttattgactgttgatccatcacagtgatacatgctcacatatgtcaca

SEQ ID NO: 61450 - DNA, 122 bp, Homo sapiens
ctgttgttattccttttatgtgctcccagccctcttgaaaagggccgctccgggactacgcgttccagaatgcagcggaaatgggggcggagcgctctcggttaggggtttggggtttggcg

SEQ ID NO: 61451 - DNA, 122 bp, Homo sapiens
cgcgcccgctggctctatgaatgagagtgcctggaaatgaacgtgcttttactgtaagcccggccggaggaattccattccctcagctcgtttgcataggggcggccggcggccaatcacag

SEQ ID NO: 61452 - DNA, 122 bp, Homo sapiens
cgtcccagggcggccccatcgccggcgctgcgcggtgcatctcaatgcagaaccccaatccgcccgcagggatccctgcctcgacacgggctctgctggatgccaggaacacccttgtcatt

SEQ ID NO: 61453 - DNA, 122 bp, Homo sapiens
gtaatatacaagagaattgacaaactgagtgtatacctgtataatctgccaaccacataacgttctgatgcatacaacctcaatttcctgttcctctctcaagtactttccctcttttgtca

SEQ ID NO: 61454 - DNA, 122 bp, Homo sapiens
atttcgatgcatgtttcatactaactccccctcagtttgcacatgggacccatgaggtgacgtgaagagataactgcacatacctgggaacttctcagacctcctcgttttctttttcttta

SEQ ID NO: 61455 - DNA, 122 bp, Homo sapiens
gctattgctgcagccagcgagcatccagcacttggtcagagagccgcctttgtcagagagcgctcctgtagccagactcatattaactgccccccatgggtgtgttgaatgcctctactgtg

SEQ ID NO: 61456 - DNA, 122 bp, Homo sapiens
ggctggcgagattgtacgcccggggcgctgtgggtgaagagcgccgggggaacctttacgcgaggcagcaatgacaacgcgcgattttaaaggcgagtggtgaggacatccgcatttcctca

SEQ ID NO: 61457 - DNA, 122 bp, Homo sapiens
ccccctcgccctatcctgaatgtgagcggggaaagtgctcacctggcaagatctggcctgcggcccttcaggggtcagcatgacttgtgtgggtcagaaagcctcagccccaaacccggtct

SEQ ID NO: 61458 - DNA, 122 bp, Homo sapiens
ccagaatttcagaggggtttgcttgcaagctaaaagatctttgcaaaggctcaaaaaatacggtctgcttcagacagagagagggtttgcaatatgcgatgaatctctcagtcccattagaa

SEQ ID NO: 61459 - DNA, 122 bp, Homo sapiens
gggggcacacctgcctcccctgggtggggcctctgttccctggcaacctggcgggcagggcggagctgggaggcctctgtgcccatcgaggagtcagagtggaggctgcagactgtggagcc

SEQ ID NO: 61460 - DNA, 122 bp, Homo sapiens
tattaatcgaaattctattaactgaaatatgaaacacctaaagccctcaaaatgggcaaacgttgcgtggtgcagtcccagacccaagcttctgggagtgaaaggtgcacccgcgaccttgc

SEQ ID NO: 61461 - DNA, 122 bp, Homo sapiens
ccaactcccaatattgggtgacatgagaaggaaggtaagaaaaaggcaagtgagaagcagcgacaaagacagagagcctgaattgcaaaacagtgattctcattttattttaagaatcttat

SEQ ID NO: 61462 - DNA, 122 bp, Homo sapiens
cctctgagacaggtattttttaatcatgcccattgtacagatgaggcaactgaggcacagcgcggggtagtcacctgccccaaggcacacaagccggggagtggcaaagctgggactggaac

SEQ ID NO: 61463 - DNA, 122 bp, Homo sapiens
cctctgggaaaacacatccgcctagaggagatgtttccaggaacccctgacaacatgaggcgtggaggcagggaaaatacattgaatcacagccacagagagtgggttagaagcacccctaa

SEQ ID NO: 61464 - DNA, 122 bp, Homo sapiens
gcttgtgtcctggcgtcgccgactctgcgaggctgtctgagcagttcattgctttgctcccgctgcgttcccatcctcatgattctgtctggtgctttctgcacagcataggtgtggtcagc

SEQ ID NO: 61465 - DNA, 122 bp, Homo sapiens
cgtgcagcagccggggtggctgaaagcgggctcctaagccatctcttcggattccttcttcgcagacgcgagcaagctcctggcaccctgtagtctctccctctccccttcctgtattcggc

SEQ ID NO: 61466 - DNA, 122 bp, Homo sapiens
gggtaccaagagagacaggtgcaccagaacctgtccaacactcaaccctggggtctagggcgaggccgcaggcgcagcaggctgaaaaccttcaccgccgcgcaccacaaccccaggccttc

SEQ ID NO: 61467 - DNA, 122 bp, Homo sapiens
ggcctctgggtgacagagaggggacccacctcgacagctcgggccacgtccttaaactcccgagcctgctgtggccactttgctgtgaggacaggccctgctcccactgcggcagcctaaca

SEQ ID NO: 61468 - DNA, 122 bp, Homo sapiens
ctctctcgaccccaaacagtggaatttggctgtgccttgggtcgtcttgctttgcaatatcgcctatagttgttggcggttttctgctgaggctgagccgtttgctccagcctccgactaaa

SEQ ID NO: 61469 - DNA, 122 bp, Homo sapiens
agcattattttgataatatctgttcacacttggttcctgtcttcccctcctcctctattccgaagttgcattcttagtatttgtggctttgtgtagtgttccattggttgaatacaatataa

SEQ ID NO: 61470 - DNA, 122 bp, Homo sapiens
ggaggagaggaaggctcaattcattctattctaggaaggccacatgttaaagcttactggcgtttacaaggatctttgaccctgagcatgagagcttggtgaggaaaatgtgaacaagacag

SEQ ID NO: 61471 - DNA, 122 bp, Homo sapiens
ctctttatggcaatgttcattcctttaataaatacctgtctattaatgcctactttgtgtcgggcctgtgttagaggtgagaggtacaagggtgagcctgaaggatctcatttctgcccttc

SEQ ID NO: 61472 - DNA, 122 bp, Homo sapiens
aatcagcataatgaagcaccagccaaataaagttcctaccggtgatctacagcacccctgcgcgctgacggtgggaatgcacggatggacatatgcggctcctacctcctcagggcttcact

SEQ ID NO: 61473 - DNA, 122 bp, Homo sapiens
gttaatacctggctgggattcatactcaggcattctggctacagaattcccactgttacacgccattgtctttcattcaagaattatagctgtgcctgtcacatagcaggtgcctggtaaac

SEQ ID NO: 61474 - DNA, 122 bp, Homo sapiens
caccccgggcccagagctcattagccgggcgccgcgggggccttcattaaagctcagcgacgcggaggctgcccgcggcggccccgcctgggcgctccgggctggcccggacctgcggcgtc

SEQ ID NO: 61475 - DNA, 122 bp, Homo sapiens
gtgcctttctccctcctcttgctatttttcgtgtcttttctcttccccctctccctgtgtcgggcgtgtttacttgcagcagccagaaagaccaccttccacccgccctctcttcggttcag

SEQ ID NO: 61476 - DNA, 122 bp, Homo sapiens
cacctctccataagctctacatgtctgggaagctgcttcctaaacttcataagctctacacgtctgggaagctcctcctcctccttgttcctgatctttacttctcagcctcttccaggagg

SEQ ID NO: 61477 - DNA, 122 bp, Homo sapiens
tgagcatagttgtcaccttccccacctcccaccaaaagtccgggattttcacgaggggagcgttttatctttgggcccctagaagagtgctttgtagtttgtaggtcctcagaaatttgagg

SEQ ID NO: 61478 - DNA, 122 bp, Homo sapiens
ccgccagttgagaaggactctgatccggctcagctttccaatcagctgcggaaggagccacgctttcgggggttgcaagatggcggccaccagtggaactgatgagccggtgagacgctgtt

SEQ ID NO: 61479 - DNA, 122 bp, Homo sapiens
ttttataagaaggagaaacacgagaggttcagggaacccctagcctcccttctttggggccgctttggacaggctggcaaggggcccggaagccaaaagcacaagtggccttacacccgccc

SEQ ID NO: 61480 - DNA, 122 bp, Homo sapiens
caaggtggtggtttcctaggccatgctattttctggcacttgaaaggaccttctccttgccgggtttgctttctttatgcccagtctcatgagggagtgccttttttgagtatggatcttgc

SEQ ID NO: 61481 - DNA, 122 bp, Homo sapiens
tgctgaaactagcctgttcttatgaattcattaatgagattgcactggctgcattcacaacgtctgcagcatttatctgtttgatctccattgtgctctcctacattcgcatcttctctaca

SEQ ID NO: 61482 - DNA, 122 bp, Homo sapiens
gggttcaaaggcctgttaagtagagagcaggagacagtaccagcacagccctaactctgtcgggcctgtcctctcagaagccaggccatggcccacctaaattctggaaggccccacctccc

SEQ ID NO: 61483 - DNA, 122 bp, Homo sapiens
gatgggaaggtgatctttcctcgaagcccagccacctctggctgggcctcttgccaaagccgcaccatctgaagttagcagcttctatccatagtctctgatgctcagttgcttctctgctt

SEQ ID NO: 61484 - DNA, 122 bp, Homo sapiens
aaagcagggcgggtctcagacagaaatttggccttatagggttgctaaacgcgaaaaaagcggggcctgggtaggaccaattaactgaaagaaatgctgggtgacaggaagtgacaccaatg

SEQ ID NO: 61485 - DNA, 122 bp, Homo sapiens
cttacaatcagggtctgcaaaacctttctagaggaggagctaaggcaagcttgtccaacccgcagcccaggacggctctgaatacggcctgtttacgaacacaaatttgtaaactttcttag

SEQ ID NO: 61486 - DNA, 122 bp, Homo sapiens
taacggcgctgtgggctggggagggccgagctgccttcagggttctggtctccagctgcgcggcactcacacctgccgctgtgaaaatgcagacccacggggcaggaattccgagtcccggc

SEQ ID NO: 61487 - DNA, 122 bp, Homo sapiens
cagtatcacaactgttttcatttttcatccacctgtttgttctttgtccgtttgactagtcgtttttatcattgtaatcacgacatcctgtgactgtgctcatgaggtctgtttatttccac

SEQ ID NO: 61488 - DNA, 122 bp, Homo sapiens
gtgagaccagcccaggtaagaaacgctgctgactgcaaccttcagctgactgcagacacacgtaggcttgtgaacaataatcagtgtttactgtttcaaatcactgtttcaggatggtttgt

SEQ ID NO: 61489 - DNA, 122 bp, Homo sapiens
aaatttgatcatgtcacgcagacagagccgcatggccatttatttagggctggattttcgcgtgcgtgctttctcccccttatccccaattccaggtcagggaagacatttcccctccccgc

SEQ ID NO: 61490 - DNA, 122 bp, Homo sapiens
ctcgcccactccccctccccccggacaagccatttgatgttctagtttgcaattactccacgcaaagtggacgtcctcctgcgcgatctttgggggtgtgtgggacgggggcgggggagggg

SEQ ID NO: 61491 - DNA, 122 bp, Homo sapiens
gccctggttcagggcgtaagggaccgaagaagcctccgaccctttaatgtgcatgatatccgggctgctgtagggattcctctgcaatagcggggtggcggacaggacttggacctgcccgc

SEQ ID NO: 61492 - DNA, 122 bp, Homo sapiens
cacgggggagcctgaaaatgtgcgtgtttgccattgtgttaaatgtgtgaatgatgttgacgctcctgtttcaggatcactttggtatgaaaaatataaaatgaagagtatcagtaaactat

SEQ ID NO: 61493 - DNA, 122 bp, Homo sapiens
gggatccgttgcctagtccaggtactgcccagctaccgggcgtcgaggattgcgaagcgtcggggcaggctggcacggtgcccacttttcccaaaacgccagccttccaagcccagaagctc

SEQ ID NO: 61494 - DNA, 122 bp, Homo sapiens
cctccccaggccgcagagtccagcaaatcccaccccgagaaaggccctccccgacccctccggcccctggggtgccccaggactccatggacaccgccccccagctcaactgagacgccccc

SEQ ID NO: 61495 - DNA, 122 bp, Homo sapiens
atcctgtcacttaccactcagtttcatcctgtccccatctcagcacagccaggttgctgccgccacatccctgaactcagggtcttacccccagcgccgggacgcacccagagttactgcct

SEQ ID NO: 61496 - DNA, 122 bp, Homo sapiens
taccacacacccatcagatagagaagaatggaattactgctgctgtatatataacaggggcgtgtctccaaccacactattttgatagtacataagcgtgactctgagaagttttatctaca

SEQ ID NO: 61497 - DNA, 122 bp, Homo sapiens
gggcggcatagttcactgaccagcccaaggtctgtcactcagcagaccagcacagagctgcgcttgggcctgaggcttctgcctcctgacttagtttccttctcagtgattggcctggcctg

SEQ ID NO: 61498 - DNA, 122 bp, Homo sapiens
aaaatcatcctaaaaatggaaccttccactcaggcaggcaccgcatgggtctgtgtgagccgcatgtttctcagccaagacgcggctgtgtaggaagttccttataaggatttcctactctt

SEQ ID NO: 61499 - DNA, 122 bp, Homo sapiens
gcgggcgtgggtgtgtgtacagggtgggggagaattgggaaagtatttatctcggaggggcggagacagctgcaagaagacttttgtcttagcattgttttagccttaggaaaggaaaaggc

SEQ ID NO: 61500 - DNA, 122 bp, Homo sapiens
atgctgttggaccacactttaagaaccgctgctctagagggtaactcggacctatcccagcgtcccagggaaacgaaatctgcagtgagaaatggaacgtccaaggcaatcttcagccggcc

SEQ ID NO: 61501 - DNA, 122 bp, Homo sapiens
cacacttgcacaactcaagttcagctctatcttatgttgaaagtccttgtttacgatcctcgtaggaggttcttaaatatctgcctgcgaactcccaaagactgggcgcttactagttaggg

SEQ ID NO: 61502 - DNA, 122 bp, Homo sapiens
gttcccatcccagcgcgttctgagggaggccggggctaaggacgcggtgacgggcgggggcggggcggccccgggtcgggaggcggggcgggagcgccggaagcgggcggtgccaggcccag

SEQ ID NO: 61503 - DNA, 122 bp, Homo sapiens
gaaacctcaagtagtttagtgaagtgtagcacacctcctcaggggttgcactttgtacctcgcttttgggggctgctggtacatgagtctggttataagtctagaagcaaagaggaggggtg

SEQ ID NO: 61504 - DNA, 122 bp, Homo sapiens
tcccctgggcgcctaccacatgattctcctgaaggagtttactggccacacagatcgcctcgccacatctgtacttatcatagctctgcataaatctccccagttccgtggaggcccccctg

SEQ ID NO: 61505 - DNA, 122 bp, Homo sapiens
ctggccttcctctccccctcccctcccctccctcgcgctgtcattcaccccgctcctctccgcgcacagccaatggagagacccagtcgaaaccgcgaagctctcttgcaccgggctttttc

SEQ ID NO: 61506 - DNA, 122 bp, Homo sapiens
actgagaggcgggtgcgctgctggtgctgctgccgcggcggctgctgatgcggaggctgccgcgcgcagtgccgccgagtccgccgcccgcccgggaccgccggtcgccggccagccgctct

SEQ ID NO: 61507 - DNA, 122 bp, Homo sapiens
caaactggaatgtagctattctcagcttagctttcatgacttcctacctcactgactctccgagttcaaattccagctacttatcacaggaaatctggctaaccaaggctgagtcatgtgtc

SEQ ID NO: 61508 - DNA, 122 bp, Homo sapiens
gcagaggcaaggcggggggcctcaagcgatgtgagtggggccctgagcatgagcaggggtcggcggagaagccgagagacccgccaagagggaaggaactgccgggcggccgagggcggagt

SEQ ID NO: 61509 - DNA, 122 bp, Homo sapiens
tagatgcaaaggaaacctatagagagtagtgtccctgaagaaaacaaaggagggagggagcgaccaagtctatcaaacattgatgggagagtgagtaggatggccccagatctgttgacttt

SEQ ID NO: 61510 - DNA, 122 bp, Homo sapiens
aacccgtgtgtgtcccgtgtctgtaatgggtcctggtttcctgtaaagctgtgtgtgtcccgtgtctgtaatgtgtcccggtttcctgtaaacccgtgtgtgtcccgtgtctgtaatgtgtc

SEQ ID NO: 61511 - DNA, 122 bp, Homo sapiens
gccctcaaagcgcttccaggcgacctctggcccaccttttatttttatttacagtcccaacggaagggcccaggtccccaagtgggcctgcgtatctccagaacaccatctaagtcacctca

SEQ ID NO: 61512 - DNA, 122 bp, Homo sapiens
ccagtgttggttaggtgatctaagcaggaccaattagagccttccctaggatttttttagcgttggagctgcaggggaccatgccccctctcttttcatgcacaatgcctgttgacaataag

SEQ ID NO: 61513 - DNA, 122 bp, Homo sapiens
gctttgggcgctccgcgaagcacctgttgaatgacggaccccggcccgggggtgcggcggcgccgcccgccccgaacgctcccaggcctcccgggcccgcctcacgtctccccaccagagac

SEQ ID NO: 61514 - DNA, 122 bp, Homo sapiens
ctgcgcgcgggcagcagcggtggcggcggcggtccaagatggcggaactgcagctggacccggcgatggcggggctgggagggggcggcgggagtggggtgggcgacgggggtggcccagtc

SEQ ID NO: 61515 - DNA, 122 bp, Homo sapiens
ctaggtatagaaccttggcattcactagtcaccatcactatactaggagtttctgttacccgagaaacgagttatgaaattaacaagcatactctggtttctcttcagatcgtataaatctt

SEQ ID NO: 61516 - DNA, 122 bp, Homo sapiens
ttgttccaacccctggttggaaggactccctgttacctgccttgtctgcctagaccccatcgcaaatgatcacatgtgttgtacattagaataaaacttagggaaatgtgttcttccgactc

SEQ ID NO: 61517 - DNA, 122 bp, Homo sapiens
cacggacttaggaacactgtttcctacctccttcacctcacctccctgccacctccagcccgtaatttagagagaagctgatgcagttgactcttcccagcttgccatttaaacgcacactg

SEQ ID NO: 61518 - DNA, 122 bp, Homo sapiens
gccccacactgcaactcctgggcctcggttccttcatctgcacaaaggggccaatgatagcgtctccctggagagttaccttgggaagcagcatgagaattgatgagaattaaagcgattta

SEQ ID NO: 61519 - DNA, 122 bp, Homo sapiens
acgcaaactctcccacgtgccctgttcacgatactgagttatgactcagccagttcccaccgctcaacccagaacagcagctgtcggtggggctgcggagcccacaacacagctcacagcag

SEQ ID NO: 61520 - DNA, 122 bp, Homo sapiens
ggagagcctgcagccgccacccagcggcaagctgtgcacagaggccgacccactccaaggcggccctgcatggagctgcagagcctcgtgaccctgtgcgctgaggccagcacatcccgcct

SEQ ID NO: 61521 - DNA, 122 bp, Homo sapiens
aggttccgagggagcgggaaaaagggttccggcgagatccactgcgccggtgtgcaggctcgagcggtcaaagctctttccgggggcccggggaactactctccttgcctcgctctgtctcc

SEQ ID NO: 61522 - DNA, 122 bp, Homo sapiens
ccttagtcaagctaatcttactaaataaggaacaagcttcccctgaggcttgcccttcagcgcactggcactgcccacccgaacgggcgtcacggatcctggtcagtctctaggatcgcgct

SEQ ID NO: 61523 - DNA, 122 bp, Homo sapiens
acattttacaacagtcacttttctctgggtcacatatttgataatactaccttatctttacgtacttctataggcttatgcctgtaatcccagctattgggaggctgaggcaggagaattgc

SEQ ID NO: 61524 - DNA, 122 bp, Homo sapiens
agtggacaggtcactggcttgtgatttggaaggtttgtgttctactcctagtttactcgtcgtttttggaagcagaccctctatgtcaatagcaaagggcaattccaagtggtagtgttcgt

SEQ ID NO: 61525 - DNA, 122 bp, Homo sapiens
ggagggggtgggagccaggaagcctgggttctggacccgagttgctgtgtgacttcaggccgccctgtgacttgctgagccccttgccccagtgatgtgtgaaaggctgtctgaggtcccac

SEQ ID NO: 61526 - DNA, 122 bp, Homo sapiens
tggatgagggatgcagaagccgggctgctcagggaaccctctgtgttaacccttcctgggcgagcgcggggaggtggcggcggggacagtgccccgagcgggagtgggaccagcggccggga

SEQ ID NO: 61527 - DNA, 122 bp, Homo sapiens
cacagccacacaagagaataaagactgacagacatgaacacacacagactcaccactgcacgttaagagcaatggctcatgggacagtcacacacgtggccacacagagtgacgatagtctt

SEQ ID NO: 61528 - DNA, 122 bp, Homo sapiens
tagtacacagtgcaattacaatctcacttttcctttcctgtttccccaacagagagaactcgatgccaccgcaacggtattggcgaaccggcaggatgaaagtgagcagtccagaaagcggc

SEQ ID NO: 61529 - DNA, 122 bp, Homo sapiens
gcctccctcccgtgccccgctgccctcatcagctgaggccggccaatgtccagcaggccccgggcccagagcctctggcctgtccggccagcccaagcagccgccagctggcgctcgtgagc

SEQ ID NO: 61530 - DNA, 122 bp, Homo sapiens
ctgcactgcaccgtctgcccctcagcccttcatttagacaagctgctcaatgccaggcaccgcccagctccgaggacagtgggccggacgccaggccccaggccacgtgcctctctcacggg

SEQ ID NO: 61531 - DNA, 122 bp, Homo sapiens
gagttccccaagccccgcccacagcacgatcctatcatctgctgcccgccccagctggaccggggctattacattattgtttgtaaagcgtcctgttgttattttctgattaccaaggcggt

SEQ ID NO: 61532 - DNA, 122 bp, Homo sapiens
ctaggccccctggcaggccgcccagcaggggccctttaaggctggccatgaggcaggcagcgtgacacccgcccagtgtgcaagttcattcatcacgggcccctgctgactcacgcttatga

SEQ ID NO: 61533 - DNA, 122 bp, Homo sapiens
ctgccggcgccggaccctgcgacaaccggggtcccccaggacagtaggcccggctctgcccgtagccctgagaattaaacgccggctctccctgcagtggtttgggctccgggctgtgagct

SEQ ID NO: 61534 - DNA, 122 bp, Homo sapiens
gagtgtctcttgaactcatgatccatctgccttggcctcccaaagggctgggattacaggcgtgagccaccacgcctggcctcactgaagggattttttaatgtcacgtggctctctcaggt

SEQ ID NO: 61535 - DNA, 122 bp, Homo sapiens
ccactctgacaggcgattggttgcttttggcagcagagtgaagtgtgtgcacagggatggcggatggaggaaactctgcagaagaattcaggagtgaggacagcctggactggttgggaagg

SEQ ID NO: 61536 - DNA, 122 bp, Homo sapiens
agccgggcagtgtgcagaggagtttcccttctgcaaagggttcaggctagtctccttccacgccagtttttggggagccagtggggagcatcaggggctctgaggcctccatagggcctgct

SEQ ID NO: 61537 - DNA, 122 bp, Homo sapiens
gtagggagaggcttttccttcacctctggcagaaaaggtttgctggggcccttcacctcccgacatcagagctgcacttcaatgtggaagctttggtcatgtgtggctcctgagtgcctgga

SEQ ID NO: 61538 - DNA, 122 bp, Homo sapiens
gagaaagcagtgaagcaaagcggaacgcgcggaagaagccgaccagccttacggaggcgacgcccctccaggtttggattcgtccatacggtttccacggcagcacacagaacgccggaaga

SEQ ID NO: 61539 - DNA, 122 bp, Homo sapiens
cctttgtgtgcagagggaggaggaggaggcggcggcggccgccgggctggagaccccgcccggggagcccccagcaggaacaatgctagcctgcctgacccgagggaacttactggacgtcc

SEQ ID NO: 61540 - DNA, 122 bp, Homo sapiens
gggcccagagcggcaggccggcgtgcgccccagggcctgcgcaccgtgggggctcttccccgcccacgaggcctaggtgctgccgcagccaccccaggaagggccccaggccacagtcgcag

SEQ ID NO: 61541 - DNA, 122 bp, Homo sapiens
cggaggaaggagcgaggggcggattctgcgcccgtgggaggctgcggcggtggcggggagcggaccgctcggagccgcgcaggggagcgggaccgtggagaaggaggaggcggcggaggagg

SEQ ID NO: 61542 - DNA, 122 bp, Homo sapiens
accaaccacacagtatggacaaaataatactggtatggaaatggttctcctgagaggatacgctggggcagtggtggaataggaattccatgaaatcaatttctgcctctactagttaatta

SEQ ID NO: 61543 - DNA, 122 bp, Homo sapiens
tctgggcagcctcggtttctttcatcttcagaatgggggcagtaatctctgaagtgggcccgagtgtgctgtgtgctctatctcccatctcgcctggtcctatgtctaacatcaacccccat

SEQ ID NO: 61544 - DNA, 122 bp, Homo sapiens
gccacatgggcacgtgtggccatgtggggggtgcaggacccaagaaggaacaagaggggccgcgtaaccctgcacagcctggcctgctcgctccgccgcctcggccctgcccgccctcctct

SEQ ID NO: 61545 - DNA, 122 bp, Homo sapiens
ttcagtgtttaaagaagttttacaaaaagcacatacacatgtactcatggagaagaacaccgctttaaaggagtaactagttgcaacttgttatgttatttccaatcttgatctatgtgcct

SEQ ID NO: 61546 - DNA, 122 bp, Homo sapiens
tgcgcaacctccgagggttccgaggagttaggcagtaagacggtgtggaggttgggggggcggggcgagtctttcaatctttcaaaggtatttttaggaatccaggatcaaagccattcggc

SEQ ID NO: 61547 - DNA, 122 bp, Homo sapiens
acagggcacaaactttctccaaatatagaaaatagttgaaatggttcaattcatttttaccgggagaaaatacatagcaagaggtaaacagtggagccaagacctaatcaataatgcctagc

SEQ ID NO: 61548 - DNA, 122 bp, Homo sapiens
tctatcccagtataccgctgctctctcaggggcatttgtgtccccgttttgcgtctcaaacgagctgccaagggaggggtggaatggcgcaatgcgacttaccgcaattaataatctcactt

SEQ ID NO: 61549 - DNA, 122 bp, Homo sapiens
gaactgattataataaaacgtctacatatttgttagttttataagcaacgcgtggtgtctcgtttgggtttaaggattctttaattatgaatgaggctgtctgagcatttcactgcggagcc

SEQ ID NO: 61550 - DNA, 122 bp, Homo sapiens
gccagagcccgggagcgccccgccacccgagttctggagaactcctcatctccacagccccgtcccccaggcgagctagccccacctctgcacacagtcccgcccaccggttccaagcctcg

SEQ ID NO: 61551 - DNA, 122 bp, Homo sapiens
ctccctccgcgtagttcctgccaagctccaggtgcccggtgcccacgtagtctcggtgaacgcagagaaatcactgcagatgtagccacgcttctctgagttaaggactcggcgtccgcagg

SEQ ID NO: 61552 - DNA, 122 bp, Homo sapiens
tttatatgaggcagaaacggccatcttctcgcaccgggcaggagggtgggcgtgagtgcgcgcccgcgtgtggccccgatgggaggcgaggcgctgggaggccggggggcgcgggggcggcc

SEQ ID NO: 61553 - DNA, 122 bp, Homo sapiens
tgtcaccttgcagccaccgagaggctcctcagagcactcaggaccactgggcggggtgagcgggcccagactctccatcgggatcctttccctgggactgggagctgccgcctttgcattct

SEQ ID NO: 61554 - DNA, 122 bp, Homo sapiens
ctggcactccctcgaccccagcacagcccaggaggtattccttggccctctggttctggacgttactttttctgtggctccagacttggtctgacttatctcccaggctccagtgtctgcag

SEQ ID NO: 61555 - DNA, 122 bp, Homo sapiens
atggcgtaaataacactgacactcaaatcccccgtctgatttcagattgggtcgatttcacgcaggttctatagaatttgccaagactgctggcctgttttctaccctgattccttaggtgg

SEQ ID NO: 61556 - DNA, 122 bp, Homo sapiens
gcccctctgtttttcagcaaacacccctggaggatgagctgcaattgggcaagcacagaacgtttgatcttcttagaaaggctctctattgtttgcttcaaaaatgacccaaggctgccagt

SEQ ID NO: 61557 - DNA, 122 bp, Homo sapiens
gcactccgcatgtgtaaaagggcaggacctttaccccaccgctagggacgggctgcactacgcatgtctgaaagggcgtgacaagagggaggagcaagaaggggcggggtggagggggaggg

SEQ ID NO: 61558 - DNA, 122 bp, Homo sapiens
gaggagcatcctgcaattatatttgggtgagcagctctaacatgactcttcagaccctttcggcacttttctagaaagaacctgaacttgtatacagaaataaagtaccaacatattagatc

SEQ ID NO: 61559 - DNA, 122 bp, Homo sapiens
gatcacagttcctgcagactgtagcagagctggggagcaggaaccagaggtatagtcccacgcccacccactctcccctcccctccctccgcggccccgcctccaaccagccgcttccggtc

SEQ ID NO: 61560 - DNA, 122 bp, Homo sapiens
gcaggccgcctgcggccctgccatgcgcctcttcggctacaaactggcgcgggacgccgccgccctcaccaaccgctcagtcagcctgctggaggagaggggcaccttctgggtcacgtagg

SEQ ID NO: 61561 - DNA, 122 bp, Homo sapiens
tttattcctagggaggaatccgcagaagcagtgagcaggtaagggagggatttcaatggacgagaggaccttcctgggggatcgccacacagtctcatccctcagttctgcctaagatccct

SEQ ID NO: 61562 - DNA, 122 bp, Homo sapiens
ccatttgtgtacttttgggggtcaactgattagctggcagctagcagagcgatcagagtgcgcagtctgtcctcgacaaggacgattaggtgcgtcaaataacacagtttctgtttatggat

SEQ ID NO: 61563 - DNA, 122 bp, Homo sapiens
acgctcttaaaggaccccggagcgggagttagttaggaggggtttccttttcagtgtgctcgtcatggttgagctcaggctctgaagccacacaaccccagacttgaatttcctcctttctg

SEQ ID NO: 61564 - DNA, 122 bp, Homo sapiens
cagagacagccctagatagaccaaacccaaggacatgactgtttcagggtcaggaaaggacgcagcctttgagtcagttctcggggtcatagagtcaccagatgacagcattagaagggacc

SEQ ID NO: 61565 - DNA, 122 bp, Homo sapiens
gtaagaggtcctgccgcccgaggaagacgcgggagggaggcccgcccctcgcgaatcccgcggctcctggagccctgccgcccgccccctgcgaacccaggccccgccgccaatggctcgcc

SEQ ID NO: 61566 - DNA, 122 bp, Homo sapiens
accttattggcttggggcagcctctgggactccacctgctcctgccggtctccttttcagcgtcggtgaacttggggccagcaccggagcagctctgtgggggcaaaaggcaccagcttccc

SEQ ID NO: 61567 - DNA, 122 bp, Homo sapiens
aaaaaggtgcatggatggatctttccattttccgacaatggtttgataaaatttttgtgccgcaagttcgagagtatttaagatctaaaggcttgcaggaaaaggctgtgctcttgttggat

SEQ ID NO: 61568 - DNA, 122 bp, Homo sapiens
tgcaataagcaagctgacgcagaagggaggacaaggagtctcaggaaccagaggagaccacggtgagagtgaggggaatgtcgctcacatatctcacttctgagacaagatataccgcaaca

SEQ ID NO: 61569 - DNA, 122 bp, Homo sapiens
ccgtctccactcccgccccctccagcgctgcaccttgtctcggggaggcgcggttcgagccggaatcagcctccctccgcggacctgacgctgggcaggtaactcccctcccctccctgccc

SEQ ID NO: 61570 - DNA, 122 bp, Homo sapiens
cttgcctgtgaagtgcattggtctcatctggatttcctcctcagctgtgattcacctggacggccacagactccctgtgcatttttgtccttcatttccccttccagcatggtggttaatac

SEQ ID NO: 61571 - DNA, 122 bp, Homo sapiens
tacagttgttttttgtctcttctttcccctgtcccgtccattgtaatgactgtttatcaacgttttcccaaagattgcctgagctctcaaccagtatcatgtctatctctgtgtgcagcaaa

SEQ ID NO: 61572 - DNA, 122 bp, Homo sapiens
cgaggacccagcactaatcactgccacttctctttaataataaatggtgaacttcaaatgcggcagaactcagccggctaatcagtgctcgccgggaggtgcaaaactgtctgaagcccacc

SEQ ID NO: 61573 - DNA, 122 bp, Homo sapiens
cccgcccgccttccgacgggggtgcggctccaggaaacggcgcgctcccagctccgcgctcgccacccgacgcgccccaggcgaccccgcagactcagccagaccaccctgcgggccccagc

SEQ ID NO: 61574 - DNA, 122 bp, Homo sapiens
ccacgcggccgagctgcaagcgaccctggcagcctcagaacccaggggtcaggggctcatcgatcctccctcccagcccctcctaatcaaggttgtgtgctgtcaggaagagcgcctgggag

SEQ ID NO: 61575 - DNA, 122 bp, Homo sapiens
gctggggcccctgcctggacttgcaggcactggaccaggcttcagtcctagcctcagctacgctggacctgaagagcccctccctattcaaaaaggctatggtgtccgtcctgaactcagca

SEQ ID NO: 61576 - DNA, 122 bp, Homo sapiens
gctccctccccggtgggtccttcccctgtgaggcggcggccgggcgctgatgggcactgacggtggtcactaggccgactccgactagagtcctgttagcttgaagaggccgtgaggcatcg

SEQ ID NO: 61577 - DNA, 122 bp, Homo sapiens
cgccctgggcctcaagctggccacgctcagcctgctgctgtgcgtgagcctagcgggcaacgtgctgttcgcgctgctgatcgtgcgggagcgcagcctgcaccgcgccccgtactacctgc

SEQ ID NO: 61578 - DNA, 122 bp, Homo sapiens
aagccacagggaagtgcctaaggcacacaaatcttaagtatacagtctgatgatttttcacgcgggtacacacctgcataaccccctcccagatcaacaaatgtctacagagacattttcag

SEQ ID NO: 61579 - DNA, 122 bp, Homo sapiens
tgtggcccgccacatccgggatgcgcaggtccctggcttctgcggggacctaggaggagacgaggagcccccattcgtgctgctagacacggacgcggcgggagaccggctttttgccacat

SEQ ID NO: 61580 - DNA, 122 bp, Homo sapiens
gagcctcaggatgaactggtggctgccaccatcttcccttggtgtccagccctgcagctccgcgggagtgtcctgggccttggcggggacttcccgagccgtctcaccgcccaggcccacgg

SEQ ID NO: 61581 - DNA, 122 bp, Homo sapiens
gcgcctggctagactgcgtgtgggccccggagggatccgggggtgcggagcttgcgaggccgccaaagctgttgtctcaacaaggagagtctggggctagtccaaagtcgtgtctacagcct

SEQ ID NO: 61582 - DNA, 122 bp, Homo sapiens
ggccgtgacccgagttggcctggactgaaggacagtaggacacgctgctgctcccttttccgtagtgtttcttaaaggcctggttttgtttagattgaggacggtttctggcagtccctcct

SEQ ID NO: 61583 - DNA, 122 bp, Homo sapiens
actctgtccggggaacagaagccacaggctctacttctcctgtccatgtgggattgaagccgagggtctcgcagaaccagctgatgtgccggggctccatttccccaagacgaggacactga

SEQ ID NO: 61584 - DNA, 122 bp, Homo sapiens
gccaggtaagccgcgagccttcctacgccgtgttctccaccgtaggcgccttctacctgccgctctgtgtggtgctcttcgtgtactggaagatctacaaggctgccaagttccgcgtgggc

SEQ ID NO: 61585 - DNA, 122 bp, Homo sapiens
gcctaggagttcagccgacttagcacgaagagtgcgatggaagggctgcttttggcaaaccgtctcaaccccgggcgacggcgggcacgggaggtcagggagcgctggaggaaacctgcact

SEQ ID NO: 61586 - DNA, 122 bp, Homo sapiens
cagaaaataagtcaaaactgatgacactctccaaggcttttcacccacttctggcaaagacgaagtaacaggaactgggtttcccctctcagctgaaataataagcaaaaagattgaagaag

SEQ ID NO: 61587 - DNA, 122 bp, Homo sapiens
gcatccaggcaccgggcgtttctggaccttcttcctccatcctgccggggaggccgccctcgagacaggagggctgaaaaacatcacctctgcatgacagatgaggaaactgaggcaggaaa

SEQ ID NO: 61588 - DNA, 122 bp, Homo sapiens
atcactgcgcatgtatctttgcgtttggctttaaatgcttccaagtttgattcaagtttacggttcaattaaaaaaatactggtttagtgcctactttcagacacagtgtagatgccgaggc

SEQ ID NO: 61589 - DNA, 122 bp, Homo sapiens
tggcgggctcgtttggcctccgcgggtgcggggtgaggagtcgagcgcaggggagtgcagcgcgttcattatggagcctttgtgtgcgcgcctgggctgtgggcacagttgggagagctggc

SEQ ID NO: 61590 - DNA, 122 bp, Homo sapiens
actagtctctcagctcagctcccagggcccgactctcttgctgttcaccaccatggtccccgtgaatgtgcccgtcgatttcctaagaggacgctgcccacccactctagttctttccaagg

SEQ ID NO: 61591 - DNA, 122 bp, Homo sapiens
ggggtgggaggcattgaggggggtgaaggctactagggagggaagttctcattctccgagcgagggcccccttacatgggcctcccgaccctcgtagtcttgggaggcggaaaaccgtgggc

SEQ ID NO: 61592 - DNA, 122 bp, Homo sapiens
cgttaataactattgaaagctcagaattgattgctgaggcaatgtgactgcattgggatgcggcaaaggacaacatgaggaggcccctgctttccaggaagttacatacagggaagaatatc

SEQ ID NO: 61593 - DNA, 122 bp, Homo sapiens
ccccagcattgtggccaggtacatggacaggaacagcatgaagaggatgggctgcagctccggatcccctgacaatcccaagagaaagaattctggagtgtctgagaagtttcctgctttca

SEQ ID NO: 61594 - DNA, 122 bp, Homo sapiens
gcccacagttccctctccctctggcccctgacctgccccgtgctcccctgcagggccctgcgtggcatgctttgccatctgtttctagggacctgtcaatggaataaacttctcccctcatg

SEQ ID NO: 61595 - DNA, 122 bp, Homo sapiens
tcctgacgacaggaacaacggtattaacaacggccggaaggtgagcggtgtcccagacaacgacggatagcggccacctggccactggtcttccttctctaccagacctgtatgtgggaaga

SEQ ID NO: 61596 - DNA, 122 bp, Homo sapiens
ttctagaaaggcagcttttgacccacttggaagcacatttaccgagttcggccccgcgaccggcactgttctaggcccttcgtgagcttttcccacagctagagctgtccagcagcgcagga

SEQ ID NO: 61597 - DNA, 122 bp, Homo sapiens
cacctcgatggccttgttccacttggtgaggcagtcacggtagctgctgaggtcaaagcccgcaatggtgactttgcgcgtgatcatggagtgcacggaggcccggccgtcccgcaccatca

SEQ ID NO: 61598 - DNA, 122 bp, Homo sapiens
agtggccgtctagacgcccacgtggggcttcctgcgatcgagaatgggttgggaccgggacggccaagccgatgctgtcggggacacgctgggaggaagaagtacggggaggaggggcgggg

SEQ ID NO: 61599 - DNA, 122 bp, Homo sapiens
cgcccttgaaggcccctttccgggctgtctgacacgatgcaagtgtcagcttgtgttggccggttgcctttctttcgcaagaggggaaaatatcctcacagactttctgtgttctcagagac

SEQ ID NO: 61600 - DNA, 122 bp, Homo sapiens
aaaaaactaagcacctactatgtgctgttttagtcactgagaatataaccctgaacaggacggaagctgtgtgccttcttggaaccctccttccagcagggagagataaaatggggtggggg

SEQ ID NO: 61601 - DNA, 122 bp, Homo sapiens
catgggctgggggctctgcatgagccccttcagaacctcgagttccactttgcacccaaacgaacacttgttgacaaagataagaggcaggagcaggtagaggattgggttttccgagaagt

SEQ ID NO: 61602 - DNA, 122 bp, Homo sapiens
cccaactctgttttcagctgacaccatgcatttgtcaaaggactgttcacggatttcatccgtggcaagaggagcacaagaggaaagaacattagcaaaaatcttctcttgttatttttggt

SEQ ID NO: 61603 - DNA, 122 bp, Homo sapiens
catcgcaggggggcgaggcgccccccgcgatgcggggagtaagagccagtccctcttgcccgcctggctcttaggatccgcggtggactcacagcctgtttatcatattgtgagtaatatca

SEQ ID NO: 61604 - DNA, 122 bp, Homo sapiens
ccacaaatattgctgaagaaaccagcaaaattgaaacctacattgcaaaacctgctctgccgggaacctccacaaatagtaatgttgcacccctttgccaaataacagtgaaaattggaaac

SEQ ID NO: 61605 - DNA, 122 bp, Homo sapiens
tcctgcccctgccacgcccaccccctgcccacctctccaggctctgctctgcagcacacccgtgggtgacccctcaccccagaagcagcagtggcagcttgggaaatgtgaggaagggaagg

SEQ ID NO: 61606 - DNA, 122 bp, Homo sapiens
cccagaactgggagtagtctgattagactaacaattccattccctgattaactgtgggatcggaatctaagagaatttgtgtagttagaagaatctggtatgataatgtgtgggagtagcct

SEQ ID NO: 61607 - DNA, 122 bp, Homo sapiens
gcaggtccaatcctccataatcatagcctttgcttcactatttgggtgtagcaacctttccgttctccacgtatcttcctggaaattgccagcattctaccagaaactgtggtaagaggttc

SEQ ID NO: 61608 - DNA, 122 bp, Homo sapiens
gccggtgagcgcggctggctggagccaggagctgaccttacgggcgccggggcagctgttcgcgatgcacatctggcagcggcgcccgcgccccgcccccgcgctggccgggcgctaccttc

SEQ ID NO: 61609 - DNA, 122 bp, Homo sapiens
aggtcaggtgaccacaacaattattctgtaacccagtgagccgctactttcatatctaatcgcagggcctgtcttcgtgcctgtctcccttggaagagaacatgccttcctttatctccgct

SEQ ID NO: 61610 - DNA, 122 bp, Homo sapiens
ggagataggatgaagtcatgattttgcttttgcaagttttcctttaaattatttctctctcgctctcctcccctccttttttttttttttttttttttctttttcccttctcttcttaggaa

SEQ ID NO: 61611 - DNA, 122 bp, Homo sapiens
gcatctgccctcccaacttttccagattttacccgtcagattcctggcagctgtgcacggcgcctgtgccggccgtcacgtcccattccgatctctgggtcgcacggtaagaggaggacaca

SEQ ID NO: 61612 - DNA, 122 bp, Homo sapiens
gcccggcacgagggctggttcatggccttcacgcggcaggggcggccccgccaggcttcccgcagccgccagaaccagcgcgaggcccacttcatcaagcgcctctaccaaggccagctgcc

SEQ ID NO: 61613 - DNA, 122 bp, Homo sapiens
gggtcttctgggtggaagccttggagacaatcttgagcacaggcaggtatgagccctgctcgggcttattgggggcaatggtagccacaggcagcctgccagatgccctgtgaaccaagact

SEQ ID NO: 61614 - DNA, 122 bp, Homo sapiens
ctgggcagccacaggcccccagcggagccccaccccgcacacagcctccaagtgcctgcacggccgtatctcccgcaattaaaatgcaggctttcaaatccatgacgctcacgcactgctca

SEQ ID NO: 61615 - DNA, 122 bp, Homo sapiens
ttttatgacaaaaaaagaaaccctccagtttagaatcacttgttatatttaattgaaaaacgtgtttctctttcttctctctctctctttctctctctctctcccctttacagtctggaaca

SEQ ID NO: 61616 - DNA, 122 bp, Homo sapiens
agactggcatttttgcctgctcagtaaatgatagcaaactcttcttctggtcccatgagccggaagacactttagaccagaagcctccagacagctaaatttaattaattatagtaaatttt

SEQ ID NO: 61617 - DNA, 122 bp, Homo sapiens
ttttggtttatcctttttttttttttttcttgaggtagagtctcgctctgtcgcccaggccggagtgcagtgacaccatcttggctcacagcagttctggaacagaaagttccagaatgcta

SEQ ID NO: 61618 - DNA, 122 bp, Homo sapiens
gccaccattatcacaacaaaactgcctgggcaatagcagtgcattccgttgagaagtactcggcgagaagacagaacagcattgcaaattaacatgtttacagggaaaagcacttagcctca

SEQ ID NO: 61619 - DNA, 122 bp, Homo sapiens
gccataaatctcttactttctttccaaacgagctctaattttaagctcaacgaccaaagacggagaggcagtcgctttgagctactcctggctatttgttgggaaatcacctaaatccgttc

SEQ ID NO: 61620 - DNA, 122 bp, Homo sapiens
aaaatgcaagccccacagttgtcagcaaaggacttccctgttaccatggtaaagccgctgcgcctttattgtggttgaggagtacttgcatcaacctaagagaaaattaataagaaggaagt

SEQ ID NO: 61621 - DNA, 122 bp, Homo sapiens
ggatgaggtagtaggggatggggcgggacttgcggcaagggacttctaccagtaggtgggcgttggtggggcggggcccaggacggggcggtacctggagcttgcgcaactgctggagctgg

SEQ ID NO: 61622 - DNA, 122 bp, Homo sapiens
ccacacagggcaggtgacagaagagccaccacgcttcaccagggctgtgctgtagtcctgcgagactgtgagctccatgacaccaggctgggtcttcagcaaaagtcttttaaggatgaaat

SEQ ID NO: 61623 - DNA, 122 bp, Homo sapiens
agagaacaaggatatttgttaagtggtgtttagatgcaatttccccccagttggcaattccgctaaataaataaatgtgttctacaaacaagtggtggatgtacatgcatttgttattgctt

SEQ ID NO: 61624 - DNA, 122 bp, Homo sapiens
gaagccccgccccgcctccgggtctggaggaggctgggaagccccgcccctccacgctagcgccgcccaggctggcacaaaggaggaagcctagtcccgcccctgcgtgcggcgcttctccc

SEQ ID NO: 61625 - DNA, 122 bp, Homo sapiens
cgcgggaagtgagcgggctgcctctgcgaggcaagtgcagttgagctgatgtggatcttacgtcgcttgagtgcccacctcctcgtcctctccccatttgtccgccgcacaaagacgctcgc

SEQ ID NO: 61626 - DNA, 122 bp, Homo sapiens
aggcccggcgagaagtcgagaacagcagctgctggcacaggtgctaagcctcttactgctcggggcttgcggattagggggccgctccgagtgcggagcccgccgagcccacgcccacccgg

SEQ ID NO: 61627 - DNA, 122 bp, Homo sapiens
gctcagcagtgcctagtaccgtaaagagtatggtctgaaaagcgcagggaagttccgccgcgaccttttgcgacgcgcctcgctcgcgggacacgttaacagagcagccagaggcagcttcc

SEQ ID NO: 61628 - DNA, 122 bp, Homo sapiens
tggactagggaagcggagttctgggagttctcgtaggattggcgcaaagtgagcccgctccgcccgccggtctacgcatgccggggagccggtgttcggacgaccgtctcccgctcctgcac

SEQ ID NO: 61629 - DNA, 122 bp, Homo sapiens
ccagcagcagggaggtccagggtctcaggtcagggagccgcatggctctgtcaacggatacgagatgagaaatcatgggggtggagtcccaatccttgtccctgccctcctacccgcccggc

SEQ ID NO: 61630 - DNA, 122 bp, Homo sapiens
acagagtgcccctcctggtaaacaaagatcaagagcataccaatcagcttctgccacaaccggctcttacccataagtgccacctactgatattgaggttgaactgcataatctaatttaaa

SEQ ID NO: 61631 - DNA, 122 bp, Homo sapiens
cacagctaagagcaaaggaggccggaacacatccaatggcagcgccgagacttcctcctgcgctgctcggccgccgtccccggacaagagagtacatggctgcttgagctgaaaggaagctt

SEQ ID NO: 61632 - DNA, 122 bp, Homo sapiens
tatgcagaaatggaaaaatgatccgtggcctctagtaaagatcacctcctcagtaagactcgcatggcaatgggatggatgaaggaacaggggataacagattggatggaacccacaccctt

SEQ ID NO: 61633 - DNA, 122 bp, Homo sapiens
ttttaagcggcgctgtcgctagggagcggctggtagggcgagcagcctcggggagcagcccgggctgtttgttccgtcaccggggaaaggaggtacacacagtcgcgcgcgcacggacacac

SEQ ID NO: 61634 - DNA, 122 bp, Homo sapiens
acccgtcctgggaacattcaataaatggccttagtactaaatgtggtaaaccacgagttgcgacatagtcaaataaaacttcctgaatttacctgctgtactttgtcgcttgtttcctcttt

SEQ ID NO: 61635 - DNA, 122 bp, Homo sapiens
gccggctgccagctgcactccagctgcgccgccctactactgtgacatcaagcaggaggccgacaccccaggcctgcccaagatctatgcccgcgagggccctgacccttactcggtgcgtg

SEQ ID NO: 61636 - DNA, 122 bp, Homo sapiens
tctgctgatgttctagtgttcttcccggggtgtgggagtgagggtgtccttccccgggtgcgtgggagtcggtgctgcgccaggactgcactcggaagcggcctgtccctctccaggcgtct

SEQ ID NO: 61637 - DNA, 122 bp, Homo sapiens
ccgccctaagatgccccctccctgggctgcccacgccccctagatgcccccgcgccagggcggccccctccctggccaaggggcgccacatcagaaaagggttttcctcagatttgttcttt

SEQ ID NO: 61638 - DNA, 122 bp, Homo sapiens
gggcgccctccccaacgtggagttatcctgggagcggctccagggcccagccggtgagggcgatggcagaatcccaatccgtccccaccccctctccgcgccctgggcgcgtcgcggccgga

SEQ ID NO: 61639 - DNA, 122 bp, Homo sapiens
cattttcacagcggcaggtgtgagtgccgcgcagctggagaccagaagcctgaggcagctcggccctccccagcccaaagtgccgttattccgtttctgtatcagtaaacacgtttcatttt

SEQ ID NO: 61640 - DNA, 122 bp, Homo sapiens
gcaccaccccctgacacgtgcggcaccaccccctgacacgtgcggcaccaccccctgacacgtgcggcaccacacagctagtgccggaactttttgtgcagagaaagaagaccctgcacccg

SEQ ID NO: 61641 - DNA, 122 bp, Homo sapiens
tcatcatcatcatctccattttacagatgaggaaacagacagaacacagagaggttaaagcgttctctcaaggccacacagctagcaagtggtaaggctgaaggtctgttaacaactaagag

SEQ ID NO: 61642 - DNA, 122 bp, Homo sapiens
ggagtggggaggaggagggctcctggcgcggggaggagccgcgggaggggggatgttggccgcagggcctcggagttctgagctgtgtttgtggcttcagcgctttgatctcctgccaggga

SEQ ID NO: 61643 - DNA, 122 bp, Homo sapiens
ccccacttccatccgatcttcagaatcacctgaagcatgttaaaaatacagattaatggccgggcgcagtggctcaggcctgtaatcccagcactttgggaggccgaggcaggcggatcacg

SEQ ID NO: 61644 - DNA, 122 bp, Homo sapiens
caggcagattttggctgcagctcagtgggacaggagctgcaggtgagggaagggcagcagcggtggagcccagcaaagcagccttggtgcatgtcttgctgggaaacaagcacagagagagg

SEQ ID NO: 61645 - DNA, 122 bp, Homo sapiens
gcaagaaacagacttgtgccattctggccttcagttcagatagcaaaaaatagttacacacgtttacatccatatggtaaaactactgctgtgcccaatcctgtaaacaatcacagacatga

SEQ ID NO: 61646 - DNA, 122 bp, Homo sapiens
aatcggaacggggggtggggagacgcgggatctggaggtgagtgggagaggacgaggggccggaaggaaacagggacatcgagtgtgtcccttctcgggtgcaccctttatttttgtttttg

SEQ ID NO: 61647 - DNA, 122 bp, Homo sapiens
atcaaggcaactttgggccaaatatttatggcttgggtttatctgaaatccaaataatggcgaaacacgtcttccagatagaagaggtgcctgtttctgtcctttggggattgttttccaga

SEQ ID NO: 61648 - DNA, 122 bp, Homo sapiens
gctcagcggcctgcttctatttatgtgggggatccaacatggcggccgcggcgaccctggcgatggcggtgaagcccatcagaacgtagtagcggggaaggggacacggtccgcactcaccg

SEQ ID NO: 61649 - DNA, 122 bp, Homo sapiens
acagctaggacttttggtaaacacctgggcaattttcacaaggaaaggcatgaaagggtgcgtgccctggtatgagagcctgaatacaagggccacaacccagtcaacctggaaatgtcgcc

SEQ ID NO: 61650 - DNA, 122 bp, Homo sapiens
atgaagttgaattgattgtttctggcccctctgataaaggtaaattgagtaaagtgtaaacgtgaaacagcatgggttaggatacttttcaaggattttggtgccaatttctgttttcccca

SEQ ID NO: 61651 - DNA, 122 bp, Homo sapiens
ttccgccattgctctggggagcccagatcccagcttcccacttgaggaggggcgggggatcgagctggggctgtccaggaacggacacacaaaaaatagccctgccgcgcaaaacgctccac

SEQ ID NO: 61652 - DNA, 122 bp, Homo sapiens
tcctgtctcattttgttcttcctgcctcttctgtgcatgggggctacattactgatgctgcggttgcccagttggagaggagagcagtagtataagaaaagcaccctggacctgtgcccctc

SEQ ID NO: 61653 - DNA, 122 bp, Homo sapiens
ccgcttcgctgcactccttgctcctcagtctgggctccgggtcctgccccagtcttcctccggggggttccgtcctcaacacgcccctagggcccccagcagtccggccttggtaccctctc

SEQ ID NO: 61654 - DNA, 122 bp, Homo sapiens
cgatagttttcccagccggaggattcttcgaagagcgcttagtaaaggacggaagttccacgtgtttgtgttgagcaactgcaggtggtgggcggagacaccagcgccccgccttctgcatc

SEQ ID NO: 61655 - DNA, 122 bp, Homo sapiens
ccttttgcagcttgatctttaatgtcatattcagtccgacatctttgaagtagaaattggcggaaggtgctactctctgtgctaactgtcagatgatgtcaggtaattacacaggtgagctc

SEQ ID NO: 61656 - DNA, 122 bp, Homo sapiens
ttttgattatcatcctaccagatagagattattccctctgcacccgggttaactgaaacccggtgggggtagatccttgccattttccggccctgtaccccactggaaataacatgcggtgg

SEQ ID NO: 61657 - DNA, 122 bp, Homo sapiens
atgctgcagtgcggcgcttcggcgccccctactgggggcaggggcaggctcctcccgccgcgctgcctcccaggcttgcgagcttgggtctttaacgtgctgcacccaagacgggcttccct

SEQ ID NO: 61658 - DNA, 122 bp, Homo sapiens
actaggaaaagcaccacctccaaattaaaatgtttatttattcagcagatattttcagtgcgtattttgtgccaagcactcttctagtttaaggatgtattcaagaacaaaacaaagatctt

SEQ ID NO: 61659 - DNA, 122 bp, Homo sapiens
atgacccaagcactaagccatcctgcccaggactccaggaacaaacctacttccagaccacgccatatgacctgcccagaatctctggataggctgatgcatgaagggcgttccctgccgaa

SEQ ID NO: 61660 - DNA, 122 bp, Homo sapiens
tgcctaaacctttgtttcttggccaaggaggggcggggtgccatgcctgagatgtagatgcggccagccatggctgcgtccacttgccctggcacaccgtgccagtcccggctaatgaactg

SEQ ID NO: 61661 - DNA, 122 bp, Homo sapiens
acccagacccccaatcccacagaagcgccgtcccccagcggcacagcaccccctccccggcgcggtggtagggcccgacgtgacgtcacccattgtttacaaatcaacccgagccggcagga

SEQ ID NO: 61662 - DNA, 122 bp, Homo sapiens
cctgcaccatcacggtgcagccctgggctgcgtgggcccaggtgagtgaggggctgggcccgcagcctctgctggtctcacagatcatgggtgatttatatttcccgcgtgggactttgacc

SEQ ID NO: 61663 - DNA, 122 bp, Homo sapiens
gcacaatggatgtaaattccaattctcaaatgatcttctgaagcaaaggataatgtcttacgtcaaactgtggcaaaagcctgggtgttcctgatctaatcttgaactagggtgtccacccc

SEQ ID NO: 61664 - DNA, 122 bp, Homo sapiens
gtcagatgcaggagcttcggagggttcgttctggagtcatgagtgaaaaggtatgtgttacggggctagaagttttagagctggttcttaccatctgccagcctttgatggcactccacttg

SEQ ID NO: 61665 - DNA, 122 bp, Homo sapiens
acactccgcgaaggtgttcctgaacttcatttcccagaggctttagctaacgtgtactttcgccctgcgatgggccgcacattttcgccgccagtcttttgctcctgtttcaggtatgcgtg

SEQ ID NO: 61666 - DNA, 122 bp, Homo sapiens
tctagagattaaattcacagtagcttcttctctcgggccagcaggaagcctgattaatgccgcttaatacgacacttcccatatttatttggccacaaaactcctttttccccataactcct

SEQ ID NO: 61667 - DNA, 122 bp, Homo sapiens
tcgaaggcgagtctccccgccctggggactcctggcgctgcagttcgcacggcggatggacgcagtcaggttctccagggagctgcgaggagccccaggacttggaaaaaccccagagcgcg

SEQ ID NO: 61668 - DNA, 122 bp, Homo sapiens
ttttctaacatgacgtcacctcttgtttgtattgcagccctgtattgagctgagatggctcgagcctaacattccatgatccaggatcgtgacagatgtgcacaggctgctgctgttgctgc

SEQ ID NO: 61669 - DNA, 122 bp, Homo sapiens
ggcggcagcgcagtgcaaccgagccccgtcccttcccggctctccggccccgaacccgcacgcccgggccggcgcacccacagcccccgaactcaccacaccccagcccccacccgcagcgg

SEQ ID NO: 61670 - DNA, 122 bp, Homo sapiens
caccttcctgggctctaggaggcgctgttcctccagcatccaagaatcagcctgaaccaacggcagctgccaggcgacagctcagagcccagtgggggtggtaaagaccattcagataaagg

SEQ ID NO: 61671 - DNA, 122 bp, Homo sapiens
agaagactgccgaagcccggctccggcagcagggtggcgcctgcgtcatgaggacgggctcgcatcttcagccctggtggcagggagcggcgtttcttccgcacaggccttgcgcctgctag

SEQ ID NO: 61672 - DNA, 122 bp, Homo sapiens
atgtcattacaaggcggaagtcctgcccgagaggacagtccccaggccttgctaagcatgcgtggtatcaagaggtgcattgaggcgctcctgcagcctcctcccggcacgggactcctcac

SEQ ID NO: 61673 - DNA, 122 bp, Homo sapiens
gtcgctttccaggtcctcgcaggttacccgcgaggaggcccctggcagctcatagccctgcgagaagtccacctccgggcccagcgggaggctctgcagctctccaggctgcagcggggagg

SEQ ID NO: 61674 - DNA, 122 bp, Homo sapiens
gatcacttgagcccaggagttctggatcctgtctctgcacaaaataaaaaattactcaggcgtggtggtgctcacatgcctgtagtcccagctatacttgggaggctgaggcgagaggatcg

SEQ ID NO: 61675 - DNA, 122 bp, Homo sapiens
ggttttctagagtggatcaccactagaaaatgaggtctaccagccgggcgtggtggctcacgcctgtaatcccagcattttaggacgccgaggtgggcgtatcatgaggtcaagggatcaag

SEQ ID NO: 61676 - DNA, 122 bp, Homo sapiens
acaggatagagggtgagagtctcccatggcatcctcaataatagtagccagagccagagccgcatccatagccatagccacagagggagcgggagccatagccatagccacagcccagtctg

SEQ ID NO: 61677 - DNA, 122 bp, Homo sapiens
caagggatccactggcctaagcctctcaaagtgttgagattacaggtgtgagccatgagccgggccagaaccttggttttacctctggaaatgggccatggccagcccggacttatctgggt

SEQ ID NO: 61678 - DNA, 122 bp, Homo sapiens
ttggagactaccagcagccctccaagccctggcagtggagaagtttcgttgctatggtttcggagaggcataaaagccatcacccagaagcaaatgtgtttgggctccttatatgtgttgtc

SEQ ID NO: 61679 - DNA, 122 bp, Homo sapiens
tagtgctggacctggcttgtgggggtgaggtgctcagtgctacccaataccacagtacaacgaatgaacaaatgtctaaatgaaacatccacattgttttcagtaagtcctcttcccagccc

SEQ ID NO: 61680 - DNA, 122 bp, Homo sapiens
accttcagctacagcttttccagtaaaaccactgcagaaatccatacttcccgacaggcacgcccggccccccaccccccactctgcgcggtcttggagcctcggggagttaaccctgcgca

SEQ ID NO: 61681 - DNA, 122 bp, Homo sapiens
acactaaaagcaactcagtgagctgcctcctcagcagaaaaccaggcacagaatagaccccgatgccattcctagtccagtaagtgcagggggtgggtgtttgtgcatgtcattcctgtgtt

SEQ ID NO: 61682 - DNA, 122 bp, Homo sapiens
tttctaaattgacttgagacttgtctcagatacttggttcacataggtttcttttaggggcgatgaaaatgttccataaaccactctacctaaaattaggtagtgatgatggctgctcaact

SEQ ID NO: 61683 - DNA, 122 bp, Homo sapiens
aacaccctttaactagtgtcgcgttatctgccgggtggttcgcaggaagtcctgcgaacacgttgttgccagttctgtaaacgtgtttagatagctaaatatagatcacagtgccacatctt

SEQ ID NO: 61684 - DNA, 122 bp, Homo sapiens
gccatttctaaagaatccacagtaggctctgtctgacagggtgcatctgggagggcctgccgggcctttattcaacactagatacgccccatctccaattctaatggacatgtgcagaaaat

SEQ ID NO: 61685 - DNA, 122 bp, Homo sapiens
ccaggccaacacacgtgaccacgtctgcctggggcagttgaagtaaaggacgcgaggcggcgctgtcaccgcattctgtgaaccgcagcgctctgggtccctcccgctggtctagtatcatt

SEQ ID NO: 61686 - DNA, 122 bp, Homo sapiens
aattgctggtgggatggctgcaatagctggagctcccattggtaaaccgggtataggttccgccttctcttactttggtgcttcccattgggtagggccgggaaacacgataaaggggacat

SEQ ID NO: 61687 - DNA, 122 bp, Homo sapiens
cctgctcagacctgctggctcctgagaggggcttagaagcctcttgcctgcgcagatcgtcgtttctagctgcgaggagccaaaatgttcagggtctgagctttaaggtctaactgttgtac

SEQ ID NO: 61688 - DNA, 122 bp, Homo sapiens
atccagttttttccggaggccagacctatcaccagcacctatttctgtctcaacagacaccggcaactggcaaaaaagaaccttttgaataaatgtgatgttttctctgtttgtcacccaac

SEQ ID NO: 61689 - DNA, 122 bp, Homo sapiens
gcagccccagtacactccctgcatgggaatctccatctcaaagtcagcctccagggagcccgccctgaaacagattctgtcatggaactcaacagagtatcctggtgcggataaccagtgtt

SEQ ID NO: 61690 - DNA, 122 bp, Homo sapiens
cgcgggaccagcagcgcgaactttttgccgctcggccagcctggcaggggattttaaaatcggccaatcacagcgggcgccaggcctccgctttccgcttactggtcctgccgtaggaggcg

SEQ ID NO: 61691 - DNA, 122 bp, Homo sapiens
accagacctggatcagaggacctaggttgggggacagtgcggagcagatggatctagtgccgaggacatccgagccgttgcttagtgttctgggatgcctgcgctgagagacgttggtgccc

SEQ ID NO: 61692 - DNA, 122 bp, Homo sapiens
gaaggagtgggacagagcagggcccttatcctgccattggccactgtcctgagcaggctccgtggtcccaccctagctgtaagagctgcgatggagctctgtgtctgaaccgagctagagat

SEQ ID NO: 61693 - DNA, 122 bp, Homo sapiens
tcattttctccgcgcctctctaatctgccaggaaataattcaacgcaattcgggctgaagcgtgtgcctcgccgcctgcggttgggtcatggccccttctgagactgctcggaagtgggaga

SEQ ID NO: 61694 - DNA, 122 bp, Homo sapiens
cacccttcactgagcacttgctgtgtgcgggacatcgaggatccgggaactcgaggcacacgccttctgttcgctgtaaggtatagtgatgataagtggaggcaaatcacttttgatcgcgt

SEQ ID NO: 61695 - DNA, 122 bp, Homo sapiens
tgtctcctccctgctcctcctgtgggaatctcatttaccctttggggtttagcacttctccgtggaccggatggattgcccctgctgtgttttgttcccttggtcctgaggtcagtgtggtc

SEQ ID NO: 61696 - DNA, 122 bp, Homo sapiens
gccggggccaccgccttgcagtccagtccaacacccaaggacccgagtcgctggggtgggcgccggctgtggggcagagacgcggcgctgcgtgtgagaagctgctgcctccccagcgggat

SEQ ID NO: 61697 - DNA, 122 bp, Homo sapiens
tgcacacataggtacccatgtggacacactcacgtgtgtgtgcacgttcaggctcagacacgtgcctgcatgcacacgtgcacacgtgcacacccagccctggacctcaggcaggcagggag

SEQ ID NO: 61698 - DNA, 122 bp, Homo sapiens
aagcattccttcccaattgttaggagagccttagaaccagcagaaaatgtcagacacatacgtggaccccaaataatgcactgggtcttttgcatatatgtagcaggttttgtagctgtctc

SEQ ID NO: 61699 - DNA, 122 bp, Homo sapiens
tcacctgtgcacgcgagtgtgggggatgaagcgacatcggtgtgtggcgtctcagtgcagcgccggcacacacagccctaagcagatgcggagcagagatgacggtggagtcaccccgcggg

SEQ ID NO: 61700 - DNA, 122 bp, Homo sapiens
atggaaatggtgactttacccatagactggggatgggttgtaaggcccaccactcatgaccgggagtgaccacctgcatctgtgagtgaccatctgcatctgtgtctggcatcaacccaaca

SEQ ID NO: 61701 - DNA, 122 bp, Homo sapiens
tgttgctcgcaggcatccagtgctttttggtgttggggtcaatctggaagacctgtgctccggtggtgaagatgggctgttcttccatccccggcactgctccggcggccactccgagccgg

SEQ ID NO: 61702 - DNA, 122 bp, Homo sapiens
ctccttgccagctccttccgctagggggcgtgactgtccctgggagacttaatggctgtccggggccatgttcgaggaaacaacattagtccctgttttactcagtattatcaaattccttg

SEQ ID NO: 61703 - DNA, 122 bp, Homo sapiens
gtttgccacatatacatagggtgtatgtatagttaggggggaaatattttactaatcctgcgaggtccgtggttaaggactccaggtttagagtggaagttaatagggtcaaatccacaatg

SEQ ID NO: 61704 - DNA, 122 bp, Homo sapiens
ttttaaagatacactcctaaaactttacttttatttttttgagatagggtcttgctgtctcgctctgttgcccagactggagtagactggtgcaattagggctcactgcagcctcaacctcc

SEQ ID NO: 61705 - DNA, 122 bp, Homo sapiens
attattattgggggtggggaggcatgaggtctgggcgcgggaatcgtttacaccccgaatcggggagctatcaaaagacagccggccgggcgcggtggctcacgcctgtaatcctagcactt

SEQ ID NO: 61706 - DNA, 122 bp, Homo sapiens
agtatgcctcagcacagaggtttcttgggttactgctagtgaatgattccaattcttggccgtctgatcccacacattacataaattccaactcctgcatctgtttaggtgagctgttggct

SEQ ID NO: 61707 - DNA, 122 bp, Homo sapiens
aggggaaaggtggagagggccaagggcagctaggagtgatgtggggagctggagcagattcggaaggactttgggagctaatatctaggtttttgactctgagcccctgttggggctctcac

SEQ ID NO: 61708 - DNA, 122 bp, Homo sapiens
agaaaatagaaaaaaaatccatcgcattcagctaacacattgttgctgtacaaaaattcccgcacagcaagatgactcgtaaactgaaggcaggcagaatgtgtaggaactgtattaggctt

SEQ ID NO: 61709 - DNA, 122 bp, Homo sapiens
gaacgctgggaaactcccggcctccgccaccatcttgctttcctttaatccggcagtgaccgtgtgtcagaacaatcttgaatcatgaagctactaaccagagccggctctttctcggtgag

SEQ ID NO: 61710 - DNA, 122 bp, Homo sapiens
gcagggctggacgtctgcggagccctcgggcactttgtcccgggcgcctggggaggaacgcggagctcccagggccttaggtgcaacggctgcgcagagcccaaacgaaatgtccccagtgc

SEQ ID NO: 61711 - DNA, 122 bp, Homo sapiens
ggagagaaagaagtcataaccatcttggaagaatctcaacttgttttatcagaactcaaacgccaatttctcacccctagcttccctcattagtgcttattaactagtattgggaggaccaa

SEQ ID NO: 61712 - DNA, 122 bp, Homo sapiens
cggggcctgcatggggtcctgagaggagtgagtgccgtcaccgagggccgcgccagactgcgacggatacagggagggcaagggtttccttttggcgctcccctttggaccccggagtgaaa

SEQ ID NO: 61713 - DNA, 122 bp, Homo sapiens
ggccgggactggcaaggaagtggcaggtcctccttccaggtttggggctgtgggaccccccggggcctccagtttctgcctcttctccaaaaaccaagactcacctgcagtgctgtcttcat

SEQ ID NO: 61714 - DNA, 122 bp, Homo sapiens
ggcaccaccacccatctgggttttctgaggtcgtcggcggcacgttcagtaacaaagcaacggctggcgatacatggcagctcacgcagcgctctttcctgcttatcccccaaacttaatta

SEQ ID NO: 61715 - DNA, 122 bp, Homo sapiens
agagaccattccctttcgcaacatttccttcctggggcttgggcacatttccttgacttccgatctccatgactttgctttgaagacccactgctctgtccctctgacctctaatgccctcc

SEQ ID NO: 61716 - DNA, 122 bp, Homo sapiens
acaagcctaagggacccctctggctgctggattagccctaaaggcaaccatttggtttaccggtgtaaatatgagctattagtgtctggtggtgcattagagtggccccaacctactgcttt

SEQ ID NO: 61717 - DNA, 122 bp, Homo sapiens
ccaactcctgccttcgcccgcgtttctgctctgtgtggttactaggaccaacgaggagggcgttaggttagtccctgtcaccttgtcggggatcagtctgctgtgcgtgctcagactcttcc

SEQ ID NO: 61718 - DNA, 122 bp, Homo sapiens
atccatgtggtggcagccgggaaggggtgatcagatggtccacagggaatatcacaaactcgaattctgacgatgttctggtagtcacccagccagatgagcgcatggagttgggggtgggg

SEQ ID NO: 61719 - DNA, 122 bp, Homo sapiens
cccgggattctccaggaggccagtttgcaaatagagctggcctttgtttctctgccgtgtcggggacaccttcctggggctgagccggcgtggagctgggattgtacctccagcttgtgctg

SEQ ID NO: 61720 - DNA, 122 bp, Homo sapiens
ctgcgtcgtctcaggggcgcgccccccatggctccgaggccccctctctcaggctctcggcgtctccccgctcccacgtcgccgccgggtcccgttgctctgtccctgcggttaggactgcg

SEQ ID NO: 61721 - DNA, 122 bp, Homo sapiens
gctgccgccgggaggcccggcgagtttggctcgtccggctggttcggccacttgagggaacgtcgggcggggcgaggaacgtcgggggtggccgagcggctcccttcgacgacggttcgggc

SEQ ID NO: 61722 - DNA, 122 bp, Homo sapiens
acctcaggtgatccacccacttcggcctcccagagtgctgggattacaggcgtgagccaccgcgcccggcccattaatactgttaattcgagcagaatgttcttggccccgccccaacagcc

SEQ ID NO: 61723 - DNA, 122 bp, Homo sapiens
gtagtgtcactttccaacgatgttaccatcaaggactttgggaaccagcttttctctctgcgcatgcgccgcccggcccactccgccattttcatccggaagtgcgtcacccagaggcggtc

SEQ ID NO: 61724 - DNA, 122 bp, Homo sapiens
catcaggttgtcattttttattgtgagattctgctcctaaagataataaatgggggattacgggtttggagtgctagtgcaaagcaatactgggaataaatctgcttttccagtcagattcc

SEQ ID NO: 61725 - DNA, 122 bp, Homo sapiens
atgtccggatccccgccccctccacccggggtcggtggggcagaggcagaaccaggagcccgggtgccccacctggctggcctggcgcccgagctggttccttcacagctgctctccctgag

SEQ ID NO: 61726 - DNA, 122 bp, Homo sapiens
ccagccagcgggctcccggaggctggccgggcaggcgtggtgcgcggtaggagctgggcgcgcacggctaccgcgcgtggaggagacactgccctgccgcgatgggggcccggggcgctcct

SEQ ID NO: 61727 - DNA, 122 bp, Homo sapiens
tacaggctccatgctatggctcccagctgggctttgtctttttgatcaccattgtatccccggtagctgacagagtgccaatacctaagtggccattcaatgaatttgttgaataatttttt

SEQ ID NO: 61728 - DNA, 122 bp, Homo sapiens
acaagactacaaaggcttcatcatcctgacaagcagcagctcccactccagagcacaggccggctagcactgcagagcctctgtccagggccaggtagggctagggcccctggggaagggac

SEQ ID NO: 61729 - DNA, 122 bp, Homo sapiens
tccagtctctgctcgcgcaccgtgacttctaaggggcgcggatttcagccgagctgttttcgcctctcagttgcagcagagaagcccctggcacccgactctatccaccaccaggaagcctc

SEQ ID NO: 61730 - DNA, 122 bp, Homo sapiens
gttctccctccgcgcgctccctgtccccccactcacctcggaagagggcacacccggggacgactccggagctgtcaccacaaagggcaggagggcaaaggggaaatggtgtctgtgcttcc

SEQ ID NO: 61731 - DNA, 122 bp, Homo sapiens
tgcgcaggatctgcgagggcctgggccggatgctggacgagggcagcctctgaaccccggcgccgcccaaccgcgcccctcgcgccttttggggctctcctgctgggcgcgggtggggtttg

SEQ ID NO: 61732 - DNA, 122 bp, Homo sapiens
gcatgtgggcttggctggctggttgaggaatctagcttgctgggatggtattagcatttccgcaggccttacacaggctagcctactacaggggcctccagagtaccaaggcagggaatgaa

SEQ ID NO: 61733 - DNA, 122 bp, Homo sapiens
aggttgaagaacagtactgtgtgattcttcatgctaatttgaatgatacaaatttgaaatcgtgctacattcaaatgacccaagagagtcacatgttttcagttagacacgaagaataagtt

SEQ ID NO: 61734 - DNA, 122 bp, Homo sapiens
gcgtgcctttgagcccgtctcctttaagtgcgcgcgatgctaggcttcctcagtagagggcgccggaggacaccgcagctggaggagggtttccgccggttgtgcggggaccgcggctcagt

SEQ ID NO: 61735 - DNA, 122 bp, Homo sapiens
cacaccactcgtatctaactcaacccctttagatattcttccaggtggaattattggattcggtcagaatgggggaggggccactatgcccttaagaggctcagaagtgcctacctggctaa

SEQ ID NO: 61736 - DNA, 122 bp, Homo sapiens
acagctgttggtgcctcttctctctcacacggttctcaaagcaggggcaagcctgccgcccgaggccttccagctgggaggtgagctgaggacagctgctctactcaaggaaatctttgttt

SEQ ID NO: 61737 - DNA, 122 bp, Homo sapiens
gcggtctccgggcactaatgaggccaccttgcacccaggaatctgggagcacaaaagaggcgctggcctgggacaatatggagggaggcagctgctaattaggggcgggagagaggcagacg

SEQ ID NO: 61738 - DNA, 122 bp, Homo sapiens
agggctggctgcctctcctgaccctgggctggggtgataggtggggaccccttggggtgacgtgggaacctcaccactgttgaaggccacagcttccccttcccaagccccacatgggcttc

SEQ ID NO: 61739 - DNA, 122 bp, Homo sapiens
aaaattttccaaccaatccatttgaatgaataccaggtcatcccaaagccacacctgtctcgtgggtggggcagcacgtggggtagaccatcgagcccctctattcccagcgtaaagccagg

SEQ ID NO: 61740 - DNA, 122 bp, Homo sapiens
agcggtcggagcggctgtctgtggggagggtgtggctcagaaccccacactgggggtgggcggtgggggcagcccctcccaggatttggtgcatgtgggtttgggttacagtgatgggaggg

SEQ ID NO: 61741 - DNA, 122 bp, Homo sapiens
ctcaagaaggggagggagcaatctgtttagctcacaggtgtcttctcagctcccagacagcgcttggaacacagtgtggactaaatagaaattctggttgctgaagtatttcagtagctatt

SEQ ID NO: 61742 - DNA, 122 bp, Homo sapiens
gggcacgagccgagtcagaagcagctgtctgcaggctggggctgggcatggaggcgcagccgcgagagagtgctgggcctggagagtaggctgggaggcagccaccgggccgtggtggtggc

SEQ ID NO: 61743 - DNA, 122 bp, Homo sapiens
aggaggggtggtagaagaggagagggtgcctgcctagatcctagtcctgtcttgaactcccgagagccagggaatatccagcaccttgatgaagccctaggcgggcgcctcctccttgtgcc

SEQ ID NO: 61744 - DNA, 122 bp, Homo sapiens
caccacagtttgttcacctttagttcttctttgttactagctttgatgggggtctgtttccgctaatcttaactgtggcaaaaatgctccaggatgtctattcttctagttatatatggaat

SEQ ID NO: 61745 - DNA, 122 bp, Homo sapiens
aactggagtcagaacctttagtgattgcgatctaggaaggacggtagtgtttgcaaaccacgtgagcacaggagtgagcaaggtccaaccccgcccctgttccctgggccgtgaggctttgg

SEQ ID NO: 61746 - DNA, 122 bp, Homo sapiens
tttgtatgtgacctgtgacttgtttctaacaaatagaatatagcaaagatgatggaatgtcgtgtttatgtttacattgtgctatacaaccacttctgtgcagttgcagagagattctcctt

SEQ ID NO: 61747 - DNA, 122 bp, Homo sapiens
aagtggcacgctcaagaggttgtctttgtaatgttgcagaatcgcctaccagaggaatgacgatgatgaagaggaggcagcccgggaacggcgccgccgagcccgacaggaacggctgcggc

SEQ ID NO: 61748 - DNA, 122 bp, Homo sapiens
gtctcgcgagagttgcttttgcgcgcgaactgtaagtgccagggtctcagggtcaggtcgcggctggtcactgtgcaggcgcttgggtgacgcgacgatctcagcggatctggtcaccttcg

SEQ ID NO: 61749 - DNA, 122 bp, Homo sapiens
actgaggaaacataaacccatctgtgctgacagaaagctaccttacatgatcctcatgttcgccccaggttcccatatattcacagcagtaaagatctccacaaagcagagaggcccaactc

SEQ ID NO: 61750 - DNA, 122 bp, Homo sapiens
ggattagttctcagggcctggtccgctagaagccaaatgcctgtgcccagccacccgtgacgcctgcaacaggcaggagatcccccaacagttactcccagccttcattccacagggtctgg

SEQ ID NO: 61751 - DNA, 122 bp, Homo sapiens
caagaaatggtgagtgggagggaggcgggggggctcccccgaacttgctgggacctcatccggccctttgagcctgagaggactctgcccccccagcccaatgaccaaatgggcccccaccc

SEQ ID NO: 61752 - DNA, 122 bp, Homo sapiens
ggggtcagagctggagtttacctcctgctcaagacactggctgctgggtcagaggagattcggacacatcacctggtttaaccccaggactctatgtgaccttcatcccagccctgactcag

SEQ ID NO: 61753 - DNA, 122 bp, Homo sapiens
agctcccggcggcgtccttcgaagcgcggctgcctgggccagcctcggcaggaagcaggacggcggaaacagaacagagcccgaatctaaagtccttgcccaaatctaaagtggctaccgca

SEQ ID NO: 61754 - DNA, 122 bp, Homo sapiens
cgctgggctgtgggctcactgggctatggggtcacctgggctgtgagctcaccggggcgtcggctcggcttctgcctgtgaaggagcagtaaggagaagccgtaactggtggctgtgccgat

SEQ ID NO: 61755 - DNA, 122 bp, Homo sapiens
gctggctgaggccccagggctcctccccaatatctggctgcccggctgcccacgcctccacgcccagggcctgctgctcctggagctggagctcaccctcctgcttgatctgcatcaagagg

SEQ ID NO: 61756 - DNA, 122 bp, Homo sapiens
tccagagttctgtccctgcaaacttgttaaaacacagccaccttgctctgtcctggggagcgtctgtcctggggagcactgctggccaagcctgcccaggacggtggggcccctgagcagtc

SEQ ID NO: 61757 - DNA, 122 bp, Homo sapiens
ctctcagcctggaccttcctttctccaaacctcaggaagctggagtcccaaggctgcctccgggcggggctgtggttcagcagaagccacaaatatttaccttggagacctcggcctggtct

SEQ ID NO: 61758 - DNA, 122 bp, Homo sapiens
tcgccaagtgaactgataaaaagcaacaggattttagccttccactgcgccatctggtggcgttcagggagaggtacagtggttcttgtgcatacacagtctatcccaaacttaacgccttc

SEQ ID NO: 61759 - DNA, 122 bp, Homo sapiens
ctagattctcctgactgctggcattccttggcttatggttgtatcactccagtatctgcccgtgccttcatatcgccttctctgtggatgtgtcacatctccttctgcttttctcttataag

SEQ ID NO: 61760 - DNA, 122 bp, Homo sapiens
gtgtggtccctcagggaagtactggggatcgtcacttatgcctgttctggacatggtcaccgagaactgtcctgtaggcattcacttaggaatcattcgaagtggaattgctcctggatacg

SEQ ID NO: 61761 - DNA, 122 bp, Homo sapiens
tgaccttgtgatccgctcgcctcagcctcccaaagtgctgggattacaggcatgagccaccgtgcctgtcctagaaccactggtaactcttaactggtaatttttgttttaacctctgtatt

SEQ ID NO: 61762 - DNA, 122 bp, Homo sapiens
ggcgatcctctcatctcagcctccctagtagctgaggccacaggcacgtgccacagtgcccggctaatttttatattttattgtagagatggggatctcactatgttacccagactggtttc

SEQ ID NO: 61763 - DNA, 122 bp, Homo sapiens
gctccaaaccccagacctgtcccaacctgtagctcagctaaggcagggactggagcatctcgttgtgcctcagcccccctaaaaggggccggagcatgcagagagatgaaggtgaagggact

SEQ ID NO: 61764 - DNA, 122 bp, Homo sapiens
gcctcgtggccccggcccgccgtctcctggaacagggcatccgtgtggcaggcctgggcacgcccagcttcgcgccctacgaggccaacgtcgactttgagatccggtacggcctctgcctc

SEQ ID NO: 61765 - DNA, 122 bp, Homo sapiens
agaaccgcacagccagagccccaggtcagaagtgcagaccagggttctcagcacagtgcccgtcgtgcttccatggcttgctacggagagagacctctggatccacactggggctgcgtctg

SEQ ID NO: 61766 - DNA, 122 bp, Homo sapiens
ctgtgtgttgctatgtgcagtctctgtgtccatgtgtccttgtgttgtctgtgtacgtttcggtgtgtccatgcatgttgtctgtgtctctccgtgtgcttgtgtgtctctatgtgttgtct

SEQ ID NO: 61767 - DNA, 122 bp, Homo sapiens
aacccttccccccagacacacaccctttaacttttcccctataagctgaaaaagacattccgaaggaaatccagccttttaccctagtttttttacatttagataattcaagactctcttct

SEQ ID NO: 61768 - DNA, 122 bp, Homo sapiens
tgcagataactatagtgccaggatgtcagaggaggcaacctctgctcttaaatagggtgccgtgctgcacttttacttaaacctcgggtaacttttcacccagtgttttctcagtatgtaga

SEQ ID NO: 61769 - DNA, 122 bp, Homo sapiens
gggccagtggccatcagcctgttgcccagcccctgatgcgctgaagctcgggcccttcctcgcgccctggtctcctgcactgagctgtggtgagcacatccgggtcctgctggatgcatgca

SEQ ID NO: 61770 - DNA, 122 bp, Homo sapiens
cctcccatgagtttagtagggccacgtccactgcttcctctcgtgagtttagtagggccacgtccactgcttcccatgagtttagcagggccacatccactgcttcccatgagtttagtagg

SEQ ID NO: 61771 - DNA, 122 bp, Homo sapiens
aggcgcaactgaggtccagaggtcccaacacctggaggagttgccaatagagtcaagattcgaatcggtaaaagagcggcccctggggtctggccgccagtcggccgaccccctggtgggct

SEQ ID NO: 61772 - DNA, 122 bp, Homo sapiens
tttgaagatgaagacactgaggctcagaaagatcaaacgcctttcccaaactcacagctacggcctgacggaggtagggtcaaatgcagctccactgatttcagagacggtgctgttaacac

SEQ ID NO: 61773 - DNA, 122 bp, Homo sapiens
ttctgggggctggggtcctgccggccaagggtcgtcaggccggggaggttgaggaggatccgttctaggcggttcagggagccagactccagtttcaggcaggtctctccagggacgactgg

SEQ ID NO: 61774 - DNA, 122 bp, Homo sapiens
gccctcggcgcggactgtgccctcggcgggcacgcggaccggcggggtagggctagggcccggcttctctgggccaaggatcaaggtccctgcctgggttaggcccccacgcattccagtct

SEQ ID NO: 61775 - DNA, 122 bp, Homo sapiens
cttcacgccccttggcttttgatctttcagggtggccaattcgattcggagggtcttcatcgctgaggttcccataataggtaagcgactccccttcctcgttcccgcgcccacgggttcct

SEQ ID NO: 61776 - DNA, 122 bp, Homo sapiens
caaacagatctagacaaataaattacaccactaaaaatgcaggtaccccagaatataaagcgagaagcgtaagagcttaaaataagcagcacaaaatatctcatttatttattgcctttaaa

SEQ ID NO: 61777 - DNA, 122 bp, Homo sapiens
cctacttgccatgtcttcagggctaatgcataacaattatcacaatttacagcagccccacgctctgaagagcttctggaggggatactactcaagcggaggaaggcaagacagggacctcc

SEQ ID NO: 61778 - DNA, 122 bp, Homo sapiens
ctgtcctcatgtctatgatgggaatgtgtcccccacctgtcctcatgtctatgatggaaacgtgtcccccacgtatcctcgggttttaccccacctcccgctcaggtcccagtccttggagc

SEQ ID NO: 61779 - DNA, 122 bp, Homo sapiens
agggtcaacaggacgagatgagccaaaagtgactcgaagcttttgggtccctgtgattagcggaatgatccaacatgggtcaggagggaggggcggcagagaatggaagttgacttccgatt

SEQ ID NO: 61780 - DNA, 122 bp, Homo sapiens
tgggaaatgggactttgggaaggctactatatatgaaacatgagaagccttaggaagaaacgaggatgttagcaatttaggaaccactgtccaattttgcttggaaagtcaaaatttaggga

SEQ ID NO: 61781 - DNA, 122 bp, Homo sapiens
aacacatggaacttgaggtagcccttgacttctgggggcattttacccaatggagcttggcggagcgttgatgaaggaatggagtgagcacacgcacagaggcaggagcacattttaaaact

SEQ ID NO: 61782 - DNA, 122 bp, Homo sapiens
aacaggaagtcccgcccctctatggaaagtaaatggtagctcggaagggtcaaaagagtccgcggtttcgccgcgtgagttgctttttgcggctggggaggtctacgcttctagagcttgag

SEQ ID NO: 61783 - DNA, 122 bp, Homo sapiens
cctggggatctgcacttaggtttgcagcctcctgggtccctgcccggtgctcctcagagccggagcctgtctgccgcagggatggcttagaggacctcctactgaccttcttgataattcaa

SEQ ID NO: 61784 - DNA, 122 bp, Homo sapiens
atcgtcctcttcccagaaggcccctgtgaccccatgagcaccatcctcagggacctgggccgaagccgcgtgtcctaaaagcgacctgagactcggcttggagtctctgaaacaaagccctg

SEQ ID NO: 61785 - DNA, 122 bp, Homo sapiens
tctccacaatgggaccaggataaagtgttactaaaacacatagcagctaattttgctctgcgtggccacttctgtatccttggctaacctgggaaattatcctgcaagtgtgtgtgtgttct

SEQ ID NO: 61786 - DNA, 122 bp, Homo sapiens
gaaacagtgtgaaaggtaaaactaaagcaaagaggttgaaatagttacccaagggctcaccgcagatgaggggcagagctagattaagagcctggcctgcctgtcccctagcccactctctt

SEQ ID NO: 61787 - DNA, 122 bp, Homo sapiens
atctagtgggagaaatggtcccttactaaattccaggtgtccattctgaaagacagacaccgtaatcatccaaaggcccttccttctcagctttgttgagagcacattgagaacccacaggt

SEQ ID NO: 61788 - DNA, 122 bp, Homo sapiens
ggcaaggagctcattctgaagatcgtgcagcagaagaacaggcgccaccggcggctggggcggcgggcgggcaggtgcggctccctggcggcggggaggccccggcccggagctgaggaccg

SEQ ID NO: 61789 - DNA, 122 bp, Homo sapiens
ggccacttacgtgtgctgctgggggaagctgtaggcagaggcgccgggggcggcgagcagcggtagaagcggcagcagcagccacagcgggcgcgggggcccggacgtcgggcgccgggtgc

SEQ ID NO: 61790 - DNA, 122 bp, Homo sapiens
tcccaaccaggcatccactgcatttgtgagcccttgcgcctggtcctgctccccacgcagcgggtatagcccagtctctggccctttcagtgagtgggaggagatggtaaatgaatagtatt

SEQ ID NO: 61791 - DNA, 122 bp, Homo sapiens
cgggggacggggtgcggggtgctgggtgcggctggggccgtgaccctaggggccggtttgcgccgggagccggggcacggttccggccgtactcacggcgccgcgcggtgactccccaggcg

SEQ ID NO: 61792 - DNA, 122 bp, Homo sapiens
tggaacacctacatctttccctatcacagggcttggacacacaggcgttggagtcagatacgctgtgtttcaattttcaaccccctacaccaattgcttctcttttctgaacctcaattttg

SEQ ID NO: 61793 - DNA, 122 bp, Homo sapiens
tgaggtccccacttccagtgggcagggctgacagagctggctttcagaagatgggggagacgcagttattcagtaaagcacccagaaacagtacttacattggaatccagtacatggaatgc

SEQ ID NO: 61794 - DNA, 122 bp, Homo sapiens
tggactcgctaaacaccgggttgttgtcattggagtcggtcaccttgatactaaggccaacggtgcccaggcgcggcgggtcgccaccgtctagcgcagtgattcggaagctgtagtgcgac

SEQ ID NO: 61795 - DNA, 122 bp, Homo sapiens
ctttttttctccccccacatagataagatttctaagggcaatatggtagtgtgctgaacacggcctaggacagggctgtgcaaaaagcagatcagatccatactttcctgttcattatttta

SEQ ID NO: 61796 - DNA, 122 bp, Homo sapiens
gggctccgggacgcaaagcagaggggccaggctcggcgtgcacagctggggtggggcccgcgggggcccagctgcgcacacgggaagcgccccccgcccccgggccaaccgggtggccggca

SEQ ID NO: 61797 - DNA, 122 bp, Homo sapiens
ttccagctgttgcttgaggaatctgacactatcactccaacctaggagtctcaccctaggcgcgcatggtcagtcacctccttgccacgaccttccttcaggatccaggccaaaggggatcc

SEQ ID NO: 61798 - DNA, 122 bp, Homo sapiens
gctggaagtgattagtgctgcatgggtcgggggcgcaacacttgggaggacctggcctggcggagcgactgcaactgggaatagtggggatgccacgaagaagcaagcacaggtgaatggac

SEQ ID NO: 61799 - DNA, 122 bp, Homo sapiens
tggggcggtctggctgtgcggggatgtgtggcgggagacgcgagccaagctgcgcggcatcgtggacagcaagtacttcaaccggggcatcatgatggccatcctggtcaacaccgtcagca

SEQ ID NO: 61800 - DNA, 122 bp, Homo sapiens
ttaaactgctctcaacaatacagattggcttgagcccttttgttggcatcacaggagcctcgattaggaattctgagaaacagctcacaagcgctaatgaataactaagtcctgtcggctgt

SEQ ID NO: 61801 - DNA, 122 bp, Homo sapiens
ggccatcgtccactgggtacgggagcgagagccgcagccggtagtcaggtttcctcgagtcgaggcacagcagctttctcgttacctccagcgccgcctgctcggccgagcgcaacagcggc

SEQ ID NO: 61802 - DNA, 122 bp, Homo sapiens
acacagacatgtccccactctgctacccagcagcctagggagtcagctggactagttagtcggctttgtgaaactcttcatctgggaaacaatgttagattctggttaaatttagctctgaa

SEQ ID NO: 61803 - DNA, 122 bp, Homo sapiens
tgcgtagccaatagctcgggacgggagcgggaggggcgtggcgtgtccggcagggggcgccgtgattggcacgccagctcccgctgtccgcgaggctgccctaaagtctagctcatgagaac

SEQ ID NO: 61804 - DNA, 122 bp, Homo sapiens
tacaccatagagagcgtaaaccgagaccagagaggcggctgcctctctatggtaacgccccgcgcaggcgctggcctggccgtgttaggcttcgctggcgtaaagtccccgggagctttgcc

SEQ ID NO: 61805 - DNA, 122 bp, Homo sapiens
gatgcggaatgctgtgcctgcgaagtcccttcctttactaataactgatgccgtgatacccgtggaagccccgagaagtaattatgaaggagaacagagacctgttgcggagattgggatgc

SEQ ID NO: 61806 - DNA, 122 bp, Homo sapiens
tccttccatgtccctccatggcacgtggggctgtgggaaccacccatctgaagagcacatcggctgcatttctccatcttcttgcccctccacagtgatcagtggggaagaacccagacctg

SEQ ID NO: 61807 - DNA, 122 bp, Homo sapiens
aaacaaagtttgctgatgggtgcggtcatctctgctcctattgtcgcactaagttctgtgcgcgctgcggaggccgcgtgtctctacggtcaaacaacgtgagtattccatgaacataaggg

SEQ ID NO: 61808 - DNA, 122 bp, Homo sapiens
cgtgcgtccgttcgcacaggcagcgggaggaggggcggcgcgaaccatggccggggacagcgagcagaccctgcagaaccaccagcagcccaacggcggcgagcccttccttataggcgtca

SEQ ID NO: 61809 - DNA, 122 bp, Homo sapiens
tctgactgcatcttggccacttgcatgaagtgcaccagcttggggtcatcttccaggctccggaagccaatgtgtttccctttggcttgttcataggctttcttgtatttgtactgtggaca

SEQ ID NO: 61810 - DNA, 122 bp, Homo sapiens
ccagatgagtcagcttggggaggcggaggcagcggcagcgcggcgagcgtgcagggaggccggagccctgcccggggcgggtcgcggggtgggcgggtgaactgccagcgaggaggcacctg

SEQ ID NO: 61811 - DNA, 122 bp, Homo sapiens
agcgggggatcaggggcactgctgagggcagttctgtggccaacacacgcctcccggactcgggtctccgcacgcacctcccggactcgggtctccgcaggcattgatgcctggcatcctgg

SEQ ID NO: 61812 - DNA, 122 bp, Homo sapiens
ttattcagctgggggccaaaccgaatgctttaggggcagcggggagcagaatgaagcaaccgtgaggcctcatgtagaaccccagggtcaggaagagacacagcacagggtaagactcccta

SEQ ID NO: 61813 - DNA, 122 bp, Homo sapiens
ggaaggtgccacctccgcccccgccccgccccgcaccccgccccgcaccccgccccttggcgcccagttacctcccagaggctgcaggaagcagcatttggcattagcgattctgtctgatt

SEQ ID NO: 61814 - DNA, 122 bp, Homo sapiens
cagcagatcagcacaaccagagtgagggttcaaggtcaaagagaagccagagccagatctcgaagggccaccaaaaagcccttaacaatggaataacaaaatcaaattgtcctttgagaagg

SEQ ID NO: 61815 - DNA, 122 bp, Homo sapiens
ccaggcgggagaggcggatagtgccatcggtgaaggagggccgcaggaattccacacgctcgcggtagggagccagcacggacacgcccatggatgggttgtagatggccacgttctgcttg

SEQ ID NO: 61816 - DNA, 122 bp, Homo sapiens
gtgtgtggctgatggcagagttcaggccgggccagaccgggccagtccagagggagaagccgctactgcaggagacagagcgatttttccgctgcaaatccttgagaagggaggatggaggc

SEQ ID NO: 61817 - DNA, 122 bp, Homo sapiens
aatatttggcaacatctaacaaagctataagtatatatcagctatgactaagcaattctacgtctacatacagaatgaccatgaagtctaaaaacagactttaagagagggagatactgaat

SEQ ID NO: 61818 - DNA, 122 bp, Homo sapiens
gggaagaacaaacggcggcgagatgcaaacttttcttttagtttgcaaccgcgtctttcacgttggcatgcctccgctagcattgcaaagtgcgggctgctccaactggtcctgcaggctgc

SEQ ID NO: 61819 - DNA, 122 bp, Homo sapiens
gattcttccccagaacggactgggagagcgaggtccgggtttccttctatttatttgcatcgatgtcgctccgagtcttcagcactgggccgcgtatgacagcatcttagtgggtgcggagc

SEQ ID NO: 61820 - DNA, 122 bp, Homo sapiens
ccaacaagcaaggtccccaggagcctactttatcctcaaggaatctgcttagtcaattgacgtattcacagggctggagaggtatgagtggtggttaccttcgtgccagagcagaacatgcc

SEQ ID NO: 61821 - DNA, 122 bp, Homo sapiens
acccccggggagatttggaggaagctttctacgtcctaggaggctgagatcccacggagccggtttacggttgagagcagacagtttcgagtagatagcgctggaagagacacgaagaatct

SEQ ID NO: 61822 - DNA, 122 bp, Homo sapiens
ttctggagaactggaaacgatatcttatttaaattccaaccgccaccattgctctgggtacgggctacctgtggtcgttccccacccgtgtctcccttaagaactggggcctcatctccact

SEQ ID NO: 61823 - DNA, 122 bp, Homo sapiens
aggagagaagactagggtattgcaagtacagacacggtgacatttggtgatggttggatacgggggtgagggaaatgagccatagagggtggctaccagtttctgcctcctccagaaatatc

SEQ ID NO: 61824 - DNA, 122 bp, Homo sapiens
agatatgttaggcaaggtctgcgagagtaccaaacacagagcctctgtgctttctccctgcggaatcagggccattaccctcccagcacatcaatgtgttcagcaaccaggaagctcaatga

SEQ ID NO: 61825 - DNA, 122 bp, Homo sapiens
tgggtttctccaccaaggaagttttccgctggttgaatgattctttccccgccctcctctcgccccagggacatataaaggcagttgttggcacacccagccagcagacgctccctcagcaa

SEQ ID NO: 61826 - DNA, 122 bp, Homo sapiens
cccggggttcggggccggggagctgggcgccggggcggggcggcggggcaagtgcggaatcgcgggctcgcccaccctcccccgtggggccgcccggggcggggacccagccgcccgggacc

SEQ ID NO: 61827 - DNA, 122 bp, Homo sapiens
tcttatcaaccactcaagtttccagggagactcattagcagagctggcaaatgctgtagtcggcatcgttatcaaccacaaaacttttgagcatctgctgtctgtttatttgtttattgtct

SEQ ID NO: 61828 - DNA, 122 bp, Homo sapiens
gtgctgccagacatttcttctggggtattctttaggatctcaagaacaacctttctatgccgaactctttattttcccccaataaagcctgcccctcctcgtgggttccccatctaatgaaa

SEQ ID NO: 61829 - DNA, 122 bp, Homo sapiens
tctctctctctcgcctgtcttcatgtcgtggattgatgaacgcgaatcgcgtgtaagcgccgccaccgccgggagtctgaggaattcgcctgggctgttagaggaaagagctaagtgagaga

SEQ ID NO: 61830 - DNA, 122 bp, Homo sapiens
tcacgtcaccagggcaacgacgctcttgcgtaaaggcccggcccaagggaacgttcagggcgtctcggctttccccgctgctgcttctgctaggcccagtgcgagaccagagcacgagcgac

SEQ ID NO: 61831 - DNA, 122 bp, Homo sapiens
ccggctgtgccagccttgagtagatcttttcgctagaagattcctgtgccctcaggtgggcgccctttcctctcaccactccctctcctccggagcgggccgaggtgagcgggtgccggcct

SEQ ID NO: 61832 - DNA, 122 bp, Homo sapiens
agtccgctggggagaccgtgagatgacagcagagaaactagcgcgatcagtagtactcagcgcaaggacagcgagcagagaaggcaaacctagtgcttgctaaggaagacttcacagaggag

SEQ ID NO: 61833 - DNA, 122 bp, Homo sapiens
agggaggcctgggtcccccgagtctgtggacaaatgtggtttggggacaccagcccctgccgaagccatgaaactcagggagagtggatgccacccctggtgtcttcgtgctgtgtcgggaa

SEQ ID NO: 61834 - DNA, 122 bp, Homo sapiens
caccctggagctctacccgatcgacgacgtctttctgggcatgtgcctggaggtgctgggcgtgcagcccacggcccacgagggcttcaagactttcggcatctcccggaaccgcaacagcc

SEQ ID NO: 61835 - DNA, 122 bp, Homo sapiens
ccccacttcccgagcctctacccgccaaattatcttttaaaactccgatcccgaaatgctcgatttgagtaataatttttgagtaataattttttgagtaataatttgatatgagactgatt

SEQ ID NO: 61836 - DNA, 122 bp, Homo sapiens
atgggaggcctcgtttaagcaaacacggtcacatgaggtgttgcagcagcagcaggccaccgcagagatagctgcttgggtgcagggccatgaagacctctgagactgaacatacaaatggg

SEQ ID NO: 61837 - DNA, 122 bp, Homo sapiens
cattatgagctgctcacagatggatacacccggcaccgcaacctggacgccgacctggtgcgggacaggacgcccccacaccttctgtactcagaccgagaccggacttttttggaagggga

SEQ ID NO: 61838 - DNA, 122 bp, Homo sapiens
attgccctttgggggtgccctgggatccctggggtagtccagctcttcttcatttcccagcgtggccctggttggaagaagcagctgtcacagctgctgtagacagctgtgttcctacaatt

SEQ ID NO: 61839 - DNA, 122 bp, Homo sapiens
acgccggcgaatgcccagaatgccagcaaaacgtgggaactgagtctgtatgagctgcaccggaccccgcaggtgacaggcattctccctttcaggcttaccccctcccccaaacccttata

SEQ ID NO: 61840 - DNA, 122 bp, Homo sapiens
ttttgtgaggtaagggcacctcttcatcacctggcccttccatgcacatgtggttgtggtcgttctgtggtgggaatttgctgcagttcagactctctggccaggcaaatccaaattccttc

SEQ ID NO: 61841 - DNA, 122 bp, Homo sapiens
cactacccatccaaataaattgtcggtatttttagtgtgtcccatcctgagtggtcctctcgggaggctgaactctccctccagcggtgctgcccagctcacagcatgttttggagtgctcc

SEQ ID NO: 61842 - DNA, 122 bp, Homo sapiens
agaggttcctgctagcagatccacagcaagccaatcagtggcctggaacgcttagccctgcgaattcccagactggggagtgcggtccaagctcaggggcaatgaagctggtcccccacacg

SEQ ID NO: 61843 - DNA, 122 bp, Homo sapiens
cagaacgagcacctgcctcttcttcctgcctccaggcgcacctctccacctgtgagcgtgcgggatgcctacggcacctcttcgctcagcagcagcagcaattctggctcctacaagggcag

SEQ ID NO: 61844 - DNA, 122 bp, Homo sapiens
agacatttctattagaagattttccctagaggcatatgactttcccactccattaggagccgctttggtggcaggacctatggtttccttttatttacttatttttattttatttattttgg

SEQ ID NO: 61845 - DNA, 122 bp, Homo sapiens
agttgcaataaaaataataacaagagcattgcaggaaaaaaatgcattgattaaaaggtgcgctgcgtgcaggattatattgcttcaacaatcgcgctgccaaattgcattgcaacaaaact

SEQ ID NO: 61846 - DNA, 122 bp, Homo sapiens
cggcggcgcgcgcgcggggggcggggcagtgggcggggcctggcgtgcgccgggtggtctcgcgggcggtggcaggtgagcggcgggcggggatggcggagcaatgggagctggacgaggaa

SEQ ID NO: 61847 - DNA, 122 bp, Homo sapiens
ctcatctgggtctgtaggtccagcctctgaagtcctttgttttgcggggtcgagggcagccgccaggctgtggggggctttgtggatgggcggcaggagaggcgctcagaagccagaggttt

SEQ ID NO: 61848 - DNA, 122 bp, Homo sapiens
cagcatttactatgagccagccattgtttcagatacatctattaaccaccttataaggtacgctcagttattattcccactttagtgatgaggaaaccgaagcatggagaggtgcagcacaa

SEQ ID NO: 61849 - DNA, 122 bp, Homo sapiens
gctgcgcccgaggaggggccggcggtgcgcggtggtggcggcgggcgcggcagctgtgcccgtctgcccaagggttaatccgtcccctgcagctgccgcgcgtgccttgcagaatttcacca

SEQ ID NO: 61850 - DNA, 122 bp, Homo sapiens
gaggggaatcaagtcctcgaggggtgcatgggtcaggggggacaagccccggggggtgcccggcccggagaaggacaaggccccggatggtgccggggttggaggagtaagtacaaggctcc

SEQ ID NO: 61851 - DNA, 122 bp, Homo sapiens
caggaacatctttaccaagcatctgtgtttttaggaaatcagttgacagattccaaatctcggagcccacgacctgacacccactcacgcgcatcacctctcaatctcggggcccacaacct

SEQ ID NO: 61852 - DNA, 122 bp, Homo sapiens
cccctagatacagcagtttatacccacacacctgtctacagtgtcattcaataaagtgcacgtgcttgtgatgatgctgtgacttcatctggagtgggggccctgctgaggggtcccggcct

SEQ ID NO: 61853 - DNA, 122 bp, Homo sapiens
cctgcgcgtgcgcacacttaaggccgtcgttcgaggggcggggcctggccctccacgccccgcccaagacctgaacttgcggaaccccggctggcagccagcatgtccccgcaccttttcat

SEQ ID NO: 61854 - DNA, 122 bp, Homo sapiens
gaacattctcaggacgcaaaaggaggccacccacgggcctcccccactcccctcaggccccgtacaccgaggaacagccagggcaaatggagccatggaagccaccctcaggccccagggcc

SEQ ID NO: 61855 - DNA, 122 bp, Homo sapiens
tcgtccagcgcgggcggcggcggcacgaagggcgccccgttctcgcggtacgacttgctgcggctgatgctcacctgcggcgcctggctgatcttgagcgtgtcccaggccgcggcggccgc

SEQ ID NO: 61856 - DNA, 122 bp, Homo sapiens
atggccttgccctgtggctctgtgacctccagaacccccgccgccatccctgcatgcacccggtcttctgtgcctgcactttggacttgagattgacacggggttcaaggacgaaggtcagg

SEQ ID NO: 61857 - DNA, 122 bp, Homo sapiens
gatacgtaaaataatattcaaataagttatattcacaaaagtcaaacactaaaaacaacccgcatgtctctattagtaaacaaatgggaaatatacaacattcatataccagattactgtgc

SEQ ID NO: 61858 - DNA, 122 bp, Homo sapiens
ggctttcctgcaaactggaaggcaggtcttggggacacttgagtccctggacttaacccccgtgcccacctctggggtgttttggcccgggaggcctgactggccactcactcacccaccca

SEQ ID NO: 61859 - DNA, 122 bp, Homo sapiens
ctcttgtagaaagaaggacactgaccaggacatttgcagcgtcacaaaagatcctgtcagcgcgaggcctgcaggcggccctccatagtgaaatatgtgcttctgcaacccctcaaagtagg

SEQ ID NO: 61860 - DNA, 122 bp, Homo sapiens
tgcgtgcgcggcgtgtgccagtgccacgaagacttcatgtcggaggactgcagcgagaagcgctgtcccggcgactgcagcggccacggcttctgtgacacgggcgagtgctactgcgagga

SEQ ID NO: 61861 - DNA, 122 bp, Homo sapiens
gttatttaattttgttgttgggctgggggagcaggtgatctcatagcggcaaacactcctcgggttggcttggggtgggatgtgcgaaagggcaggattcggaaggaggtagggggctggtc

SEQ ID NO: 61862 - DNA, 122 bp, Homo sapiens
ctcccccgcgcccatcccaggccccggctgggctgtgatgccccggtaacagtcagaggacgaccccctccccaaaagcccccttcccctggggcgagtgccagacctggctttgcagcttt

SEQ ID NO: 61863 - DNA, 122 bp, Homo sapiens
cacactgctcgctctttgtgccacttcagggtcctgtccccttgagtctcaatcaagatacggctcattccacccttgggcaggagggcaatgctgatgaggctgtttatagcttcggtgcc

SEQ ID NO: 61864 - DNA, 122 bp, Homo sapiens
cggtcatcgcggtgcgggactgaggccggcccactctgagtgcacagccacactgcttctcgtgcccgcgggccgggcgccacctggcgcagaagtggtgctgatgccgccgccgcacgaga

SEQ ID NO: 61865 - DNA, 122 bp, Homo sapiens
agcatccctggcgcggccatttcagccccatcttggcccagcggagggagctgcagccgccgcttcagcagtttgaatttcagtttcttcggggtttaggaattgggcgcaccgaggaggag

SEQ ID NO: 61866 - DNA, 122 bp, Homo sapiens
tttcgttcattttaatttttcagtattataatgctgcagtgaattacgtagctgtctctccgtgcagatgggctgttcctctatggtagacggtgaatggtggaattaaggaatttttagtg

SEQ ID NO: 61867 - DNA, 122 bp, Homo sapiens
tctctccttgaaatgttcttttccttggcttcaggagaatagagtcttctggttcttctacgctctgaccaaactctagatcagtgctgtccatcacagctttctatgatgctggaaatgat

SEQ ID NO: 61868 - DNA, 122 bp, Homo sapiens
cccaggctggagtgcaacactgtgatctcagcttacttcaacctccacctcccgggttcacgccattctcctgcctcagcctcccaagtagctgggattacaggcacccgccaccaggccca

SEQ ID NO: 61869 - DNA, 122 bp, Homo sapiens
ttgttgggggtcctgtagcctgtcagcgagtcggaggacgaggtcaataaatatccaaaccgccgaagcgggcggagccggctggggctccgagagcagcgcaagtgaggaggggggcgcgg

SEQ ID NO: 61870 - DNA, 122 bp, Homo sapiens
tttggcattggaggaagcggagtccagacacactctgagtcgcgggcaagttggctcaggcgggtggacgagtgaattctgggaactgtagtccatcaacttcatggaatggcggacccttt

SEQ ID NO: 61871 - DNA, 122 bp, Homo sapiens
tccatccgcttggctttgacagtgtcagaagcatgatgcctgacgattgcgcatgagggtcggccccttgcggcagcggtggggtgcactgcctccatagtacaccgctgcccgctgcttgg

SEQ ID NO: 61872 - DNA, 122 bp, Homo sapiens
tgtgcagagggaagacagtggctcagggacaccagccacatgccaggggatggttctggccgagtgggggcccctccatgggggggcttggagcaccccccatctgcttggccaaggctgcc

SEQ ID NO: 61873 - DNA, 122 bp, Homo sapiens
ccacctgctctcgcctggctgggaacgctgcgtgtggggctggctgggaggggcggggcccggcggggcaggggcggggctgggagggggagccgggccggcccctccctcgaggccccgcc

SEQ ID NO: 61874 - DNA, 122 bp, Homo sapiens
gtagctgggattacatgcacacaccgccacacctggctaagtctgtatttttagtagagacggggtttcaccatgttggtcaggctggtcttgaactcctgacctcatgtaatccacccacc

SEQ ID NO: 61875 - DNA, 122 bp, Homo sapiens
acgtggaagacctgcccctggcgtcacaaccgctcgagatgaaaaagccaagccagggcgcggctgagggggcttccagcctcccttggaattaggattgggatttaaatcctcatctgtat

SEQ ID NO: 61876 - DNA, 122 bp, Homo sapiens
atcagggttcgcctggggccactgagaccacgcgccggtgcccgccctcccgctgcggtccgattttctgaaccaaccaggcgcttccgggcgccttgccccagacgggcccaccgcctgcg

SEQ ID NO: 61877 - DNA, 122 bp, Homo sapiens
cacccatgcagtaacactgtgccctgtccttccaatcactgccactaggtggaagcagagcgtgcatcgcccagatgggctagattctcacaggctcactgctagaacgaatattcttgaga

SEQ ID NO: 61878 - DNA, 122 bp, Homo sapiens
ccgggcggagcggggtgcgcgggcggttgtggggcccgggaccggcggggccgagtagatcgcgctcgaagccccggtcgggtccgcgacaagatggcggctgttgattcctcaattaaaaa

SEQ ID NO: 61879 - DNA, 122 bp, Homo sapiens
tctccagtgccgcttcagacaatgaaatcagcgtgtccgatcatcaattctcatcatgatcgtgacgtcacaaaagacagcggccaatgggagcctgcgatcagctcaggacagtccctggc

SEQ ID NO: 61880 - DNA, 122 bp, Homo sapiens
atgactggcttccacactttctgtgagaggacagccttgaacacgcagagcaaaagcaggcgagcacgggcggaaggagccgggaggccctgaggacgtggcctggaaactattcacagcac

SEQ ID NO: 61881 - DNA, 122 bp, Homo sapiens
agatatttttgcaggggcacgctatgttctgattcactgaggcatataaaaggccctctgcggagaagtgtccatactgaagtcacctacactccttcctacccaaggatgacctcaacaac

SEQ ID NO: 61882 - DNA, 122 bp, Homo sapiens
ggaaacaggtagcaaatggaaacaaacctataataattcaactagtctttattatgtacccgttgtatgtctgctgatagtgctagaaaatggaagtcctccaggcataatccaggcccctt

SEQ ID NO: 61883 - DNA, 122 bp, Homo sapiens
tctcatactcctgtgctcaggcagtcctctcaccttggcctcccatagtgcaggaattaccggcatgagccactgagcctggcccacacaacttttctaaataatttcagtatataataagt

SEQ ID NO: 61884 - DNA, 122 bp, Homo sapiens
caaacacccacgcaggtaaacacccgctcgggcaaacacccactcaggtaaacacccgctcgggcaaacacccactcacctgcattgagcagcactttgacacagtccagatgctcccgggc

SEQ ID NO: 61885 - DNA, 122 bp, Homo sapiens
ctgttggaggcgtgggtagcagctgggagaaccggctgggtgctgcccctccccttgggccgggcacggagtaggcacctggcgggctccccaggtggcagacgctgtcgctgcgcacacct

SEQ ID NO: 61886 - DNA, 122 bp, Homo sapiens
aaagtcggggagtgccaaggggatgaggtcagcgagtggccccacccccatccgtccccgcgggggccccttcccgcgctgagctcagcatgactcagcagtcgctgcctgcaacaaggacc

SEQ ID NO: 61887 - DNA, 122 bp, Homo sapiens
cccgcagaaggttgcatgaacgagtggtgtgaagcctgttgggtagcttggccactcccgcggcatgggtcacctgcacaggaggttttgcccaccagggggcagcagagggtcagggagca

SEQ ID NO: 61888 - DNA, 122 bp, Homo sapiens
ttgttgttgttgttttgagatggagtctccttgtgtcgtccaggctagagtgcattggcgcgatctcggctcactgcaagctccatctcctgggttcacgccattctcctgcctcagcctcc

SEQ ID NO: 61889 - DNA, 122 bp, Homo sapiens
gtttcgtcgcgaaatatattctttgtgtggttcgctcactcgtgcctggttctccgagagcgcagcgcgggctttattctcagggggtgtggcgcctcgcccccaaacccagcagcccagcc

SEQ ID NO: 61890 - DNA, 122 bp, Homo sapiens
cagaaccaccagggcgacctggacgtagccaagcgcatgatccgcatggccaaggtgaggcggcagctcccgggacccgggattcgggcgccgggaggggcggggcggggccgcggggagcc

SEQ ID NO: 61891 - DNA, 122 bp, Homo sapiens
ggggaactgtagttctcctcgctactttgagacgtgtctcgcctcacgcgttccggcccccgagtcctggcgccccagccccagagttggtttcccctaaagcggaagggtgggcgggtccc

SEQ ID NO: 61892 - DNA, 122 bp, Homo sapiens
ctgtcctccatgggcaggagggctggctgcgagagccccgggttccctttactgaagtcacggtcttggccaaagctgttgtttttgtgactctccggccatgtgatggatagaggggcggg

SEQ ID NO: 61893 - DNA, 122 bp, Homo sapiens
atagcaacgaagctaccaaagcactggagctcataacaagctgcctgtccttggccacctcgcttacctttcttgagactcactttcttcatctaaaggatgaagatgataatatctcctca

SEQ ID NO: 61894 - DNA, 122 bp, Homo sapiens
ctttgacctgcctgtgcccacccctcccaggtgtgggacattgagtccaaggagcaggtgcggaccctcacgggccacgtgggcaccgtgtatgccctggcggtcatctcgacgccagacca

SEQ ID NO: 61895 - DNA, 122 bp, Homo sapiens
aaccgcaggtgccacgggcactggcgttgagcttgggaggttttcccaggtgagagaatccgggggcccttttccctatcagattgttttccctttggcgctcttcccagtcagacctctag

SEQ ID NO: 61896 - DNA, 122 bp, Homo sapiens
acctcatgatccatgcgcctcggcctcccgaagtgctgggattacaggtgtgagacaccacgcccagccccaaagaaggtatttttataatcatcaatcaggtagataatctggcccaattc

SEQ ID NO: 61897 - DNA, 122 bp, Homo sapiens
ttataacacacagctgaggtctcgatcacactagatgtctccagtcagtcgtgtggaaatcgatgtgcttcagaacagtctgtaagtagaaatctgtgtgctttcacagtctgtaaagggtg

SEQ ID NO: 61898 - DNA, 122 bp, Homo sapiens
cacaatgtgcgtggccaataaatagatgcttgaaaagggctcctgtgaggtccgagacaccggacaacgggcggatagagacagccttgttgtttacggcctctttgagaggctgctgctgt

SEQ ID NO: 61899 - DNA, 122 bp, Homo sapiens
atcaaatagccagatccaggctttctaacaagctgccatctgacttacctggcacattgacgaaaatgcccactgttaccccagtccaagctaccaggactcatggagactgaggaaaccca

SEQ ID NO: 61900 - DNA, 122 bp, Homo sapiens
aaaatccaatgacaggtatccctttttggaaggcaagtttcccaaactctgataccaacacgaaacacctggggccggattaccctctagtggggcccccaaatcaagctaaacagagaagg

SEQ ID NO: 61901 - DNA, 122 bp, Homo sapiens
ccagcccccaacccccagcaggaggcagggagaactgcaaggagctcagggacagggggtcgctgtcacctctgacctctggcctttgccatctgccccacctggacatcttgggtgagggc

SEQ ID NO: 61902 - DNA, 122 bp, Homo sapiens
ccaaattgttgaagccaaaaaatcaggggtgtctgatttacatcccttacagcctccccccgccttttttttagcaggcctccttgcttccacacttgcccccaactgtaattcactcacac

SEQ ID NO: 61903 - DNA, 122 bp, Homo sapiens
acggctgcattctctttggcatcgagttcagctacgccatggagacggcgtacgtgaccccggtgctcctgcagatgggcctgcccgaccagctctacagcctggtgtggttcatcagcccc

SEQ ID NO: 61904 - DNA, 122 bp, Homo sapiens
caaatttctaaagcagggagattctgaaaagtcgcccgtctggttctcaaagcagtcgcccgtcctggttctccaggatgcctgggtcagagcatgaataaccaccccgctccccacgcacg

SEQ ID NO: 61905 - DNA, 122 bp, Homo sapiens
acttgctgggtcactcagaggtcagagccgcattccagacctgcttttcccacggggccacgcgtgctcttctgaacggaagtcgttgtgtctggtgtcacagttggtctgtgggtgtctgc

SEQ ID NO: 61906 - DNA, 122 bp, Homo sapiens
gatcctccgcgtgcggccggctcaccagccaatcacggcctcgggtggttctcggcgcgccgcgctgcctccttggaagtgtagtcctcaagttgcagcggccaagagtgagacccgccttg

SEQ ID NO: 61907 - DNA, 122 bp, Homo sapiens
ccgtctcaattaaaataataatacacacgtaaaatcagttacaaactgttttacccattacgtgggaaactagagactaataatagaggattaaggggggttttatttcagggggaaatcct

SEQ ID NO: 61908 - DNA, 122 bp, Homo sapiens
agctttgtgtcaggacagcgtgggtgagcgctgcccccactgcatggctgcagggaggcccgagggcaggatcttcccaagggacaagctggccatggtcccgtgcgtgccagggtggggcc

SEQ ID NO: 61909 - DNA, 122 bp, Homo sapiens
gcctcggggcgccctctcctctgcgccgcgcttctccttggaccttgcctccgcggtcggcgcagccagagtctctcccggctgcgctgacgcctgccgcgcgtctcattcattcattcacc

SEQ ID NO: 61910 - DNA, 122 bp, Homo sapiens
ttctcttgtacagtaggagaggcccctgggctctgatcaatgtcagaggcggggtctccccgtggggctgtgggggcggccaaaggccaaggcccacttcaggtccctcctctcagcagcag

SEQ ID NO: 61911 - DNA, 122 bp, Homo sapiens
tcccgcaggctgcacagcttgggcagccaggtccacgagccatctgcggggggacaggggcggtcaggcggctggggccggccagggcggcagcactcccgggcggcgggcacgaggcactc

SEQ ID NO: 61912 - DNA, 122 bp, Homo sapiens
gcccccgatccccgcctaccggggccgccgcgtcctcctcatccataggcctctcagctccgcacacaagctcttcggccgccgccaccacacacatccgggtccccgcctttccttcactc

SEQ ID NO: 61913 - DNA, 122 bp, Homo sapiens
agaaacatgaccagattttgcatatctccaggtagggaactaagtagactaccttatcaccggctaagaaaacttgctactaaactattaggccatcaatggcttgaataaaaaccagagaa

SEQ ID NO: 61914 - DNA, 122 bp, Homo sapiens
cactgtgagtccttcaagctaacctgcttggagcctgcaattccttctgctctcctcccacgcaccccatgggctggctccaagaactttttctttttggcttcatccccctttcccccaat

SEQ ID NO: 61915 - DNA, 122 bp, Homo sapiens
atattcctttgtatttaaaaatcactaaaacttaaaaagaaatgacaaagtgtcatggtacgagggaacacactgttctacaacatgtagaaaacagtggcccacatgttcagtatatgcat

SEQ ID NO: 61916 - DNA, 122 bp, Homo sapiens
atgctcggtcctgtagatcccgggaggccatgttataaaaggagacttgctgggatgtgacgggttgccacttgaaatatcttccatttggataaagtaggaatatttatacatgtgcccca

SEQ ID NO: 61917 - DNA, 122 bp, Homo sapiens
agcaagaggccctgggtctctccaagcagctgcagaccccagctcgaattttgcacatggcggggtcccgggaagggtggggagcagttgtccttcctgtcgtcgtctgccgtgtgccatct

SEQ ID NO: 61918 - DNA, 122 bp, Homo sapiens
gaagacgggcgacccgagagccaggctggctttgcctccgatccgcagagaccaggccagcgccacgaacaccacgcagggcgctccccgtccatggccctctgggtgcggacggcggctct

SEQ ID NO: 61919 - DNA, 122 bp, Homo sapiens
ccccaagggctgtcaaaacaagtctccctccctgtcacaacagagctgagtggaggccgccgccgccgccgcacttcctgggaccgctgcgccgcagtccgcgggcaggtggcgggtgcgcc

SEQ ID NO: 61920 - DNA, 122 bp, Homo sapiens
cacctcctccccagtccctagagctctcaagcctgcctgttcagcaagggaggcttgccacgcttcttgtgtttgagagagcttttggggtccatcttgagagcaaaagaagtcttaaatgc

SEQ ID NO: 61921 - DNA, 122 bp, Homo sapiens
acctttcaccagagaagaggacgttgtcacagataaagagccaggctcaccagctcctgacgcatgcatcatgaccatgagacacaactggacaccaggtaggccttggggctacgcatggg

SEQ ID NO: 61922 - DNA, 122 bp, Homo sapiens
ggcgaggagaggagggatgcgcgccctcctcccgctcctatctgcgggtgccaccgcctgcgtcagggacccctggcccgagtaagcccagactgacgagcctgacactttaatggggtgcg

SEQ ID NO: 61923 - DNA, 122 bp, Homo sapiens
tctttagctgttccttgaaataatactttcaaaagcagagcaggtccgtgtcagtagacacgtgggggttcgctgtttctcccattacaataaagggaggtctgtcttcacgtagtggcgac

SEQ ID NO: 61924 - DNA, 122 bp, Homo sapiens
gctctgaggagagcacggtttagcaaccctagaactgttggatattaacaaagtgaagcacgtcatttgcagcagcttccctgacaatgttaggtttcttagccaagttttgacaagtgttt

SEQ ID NO: 61925 - DNA, 122 bp, Homo sapiens
atgtgaatacaggatctttcaccttttctaaatagagctggcccttgctcttgcagaatccgtgataactttttcacagaacagatcaagttgggaaggaggagggagggttaggcaagcaa

SEQ ID NO: 61926 - DNA, 122 bp, Homo sapiens
agcaaattaaaatccaactttgagatatggcatgggagaatgttatggaccatgctaattcgagatggaattatgccttcattttcaggaatttttcaaaatgaaaggattgaattaaagta

SEQ ID NO: 61927 - DNA, 122 bp, Homo sapiens
gcataaggtggtcaggaagtttttgcagaaactttcccattggtcccatcagcccgcggccggcactgctttaggagttgcagctctgtgctcgcgaaatatcctgcctagaccctgttttg

SEQ ID NO: 61928 - DNA, 122 bp, Homo sapiens
gcgcccccggagcacccccggccggagccgtctcgcgtgccgggaggatcggactctttccgtcacccgtttgcacctctgcagctgtcaggagcgggtcaggtgcgaaaagcggtgcggag

SEQ ID NO: 61929 - DNA, 122 bp, Homo sapiens
agggatgggggagacagcccagcacggactgcatggacgcacgggaggggccgggagcggcgtgtcagggatgggagagacagggacgggaagggcccagcacggaccacacagcacagcct

SEQ ID NO: 61930 - DNA, 122 bp, Homo sapiens
ccgcgatggctccggcatggcgaggtgacaagagcgcctagacgaacgcggatgcggggccggcagggctatttgccatctttatattcaaattaaggctccaaatttgtagtgtctgattg

SEQ ID NO: 61931 - DNA, 122 bp, Homo sapiens
gcggctgcctcgtggaagtcacgttccttctgcccgtcctctcgggtactctatggttttcgtggccgactactctaattctagttccggtctctatggcggccggcggaggcaggaacggt

SEQ ID NO: 61932 - DNA, 122 bp, Homo sapiens
aacatattttctagtatcctctaagggccaaagtcctacaatcggaatggattcatgccacgttgaagataaaattatcctctctctgaaatacggtaaagatttaaataggtcctgagact

SEQ ID NO: 61933 - DNA, 122 bp, Homo sapiens
tctatcatctcctggcccccccttgcctctgggtacctggtggatagctgccttctcctgcgattaaaggctgtggacgtgacagtgagaaatgtcacctgacttcataagaccttctagca

SEQ ID NO: 61934 - DNA, 122 bp, Homo sapiens
ggtcccccaaggggatggtctccataactggcttgggggccggccgtatctcgaaggagtcgttggtgctggtggctgcggagacgcactggcgctggctaggagtggcactggcagggggt

SEQ ID NO: 61935 - DNA, 122 bp, Homo sapiens
ggggtgagagggagaccaggcgaggggggtcacagggcctcttaggatccccaggccatacggggcgccgtgagctgcccggcggagcacccagggctcgcccaggccgggctgaggcgccg

SEQ ID NO: 61936 - DNA, 122 bp, Homo sapiens
tcggagtttcctgctattgacctggcggggcgcgccagccctccctgcccgctggtgccgcggtccctctcggctgcagcagtggggcacagggacgtcatggacaaaagacgaggatgcca

SEQ ID NO: 61937 - DNA, 122 bp, Homo sapiens
cacacacacgtgtgctcgcgcgcgcacactcacgcaggggcacgcggaccggcacacactcgtgtgcacacatccaaccgggcacccccgcgcgcacacgcccgtgcccacgtgtgcacgct

SEQ ID NO: 61938 - DNA, 122 bp, Homo sapiens
tgtattccaggagctggcattcttgtggggcagatagagacagatagaagatgctgcatacgcaaaagaaactggactggcaggaactaactgggataagatctcagaggaagaacaaacgt

SEQ ID NO: 61939 - DNA, 122 bp, Homo sapiens
cgccgcccggcgcaggggccgggagcaagtgcacgccgcgcggaggacgaagaggctgcacgcacagccgctgccgggggtcggggccaagtgcgcgcctcgccgaggacgaagaggctggc

SEQ ID NO: 61940 - DNA, 122 bp, Homo sapiens
tcccctccctaccctggcggacgtggcccggccgctccgaggggtttccctcggaccccgcgcctaaaccccggccagcgggagcgtctaaggctagccttgtaccccaccggcactcggcc

SEQ ID NO: 61941 - DNA, 122 bp, Homo sapiens
ctgagactcgtaaaattcatgcaggcttatcatccttggtgagggctccaggcgtgcgcccgcatccccgccagctccccgccatgacgcgtgggtgggcctgggctgaggcttttctttct

SEQ ID NO: 61942 - DNA, 122 bp, Homo sapiens
ttcctggggcccctgggatacataaaacagcctggactggcgcggaaggctccgccaaggcgcacgcagggcggggtgtaaggggagttcctgggactcccggtgcaccaccagagggacaa

SEQ ID NO: 61943 - DNA, 122 bp, Homo sapiens
agctgagagctgctctctctttgacagaacacagctctttgctgctaaagttacccgccacgggagtcattatgacccttacggtcccccgagaggaggaatggagagttttctgaactgag

SEQ ID NO: 61944 - DNA, 122 bp, Homo sapiens
tgaacaatgactgcctgtgaatagccactgcattccagcctgggcaacgtaacaagacctcgtatcttagaaaaccaaacaaatcagtagtcgcttaggaagcaggaaaaaataaataaaaa

SEQ ID NO: 61945 - DNA, 122 bp, Homo sapiens
taggggcacccggagatgatgttggggccagacccatggcattaggctttttctgcttcccgggggctggagaataggacctctttcctatcttcacctctcccactgggagggaacaatct

SEQ ID NO: 61946 - DNA, 122 bp, Homo sapiens
attcttggtcacagctctagccacagcagaaggaaaggggcttccagaagaatatagcaccgcattgggaaacagcagcctcacctccacctgaagcctgggtgtggctgtcagtggacatg

SEQ ID NO: 61947 - DNA, 122 bp, Homo sapiens
tgcttccctccccgccccttggctccgggcacagcgtggctgaaccggcttatctggcctcgtctctggaggcctccccagctgtcatgtccgttgacatttcactgttcctggcagtggct

SEQ ID NO: 61948 - DNA, 122 bp, Homo sapiens
gcctttgggaagctcagaggagccgcggggagccgggcgtacgagagcaggccaggactccgctgggcgaggccgagcagggacaccagctcctcacccagttgaaacttgcggtcactgga

SEQ ID NO: 61949 - DNA, 122 bp, Homo sapiens
atctatttatagcacttacacgtgtctaaaccagaacagggtctatacctgaagagctgacgcctccttcagatgcgcgttccgtgggtcgaatccacgccagtctgtgacaaaaagtgctc

SEQ ID NO: 61950 - DNA, 122 bp, Homo sapiens
ggaattatctctcccattttacagaagaagaaactaagtaatttgcccaaggtctcacgccggttagagacaagacaaggattcaaacctgggcagtctgactctagagtccgtgttctcac

SEQ ID NO: 61951 - DNA, 122 bp, Homo sapiens
acaggcatgagccactgtgcccagccctttttgatttttaattaaagatcttacaatggtcgggtgcggtggctcttgcctgtaatccaagcactttgggaggctgaggcgggcggatcacc

SEQ ID NO: 61952 - DNA, 122 bp, Homo sapiens
gggggggccccttcctcccagttgggaggaccaggaaatactgctgccttccaaggtttgcgcgccaccccgcgatgggtcagactccagaactcaaccgtgcacagtggagtgggggaggc

SEQ ID NO: 61953 - DNA, 122 bp, Homo sapiens
ttcatgcagagctactcacagacactgctgtgtgtctctaacttctccacaacacagaggcgatggggactcaggaagagtgatgttgtgggttgacaacccaccacaacgggagcctgctt

SEQ ID NO: 61954 - DNA, 122 bp, Homo sapiens
cccagggcagccttctttggcccggcacagctcccgggccttccccgacccctgtgacctcgcacctatgagggctgccggcccgtccttctgtggtccatgcccccggcctgtccgcctgc

SEQ ID NO: 61955 - DNA, 122 bp, Homo sapiens
cggctgagctttcctagaaacagctatttggggacccatttcctgttggagtctgaaaggcgcacgcaccagagccagtggcaaagcaacttaagctgcaggctcctcctgcccacccccag

SEQ ID NO: 61956 - DNA, 122 bp, Homo sapiens
gtctccgattgagaagtatctgccccaggtcctctgcgggccccactgaacagtgtggagcgttcacaggttgggggtcaccatttcagaatccagtttgttgagacgtggagggtacagga

SEQ ID NO: 61957 - DNA, 122 bp, Homo sapiens
gtgtatgcgtctgtgtgaacattgtgtattttaaactttttggagcttagccagatacttcgaatgctaatcctggcagaatttccctttaaggatgtcctgcagagaatttgttactcata

SEQ ID NO: 61958 - DNA, 122 bp, Homo sapiens
ctgtcacctggaaggtcggggctgcagggctgcggcgcggtcagtcctcaggaaaggctccggcaactactccagtggaaaataacaaaaacaaaacgtggcctcgcgggggccgctcctcc

SEQ ID NO: 61959 - DNA, 122 bp, Homo sapiens
gggcttcagggtacttcctcctgtgtgctttgcacgtagtaggtgctcagcgaacggaaacggggagactagttatcactctccaggcaagcccgcaaagaggcctcaggtgaaaagagaaa

SEQ ID NO: 61960 - DNA, 122 bp, Homo sapiens
aactatttcctttcattgggcacagaggagcggggagctcgggcagcgctgcattgtagccgctgatcgtcgtgtatatgtcttaatcttccagccacaaaaagtacagggccgccctgaag

SEQ ID NO: 61961 - DNA, 122 bp, Homo sapiens
gcagcagcagccggtggtcggggtccatgacatagggctttcgggagggggcggccgcggcggccgtctcctcagaccccgcgcccttggcctcgtcctcctctgagccgtagaaggctttt

SEQ ID NO: 61962 - DNA, 122 bp, Homo sapiens
aggtgggtgacgggctgcgggggcgccgccatggtggcgccttctgggtctgggtgggggcgaggaggaagtgcgcgcgcacccgcccgccccgcgcacgcgcactgaggaccttctcgcgc

SEQ ID NO: 61963 - DNA, 122 bp, Homo sapiens
cttgccttgctctccttggtaacctagttcctgtaaccttgtgttttccagattggcccccgccgcatccacacagtccgtgtgcggggaggtaacaagaaataccgtgccctgaggttgga

SEQ ID NO: 61964 - DNA, 122 bp, Homo sapiens
tgtcgtcacagcatgatcatattttttcacccttcacttctccttttacacaaatagccccggatatctgtgttaccagccttgtctcggccacctcaaggataatcactaaattctgccga

SEQ ID NO: 61965 - DNA, 122 bp, Homo sapiens
ggacaggtgatttccctctggctagggctggcccagatgcccccctccacatgcaggtgccggtcgatcccagcatgactttgctctccgctatgacagtgcagcagtgagttcaatataaa

SEQ ID NO: 61966 - DNA, 122 bp, Homo sapiens
gggttggccagttccggggagccggtcggtttgggggccagaggggcacgaggcgagacccgggaccttccaggccccgagcagccgccttccccagtaatcctgcgcgaaaagcacacggc

SEQ ID NO: 61967 - DNA, 122 bp, Homo sapiens
gcttccccccagccgcatgtcgaatcttgttggcatttccattcgtttaatcacgggctccgggagatgctgtgggaagtaccggcaggacggaggtcttgccctggtgggatgggctctct

SEQ ID NO: 61968 - DNA, 122 bp, Homo sapiens
gctgccactgcacctggcttctccccatgccatgccaggacagatagaggtgggaagctccgaacaaagcagatcatgactttaaagtgaattgtttttctagagcttctttattatggttt

SEQ ID NO: 61969 - DNA, 122 bp, Homo sapiens
tgcttgctccaaagaccttattcagtatgcagttcactgaaactttccacaaaactaatacgtccatttgctaatcatgaaaaataatcttcatattttcttaattaataatctcaccagca

SEQ ID NO: 61970 - DNA, 122 bp, Homo sapiens
ccagggctaaatgtgctgctgccccgctggatccagataccaaagccgacagtgccacagcggagcgttctcccagctctggtgccgacagcctgtgcagtaacgcgtcactggaccccgcg

SEQ ID NO: 61971 - DNA, 122 bp, Homo sapiens
cattttcttttctccatcaccctggcagctcttccacacagccagagcggctgcttgatgcgtagtgctggctttggtgcttctacagtggttttgctagcttttagctgttagggatcagc

SEQ ID NO: 61972 - DNA, 122 bp, Homo sapiens
ctccccctcctcccccgactggccccgcccccactgccggccccgcccccactgccggcccgggccccacccacgccggagctgctccatttaaggagattgcgcagctggaaagctacacg

SEQ ID NO: 61973 - DNA, 122 bp, Homo sapiens
aaatacacggaccagcccagcctcccgcaagacgtgccgcacactcaggaaagcaggcgtcgcccccgccccaattcaatttcaaccctggggtcccggcctcttctggcgccgcctccgtc

SEQ ID NO: 61974 - DNA, 122 bp, Homo sapiens
tttgtgcatattactgtctccattttacagaggaggaaactgagacacggggaagtgatgcgtgactcacagtcacatagtaagcttggattcgaactcaaggagtctgacctcctcacccc

SEQ ID NO: 61975 - DNA, 122 bp, Homo sapiens
ccccgaggcgccaggaggcaactttcacctgggggaggcgccgggcgccagcgggccaagcggccgggccgcggagcccacttcacttgggagctgccccaggccgggggtcgacaccgcgt

SEQ ID NO: 61976 - DNA, 122 bp, Homo sapiens
tgctggctgtggtttcaaccagcgctggctcccggtccacgtgctccgggagtggcagtgcggacacaccagcgaccaggactcttacacagattccaccgatggctggtccagcatcaact

SEQ ID NO: 61977 - DNA, 122 bp, Homo sapiens
cctgtcaggccgctctgcattgaacctgaaatgccgggtcacccttgggttgagtgaaaccgggccccatgctgaggctacaagggacatagaaagggacaagacgcagcccgtgccctgaa

SEQ ID NO: 61978 - DNA, 122 bp, Homo sapiens
gttgtttttaaatccatcacatctgagtgcttttgaaaacatagaaatctgtctagactccgtataatatatatgaagaaattgagatgcaaaaaagtaaagtgacttgtccaaggtcacac

SEQ ID NO: 61979 - DNA, 122 bp, Homo sapiens
tttgaggaatctccacactgcctgccacaaggttgaactaatttacattcccaccaacagcgtaaaagtgttactttttctctgcaacctcaccagcatatgttgtttcttgactttttaat

SEQ ID NO: 61980 - DNA, 122 bp, Homo sapiens
ccacttcaagaaaatacttcttttcgaaagcagctctaccagcaatagataggaggaaagcgaggaaaccattccaaaaggcttggtttaactcttgggtgaaaggatgccaaatgagatga

SEQ ID NO: 61981 - DNA, 122 bp, Homo sapiens
cccgcgccccccacccggggccgcgccgcctccgtccgcccctcccccggggcttcgccccggacctgccccccgcccgtttgccagcgctcaggcaggagctctggactgggcgcgccgcc

SEQ ID NO: 61982 - DNA, 122 bp, Homo sapiens
taaggttccttaggccctagtgagaatcaagcttttggccctccctctcccatgtcttaacgggagagggagagaaaccatgcatgaagcaactctgattctgcgtgtgagataaatactac

SEQ ID NO: 61983 - DNA, 122 bp, Homo sapiens
ggacaagtacgccgtgggcggggccggcgggtcgtgatgttagttcgcgctgtgtggaggcgggccggcgtggcgctgtgacgcagcgggagaagacgggctgggagggcgctgtgctgaac

SEQ ID NO: 61984 - DNA, 122 bp, Homo sapiens
tgtggtgggggtgaggctggggcggcaggctgcctgggcgttggtggacggtcgtgtccccgccagcattgttctgtcactttgcctgtgtcagcaggtggaagtgctcaccagacattaaa

SEQ ID NO: 61985 - DNA, 122 bp, Homo sapiens
cggaggtggggtcgcccttttcctcagtctgtctgtaggtttccacgtgcccctgatcttcgtgttggccgcgcctgtgcttctcatcctctctccactgccctcgctcctccatctcctcg

SEQ ID NO: 61986 - DNA, 122 bp, Homo sapiens
aaggtggcggcggaggttcgcctaggactggggaggcgtccctaggctcagaagttggcccggccggagcggagatttaaaggttggagcgcagaggctcttaaagaggccgagtcgaattc

SEQ ID NO: 61987 - DNA, 122 bp, Homo sapiens
ggcggcgctgtgagcgctggtgagtttgccggcggggtggggtggactccgcgcggggggcggagaggacgtagcgctcggcccggcgcccgccccctagtgctgcccccactttgagagta

SEQ ID NO: 61988 - DNA, 122 bp, Homo sapiens
ggtgtcaagatcaatggtgtatgttctggagccaaactggctaaccttaaatcttgagttcgtttatcagctatgaagcttttggtgagttgcttgatatctgtgggcttcagtctctttat

SEQ ID NO: 61989 - DNA, 122 bp, Homo sapiens
tgtgtgcttgttttcctgaccaggactgacacagaaagcttaaagggctgggctggacaccgcagccgctcagcacaagccacagagttcctagacccgggaaagggcaactgctcccaaaa

SEQ ID NO: 61990 - DNA, 122 bp, Homo sapiens
ctcgcagttctgctgacccctcgtgtagatgtgctgcagccttgggccctccccggcccacgtcctccgttgacacagcttctctggagaccctagaaggcggcatgtcctgccctcaacct

SEQ ID NO: 61991 - DNA, 122 bp, Homo sapiens
gatggggtagcgggcaggggccggaggggccaccctcccagctgacccagcctcctgggccgcttcttccaaaccagcagggtagaaagatggggcacccaccagtctctcccagtgccccg

SEQ ID NO: 61992 - DNA, 122 bp, Homo sapiens
cttccagtaggagcagggtttctgcagggaagcagagagaggagcccgggagaaggcacacggtgagcaaaggcagggaggtggcccactgtcctacccccacagtggcctgtgctttttgt

SEQ ID NO: 61993 - DNA, 122 bp, Homo sapiens
tcacctttagacagcacacacatagcagcaaaaaggggaattcagaatcgactccagtttcgtcagaccctgggagacagaaacatgttattagcagggtccatggagtctgggttctctga

SEQ ID NO: 61994 - DNA, 122 bp, Homo sapiens
caaactcagcagcatggggtggaggctaagaacaggggctgcgcagtcaagcaggctaaccgggtgaaggggtgaaaagcatcagcatcttcatttcacaaccgggaaaaatgaggcacacg

SEQ ID NO: 61995 - DNA, 122 bp, Homo sapiens
agagcagtgaggggtgtgtgagtgagcatggggtccagccactgtgcagtcaggcacacccgcagctgctgcaaggtgggcagctccagtgctggcatgggcgcccactctctgcaaggctg

SEQ ID NO: 61996 - DNA, 122 bp, Homo sapiens
tgtggggaagaggctgggcttggctcagctgctgagggatcagccgaccccaggtcgctgcggccctttcaggaggacgttggggggcaggagtggccggcggccacctgagaatgggagtg

SEQ ID NO: 61997 - DNA, 122 bp, Homo sapiens
gggccaaggaggctgcatgtgagcctgccccattaggacacaaggcccgaggagctctcgcgacagggttcccggggtgactgcctgtaaggggccacagctcagtgaggtcgagaaggagt

SEQ ID NO: 61998 - DNA, 122 bp, Homo sapiens
cgtgtgaaggccaacaattccacttcaggagccagtcccctgtcaatgctcactcgggcacgtgagcacaggatgcctgaggctgcgtcacctgtgccgtcaaaacgccccgtccaccagcc

SEQ ID NO: 61999 - DNA, 122 bp, Homo sapiens
agcctccacaggactgcgctcagcgggagacggggcttccccgtgaagaggtgctgagtgcgaatgcccactccaacacctggtcactgtgtgatcttgagaaagagttgagcctctctggg

SEQ ID NO: 62000 - DNA, 122 bp, Homo sapiens
gcgcgggccctcgcgggccggcctcgttccggggccttttcccccacaagggcccccccgcggccgcctctgtgttttgtttccgctggtccccggcgctgtgactcccatttccgttcgtg

SEQ ID NO: 62001 - DNA, 122 bp, Homo sapiens
acacacctctggggacggggaacccactgctcccagctaaagcaaccctgtttcctggcccgcctcagacagggctgcaggccttgtttgagcccctttcagggcacctggccttggattgt

SEQ ID NO: 62002 - DNA, 122 bp, Homo sapiens
tgtcaccgggtgggggtcattccctggcaccggcagtctagtgcgcctcatgtgtagtaccgtgggaggatcggctcccaaccctccagcaggaagatggaatcaccccagcccccggcaca

SEQ ID NO: 62003 - DNA, 122 bp, Homo sapiens
aaacaaccaaatgggataatacactagcacatactttgtgctgtctgaaattaagtagcacggtgtggcaatcaaatgcgcaagacttagccggtttagcaagtatcagaaacttaggtgaa

SEQ ID NO: 62004 - DNA, 122 bp, Homo sapiens
agaatccgccatttatttaatgcattcagcactaggaggtaactaaaaagccatttgtgccgtaggaagtttgcccagttacctgcttacttggatacagtttcacttaccatttcaacttc

SEQ ID NO: 62005 - DNA, 122 bp, Homo sapiens
ctcctggccctgtgtaaattcctgttggcactggcgatggaagtttattttcattggaaacgtataggattcaggctggttgtgcatatttcctctctaaacataacggaaagaagcgagtc

SEQ ID NO: 62006 - DNA, 122 bp, Homo sapiens
gtctatggccgcgctctgtgtctccgagcccctaacactaatgtcgggatcaaagggcagcggcggcggcagcacagctcacagctcgctctcttgctctctctctctctctttctcgctct

SEQ ID NO: 62007 - DNA, 122 bp, Homo sapiens
cttcaatttgagccaagctgcagggtctgtggggccagcagccccatcactctttctatccgggccagtccctaaggaaatatctccccttcccctgcctattacacatactttccaccagg

SEQ ID NO: 62008 - DNA, 122 bp, Homo sapiens
cccattttataccacattatacccattttaaagatgagaaaactgaggcttggagaatatcggtagtagccccaccatttcctgtgacttcctggagcctggcccacagaggagggttcagg

SEQ ID NO: 62009 - DNA, 122 bp, Homo sapiens
aactttagtatatacacatatccataaatatttctctatgtatctattttaaaataaacacgagttcattctggtgtctccagctctaatccatggccgcatggatcattctagcctcctcc

SEQ ID NO: 62010 - DNA, 122 bp, Homo sapiens
gcctcacatacagttccttttttgctttctgtacactgctatctgctgctttgttggctgcgctctggatcactcgctgctcagactgcctaacacaaggacaaaactttgaagtaaaaaat

SEQ ID NO: 62011 - DNA, 122 bp, Homo sapiens
ttttacaggcccatccaagccagattgctggccctttctggtcctggtggaggtagaggacgtggtagtttattactgaggtaagatttcctttggactttactcatgctgaaactactggt

SEQ ID NO: 62012 - DNA, 122 bp, Homo sapiens
ttcaacacaatccctatcaaaatcccagcagggattttatagaaaattgacaaaataggccgggcgcggtggctcatgccggtaatcccagcactttgggaggctgaggcgggcggatcatg

SEQ ID NO: 62013 - DNA, 122 bp, Homo sapiens
ataatcctttgacgggttttggtcggcggagaatggtctctaaacttcccaaaccgcccccgtttcacgtcctgtgaaaggaagtgctcctctgatgaccaatcagcggcgagaagctcttt

SEQ ID NO: 62014 - DNA, 122 bp, Homo sapiens
tgtgagaaaataagaacaaactcaaagttatgaccacagaatagatgaaaataggcttcacgggtctgaagaagtgggctatatcagccggaatgtgttgattaaaattttttaaaaggagc

SEQ ID NO: 62015 - DNA, 122 bp, Homo sapiens
ctccaggcaacggcaccactttggagttaccaggagacaaggttgccagggcaacacaggcgtgagtggcagctctggggcgaagtctgggtgagaagatccagccagggatcacgatcatt

SEQ ID NO: 62016 - DNA, 122 bp, Homo sapiens
ggtgccaggccacagggcatgcccgacgaacagggagtcggaaccccctcaggccaccctcgggagtcctggggtccagaggggtgtccctgtaccccttgcacacaggaccctcactctgc

SEQ ID NO: 62017 - DNA, 122 bp, Homo sapiens
gtttattaaaaatcccaatattgaattggggtggtccctagacgcctcgcccccgggctgcgtccggggctgggcaggtggagcgcagcgccgcctccccgcgcgcgccccagaagcttccc

SEQ ID NO: 62018 - DNA, 122 bp, Homo sapiens
aactcctcttgtgtgttcatgtcctaaattttgctgacgcgaaatgacgaagcccaggtacgtaccccagacaacgtagccacttcatactgggaacctcgtcggggaaaccaaggtacagc

SEQ ID NO: 62019 - DNA, 122 bp, Homo sapiens
cggagatccagcatgggaagagccccctgccacttccagcaaggagcacacaggtgcatccgttctttctgccccacactttctagggacagcaggccgagcccatggtgtgcgccgtcagc

SEQ ID NO: 62020 - DNA, 122 bp, Homo sapiens
gctggagcctgggacgggggctcagggctatttcctgggggcactacggaccacagtgaacgacctggcatgctctgataagaaaacgctttataatctcgccaactaccttaactgccgta

SEQ ID NO: 62021 - DNA, 122 bp, Homo sapiens
ctggcgcgctgagggcggtgagcgagggcgccaaggcacaggtggggcgggagtcgagcgcggaggctcggggggcgggacgcggggcctgggagcggccagggaccgcggcagcgcctcag

SEQ ID NO: 62022 - DNA, 122 bp, Homo sapiens
atggggaagccagaccaagagagccagcccccaggctcaccggtggaggtgggttgttggcgggagcagcaggacgaggtgcgctggccaggggtgtggtggcaggcccagaggtggagccc

SEQ ID NO: 62023 - DNA, 122 bp, Homo sapiens
agcttcacttaagctttctgaacctcagtttcttgatctgtaaaatgaagattaaatccacgtacattctgcatctgccccattaataaatcatgtccactttattctcaaaaggtattcag

SEQ ID NO: 62024 - DNA, 122 bp, Homo sapiens
ctgcggtcccccagtccgcgccccgcccagccgtcccccgtcggctccagccaatccgcgcgcgctcccctggccgtctcccaccggatcaggtgtctcctctgcgcagactcctccacgac

SEQ ID NO: 62025 - DNA, 122 bp, Homo sapiens
caacaccggcccccgcggacgttagggggctctgtgtgccctatagggctgaggcttggccggagcagggcttttgctgcatggatggggcaacctcaccagcttggtctctttgtccatga

SEQ ID NO: 62026 - DNA, 122 bp, Homo sapiens
ggtggagctggatgccaggcgggccaatgaggtcgaggggagctcggggtgggagatctgcggtcctcccagtgccggggaatggttgagtgacaggaccgggggggcggagccggcgcggc

SEQ ID NO: 62027 - DNA, 122 bp, Homo sapiens
aacgtcctcatctgtttcatagacaagttcaccccaccagtggtcaatgtcacgtggcttcgaaatggaaaacctgtcaccacaggagtgtcagagacagtcttcctgcccagggaagacca

SEQ ID NO: 62028 - DNA, 122 bp, Homo sapiens
atctgctttctggcctacaaaaggattatactaaacccttttagtggtggggagagtatccgtggagaggaaagagcaggaggaaacaggtctttccctgaaaatgagcaagggcgtttggc

SEQ ID NO: 62029 - DNA, 122 bp, Homo sapiens
cttgccggtccctctgcctggcacatgctggcttcagtgttcataaagctccctccctcccgtcactcaggtctctcctcagatgtcacctcgtcagagtggcctgtgctgactgccatatc

SEQ ID NO: 62030 - DNA, 122 bp, Homo sapiens
gagtaccacaaccttcaaataatctgcaagtacagggaaatctttttccaaaacaattcccgcagcccacctaccaacactacaagcctaggggtacagaaaatgggagggaagaggtaagc

SEQ ID NO: 62031 - DNA, 122 bp, Homo sapiens
gcgcccgcactcctcagcctttgggtggtcgatgggactgggcgccggcggagcagggggcggggctcatccgagaggttccggtcgcacaggagcccacgatggaggtgggaggctcaggc

SEQ ID NO: 62032 - DNA, 122 bp, Homo sapiens
gtggtagtgtgcaaatgatgtgtgaggaaactttggaggagtctcaccctgcctggagcacgtggcccctaaaacagcgcagcctcccaaagacagaagatgtggactagtgagaagccagg

SEQ ID NO: 62033 - DNA, 122 bp, Homo sapiens
ggaggccggggtcgggctagggatcgggctgggggtcgcggtgttgggtctccgggccgccgccgcgcgcgacacctggcgggctccctccctccagtccacgccggacgcctgggcttgca

SEQ ID NO: 62034 - DNA, 122 bp, Homo sapiens
cgcgacacggcgggcaggaaatccaccccgctgcacttcgccgcaggtaaccggggccagcgtcccctcgcctcgctccagaccccacctgcgcagccggggcccacaggtctgaaaccagt

SEQ ID NO: 62035 - DNA, 122 bp, Homo sapiens
ccagcctggcgctgagcaccctcaacagctgcgtggatcccttcatctactactacgtgtcggccgagttcagggacaaggtgcgggcagggctcttccaacggtcgccgggggacaccgtg

SEQ ID NO: 62036 - DNA, 122 bp, Homo sapiens
aaccggtttggtacccggttggtgggagccacggcgacttcttcgccgccgccgaaggcccgcagcaatgaaaacctcgacaaaatagatatgtctttgggtgaggggccgagttggaccga

SEQ ID NO: 62037 - DNA, 122 bp, Homo sapiens
cttccaggagaggcccacccagcctggctggcaaagccctcccacgtgcagctgctagcccggagaggtgagtcactgtccctgagccctttacagaagctcttgggaaagccacagacctc

SEQ ID NO: 62038 - DNA, 122 bp, Homo sapiens
gagagatgcacaggtaacattttgatacatttccttccagtcttttctctagatgcatgtcgttttctttttaaaaatttattatataaaactggcatcagactgtatagactgtatatctg

SEQ ID NO: 62039 - DNA, 122 bp, Homo sapiens
gccagtatgacaccatggatgaagaggcggtggatgtgcccatcctgggccatggacaggcgagagtcgtggggcaggggctgcccacctcgcacccagcgcacggcccccgctgcacccac

SEQ ID NO: 62040 - DNA, 122 bp, Homo sapiens
tctgtgggacggtaggcttgggagaccttggggggatctgtgcgtctccagtctctctctcgctctccctcttcagtgcagtgttgaaagtgtgaagcagttggtcccccccctccaccgcg

SEQ ID NO: 62041 - DNA, 122 bp, Homo sapiens
gtgcctgcagcagacgcggtgtgtgcatacacacacacacacatctaagtaaactagacacgttacataaaatgcgtgcccgcagcagacgcagtgtgtgcatacacgcacacacatctaag

SEQ ID NO: 62042 - DNA, 122 bp, Homo sapiens
gctcctgccgttggcagacacctctgcagccaggcgtggggtgtccttccatcaaagcaacgccagggggcaagaagcgttaacaaagcccgggacgctccgcactctccctttatctaccc

SEQ ID NO: 62043 - DNA, 122 bp, Homo sapiens
attaggatggagtaccacgcactgtgggttagtggttctgaacacaactaggctgagcagcgtcaactatatcagtatagcagagggcaacaagaggaagaggtctctttagtagtcttaca

SEQ ID NO: 62044 - DNA, 122 bp, Homo sapiens
gagcattcaaagggatgaagaatttcacaggaagatgacagcaatgacaacttctaggaccgaccagtgttgcctggagatgattacccctgaaacacacacgtgctctgagagttttgctg

SEQ ID NO: 62045 - DNA, 122 bp, Homo sapiens
aaacccccaaagctatgtaaactcattgagggacctgcgcaagtgaggtcctgaagcttacgcttcattggcttcattgttaatctccctctgcctgtgacttcagtgattttgacctagaa

SEQ ID NO: 62046 - DNA, 122 bp, Homo sapiens
atgggcaccgcttagaccagggagtccaaaccataggcttgctgttccagtttctcttatcggatgaagggacccccatttcaccgacgtcattgacttttgggttctccgctgaccccaga

SEQ ID NO: 62047 - DNA, 122 bp, Homo sapiens
agtgggctccggctctgccatccaggcggccgttccattcttgagttgttctcggcatctcggcatctcggcaaccaaacaagatccaaagttggagaggtgggcaaacctactttatacat

SEQ ID NO: 62048 - DNA, 122 bp, Homo sapiens
gtggtcggccctttggctggccgtggttgctccaggtggctattttgggtttctgtgttgcgttctctccagagcttctggcagctaagcacctgcactcgatttacctaaccaagtaaaaa

SEQ ID NO: 62049 - DNA, 122 bp, Homo sapiens
ccagtcctccctcaccactccccctgtaaagagacttcagacaggcctaaggccctgggacgaaagaagcaaaagtgaaccaggacgccctatcccctcctcccaggcggggacaaaaaaga

SEQ ID NO: 62050 - DNA, 122 bp, Homo sapiens
gcttctccgagaccctccggctgccacgggagccttgggtgttgctgggtcctcaagaagcgggaagagggagctccaggatgctgggccatgggaggctgatcccggggtgcagggtcagc

SEQ ID NO: 62051 - DNA, 122 bp, Homo sapiens
ggagggttttcatgacaacctggagacacaacagatgtttttagtgctaagcatgagtgccggaacatgtaccgagagacatgggcgtgtgtgcagctgtgcataggggagtctggggtgtg

SEQ ID NO: 62052 - DNA, 122 bp, Homo sapiens
tctctctttctgagtgcagcagggactccgggggtggagagtaagttgtatttactgtgacggtaattgaaaggcagcagcagccaccccacattgtccccggcaatacctaattggtggac

SEQ ID NO: 62053 - DNA, 122 bp, Homo sapiens
ggtggagtgcaaagaactgtagccttggcttcactcactatggaaagaaagctccaatgccgagtgggatcttctgcagattatgggcagggtaaacttgttctcccaggatccagactgga

SEQ ID NO: 62054 - DNA, 122 bp, Homo sapiens
gaggcggtgacgtaggcctgaaaagcaccttcccatcctggcagagtctatattagagagcggcaatggctctatataaacagggcagccaaagggaggaggaccacaaggctcagggactg

SEQ ID NO: 62055 - DNA, 122 bp, Homo sapiens
cctagtctcgctgacttgacagagtggcacgaggctctgcccatctgtccccccagaccccgcaagatccctaaggccaggcctgggtcctctgtgtctgcacttgctccgagcgcccagcg

SEQ ID NO: 62056 - DNA, 122 bp, Homo sapiens
cataaattacagaatctttccccttcctagcatcttgccatcacagcaatagggcatcatcggaagaatttattacagctagctataagagctgcaaggcacagggtctctcttggaaagag

SEQ ID NO: 62057 - DNA, 122 bp, Homo sapiens
tgtggcctcactaccacctgagacattgtgttctctgccctcagaaccaaaaaatacccccgtgtgaactttttgagaagactggcctggtgtagggttgagggtgggtgctgttgctaacc

SEQ ID NO: 62058 - DNA, 122 bp, Homo sapiens
gcccagttcccaggctgtggaacacacagggggcaagctgagcccatcctgcccctgctccgtctcttcctcatccttattcttgtcactgggagacattcgtcactgagtggcctcaggga

SEQ ID NO: 62059 - DNA, 122 bp, Homo sapiens
aggcgactgctcctggcagagcgacgcaaacgtagcaaggatcggggctgtcactgatgacgcgagacgctgctgccgagtcaccgctgcgatgagtctgagcgagaaagatccggcctacc

SEQ ID NO: 62060 - DNA, 122 bp, Homo sapiens
ccaccgccccacctcttcgtccttagtggctgggagtaatctcagctgcgttcatccaatcgacagacccgcccctccacgctgtcgcctggggctacgagacgccattattctgtttccgg

SEQ ID NO: 62061 - DNA, 122 bp, Homo sapiens
acacacagaattacacagacacaagcatatttacaaacatgctcaggcagatacccgccacgaataggaagagacacagacctagagtcaagtgacacaaatactcaagagacatgtagagt

SEQ ID NO: 62062 - DNA, 122 bp, Homo sapiens
gtgggtggccatgtcttcatgtcagcttgaaagatcgtcaccagggaaatatctatatctcggcagagaaagcttcagcctgtgtagtccagctgtgctcaaatggaaatccagaaacccag

SEQ ID NO: 62063 - DNA, 122 bp, Homo sapiens
ctaaggtgatccaccggcctcagcctcccaaagtgctgggattacaggcgtgagccaccgcgcctggctggtaaaacatttttttaaagctcaaaatttagtgaacatttatctgctaaata

SEQ ID NO: 62064 - DNA, 122 bp, Homo sapiens
catggtaaaaacccatctctactaaaacacacacacacacaaaaaattagccaggcatggcggcgtgcacctgtaatcccagcaactagagggactgagacaagagaatcacttgaacccgg

SEQ ID NO: 62065 - DNA, 122 bp, Homo sapiens
tgttggccaggctggtctcaaactcctgacctcaggtgaggtggcgtgagccaccgcgcccggcaagaaatctattttgaaagtaataattagtggctgggtgcggtggttcacgcctgtaa

SEQ ID NO: 62066 - DNA, 122 bp, Homo sapiens
aggcaggtataaagaaatactggatggggacccagacccacgacactccctctaccagggcgggtcttgaaagtcttggggccacgagctctgtcttctttacctgcaggagccttcctgat

SEQ ID NO: 62067 - DNA, 122 bp, Homo sapiens
gcgacgggcggggcgagatggcaaagtctccctttggaactacatctcccatcatgcatccgcgcctcggggtgcctggctcagcctcaggcatgagacctgtaccagcccccgggagccgt

SEQ ID NO: 62068 - DNA, 122 bp, Homo sapiens
tcaaatagactcgcctagaatttctccaggaaacggttgggtagggggagctctggcccacggctgctttttcacctgccaaggcctgggtgcttcctgcagagccatttcaccaacaacga

SEQ ID NO: 62069 - DNA, 122 bp, Homo sapiens
ggccatgagacttgccaaaaaggttactaaataaaggtaggttcatccaaagagaagcaacggtgagggcaatgcaaggtctccagccaggtggatggcatcaagcaagcagcaataggagc

SEQ ID NO: 62070 - DNA, 122 bp, Homo sapiens
accccagggggaacagtagcttcaccttgttattcccattgctctcctggctcactcttacggtcggtctccagtgactgaagcattccccacccttggaatttctcatcttctgcctccct

SEQ ID NO: 62071 - DNA, 122 bp, Homo sapiens
agtgggcacgtgcggcacttccggggcggggcgggcacgcagcccttccgaaggcccgcgcgagccgctagttttgcccacgcacttttggcacagccgcgccacgcgatcggcgatctgat

SEQ ID NO: 62072 - DNA, 122 bp, Homo sapiens
ggggggcggcgggcgggggcgggggcggggcgcggggccgggagagccacagggagtccgcgcgcaatcgagcgccgatggcacggatgcgaggcggggaaggccgaaccgaagggcagagc

SEQ ID NO: 62073 - DNA, 122 bp, Homo sapiens
tttggggagaacccgatggagtctgaaggatctctaaatcaggcggaacccacggtgcggcgagttgggacggaagtaaccggtgggagtggggaggagccggaagttaaggaggggagggg

SEQ ID NO: 62074 - DNA, 122 bp, Homo sapiens
ctcccttggacggccctgcccccctgttctggcccagcccaagcaccctccaccccaccccggcctgctcaaaggggccctgtctgccagagcagagcctcctccaaggctctatggctctc

SEQ ID NO: 62075 - DNA, 122 bp, Homo sapiens
atggtgtcattctggggtcagtgtagggactggaccttccaaatagagctagtccagagtcgtaccagaccatcctgaatcctctggactgtttcccctgtatgtttccctggaagcttcag

SEQ ID NO: 62076 - DNA, 122 bp, Homo sapiens
tgggaccagggtggagagcagaggggcgtccaggtgcagccctttccctcccaggttggacgcccttttcagatgctaaaagtgataatccccacacacactcacatgagaggggctgtgga

SEQ ID NO: 62077 - DNA, 122 bp, Homo sapiens
gagccgactggtagtaggggcagccgtgtggcggggagccggccgggccttcctgctcatcgaggacctgactggctcctgcttcgagccactgccccagggtctgctgctccacgagctgc

SEQ ID NO: 62078 - DNA, 122 bp, Homo sapiens
catgtgacttgattttttcgtccattttagagaagctgtacccaccctggtttcaggacacggaactaaatttattagaaaagaagccacttcaagtcatgaaggagaaacacaaagattct

SEQ ID NO: 62079 - DNA, 122 bp, Homo sapiens
tgaaaatcaaggcatcgtggagccacctcctccagagggggagccacaatctcaggaccccgaaggagcagacattttcaagtggctcctttacattaagcaaaatgtggtcctctcattcg

SEQ ID NO: 62080 - DNA, 122 bp, Homo sapiens
acaacgccgcccgtgacggcaagggggcagctgctccagaagctgctcagcagccggagccgggaggaactggacgagctgactggctaggtggccggcggggggacgccgctgctcatcgc

SEQ ID NO: 62081 - DNA, 122 bp, Homo sapiens
tccgcctccagtgtgctctttggctgagggactggtgggcgctggaaatattagaggcgccggtgcctgtgatgtcgccgcctctgtgacgtccccgccgcgaccccacaggcagggagccg

SEQ ID NO: 62082 - DNA, 122 bp, Homo sapiens
acgcggcgttcggaggcgggcttctgggggtgggcggagcgtgccgcggcaggaagttggcgatgcgcaggcgcgagggctcgcccggcgctcccagggccggccgcggaggcggatggggc

SEQ ID NO: 62083 - DNA, 122 bp, Homo sapiens
caccataagcctaggtaccaagtctatgcaaaagatctcatgtccaggcaagtcctaaggcgcagtctccccttttatatcttaaatcacaatatgctatataattttcaggaaacagtagg

SEQ ID NO: 62084 - DNA, 122 bp, Homo sapiens
ggggtggggctgaggggctgcctggaggggttcatttacagagagaccaaagtgcccaggcgtggggaagagcggggctgaacaaaggggccgaggctgtcacctttcttcatggccttgtc

SEQ ID NO: 62085 - DNA, 122 bp, Homo sapiens
gcgcctctgccccgccgccccgtctgggatgtaaggagcacctctgcctggccgcgaccccggctgggaactgaggagtatctctgcccggccagccaccccgtctgggaggtgaggagcgt

SEQ ID NO: 62086 - DNA, 122 bp, Homo sapiens
tgttcccgcctcaccctggacacctgatctactgtctttggagcttggagaaggacttgccgagaagtctgaagaatgcatcaggcctgacctgactttgctgcccctaattgttttctaaa

SEQ ID NO: 62087 - DNA, 122 bp, Homo sapiens
gccggagcggacgggatgaggtgcaccgcagaactggggactcctggtgccgggacgcggcgggctggggcgccccactctcggggcaagtctgcaatgcccggtgcccacaaaaaggacac

SEQ ID NO: 62088 - DNA, 122 bp, Homo sapiens
gagggttgaaaaagaaaaagtgcgtaagagggtcccaaaaagaaccagcttccgtgtagacgggtctgcagaatctgccgtctcccgtcttctgggtcccctggcccgcccggagtggggac

SEQ ID NO: 62089 - DNA, 122 bp, Homo sapiens
agcagcgcccgaagcaggtggcggtgggagggcggcggaggcggctacgggcgactccaacgcgtccgaaatcgtctgtgcggcaggaagtcaagcgtgaaattaactttcactccgcggcc

SEQ ID NO: 62090 - DNA, 122 bp, Homo sapiens
gttaattgtcaactaagatctgctgagaatccccaaggtgctccaggattttcagtgttgcggtagctcttagtctcactctgagttttacagtcccctgggctgttatctgaccgacctca

SEQ ID NO: 62091 - DNA, 122 bp, Homo sapiens
cgtcagcttcaaggaccccagcgactacgtgcgcgccatgcgtgagatgaatggtgggtgcggcctcccctgggaactgcaggcgcggcaggcgctggcctaagcctgacccgagcctgcct

SEQ ID NO: 62092 - DNA, 122 bp, Homo sapiens
aatgatgactgagtcagcctggctcccttgccactggaatattgtcagaattggccggctcgcccttgcctctgtaaaaagcctttgccaagggtgtgatttttcctgaagatcattctttc

SEQ ID NO: 62093 - DNA, 122 bp, Homo sapiens
ctcgaaccgtttttaaatttccctctctggagctgtccagctcagagcatgcgcagtagccgtgcggggggcttttccccaagggtcagttacagggcagggtcaaggggattgcagcgggc

SEQ ID NO: 62094 - DNA, 122 bp, Homo sapiens
aagcccctggggtctgcgcgcagttttcctctttcaaatattcctaggaatagtcggcagcggcagcagccgcagcagccgcggatctagagcaaacgtcctgtgctttggagttagaacca

SEQ ID NO: 62095 - DNA, 122 bp, Homo sapiens
gtgccaccgctgacaggcagccacgtgggtatccccagcggaagggctgtctcctcccggcggcgaggacaggaacccagtgagctgaacacatccgacattgtacggagcagcaggaacag

SEQ ID NO: 62096 - DNA, 122 bp, Homo sapiens
catcacggtgggcatggtggccttcagcgacgtggagcccacctctctgttcattgccggcgtggtggtgaacaccctgggctctatcatttactgtgtggccaagttcatggagaccagaa

SEQ ID NO: 62097 - DNA, 122 bp, Homo sapiens
catcacagaaatgtgaaggcagagccaggagcctgcctgcctctgttctccatgggaattcggggtccggggccaggaccaccaccctcctgcccagcacagcaagtccgaggggctggcag

SEQ ID NO: 62098 - DNA, 122 bp, Homo sapiens
agggctcttctctacccttgatacactcaacaccacccacagcaaactccagacacagaacgtagtaaacccaggggaccaacagatgcaaatggctgtctttcccagtaagtgtgagcttc

SEQ ID NO: 62099 - DNA, 122 bp, Homo sapiens
gacctctgattggagcaagaggtggaggaacaaagccagggccagctgcttcattttcagcggggagagatgaatcaggcacatttaaattaccaagatcatctttggtgtcatttctactg

SEQ ID NO: 62100 - DNA, 122 bp, Homo sapiens
cggcgccgctgcagagcgatgaggttcacacggtgcagccgcagccgctcccaggccttccgagccaggcctcccacacagttcttggtggtgtaccagagccagtacctgggagagctggg

SEQ ID NO: 62101 - DNA, 122 bp, Homo sapiens
gcggccaggaacatcgcgagcggggaccaatcagagagtagctttgcctctataacggcgcgagagtgagacgtcatcggtgagcgactaacgctagaaacagtggtgcgcggagaggagag

SEQ ID NO: 62102 - DNA, 122 bp, Homo sapiens
ttggccttacccacgaggctttgcggtggctgttggcttggcggtggtcgcttggcttggcgtggcagtgatcgcttggcttggcatttctggcttggcggtcctcctttcgcagattggaa

SEQ ID NO: 62103 - DNA, 122 bp, Homo sapiens
gaaataaattcgcagtggacttgtctattgagggcctactgggtcgcaatagcagttttccgaaacatggccgactctttgacctcagcaattttacttctaggaatacatgtatcctctag

SEQ ID NO: 62104 - DNA, 122 bp, Homo sapiens
gcactgcgaccgtctgcaccgtggccgccccttctcaccgacgacgaggagcactgcgaccgtctgcaccgtggccgccccttctcactgacgatgagcattgcgactgtatgcaccgtggc

SEQ ID NO: 62105 - DNA, 122 bp, Homo sapiens
tggcgcatgcgcatcatgacgaggctctcgtagtccctctctgacagcactgagccctgtcggacagggcagggacagggaggggtcagggacagcagggcacagcctcacagactccgagt

SEQ ID NO: 62106 - DNA, 122 bp, Homo sapiens
gctttccagcggctgttgggccactcttgaaggcactcatcagggcctcccttggcccggcgggagggctgcagcagcggcaagagtctatgaatggttctcaagcccagggctctgggccg

SEQ ID NO: 62107 - DNA, 122 bp, Homo sapiens
gaaaggtggagtttgtggagagggcgcgataaggtctacttccaacttgaaacacgacaacggtgaaatgagtcatgctaaaactctttgggtttcctgggagaggcatttcattagggctg

SEQ ID NO: 62108 - DNA, 122 bp, Homo sapiens
acccaggggctggcgtcagaaagaatggaaggctgggctctcactgtaggcctgcagcaacgagggacttccagagataatcccaggccccaatctagtccccaaactagaattacagctac

SEQ ID NO: 62109 - DNA, 122 bp, Homo sapiens
aataagggcacataaaagatttggtggtgctgtggtttgaacatgtcccccaaaagttcacgtgttggaaacgtaattgccaatgtaacggtattaagaggtggggtctttaagacgtgact

SEQ ID NO: 62110 - DNA, 122 bp, Homo sapiens
ccacccatctctggttccagcttgcagtccaaaccccagattttcaccctgcctccagatcgtagccccaattcttagtgttacaacgagccttgcccccagccccattcttagccccgccc

SEQ ID NO: 62111 - DNA, 122 bp, Homo sapiens
acaggatcagtctctgggtgccacagtacattttacctgtcatattcatggaaacccagccgccaaccatacttggttttatattgcacagcctattcatccttccccatgacatctaactg

SEQ ID NO: 62112 - DNA, 122 bp, Homo sapiens
agggggtggctggaaggtggacctgcctgctgggccaacctggaggggcaggtgctgtgccgcggagcccgcagcctccgccaactccaagtcggctgagtttctgtggccagggcggacca

SEQ ID NO: 62113 - DNA, 122 bp, Homo sapiens
aggggctggggcgggacttccctgggcactgagtcaaagcttgaggggagtgttcgctcccgcattttcgattccactctcttccgtttctgtcgctgcagtcgtccgcgggtaaggccctc

SEQ ID NO: 62114 - DNA, 122 bp, Homo sapiens
gcagacccaggggggactcccactttggaggatctgggtgtgttccttgggttgtggatccggcaagggagctggccgaggttcctgggtcagtatgagaggccctgtgagtccagccgccg

SEQ ID NO: 62115 - DNA, 122 bp, Homo sapiens
ggcagcacctccctcttcaagaacgagcatctgagcttttgggggaaacctgtagctccccgaatgccatccacagagcccccctcagtcggcctcccctgaggcaccaaggctggcggaag

SEQ ID NO: 62116 - DNA, 122 bp, Homo sapiens
tgtgtttttttttaagatatagggtcttgctctgtcaaggctggagtgcagtggcacaatcgtacatctctgcagcctcgaactcctgggagaaagtgatcctcccgctttagccttcagag

SEQ ID NO: 62117 - DNA, 122 bp, Homo sapiens
tacagatgaagaaacaactgatccaagatagaggaaatgagaggaaaaagaagacagtgacgaagaggtagtgatatatgcaccttaatggatgcataggagttttctagacagacaagaga

SEQ ID NO: 62118 - DNA, 122 bp, Homo sapiens
ccccagccacgctgcagcaacaccagaagcgcaaaagaaaatgtgctgttgcatagacagcgcaaataaataatggttcttgtgataatcagcttttgcttttaatgggcttcacatgactc

SEQ ID NO: 62119 - DNA, 122 bp, Homo sapiens
acagcaccctcaggaggcggcctgcagccggagccctctccagggcaggtgcctgagggccgcccatgggacaggcccgattgtacccacggtgcatgtcatctgttccactcctgctgact

SEQ ID NO: 62120 - DNA, 122 bp, Homo sapiens
tgaaagcactttgctgattacagtcccagatgtcattgcatacattaccctgctctataacggggctttgaacactttaatttgaactacaaatactattaagctttttgcacctcttctgc

SEQ ID NO: 62121 - DNA, 122 bp, Homo sapiens
caaggtgtccaacagggaggtggcggccacttcggccgcagaggcgtcgggccacagctgcgcagggtactccatgctcagggccagcagggaaacctggatgggggattaggagggaatca

SEQ ID NO: 62122 - DNA, 122 bp, Homo sapiens
cttcaagataaagacttcttagaaacaaaagttcattctcactttgttcaaataggcttacgtatcaggtaatcactggaaagcaaaacttacattaacatacactatgtcaatcagatgta

SEQ ID NO: 62123 - DNA, 122 bp, Homo sapiens
cccgggctgctcggaaaggggccggggccgggccttccgaaagctcctgggcggccctgccggaaccctgctctccactgcggcctgcagggctgttaccaggagccctgcctgcccgcccc

SEQ ID NO: 62124 - DNA, 122 bp, Homo sapiens
accccagatttaccctagaattcatctgcatgtgggtgcccacacacctccaatgcaaagcggagcccatcagcctcccagatttggcagactgtaggatctcagtaagtgtgagctatttt

SEQ ID NO: 62125 - DNA, 122 bp, Homo sapiens
cagcagtagcagtagatgcatgtaccctaaggtcattaccacaggccaggggctgggcagcgtactcatcatcaaccctaaaaagcagagctttgcttctctctctaaaatgagttacctac

SEQ ID NO: 62126 - DNA, 122 bp, Homo sapiens
catctaaatggccacacgtggttggtggctgctgtagttgacagcgctgcgtgaaggctccggcgcttctcgcaccgcagggcccacagcacagaccacacctgtagacttggaggagtggc

SEQ ID NO: 62127 - DNA, 122 bp, Homo sapiens
ggactcacccctgctttgggcaggcagtggaaggcaggccccacaagagctgctcactcccgtcacctgtctccctcgggggtctagggtcgaacctcctgtgagcccctcctctccatgca

SEQ ID NO: 62128 - DNA, 122 bp, Homo sapiens
ctagacccctgttgactccaatagggatgacaccatgtttgagagactgaagaaaagacccggaggtatcaaatgagacatagggtttatttgggggactcacgtacagagccgtccagtgg

SEQ ID NO: 62129 - DNA, 122 bp, Homo sapiens
acccgcgcgcggccagggaacgcttgctgagggcgctgctgtcgttggtgttctgtaccgcgcctgcccgacgctcacggctccgggggcccatggccagaagagactcaggaatggcagtc

SEQ ID NO: 62130 - DNA, 122 bp, Homo sapiens
gttcccttaatgccagggcaggtagtagagcaaacggccccagctgtcttcctccctgcccgcccgcaggcaaagcccccaggagacgccggacgagccgcgtgcctttcccaccgcctccg

SEQ ID NO: 62131 - DNA, 122 bp, Homo sapiens
acgtgcaccaaggtaggtctcgcctgggacgcgcggagggtccgggcagagggcggtaagcggagcggccacagccggagcacgggccggtccacgcgggcctaagtcgctgcccgctctcg

SEQ ID NO: 62132 - DNA, 122 bp, Homo sapiens
cttctgctctccatcgtcattctgtactgcagaatctactccttggtcaggactcggagccgccgcctgacgttccgcaagaacatttccaaggccagccgcagctctgagaagtcgctggc

SEQ ID NO: 62133 - DNA, 122 bp, Homo sapiens
aagggggagctggaggggcaagcccagaggcagggccaacactgagctgcatggtccctgcgatggacaatctgagcctgaggtaaacgggctgatgtgggactgacggatgcaaggtgaca

SEQ ID NO: 62134 - DNA, 122 bp, Homo sapiens
caacaaatcacagaaaacataaataaatgcattttgttcagggacagatggctgaagcaacgagagtgaatcacagagtcacagaatcacagttatgtgcaaagcactcaggaaatagcttg

SEQ ID NO: 62135 - DNA, 122 bp, Homo sapiens
gtcccccttccacccgggcaggaccttagagccaaagctcaggtctttctgggccctaagcgggagggagagccatggcacacccgggaagcttttgcctccctcgaccccaggggccattc

SEQ ID NO: 62136 - DNA, 122 bp, Homo sapiens
acttcggcttcagctgagactgggataacccgcttgagccagtgccaaattccacccatccggcgcgcaagcgagcggggcttctcctccccaaccccggcccaggctgcttctgccgggtc

SEQ ID NO: 62137 - DNA, 122 bp, Homo sapiens
cctcgaccgccacctgcccacggcctccctgctggcctgcggtagctcgccagggcctctcggacctatttgactggctgctatctgcccccaaacttgagtatttgccctctcgactgcat

SEQ ID NO: 62138 - DNA, 122 bp, Homo sapiens
cgtcattcctacataacaaaataacactctcttgcgaatgagtttatttctactgttggacgtgtggttaagagtgggagttctggaatgggatcaaagtacaaggcctgacttgcaggaag

SEQ ID NO: 62139 - DNA, 122 bp, Homo sapiens
gtgagtggcagcgctatatttacccgctgtggctccggttgcagagccaaggccgccagtcgccgagggcactggggcccccgcaggctgcaggcagctgtgagctggacccccttcctcct

SEQ ID NO: 62140 - DNA, 122 bp, Homo sapiens
tgtcgtgccggtcgtggggacagatgggagggaattacggtatttacagctgctcttcgccggctcttgctcccccgcgtgtcgacaaccgaaactgcagcgaggcccagaggcctctgccc

SEQ ID NO: 62141 - DNA, 122 bp, Homo sapiens
tggcctccctccttcctggggtgagcctctccagctaggctacttgcgccagctgctgcccgttgggcagctcgccgaggacttgataaaccccattccctcccatccgctcccgcctccca

SEQ ID NO: 62142 - DNA, 122 bp, Homo sapiens
gtccgggggtgggggcgggagcggtgactcaaagggcttttacacccgtgcagcctcctgcgctctgcggatcccgggccagaccgcttcgcggggactcccctcaccccgtgaagtctctc

SEQ ID NO: 62143 - DNA, 122 bp, Homo sapiens
tcgaggcagtaaagccagttgttcacccagaacatctgactgccataaaaattatggtgacgagaaagaacgtttgctcaaatgccggggtcgggttgagggctggagaaaggtcccacccc

SEQ ID NO: 62144 - DNA, 122 bp, Homo sapiens
tctggtcggtgtctgtccgtagttcccatctccacatcccgtctgatcccgctcgtttttcggcagctccctttgacgtgattggacccccggagcccatcctggccgttgtgggtgaggac

SEQ ID NO: 62145 - DNA, 122 bp, Homo sapiens
ggtccacagggcacacgtagaggagcacgcactgggacagaaggcagggacgtccatccacgcggccttcactcaggctgccggcaccaccgggcttctcacagcgccgggcttgtgtgcca

SEQ ID NO: 62146 - DNA, 122 bp, Homo sapiens
gttatcgtaagcatgtacaaaaggttatttcttaagcttgcatttaaaatgcgtttacttcgtatgatcctcagcaagactatgagtggaatattacatgctcacacaagcatacgtgcata

SEQ ID NO: 62147 - DNA, 122 bp, Homo sapiens
aggatgacaaaaatgttcctgtgttccagggtaatgccaggtgggttttgagagctgggtcggtactgcagacatctcttctccgttgtcgggtgccgtctctgctccttgtggttattgct

SEQ ID NO: 62148 - DNA, 122 bp, Homo sapiens
cttaggtgatccgcctgccttggccttccaaagtgctgggattacaggcgtgagccaccacgcccagccacaagagagatgcttgtggaaagggatacgggcttgaggttcccaatgggtga

SEQ ID NO: 62149 - DNA, 122 bp, Homo sapiens
ggcttgctaggaagaacagagtcacagacctttctagtgcttcagtttagatcttcctaacgtttagagagcttactgagtcgtgtataggtccaaccttaagcccatctcccactgcgtta

SEQ ID NO: 62150 - DNA, 122 bp, Homo sapiens
gggagctggagagggtgggaccacgcaggaggcagatccaataaacaggaagatttttctcgtgacgtcgtcggcgcgcgccggaagcgcggatcacacgggcccctacaaggggcccctac

SEQ ID NO: 62151 - DNA, 122 bp, Homo sapiens
ctgctggttctgccggtagaaggggaagaggtccatgatccactggtagatctcgctcagcgtcagcatcttgttggggctctgctggatggccatggtgatgagcgagatgtacgagtagg

SEQ ID NO: 62152 - DNA, 122 bp, Homo sapiens
aaacatgaacaatgcaaatgaaaagttaatataatatgttctgagtgtcacttgaatgaacgatgtagagcaagagtgatgagaaagcagcagagcaaatcaggaactgggcttttgataaa

SEQ ID NO: 62153 - DNA, 122 bp, Homo sapiens
tcttaagtaactaattatttagttgaataactactagggaaataggccataaatgtcactcgtgctttccttgtaagaagcccacagctcttctcgcagcatgctcttttcagtacctgttc

SEQ ID NO: 62154 - DNA, 122 bp, Homo sapiens
gtgacgcgtggccgccggcacccggagctcctgggcacacggcattggcaggggccgcttcggcagagtgatgactgatgatgagtccgagagcgtcctctccgactcccatgaagggtcgg

SEQ ID NO: 62155 - DNA, 122 bp, Homo sapiens
aggtagctgtgaaaacaggagggcttcgggagggaggcaggggggagccccaccagctcccggctctcccaggagaatggggacaagttctgctaggtgaccacggctttgaaattaaccag

SEQ ID NO: 62156 - DNA, 122 bp, Homo sapiens
tgcctcctcaacccttcatccttcacaggaggaagacatggtggcccacagctgagagaacgcatgctcagggattttccctgactgctccttgccttaagcaatgtcatatgaacaggctg

SEQ ID NO: 62157 - DNA, 122 bp, Homo sapiens
accccgatctgggagaaaaggtggcttgagctgcacctcaaagatgggctctatctcagccgggttgcaagtgcacagggctccccgcgggacggagacagggagttgggaggaaacgcaac

SEQ ID NO: 62158 - DNA, 122 bp, Homo sapiens
gattggtgaacgtcgcctggcggtgtgtatgctttggaattcgtggtttcctctgggcctcgatacgccatccatttttgtgattgttccatgggcacttgaaaggccttcgatgaatattg

SEQ ID NO: 62159 - DNA, 122 bp, Homo sapiens
tttaaaatttcgcttgctgccttggttgctgtgatgtcacttgcccatccctagactgttcgccatggatttccctatcaaccctcagccctggcctttgatcctgtacagaagatcctggc

SEQ ID NO: 62160 - DNA, 122 bp, Homo sapiens
accactgcactccagcctggtgacagtgcaagactccatctcaaaaaaaaagaataccagcggctgggtaatttacaagaaaaaagagtttctttggctcacaattctactggctagaagat

SEQ ID NO: 62161 - DNA, 122 bp, Homo sapiens
tgtctagcctgtagggtccttgaggacagcatgtacatcaatacatatgctgtccactgtcgtgtccaggcttagtgcacagtggtacctgtatgctgggttgaactgcagtatttataagt

SEQ ID NO: 62162 - DNA, 122 bp, Homo sapiens
cccaacaggagtgagtgaataacgcaacactcaacgtttccacaaggctgcccgggggcccgctggaaagtgtccaaagaacgcagagctgaggctactgctcacgcaaggtcgggatgcta

SEQ ID NO: 62163 - DNA, 122 bp, Homo sapiens
ccgcccgcctcattcacccctctgcccgccccgcacggctccctggtggtggaggtgcagcggctaaaccttgggcttgagctgatgagtgttaatgataaacctggcttcctggccttact

SEQ ID NO: 62164 - DNA, 122 bp, Homo sapiens
gatgccatgtaggaggcaggtctgtgggtcagaggaagaggggaggacaatctgtcacagcgcatgttcacaggaaaagcctcattgaatcctcaccacacagtattttcttgtggctttac

SEQ ID NO: 62165 - DNA, 122 bp, Homo sapiens
ccaccaggagcaaggcctggtctctccttcctttacagagacctcaggaacaggctttagcggatgggatattttctcagaatccacagaaagttttgattcacaattagaaaagtgatacg

SEQ ID NO: 62166 - DNA, 122 bp, Homo sapiens
agcagctcttcactccgttgttgttgctgctgctgctgctgccgctcctgccggatgaatcggttctggtgcactggcccgatggcctccagaaggaccgcagactcatccgggtctggagg

SEQ ID NO: 62167 - DNA, 122 bp, Homo sapiens
atccatgtccggtgccgcttctctgtggcgatggtatccaggaatcacgggtgggagtcacggccacagtccctgtcgcaccagccgcctgcccacacagccaccgttcactctagcttgaa

SEQ ID NO: 62168 - DNA, 122 bp, Homo sapiens
gcaggctgtggaaaactgggcgcccccttctttcacccaccttcttacccctgtcagcgccgagatctgtagcagaggttcctggtctgaaccaccgattggcaaagaaagctgcagattaa

SEQ ID NO: 62169 - DNA, 122 bp, Homo sapiens
cacggtgagtgttacagttcttaaaggcgttggtgtccggagtttgttccttctgatgttcggatatgttcggagtttcttccttcttgtgggttcgtggtcttgctggcttcaggagtgaa

SEQ ID NO: 62170 - DNA, 122 bp, Homo sapiens
cacacttcttgtgacctgcttgcctggggtttgcattgtctgccacccctcactcactggcgggttctcttgtcccagtttcagcttttcctagtgtttcttttctgtttgggactgaaaat

SEQ ID NO: 62171 - DNA, 122 bp, Homo sapiens
ccacagacccaggctccccagcctgacctgcaaatccatcacgtagcaaagcaggacttccgcatgctttccgacccacgccgacatctcgggtgtgccaaacaatctacctctgcgcaaga

SEQ ID NO: 62172 - DNA, 122 bp, Homo sapiens
agaagttggacaatgactttggagcatggcctagtaagaaccggcgtttccctctcttttcggcattggtgatactcttgagagcaacaggtaggatgttcacacacaccattgtggcagcg

SEQ ID NO: 62173 - DNA, 122 bp, Homo sapiens
aatctgaactgaaaaaggacttagggttcacctgactatacccctccatggcaggacgctcgggccgagggacagctgcccagagcctctggttcagatggacacctgaggcccagggtcgg

SEQ ID NO: 62174 - DNA, 122 bp, Homo sapiens
ggtagctttcgcccctgtgctgaccacatgagagtgtctgtatgtgagtccatgtctctgcgggtagggtggttcattaggcttacctccaaggccttaactgcaagggagtctgccctgga

SEQ ID NO: 62175 - DNA, 122 bp, Homo sapiens
ggaggcacacccgggcaaaatcacccagatgggagctggggacggggaagtggacaaacccgacagatatagacacactcaggggcacagacacacacccgggcacagagtcggacacacct

SEQ ID NO: 62176 - DNA, 122 bp, Homo sapiens
taacaaccttaaattctaggtaggcctgcctgatgtcttgtttttatatttgtgggcagtcggaacacttgtattcagaatatgctggaatgctagtctctcaatttgtgaacacgggggag

SEQ ID NO: 62177 - DNA, 122 bp, Homo sapiens
tttgagggcaagaatgagggtaagttcaggagacattaggacacatactttacgtatctacggtgcccctgtttttgggaacaaaaatgaagccctgcatcctctgtctgtgggtgagatga

SEQ ID NO: 62178 - DNA, 122 bp, Homo sapiens
cttctttgctccttaatcactagctcactaggcccacagaacaagacagggtccgccccccgcccaccgccgccccccggtcctggcctgtgaccggcccacagcggcgctcactgcctgtt

SEQ ID NO: 62179 - DNA, 122 bp, Homo sapiens
gtttccggcagttttacttccgtttgtttaacagctggcccggaagtttaagtgaatatgcggcttgggctccaaaagttgctgtacggtattttattttaaagtagaaatctgtccgcttt

SEQ ID NO: 62180 - DNA, 122 bp, Homo sapiens
gaggggctgtgactggggaggagtaaggctgacctgcacccttaacctggagggtgacctcgagcaaaactggaacttctaatcccctgtagcaggaccactgtgacaatgagaccgctggg

SEQ ID NO: 62181 - DNA, 122 bp, Homo sapiens
gggccgctccccgggagagccgagcccgcccgtgcgtcttcccccgcgcgcccgcccctgcgccctgcgcccgccccagcccagcccagcccagcccagcgcggtcgggctcccgctccggc

SEQ ID NO: 62182 - DNA, 122 bp, Homo sapiens
taaataaacatttaggtgaaacaaagcttccatttccaatcggcctaactctggtattagcgttggcaggggccatgcaggaggggcagtgagcagtggtggccgcgttgccgacagagggt

SEQ ID NO: 62183 - DNA, 122 bp, Homo sapiens
tctcggctggggacctccccagcacaccgatcccacaaactctccacgcgcacaccccctcgcccacagacacaatgaaacacaccgaaactcaagcacgcgcgcgtagcccgggacccgag

SEQ ID NO: 62184 - DNA, 122 bp, Homo sapiens
agagggaacaagacaagatgacagttaggagaaactggtgtccaggatatgccatcctagcgggtgctgacactgagattcccaggccaggcaccccgtgctgcaaatgctttgcagcttga

SEQ ID NO: 62185 - DNA, 122 bp, Homo sapiens
agcaggccttgtagctcatccacggttacacagaggatctcagagccaaaattccatggccgatccgtcttgacttcaaagcgcgatctatttccaccaaaccacggaaccatcgacacgtg

SEQ ID NO: 62186 - DNA, 122 bp, Homo sapiens
tcctttctgttccgggaagccagtatcttttcctttatcagattccttttttaccaacagcgggaatggtaatggtgaatggatgcagggttttaaaatcagccaactttgttctgacttcc

SEQ ID NO: 62187 - DNA, 122 bp, Homo sapiens
ttagtgtggatttcagcaaaacctgatcatcccacccagaagaccttctcatcaatagatcgcccttaaagacccattgtaaggtcataaaaaacctcggccacctgcacaaagatggtgcc

SEQ ID NO: 62188 - DNA, 122 bp, Homo sapiens
tcaccgtgccggcagccttggggccagcaggagcctcctacgcaccggactgcccagtggcggcgtccgcttgttaaacctccccgggtatcttccgggcgggactccctggccaggcatct

SEQ ID NO: 62189 - DNA, 122 bp, Homo sapiens
tggaagagggcggggagagccttctagttggcgagtgggctttaggacccaacgggaacccgtgcctcttgcagcagcctaacccagaagcaggggggaatcctgaatcgagctgagagggc

SEQ ID NO: 62190 - DNA, 122 bp, Homo sapiens
acaaatcatctatatttttttcagcgcatcatgtctatttttcacgtagcaactcccttccgggcattcggaaaacgctcctcgtcggatatttctacccacaggatgctctttctgtttaa

SEQ ID NO: 62191 - DNA, 122 bp, Homo sapiens
cctcctgggacaaaagtccagacagctggttttatgaaaggtgggagcatagcgccaccccgtggcagttggtgtgagtgcccccagcttctggaacggcacccacaggtgcagttctgatt

SEQ ID NO: 62192 - DNA, 122 bp, Homo sapiens
agcatcaggcaatgctattggtgccaagaactggctctgcctagaggccccaccaagaagcgaaatccctttgctcagaagtcaggttacattacagaaagaaatgaattttaaacattcca

SEQ ID NO: 62193 - DNA, 122 bp, Homo sapiens
gattgaggctgagtgataccagtgtgtatctgctggatacaaatatcacttctgtcattccgatggccatgtgtatctcttgcttaggtagcatttctggcctgaaccagtgataggctata

SEQ ID NO: 62194 - DNA, 122 bp, Homo sapiens
ctttccagccccgagagggacctggttcctctgcccaggcttctgtcactctgtcacctacgctatgccctgctgtagtcacaggaggtgtagagaggaccccgggacatctgaaagccagg

SEQ ID NO: 62195 - DNA, 122 bp, Homo sapiens
caggtacttctggtatagaaagcgcttttccaattcatagatctggtggttggtgaaggccgtgcgcgactttcgccgcttcttaggggtctgccgctgcccaaagatggtcataccgtcgc

SEQ ID NO: 62196 - DNA, 122 bp, Homo sapiens
ttttttttttgagacggagtcttgctctgtcgcccaggctggggtgcagtggtgcaatctcggctcactccaagctctgcctccggggttcacgccattctccagcctcagcctcccgagta

SEQ ID NO: 62197 - DNA, 122 bp, Homo sapiens
gactgggaaaggcactgttggtgacatcaccgatagggcgtttctatgtagatgaggcagcgcaggggctgctgcttcgccatgaaggatttcccgtgctgtaggagcaagtccgggaccgc

SEQ ID NO: 62198 - DNA, 122 bp, Homo sapiens
atcgtcagttgccaggccatgaagagagtcaacggaaataagtttttattctagggcacccgctctctctcaggtaaaagccgcgccccaatcaggtactgccgcgccagggccgcgggaca

SEQ ID NO: 62199 - DNA, 122 bp, Homo sapiens
gggtatcatatcttcactgaattgacctgacgcgatgacattgacaaaggtggtcttgcccgagtactgcagccccacgagcatcagctccatctcctccttccagaagagcgaacggaacc

SEQ ID NO: 62200 - DNA, 122 bp, Homo sapiens
gaggccactcgcttcaggtctcacctggtgctgggcacctgctatctactcggtgctcagcgagcgtgtggcaagggaaagagcgcatggccgctgcagaggcccgggccgaggtgtgaggc

SEQ ID NO: 62201 - DNA, 122 bp, Homo sapiens
caaataacaatagcttaggtttaccgagaggttgttatgtgacaagcactgtttgttttacgtaaatcatcgaggtaaatgctcacaacagccctattaagtaagtactattattataaaaa

SEQ ID NO: 62202 - DNA, 122 bp, Homo sapiens
ttgctctggcatccaccacgccttggggtgcttctctcaggcacacccatcccgccagtccgatctctctgctggtgttccttacagagctgagagtggacagatgaggccaagcaaaaact

SEQ ID NO: 62203 - DNA, 122 bp, Homo sapiens
tggcgcggccttttaaaggggatgtcttcttgttaaatgggaccccgctctttcagggcacggatatctcttttaaggagatgctggggcttctcaaaggcacgtgcagcttcttagcatca

SEQ ID NO: 62204 - DNA, 122 bp, Homo sapiens
cccctcctcttccacctctgttttttcccaacttgctttaggattagcctccatctctctcgaccccaaacagtggaatttggctgtgccttgggtcgtcttgctttgcaatatcgcctata

SEQ ID NO: 62205 - DNA, 122 bp, Homo sapiens
gccaaaacaaacagacaaaaaactgtcattctcatatgaccacggactctgcgccccggccgcaggcggaggacagggaggagcgcacacgagaaagctcccacgcgcccgcgcctcgcctc

SEQ ID NO: 62206 - DNA, 122 bp, Homo sapiens
tggcttagtcccaggaaacagtcagtctacgcggctccgtgccccggggtgtaatatgcccgggaggggcagcgcttggctaccccaacccttcctcctcttctgtactagtccgagcccgg

SEQ ID NO: 62207 - DNA, 122 bp, Homo sapiens
ctcaccttgtcaccaggggcaccagcagggccaggaggaccaatggggccagtcagaccacggacgccatctttgccaggagagccatcagcacctttgggaccagcatcaccctaaagaca

SEQ ID NO: 62208 - DNA, 122 bp, Homo sapiens
ttgccggtggggcctgtgggactgcagggcctggggtctgggaggcggccttgtccctgccgctgcagccacgagctgaggtctgtgttgggagggtgagccccagctgaggtctgtggggg

SEQ ID NO: 62209 - DNA, 122 bp, Homo sapiens
acccctgccatccctgcagtcgctggcatcctgttcttctttgtgatggggaccctgctccgcaccagcttcagcgaccccggagtcctcccacgagccacgcctgatgaagccgccgatct

SEQ ID NO: 62210 - DNA, 122 bp, Homo sapiens
tttcactgtttgttgagacagcccaggcagcatcttgggggctaatcccgggggctgagtcgctggagaggggtcaaggggagtggcctgtggctgccattagtgcctgtccctgtggcctc

SEQ ID NO: 62211 - DNA, 122 bp, Homo sapiens
agtcacgcacttgcaggccatctttgccattatccaagacggtgagccgtgcagcctcatcgtttccaggtttcaatatggctccccgcgtcaccgaaaaggttaatctcagaaactaactt

SEQ ID NO: 62212 - DNA, 122 bp, Homo sapiens
tcgcaggacctgggcggggctcgcaggggctgggcggcctgggggcggggctgggcggagcgcgcagccgcgcagcggtgggaggactgcggggctcttgaggccagctgcagagcttgtgg

SEQ ID NO: 62213 - DNA, 122 bp, Homo sapiens
ccccggtgctgcatccagaaggttaccccaaagctgagcacacgccctccaaggtgaggccgacggctgggcgcctgtggccagcacggggcaggacctagtggttaaggacgtgggtctgg

SEQ ID NO: 62214 - DNA, 122 bp, Homo sapiens
cggcggcgcgaggctatgcgcgccgagggcgcccccgcctcaccgcccagcaccggcacgcgcacctgcacggtgactgaaggcaagcacgcgcgcctcagctgctacgtgaccggcgagcc

SEQ ID NO: 62215 - DNA, 122 bp, Homo sapiens
caatgggagcgccgttttggggagacgggcccgaagaaacattgggggtgctcgcccccgcgttcgtcgccccgccccgcgcgcccgcgcaccccggccccgcccccgcgcgccgtccgtga

SEQ ID NO: 62216 - DNA, 122 bp, Homo sapiens
gggtgggcagggaggctgactgcagccccgaagcccatcgctgcgtttcctcggtgtctgcgataaacgagagggctcattccctgtaggagaagtgagctgaaaacactttcccgcaagac

SEQ ID NO: 62217 - DNA, 122 bp, Homo sapiens
cccctccccgggaggaggtgggcttcgagtcacgtgacccgtgccctacgggagggggtgcggtcggggacccggcaggaggcggccgagaagagaggaccgtgggggcgttcgcgtggctc

SEQ ID NO: 62218 - DNA, 122 bp, Homo sapiens
gctggtatcaaagggagggcaggcagaggactgggcactggatgtgatgcctggactgagcgttcccacagggtagggttgagtctcagaggaggctgcttcctctccctggggctaatcag

SEQ ID NO: 62219 - DNA, 122 bp, Homo sapiens
tgcagatttaactactgtgagttgttaccttatggaaaatgaaaatcatgcgcctgtgatcgcgccattgcatggatcgggttattggtaagacgccttcataggcagtgaaaacgatgcct

SEQ ID NO: 62220 - DNA, 122 bp, Homo sapiens
gctgcatctaagcctctggcagatgtttcttctgacctccaggtacatgtggctgggctccgaaaaacccgtgagacttcagtccatccctactgcaaatgacagccatgtgtctgcactag

SEQ ID NO: 62221 - DNA, 122 bp, Homo sapiens
gcctcttcgaaaacccgactaggcgcaactcagcgttcagcagggccgggagcgccaggtcgtccccggggcccgggccccatgactcctgccccaaagcccactccacccgacctcccttt

SEQ ID NO: 62222 - DNA, 122 bp, Homo sapiens
cgctgcctcagtcgtgagacaggctctgagcgagactccaggggcctcagacttctgggccgagtgtgtcactttcctggaggctccggcgaaagagggagacactggatgtagtaaacatg

SEQ ID NO: 62223 - DNA, 122 bp, Homo sapiens
ccaggtacttggacattgtggcctagagaggttaagtaacttgcccaaggtcacacagcacgtaactaagccaagattccatatctgggttaataaagttatgtacagggacttgtgtgttg

SEQ ID NO: 62224 - DNA, 122 bp, Homo sapiens
tagaagcagacatgaaagctaatggtctgacccagacaagaggttataactaaaggcacccggagactgcagaagggccctgggccactcctggcaatcagggtagccttagagggtgtcag

SEQ ID NO: 62225 - DNA, 122 bp, Homo sapiens
actccaggacgcgcagggcgggctcccttctgtttgcaggggaattcccctaggacagtacgcgcctctcgccaggttttcaggactgacgggcggggcggtcgaggagggggaagagccgg

SEQ ID NO: 62226 - DNA, 122 bp, Homo sapiens
tggaaagttgtctatgcagctgtgctaaaacaccagaagcagattgcagctgattgtacccgggtacagcatcactccagcccacttagagcagaaacccagttttggaaacaacactgctc

SEQ ID NO: 62227 - DNA, 122 bp, Homo sapiens
gtgcttttgtgagtgctgcaattccttcaagtgtaattgcgctactgcatttttgttggtcgcagggaaggggtgtgcctgcaaatgtccgcgtggttcgtcctcagcctcttcctttttac

SEQ ID NO: 62228 - DNA, 122 bp, Homo sapiens
ccgtccaccggactcgtgggcgcccgcactgactgtgatgtagtttcctgacctctgacacgtattgtctcaagattaaaggtaaaaacgggactttttcagcccactcgggtaaaatgccc

SEQ ID NO: 62229 - DNA, 122 bp, Homo sapiens
accttggattatgggagtagcagggggcttccagagtagagggctccctttcctgatgtgcgtttatgtctcctcctgtctccttgcatcggcgatttccagtgagatgagtcagaaaccgg

SEQ ID NO: 62230 - DNA, 122 bp, Homo sapiens
ttgttgtttctgggctggggtaaaatggtgaatccaaagaaccacccttcctctgctctccgtccccttttctcccctagaccccctcacttcacagccgcccctacctgctttagacccgt

SEQ ID NO: 62231 - DNA, 122 bp, Homo sapiens
caatgcagccagacattcggagccactaccggtctctgcgcattggtggtagtggttccccgggcccagctgtcttttcttttatctctttgtcttgtgtctttatttttacactctctcgt

SEQ ID NO: 62232 - DNA, 122 bp, Homo sapiens
ctgctcagctacacgaccaccgctgggatccgcacttccggaggaaaatggcgaagtgggcggggtggcacatgcgtagagagaacctggttcccaaggtccttgatggtaaacatcattgg

SEQ ID NO: 62233 - DNA, 122 bp, Homo sapiens
ggaactgggccgtagcaaggtgtgttccttttccactctgctgtggggccaggaggctgacggctttgcacagtggcgtctgtagggtttggagagtggcacccataggagatgagatggag

SEQ ID NO: 62234 - DNA, 122 bp, Homo sapiens
caacacattattctcttagcattcaggattaattcagtttcactgggctaaagttccttccggaggctctagagcagtatccgtttcctggccttcttcagcctctagagcttcattccttg

SEQ ID NO: 62235 - DNA, 122 bp, Homo sapiens
caaggtggtttgggaccacagcctgagaaagcccttccagctctggagtcataaaaagggcgggagccgtttctatagcgacgggaggagggcgtggccgtcccttgccctctgccgggctc

SEQ ID NO: 62236 - DNA, 122 bp, Homo sapiens
aaatctcccctctccccccataactaataaacaataaataaataaattttcctaaagttgcgggaagaaggcatgaaccactggcatctgtggtgtagctttcggatgtcccagggggtgtt

SEQ ID NO: 62237 - DNA, 122 bp, Homo sapiens
agtgaatgattacagatatatacaggtctgtttggccaagaatgagtatacagacgatctcggcatgcagtgtcaggttgaagtgcaaataaatgtgagatgccagagcactcatcacattc

SEQ ID NO: 62238 - DNA, 122 bp, Homo sapiens
gggagctcgcgcctttgcgcgcgggcttctcgcgccaccctgtggcttctcttggaggcgcggtcttggctctccggactcccttcggccggattaggcgaccccttccctttctctgcccc

SEQ ID NO: 62239 - DNA, 122 bp, Homo sapiens
ggagaacaggatagtttgtgcttccttttttccattttaacttttcctctaacgggcatccgggcaagaacagggttcagtagtttgggaagggagctgggggaggcagtggcggctggagt

SEQ ID NO: 62240 - DNA, 122 bp, Homo sapiens
ctagtgtctcttaactgctgtcaaggagtttcaagttaaattactcctctaatgaggtcacggcaagggaatagtgagatgagaaaagtcttccagcattacctacctgtgcccgttggttc

SEQ ID NO: 62241 - DNA, 122 bp, Homo sapiens
agggaggaacgcacagcatggtggacggctgggagctttaggagggggcactccgggacgcgtggtggtggcgtctggaggaaatggagctaagcgggtggggtcctgaggtatgtggaagg

SEQ ID NO: 62242 - DNA, 122 bp, Homo sapiens
tctgaacccttagcggtgagtcctcccactccagcctggtgtccaagcaacaggttacatcgctgctgcttcagcaccttgttaacgcgcctgaggttgccatcttgtttaagggcaccttc

SEQ ID NO: 62243 - DNA, 122 bp, Homo sapiens
tttcccgctctcgctggcccgctgtgtggtctcggaggcggaatttgggcttctgaggagcgcagggcaggcggggcgagaatatgtacgggaagggtcggtgccctcccttgggactcccg

SEQ ID NO: 62244 - DNA, 122 bp, Homo sapiens
cgtgatgaaagtgacattttggccaggtgaaacctcaagctggtacaggcagctaaaacacgggcgtcgtgccctggagacaccgggggtcctgaggatggggaaggggctccctgctgcgg

SEQ ID NO: 62245 - DNA, 122 bp, Homo sapiens
tggttgatctctgcagaaaaccccacagaagccccaaactgctcccgctacttccagtttcggtgtgagaatggccactgcatccccaacagatggaaatgtgacagggagaacgactgtgg

SEQ ID NO: 62246 - DNA, 122 bp, Homo sapiens
tggacttataaacatgtgtaaaacacattctcctcctaccctgggaattcccccagttaacgtctttaaacaatggtggtgtatgtggtacttcatagtttacagagtatttttatagctgt

SEQ ID NO: 62247 - DNA, 122 bp, Homo sapiens
ggggagagcagggcaggactcagatgcttggtggggcaggagagcctggctccagccccccgaggaacccccacaccctaacaccccctccagggcacactcacaggctccagcacccccag

SEQ ID NO: 62248 - DNA, 122 bp, Homo sapiens
tgtggagatgccgtgtgtgcttttggggctgtgtgctccgcagggcagtgtgtgtgtccccggtgtgagcaccccccgcccggccccgtgtgtggcagcgacggtgtcacctacggcagtgc

SEQ ID NO: 62249 - DNA, 122 bp, Homo sapiens
ttgggagggtagaggggcgacgcgggggagggcggtccggggagctgaatggcctcaggacgccggccgaccgggtgtctgcatactgtgggcggcctttccaagtgtggggagcggcctcc

SEQ ID NO: 62250 - DNA, 122 bp, Homo sapiens
aattttcgctgctcttaaaattttttttaatatcattgcttcccaattgactcacaataacgcagacatagggactgctggagactgtgaccttaaacagttaaagatgtctgcatatacga

SEQ ID NO: 62251 - DNA, 122 bp, Homo sapiens
ttttccttggttatttggtgctcggtccttagtgaatggtttccgctaggcaaaagcaatcgagccatcgtaacatacttgtgcgtccgcccagaaatgtgggcgtcagcgtttttggttcc

SEQ ID NO: 62252 - DNA, 122 bp, Homo sapiens
cccacggttttctcaactatttttacattttaagtttttatcattaaatcttaaatccaccgggagttgtttcagtgaaagactgaggtgtgcatctgtgtatgttttcctccggatgagca

SEQ ID NO: 62253 - DNA, 122 bp, Homo sapiens
cacatgtaaactacttgaactccatttcatcttttttcataccatctctaagattgctgccgcatttgcttgttaaactgaaagcatgtttcttgcaaaggctctattggaaggagcagatc

SEQ ID NO: 62254 - DNA, 122 bp, Homo sapiens
caggtccggagccctgccctgcgggaacgcagctaaggctcggtgagaaatagagcgcagcgccggtgggctggcactgctgggggacccagtacactctccgcagccactggcccgggtgc

SEQ ID NO: 62255 - DNA, 122 bp, Homo sapiens
tgccggaagtgggcgggatcgcgttgcaacgcggcaagggcgatgagagcgcggaggaggcgctggtggccgagtttggggcggggactgtccccaatgctccgcagcaaggttactcgacc

SEQ ID NO: 62256 - DNA, 122 bp, Homo sapiens
ggtagatgtagatacagtttcctgtcatttgaattcattctaatttctcttcaaggccagcgagattccctgattgtagaaatcagttaacattagttaaagccacctcccattattcccct

SEQ ID NO: 62257 - DNA, 122 bp, Homo sapiens
cgacagccagtgaacgtgttcctctcctcgggcaggcccccgagtgtagaggagctgcttcgggaggcgcagctcaatctccagagcctgttgcaaggtaccgagagggaggggggctgcgg

SEQ ID NO: 62258 - DNA, 122 bp, Homo sapiens
gggggcgggccgggggcggcggggccggggcctggattgggccgggccgaggcgaagggtcgaaatcggcggcctccgattggcggagcctcagtccttcttgatgcgcgctgggattggcc

SEQ ID NO: 62259 - DNA, 122 bp, Homo sapiens
aagaaggtaggaaagacagtcttgactggcctacatcaccacttctctatgccctggcagcggccacatggcgcagatagaatctgtgtgcctggcagtgggggaacagattgtgagactgc

SEQ ID NO: 62260 - DNA, 122 bp, Homo sapiens
gatacgcctctctgcaatgctattggtcgaaatgcatgtcaatctcccagcgtctttatccgtgttccttgactctgggcaacttaaaagccctaatacttttactttcgccacacaaagag

SEQ ID NO: 62261 - DNA, 122 bp, Homo sapiens
gaccagtgtcctgagacatgaccgccacctctccctccgcagaccgcagcccgagagccccgccccgccccgccatcctccaataaagtgtgaggttctccgaagctgttgcgtcgagttct

SEQ ID NO: 62262 - DNA, 122 bp, Homo sapiens
cgccaccagagggcggcggctccgcggaggagggccccagcctctgcgccggctcgcgcccgcagtgcctttaaaacgtgcgttggaagtagacgccacgcagcctgctttccagagtcccg

SEQ ID NO: 62263 - DNA, 122 bp, Homo sapiens
tcccttcccagccagtcagccagatcaccccacatgcacgtccactgggctcagaccaggcgtgtgggagtctcctcagtccccaagttgtctcaaaaactaggttatacaacatccttcac

SEQ ID NO: 62264 - DNA, 122 bp, Homo sapiens
aaacctgctaaggagatgctgccactaaggacgtattgtgaggagcctgaaacctcaggccgaggatcacgggatttatggaagacggtggaatccctgcgtatgttgtggacatggccaca

SEQ ID NO: 62265 - DNA, 122 bp, Homo sapiens
ggctggatggaggcgcggaggcggtgccgcgggggcgggacagagcctgactgggcagagcgtggagggcggagactcccaggcgagggggcgaggcagggtctgattggccagcacgcgga

SEQ ID NO: 62266 - DNA, 122 bp, Homo sapiens
acctctacctacccaatcaagggcaggcccttattttcccttcttgggttccccagaggccgcagtaccctagcagaaacagttactgaggtggctgacagggtgtcccttcccaaatcacc

SEQ ID NO: 62267 - DNA, 122 bp, Homo sapiens
tgcattagaccaataagccggtgtaaagcactgtgagtgtgcaatggcatcgtagagaagcgccatctagcccagactgagggatgaggcagttttcctgagaaacatgactccaactaatg

SEQ ID NO: 62268 - DNA, 122 bp, Homo sapiens
cacagacctgggtgggaggctgagcactgacaaacatgctctccttagccaaactccagccgggctcctcagagccccttctcgactaagcctcagtcttggcctaaagactccaacaaaca

SEQ ID NO: 62269 - DNA, 122 bp, Homo sapiens
cagctggctgacttggtggtagcttcccctgcagagatgagaacaggcaggctcttcaggcggatgaagcccgagccccttcctgtgtctttgtcaggccagactcagagcacaaagccttc

SEQ ID NO: 62270 - DNA, 122 bp, Homo sapiens
ctgtccttgggtccgatgcggggctgtggggaggtgccagggtgtgggcgcagcagggagcgggtgtgttaggcccccgcccatcccgcgcccgagccccatctggctcgggctggcacctc

SEQ ID NO: 62271 - DNA, 122 bp, Homo sapiens
gcctactcggtcgcagctaaagcccggagcgtgggatccgggcccggaggaacgggatggcgaacgcgagctgcgccgcggccaggagcccgccgcaccgggcatgctcagtggcgcggccg

SEQ ID NO: 62272 - DNA, 122 bp, Homo sapiens
cttccccattccttctctccccgttcccgtttctccccccaaccaccacaccccgccccccgccccccgaactccaagcagcaccaagtctgtgccaacggctaaagtcagtagaaaggagc

SEQ ID NO: 62273 - DNA, 122 bp, Homo sapiens
atagagtgaagcacgctacgcataatccgtttggggattccgaaccccagtggctctgtacgcacccaggtcgctggagcaggaggtcccagatccccgctgtaaggctccgtgggcgagcg

SEQ ID NO: 62274 - DNA, 122 bp, Homo sapiens
ggaagggtggcctgggtccctgccctgggaccaggcatgatgcatcccctccccccaggccgtgtgcgactgcatctccccaggcctcttcgatgtcctcacatggctgggttactgtaaca

SEQ ID NO: 62275 - DNA, 122 bp, Homo sapiens
cgtgtggcccttcctatagcccgattcgcccgggccagagcgcgagccggggcacctgggcgttggggaccactctgctccccaaaggttgccgctacccgcccgtcccacggctcccgggc

SEQ ID NO: 62276 - DNA, 122 bp, Homo sapiens
ctcttagagacaaacactgatgtctgaagaatttaaagcctctggtacctacaactacagcgaacattaaaagcaatccagtttctactcagataacccaataccccacttcagttcctatc

SEQ ID NO: 62277 - DNA, 122 bp, Homo sapiens
cctgaggggctcacctggatggggcctgcagtgcgttcccgctttgcttccttccctggacggcccgctccccgaaacgcgcgcaataaagtgattcgcagagctcgtgtccggctccctcc

SEQ ID NO: 62278 - DNA, 122 bp, Homo sapiens
ggaaatccgagcggctcctctagcctcggctgctgccgagctcgctcctccccgtccgctcgcctggctcagctctgcacgccccccagctagctcccgctctagtcacctcttccccgcgc

SEQ ID NO: 62279 - DNA, 122 bp, Homo sapiens
atttcacgggaatgtcaccaggttctgttccatccacttggacagtaactattcttggaccgagtctcgacacctagaggtgaagtttgtgtgtgttggagaggaacccaggtaaggcactt

SEQ ID NO: 62280 - DNA, 122 bp, Homo sapiens
tgcatcggtctttggtcagccttgttgccagagcgggaatttgaggctgacgccagcttgcgtcgaaattccctgtggacgccgagatcacaaagattcgaatgctgcgctgggggtgggta

SEQ ID NO: 62281 - DNA, 122 bp, Homo sapiens
agcgcggcctggctggccctcaggtcgcagtccagtgcgctggctgtttgccgccgccgccgggccagcgcctcctccaggtctccgacctgtgcccgcagcttcttgttctcccgctcaag

SEQ ID NO: 62282 - DNA, 122 bp, Homo sapiens
ttggaataaacgacagagacacggaaacctccgaggtttccagagcggacccggaaatgacgccaggggatgcaaacccttctgcccctttttgctacccctgaagcttactgttagtggtc

SEQ ID NO: 62283 - DNA, 122 bp, Homo sapiens
ggcggcagtccatgggcagtaatgtacttcttgtaagcctcacgaatgatcttgaaggctcgagcagtggcatagggtatgtctgtaacagggtcccggtatagggctggacgatgggtcac

SEQ ID NO: 62284 - DNA, 122 bp, Homo sapiens
agacaggctcacaagccaaggaatgcaggcagactccagaatccagaaaagctaaagaaacgggctctccccaaaaggatacagagagaaccagctctgccaaccctgattccaccctgatt

SEQ ID NO: 62285 - DNA, 122 bp, Homo sapiens
gccgcgtggcgaacagtgttccccaggatctgggtcacgtctcccggcgtccggcgggatcgaaggagagcttgtcctcgagctgcagcagtagagactgaggttagacctgacgaagggag

SEQ ID NO: 62286 - DNA, 122 bp, Homo sapiens
gggcccctgtcgctcctctctaccattaggcttcaatgcctttcacaaacctcatccctccgacttattaaatggggcttcttggtcccaaaatctggaggcccatggttcagaaatttggg

SEQ ID NO: 62287 - DNA, 122 bp, Homo sapiens
gtgcgacaagcgtttcacgcgtctggccaacctgaccgtgcaccagagagtgcacttgggcgagcgctccttccagtgcgcccagtacagcaggagattcatgcagaagcccggcttcctgc

SEQ ID NO: 62288 - DNA, 122 bp, Homo sapiens
caactttgccactccacgatggattgattatggtaaagtggcttcacagtgtagctgtggcgaggcgagagtgaccttttccatggatgccttcgtgcgcatcctgcaacccgagagctatg

SEQ ID NO: 62289 - DNA, 122 bp, Homo sapiens
aggtatgtctaacccacgctatccttgctttgttccagggcactctcgcagggaaaacgccgcctctgactacacttggggtggttaagacgagatcttcaaatgaaaattctcaacgctac

SEQ ID NO: 62290 - DNA, 122 bp, Homo sapiens
tcttttgtgtgaaaacgcccgctgtgtgcagatctccgtcttcgtgcagggcctactgtgcgccgcaccccccttccatgcaaagcctactgtgtgcagaaccccatttgcctgcaatgcct

SEQ ID NO: 62291 - DNA, 122 bp, Homo sapiens
gcggttttatttctctccgctttggacggggcaaactagcttttgggagtgaagcgggtacgcagttatccaacaatgtctggtgagtcaggacagcctgaggctggtccctcacatgcagg

SEQ ID NO: 62292 - DNA, 122 bp, Homo sapiens
cctcgtgatccacctgccttggactctcaaaagtgctgggattacaggtgtgagccaccacgcctggcctaaattagtaattttcaagagttgtatttcaatttgatttcagggtcgttagg

SEQ ID NO: 62293 - DNA, 122 bp, Homo sapiens
tacctgccaattacccatctcagagggtcgtcagagatcgctgagccctgccagaggtgccggataaaccttagctgcctttattgttattgttattatttctgcttctattaactgagctc

SEQ ID NO: 62294 - DNA, 122 bp, Homo sapiens
accaaccaagggagggggcgagaccaaccaagggagggcgcgacaccaaccaagggagggcgcgacaccaaccaagggagggcgcgacaccaaccaagggagggcgcgagaccaaccaaggc

SEQ ID NO: 62295 - DNA, 122 bp, Homo sapiens
ggacaaacaaacaactcaacctgaaataaatacaaaggcattatgtgcttcttggtacgtcgagggtcctaattacccctcaaaaggaggtagcagggcctttccctggacttggccacctc

SEQ ID NO: 62296 - DNA, 122 bp, Homo sapiens
ccatcctgcccaacacagaggtcgcctctcaggagccacatagactcaagcaaacgttcccgccctgcgaggtgctgacgctgacacagaaaagttcccctgggggtcaggaggcaggaggt

SEQ ID NO: 62297 - DNA, 122 bp, Homo sapiens
aacggggcacaggggctacacaggcctggaccccagttctgaaggatccctaacctgggccgggcccactggctgtcgccaggaatcacaggattctacataaaaacaagatgactcactca

SEQ ID NO: 62298 - DNA, 122 bp, Homo sapiens
gggtcagcccggcccagcttctggggtctggaggattcccgtttcggcctggcctggggtcgtggggcggcccaccctggagggccccgcggggtgacccctgtcccggccgccgcggccgt

SEQ ID NO: 62299 - DNA, 122 bp, Homo sapiens
gtgttcccgccgcgcagacaggaggcgtggggccaggcagcacagccaacagcctctgtccgcgtcctcccgcggggcctcgcgcgggcgggggtgagaggggagcggcccgttgcgctgcc

SEQ ID NO: 62300 - DNA, 122 bp, Homo sapiens
tccaggtagctgcacacgcattacaaacatctcgttaatcttctcggaggtcctgcgaggcgaggcctgtggtagccctgcccttggagcactgagaattagtaaggaaatcgccgctgcat

SEQ ID NO: 62301 - DNA, 122 bp, Homo sapiens
catagcatcctccaaattgacctcaagctggttgggctcagcttcacagggcaatttgggcgaggcactttacttcctgttctttctcctgagggactggttcctctgagttctcccattta

SEQ ID NO: 62302 - DNA, 122 bp, Homo sapiens
agactgtatctcaaaaaaaaataaaataaaataaaataaagctatgtgatagaatgactgcgatggggattaggtcctcactgaaatggtgagagtggagttaaaacctgaaattaggtgac

SEQ ID NO: 62303 - DNA, 122 bp, Homo sapiens
ccttcagttccctggggagtctcttcaggtcaaggaaatctttggttctaaccacttctccgagccaggactgctgggtggtctaggggcaggagggcagaatgagggtgggtcagggcagg

SEQ ID NO: 62304 - DNA, 122 bp, Homo sapiens
tgattatgcattgcaacattgctgcctgtcagacggtgtttgcatttgacctcctcccaccgcttctccttcagaaaattttcacttgggctggatccacatccacatccttaattccatcg

SEQ ID NO: 62305 - DNA, 122 bp, Homo sapiens
aggtgtgcagtcactggagtaaacgtcactgggacatgatgtgtaattctttgtgtacatcgctgagttctgctgctaatgttgttaagaattggtgtatccatgttcaagagaattaccgg

SEQ ID NO: 62306 - DNA, 122 bp, Homo sapiens
ggatggcgtttcggggggcggtgcatgcagagaagccaacagagcagtaagcgcagcagccggagtgtggaagatgacaaggagggtcacctggtgtgccggatcggcgattggctccaaga

SEQ ID NO: 62307 - DNA, 122 bp, Homo sapiens
acggagattgttcttttatcgctgtgccgactttcttaggcagggctctccagacctgtacggtggtaagatctgctttctgaaaggaagctgacagcctgagaggaaaaccgtatatcccc

SEQ ID NO: 62308 - DNA, 122 bp, Homo sapiens
tggctcagatgttattcgggacctggagtgggtcatctttgatgaggttcactatatcaacgatgtcgaggtaagggccatgggctccccagaacccggcagtcctctcctttgggaccagt

SEQ ID NO: 62309 - DNA, 122 bp, Homo sapiens
gctttctgtggtgaagaatgttctcatggccatggcattggccgcctgagttaagagtttcgagagaaaacaactgagaggatgtaaattgtacagggacaggttgcttggggagaagttca

SEQ ID NO: 62310 - DNA, 122 bp, Homo sapiens
ttggccccttccctcaccctgtcactggtctgctcccggggcccgtctctgctcgccgtccgtgtcagtctgtccgcttgagccgggttcccccgcccactcctcatcgcccccaccccagg

SEQ ID NO: 62311 - DNA, 122 bp, Homo sapiens
gcacaaaccagagctggtgacccccagttccctttaaatcagcgacatgtcattacaaggcggaagtcctgcccgagaggacagtccccaggccttgctaagcatgcgtggtatcaagaggt

SEQ ID NO: 62312 - DNA, 122 bp, Homo sapiens
tacccaataagcaaagaattggtgctaatcaccaactgttgagtttaccattacaattgccgtttggctcagagccaccatgcacaaggggccctgatcatcacaatttgtacttcactgtc

SEQ ID NO: 62313 - DNA, 122 bp, Homo sapiens
agcccactccctccctcctggtttcggctgtatctggccgatcaggtttccccccggccacgcagtcaccattaagatagctgttagagcaaagtagtgtaaacggatagctgctttctgcc

SEQ ID NO: 62314 - DNA, 122 bp, Homo sapiens
tcatttccttaaaacataacctcgggacatggaagaataagccaactttagttactgacccggagaaccaggttatgaagggctcagctaagtctcactagctgacaatacagaattgcact

SEQ ID NO: 62315 - DNA, 122 bp, Homo sapiens
atatctcagctcatgtttcttaatcatttttctgattctaaaaagtcgatgacaaaacttcgatagaaacacagttctagcatttgggattggaggaagaagtgtattcagcattctacctt

SEQ ID NO: 62316 - DNA, 122 bp, Homo sapiens
ggcagggagccggggcaccaggacaggctgttcgggtggcggcagccaggacagcgttcccgcggcgcccaggccagactggacgggacggggcgggtcgcgatgctagagctcctcctcct

SEQ ID NO: 62317 - DNA, 122 bp, Homo sapiens
tacttcctccttctctccctccgtctccctcctcccctctttctctgtcgtgcctcaattcgatgcacttctatcaggttgtctttaaatagtgtagtgatagcccctagcaggtccaggct

SEQ ID NO: 62318 - DNA, 122 bp, Homo sapiens
cccgcgcccactaagcccgcaaagttgctggcgaaagagtccgggcgctggctgatcgagcgccgcaggccccacccccgacccccgaagtctgttactcggtctggctgaccccgccggtg

SEQ ID NO: 62319 - DNA, 122 bp, Homo sapiens
tccatacacgggagaaaaaaaatcgttcgtcgctgtgggagggctgccgggtctcgtccacgctcccttttgagcacctacagtgagcgtaggattgccacggatagcccaatccacaagtg

SEQ ID NO: 62320 - DNA, 122 bp, Homo sapiens
atcttgtgttggacatcaggagtagcctgaacttggctgagtagggctcctagaaaacatcgctgggcttggcaggtaccacattgacatgtcccatgcttgttaatgtatatttctgagat

SEQ ID NO: 62321 - DNA, 122 bp, Homo sapiens
atgctgtctctggcaaaggctctaccataggatgtgccaatttccagtccccgctcccagcgtggcctggtgtctctctgagaacaaaagcacttgctgaattctcagaggtgcagcctgta

SEQ ID NO: 62322 - DNA, 122 bp, Homo sapiens
tcacctcccagacggggtggtggtcgggcagagacactccttagttcccagacggggtcgcggccgggcagaggcgctccttacatctcagacggggcggcggggcagaggcgctccccaca

SEQ ID NO: 62323 - DNA, 122 bp, Homo sapiens
tccactgttccattcggatgaatgatgtgtggaactagaggccccctgagattttaaacacgtttctgtaacacccgcaagtagaaaggaagcctggtgagggggagaaacaggctgtggcc

SEQ ID NO: 62324 - DNA, 122 bp, Homo sapiens
ggtgtataagggggatggggaggttcttcgcccggcaaaggcggactgtgggccctggggcgcggcgggtgtctccctcccactttcctctctattccccgctaattatcactttgaaatct

SEQ ID NO: 62325 - DNA, 122 bp, Homo sapiens
gggatttatgttgcgtttccaaactgcttctgcctgtcggcgcctgtgtggaaactgcgacgagtctgggagcggctgccggagaggcggggcagaggtgtgacgtcatcgccgcggggcgg

SEQ ID NO: 62326 - DNA, 122 bp, Homo sapiens
gagcttcctcaggatagcaaagctggatttttgagcagcaccacctgctggtcctacacacgttttacttcctccaccccaaatctctttctgttggaactgcactctttcagagcctctgg

SEQ ID NO: 62327 - DNA, 122 bp, Homo sapiens
gtggagttcagatgagcatgttttattatgcttttcacctgttgaagaacattgagcaaccgttaagatccatttttctcagcactaattcaggttgcatagaatgtttgcaaagtttagaa

SEQ ID NO: 62328 - DNA, 122 bp, Homo sapiens
agtcacaggcctacctgtttatgaaaacttacttacttaaaataagagctacttttgggccgggtgcggtggctcacgcctgtaatcccagaactttgggaggccgaggagggcggatcact

SEQ ID NO: 62329 - DNA, 122 bp, Homo sapiens
cgtgggtgcgtaaggcattggtgcacacgggcgtgagtgcgcatgtgtatagtgtgtgcacgtgtcatgtgtagtgtctaagtgagtgggctgtgcatttgcaaaagtccgtgtgtattgtg

SEQ ID NO: 62330 - DNA, 122 bp, Homo sapiens
gggcagagccgtcgagccctcccggcctggtgccagtgtgagtgtgagcgaggcttcaggcgatcccagccgctgcatccttgctgtgacataagccctccgtgttgaactcccagcgcagg

SEQ ID NO: 62331 - DNA, 122 bp, Homo sapiens
cccgctccctgccccgccagggcacctctccccacaggttttccctattccatcctcagtcggctgtataggtggatgctcagtttgatgacggtatccgcctgaatgagtcatgctggggg

SEQ ID NO: 62332 - DNA, 122 bp, Homo sapiens
cagactctggtgtcaggcagatctgggtctaattcccaatttgccaacttatcaggaccccgggggcaagttgcttttagcctttctgcttcagctttccttttctgcaaaacacagacagc

SEQ ID NO: 62333 - DNA, 122 bp, Homo sapiens
ggcacgcagcctgcagagtcccctgtgcctgcctgttggacactgaatcctttaccctgacggagcggcaccaccacccaagggtgcctttctccccttgtggcttctgagtacaaacccga

SEQ ID NO: 62334 - DNA, 122 bp, Homo sapiens
aggcaaacagcaaaacggcaaacagctacggcgggagaaacaagaacattgtaagccccgcgcagactgtccctgtggaggagaaaggcacatgagcagccaaagggacggacactcacaca

SEQ ID NO: 62335 - DNA, 122 bp, Homo sapiens
tgaatgctgcccatccctcagtttttcttcagccttgaactagctttacatagagctgagcgtccttgaaacccccaggtctattttcacgtgatgcactggtgagttcagcctccctatcc

SEQ ID NO: 62336 - DNA, 122 bp, Homo sapiens
cactagtcccactgtcaactagacatctgcactctgacttccagttgctggcatctcaaacgcaacttgtgctaccctaacactggctcatccgccaaacctacttcaccccactttcccca

SEQ ID NO: 62337 - DNA, 122 bp, Homo sapiens
ttcacccagcatctcagaaactgcgcgcgggatgaacattcgggtgtttccggcaggtgacgctgccgagtccccgcagcagggggcgagcaagggactcgcggttgacgggacacggatcc

SEQ ID NO: 62338 - DNA, 122 bp, Homo sapiens
ggcctcgtggtggttcagggagagatgttcgtgaagcaagggcgtcccgtgagcctggcccgtcacccgacctctaggcttcacaaaccttcagatctgagcaacacacagtcgtgaccctg

SEQ ID NO: 62339 - DNA, 122 bp, Homo sapiens
ccaggcacacacagccacacacacatgctcacccgcataagcacacccgtgtacggttcacgcttgtgcgtgcccactcacataggtagacatgcacgcacatatgtgctcatgcccgcaca

SEQ ID NO: 62340 - DNA, 122 bp, Homo sapiens
gccgagggtcggctgcgcccctggcaaggctgtagggctggggatactgagtatgacaggcgaggtccctgctctcaagaacttacatgggagagaaggggagacaagataaacaggtaaac

SEQ ID NO: 62341 - DNA, 122 bp, Homo sapiens
gtacctgcagcagcacggaacgaatcaacgcgttaacgggtccggtgcatgagtcgctaacgccctggaagcaccagagcacaagcccgcccttggagaaaatggtgaagaagtcgagcatg

SEQ ID NO: 62342 - DNA, 122 bp, Homo sapiens
gtccattccagccactttcctgacaaactgctggcagaacccgtagcacatgaagaggaccgagttttcggcgacgtaggccataagtgccgggccggtgcccttgtagaagccccggagac

SEQ ID NO: 62343 - DNA, 122 bp, Homo sapiens
aaacacgccaccgtgcaaacccactgaacaactagaatctgtgcccaaagccctctaacacgatcggttgctcccctctcctcaacagagtcaacattttacatcctctggagagggacaca

SEQ ID NO: 62344 - DNA, 122 bp, Homo sapiens
ccaaccctcaccctcacgctcacgctcacgctcacgctcacgctcacgctcacaggctcccggctccacattcctcgcagggctccaatccggacccgcccgccttgcccttcatcctcaaa

SEQ ID NO: 62345 - DNA, 122 bp, Homo sapiens
cctcgtattcccaaaaggtctcttgggtgccctgtttgttgtgttaaggtctctcaaagccggtggccattttctgcgagctgaatccctgtgtgaaactcctcccactgtgaggtctacga

SEQ ID NO: 62346 - DNA, 122 bp, Homo sapiens
gcagcgattcagggcggcagccggcaggagggtgctgggcaggggcgcgcggccagctggcgcggaggcagatcgagccccgaggctcctcgggccgcgcgccccaacacaatctccacggc

SEQ ID NO: 62347 - DNA, 122 bp, Homo sapiens
ggaagcagcaaggctgcatcctcctgtatcccctttggagggaggatggccctgctgctacggtgatctcaaacttccagcctacagaactgtgagaaagtccgtttctgttgtttaaagac

SEQ ID NO: 62348 - DNA, 122 bp, Homo sapiens
agtccgcctctgaactgacgctgcagtggactgagggacactctggcgacacacctaccacgggctatgtgatcgaggcccggccctcaggtagggtggcaggccccacaaacggggtctca

SEQ ID NO: 62349 - DNA, 122 bp, Homo sapiens
acccggggacgcacgagaatccctgcctggagatgaaggcgcggctgcctgtgtgggggccgctcgcgggcgccggagcccccggtgtttgtgtttggggtttttcaaagtggttaagctcc

SEQ ID NO: 62350 - DNA, 122 bp, Homo sapiens
agcaacaaaaaacgtctgtgggttggagaagactcagagatcagaggccggtgggcgccgcgataaccactggaaaaaggaaaggagtcaggaagtaaagtgcacctcccactcccggaaaa

SEQ ID NO: 62351 - DNA, 122 bp, Homo sapiens
gatattaaactgtagccggaagggatccctgcctgaggctctgagcctggggcctgcccacgctttgttataaggaagattagcaaatactagaaaggtgagaaagcttccccctggctaat

SEQ ID NO: 62352 - DNA, 122 bp, Homo sapiens
ctggcgccttaggggctccagtgccaccattgcttttgctgcttttctggctttccctttcggacatgcgcgctcggagcaaggcgccctcgcactcagcttaccgcgcatgtacgttgcca

SEQ ID NO: 62353 - DNA, 122 bp, Homo sapiens
gtgcccactgctccctctcccaagctacgactacctgacggacgaggaggagcggcacagcgccgagagcagcacgagcgaggacaactcgcccgagcacccgtacctcccgctcgtcaccg

SEQ ID NO: 62354 - DNA, 122 bp, Homo sapiens
ctgcctcctgggttcaagcgattctcctgcctcagcctcccgagtagctgggattacaggcgtgcgccactacacccagcttattttagtacttttaatagagacggggtttcatcatgttg

SEQ ID NO: 62355 - DNA, 122 bp, Homo sapiens
ctggctctgcgccctgggcttacgaagcgctctgttacttagggacggggcagggtaggccggaccggcccaggactgcagaagccacctgcccagggcctcccaccaaccccgtatacctc

SEQ ID NO: 62356 - DNA, 122 bp, Homo sapiens
tagccttatccggagatacaggatgtctcgggctctccatctgccgggctctaaaatgggcgctcggtccctgggggctgcatccggaggctggggggactggtcgagggagagcgggcggg

SEQ ID NO: 62357 - DNA, 122 bp, Homo sapiens
gtgggtttatttcattttcctacaccactgacccgaatatgcccggcgccatggggactccggctttgggagaagctgacgttgttatccccaggaatagctgtcactccggtccagatggc

SEQ ID NO: 62358 - DNA, 122 bp, Homo sapiens
tcctgacgcccgatgaggcgccctcgccccccaggctactggcggcgggcagccccctggcgcacagccgcaccatgcacgtgctgggcctggccagccaggactccctgcatgaggactct

SEQ ID NO: 62359 - DNA, 122 bp, Homo sapiens
agagttttgtgaactgggaggggcttgcaaaggttatctcattccactgcgggctgcacgcgtggcaactggcaagaacaagtgaggctgagtggctgtcacaccacagagagtcatgggga

SEQ ID NO: 62360 - DNA, 122 bp, Homo sapiens
agttacaggaattttaactaaattagaaagtttgccactttgttccgtgtaaaataaaagcgtataaagccagagctcctgaaacacaggttcagctcagtttgaaaaaacaagaaaacgtc

SEQ ID NO: 62361 - DNA, 122 bp, Homo sapiens
caggcaccctcatgaagcagaggacctgggcttaaaactcattcagtatcaggaaaagagcgccgagcacgggcctattatgccaaagcttctgaaaggggcaccacgttttttgctctatg

SEQ ID NO: 62362 - DNA, 122 bp, Homo sapiens
gggcttccacccggcgggctggcgtgcgggggctggtcttcgccgagatcctgctgggagcgggctctggccccacggtgagcccggccccagcctcggtgatgcgcttcgctgccgcgcgg

SEQ ID NO: 62363 - DNA, 122 bp, Homo sapiens
gtagcaggtggtggtggtggtcttacatggatggaaggagacatcaggcagtgctggttgcggtttgctttagagcatttgtggagagttaacctaacaaggctgttttctatttacagatg

SEQ ID NO: 62364 - DNA, 122 bp, Homo sapiens
gagagtcttcagtaggccacaacaagaacccagcctttctcttaatgggcttatattggtcgaataccacgtaaggagttcatgtaattaatcactgagctgaggccactgctctcttcttt

SEQ ID NO: 62365 - DNA, 122 bp, Homo sapiens
ctgattaggcagccgcgtggcgtggcatcagcatgtgtgtcgcagactgttagctgcccgcgctggggcccacttgagctgcagaaacacacaatggtgcctggggagatggcggctgcagc

SEQ ID NO: 62366 - DNA, 122 bp, Homo sapiens
ctggaacttggggtgatgagggcaagatctgggacgcaggggcgtggtccagtgcaggggcgtggcccagtgcaggggcgtggctttcagccaaggggcgtggccattgcgattgggcggga

SEQ ID NO: 62367 - DNA, 122 bp, Homo sapiens
aatttgcttcagacagcgtgctaggtgccctccttgcattaactgatttaatgcatccaccgaactaggaggttagggcactagccagcagcactctccaacagaaatgtaacgtgaatcac

SEQ ID NO: 62368 - DNA, 122 bp, Homo sapiens
cggtctcggcggaaactagcaactgtgggcacttccaggctcgaaagggctcaaggtcaccggattctgctggccacttcttaaaaggaaaaattcctaccttaagaaggcatttactcttg

SEQ ID NO: 62369 - DNA, 122 bp, Homo sapiens
ctctgaaggctttaggcaggtactggcaagtctgggtttcaggcagacagcatgttagaacgagcaggacagggagtcacatctctcagcatttgcatctcacctactagtgtgtgccctgg

SEQ ID NO: 62370 - DNA, 122 bp, Homo sapiens
ggcggccagcagcgtgcggcccagaagcgcgtagcaggctaccatgacgcccagcggcagcgcgaagcccagggccacctgcgccacggcgctcgcccccttcaccgtctgcgtgaggccct

SEQ ID NO: 62371 - DNA, 122 bp, Homo sapiens
cccggatcttgcattattcatgaggaggcggtgcctggggaccccagccccacccacatgcgggagttccgaatgcgcgcggccgcccagctgtgattcctgagggggcggggcttagtgga

SEQ ID NO: 62372 - DNA, 122 bp, Homo sapiens
catggactaatatgctttctcttgcggagtgtcatgtcaaaggtacaacaatttaaaaaacggaagttaaaggatcatctttctaacaaatgtcagctcaactccaggaatagaagacatac

SEQ ID NO: 62373 - DNA, 122 bp, Homo sapiens
gggcggggctgggaggcccaggttgggatccgagtggcacggggcggggcctggccttggcgtgggcgggtcttggaaaggccggggctaagcctggagtaggtgggcttcaagggggccag

SEQ ID NO: 62374 - DNA, 122 bp, Homo sapiens
tgagcccactgcctccctccttcctaggtggagcagtggtctgacttcatctccaaggttcggggctctgttatcccgacactgctttccgtggcatgtgcaaggagagacagaggcgagtc

SEQ ID NO: 62375 - DNA, 122 bp, Homo sapiens
ttccttctcccttcttcaaattatgctgccatcattcatgccctagtagcaaactgaattcgaagttctctgaggcagggcatggtggctcacacctgtaatcccagcactttaggaggctg

SEQ ID NO: 62376 - DNA, 122 bp, Homo sapiens
ctgtgctttccaggtaatgcggaacacacgtgcctgcattcatactccatttatcttcaccgtccttcaaaatggatgagctaaacccacgcacacgcgtggacgggctgcacatggggtaa

SEQ ID NO: 62377 - DNA, 122 bp, Homo sapiens
ccgccgaacaaaggagcaggggcgccgccgcggggacccgccacccacctcccggggccgcgccgcggcctcccgtccaccgccaccatgaccgccaacggcacagccgaggcggtgcagat

SEQ ID NO: 62378 - DNA, 122 bp, Homo sapiens
ggcaggcaacctcacatgaagacctcagggattaaggcagtcagagcaacctctctcctgcgcctctgatggttctgctgcatagagaaaactcaaattagtagggaatctttccatgtgta

SEQ ID NO: 62379 - DNA, 122 bp, Homo sapiens
ttccacttactttaccacactctgcttcagtaaatccccaagagctgccaggttcctgcacgttctcccctagccgtgcctcgagttcagagcgcggccctcactgtacaggcctcccccgc

SEQ ID NO: 62380 - DNA, 122 bp, Homo sapiens
ctgtgcgggagccgctgtgggaggcgctgcctcagagctggtctgataccctgttcctgccggtcctcctgccacattccctgccccttcctaagtcctgtgccggcctctcccagtccctc

SEQ ID NO: 62381 - DNA, 122 bp, Homo sapiens
tggggactgaaaaataattttcatgtattaatactaccaaggatgatttggggaggaagacggagaaacagcaaggattatattttcctttgaagagttgctgggacctttcctaggttagg

SEQ ID NO: 62382 - DNA, 122 bp, Homo sapiens
ctgggccgcccccaggttggactaagcaggcgctctgtcttcgcccccgcccagggtgggcgtctcctgaggactccccgccacacctgacccgagaccgcgcgcccagcctagaacgcttc

SEQ ID NO: 62383 - DNA, 122 bp, Homo sapiens
cccgccccaggcaaagtcaataattgctctgggtagttcgagcaggtggtgtgagcaagccgtggtggcatcagaaagcacagtcctgggaaggggacggtgccggggaggatgtccgcatc

SEQ ID NO: 62384 - DNA, 122 bp, Homo sapiens
tacgtggggtcccctctgcagcccacatcccctctgacagatccctccacggaaaggctccggcacctcaacctcactctggctgcattggaaactcttctgtcgctatcggccttctctga

SEQ ID NO: 62385 - DNA, 122 bp, Homo sapiens
cgagcatgcgagagcgccaggcggccaccagggggcagcaccggcctccgccccgccccccgcacccagccataccttgcagtgtgcggtactcaccaggccgccgcaggacggagctctgg

SEQ ID NO: 62386 - DNA, 122 bp, Homo sapiens
accacacctgcctggggccttcggggagccccccccaacaggggaggcacgagacagattcgtgtgccagccctggctccttgctagccacagggcccagcaaatgcagaccctccctccct

SEQ ID NO: 62387 - DNA, 122 bp, Homo sapiens
acgccgcagtggggaactgagtggagctgggtgcttgccccacttggaggtggctccaggcgcgtgggggacacccactgctcagatgcagccacagacgccaagagtgtggtcgacgctct

SEQ ID NO: 62388 - DNA, 122 bp, Homo sapiens
attgcttcggatcttttctccaggtctgaaaaccagagggaccgtgcccacgatccccgccgtttccctgaccagcacggctgtggcgagttcgttgttcaatcccggatggctcagcaaat

SEQ ID NO: 62389 - DNA, 122 bp, Homo sapiens
cgggggtggtggcacgcatgcctgtaatcccagctaccctggaggctgaggcatgagaatcgcttgaacacagtaggtggagactgcagtgagcggagatcacgccactgtactccagcgtg

SEQ ID NO: 62390 - DNA, 122 bp, Homo sapiens
agagggcattagttacgcctctttattgacagggtgctacattctgtagttcttctctttcgggatcgccctcctcctcctcctcctcctccttcctcctctcccgccgcctgcagccggag

SEQ ID NO: 62391 - DNA, 122 bp, Homo sapiens
aatactctctctttgactcctgcagccttcttcttagtatgttaacgtccctgatatgcacgatggtgtttgttttgtaactgtgtattagggttctcagagaaacagaaccaacagtaaag

SEQ ID NO: 62392 - DNA, 122 bp, Homo sapiens
gcgggcgcctggggaggggagcgcctgggcagctgtgggcttggtggtgagcatggtggccgcgctgccagggtggggccatgccgggggtcccggccggcccaggctacccctggtcatcc

SEQ ID NO: 62393 - DNA, 122 bp, Homo sapiens
gcctcttccccacgcacagggagctctgggggcacacggtctggcacgcgagggccacggcggggctgttagaggctggtgatcatcctgaccatgtggtccagggcgccccggtcctccgg

SEQ ID NO: 62394 - DNA, 122 bp, Homo sapiens
tcaaccccaccccaccggcctgtgcttccggcctcgacgctccgccgtgctccccgaggccgctcctctgcggagctcgctctccccactggtccccagtcccgcagctacgcggcctccgc

SEQ ID NO: 62395 - DNA, 122 bp, Homo sapiens
acgtctcccagaagcccctccacgtttgaaaatgcgcctcctcctcggagacagacgcatcggtgccacctagtggctggtgggagtaacagctggtcccagtcttgcgcctggccctcttc

SEQ ID NO: 62396 - DNA, 122 bp, Homo sapiens
aaggagataggtgaaaaataaatacacggctgggccgcctgcagcaagcgcgacagtgcccgggacccccagggccactcctgcctctggtggcctcaccgcggcccaggccctcgtcccca

SEQ ID NO: 62397 - DNA, 122 bp, Homo sapiens
acttacagaaaagcaaagggcctctcaataaagaggtcattgtacacctctccaaacaggcgattttctttctcatttttattcccctgctgtgtgctgaaggtcactggctacaagccggt

SEQ ID NO: 62398 - DNA, 122 bp, Homo sapiens
acgcgtgagggactctgagacagggggcaacaggcggttacgggtgaggacaacaggaagcgttccaactgccggaaaagacgcgagcgctgaggggccaaggcagcccggtcccccgccgc

SEQ ID NO: 62399 - DNA, 122 bp, Homo sapiens
cggctaacttccgctttcttccccctctcctaggctcaaactagtcaaatcttgttcactcgaccaatggcaaatcggaagtgggcgggacttcacaagtccggaccaaagaaacgcgagct

SEQ ID NO: 62400 - DNA, 122 bp, Homo sapiens
tggtcatgaatttaaagtgagaccagtcaccatggctgtgtgtttttctccagccaaatccgaaacattgaaaggaatgggaagggagagtcctgctatttgcctgatgatgttattattta

SEQ ID NO: 62401 - DNA, 122 bp, Homo sapiens
cgggcgccgccggaagctggggcggggcgcccagcgggatgcggtgaagggcgagcggcgcggcggctgcgatgagtgcctctgcggccaccggggtcttcgtgctgtccctctcggccatc

SEQ ID NO: 62402 - DNA, 122 bp, Homo sapiens
aagccagggctgccccgtgggtggaacatcctctaatttgccaggcaggaaaggatggggcgatgagtcacccttctgagtgattcctgccgagcttcctacagaacatatccaggagcagc

SEQ ID NO: 62403 - DNA, 122 bp, Homo sapiens
gggtctgagccgggccgaccacggttgggtttaggctccgagcatctcgcaaagcgttgccgggcgagaattccgaactaatggaaagtccggtccacctgtctggaatgtctcatacaact

SEQ ID NO: 62404 - DNA, 122 bp, Homo sapiens
tgtttgaaggtgttcttcctaatgtttcctaggctgctgaattcagctctctaaaaaatgcggaatgctaaccatgactcccaggcaagtgctacaccaaagcatctattctgctggaaacg

SEQ ID NO: 62405 - DNA, 122 bp, Homo sapiens
taagatgccatacatggtgaaaaagtcaccttaccacagtgaaatgatgtgatgactaagcggacagacagatgttaatgaggaacatggtccagctgctgcaaagtagcaaagcttcccag

SEQ ID NO: 62406 - DNA, 122 bp, Homo sapiens
tgttgaaatgtttcattgatatcgatccctccttacacaggatgatgatgataatgataacgatgatggtggctaacatgtatacagtccttaggacgtatcgagcattttcctgaggaaac

SEQ ID NO: 62407 - DNA, 122 bp, Homo sapiens
ggagccaaacacttggctagcacccccagagcagagggaagagccccgaaacagaatgggcgagttcagagcagtggctgtcactctggctgcccatcaggatccctcctgagccttacagc

SEQ ID NO: 62408 - DNA, 122 bp, Homo sapiens
ggaaggcggtcattggccggggcagcgatgtttggtgtgcgagctttgcacttactgagacgcttcatccgcagggcacacatccaaagcccatgcagcgtctggttccctctcatccattt

SEQ ID NO: 62409 - DNA, 122 bp, Homo sapiens
cttgagggctcagggccgcacggcgtgaccgcacctgttgtgaggacacagtccacatcccgtgtctggtgctcctggttgaaaaagtcgggtctggaggcttccagctttttgtcatagca

SEQ ID NO: 62410 - DNA, 122 bp, Homo sapiens
ccctggggtcagtgatagaagacacggcccctgggccccaagtctgctgagctgacacctcgggctgccgctcacctgcagagagacactagaaggctccgactcccttcctggcccccact

SEQ ID NO: 62411 - DNA, 122 bp, Homo sapiens
ctccaaagcaaaacaaaacaaattcctccagccatgccgtctttctccaacccactcaagcgaaagaatggacaccagttaccagccgctgacttttgtctcagtgagaataataataggca

SEQ ID NO: 62412 - DNA, 122 bp, Homo sapiens
tggggtgcaagccccgcccatcagccatcggagggcaagccacactccaccccgcccccgcgcacaggccccgccccacttttgccccgggacctaagccccacccctatccctgtctctcg

SEQ ID NO: 62413 - DNA, 122 bp, Homo sapiens
gaagtgttatttcctttatgataaagtctctgtttcactcagagacacgctgggggatttcgttaaacagaagacactcctagtacaaaaatagaatgtgattcactctctaacaatgttta

SEQ ID NO: 62414 - DNA, 122 bp, Homo sapiens
ggatggacccccggccgagccatgttggctgatcagacccagtgcggtttggaagtttctcgccacccacctgcccccctgcccggagagagtgggtcaggcgccctcctctcggctggtac

SEQ ID NO: 62415 - DNA, 122 bp, Homo sapiens
ctgtccgcccccggccaccaagcaagccggcattgggggggagcctgccgcagccggagccggctgcagcccccggcccaagtatcaggcggtgctgcccattcagacgggctctctcgtgg

SEQ ID NO: 62416 - DNA, 122 bp, Homo sapiens
cccagcctggcttcccgctcccaagcgcgggcacctgcggccgaagacgcggctccgcagcgccacctagtggccgcccagcctctccccaaagcggagccttaggacgaagctccctttcc

SEQ ID NO: 62417 - DNA, 122 bp, Homo sapiens
acacgcactctaacccaccacgcatgcactgtcttactcctgcgggctacccgctacacacgcactctaaccagccacacatgcactgtcttagtcctgcgggctacccgctacacacgcac

SEQ ID NO: 62418 - DNA, 122 bp, Homo sapiens
cgccttccgccacgcccaggtccgcaggtcttcgctcggggcggaaaagaatcctccccgcgcactcccagccaggaggaacgccagaggccccgcccaatccctgtcgcttcattggctct

SEQ ID NO: 62419 - DNA, 122 bp, Homo sapiens
aaggcagaggctggagcgatgtgtccaccaaccagaggacaccgaggatggcgaggatggcgaggacagtgaggatggtgaggatggcgaggacaccgaggacggcgaggacaccgaggacg

SEQ ID NO: 62420 - DNA, 122 bp, Homo sapiens
cgggatggaagggactggcaaagatgaacagccgccgtgtgtagcctgtacgcatgggggcgcgaccaagttcccgggaaaacggcacgaagaccggtgggaggagcctgcagaaaggtcca

SEQ ID NO: 62421 - DNA, 122 bp, Homo sapiens
tggtggaggaccagcgttcccactgtctgcagctgtgccacctccctgtgccgggctgtgcgtgctcacgctcggctccgtctgcctttgtgcgatcagactgagagaccccccaggcaggt

SEQ ID NO: 62422 - DNA, 122 bp, Homo sapiens
agctatataactagggacttctaccatgtagactcatatttgctattttgctccaacaagcgttatctaaaataggagggctgaacacaaggtcatacaggccactttgtagactgacccca

SEQ ID NO: 62423 - DNA, 122 bp, Homo sapiens
tcagaggctcagaaactcgctctcagccccctggaggcggagcccgggagataaggttcgcgctccccacccgccccctttccttggccgaagaccagagggtggattttggatctggatct

SEQ ID NO: 62424 - DNA, 122 bp, Homo sapiens
cctgtcctggaatctagagaaagaagtagaatcacatgcagatctaaaaaggcaaccagccggacgtcataatgaggttctcggtaggagagcatgagagaatttgcttttattggccccag

SEQ ID NO: 62425 - DNA, 122 bp, Homo sapiens
ggaggctgtaaggacggaggagtctgtctgctctcaggcaccaagggggcatcctttggacggctgcaatcaatgaaactggattacaggcaccaggatgaagcggtcgttttaagttacgt

SEQ ID NO: 62426 - DNA, 122 bp, Homo sapiens
tgcagaccgccactgcttttcggtgcccgtgcacagactcggggttaaaagtgctgaattcgggatgctctgggatagcagatccttcgaaggaatttcggtccagattgtttcttgagtca

SEQ ID NO: 62427 - DNA, 122 bp, Homo sapiens
cggacctctgctgccccctggcggctacgtggacggtgactgcggccctttagtggtaggcgaactgcggctccacctgggctccggagccgccccagtcaccagcctcttgcttctcttct

SEQ ID NO: 62428 - DNA, 122 bp, Homo sapiens
tggcggcggtcgggccattgtgcggtgcattgtgggagccgcgcgagcgggcgctcgggtcgtggagggggcggtgccgcgggatctctatggtcccgcccgcccgcgggctagagcggccg

SEQ ID NO: 62429 - DNA, 122 bp, Homo sapiens
tctgcactgtgtaaatatgtgaaataacgggaagaccaaagaggagtcccctcggagtcccgtgcttgaagccagctgctggatagccagacaccgtagcttactgtggacgagcactccat

SEQ ID NO: 62430 - DNA, 122 bp, Homo sapiens
tgcctgggtcactgtggatgaaatgagagtccagaattgtctcactgctcattgggttgacggtctaatggggaaagcaaagagtaacaaaataattacaaataaataaacagtgcaggtgt

SEQ ID NO: 62431 - DNA, 122 bp, Homo sapiens
gccccttgcagcaaggagctcacagtttggcagtgagaatgctacagcgtgggatgggcccgggctgggagctcctccaaggctggagctggagctcctccaaggctggagctggatctccc

SEQ ID NO: 62432 - DNA, 122 bp, Homo sapiens
ctgcggagttccgattgtttggtttcgtcctgataatcactgtgctgtgttttccctacacgctctgtgacggggccgtccgcctccttcctgggctcctttaagagggtggtaacggtaca

SEQ ID NO: 62433 - DNA, 122 bp, Homo sapiens
ttgcactgcagctgaggatccccagacagcagcatccccacccccaggtggtatgctctgcggcaataggaatgtctgggctacagcattaaagcacattctgtttctaggggagcatggca

SEQ ID NO: 62434 - DNA, 122 bp, Homo sapiens
tagtctggcaaggaaagcagcaagagaggagtgtcaggcaggtatctggacctgacaccacgtgggcacctgcttatatgtggaattcccctccagatcatctctgcttcctaaatgtctcc

SEQ ID NO: 62435 - DNA, 122 bp, Homo sapiens
gctggacagctgggccataggatctcatgccagcctgtccttctggcttcctctgtcccacgtggctgagggtatttggtgtgggttttgttctaccctttctcatttctcccacacctcct

SEQ ID NO: 62436 - DNA, 122 bp, Homo sapiens
ggactgagcttcggaggctggggctggcctctgacctgcttgggcttggagagccctgcccgctgccctgccccccaggacaatcagggattcagaccctgaggccgaggggggaacaatgg

SEQ ID NO: 62437 - DNA, 122 bp, Homo sapiens
acccaagcggatcttgcttggcctgtatgcgttactgggggaaatggacgtgggcctgagcgcggcaggtgcgagggcgctgccccggggccgaccaccctgcggggacactgtagctgtca

SEQ ID NO: 62438 - DNA, 122 bp, Homo sapiens
tccaggtcctgggggagtgagagcttccaaagagagtcaagatgtcccattaggccacttcgccaaggactggacccggccacactgcccaccccagcccttggccctcagctgggtgcagc

SEQ ID NO: 62439 - DNA, 122 bp, Homo sapiens
ggaggcctggcttagggtccctttgaggagctgggagttttgggacggggggcgcccagacgtgacatttgtccctgtgttgtaatggccacgttacataaactccggtgtttcctccttca

SEQ ID NO: 62440 - DNA, 122 bp, Homo sapiens
caacacctgtacttcaggcacgccattccgcttcttctggtaacccaacccaaccctctacgagaatgtccttcccatgcaagctggcacctgaacctagctgggcaaatcagagcctttcc

SEQ ID NO: 62441 - DNA, 122 bp, Homo sapiens
ctggcccgcgcggcgagtgtggtctctgggctcgggaccctgacctctggccctgggggccgtgcaccggcagcgcaggattcagccttcttccaactggccctgagaccacttttgcgact

SEQ ID NO: 62442 - DNA, 122 bp, Homo sapiens
cggcgccacctggaggtcaggaccaagacgagacaggctgttcaagtcccccagcttcgccgcggccgccacgcccgaccacccggcccccgctggcgtccctagctggccccctacaggtc

SEQ ID NO: 62443 - DNA, 122 bp, Homo sapiens
atgctttcttgtctcctaacttggatttagagtcggagtcgcggtgcggccactcggggccgcagctacctcccgacggtgaccggtccctgcagcccgggagacgctggccgccggggctg

SEQ ID NO: 62444 - DNA, 122 bp, Homo sapiens
agtttaatctccggcggaggaccggggttgcgggaaatgcgccggggagtgagggcttcccggatcccccgccgccgactccgcgcgggccagcggcgcggggcgggccgggatcagcgcct

SEQ ID NO: 62445 - DNA, 122 bp, Homo sapiens
tgtctgtgcttggtgggaactattaaattacggcgggatgtttctgattagagcgaaagccgtgcctgtgcgcggccccgggggccacatgtgcccggccgcctgccccagccccacacttg

SEQ ID NO: 62446 - DNA, 122 bp, Homo sapiens
ctggatgtgtgcagcccgccactgggctacaacgtaggggtttagagctgaatgtggaaccggtgagtcaccgaggcagggcccgacagcaagtggaccagccgtcccggtttccctggagg

SEQ ID NO: 62447 - DNA, 122 bp, Homo sapiens
agtgacccccactcacaccagaaaacccctccccccggcgattttgctgccaactcgagtcggctacagacagtccagtgagtccttaattacaaggacgagagaaaagcacggtgcccctc

SEQ ID NO: 62448 - DNA, 122 bp, Homo sapiens
tctggtccttccattccagaatctcttaaccttagtggtggaaaaaataagggtctccaccgaaatctcaaaacagggaggaaggtttccggcctcccggaggccaaggcagaggcgctggg

SEQ ID NO: 62449 - DNA, 122 bp, Homo sapiens
aactgctccatgtggggtatattctacccatcctgggctgtgggaaaggacttctgtggtcgaatcagtctgagaaagctgagtcaaagctagaaaggtgtttcactatataagttttcaga

SEQ ID NO: 62450 - DNA, 122 bp, Homo sapiens
atcaacaaatgcttgttttcaggcgggtggtcaggaaatcaagtgagcagcctgaggtcacgcaactagagggtgaccccagcaggactggactgtgccctgccacctccaggccacccctg

SEQ ID NO: 62451 - DNA, 122 bp, Homo sapiens
gccagggtgaggtggggagtgggagtgtcagccaggcttcaagtgggggtgtgctggcagcgtgattgtcctccagggcaccagagggtccaggccttggcatgccccaggtggcacatgct

SEQ ID NO: 62452 - DNA, 122 bp, Homo sapiens
acaacaacaacataaaagatgtaaggtgttaactccttgttaggcagtagttttctatatcgttttgcctgaaatttttatccagatgcaatgtggttgaactagcatcaccatggtaacta

SEQ ID NO: 62453 - DNA, 122 bp, Homo sapiens
tgccttctcctgtcagtgtcgcaccccactgggttcatccttccactttcacacttggggcgcggggaagggctgaatgcaggcaccactggtcacgagggcgtgactgggcaattcctcct

SEQ ID NO: 62454 - DNA, 122 bp, Homo sapiens
cggccacgcctcttataggcccggaagtttaccccaccctgcaccgtgattcaccggaagcgctctagggaaccctggagcttccgcgcctgcccagttttgctccgaaagacttaccgagg

SEQ ID NO: 62455 - DNA, 122 bp, Homo sapiens
taattcaagccttcagctccagccaatttggtctaaccaacacccaagacaccttatacacgctcacgtctgagcctttagccaccacatatggctgtacagtctgagtgttacaccaaggc

SEQ ID NO: 62456 - DNA, 122 bp, Homo sapiens
acagcttccaacccccacaccccagcatccaatccacacccagcagacccttcggcatgccgccctctaccaggaagccagaggcctaggagctcgccatccatatttatttgaaaaggtca

SEQ ID NO: 62457 - DNA, 122 bp, Homo sapiens
aagggaggcgatcgataactccggtgtgccgctgactgttggattggctcgaacttctcccgccaggcctaacctactcccgcgcactcctgggcccgcccagccgccatcttggtctagga

SEQ ID NO: 62458 - DNA, 122 bp, Homo sapiens
acttgctgagagaactttttgtcggaatgctgatctttccttatggtaccagggaacaagcgttctgtttctaaataaacattttacatataacacagggtttctccatgttggtcaggctg

SEQ ID NO: 62459 - DNA, 122 bp, Homo sapiens
ctgccctctgggagggataccggggtggttggggaacgcatctgctgtgcgccacaccctcgtctccaggccctgcgtgctcagtgggctctcagttgccaggtccgacctgggtggaacat

SEQ ID NO: 62460 - DNA, 122 bp, Homo sapiens
ctcacacgggtgatttagggtggagggtcccgcgggtgctggtggacacggaccctcacacgggtgatttagggtggaggctcccgcgggtgctggtggacacggaccctcacacgggtgat

SEQ ID NO: 62461 - DNA, 122 bp, Homo sapiens
gccccggcgcccggtggcagcgggcggggggcagcgtcccgggcggggactcgcgggctccgttcagaggacgcccgccctgccctgcccgtgtccctgacctcgtccctgctctgctcctg

SEQ ID NO: 62462 - DNA, 122 bp, Homo sapiens
caaagattatgctaatacacatgcccacagagtcagggaaagtcagtctagaaagcccaacgagaacaatctaaagtttttttagactgacagacttaaaaccaatactcaaggttcacagc

SEQ ID NO: 62463 - DNA, 122 bp, Homo sapiens
tccctgctgctcagcacttcctcaagacccagggtcggggtagtcctgctggggagctgccgccccagggggaagtcgtgtgcagccggccggtggccattgctgagagggggtccagcgcc

SEQ ID NO: 62464 - DNA, 122 bp, Homo sapiens
ttgctacatcttcagagctctgcgaggccaatgctgccttcactgtgactccctgataaacggaggctcagatagggccgcccagaattgcatcagtggtgcacagtgaaaggacgcctgaa

SEQ ID NO: 62465 - DNA, 122 bp, Homo sapiens
cgcggccgggcgagcggagaacaaggtatagcctgtatttaggttcctgcccttatatggcgatgtgcgcgagcgcccgccgagcggccgcaccatataagggcacgcggcgggcgccgggc

SEQ ID NO: 62466 - DNA, 122 bp, Homo sapiens
ggcgccgcgtggcatgctgggggtgctaggtaccgaaggcagatgccgtccctttggactcgcttcgtccaacgcccccacgagtttcggtggcccttcgccccacgctataagagcagtca

SEQ ID NO: 62467 - DNA, 122 bp, Homo sapiens
catgggaagaaggcagcccaccttgatggaccggagggttagagcctgcgatgtgagaagcgggtgtgtggaggtggcctgtctacaagagggcaagtttaaggcccattgcagtggcacta

SEQ ID NO: 62468 - DNA, 122 bp, Homo sapiens
cagaggacaagctgggggctcttctgcttgggctgggggctgagcacctgtgacctccaccggcttccttctcctcctctctgaggactgaatctggggcgcagaaggacagagattcaggc

SEQ ID NO: 62469 - DNA, 122 bp, Homo sapiens
ggccaggtatgctttacggcactgccgggcaatgaagcagcccgcgctaggagctggggacgaccacgatgagaacagaaggacacggggtcgggagcctcgctttacggcatagcgaggtg

SEQ ID NO: 62470 - DNA, 122 bp, Homo sapiens
cggcagcggggagaagggtgcggcgcagcccgagtttcccaccttttatcctggcccagacgcggctggggcggacgggacctctcgcgctctgcctcctcctcttgcttcatggagccatg

SEQ ID NO: 62471 - DNA, 122 bp, Homo sapiens
cgtgctcaggctgaacagcttttcttccctgatctctcggaggcgccggctgctggccaacgcagggcagcctcctgcgtgcgtgctgtgggtttctccttcagtttcctctcattgcctga

SEQ ID NO: 62472 - DNA, 122 bp, Homo sapiens
atcctgcagcgaagctgcccagatcattttgtgtttgggcggcggctgagttcccaaacgcgcgcggagaccctgggaaggaggaagtaagcgcgaaagtgcttcccttaagcttctgaagg

SEQ ID NO: 62473 - DNA, 122 bp, Homo sapiens
gccagatgtgtttcagaaacaggccatcctgcacttggaacggcatgactctgtctttgtcgcagctcacacatctgcaggaaaaacagttgtggctgaatatgccattgccctggcccaga

SEQ ID NO: 62474 - DNA, 122 bp, Homo sapiens
ggcaacatgcagaggctggtggaggactccaagaacaagtatgaggatgagatcaataagcgtacagagatggagaatgaatttgtcctcatcaagaaggtaacgtggctgaagctaacatg

SEQ ID NO: 62475 - DNA, 122 bp, Homo sapiens
ttcctctaggaggctagggagaatcctggatcccttccccaactggtcccccaaattattcgcacagcactttaaaaaaatcgagatgaaacttacataacataaaattaatcattttattc

SEQ ID NO: 62476 - DNA, 122 bp, Homo sapiens
tcaccttccttccctgtaaaaccgcataagagcagaacgcacctgcactgggcggaattgcggcccccccgcaaaattcacatccgcccagaaccttcacgtgtcaccttatttggaaatag

SEQ ID NO: 62477 - DNA, 122 bp, Homo sapiens
aggaagaccctggccccctcatgagggtttcctctcagtggcttcctttcctctcagatgcggtgcgcaggctgcttctccgcctatcactgaacttgatgccatccagatgggagttttta

SEQ ID NO: 62478 - DNA, 122 bp, Homo sapiens
cccctgaaaaagatggacaactgtgctatgcttctggggaggattgtgcctttatcacatcgaggacgccatgtgtctgaagtctcagaatacggtcctttatcacgtcaggggtgccctgc

SEQ ID NO: 62479 - DNA, 122 bp, Homo sapiens
ggcccgcggccccgctaaccccggggcccgcgcccccgcggcagggatgcatcatggccacgctggcttgccgggtgcagttcttggacgacacggaccctttcaacagcaccaacttcccc

SEQ ID NO: 62480 - DNA, 122 bp, Homo sapiens
accgcgcgggcacccaggtgccgctggcgccgctgacgaggggtgctagcaggctgtgctcgaggagctaggaagctgtaagcctgtgaaaagccaagccaaccaggcagagcggctccgca

SEQ ID NO: 62481 - DNA, 122 bp, Homo sapiens
gctatatccaaagatctagtattccaaagctctccaggtgattccagtgacacagacacacgtttggactgtcttgtactatgctatgcactgttctgctcttttttgaattggaacatgag

SEQ ID NO: 62482 - DNA, 122 bp, Homo sapiens
tgcccaccgtgtctctcgcgtcccgcgagctgcctgtctcgtcgtggcaggtcaccgagccgtcaagcaagaatctgtgggagcagatctgcaagggtaggaaacctgggctggccgagagg

SEQ ID NO: 62483 - DNA, 122 bp, Homo sapiens
catcgtccccacagcagcagctgagcagcaggggcagccgggcctggatgaggctgcaggcggctgtgtccccgtcctggctccgcgtctccgcctcggccaggatcagctccaccaggctg

SEQ ID NO: 62484 - DNA, 122 bp, Homo sapiens
tgtggcggctgcctgaagctagtgagtcgcggcgccgcgcacttgtggttgggtcagtgccgcgcgccgctcggtcgttaccgcgaggcgctggtggccttcaggctggacggcgcgggtca

SEQ ID NO: 62485 - DNA, 122 bp, Homo sapiens
gatgggcgaaggaggttgtctatcccacagttggagaggggccctctctgccccagtgggcgatctgggctacggccaagttgccaccagctagttccgcttgaaaaccacttctggccccg

SEQ ID NO: 62486 - DNA, 122 bp, Homo sapiens
ggagaaatctcctctggtggctttatagctcacaattgaaaccctaccttctttaacatacgatgagcttttttcatgaagctgccctcacccaagtagttgaaaaacggacaaccgttttt

SEQ ID NO: 62487 - DNA, 122 bp, Homo sapiens
gggaaggttgagaattaagtcaggaggtaatgctcgggaagtgtcacaaatttaggtaagcggtggtggtagcaccattggaagttttaaaaatctgagatcaaatagtaaaaggttgcaaa

SEQ ID NO: 62488 - DNA, 122 bp, Homo sapiens
ttggggtgagaccattcgtggtgctggtgggggccgtcccgtgtattgtaggatggttagcggcatctgtggtctccatcctctaggtgccattcccccctcccagctatggctaccccaga

SEQ ID NO: 62489 - DNA, 122 bp, Homo sapiens
ccacgccggttaccatgggtgcagcctggggacgctgtcgtctgtggccagtgagtgcaccgagcatgcggagagggggacaggaggccttgggaggtaggggtggggcaggaagtgatggg

SEQ ID NO: 62490 - DNA, 122 bp, Homo sapiens
agcctccgggaggtcaccgagcgcagctttaatacctgagctcgaaggccccgctgtgctcgccgacccccgtacctcgcggccgggcccttgggacccacagcatccttgtgaggcccgga

SEQ ID NO: 62491 - DNA, 122 bp, Homo sapiens
aatagttctccctgaagctgggtgtccctatctttatccccccaggagtgggaggagcggcgcaggcagaacattgagaagatgaatgaggagatggagaagatcgccgagtatgagcgcaa

SEQ ID NO: 62492 - DNA, 122 bp, Homo sapiens
gcggtgtgaccccggccggtgccttggttttcctggccttcatgtcctcctatgtaaacgcggggtgatgacggcgccgacctcttggcgctgttgtgagagtgaagtgggcgcgtggttag

SEQ ID NO: 62493 - DNA, 122 bp, Homo sapiens
cctccatggtgatggacagcaggcaagacagggccaccacgaccgcaaaggactggtggtcgctgaagctggcgggtcccgccgtgtcgcggctgatccacagtgtcatgaagaagttgacc

SEQ ID NO: 62494 - DNA, 122 bp, Homo sapiens
accaaccttacaaaactccagcctccaaaactccgcccttcgcgattcttccccgcccctcggcgtccagacagatagacagacgacctgccccgccccctgcgccaccgactgactcagtg

SEQ ID NO: 62495 - DNA, 122 bp, Homo sapiens
ttggtctagcctggatttacccctcagtctggtgccttaatgcttgctcagcactcaaaccgcaaaccaaagatggcaccctagggcaggttatctttaaatattcagagtttctaactatt

SEQ ID NO: 62496 - DNA, 122 bp, Homo sapiens
gtcattagtcccaaccctctcagagatgaggaaacatctagtcactgtttcagtgagacccgaagtcagaactcctggcccccagttcagcaccttcttggctgcctgcatgaggcctgtcc

SEQ ID NO: 62497 - DNA, 122 bp, Homo sapiens
aaaggaaggagacagaacaatccaccgagaatatcatctcacctgagaaagagccatccccgactcctttgctttcctcttcctcttctgggtttcttcctcaggtaccaagagtctttaga

SEQ ID NO: 62498 - DNA, 122 bp, Homo sapiens
ccaccagaagaggcagcgccccttgcaaggagtattctcacatggctgggaaaatgtgtccgtgaccaaacatcatatgaaatcattgaaaccaatcatcctaaggagaaagtaactaaagg

SEQ ID NO: 62499 - DNA, 122 bp, Homo sapiens
acgcgctgtgagtaggcgcttcctggagcttttcctgggggtcctcagaaaaacccctgccgtccccattatagagatggggaaactgaggctcaggaaggccagagcttgcccaaaacctg

SEQ ID NO: 62500 - DNA, 122 bp, Homo sapiens
tgaagttcacgatattggaccaaaaccaagcttgatgacttggaggtgctacggcacaaccgcaggattgagccccatggttggaatttaaacacactggcatgacctctcgacaaatatgg

SEQ ID NO: 62501 - DNA, 122 bp, Homo sapiens
cgtccacctcatgcagtgagccagcctggccgcctccaccctgcagaacctcagtggtggcgtcactgcgtccagtcagctgctccaccgggttagggtcaggagacggccagagcctgttt

SEQ ID NO: 62502 - DNA, 122 bp, Homo sapiens
ctctcttgtgcctccagctccagctcccctgagttctcaggatgtgaggggtctatggttcgtccccccgctccagcctggagatgacatcaggtttggaagcttgaagtcctgctccagag

SEQ ID NO: 62503 - DNA, 122 bp, Homo sapiens
tttcttgcttttgatgggatcagatggttcatttccaaagagagacagagagaactgtatcgtatttaggagcaatagccttggagtaagacttgtgcttaaactctggatttgtttcttat

SEQ ID NO: 62504 - DNA, 122 bp, Homo sapiens
taagaccccatcccttccccagattaaagagttctgaagtgtgaaaagaggggaaacctccggggaccttgaccccttgggcaggaagtgaaagaaacccaagtcctgatttcagagaaatg

SEQ ID NO: 62505 - DNA, 122 bp, Homo sapiens
aacaaaccctccggcctggatcccaaaacaacagtcgcggttctgcaacagaaaaggctgcgctggccctgggacctgtctcggaaatactcctcatccatctagtttctcccaggacaact

SEQ ID NO: 62506 - DNA, 122 bp, Homo sapiens
ggagctgagtgtactgggaagtccaggtgcatccttagggtaggctgcatgtgaaagctgcgtcctttttgcctgtggtgaggtgaatatcaatacagtatttatagaaagtccacataaat

SEQ ID NO: 62507 - DNA, 122 bp, Homo sapiens
ttcccctctcaactcctaaagccacacccacctcccctaaccacagggcagggctgttttcgagtttgcccttggctcctatgagcacatcttgactcctgcaaaagaactgtgtgcttgtc

SEQ ID NO: 62508 - DNA, 122 bp, Homo sapiens
tgctcccttccacatccctctgactccaacactgagtccactgacatttctcaagccaagcggccctcctaggttgctctcagaggcttccttctcccacgcctacccagttagatggagct

SEQ ID NO: 62509 - DNA, 122 bp, Homo sapiens
actgatacttgtcaaatggggaccccccaccctgagtccctttcaccctgggggcagtgtcgttcgtcctgtccagaatggcagcctgtggaggcacctgcaagaacaaagtgactgtgtcc

SEQ ID NO: 62510 - DNA, 122 bp, Homo sapiens
aacgttattattttgaaaactatttaactaaatgtataagtggagctatggaaaaaatatcgtatatgtaagggtagacttggtagtcagatccagtaagagctaagcaagtaatttcaatg

SEQ ID NO: 62511 - DNA, 122 bp, Homo sapiens
ctccacggcgccgagccctgattgacgttcagccaggccaatcatagcctgtgtctgaggcgcgcggagctggagcgcccagggcatgtccgccgatcccaaggaggcaatctgtcaggcgc

SEQ ID NO: 62512 - DNA, 122 bp, Homo sapiens
ttgccttagctacagagggtggaaccctatctcggaaataattcattggggcatagctgccgcaaattcagccactttgccatctgtcctcttcgctggtttgagcctgaccgattttaata

SEQ ID NO: 62513 - DNA, 122 bp, Homo sapiens
gaaataccccgattgggtgggacttaatggactttccgcgcctgcgtccaggactgaggccgtgagagcgctctcttcaggcgctctgacttgtttctgctccatctctctagggggtcttt

SEQ ID NO: 62514 - DNA, 122 bp, Homo sapiens
ggtcggtgcggtttgataagtggtcggttcctggagctgcggtcttctgctagcctgatccgcagcttcagcctccgccgcctcctcagccctcggcgccgccgctggcgccgccgcctgac

SEQ ID NO: 62515 - DNA, 122 bp, Homo sapiens
actccagaggaaaagcctgtggggctgagtctcagggtgcacgctgtgccaggtaccccacgtaccttcagagctgcagccaggaggcggtgggtgaagttgtgttgttgaggcttctcctt

SEQ ID NO: 62516 - DNA, 122 bp, Homo sapiens
tggtgggcctcagtctgcctgcgcctgttgaggacacctgcatgtaggcgtggatgtctccgcccagggatggaggtgtgcacacagatgtccatttgcacttatgtttgcacaatgcacgt

SEQ ID NO: 62517 - DNA, 122 bp, Homo sapiens
tggaggggactcacaaaaaatttgtcattcctgcactctaacattacagctgcctacctacgcacacaagcctcccaggaaattacaaagtaactataaggctccgtaagggccacaataga

SEQ ID NO: 62518 - DNA, 122 bp, Homo sapiens
ttccagcatcctggtagaagagtggaactgacctggaggacagcaaaggagcccacgtggcgttaagcctgaaggtgcagtattcccattcaacagagactgctgctgacagtgggcggggg

SEQ ID NO: 62519 - DNA, 122 bp, Homo sapiens
agctggagccataaaaggactgctcccaggtcaacacgaaggcctgcccaaggactcctgcggccttcaaagatttgcagcctgaggacaactttcagcaacaccgcgacactctaggttgt

SEQ ID NO: 62520 - DNA, 122 bp, Homo sapiens
gccagctcttcactgcacacctcagccctgacagggaccccagggcagcggtgcccaccccggctgcccctggaatgacccagagcccatgtccagcctgcagatctcggcagccgctctcg

SEQ ID NO: 62521 - DNA, 122 bp, Homo sapiens
ggctgccctagggggcaactcctcccccagcgccaaggacatcaagaagatcttggacagcgtgggtatcgaggcggacgacgaccggctcaacaaggtagcggccgcccttgccccgcagc

SEQ ID NO: 62522 - DNA, 122 bp, Homo sapiens
cccacagcgagctgtggagctgggagggccattcagagctctgcatggaggcagggtggccggccttcgtcccctcaggccagcagggcaaggcagctcccctcaatagaggtgagttacca

SEQ ID NO: 62523 - DNA, 122 bp, Homo sapiens
cacattgacgtgtctagacagggagtgtaactctggcgcacactgatggggagacaggtgcgagctttctcactggcactgcttcaaagatcaaaacattgaacgtaatctaacggttcctt

SEQ ID NO: 62524 - DNA, 122 bp, Homo sapiens
ccggggcaagacctatcagactttggaggagttcgtggtaagatgcgaacgcccgccgggcgactttgcaccttccaggaaggggtggaacagctttggttctgtggtcccccactttgaag

SEQ ID NO: 62525 - DNA, 122 bp, Homo sapiens
tggggcttgtgtcatactggggagacagggcaaaggttctggcccattggcatgtgaacgcgaatggggaggaagagggggagaaagggcgtggcttccgaggccccctctcacccgaacac

SEQ ID NO: 62526 - DNA, 122 bp, Homo sapiens
gatattattcccatttcacagatgaggaagttgaggcttagagaggataaatgacctgcccgagttaccatagctaataagtagcaaagccagaacttctaaggtgtgcctgagtctaaagc

SEQ ID NO: 62527 - DNA, 122 bp, Homo sapiens
acgcagatttgacaaatgtctttaaaggcggggtgggggtaacaacaaaaagccctggcccgtgtgttttgagcgcgttccaaggtgctcggcgtgaataattgatgccagcgccacttttg

SEQ ID NO: 62528 - DNA, 122 bp, Homo sapiens
ttggcagggcttcgcagtcggggtggtgccaggagccctcccccccacccgccagcattccgaggtaacaggcatttgttacccagctcgtgccaggagcgattggcaggttcgagcagcac

SEQ ID NO: 62529 - DNA, 122 bp, Homo sapiens
cccgcgctcccaggcgcagtagctcggcggccgtggcgcggcccaggccgctgttcgccccggtgatcagcacagtcttcccgtgcatgaggccggggtccccgcctctgcgcagccgctgg

SEQ ID NO: 62530 - DNA, 122 bp, Homo sapiens
tgcagcttcctcattacggagagagctgaggcctggggaaacgggggctgctctttcacgcgggccccgcagcccttcactttgtgtgaaaattccctgcgaaggctgcacggccggtcccc

SEQ ID NO: 62531 - DNA, 122 bp, Homo sapiens
ggcgaagaagcagcactcctacttactagggcaagactcatgaacagggggcgggggctccgggggcggggacgcgccccgttctctttcgctcttcttcccggcagccttagcgccaggcc

SEQ ID NO: 62532 - DNA, 122 bp, Homo sapiens
ttcattttttacccattgtctcattcataaacagagaaaaatatttgttgaatgagtgaacgtgggatctctgttcattttggtatattactttgctttctgggctgagctcaggacagatg

SEQ ID NO: 62533 - DNA, 122 bp, Homo sapiens
ctgaggctggagagggtcagggtacaggaagctcagggagagagccgcctgggctgaggccggtgctgacagctctgggatggtgctagtggctcctctcaaccctgacgtctggcaaagtc

SEQ ID NO: 62534 - DNA, 122 bp, Homo sapiens
gtttaattcatgaggcatgccatgctgtttccataggaccttgggcacttttaccatggacgttggggcagtcttcactggcttaccagcctccacaccttcatatctgcccgttcccttcc

SEQ ID NO: 62535 - DNA, 122 bp, Homo sapiens
aaaaagatgctctgtgtctcgatatgaagtcttctgcttctgtagatttgttcgtagactcgtcagactctcacagccctctacacttgacggaacagaccccgaagaagcctcctcctgag

SEQ ID NO: 62536 - DNA, 122 bp, Homo sapiens
ttaaaaaaaaaaaaaatccacacacagcaaaccagggtacactttcaagttagaacccagcgagaaggcagggcagggaagttactgctccatctcacagaagaaaaaggcagagatggaag

SEQ ID NO: 62537 - DNA, 122 bp, Homo sapiens
cgcggggcctcgagtggaactgggggtgcaacagggacgccgcagcacgagggccagggccgggcggagaaaggcccgcccgcgaaccgcgctcctcctcagccccgcgcccccggaccggg

SEQ ID NO: 62538 - DNA, 122 bp, Homo sapiens
cggagactctgggggagggaaggcaggatgcggtgcgggagttaatggacctggccttggcgaaggcgcgtcctgggttggatcgaaaccctctcatccgccctgtggccggagggaccaga

SEQ ID NO: 62539 - DNA, 122 bp, Homo sapiens
gggccgtggggcggggtcgcagcaaggcttcccctctaccctctctgggcctctcacaaacgctgagccccgccccgctgaggcctgtctgcagaatccacagcaaccagcaccatgcccat

SEQ ID NO: 62540 - DNA, 122 bp, Homo sapiens
ggcagcccgtgctgtcggcgtcctccgccgccgccgccggcccagtgcgcggcggccgcgcgtcctcccgtcaccaagcgcaaccccccgcctccggctccgcccccgcggcggtcactacc

SEQ ID NO: 62541 - DNA, 122 bp, Homo sapiens
ggatcgtgtgcaaatgtgcagggggagcccccgcgggtgacgtcagtgtggatgaagtcacgggtgtggcagagcctgtggggctctcaagctattcgagggttttgtaactgatgctctac

SEQ ID NO: 62542 - DNA, 122 bp, Homo sapiens
ccagcgcggacgcaggtgcagcgacctgcagggccttggaggcagactcaggggatgccccgcggggcccagcgcccgaggagaacgtcagaggcacaccatcaccagcggcgtggactgcg

SEQ ID NO: 62543 - DNA, 122 bp, Homo sapiens
gcgcggggaggcagcggctgggccagctccggggacgcccgcgcgctcgcttgctcgcgacgcggcggagccagccacagccacccggcttcgcgctcctccgatgtcctcatttactgcaa

SEQ ID NO: 62544 - DNA, 122 bp, Homo sapiens
atccttgcgagacggggtggggcgaatcctcccgggtgggcatcgtggggtgggggtgggcgttccgcgaggggcatcctcccgggcggacgttgggggattctcgggggagggaggggcgc

SEQ ID NO: 62545 - DNA, 122 bp, Homo sapiens
aaattctcaataaataagtgccagctcccgcgctcagcaggctccgagttttattcgatgcgctcggcgctcttggtcgagcgggattccccctccggagcccgagtctgcgctctgggctc

SEQ ID NO: 62546 - DNA, 122 bp, Homo sapiens
gctgccagcacaagcgtcctcgtcgctgtctggggtgcacgctggggcatgtgcttagttcgtacttcccattcatggaagagatgatgagccccagtaagaaaataatttgaaaataattt

SEQ ID NO: 62547 - DNA, 122 bp, Homo sapiens
ttctgagaaatgcgtcgttaggcgatttcatcactgtgggaatgttacagagtgtgcctacgcaaacctagatggcagagcccactccacacctaggccagatggcagagcctgttgtttct

SEQ ID NO: 62548 - DNA, 122 bp, Homo sapiens
atttatgaatggagcctaagcaaatctgaaaaccaagcagccccaggcaactgagcccagcgtagcaaccgacgccggggcctgttgctaagggaaaagaaagaaaggacgtggtccgtcag

SEQ ID NO: 62549 - DNA, 122 bp, Homo sapiens
agcgtgggtgaagccgcatcccagccgctctgtcctcgggccttgagccgcaccagctggcgccaggctgtcccccagcgaccttcagcggctcactcagcctgacagaaacgctgtgtttt

SEQ ID NO: 62550 - DNA, 122 bp, Homo sapiens
ggaagtgatggcaccgggtgaggttatcagggggacatgtggggaagtgacggcacccggcgaggttatcagggggacacgtggggaactgatggcacccggcgaggttatcagggggacac

SEQ ID NO: 62551 - DNA, 122 bp, Homo sapiens
ccctttatggcagcagtctgagggacagcagaagcgtcctctggggtcactcagaccacgcggttcctggagcctcggatcggctacttcagacacggacgtctccgagttgtcagtgccga

SEQ ID NO: 62552 - DNA, 122 bp, Homo sapiens
aggccaggccagatgtggtgcagccaggggagggggcaagccccgggggccgtgggccatcggttcacaccacatcaggggccgggaatcccactcagggtttagccctaggctccccccag

SEQ ID NO: 62553 - DNA, 122 bp, Homo sapiens
agagcctaacgagaacagggcctatccccaggggccccgggctggacgcagaccagatctcgcgggggtgggctgggaggcgcccgccagaggccggaggctgacagtgcctttcctatcct

SEQ ID NO: 62554 - DNA, 122 bp, Homo sapiens
cacacacacgggatcacattgcacccatgaagagcctcacagacaacacacatacacaggcgcacaaatgcatgcacctcctggctcccattcattaaggtcttctggctgaccttcgattt

SEQ ID NO: 62555 - DNA, 122 bp, Homo sapiens
tctcccggttgctggggaagagcagccggaagcagcgggagcccgcctccacgtccaccacgaagcccagcttgtccagaggctgggccttgagctgcacggccaggtgcaggctgcgcgcc

SEQ ID NO: 62556 - DNA, 122 bp, Homo sapiens
tgatgaggaagatccagtttccctgagtttacaatctgtacgcacagagtctaagtcagccggactcatacttggcctgagtgtgtttctcgtttcggccctgcagttgtgggcggtggtga

SEQ ID NO: 62557 - DNA, 122 bp, Homo sapiens
tatgcagccaggcatggtcgctcacacctgtaatcccaacactttgggaggccgaggctgcggatcacctgaggtcagtttgagaccaacctgaccaagaaagagaaactccatctctacta

SEQ ID NO: 62558 - DNA, 122 bp, Homo sapiens
acgaccagggcgcagggagtgagcttagccttagaaaggctgtagctaggattaatcagccgggctctgcagggctccgttacccagggcttaccctgtcactcagggctgaggggcggagc

SEQ ID NO: 62559 - DNA, 122 bp, Homo sapiens
cctcttgagtagctgggattacagaagcctgccaagacttccggctaatttttttattttcggagagacagggtttcaccatgttggccaggctggtcttgaccttccagacctcaggtgat

SEQ ID NO: 62560 - DNA, 122 bp, Homo sapiens
tattttcctcatcacagtattcttccaatattccaccaacaaactctttcaactctttatcggatgagaaggtataggaatcatgtctttcttactaactggctgacaatatggccgagcag

SEQ ID NO: 62561 - DNA, 122 bp, Homo sapiens
ggaggagtcatcgcgagaattgaccaaacgcagctcctccaatcaggagttcgaggaggtcgtgacgtcaccggggtggccggtagcaatccggtttagttaaccagccactgtaccgtcag

SEQ ID NO: 62562 - DNA, 122 bp, Homo sapiens
aggacccaggggagggttgcggctaatgagcagaagctcgatgtcagacttctggatcatcggacccagggtctctgccggccactctgaattaagcgctcctgttcacaggcagatggtgc

SEQ ID NO: 62563 - DNA, 122 bp, Homo sapiens
aacccttttaatataatagcttagagaggaagggaaaacactttcatgtgccagagaggacgcacatgaaactgaccacatttgttgcctttggaaagggaacatggccagaggagaagaag

SEQ ID NO: 62564 - DNA, 122 bp, Homo sapiens
ggtgatctacctgccttggcctcccaaagtgctgggattacaggcgtgagccaccacgcccggcccgctgcatcttctttatgccagaaggatagagaaggggagtcttttttttgagactc

SEQ ID NO: 62565 - DNA, 122 bp, Homo sapiens
ggagtagcgtccggacgctggggtaccgtgggaagggtggttcccggtctcttacgtggccgtctgtggagtagcgtccggacgctggggtaccgtgggaagggtggttcctggtctcttac

SEQ ID NO: 62566 - DNA, 122 bp, Homo sapiens
ttgcgagccagctggagttccaggtgggcgtggtcttggcgggcccgcacttcgagcagccggccagccctgctggccccgggccagtggctgcggagtgtgtactgggtcccccagcagtg

SEQ ID NO: 62567 - DNA, 122 bp, Homo sapiens
gcgtccgtacacgtccaccttgagatgagcctgcaggctctggtagtagcgcaccctggccgagtccggcttccagttggacaccgcccaggccaccagctcggtcttggccgagaggttga

SEQ ID NO: 62568 - DNA, 122 bp, Homo sapiens
attgtcgggggcttccccaaacatagtggctggcagtgagttgccatagctgacacattccgggaatcctcattagctgggaaaggtggacgatgtttgtcttccacattccagtgccgggg

SEQ ID NO: 62569 - DNA, 122 bp, Homo sapiens
agaatatcacagaccattgctagggagacataacacctagggaaaatctctcagagataacgttcaagaaacatccctgtatgaatgcttttcttccttccttcctttctgtctctccctcc

SEQ ID NO: 62570 - DNA, 122 bp, Homo sapiens
ttaccaggttttgactggaatgccaggcttaacgttgctcagaagttgcttctatgaggacgtctcccagcagctgtcagtgtttccaatgagtcatcgccagcccctgcaatgagcctctc

SEQ ID NO: 62571 - DNA, 122 bp, Homo sapiens
gaaatgctcagcctacgcacaccctcgcccccgagcacccggttctgaagaatgggcaggcgcctgaatggccctgggaagggacacttctggaaggaattgagctatcccttgccaccatt

SEQ ID NO: 62572 - DNA, 122 bp, Homo sapiens
caataaaaaatgtctccagacactgccagatgtcccctggggggcaaaatcatccctggtcgagaactcctgctgtacacattgctttctgagggatattttgtttttttgcactaacaatg

SEQ ID NO: 62573 - DNA, 122 bp, Homo sapiens
gaacccccagtcaatggccctcacgtgccaacttggctgcatacccctgttccaagaccacgtgcacagcttggcattgctggagggcgctgggcacaccttgtgtctcccgcctctgtggc

SEQ ID NO: 62574 - DNA, 122 bp, Homo sapiens
ctgtgtgcccaacagtacctgactcatcttgtccccaagctagacattaccaccgccatccgcctagatcctggaggagaagacaagcccacattgtccgggaagcagccccacggatgcat

SEQ ID NO: 62575 - DNA, 122 bp, Homo sapiens
cagaagtagcagcaggctactgggtgggcaagcggtgtgtaccgcagctgtggaggacatcgacgcggaacgcccggattgagctcagaacacaccggccccgcccgggactcattctacaa

SEQ ID NO: 62576 - DNA, 122 bp, Homo sapiens
tcactaccctcagattctaactccagcttcacatcattaggcgtaagcagccaattgggccgtctgggagccgtgcatcctgggagttatagtttccggctccctccttcagattacaagct

SEQ ID NO: 62577 - DNA, 122 bp, Homo sapiens
acgccatggttcccgttgcttctctgttacctgttctttctcgccatgatccggagagcacgccacatcctcctccaaccccttcaccctcactggcagagaacaatctctccatccctttg

SEQ ID NO: 62578 - DNA, 122 bp, Homo sapiens
tggggaaagaagtccacgtcctcacctgggtttccatcctgggtccaggcacctctccttcggttctagattaggaagggagggcagtgcccgacctgtgactgttttttgagagggcaata

SEQ ID NO: 62579 - DNA, 122 bp, Homo sapiens
cgggccccgggagcgccctttccgggccggagcccaggcctcagaaccctcttgcggactcgccctagggccacggagcggttcctctgtctggccctgtgctgaaggtttcgtactcgttg

SEQ ID NO: 62580 - DNA, 122 bp, Homo sapiens
cagtggggaaccaccaggaactttcacttgaacctgctctgctgagccccctgtgccatccgtggacctgggcgagggaggctgctgaactgggagctcagggcccatctctctgaggagct

SEQ ID NO: 62581 - DNA, 122 bp, Homo sapiens
gaggctcagagagacactttctccgggatcttaagtgtgggggctgctggctggggggcccgtccggcccaacgccggaggcttggaaaagagagttggcagcgggagcggactacgtgccg

SEQ ID NO: 62582 - DNA, 122 bp, Homo sapiens
tacacttctgtgtggcacattaaggtggttttgctttgctggcttccgaaacagccaccacgcaaaccctagttgacaggcacgactgaacaaatgagcatggtggctgtaagtgactgtca

SEQ ID NO: 62583 - DNA, 122 bp, Homo sapiens
ccggcagtttggggggtgcagggcggaggtcggcgtctcttctttgtccgtgaggaccgccgccctgtgctgtttgctgcattgagaccctcatcgcatacgggcggtttggcttttgccca

SEQ ID NO: 62584 - DNA, 122 bp, Homo sapiens
actggagtcagaaaagccaaatccagtcctcagcatttattactaactctatgacctcttcgaatcatttaaattctctgttcttgttttctcttgtaaaacaggaaaagaaaaaagatgca

SEQ ID NO: 62585 - DNA, 122 bp, Homo sapiens
ggcccagtggtgatgtgcaagaaggcggccaaggccgggctgtcacagtcgctcttcgagcgcctggtggtgctgggcatccggcccatccgcctgcaggtccagtaccggatgcaccctgc

SEQ ID NO: 62586 - DNA, 122 bp, Homo sapiens
aaccagcacccccttccgccgcctccagcttatggtgagtgtggctgggggtgcagagagcgcacgggaattcgggggtctggggccgagaacgtgaccgcagccgggctcgccgggagttc

SEQ ID NO: 62587 - DNA, 122 bp, Homo sapiens
aggggctggggttggggcgggggcgccaaagtttagggacgggggcgggagacccgggtccgccttcccaggacacacgggcttgaacatctgagcccaggggcccagagacagcaagaccg

SEQ ID NO: 62588 - DNA, 122 bp, Homo sapiens
caggctggaattcaagcatggtcaggtgggggtcaggtgcagggtgtgccccaagccagtcgtgtcccaggaagctgggacgtgggctgcctctcacctgctcttgtgaccacacaggcgat

SEQ ID NO: 62589 - DNA, 122 bp, Homo sapiens
tttatggcgaaagccaggtgaagccaggaacagactctgtgcctctgaggcagccggacgcggctgttgacgcagaaggttgattttgtctggatctctcttgaccagacaaggtagggtta

SEQ ID NO: 62590 - DNA, 122 bp, Homo sapiens
ctaaaattctgacaccacattccttgcagagccttgcaacgggaagaagaaatggcacggcgtgaacccagtctctcaaatgagtcggccaaaccttgacaattgatctagcgccactgcag

SEQ ID NO: 62591 - DNA, 122 bp, Homo sapiens
acatatgagagtcaggccccagacacaggacgagagcccaggaaacagtgagaaaggcgtcgaatttggagtcaagagacctggattcaagttccaggcctgccactttctagatattacct

SEQ ID NO: 62592 - DNA, 122 bp, Homo sapiens
cccagcggctgggaggtcccgccctggccgaggaaatgaagagggcgcagggcatgggggcggcgcgcacccgggacagtttccagtcggcttctccgtgaccttcctcccccttccagctc

SEQ ID NO: 62593 - DNA, 122 bp, Homo sapiens
catttttatcatttaaactagaaatatccccagttttcctaaactgagctcaagctatttcgcatcctgcttctgtgtatactcatgcccaacctctgccaccctcacacttacacacactc

SEQ ID NO: 62594 - DNA, 122 bp, Homo sapiens
ttgcaggggccagggctctagtggcctgctttggggccacttcagcatgacctgcggaaacgcgcccctttgttccgcacactgagccagtaatatattcctcgggtttccccaaaatactc

SEQ ID NO: 62595 - DNA, 122 bp, Homo sapiens
tcaggggatttctgggaaatgtagtccagacgctcagtggagtctcggtcaatttgactccggcaggtggatcccagggaattctgggaagtgtagtccagacgctcggggtcgtcgcggtc

SEQ ID NO: 62596 - DNA, 122 bp, Homo sapiens
cactctgtccagagcttcaggtaggcctcaggaggtggaactaagatccagctcatggtccgagcctgctcagcctctaacagaatggaactttccaatataagccctctaagggatggggc

SEQ ID NO: 62597 - DNA, 122 bp, Homo sapiens
attgatggaattatgtggtctccaccagactgccacttttccatgtttactagaaccatccgtaaacagtgttaaagcattaggtatgggggagtgaactatcggtggcctgaatatatgac

SEQ ID NO: 62598 - DNA, 122 bp, Homo sapiens
caaaagtgctgagtcagaggtcggatcatcatatcaatgagtcccggggcatccagcccacgaaatgtgtgggctgtggaaaagaagcaatgtttgaaatatacagggccagagctagtctg

SEQ ID NO: 62599 - DNA, 122 bp, Homo sapiens
gcggacatgggggcctgaggctcacagtcaggccggatccgggtgaggttgtagtcggcccgcagggagcgcacggctcgcgtgatgcttagcgccagctcaagggcggcttctgcctcggg

SEQ ID NO: 62600 - DNA, 122 bp, Homo sapiens
agccctctttggcattcttcgaggccggggccatagcggcctcggcgggctccgttcccccggccaactccatcaattccccgcggtcctcccgcgggggccaattccagccgcgaggccct

SEQ ID NO: 62601 - DNA, 122 bp, Homo sapiens
cagtgagtgagtccactatggagctactaccaggttggtttaatttgcatgggtcccagacgagtctcaagggcccaggagggtcacccacgctgtcgtctcttctgcccccgcagcttcag

SEQ ID NO: 62602 - DNA, 122 bp, Homo sapiens
taacggctgtttgtttttgcacacggcacgcggaggcggggcctccagccccaatagtgacgcgctctctgcctttcaccaggcgcccaagcctgacgaacagaaaggcaaaccaatgagat

SEQ ID NO: 62603 - DNA, 122 bp, Homo sapiens
cagtttctagactacctctcctggcccactactatagcatattttttgcaaatgtcagggcgtatctacagcttctgtaatcataaaaactaattttcagtcttggcactaagactgtttgc

SEQ ID NO: 62604 - DNA, 122 bp, Homo sapiens
ataaaatttgctacagtggccatggtttggtgtagtacgtggcatgaattccatccacaccgctgtgcagccatcaccgcgtccacctccagaactcctcatcttccagccggaagctctga

SEQ ID NO: 62605 - DNA, 122 bp, Homo sapiens
tcagcccttgcaccatttgcatctcttgtctatctcattttattaatgctgtcagtctcacggctccactagaatgtagctccaacagggtgagaattgggggctgttttgtttatactgga

SEQ ID NO: 62606 - DNA, 122 bp, Homo sapiens
gggtactgcaatgagggacttaagccatgagctttggggtgtgggtgagcttgtctggcacgggactgctccccagagcaatatgggactgtcattctcctcaacaaagagccacatggctg

SEQ ID NO: 62607 - DNA, 122 bp, Homo sapiens
ttcaaaatttcgtgtaaaataatcaagaactccacgtttctatcactcactgtaggctcccgtcccttccacccccgggcggggacccctcccagcgacccggccagctctcagcacttcgg

SEQ ID NO: 62608 - DNA, 122 bp, Homo sapiens
tttctctggcgtggaaagtaggcgcgctccgctgtctcccgccgcctgcctcagctttcgcggttccctcctaggggtgtgcctcagtcggagccccttctgttaaattcttcccccttggc

SEQ ID NO: 62609 - DNA, 122 bp, Homo sapiens
gcactcgggagccgctggggggcgagggtgtggctgtgcactcactccccccgggaggaccggctgtggagcagctcctgccttcagacccagcccaggagagcattgcgcctcagtttccc

SEQ ID NO: 62610 - DNA, 122 bp, Homo sapiens
tttgttgtgaagtgttgaataatagaggatggccggtgacccagtaaggactaaaccttgcgctggtttattgtggcaagctgagaaaggggctttaggcccgggaccccaggcactgaccc

SEQ ID NO: 62611 - DNA, 122 bp, Homo sapiens
cctatgacccgtaacctttgacccgccatagccctcacctgggatgcagggctgacctctcgcctgtcctctagccttgacccttcccctgatcacaattcccatctccctgcccttccctt

SEQ ID NO: 62612 - DNA, 122 bp, Homo sapiens
gctggagctggagtcagggcgggggcaggtgtgggggctgtgggcggcggaggcgggagccgtgaatggggatgagacagtgaggactgaggtgacaatcccaagctccagggttgtgcctg

SEQ ID NO: 62613 - DNA, 122 bp, Homo sapiens
tcgttagctgcgttcggggaaggttggggcgtcagggagctctcggatcacagcagcccccgccctctcctaggcctggcccggcagagcccccagagtggaccccccagcgactggggtct

SEQ ID NO: 62614 - DNA, 122 bp, Homo sapiens
cagcatcctgtcgggccagagcctcctgatgctgggcagcagtgatgtcatcatccaccgcgacggctccctcagcgccaagagggcgggtgagtgccttccctgccacggccccttcctct

SEQ ID NO: 62615 - DNA, 122 bp, Homo sapiens
tgtcgctgattttctactgtaactgtgcttaaggaacacatcagctcatgtggccaaatacgagggttgaaaaataatgacaggactctcatttcagtcaaactagactctgctatttgaca

SEQ ID NO: 62616 - DNA, 122 bp, Homo sapiens
gccagttagggaaacccagcaggtttcgaggggaacctgcatttcccggggacaggccctcgacctccccgtgccacctgccggtgcctcgctctgggccagggggtccagccagctcccgt

SEQ ID NO: 62617 - DNA, 122 bp, Homo sapiens
caggtcaccgaactatcagcctgggtgagagctgccctcccctagctgactcacaggtaccggaaagaggagagtgggggaggaactagaagatgtctgcttctctgctttctgccgttgat

SEQ ID NO: 62618 - DNA, 122 bp, Homo sapiens
cagggtggtctctctaggctcgttttagtcacagatcttcggcaaatttgggtttagggccgcgatcccgaccctaacttgggactatttcaggaactggagttgaggcttcgttgggacag

SEQ ID NO: 62619 - DNA, 122 bp, Homo sapiens
tcaggcccaaattgatgagacctccccgaatccctcccctgcccgagttactaatgacggcgtgaggtcacacctggccactcaaaaccagctccttgacgcaggtgaccctccgcctcgcg

SEQ ID NO: 62620 - DNA, 122 bp, Homo sapiens
ttccgctcttgcgatcggtgataaaccggaggcggccgaggccgacagaggtcagcaggccgctcgccacgggtctgcgagcggacactgccaccctccggccgcgcgcgggactgcaccgg

SEQ ID NO: 62621 - DNA, 122 bp, Homo sapiens
ctccgtttggccacaatgcaggttggatttggggtttaaggctgggctccagtcagccctcgggagcccctgggcaggaaaacatggacaggcctacgggttcttctgccatttcactggcc

SEQ ID NO: 62622 - DNA, 122 bp, Homo sapiens
actccccgcgtctgagccactttcttccccgagtgcataaccaggggaaagcgaaccggacgtagctctgctactcaccagctgcgtgacctcaagcaagtttctttacctttctgagccaa

SEQ ID NO: 62623 - DNA, 122 bp, Homo sapiens
ctcagcgcaaagactttgccctattccaaaatggctccggcgcctacaacttaagcatagcgcaggtccggaagttacgcaaccccataaggtagcacgccgttacccgtggggagcgtttc

SEQ ID NO: 62624 - DNA, 122 bp, Homo sapiens
agaagattctgcaactggctgaatgggacaaggagcactggataagcagaaaggcagagccgaagatcacaggcagacgctgagcttgagtgagagagaactgtgctgccactcactacagc

SEQ ID NO: 62625 - DNA, 122 bp, Homo sapiens
cggtaagagaaggcgctgcaggagcctccagcttagcccccctacctgggtacttcgccccggccccactacctccaggcatccgagcggcagctgttaactttcgtgatctttggcgcccc

SEQ ID NO: 62626 - DNA, 122 bp, Homo sapiens
tggctcctcgctctcccatgcctctccctttatgtcctctgctgtccagcgcctgggccccggccctccctgggacaccatcctgccctgcccgagtcgtggctctccagtctctttcgggg

SEQ ID NO: 62627 - DNA, 122 bp, Homo sapiens
ccctgggcgcggccatgttggagaaaactgcactacatttcccatgagcccgcgggacaacgaacagcgctcccacagtcctcttcgcctcccagagcccgggagtgaccctttttcgacca

SEQ ID NO: 62628 - DNA, 122 bp, Homo sapiens
ttaggttgcttgtctgtcactcaagaaggggcgggcacagctgccggtagaggggaaaaacgccggccgtccccgcccccctagtggaggcctcttaaagaaacaggacgccattcccctgc

SEQ ID NO: 62629 - DNA, 122 bp, Homo sapiens
tcgccctggacccagccccttctctcggcccctccctccacagaggggcgtgtcctcacccggcccagccacagggtcctctagtggccacccctgggccggcactaggaatattccccttc

SEQ ID NO: 62630 - DNA, 122 bp, Homo sapiens
gaattagccaacttaagaacaagtccaacagcactgctaagcaagagcctaataactcagcgtttcgcgacatctcttggcggcgttgaccgtttgcccgggacactggtttagaagcacgg

SEQ ID NO: 62631 - DNA, 122 bp, Homo sapiens
ggtgaggcagggaagaaatgagaccacccagctatcccaacagctacctcacctcaaagacgcattgtgcctgatgaagctaagcaggggtgaagaaactgcacatccactgcttgggacag

SEQ ID NO: 62632 - DNA, 122 bp, Homo sapiens
ccagaggctccaggttacccacgggctcagggatggctcccacggggtgtttccagttcccgggagagtcgagtaaggtcccggagcgcacggccctgaggcctggcctgggggctcgggag

SEQ ID NO: 62633 - DNA, 122 bp, Homo sapiens
ggcgcggcggagggtgcaaaaagccccggtggtgggtcaaggagccgcaaaaagccccagcgtgggggcaaaaagccgcggcggcagtggcaaaaagcagtggaggtaaaaaacactcggca

SEQ ID NO: 62634 - DNA, 122 bp, Homo sapiens
tgaagtcagggccaacgtcttctggttcaactcggaactccccatttccagcccagcgcccgaaacccagtgggcctgggaattatgaatttactgttgaatgaatgaatcaattatgttaa

SEQ ID NO: 62635 - DNA, 122 bp, Homo sapiens
gatggctccgatttatccatgtcggtgcagggctggagaacgagctcggcccagctgggacgctactgctgtgaggcttcccgtgcatctcagaccttgagagaccaagcctctcttttcac

SEQ ID NO: 62636 - DNA, 122 bp, Homo sapiens
acccagtgtggaagacagtttgaccattcttcaaaaccacacacaagattaccatatgatcggcaattttactcctaggaatataccaaagagaattgaaaacatgttcacataaaaacatg

SEQ ID NO: 62637 - DNA, 122 bp, Homo sapiens
gcagataggcaggctctgagcccatcaccaagccacagaactggtggtgggagatgcagccgggaaatgggggcgtcctgccgtgctctggggagttgctgcatcttcttttacgggataat

SEQ ID NO: 62638 - DNA, 122 bp, Homo sapiens
gtgggaccaggaacaaaatacgcttagtgagttgcccattttaagcgagttgtgcacagacgaaactaagggtcagaaacagagaggatactcctaagtcacccacttctctgtggccgggt

SEQ ID NO: 62639 - DNA, 122 bp, Homo sapiens
ctgtgtcactgacttactctgggggtgaccttgacctggtcccttccctcggcccatttgcgaaacagggaagcctagttaaaagatcactcaggtttaggggtgccagacctagcaaataa

SEQ ID NO: 62640 - DNA, 122 bp, Homo sapiens
ttggaggggggggtgctttttgtgtatttttcaaatttttttctgttggaagatcaagaccggccaaaaatccatgatcaaaatgtgtttgcattagatttcgcattggaagaagcggcgat

SEQ ID NO: 62641 - DNA, 122 bp, Homo sapiens
cgtcgcgggtgttaaagggcgagtctacgcggatgtcacggtcgccgcgggcaaggaccgcgaggttgcggccctgctccgaatcccggctgcgctggccacgctcctccacgcgcggggcg

SEQ ID NO: 62642 - DNA, 122 bp, Homo sapiens
aatctctaacccagtatcggaacgttaagcggcttctccgctttcctgccgtgagaaactcgaggtgacaacctccgtttccggttggctccggttgcagagttgagtgtcctgagaggtca

SEQ ID NO: 62643 - DNA, 122 bp, Homo sapiens
aagagaaggaaggattttgtggattgctacattgtgagtgtggggtgagtcccagaacctcgctatgtcagggaaacggaagcgtgtggtgttgactattaaagataagcttgatataataa

SEQ ID NO: 62644 - DNA, 122 bp, Homo sapiens
cacccacctcggccaaatcccaaagtgctgggattacaggcatgaggcaccatgcccggccggcactgttttcttaaacagggagtagtgagagataaaacccatcgcatgttttggaagga

SEQ ID NO: 62645 - DNA, 122 bp, Homo sapiens
ggaacatatgcataaacaaaagggagtatgtagtagttatagagatcaacatttgaagcacgttagtctctggaaactacatgtcattggctacctgggaggtgaatttgaaaaggcttcat

SEQ ID NO: 62646 - DNA, 122 bp, Homo sapiens
ttcttattataaatctagtaattgttactacagtggtgactttccttgacccatctacgccgattccctctccgggactgcgcccaaagcttccaattcccgcccacccggaggattctgcg

SEQ ID NO: 62647 - DNA, 122 bp, Homo sapiens
agggggccggggacatgagaagtttggctaagaaatttttcttttctttgaaaacaaaagcgttgttataaatggaacaaaatttaagtcaacatggaacccacatctctttcaaacgtcgt

SEQ ID NO: 62648 - DNA, 122 bp, Homo sapiens
ccgctcgcagtcccggttcccgagctcctgccgccgtcgccctgtggaggacacccctgccggccccgcagtccctcctcgacttgcgctggcttcggccgtcctggaactcgagctcgttc

SEQ ID NO: 62649 - DNA, 122 bp, Homo sapiens
ccgttagcgcgcggccgttagcggtcggtttctactaacggtaggcgtcgccgcgattcccgaaggtcatagtccgcgtgacccacccccgtttgcgcgctcgcagtcttcgccggcgcagt

SEQ ID NO: 62650 - DNA, 122 bp, Homo sapiens
aggctaatcttcagtgtatagacattttaatatggtactatcttaaaaatcggattttatcgggtttataaataaatctagttgaaaaagtcattttatctgaaggcttctcttgaaaaaca

SEQ ID NO: 62651 - DNA, 122 bp, Homo sapiens
atggcgcgcaggagcccgcgcagtcgctcgcactccgcctgcagctggctgtggtcctcgcgcaggcgctgcctggccacactggtggggttcaggctcatgtgcagcactttggtcctgct

SEQ ID NO: 62652 - DNA, 122 bp, Homo sapiens
ttccccttgtttcctgtggtgccaatccattgcttcgtttttcgtgtttgagagcttttgcgtttcattgtacattgtacaattctagggagccattgttcccatcctaaagctggtagatg

SEQ ID NO: 62653 - DNA, 122 bp, Homo sapiens
cccacgctgagtcagagctgtaggcggggcggccgcgaggctgagtcaggcaggggaggccgcccccttgcggaggccgcatcttcttaagagccgattctgaactgaccactccttgacgg

SEQ ID NO: 62654 - DNA, 122 bp, Homo sapiens
caccggccctttataatgcgagggtctggacggctgaggacccccgagctgtgctgctcgcggccgccaccgccgggccccggccgtccctggctcccctcctgcctcgagaagggcagggc

SEQ ID NO: 62655 - DNA, 122 bp, Homo sapiens
ggggtatctcccgaggacccgggctcctcggagccacccagtggggatgtgtgggtgcctcggggccggccccctgcagcggccgcagaggtgttggtgtgctggaccgggggcagctgggt

SEQ ID NO: 62656 - DNA, 122 bp, Homo sapiens
ttgggatgtgaaatctttctggaatgttccttcgttagttcctcgcatggcttgttccctcgcttccctcttttgagtcttgactcaagtcacctccccagggaggccctgtcctgccctgt

SEQ ID NO: 62657 - DNA, 122 bp, Homo sapiens
aaagcttctggtgacacacagctgggatcagcccagggctggtgcgacaccctggactcccggccaggaaggcacggaggagggcatgggtgtggccgggccggggtgggggctcagccttt

SEQ ID NO: 62658 - DNA, 122 bp, Homo sapiens
agcctgggctatgggagagaccagcctgaacacagaggtagtgagtgggactccagcttgcgccaagggcgggggctgggagcgggggcagggtcactgccacccaagtcgtccgcgccggc

SEQ ID NO: 62659 - DNA, 122 bp, Homo sapiens
gtcccaggaccatcggagtccatgctctgggagtgggcagggacctggcgccttctgagtcgagtagggctttaggtggcccagtgcgtggacgcttacttcagccccgtgggactttcctg

SEQ ID NO: 62660 - DNA, 122 bp, Homo sapiens
ccccaaactggcttgggggtcgagtatccggggctctcccccgcactggcgcttcccgcgcgggcgccccaggtgtccgttccgttccgccctctgcctggcagggcatccagaggtgtccg

SEQ ID NO: 62661 - DNA, 122 bp, Homo sapiens
cgagagctgggacgtggcgggcggcgctggctgtggggaacagcgcctgtcagtgaaaagcgcgggcaggcgcaccggagcggcccgccaggtggctggccccagacagagcgcggaggcgg

SEQ ID NO: 62662 - DNA, 122 bp, Homo sapiens
gaacctggcatctccctacaaaattcagaagccagcagctttcagggccttagcactcctcgccagcacagcaccctcctccctgctctcaaaggccaagcctcgggtgcctgagcctctgc

SEQ ID NO: 62663 - DNA, 122 bp, Homo sapiens
aatgggggccgagaacctgcgcctctacccagttcccaggcgatacggccgctgctgatccggaagctcactttgtgaaccactgacgcagcacatggtgaggacgctgtatgtgaacactc

SEQ ID NO: 62664 - DNA, 122 bp, Homo sapiens
cagccgtggctccggcagtgggtctgattttatcccgcaaagtgatgtcctgtgaccgttcgatagttccctgagtcactcaataagccagttgggccccatctccctgccctcttgcgagt

SEQ ID NO: 62665 - DNA, 122 bp, Homo sapiens
gaagtcaagggcgggctccgggtggcccggccgcgccagggatgggaacccggcaggagtcgctggggaggccgtgtgtgtttcactgtattaccaactatgtgacaggctgcgggtgtgac

SEQ ID NO: 62666 - DNA, 122 bp, Homo sapiens
tcgcccagtctaccatggggtggcgctctaaggcccagatttgcccgccctcgtcctccacgcgctattgcaagcagcagagaatgaaccctctcaagctttcgttcttgtgtctctttctc

SEQ ID NO: 62667 - DNA, 122 bp, Homo sapiens
ggtctcagggagtagggggcttcagggcctcccagtctagagccggattggcgagttagacgcttgtagatccaaggttggattggggtggggtctctgggacgttggatcgctacgcaagg

SEQ ID NO: 62668 - DNA, 122 bp, Homo sapiens
caggaggaaaagtgagtgagtgtgtgtgtgtgtgtgtgtgtgcgtgtttctgtgtgcgtacggccagaataatgagtcgcactaattcatagaattccattttggccatcacacacggctcc

SEQ ID NO: 62669 - DNA, 122 bp, Homo sapiens
tggagacaaaatcagcagtaggatctcggtttccagcccagtgcaatttctgctctatcccgctgacctcattgttgaggtaggtggtaatgtaaagggaagagctaccccttatgggatgt

SEQ ID NO: 62670 - DNA, 122 bp, Homo sapiens
gcccgctgtccgcgttgcaaggtgcaaggtcggcagtccaggaaaggtgttcctgtacgacgaccacgggccacccctcgctgcttagttgcccccagaagttagagttgctgccgtgggcg

SEQ ID NO: 62671 - DNA, 122 bp, Homo sapiens
cgatgctggctgggtcccctggttcgcaagacctcggactgccagggggtggggcctcaccgcgcccctccctctccggttcgggccccgcccctcctcctcctgcgccgggctggggtacc

SEQ ID NO: 62672 - DNA, 122 bp, Homo sapiens
accctaaggcatcttccaaatgactctcactgtaacgttcaccatccgctgtcccagattcgaaacctaccctgcacggcaatccgcaagcactaaccgtggttggtggctagaatatgagt

SEQ ID NO: 62673 - DNA, 122 bp, Homo sapiens
gtctcaagtccctttcccaggacatcctggaatcagcagccccaccctgggccgggtcagcgcgtgccatcggagcccccacgtcagcctctctctccgatcggcacctggcgtcccagtgc

SEQ ID NO: 62674 - DNA, 122 bp, Homo sapiens
tgaaattcattttaatagaaggaattttcgtggatataatctacaaccgattttgctctgcgcaggtaagatccgttttcagaccaaaaccctgaaaacaagcgcagccagtcaagcgaacg

SEQ ID NO: 62675 - DNA, 122 bp, Homo sapiens
caggaaggggggcaatgccttgtagaaaagagcccaagagcaggtgtgaagaggcatgagcgctagtgcagctttgctgccaatcagctttgtgaataaaagcatggggtagcatgaagata

SEQ ID NO: 62676 - DNA, 122 bp, Homo sapiens
cctcctccttccacacggctgtggtgaaccagtaccgcatgcggggtctgaaccccggcacggtgaactcctgctgcattcccaccaagctgagcaccatgtccatgctgtacttcgatgat

SEQ ID NO: 62677 - DNA, 122 bp, Homo sapiens
cgcctcccgccctccgccccgagccccaccccccgaaggccgcgccccaccgcacctccgcgcacggccaatggcgtgagcccctgacagagtcccgccccctccaaacgcacagccaatgg

SEQ ID NO: 62678 - DNA, 122 bp, Homo sapiens
cccagcaaccgctgcagaggcgggaaaacttgaattttgcaaccaagagttgcagcgggacgcctaagcaacgataaggggcggtggaggggcgtcgttgggggctgcagcatcccaaagtg

SEQ ID NO: 62679 - DNA, 122 bp, Homo sapiens
attccagtggagctgtcattttgtggctcccatgccctggtgtggcatgctctgttttgccgtgactgcggctacatggcttggcctgttgggtggcggtggttgtgtggggctggctatgg

SEQ ID NO: 62680 - DNA, 122 bp, Homo sapiens
gtggcaggtccaagagacagagattatgtgtcgggacacagacagcctcccatccccaaccgtaatggattcaatttcaagtccacagagtggggaggaaggatagggtgggaaagtgagac

SEQ ID NO: 62681 - DNA, 122 bp, Homo sapiens
agaaagggtttcatcatgttctccaggctggtctcaaactcctggccgaagttatcagcccgccttggcctcccaaagtgctgggattacaggcatgagccatggcacccggccacatttgt

SEQ ID NO: 62682 - DNA, 122 bp, Homo sapiens
ggcggccgagggaggggtgacctggcggtgggctgaggagtggtggctgtggcccctacccgtggatgtgaatgctttaggagttggccacccatgttgtgaactgaggttgttcccaggcg

SEQ ID NO: 62683 - DNA, 122 bp, Homo sapiens
cgatgccggaccagatctccgtgtcggaattcgtggccgagacccatgaggactacaaggcgcccacggcctccagcttcaccacccgcacggcgcagtgccggaacactgtggcggccatc

SEQ ID NO: 62684 - DNA, 122 bp, Homo sapiens
ccctgtcctcgctcaagacttgatgtcccattgcccaagcattgctaagggttggctctgcgctttcactatggttcatgtatttattcttaaaatccgactttaaggtccgggggaggcga

SEQ ID NO: 62685 - DNA, 122 bp, Homo sapiens
gaagacataggcacacttgtatattggcacaaacttattgagagcagtttgaccaaattgcgcatgtcctttgactcagaaattccacttatgaaaatctacccccacagaaagactgtaag

SEQ ID NO: 62686 - DNA, 122 bp, Homo sapiens
cctgtaacagaggggcaggagtggccaccgtcctgtaacggaggggcaggagcgggccaccgtcttgtaacagaggggcaggagcgggccaccgtcctgtaacggaggggcaggagcggcca

SEQ ID NO: 62687 - DNA, 122 bp, Homo sapiens
ctgatcgcggacgcacgcagccccctcctcgggccctgggcccgggaccccagagccccgcgcactccgcgctcctgcacctccgcgccgcgcttgcacacgaacgaatgccgggcaccgcg

SEQ ID NO: 62688 - DNA, 122 bp, Homo sapiens
cttgtcatgatgtacaaccttagctagccttgctcctctgtgctgcccacttcagttatacgagaaggtattatgttggtgttagctggtaaaatgtctgaagaatctgtgaacccaaaaaa

SEQ ID NO: 62689 - DNA, 122 bp, Homo sapiens
ggaggtgtcagggaaaagcaagagtcaagaatgatgttttggctctcgggttggcaattgcggatggtggtaccactaactgagactggagacagatgaagaggcacaaagtgggagggaaa

SEQ ID NO: 62690 - DNA, 122 bp, Homo sapiens
gtgctcagcccccggggcacagcaggacgtttgggggccttctttcagcaggggacagcccgattggggtgagcgtcccccactccttccctccaggcctcacccctggtctggctgggccg

SEQ ID NO: 62691 - DNA, 122 bp, Homo sapiens
aggaggtgacaaatgggattctgtttcctcactgtagggaatccagagagataatgacttcgcgcttagcacctgggtcagttctgcttggcttttccccagccagcttccttctctctttg

SEQ ID NO: 62692 - DNA, 122 bp, Homo sapiens
tgtgcctcggtccagacggcgctgccgattttccaaggagaggccgtggcccgcgtccgccgctgcaggactccccagcttcgccctccgctccgcgctgcagccctgcgcggtgctctcgg

SEQ ID NO: 62693 - DNA, 122 bp, Homo sapiens
ttcccggccccacagccagcctggctccagctgggcaggagtgcagagctcagctggaggcggagggggaagtgcccaggaggctgatgacatcactacccagcccttgaaagatgagctgt

SEQ ID NO: 62694 - DNA, 122 bp, Homo sapiens
gtaaaaacccgttttatgggggaacgtaattgtgagcgggatgcgctctctttagaatcgcgtcctcccaaatgctcccgccgtcccattaccggaatggggaccattcggctgctgcagat

SEQ ID NO: 62695 - DNA, 122 bp, Homo sapiens
ccctcttctgtacaaccccctcacctgggggtcctgggccgagcttcggagtcccagggccggcagcgttgctccacaggcagctggtattaactccgtgtcggcgtaactgacccactgtt

SEQ ID NO: 62696 - DNA, 122 bp, Homo sapiens
cgtcgccagcaagcacagcagtaggaccagggggatgcaagagcgggggcggccggggatcgtgcttctcgctcaggtccagattcccggcaaccaggccggcggaatcacgtgccatgctc

SEQ ID NO: 62697 - DNA, 122 bp, Homo sapiens
taaaatgggcttatgtttttttcctaaccaattcaggctatggctttaagcttctttttacgggaatatgacttctccctcgattttcaattcttgttaaaccaagctcaatttatatgaaa

SEQ ID NO: 62698 - DNA, 122 bp, Homo sapiens
acttcacaacaattactactttaacacctcttttctgaagcctataagtatttgtggcaacggagaaaaggaggcagaatcctcaggctgtcaacatgcccttcatgcaacctacaacgagc

SEQ ID NO: 62699 - DNA, 122 bp, Homo sapiens
ccatctgcgggctgcctgctggaagtgctttagcctctgggcaggaaggctgatgttctgcgacaaacatcctggctgggaaatcccctggcccgtaggtccctagggcctgggcagcctcc

SEQ ID NO: 62700 - DNA, 122 bp, Homo sapiens
gaagatgggtgaccacctgaccaacctccacaggctgggtggcccggaggctgggctgggcgagtatctcttcgaaaggctcactctcaagcacgactaagagccttctgagcccagcgact

SEQ ID NO: 62701 - DNA, 122 bp, Homo sapiens
atcatatcatatatttgtctgtgtgtttattgcagtccccctctccaacaacataaaacacgagttccatgaggacagggagtctacctttttctaacacctggaatagtgtccgatgccca

SEQ ID NO: 62702 - DNA, 122 bp, Homo sapiens
tgggctggctgcctgagaaaaggccactgtggctctgcagtttcaaggtggcaaggagcccggcactcgcgctgggtacggcctggcgggtgcatgtcccagggtcgggcgcagctctccgc

SEQ ID NO: 62703 - DNA, 122 bp, Homo sapiens
aactgccttttacaagttagaaaatgctgtttgaatctagttgaaccagggaatacagagcgagcaatatgtagcttgaattacatttaaaagcagattttttacaaacaaaatggcgaaag

SEQ ID NO: 62704 - DNA, 122 bp, Homo sapiens
ccagtactaggatatctttctttgctgtatcttccacacccattagatcatctttctcagcgacttcctcatactaaggaaagagaaaagagaactgataaccgtctcttcccacaacacaa

SEQ ID NO: 62705 - DNA, 122 bp, Homo sapiens
ggccttctgctcttcccgtttttcacaactttaattattgacaatgatttctgaatctcccgtgagctctggtgtcacatacttgacacaaagtacagttaaaaacttcttgaatgaatgag

SEQ ID NO: 62706 - DNA, 122 bp, Homo sapiens
tcccagtttagttgcaagagaactgtgaatgtgacaagggctttgtgtagggaattcaggcgaatgaaaggaccaaggagacccagttgagggaacaaacttttgagggtcagtggggtcag

SEQ ID NO: 62707 - DNA, 122 bp, Homo sapiens
agcgttggagtcaggcacgcgttagtaacatcgtttcccaggcagagactcagctgcaaccgaggccttgaccgccctgggaggaattttctgcccatgtgtttttcatttggcaacaggtt

SEQ ID NO: 62708 - DNA, 122 bp, Homo sapiens
cgtgggcagaaaaggtctctgccaccatgcgctccacaggtgtgaggaggaggccgggggcggggccgccctccgccagcttcttgcgcacagcacctcgcaggtcccgccacttgtgcttg

SEQ ID NO: 62709 - DNA, 122 bp, Homo sapiens
catttgcatgtcggcgacacgcctggtctcgggctccctttctggggctgtcctcccaggcggctcccaggtcctcatccagggaagagcccagcctcggccagaagccaccgcggcctcca

SEQ ID NO: 62710 - DNA, 122 bp, Homo sapiens
catagagaggcccatgccccggtactggcacatcatgttggacagcagcttggaggctgccgacactgaaatacgttctccatttcgcagatagtacagcctgggtgaggacaaggtggagt

SEQ ID NO: 62711 - DNA, 122 bp, Homo sapiens
accccatccctggaagctgctctctaggagttactctgaagcagttgccacttcttccctcgggccttttcccttgataattcttcacttcctctgggaagtcaccccgaccccctgtcagg

SEQ ID NO: 62712 - DNA, 122 bp, Homo sapiens
ccaacctgccattacatcagaaaggcttagccgcaaggcaggtgcggcaacttgaggtgacggctgggggtggggccggatggctgaccccacccttcgtacccgtttgcttccctgtggcc

SEQ ID NO: 62713 - DNA, 122 bp, Homo sapiens
cgtaaagtgaaagggttcttgcgcccccacagcagcccggggcagggtcaccctcgcgaccggggcggtcattgccgtattccgtcctgagctgccgctcccccacgatcctcccaccaatc

SEQ ID NO: 62714 - DNA, 122 bp, Homo sapiens
gtaatgtcattgatagtctacttgtttcacccttactttttgttattcttgttcaccaatcgccatgcactttgacttccatgatatagttttctcaaaatgctctctgtaggatgaccaag

SEQ ID NO: 62715 - DNA, 122 bp, Homo sapiens
aaatcatactccacagaatgcacaacaactgtatggccagcattatttcctccctggcagcggcacatggggtcctgcgccagtagatccgccacctcccctttgccttcgtcgccccactg

SEQ ID NO: 62716 - DNA, 122 bp, Homo sapiens
tgctgaggcctttttgacggtttgtccgccatcactttcagaggcgctccgcgcgaaccccgaaaatctgtgcaaaattctcagggttaggggaagagcatgggtggagagtaaagtgaagc

SEQ ID NO: 62717 - DNA, 122 bp, Homo sapiens
tcatttctcacttgcttgcgggcagaggcctactgagagccaggccgtgggccacgcttccgatccggtggggagagcctcaggcgcgtctgcaggcacctgcctcctccaccaacacaacg

SEQ ID NO: 62718 - DNA, 122 bp, Homo sapiens
agcactccctgttctgaaggttttccctaaacacggagacaacactaaaaagctgtgccgcgtgagggctgaaagtcctgttttctccctagcttcagtgaagaaagcctgacggctccccc

SEQ ID NO: 62719 - DNA, 122 bp, Homo sapiens
tccaactgccgctgtagagccactgggatgcgcaccaccggcaggggttcgtcgggactgcggaccgtgaggccccgtcgcggcgccaggagcaaccgagtcacgagggaaaagagccgcac

SEQ ID NO: 62720 - DNA, 122 bp, Homo sapiens
tcactgattcattattaatctgtaggaatggccaattttccatgataggagctgttactacgatgaggggactgtgcttagtttggacttctttctgcaagggtccaaaggcatctgtcttt

SEQ ID NO: 62721 - DNA, 122 bp, Homo sapiens
ccctagacgctggctcctcagtagcatcagcacgagggccacagcggcgggcgcccctggcgctgcccactcccccgtgagccgcgggatgtgaaccacgaaaaccctcactcgcggcgggc

SEQ ID NO: 62722 - DNA, 122 bp, Homo sapiens
agcacacgtcctcgtctcattcctgatcgaacgcggtggtgagagcacacgtcctcgtctcgttcctgatcgaacgcggtggtgagagcacacatcctcgtctcgttcctgatcgaacgcgg

SEQ ID NO: 62723 - DNA, 122 bp, Homo sapiens
gtccacgatttccagcgaacagcccggggatgggcctgggcctggcgaggggtgggcctgcgggaggccgggcgaggggcggccccggcgcgtggaagcagggtacggcgcctgcggatccc

SEQ ID NO: 62724 - DNA, 122 bp, Homo sapiens
ttagggctagccaaagtgtatttcgccctcccagggaggccaatggagtagcgagaaatacgagaaatatcatcacaccaatcatctctaaaaggaacttctaaagaagtcccaaggttctt

SEQ ID NO: 62725 - DNA, 122 bp, Homo sapiens
aaaatgcaggagctagtaagcttcaaatggaatgcaaagaatctgcccagttaattggcccgaggaaagaacaaggtaattctatagttttaaattttctgaagcccaaaggccccttcaga

SEQ ID NO: 62726 - DNA, 122 bp, Homo sapiens
cccctcaccccactatccccctcgtcccgctgcctgcctcggccgccaccccactcacctcgcatgtactcaatggtgccgtccagcacaaggttgaggagtgggtcgaagcccttcaggat

SEQ ID NO: 62727 - DNA, 122 bp, Homo sapiens
aacaagcaatgatgccacatctctatctgaatggcaaatgtctgagtttatcaaaacaatcgataaattgcatttccaggccgggtgcagtggctcatgcctgtagtaatcccagcactttg

SEQ ID NO: 62728 - DNA, 122 bp, Homo sapiens
acagagatttcgtctctcccaatcgtcaggcatttcagtggatctgtgctccttgtgagccgctctacggtggttaagtcaaagaaaaaaagcacacttcccagggcgacaacggactctct

SEQ ID NO: 62729 - DNA, 122 bp, Homo sapiens
aatcaaagacggctgatggaggggctcagccaatggcgcacactgtcatcgagtcggaggcggccccacttcagtggagagtcatcctgccttcctcgccatcagctcccatctccttctgg

SEQ ID NO: 62730 - DNA, 122 bp, Homo sapiens
cacacacacctgcactcagcgccactccacagccactgtggggtccggagcagctgcccccgcacttgggccgcgtggccttgtctcagtctgccttgtcacctgtcaggtggactcctgga

SEQ ID NO: 62731 - DNA, 122 bp, Homo sapiens
tgggtattccccgtattgattaagaatgggacggacttaccctccaccctaagagttacccgaagctcggcatccgcgattgtctaaggggcctccgagacgttcgggcagcgtcagtcttc

SEQ ID NO: 62732 - DNA, 122 bp, Homo sapiens
gtcagaacaggaagaagaacctgagaagtcgccggggaagggaggccaggagcaggcgtccggccccttcccacagcccgggagaaattagtgttgcgccccgcccctcccggacccccgtc

SEQ ID NO: 62733 - DNA, 122 bp, Homo sapiens
tgctgactgggaaggccgagccgggtgggcctgacaccctagatttaacaagcttccaagcgcaggagtccctctgcatttagctcgttttccttgcacctgtcaccgaaaggcttatttcc

SEQ ID NO: 62734 - DNA, 122 bp, Homo sapiens
cagggaaggctgtgggtttgcactacatagcacattgttctatccaggcaaaaggtcaagcgctgtagaaggccaaagctaaaaatacagtgtggcactggggaaaatgaaggagctgtcca

SEQ ID NO: 62735 - DNA, 122 bp, Homo sapiens
ggatcccagcaatgaactgggcctcaagtggaatgtctcccactttctgcctaacctgcacgtccatcagcacctcatcaatgagatacgactcctccggggagaatttccccctgcctggt

SEQ ID NO: 62736 - DNA, 122 bp, Homo sapiens
cgtctgcacagtggggataagaaagcctacctcacgttacgattttatacataggataaacgcaagattaaatggatatttggaaaacactcggctggttctcactcaacaccaccgccttt

SEQ ID NO: 62737 - DNA, 122 bp, Homo sapiens
gctgtggggcccaacacagccacctggtcccaccagtgcccaaggccaccacaagctgaccgggaacccagcacctctgcaggcagtggggccacctcaggacggccaggatgggcccagag

SEQ ID NO: 62738 - DNA, 122 bp, Homo sapiens
catttcttctaacccttaggtacatctctcaacatacacaaaaagctattttgtattgggcgagtttgacccaatctcctagcatttatcttgaatacaacagttctcaaacttgagtgagc

SEQ ID NO: 62739 - DNA, 122 bp, Homo sapiens
cataaggaccttgtgaatacaacagaccaaaccagacctatggaaagacagctagtcactcgtggacacccacctaacaaactatactgtcccaaatacttttttttaaaaaagtgacttct

SEQ ID NO: 62740 - DNA, 122 bp, Homo sapiens
cccacaaggaggggaaaccaggtcgccgcggtctgcagcagaacgccaggttccagaggacggcaggcggagggcggagggagaaaggcgcgcgaaggcgcggaggaggcgtcggctgcggc

SEQ ID NO: 62741 - DNA, 122 bp, Homo sapiens
ccagaacactggcccccccaccccgggcctggaccacacccttcaggtctgtctccggtacgctgggagcctgcaggcagggtgccagctctatacctactggttctgtaatgcacttggcg

SEQ ID NO: 62742 - DNA, 122 bp, Homo sapiens
ctgtaagtaatactccccagaaaagacagacaatcctagttaaccagcccatgctgcagacgctgtaggtccctttgctgctttagtcttccttcctgtattgtgcggccagagaagttcaa

SEQ ID NO: 62743 - DNA, 122 bp, Homo sapiens
cctgcaaaccaaggccccgcccactccgccattggggtgcaagccccgcccatcagccatcggagggcaagccacactccaccccgcccccgcgcacaggccccgccccacttttgccccgg

SEQ ID NO: 62744 - DNA, 122 bp, Homo sapiens
tcagcaccaggcagatcatgatggcggtgcgggagcgggatccgcggggcggggcggtggcgcccggggcggggcctgcgcttaaagaggcctggtcggggcgctgcggcctccgcggggag

SEQ ID NO: 62745 - DNA, 122 bp, Homo sapiens
gtagctggggtttgcccggtacgccagcggccctgagacgatgtgtgcccgcagcacgatcgtgtctgttggcatttctgggtgtggatgctccaaaccaataaaccacaatacagaaccca

SEQ ID NO: 62746 - DNA, 122 bp, Homo sapiens
catggtggtgtttaagctggtaaggcctgcggagctccggagcgggacgcgagggggtgacgagtgcacctggtgactggagccgggctccgctgtcgtgcgcctttgcagccatctgttct

SEQ ID NO: 62747 - DNA, 122 bp, Homo sapiens
ggactcctggcagaagccgacacacagttgggccataacaaagagccctggtacggggcacgttcccgcccccgggaggttttggaaacactgtgaggcagggggcggggcttgagcgggcc

SEQ ID NO: 62748 - DNA, 122 bp, Homo sapiens
accttaggtgatccacccgcctcggcctcccaaagtgctgggattacaggtgtaagccaccgcgcctggccgggaaatatctcttacagaaataaaggcagttggctgggtgtggtggctca

SEQ ID NO: 62749 - DNA, 122 bp, Homo sapiens
ggctggcccgcccggggatggggcagaagctggggcggctgagagcgcagcgcgggctcccgggagacgccggcccactgcccgcccgctcgccgcaggtaggcccggcccccgggaggtgg

SEQ ID NO: 62750 - DNA, 122 bp, Homo sapiens
ggcgatcttcctctggtgaactcttgagtaatgtgctaaaactttgggtttgctctgcgacgcagacattctcgaaatgccatcgatgccgtggagcagatcccatctccctcggctcatcc

SEQ ID NO: 62751 - DNA, 122 bp, Homo sapiens
atccagcctagcaaagaggctgctccggatggggaggggatgaaaaccctgcgggtccgacgcccatgcccacgttgcccaggccttcacagacccccaaactggaaccgccgggacgacga

SEQ ID NO: 62752 - DNA, 122 bp, Homo sapiens
taatattaggtagaaaatgaagggtatctttgagagcagaactcaaggaagcaagcaattcgccttaggaggaaagagttacctgtggataaaggagaaactgaaaaattcacaagtcaaga

SEQ ID NO: 62753 - DNA, 122 bp, Homo sapiens
gcgggcgtgcttactcaccagctggccgatccggtccaagttgtccaggaagtacttcaccgactccccctgtcaggaaggaagaatattcacagctcagtctggactgaggaatcctgatg

SEQ ID NO: 62754 - DNA, 122 bp, Homo sapiens
tgcccactgtgttgggtgtcacaatcctaccttccttgggcgcgctacagatggacgtcccggggtgcaggtggcgtgccttgctgtgtgcaaatgctttgttcagtaaaagctgtgtgcaa

SEQ ID NO: 62755 - DNA, 122 bp, Homo sapiens
aaaagaatttcaagtaaaatgaacagatcttcatagcatagataggcggtaagatcttgacgttgataactgtgaaagactttgatttcacagccaacaggatgaagtatttatatcatatc

SEQ ID NO: 62756 - DNA, 122 bp, Homo sapiens
atgcagcacctctgctctcaactcgaagctcacaagtataataaaattcaaagtagcttgcgtgacctgcaagatcatacatgacgtagcatttagctgctacttcaagtggatttgccacc

SEQ ID NO: 62757 - DNA, 122 bp, Homo sapiens
accagtgtgaagataggaaggttatttggagatatctgtgcctgctaaacacaaatgcatcggcccacagaattgccttctctgctgttaaaatgcttggcaaatggaactcctagctgagg

SEQ ID NO: 62758 - DNA, 122 bp, Homo sapiens
cgtgctgcagcctgcgaggggacgacggtgtccctgtgttgtgcctccccgtccccagcccgctgatccagttccacctgctgcactccaagttccacctgtgcagcgtccccacccgcgcg

SEQ ID NO: 62759 - DNA, 122 bp, Homo sapiens
tgctaacacaggcgtctcacacaagaaggtccctaaaatgaaagacgaacatcaggatggcggccgctcatccgccagacttgctgggagtttcaggagcattcccacacacgatccctaat

SEQ ID NO: 62760 - DNA, 122 bp, Homo sapiens
gcccttgttagcgctgaaaatggaagcccctccattcaggcctggacagatgatgggcagcgaatgtgctcacctgctgagctgtggggctggactaggtaccaaaatcagggtagaacact

SEQ ID NO: 62761 - DNA, 122 bp, Homo sapiens
agttgcaattggagctacatatcacctgtaaagtcttctggccaaaaaattaagcccagccggaccttattaaacctttaaatctaacaattagttttgaagcttttacagattaaatgaag

SEQ ID NO: 62762 - DNA, 122 bp, Homo sapiens
gctcatcattatcatttaagatctctcttgccttgtcctgcagcccttcccttcttgtcccgtgcccagcccatctggggaccgtcacttcgtccttcttcttcccagtccaaacttcttcc

SEQ ID NO: 62763 - DNA, 122 bp, Homo sapiens
ctcccgggttcaagcgattgtcctgcctcggcctcctgagtaactgagattataggcacccgccaccatacccacctaatttttgtgtttttagtagaaacgagggtccacaatattggcca

SEQ ID NO: 62764 - DNA, 122 bp, Homo sapiens
aggctggggctggcacaataggcaagattatggcccagagaggttacctgtcccaggccacgcagcacagaactgcgtttggaagccagactttatagctgccagcactacctgactcagat

SEQ ID NO: 62765 - DNA, 122 bp, Homo sapiens
tatctgggctgcttgttctccagggggagctctctcgaggatatctgggtgcttgttcttcggggggcgctgtctcgaggatatttgggctgcctccggagtcgcagtgttatcggaaagtg

SEQ ID NO: 62766 - DNA, 122 bp, Homo sapiens
cgggatccggcccccctctcggccggtcgtggcgccgagcggcctggctcccggcgggcccgccccttccgggcaaacgtcaccgccccacccagcaacgggcccgcccggcgcaagtgcgc

SEQ ID NO: 62767 - DNA, 122 bp, Homo sapiens
ggctcccggaaaggagcttcagggatgggggctgtagacgcctggggagggacccctgtacgggggaaagggagcgagaagggaccccgctgagagctggtaaggaattctctgccgccccg

SEQ ID NO: 62768 - DNA, 122 bp, Homo sapiens
tgaagctgctgaccaccaagacctttgctcagactgtgtccagcagaaccctgagcccctcgaccccacagtctcccagcagtgagcagagtgaggcttggagcctggatgggatgtggagg

SEQ ID NO: 62769 - DNA, 122 bp, Homo sapiens
actggctaagggaggcccgtttctctctttggttatctagctgtatgagtgccacagagccgtcataaagctagataaccgaaagtagaaatgattctcacaacttctgcgtgcgagcgccc

SEQ ID NO: 62770 - DNA, 122 bp, Homo sapiens
gtgtacgggtgctggctgacgatccgatcacatgagccgcgtgaaggctctgaatctccacggtgccatctccagtttctgggcatcgcgttcctctcaagaatgaacggcgatttcaaagg

SEQ ID NO: 62771 - DNA, 122 bp, Homo sapiens
gtcagaatgccttcatctgatcaaacactgtcaagcacgccactgtccaggcaccaggcacgcaagtggacagaagactggccctgtgagactctcttctccgggctgagagacaatggcca

SEQ ID NO: 62772 - DNA, 122 bp, Homo sapiens
cctgattgggtgatgattcaagtcctgcccccttggtactgagtgacaggagaagcaatgcggtatgtggctgagtaaagacagattgacagggtcttggccactgcccttcgcgggccggg

SEQ ID NO: 62773 - DNA, 122 bp, Homo sapiens
gtttcccccagtaactgtgaaggcagggtcagaagcagaggcctgctctacagcccttttcgtaatcaccagtcctccccttggcctacttcaaacatgaccacacactgctgctcccccag

SEQ ID NO: 62774 - DNA, 122 bp, Homo sapiens
tcaaggtaccccggagtgtgaggagggtggagagaacaggccagcctggggtgcccaagacggacttggtccaagccaatttggctctgtcctgcttctaacagttctattagagatcacaa

SEQ ID NO: 62775 - DNA, 122 bp, Homo sapiens
cctctctgcccacttcctgctttggcagaccctggtgtcgtgggcggactgggccctcagcgccacactcctggagctccacggcctggaggccatcttgcaggtggtcgccatcgctgcct

SEQ ID NO: 62776 - DNA, 122 bp, Homo sapiens
atctgacatgagaacaggaacaaagcctgtggaaacccgctttctctcgagcaatgacagcgcggatccacaggtgagtgtgccatccgcagacacggaaagccctgcccttccacggggtg

SEQ ID NO: 62777 - DNA, 122 bp, Homo sapiens
cacaggtgtgagccaccgtgcccagcctaaaatattttttaatgcaggtatggtaggagccgggtggggaattagactgtgaatctggagggcctccaggaagaaaggatgttgagttcaga

SEQ ID NO: 62778 - DNA, 122 bp, Homo sapiens
gtgggctcaggcctgtgatcccagcactctggtaggcgcaggcgggcggatcacttatgccgtggagttcgagaccagcctggaaacatagggagattcccgtctttaccaaaaaaaaaaaa

SEQ ID NO: 62779 - DNA, 122 bp, Homo sapiens
agaatgatctgccactcaaagacaaggaaaaagagacattacctcattaccagacatctgcgtcctcacatatcctggaaagaaatcgagaaaagaatggattgccccaattaggacccaat

SEQ ID NO: 62780 - DNA, 122 bp, Homo sapiens
gggactgaagtcctctttcagaacactaaaaatgctttgctacattccttgacagtttcccgagacagggttgggttggagggagtcttcccgaagatttaagggctccccactgtgctagc

SEQ ID NO: 62781 - DNA, 122 bp, Homo sapiens
ttaatgcttttttaacccaatgaaatgtggaagtgttttgtgatttttatcttactatagcgattgttttataaacaaagaaaaaattaattcagggttgcagagatggtaaactattaaaa

SEQ ID NO: 62782 - DNA, 122 bp, Homo sapiens
caagtcccagcagccgggctgcctcaaggggccgaaggcctccacgacccacagacattccggagctcctacccagcagcagccctggccagagggggccacacggggctgacggggtgaag

SEQ ID NO: 62783 - DNA, 122 bp, Homo sapiens
gtccgtgtcgtgcaacagtgtgacagcgtgaggctgaccaaacgcaggattgtgggcaaacgagacgcataaagcctccaaagggagcagcagtcgtgagtgtgagaacgcgtccgccttcc

SEQ ID NO: 62784 - DNA, 122 bp, Homo sapiens
gcggggtgtcgggaagggtggtgacgcaacatagagactccgcccccttccttggagcgccgcgactcgggctgagggagctcgggccaatcagagggacggccccagaatggcatggtaac

SEQ ID NO: 62785 - DNA, 122 bp, Homo sapiens
actctctggggatgccctactttgtaatggagtagcttttaataaactctcttctcactgcgctctgctactagccttgaattcctttttgcatgagatctcagaaccctctcttgagctct

SEQ ID NO: 62786 - DNA, 122 bp, Homo sapiens
cgtgggcaagtcctccctcatcaactccctccggaggcagcacctcaggaaaggtactggcgcgtgcggctgatcacctcaggaaaggtactggcgcgtgtggctgatgtgctgatgccacc

SEQ ID NO: 62787 - DNA, 122 bp, Homo sapiens
gcggcggaaccacaagcggtgcggggcgaggcgggcggcctggacggcctggaaggccagcgcgcaccaccgagacgtgggctcctagaggggccggaagctttcggataacaacttccgct

SEQ ID NO: 62788 - DNA, 122 bp, Homo sapiens
ttggggtggctcgggcttatggtgtcacctgtgggcatctcctttccaggcctggagtcccgggcacttgccctgtcccgtgtgggccctcgtccttccctcaggagcccccgcttaaatcc

SEQ ID NO: 62789 - DNA, 122 bp, Homo sapiens
cctggcatggaccaggaactcccctacgtcctcccatccccccaggctaagagctgcctgcgggatacagcccacccaggtcctcactcagtttccctgtgcctccacagccacggagattc

SEQ ID NO: 62790 - DNA, 122 bp, Homo sapiens
tgacttcaggagtgaagctgtagaccttcgcagtgagcgttacagctattaaaggtggtgcgtccggagttgtttgtccctcctggtgggttcgtggtctcgctgacttcaggaatgaagcg

SEQ ID NO: 62791 - DNA, 122 bp, Homo sapiens
ggccgagggacctgcgtgggtgcgggcgtgtgagtgtgtgtgtgtgagtgtgtgtcgctccgggtccacgctcatgcacacacccacacgcccacactcagggtctgccccctcggcctgcg

SEQ ID NO: 62792 - DNA, 122 bp, Homo sapiens
gccactgactgaggcacggataaacaaaacggggcgtagcaaaagggaatgctattcggccgcttagagggatgacgatgccacgctacagcatggatgaactttgaagaaacgatgctaag

SEQ ID NO: 62793 - DNA, 122 bp, Homo sapiens
cacgtgggatgtgccagaactagaactggctctgccgacttctcgggggcttctccgggacgggcctggccttggctgctggaccctgggtcccttctcccggacggcagcccccatcccat

SEQ ID NO: 62794 - DNA, 122 bp, Homo sapiens
gacaaaaacgtggctacatctgggaccaccccccaacccccactttgtacgtaggaaatacggagttgaggatggagacccacagtatgtccagagtgtccccaaaggccacagtgcccgcc

SEQ ID NO: 62795 - DNA, 122 bp, Homo sapiens
tttaaaatagccacattcagaaaagtaatgcgcagaattcctatactttggtaggatttacggtgaacctgttgcccctccctttctttgcacattttatgttttctgcttccctggctggt

SEQ ID NO: 62796 - DNA, 122 bp, Homo sapiens
acccactgtcacattggttatacagtcacactcagttgaacagtatcacaacagatcacacgctgtcacactgggttacaagcagccacctcagtgccacaatgtcacacactttgtttcac

SEQ ID NO: 62797 - DNA, 122 bp, Homo sapiens
agagatgggctctgccgacccggggcagcggtgcggcagagatgggctctgccgccccggcgcacggctatttttacagagtccgatgggggaggaaataaaacaactcggcaactgctttt

SEQ ID NO: 62798 - DNA, 122 bp, Homo sapiens
ccacatcatctcaggcgggctggccggggccctcgccgcggccgccacgacccccctggacgtctgtaagacccttctgaacactcaggagaacgtggccctctcgctggccaacatcagcg

SEQ ID NO: 62799 - DNA, 122 bp, Homo sapiens
gatgagaaccacgtccggtacagccacaactgctctcctgcctcacccgcatctctgcggcgcccggtgcctgtgtaagccaggactctacaagtttgtcgaatgagggaatgaatgaatga

SEQ ID NO: 62800 - DNA, 122 bp, Homo sapiens
gaacctcagataggaagtctgatttgttatgatcctggcagacactggaaaccccggcagcgtggctgtgtcagtgcttgggggcctgtctatgtaaaacccacaccggtctgctctgtcgg

SEQ ID NO: 62801 - DNA, 122 bp, Homo sapiens
ttggtaaatacggttaatactagttaacctatccagaattacagtttaacatttcctgggcgtctgtctgtatgtggatggtactgtgttagttggggggggtacgtgtatagtaaggcagt

SEQ ID NO: 62802 - DNA, 122 bp, Homo sapiens
tgtcgcgctgacacacatcagctccagtctggaatgtgagatcaaggcgtgtgcgccgagcggtgggtttggcccctgccccctccccctccgagtcaacactgcttgtgtgttgcggtgat

SEQ ID NO: 62803 - DNA, 122 bp, Homo sapiens
aagtcccacagtagaagaaataatactttctgcgtttcagttagtgctctttatgcaaagcggccaccgtgaaatacacatgtaaccagtaacaaacattttatggtctactttaaaaaggc

SEQ ID NO: 62804 - DNA, 122 bp, Homo sapiens
agagcctcggactcatttgcccagcagcagagctggctggcagcaaggccagcactagcacgaggtggggtgaggtgcacctcccagctctgggctccttccattccaccatacactgcact

SEQ ID NO: 62805 - DNA, 122 bp, Homo sapiens
cccgttcagcgagaagtccctgggggctcacacaagggcccctctgcttggccctgggcccggccccacccacccagccagacggtcaccaaggagccggttcccatggctcacagagcccc

SEQ ID NO: 62806 - DNA, 122 bp, Homo sapiens
ctaccccggctccgctgcggctgccgctgcggccgcagcgctcgggccccacgccgcgcacgttggctcctactctgggccgcccttcaactccacccgggacttcctgttccgcagccgcg

SEQ ID NO: 62807 - DNA, 122 bp, Homo sapiens
agtgtcgcagtccggaaaagtagaacccaaacaaacacaaaaaggagcgtgcaaggcccacgccgcgctgcacagactctccccacctggtgaatgctgacctggggccaggccacaggcag

SEQ ID NO: 62808 - DNA, 122 bp, Homo sapiens
gtgggagggcttgccgtggacccgtggacacaagacaggggtgtcctctgcctgtgggggcgggagggtcgctcacctggagagggggtcgcctccagtcccacgccgaccaggatcagcac

SEQ ID NO: 62809 - DNA, 122 bp, Homo sapiens
ctcgcggaggcccccacagcagctccacctgtttggggatgccaggcagcttacatctaccggctttattagttggctggaaacctgctctccccctccaggtcctggcactcacagatgat

SEQ ID NO: 62810 - DNA, 122 bp, Homo sapiens
ttttaggttaaccaacctctcctgatgactacctaggtaccatccttgccttctccaggtcgacactctgaacgttctgcctgactttcctcactctgatttccagttgtattcctgaaccc

SEQ ID NO: 62811 - DNA, 122 bp, Homo sapiens
ttactccataggaccggtaaggattagagttaatgcaagtaacgtgtttggaatagcgcccggcactggataagcacacaaacaatggttactacggtgattgttttaatcaagtggcgcac

SEQ ID NO: 62812 - DNA, 122 bp, Homo sapiens
cagcgggacgcggagaggtcatctccattacaaactggctgtgattaagccattacttaccgtaatgggatccttgcagtcgtaggtgatgcctgccacagccgataagccgcagcggccac

SEQ ID NO: 62813 - DNA, 122 bp, Homo sapiens
ggagtttgtctccccgaacccaggcgtcccaaagcagctgggggccgccattttgccgtacggcactggctacgcccggactccggtgcgcagccagtggagctcttttcacccggtgcttc

SEQ ID NO: 62814 - DNA, 122 bp, Homo sapiens
ttatccatatgctgtgtatttgagacagggaactgttcctgtccccagccgatgaccagacgcccatctttcttccagtgggttacttctcccccatcagtccttcgctctgcgcccgctga

SEQ ID NO: 62815 - DNA, 122 bp, Homo sapiens
caacagcctccaattgggagacagatgcccagtggccagagcacaggagactgtcagggccgacctgatggtgtaatttatttaaaatgctacaaaaatacagccaggtgcagtggctcatg

SEQ ID NO: 62816 - DNA, 122 bp, Homo sapiens
aagggtctgtggccttggtggccactggcttcctctagctgggtgttttcctgtgggtctcgcgcaaggcacttttttgtggcgctgcttgtgctgtgtgcggggtcaggcgtcctctctcc

SEQ ID NO: 62817 - DNA, 122 bp, Homo sapiens
aagaaggactcaggcagctgaagccgctgggaacaaagccttcatcatgggggtgggaggcgtcgtgcacctgagtgcagcaaggcacctgcctttcagctccgtccccacatccacagact

SEQ ID NO: 62818 - DNA, 122 bp, Homo sapiens
atcctagacgcacgttattcttatgactgtattatctctgtccactgccactcggggtcccgccctcctgacggcgcctctccctttattctccttcgctgtgattttcccacatgggctca

SEQ ID NO: 62819 - DNA, 122 bp, Homo sapiens
cccttgcagatcttgcagacattttcgtgggctccagggacgacacttctaaaggagaggcgaggttcactggacgttttgggaaactgtaaggcaaaaataaaattctaagcctcccaacc

SEQ ID NO: 62820 - DNA, 122 bp, Homo sapiens
acgggggcccgaacggaccgtgaggcgcagatttgagccgctgttgagatgattcctttccgttcgcggaagagatggggaaactgaggcatgagtgggccagcggggaggccgctcagggt

SEQ ID NO: 62821 - DNA, 122 bp, Homo sapiens
cgtccagagtgcacagccgcaggtgtgagtctgactgagctccagccacctcgctcccggcgccttagagccgcccaccctgggttcctcaagaggatcacctggggctcgttaaaaaccca

SEQ ID NO: 62822 - DNA, 122 bp, Homo sapiens
tttcccacggcctctcttacaagtcttattcctgtgtcaccctaccctgactgctacaaacggcttcctcctgcctaaccacaacctcactcactgcaggttcccttcattctgctggcttc

SEQ ID NO: 62823 - DNA, 122 bp, Homo sapiens
atttaagctacagcagctcaaagaaggcctgtttttaaagcttagcagaagcccattctccgctgaagcctgttctttgtggaagcctggctggggggcagtgggggcggtgccactgtcga

SEQ ID NO: 62824 - DNA, 122 bp, Homo sapiens
cattggagaaagagtcaaacagctccacgaggcattttgaaattcatcccaactgtaggccgagtgacctgcaggttggacaggctgccaaagtccaaaagcttcagcatttccttagtgtc

SEQ ID NO: 62825 - DNA, 122 bp, Homo sapiens
agccgcctatatgagttgtctgtccacctctactgggaggtgtctcccagataggctacacgggcatcagggactcacttgaggaggcaatctgtcctttctcagagctcaaacgcggtgct

SEQ ID NO: 62826 - DNA, 122 bp, Homo sapiens
agggccttcacggcctgcactgttctgccgagcagggctgtgcgcagctgagttgagtcacgctgcctgcgtcctgggctgtgcgcagctgagttgaatcacgctgcccgcgtcctgggctg

SEQ ID NO: 62827 - DNA, 122 bp, Homo sapiens
ttttggtctgactcagagactgagtttattaaccctaggactcaaagcaggaaccctggccggagctcccaggttgccagggttcctcttgtgctctgtgtggccccaccatagctcacctg

SEQ ID NO: 62828 - DNA, 122 bp, Homo sapiens
tgaagactcaatagcagaaaaaggagaatatctgaatccacaaatcaaagtatgaatagccgaatgacttaaaacagaaatatgcatgaattcaagacaatggagaaatagaatatatcctg

SEQ ID NO: 62829 - DNA, 122 bp, Homo sapiens
accgcagttcagacacgaaagcaatgacgagcttggctcacctgtgagaaaactttaaaacgtatctactccctcgtctaaactcttcccgtgctcctcctcctcccgccctccgtgccttc

SEQ ID NO: 62830 - DNA, 122 bp, Homo sapiens
cgaaaaaaggaagggctctgttccggaccgggtggggtttgggaagggtagagccggcctcgggtgcccttcttacagggcctgtctcccgctgcgtgcaccaagtgctttgaaagtttttc

SEQ ID NO: 62831 - DNA, 122 bp, Homo sapiens
gccgctgctgccacctagtgggagacgcctgctactcctctcggttcctaaccccagggtcgttcccggctgagcactaaggagggggcgggggaggacggagagagccctgtgcccctgga

SEQ ID NO: 62832 - DNA, 122 bp, Homo sapiens
atccatgtcctttccttagcaatggcgacattctaccccctgcagagccttgacagctttcggcgagatctggaaaccgccagggacgcctccctgtctgcgcctccgcccgcccagtgccc

SEQ ID NO: 62833 - DNA, 122 bp, Homo sapiens
gaatataattaacacatcaggtcaggctccgtcctgccaggggcgtgtttatgacattatcgcttcccagacagcttaggcccatccaggagaccggcgacagtgacttccttgccaaggta

SEQ ID NO: 62834 - DNA, 122 bp, Homo sapiens
ccggcccgggggcctggccttgcaacagcagcgcctccccggcccgtgggtccccatgcccgcccctccccaggaggaatgggaagcctccccgggccttgccacattcagttaggaagctt

SEQ ID NO: 62835 - DNA, 122 bp, Homo sapiens
cattaaatgcagaaattatcaacaaaatgagaaataggaatttcaaagtctcaaagtgaacgacggaaactgaaatctacaaattagaaaaaggcgcagaattttgaatattcttgtcgccc

SEQ ID NO: 62836 - DNA, 122 bp, Homo sapiens
ctccatagaaacgtgtcagtttcaatagtagtgtcaaagttcactatatacagacattcgcgcagatccccctttcggaaacattgctctgcgagtcctcccgtttaaacgcattcaatttt

SEQ ID NO: 62837 - DNA, 122 bp, Homo sapiens
ataatgtggacgaacaagtgaaacactttttcaacttaaatgaaaaaacaggagaaatcacgacaaaggatgatttggattttgagattgcaagtagttacactctgagtatcgaagcaaaa

SEQ ID NO: 62838 - DNA, 122 bp, Homo sapiens
tgccaacgaccgcgccagactggcgttggaacccttgggccataaggtcttagtgggtggcgtcattatctctgcggtttgcaaaagcggagtggccctgtcaggcgggaagcctctctcct

SEQ ID NO: 62839 - DNA, 122 bp, Homo sapiens
acctgtagctggaccggttaggagccgtcaggatcacctggttggttcggaagaaggggccgaaatgctggtcatggaaagctttctcactccgggcttggctgttgggggccgaccacagc

SEQ ID NO: 62840 - DNA, 122 bp, Homo sapiens
ggccctctctgcccggctcacattagctgtgtgccaggcacttgggctgggcgcatggcacgcattgtgccacctgctgacctagctgctgaagtgttggtattgttatggggaagctccag

SEQ ID NO: 62841 - DNA, 122 bp, Homo sapiens
aagaggtctgatttcactcattaaactatgcagtgtgatgtcatagccaaatggccacaccgcattggagagccaagttttctctcccagaacagcctgcctgggcgcgggccaccatgccc

SEQ ID NO: 62842 - DNA, 122 bp, Homo sapiens
tcggccacatgccgtgcgcttacctcctactcagatgcacgcgtgccggggatgggggcacgcgcttacttcttttgccccgtttagaaagtaagttttatgtggagcagccaacctgtgtt

SEQ ID NO: 62843 - DNA, 122 bp, Homo sapiens
acccgtgctgctctcgttacccaggctgggcgtttgcttgtgtcctgccccgtgtgatgccgtggtttccagttgggcagtttccccccaggagacagtgtttgttgtcacccctggggagg

SEQ ID NO: 62844 - DNA, 122 bp, Homo sapiens
ttacttccgtcttgatgcttgaaaacccggcctggactccaagctgtagctggcttctctcggtgcaatctaaaaggcggagctcggagtagcctgtgccgtcgggacgggaagatgtcagc

SEQ ID NO: 62845 - DNA, 122 bp, Homo sapiens
tatatccccaggctgccgtagacacagcctttgctctcccgaaaaacacgttctaggcgccgggattccagatacctgggaaatagagtgcacgcagctgttgagaggcctcgcgcttggct

SEQ ID NO: 62846 - DNA, 122 bp, Homo sapiens
tcggccgctggatggggctgggctggcagccgggaccccgggtgtcctgtcctgtccctgcgcggtgactgcggccccgccccggagccctctctgggcagttccgcgcccgcagccccgcg

SEQ ID NO: 62847 - DNA, 122 bp, Homo sapiens
aatggattcgaacaaggaatttgtgacttccaacgagagcaccgaggagagctccaactgcgagaatgggtctccccagaagggccgcggcggcctgggcaagaggaggaaggcgcccacca

SEQ ID NO: 62848 - DNA, 122 bp, Homo sapiens
ggggagacagagaggggcgggcctgagtcgagtatccctctcctcgcagcgccacaactgcgcgcaccgacctccccacgccagacgcggcgtgagccaggcctctaatccgctcgcccctc

SEQ ID NO: 62849 - DNA, 122 bp, Homo sapiens
ggaggaggtgggaggattgcttgagtccaggagctcgagaccagcatgggcaacatagtgcgatctcgtctctacaaaaaacaaaaaaattagctgggcatggtggtgtgcatcagtaatcc

SEQ ID NO: 62850 - DNA, 122 bp, Homo sapiens
attgatgatcagagtggaaatctgtgaacacactcggtctctaagattccctttctggggcggaaaggcaatcctgattatggagaatcatgcctaaaaatcctcaagagccaggcacactg

SEQ ID NO: 62851 - DNA, 122 bp, Homo sapiens
gcagctttcgtcgccgccgattcgtcaaggtcccgggccgcagcatctagatcgtcgtggcgaagccgactctccgggggatgcggccaatctccaagctccctgggccgcaacttccgagc

SEQ ID NO: 62852 - DNA, 122 bp, Homo sapiens
acctcatattccacccgcctcggcctcccaaagtgctgggattacaggcgttagccactgcgcccggcccgagaaaatacagttttaaaaagagaaagctttataacctcaccaatgaatac

SEQ ID NO: 62853 - DNA, 122 bp, Homo sapiens
acttggctgtaaaatgggtatgagaacacctggcctgtcccacctagcagagaaaggcaccgtggggatctgcaggatcaatggatggccagggtctgcccgtgctggtctcgagttggggt

SEQ ID NO: 62854 - DNA, 122 bp, Homo sapiens
ctgtgttctgtgcatatccacatatgtatttgaaagttagtgcacactcaagtcagccctcggagcctgcgtcccctcatggatacaccatgagtgtgtgaatgtacaaactgcctgcacct

SEQ ID NO: 62855 - DNA, 122 bp, Homo sapiens
gggcgggctgcgggagttcctcctgcgcgggcgtctgaggcgctagaggtcaccggagcgcgctcccctcgccagggacctacactcttcccgctgctacattaggccgcattaacaaggat

SEQ ID NO: 62856 - DNA, 122 bp, Homo sapiens
tgcgattctctttggtaaataatcaaggaagagagagagtagagagtgaaagagagaaagcgagagacctaagtgacccaacgcacacttaccttcaggcttaggaggtatttacaatcagg

SEQ ID NO: 62857 - DNA, 122 bp, Homo sapiens
tgtttccattgatattcaacaaagaagaaaaagaaaagggagggggagaaagtgaagggtcgtggaaagcagtagctcaagaaaaggaagaaggagaactaacaagaggaagaataagagga

SEQ ID NO: 62858 - DNA, 122 bp, Homo sapiens
cacaacaaccaagatatagaatcaacctaataacccacaaatcagtcatttgcagcagcacggatgcaccaaggattttccaccaaaaaaaacaaggcattgataaatgtaaaattaatcaa

SEQ ID NO: 62859 - DNA, 122 bp, Homo sapiens
tccttaatactgtaaggctgtttcaaccttttcttattgaaatacacatcaaatcaaaaccgtatttcgtaatcatctaagtgaatttttaaatatctagctttttacacatacatttatct

SEQ ID NO: 62860 - DNA, 122 bp, Homo sapiens
gaccatagtgaggggactcctgggttgggctccattagcccctggcgaggtcaggcctgccggctgccatcacaaataataaaagcagggcaggaggagcttccccacatcctggagggcaa

SEQ ID NO: 62861 - DNA, 122 bp, Homo sapiens
ccattctccttcgggaggggctagcgattatctttcatggggagacgcgtcccattgcctcgtggtggccccaggagcggaggatcgagtcccgcccgaagtgacgaataaatccggactct

SEQ ID NO: 62862 - DNA, 122 bp, Homo sapiens
cttttggcaaaatacaattcctccagcttttttccgtgcaaaaaacatgtccatcaaacccgtccctgcggcgcctgtggaagagggaggccgctggattgggtccgggaattgcgggaatg

SEQ ID NO: 62863 - DNA, 122 bp, Homo sapiens
gcatgtgcagagcaatactctgtcttgcagtatgccagccacggacggggtttagacaaacggctgaatataaaactcttgcctacaagcagctcagcctagagggggaaacagattcataa

SEQ ID NO: 62864 - DNA, 122 bp, Homo sapiens
tcgccccgaccctaaaccctcacctgaaccctaaccccgctgggctcccggctcccccgtcggtcaccatacatcgtgtgtcccgattcaccataaccaccagaaagtcgcttatgaagatg

SEQ ID NO: 62865 - DNA, 122 bp, Homo sapiens
gtctggtggccatcaggtaaggctgggtcatggaaagaaagaatgaatgcagactacgggcggtgaatagaggtctcggatgccagcaggcgtcccaacccagcaggaactggctcaattct

SEQ ID NO: 62866 - DNA, 122 bp, Homo sapiens
aagatgtcagggatctgccacgtttcttccttcctccagagcattttacaaaaacaaaaccggggaggtatttattaatgctgtttggagatgggttgcgtctctctgatgagccactcgag

SEQ ID NO: 62867 - DNA, 122 bp, Homo sapiens
tcttaaccaacaggaaagagccggtcttggagagaagtccactgaatacgctcacttgttcgaagtctttggcatggaccctcatctcactcagccaatgggaaggcacgctggcaagaggc

SEQ ID NO: 62868 - DNA, 122 bp, Homo sapiens
ggtggagagaagttcactgggcacggtgggtaggggttggtggggttgcaggggggtatccggagagagaaacacctccaagtcactagagtatttgtctttcgctcactcgggccggggaa

SEQ ID NO: 62869 - DNA, 122 bp, Homo sapiens
ccctcgcaggggctaaaggacaccctgccagtgccttcactccagacgcctgcctcaggtcgccccttcgtgttgtgaatacggtgtggaggtggccagtgcaaagaaaaacgtaagctctt

SEQ ID NO: 62870 - DNA, 122 bp, Homo sapiens
ttggactgggcgggacccggagttctgtgctgggcctcctgctgcggtgccctgcagccccgaggagctcccggggactgtggggctgaccagccatcagccctgcagactttggggatgag

SEQ ID NO: 62871 - DNA, 122 bp, Homo sapiens
gtgtagaaaatggtgcagaagagactgcggccagttgctgagaagatataacgcagtagccgcttggtggcctgttactcagcattaaaaaaacggccttgttggattgaagatacatgtgc

SEQ ID NO: 62872 - DNA, 122 bp, Homo sapiens
ggattctcttgcgactgctccagacgtttctgttagtagaaagccagatcacccgatgggcggggagaggcgcgtgcactgtttaacgtggtctaactcagaccaagggtgggggaaccccc

SEQ ID NO: 62873 - DNA, 122 bp, Homo sapiens
aacttggaaccaataatcttgcctccatatggcagatgtggaaactgaggctcagagaggcgatgcgacttgcgttctggctcccagaggatttgggacacgggggaggggacgttcccagt

SEQ ID NO: 62874 - DNA, 122 bp, Homo sapiens
aataacacagctctccaaatggcacgacacccgctaccttttggcttggagacgctgccccgaaggcggaacctccaggacagctacgtagcgtcccgagcactcagactgaagccagggca

SEQ ID NO: 62875 - DNA, 122 bp, Homo sapiens
caaaaggcgctttgggacctcgcagaggacaactgggaggccagggctttggctgccatacgggctggagctaagaactccagagttgggcttgcctgggcttctcgagaggggatggagcc

SEQ ID NO: 62876 - DNA, 122 bp, Homo sapiens
attaatgtctatttttttcttcctctacaaggtgacagtttgaaaatcttatttattggccgggcgcagtggctcacgcctgtaatgccagcactttaggaggcaaaggtgggaggatccct

SEQ ID NO: 62877 - DNA, 122 bp, Homo sapiens
aattacgcctgcgcggaggctttccgagtccatctcctaggacgccagactgaggccgcgcgtgcgcaatgctgccattctgctgcgctagaaatgtggcacgcactgaggcggaggtaacc

SEQ ID NO: 62878 - DNA, 122 bp, Homo sapiens
cctggcaagaaattgtgtcctgtgtctcgtggcccagcctggcactcgccctcctcgccccgctcagctttagggggcaggaagcagtgcagctccttaacccacttcctgttagagcatct

SEQ ID NO: 62879 - DNA, 122 bp, Homo sapiens
tccccttctatccaagcatgaaagtaccaagctctttcgcctagaagaacgctttcaaagcgtatcaaattcacgggtttggagacaaagagaaagatgctgctcttatcgacttacgaaaa

SEQ ID NO: 62880 - DNA, 122 bp, Homo sapiens
ttgtttttccaactcttcgtaagagatgctcttatcatgcaccccatttgccagaaagatcgtacgtaactcaggacacagggctaagactgggaaacgcttggtggaaaggctctggtttc

SEQ ID NO: 62881 - DNA, 122 bp, Homo sapiens
cgtctggtcagggcccctcattccctgtgcataccactccccaagccgcacatccaagaacgacaaagtcccctcctgatggacctggcctgcatctccacctggccactgcttctagacac

SEQ ID NO: 62882 - DNA, 122 bp, Homo sapiens
ccgccttctccgcgaggggcctccggggctgcacgggccgcagcgcctctgcgggctgcgcgctgctatctccctgcagcgctggctccaagcgctctgagcgcccggcccgggacctgcgc

SEQ ID NO: 62883 - DNA, 122 bp, Homo sapiens
agacagtgtacggcaggtgctaggagaggggtccgtccgcctccaaccgaggtgatgctacgcttgaccctcgaacaacacgggtttgaactgcacgagtccacttacacgtggcttttttt

SEQ ID NO: 62884 - DNA, 122 bp, Homo sapiens
ggcaggctaagatctgcacggttagttaccgtcagaagctgtaacccagcgcagtgaccacgagaaagcaagcagtgatgcagacgcttcctgatgacgatgctgacggtgcgggcagggga

SEQ ID NO: 62885 - DNA, 122 bp, Homo sapiens
gtgcctgtcactgtgctaaatactttacgtgcaagttctcattcagttttcacaactctgcgaggtagacacgattctcatccagagttgacagagacagaaaggaagtcttgagggaggtc

SEQ ID NO: 62886 - DNA, 122 bp, Homo sapiens
caggagctgaggagggactgccaagatgcccctgaagttcttccccaaggaacgggccaccgcatcgaagggcacggcatactccccctcctggccccgaggccgtggagcaggcaccggtg

SEQ ID NO: 62887 - DNA, 122 bp, Homo sapiens
accctgcggacagggcacgagtccgggtctcggaggaggtcggcgactgccgcgtgggtccgcgactcaccaagtacagcggctgccagcgacgctgagtatccaactcttcgaactcccgc

SEQ ID NO: 62888 - DNA, 122 bp, Homo sapiens
aatttggggcaaagagctgacaaggctccccaaggagaaaaattccatcccactagatggcgctgtaaggtctgaaatgttaggtaaaaactgactccaaattctttttagacaaaagttag

SEQ ID NO: 62889 - DNA, 122 bp, Homo sapiens
aacgtggttgggaacttctcatttattaatgtaatcttattttagaagatgaatgatgatcgcttgtgttttcgacaacatactaaatcctgagtagaaatttctgatatttaaccaggaat

SEQ ID NO: 62890 - DNA, 122 bp, Homo sapiens
agggtgaggacagtgagctgacccgcttgctcctgcttcatctgcccacatgtcccacggcgcctgcctctcctatgcagtctctctgccttcgtgggcagccctgtgaggcctcctgcctg

SEQ ID NO: 62891 - DNA, 122 bp, Homo sapiens
gaccttcgcagtgagtgtcacagctcttaaaggtggcgcgtccagagttgttcttttccccgccagtgggttcgtggtctcgctgacttcaggagtgaagctgcagaccttcacggtgagtg

SEQ ID NO: 62892 - DNA, 122 bp, Homo sapiens
tttactaagccgtgtgtggggaggtgtccggcgtcctcctcctgggacgggattcgaacccgctatccgacgggcccgcccacagggtctccccgggtccccgcttcgggccggcgagtggg

SEQ ID NO: 62893 - DNA, 122 bp, Homo sapiens
taaattggttcacaggataagaggacacccaatcatgtaaaaactggtacaagccaggcacggtgtcttaggcctgtaatcccagcactttggaaggccaaggcgggtggatcacctaaggt

SEQ ID NO: 62894 - DNA, 122 bp, Homo sapiens
agcgagactctgtctcaaaaaaaaaaaaaaaaaaaaagaaaatgtctaagttggaaacaacggtaagtggacaatagtggattttatttgcaaaagtgaaacagagtttatgtttccacgca

SEQ ID NO: 62895 - DNA, 122 bp, Homo sapiens
ttctcacacacacacacatacacacacacaaaatacaaaacttagccaggtgtggtggtacgcgcctctactcccagctacttgggaggctgaagagggagcatcacttgaaaccaggaggc

SEQ ID NO: 62896 - DNA, 122 bp, Homo sapiens
cacacaaaccccgcttcctccttcaaatttccgctgccggctttaccgatgcgaaagccgcggtggagtttagaccactcctcccggcgccgggctcagcccgccttcgccttccctctccc

SEQ ID NO: 62897 - DNA, 122 bp, Homo sapiens
cctgagactgccagaaaagatgctaatgaaagaccaattgtgtggccagagtgttttcttcggacatctgcccagggaactggaggatacccagttcagaagcgaggtcactagccccatcc

SEQ ID NO: 62898 - DNA, 122 bp, Homo sapiens
cagggctgaaatgaatggagccaacacatgtggttctctgagcaacagtgtaaaataatacgttttttgtgcaaatgctttctcttccccggaaaccaaatccaggtaaacaaagggtgatt

SEQ ID NO: 62899 - DNA, 122 bp, Homo sapiens
tgccaggaggatttatttcattctgcactcatgtttactgagattctgagagtgagtggtcgcgttcctgtccctcggtccctgtcccccacggcccaggttctgagagtgagtggtcgcat

SEQ ID NO: 62900 - DNA, 122 bp, Homo sapiens
ggccgggcacccgggaacccgcgagcgcggggctgggctctgggctgcgtccgggggccccgacttggttattgatcggcccaagcgcaggagaactgactctataatgcatcgcctgacca

SEQ ID NO: 62901 - DNA, 122 bp, Homo sapiens
cctggccttcctgaccagtcaaagccagttggactgtgcgcctagaagtggacagacatgcgaaatgccatactgtatacgtacaatgcataggccaaaggcgaccctatgacccagagatt

SEQ ID NO: 62902 - DNA, 122 bp, Homo sapiens
ggtacgagtgacagtcagcatcactgcaccctggttagccatgtgtatgttgtggggcaccgtggcccggagcacctcattatgttcagtccctttctctaaactgcgagctgcccgtcctg

SEQ ID NO: 62903 - DNA, 122 bp, Homo sapiens
ctgcctggcggggcagcttcctttccaggcaaggcggagacctgcagggcgtggagaccccgcccggcgcagaacgcgctggccagtgggcagcttgacagggtccccgtgtgcctagcgac

SEQ ID NO: 62904 - DNA, 122 bp, Homo sapiens
cccggaagcggaccgcggggggcgaacgcctagagcgcagtttccggtagacccggaagccgattgcagggagaaactgttttcgcagcagtgcgtgagtttccctttgtctatgttaagtc

SEQ ID NO: 62905 - DNA, 122 bp, Homo sapiens
gtccgagagcggggagggcgtttcctggggtaactccacctggggtcttgtcgaagttgccgcatctccgccggaccgcacgggaacgacgtgcccacactcggaggaaggggttggcgctg

SEQ ID NO: 62906 - DNA, 122 bp, Homo sapiens
ccggccgcggccttgggcggagcaggggccactagctgccacttctgcccgccccaggtgcgcgcggagggctacgtggggcgggccgcgacccggcaaagtcatgttgaaaaaacactctt

SEQ ID NO: 62907 - DNA, 122 bp, Homo sapiens
gccacttccgccctggagaacatttctcacccaggattggtagaaacctaagagcgcatgcgcactgagaggataccgctaaaaatcgccttcaaaattgcttaaaaggcaaactttaacaa

SEQ ID NO: 62908 - DNA, 122 bp, Homo sapiens
gtggcggcacgttctcacttacctctgactctgtccgtcttactacatcccattcaggcacgtcccgaggccttcgcaagggctgaaaaattccagcaaaggctgtcccctgcccagaatac

SEQ ID NO: 62909 - DNA, 122 bp, Homo sapiens
ggtggtgccattggcgggatatttactgtggtactctcttaggaccaggcttcctgggaccggaaggaattgagaggctgaggcttctcttccttctctgtgaaataaagggggtgacacca

SEQ ID NO: 62910 - DNA, 122 bp, Homo sapiens
gctattttggacacattcctcaaggccaaaagaagaacgtggcggagggggaaagagtttcgagtctcccactgtgaccaaactaagaggttccaccctcgggccccagctttctcccgccc

SEQ ID NO: 62911 - DNA, 122 bp, Homo sapiens
acctcgtccctgcggagaccccggctgcctcctccctgccccgccgcacagcccacctcgcgatctggggcccgcagacactccccctcggctgaccctggctgacccccagcctcaacccc

SEQ ID NO: 62912 - DNA, 122 bp, Homo sapiens
gcgctgccagtgcttgcagaccctgcagggaattcaccccaagaacatccaaagtgtgaacgtgaagtcccccggaccccactgcgcccaaaccgaagtcatgtaagtcccgccccgcgctg

SEQ ID NO: 62913 - DNA, 122 bp, Homo sapiens
ccaaggcgcgccccgcactgaggaccccgaggttggggtagggtctggcctccagcaggacgcccggatgaaagtcagccctgcggcgtcgccaaccgcagcccacagcctccgcgggcagc

SEQ ID NO: 62914 - DNA, 122 bp, Homo sapiens
ggcaccgggactgactgtgcctgcttctgttcagattctcagagactgacatggaaagaccggattcttgcaagaatccgtaccttggtccttcccacatgctctcggggaaataaaatcaa

SEQ ID NO: 62915 - DNA, 122 bp, Homo sapiens
cagtgagttagcggggcctgtgccctgatgcggaggagcagccgtgcactaagctgggctcgcttggtgcccgttgggtctccacgacgtagctgaccgtgttaggctcttatgtggagaac

SEQ ID NO: 62916 - DNA, 122 bp, Homo sapiens
cgagatgatggacggccgcctcctggaacacccgcatgcccagttcgggggctcgctgggcggcgtggtgggcttcccctacccgctgggccaccaccacgtgtacgagctggccgggcacc

SEQ ID NO: 62917 - DNA, 122 bp, Homo sapiens
aggttgcagtgagccaagatcgcaccactgcacttgagccagggcaatgaggcggaaactcggtctcaaaaaaaaaaaaaaaagtccaaatgttctttcttacccttaagtagcaaataaga

SEQ ID NO: 62918 - DNA, 122 bp, Homo sapiens
ctataaaggaatacctgaggctggatatttacaaagaaaagaggtttatttggcatatggcgtctacatctggtaagggcctcagactcatggcagaaggcaaagaggaatcagtgtgtgca

SEQ ID NO: 62919 - DNA, 122 bp, Homo sapiens
acctcaggcccacagggagtcaggtttccaaagcagacccagaaagcatggccgtgtgctcggggccacagcagtcgtaccagggccaccactccccacaggtggacccacacggtaatggc

SEQ ID NO: 62920 - DNA, 122 bp, Homo sapiens
ccgatctcctgtaatctacctggattggaacgcccagctttgtacagcctgagctctggccgactggaatttctgccaggtcctattcacacccttggccccagctggctgtgaggtttcct

SEQ ID NO: 62921 - DNA, 122 bp, Homo sapiens
cgccgggggaaggaagcagtagaccggctttggggtctaagccgccgtggtcagaggtcccgaagccagtcctcgtctgctgcccggctcccgcccgtgttcgaggcagtagttaggctcgt

SEQ ID NO: 62922 - DNA, 122 bp, Homo sapiens
tctcaaaaaaaaagaaaaaaaaatgtttcatatgccatttaaaggcagtaagttgatgggcgcagtaggggtttgaatttgaagaaaaatgggccagttgaggtggcgcacgcctgtaatcc

SEQ ID NO: 62923 - DNA, 122 bp, Homo sapiens
aatctaacaacaagggttatttccatttcacagacaaaaaaacctgaagtttgttaattacggtgttaaattatcctacgattaatggcagaaataggtcctgaaccaatatgcctttgaga

SEQ ID NO: 62924 - DNA, 122 bp, Homo sapiens
aaggttcaagagtttcagcaggttaaaaaaattagacaaactaccaaccagcatggcacacgggcagtgcttcttactccccgaacaccatcgcctacccctgagccggggcccttgtccct

SEQ ID NO: 62925 - DNA, 122 bp, Homo sapiens
ccgcttttctctcgggtgatccggccgagtggccctgggttagcagctgctgcatttccccggctggctgcggtcactggtggcagtgctcaggcgcccgccgcccttgaccttcggccccg

SEQ ID NO: 62926 - DNA, 122 bp, Homo sapiens
ggcccgagggccacatcttcgctaagtcaccagctcagtgcgaggcatgggcctaagagccgcgtctttgctaagtcatgtccctggcacagccgccccacacggcacgtacgccgacatcc

SEQ ID NO: 62927 - DNA, 122 bp, Homo sapiens
atctcctcccccgaacaggtgaacgcatccccctgccctgggctggctggcaaccaaacacgtagtaactctggattcagagttcgagattcagaactgagtggactttagacaagcataga

SEQ ID NO: 62928 - DNA, 122 bp, Homo sapiens
tgataaaagagctttctgctgaactcacaagcacccttgaacctttcagtttgctcccagcgctcagatcccagtgtttctgtgaaatggcagagagagagagaagaccattctggggccta

SEQ ID NO: 62929 - DNA, 122 bp, Homo sapiens
tgccccgcccccaagacaccctcgccgctcattggctggggcggagggcaggataccaatcgcgtgggtcccgtcctccgccccgccctccggccgcgcatcaaggatctttgctcctcccg

SEQ ID NO: 62930 - DNA, 122 bp, Homo sapiens
ttcacgacgacgggcgggcaccagccttcgggggacacgcctcgcggctcccgcacctcgcgcccagcaggttctcatagctgcggccacggcccaactggtctccgcacggcccggggcca

SEQ ID NO: 62931 - DNA, 122 bp, Homo sapiens
gcgcaagcgcggaagcacagagccgggttttgttgtttgtttgttccccacccccggggacgtcttttactttgagatgaattattggccccggctcccttccctcctcatccacatgcttt

SEQ ID NO: 62932 - DNA, 122 bp, Homo sapiens
ctgctgcgccgtggagatgatgcacatggcagcaccccgctacgacatggaccgctttggcgtggtcttccgcgccagcccgcgccagtccgacgtcatgatcgtggccggcacactcacca

SEQ ID NO: 62933 - DNA, 122 bp, Homo sapiens
tgggccaggacggattaaatcaacagccagcatctaccttagatttaggtcttaattgctcgagaaactgttttgaaataacctgaaattaagagtctctgtcccttgttctagagctcttg

SEQ ID NO: 62934 - DNA, 122 bp, Homo sapiens
accaccattgactgacagcgcatgttactcctgacctcacacatcactgggtataattgccgggggctcgttattgtcattaacgtctcctgcatgcacacgggagtgcctttcaccccaac

SEQ ID NO: 62935 - DNA, 122 bp, Homo sapiens
tggtttcctttttttctttcctttttttttttttttttttgaggtggagtctcactctgtcgcccaggcagtgccgtggctctatgcaacctccgcctcccaggttcaagtaattctccttc

SEQ ID NO: 62936 - DNA, 122 bp, Homo sapiens
tcttattgctcgccgcccccttcctccgacaactcggaagcctcggaagccggagagccgcgagttcgtctgcctcacaaccacctcttcccgggcgccaggcgctgcgacgtgcgacaagg

SEQ ID NO: 62937 - DNA, 122 bp, Homo sapiens
gccccaagcagctggagtgaatcagaggggcagccacatctgcacatcctgtggggcaatcgctcacgcgcgggtgacggcgccagcaggccggctggggccgggggcgcttggggaccgcg

SEQ ID NO: 62938 - DNA, 122 bp, Homo sapiens
ctggaggcccagctgcccgtcatcagagtgacaggtcttatgacagcctgattggtgactcgggctgggtgtggattctcaccccaggcctctgcctgctttctcagaccctcatctgtcac

SEQ ID NO: 62939 - DNA, 122 bp, Homo sapiens
tcgcggcgacgctggctcgactccctccgcttaagcccctagcagtgagagccggaagttcggcctaggctgggcgggacttccgctactagacttccattgtcttccaccaatctcttctc

SEQ ID NO: 62940 - DNA, 122 bp, Homo sapiens
acgcacacagtagaagcagcatattgactttttttctttaagggaggcagggaaagatgacgagttcaattttaaatgctgaatctgagacctgtggggaatccaaggggagaggtgcatga

SEQ ID NO: 62941 - DNA, 122 bp, Homo sapiens
tagcaaggattcctattcatattcattgtggggccgccctgggacacctctgctccgaaccgctaggagcccccaggcacaaaaccctctgattgacacactcaccgctccagcttacgcct

SEQ ID NO: 62942 - DNA, 122 bp, Homo sapiens
ctttccacagtcctaatgacacttatgtaaaggctgtgagggttttgggaatttcggtgtcggaggagtcaataagggctaagaagaacaaaagaactacattaagtatagggagatggaaa

SEQ ID NO: 62943 - DNA, 122 bp, Homo sapiens
atggtggtggaggcggccccgctgtcagtgacctgtcccagtgaccacacgtcctggtggcggatgaagccctcttcgagctagagaaaaatagataagcccagcagccccagaagatggtc

SEQ ID NO: 62944 - DNA, 122 bp, Homo sapiens
tgagctggtgtccaaggagggctgggtgactcgtggctcagtcagcatcaagattcctttcgtctttcccctctgccctccctggcttgtcagctttgtccctcaggcttggcccctcgtgg

SEQ ID NO: 62945 - DNA, 122 bp, Homo sapiens
gatgcgtgtgccggacactgtggaaggtaaagcgctccgcacagcccgcctaagtgcgcccgggacagagccatcccccaggtgctaccaaacaaatcctccagctgctggtacggggaagg

SEQ ID NO: 62946 - DNA, 122 bp, Homo sapiens
ctctgtgtacctcagccccagctccaagcccgtggccctggcatgagctgtgcccagcttcgtcagctccagcgtttgcctggtctggaagtcctggccggccgcccacatcgggctcacct

SEQ ID NO: 62947 - DNA, 122 bp, Homo sapiens
ctttgcattatgtccagcaaagatgagtgattacaacagaaacctcaaggctcacaaggacgaaactattcactgtctcacctcctaccattgatggaaaacgtcgggcagccctggagctg

SEQ ID NO: 62948 - DNA, 122 bp, Homo sapiens
tagaggctggggcctctgcagcctctacagctgcggctttggagaacttacaggtggaggcgagctgctctgtgtgcctggagtatctgaaggaacctgtcatcattgagtgtgggcacaac

SEQ ID NO: 62949 - DNA, 122 bp, Homo sapiens
aggagtggcgcgaacaggaagggactagggatagaagccgggcttggacacagtgaggcacgaaccccgacagacacagagacagacaaggggtgctgatctcctcactgggcggggtgggc

SEQ ID NO: 62950 - DNA, 122 bp, Homo sapiens
ctcccagtgcagatcctacctggatacatttttattagtttggtttagagatctctttatcgacttatttgtagtccagatttatgagggtgataattcattctccattccctttaacaggt

SEQ ID NO: 62951 - DNA, 122 bp, Homo sapiens
ctgtggcgagtcccattcttctatgagctctcgcgccaggcctgtgcacattgcattttgcggctgtctgatgaacatgaggttgaaggagcctcggatgtggctggcattgctcctggata

SEQ ID NO: 62952 - DNA, 122 bp, Homo sapiens
gcaacctccctgcctgattctcctgcctcagcctgcccggtgcctgggattgcaggcgcgcgccaccacgcctgactggttttcgtgtttttggtggagacagggtttcgccgtgttggccg

SEQ ID NO: 62953 - DNA, 122 bp, Homo sapiens
tccaatcgcgaattaccttgatctccatgcattccacatggcactgaaccaaatacaactcgaaaagacatctttgtttcccagtcaataggaagttatagttctctcatgggtctcaagtg

SEQ ID NO: 62954 - DNA, 122 bp, Homo sapiens
cagggtccctggagaaggagcctcttgggactcagacagggccagtcccgagcgaaggtacggaataggtgagtgaaccttgggaactccggaccctgttatctaccctcaatcacctgcca

SEQ ID NO: 62955 - DNA, 122 bp, Homo sapiens
cgcgccaagtcgctgggtgaccctgggcctggcgaaggctcagttttcttgtctgtaaaacggacttggtaatagaacgcacttcgggggtggtggagaagattacaaggtaacagcgactg

SEQ ID NO: 62956 - DNA, 122 bp, Homo sapiens
cgcccggcgccggggtaggatgggggtgtccctgcgctctgggggctggggacaggggggcgggcaaaggcaaaagaaaaagaagggagccggcgcgaagtctcagttatgaaaaaacgcat

SEQ ID NO: 62957 - DNA, 122 bp, Homo sapiens
cgtgagcttggatacactggccgtaaaccacctacaggagcgttcctagtagaaactcttcgatttcacaaaatgctagaaatatcagcatgatactaattgtttctttgaatttgagtgtg

SEQ ID NO: 62958 - DNA, 122 bp, Homo sapiens
cacgtaagggtcaactatgaccttcatcaagaagtagcggttgggaaccagggatgctcccgtccatcaaggcctgaatgagatgctcctgggaaagagacttcagtgcttcctcccacatc

SEQ ID NO: 62959 - DNA, 122 bp, Homo sapiens
ttctccctacctttagttcctgtgattcaggtgcctacagcagggagacctgccacggcgcgcaggtgatgtcttgagacatggggctggggtccaacagagtaaaggccaggaatttcttt

SEQ ID NO: 62960 - DNA, 122 bp, Homo sapiens
agggccttggagaaggcgaactgtccagggaagtagaagctgtgggggtcctcaccagcccgctgcaccctgaggcactgggtctcctggtgctcctcagcctcctgccagtgcccaaaact

SEQ ID NO: 62961 - DNA, 122 bp, Homo sapiens
tgataaactaaaaagaactttttaatgtattagaaaattgataaagcaaattaggaatctcggcagctgtatcttctgggatggattcttatagcacctatttggcaactgtcaaagtcagt

SEQ ID NO: 62962 - DNA, 122 bp, Homo sapiens
gcagcagattgcggggtggggggggccaggcaggtgagagcttagcctgcatatgcctcccgcagaccccggtgtgatggccttcctcaccctggccaggacgctgtcccctgttgagtccc

SEQ ID NO: 62963 - DNA, 122 bp, Homo sapiens
gagacggggtaagtgccctaaggttggaactggccgtggttccccccggacggcgggaagcgaggtcagcgctggcgcgggctccggcagcgggactaggaggcggggcaggggtgcgggct

SEQ ID NO: 62964 - DNA, 122 bp, Homo sapiens
tcgcccctcctccttcccccaactcgcgcaggtgcgaccgccacgccccttcggcgcatgcgcagaacgaggcctccaagccccgcccttcctgggccgcttgacctgcccccaaccgaagc

SEQ ID NO: 62965 - DNA, 122 bp, Homo sapiens
ttgccagagaagaccagctcaaagcgcccatcactatgggctggccccacagactcacagcgaagcagcgagcagttctccacacaggtgtgctcctcgttgctcaggtagaggcggaactc

SEQ ID NO: 62966 - DNA, 122 bp, Homo sapiens
atccccaccaggacctaacagatctcacatctgtttccaatttaggttctcatcaatgtacgtttagacaattacaacagccctcctgtctggtctccctattctcagtctctccttcaact

SEQ ID NO: 62967 - DNA, 122 bp, Homo sapiens
agggcacagagtggaccaggagtcagccagggtttccaaggatgctcctcagaggagctccgtggggactgggaaggaccaaggggtgcacctctggacgtccccctgcacccagagcagct

SEQ ID NO: 62968 - DNA, 122 bp, Homo sapiens
ttcctctgtgcggtctcctcccgggagttggggaccacgagtgggggcggtgatgctgtgcggctcctcaggtgttcagttccgtgggtgcctcctacgccttggtaacccggacggtgtcg

SEQ ID NO: 62969 - DNA, 122 bp, Homo sapiens
atctgtagaaccggtggcatctagtaacccttccaccttcctggcctgcctcggcccccgcggcccgtggtcctcaccagatgttgctctcgcggctctggtccaccaccatgaaggtcccg

SEQ ID NO: 62970 - DNA, 122 bp, Homo sapiens
ctgcatagtaatgattgagaatcccctgatctagatccaacagatctcgacctttatagacgctatcaaggaagcacctaaggaagacaattttcctgactatatccatacctccagttagt

SEQ ID NO: 62971 - DNA, 122 bp, Homo sapiens
ttttttttttttttttgagacagagtcttgctctgtcacccaggctggagtgcagtgaggcgatcccgggtcacggcaagctctacctcccaggttcaacctatttttgtgcctcagccaac

SEQ ID NO: 62972 - DNA, 122 bp, Homo sapiens
caagaagaaaaattactcatactttatcattacagactatatccctttagactatatttacggatatttatggaaatgatttgtagaagtgctacacatactattctgcaatatgctttttt

SEQ ID NO: 62973 - DNA, 122 bp, Homo sapiens
aaccagccacggagcaggggccgggcggcgaatggccgcgcccctcctggccctctgactcggcgattggccggccgtgctcgcactccacgacccaaatggctgttccagggcgctagtca

SEQ ID NO: 62974 - DNA, 122 bp, Homo sapiens
gctggccggagtggtcacagcagcttctgagaggagtctgcccagccttgggagcatgggcggggcgggggtgggagagggcctgggaccacagcagaacccttcaggcctcggactccacc

SEQ ID NO: 62975 - DNA, 122 bp, Homo sapiens
ggactgttttggggaagagctggccaattccttgcagtaccaggtctctccacaaggtggcgccagtggttagtccctgcttctcttgtctaacttgtattttacaagttctactgtttggg

SEQ ID NO: 62976 - DNA, 122 bp, Homo sapiens
gataccaaaatcacaacttgatttttggaggaattaaagcaacctgcgatgtcaaggctacgtaggttgaactttgcaggttgaccgtgtgtgacttggctaacgcaagagtgagtgacaga

SEQ ID NO: 62977 - DNA, 122 bp, Homo sapiens
ccaaaattagactcatcgtccacgtcaccaacccaaagccccagtccagcagaccgggtgcgtccttgctgagttttgcttccctcaggttccgttgatgtcacacccaaggcctctcctcg

SEQ ID NO: 62978 - DNA, 122 bp, Homo sapiens
tgcagctcatagaggggctgcaggtggtgggcggtggccgctacttccccaccaaccacacggtacagctgcaggccgtggtcagggatggcaccaacatctacagctggactgcctggagg

SEQ ID NO: 62979 - DNA, 122 bp, Homo sapiens
agctattgatctctagcattctctcatcactctaaacagaaattgggtactcattaaacacgtccccagtctcccttccccccagctcctgataatgtctatcctactttctctatgaattt

SEQ ID NO: 62980 - DNA, 122 bp, Homo sapiens
cagcctggaagacgaacctctccctcttctgctccgccgtctgcacagccgctgtggacccgaggccctgcattccccaggctcaggcccgccaggcagccccctgagctcatggctggcaa

SEQ ID NO: 62981 - DNA, 122 bp, Homo sapiens
tcaccggcaacccagcatcccacactctggatgggggtcaggagtggaggcgacaggaggcgaggaggcgagtgggcggcacagacaaggagggagcccacccctgctctagacagagttta

SEQ ID NO: 62982 - DNA, 122 bp, Homo sapiens
gctacaggggccccttttattgtcctcctgctcctgggtctgtacctggtctttcacctccgttgcttctttgggctcttctgccctcacctccattttcgggagcctggctgggatcacct

SEQ ID NO: 62983 - DNA, 122 bp, Homo sapiens
ccgggaccccggaggagccagagccagagctggaagctgaggcctctaaagaggctgaaccggagccggagccagagccagagctggaacccgaggctgaagcagaaccagagccggaactg

SEQ ID NO: 62984 - DNA, 122 bp, Homo sapiens
gggcacccacgaggtgcaggccagctgcagagccaggcacaggacagcgccccctgcagccgcctctgttcctaagtccaagacccccaggagcccacagttgggtcccccacgggaggggg

SEQ ID NO: 62985 - DNA, 122 bp, Homo sapiens
cggctggggggcgggacctgcccttcattggctgaaccgcgcagtattttggcacctgtgcgctggactcgagcgctccgattggagttagggcctgcttgtctgcgtgctgcgaagtccgc

SEQ ID NO: 62986 - DNA, 122 bp, Homo sapiens
cgatggctgcgagtccatggtcagaactggacgatgtcttcaaataaaacggcggcagcgcgacctctcgacctttgcccctgcgcaattgtacccacgacgacgcccccctccccgcgccc

SEQ ID NO: 62987 - DNA, 122 bp, Homo sapiens
cgcctctcaatttcagtcttagcttctcatctgtagactgtaggtttccaagttctccaacgttagggaccaagtctaactcaccacgtgtcccttgcccatagccctgggcctggcagata

SEQ ID NO: 62988 - DNA, 122 bp, Homo sapiens
tcactgttctcagcttcgtttatgtaggctgcagagccaagacagcaaatactgcacatccgggagcctccccaaggccggccctgggccttcccccaggaagagccccacggccagctcct

SEQ ID NO: 62989 - DNA, 122 bp, Homo sapiens
cctcgtgcccactcctgcgggccggggtgagcgcgtgaggctcaggcccctgggcctgcccgcagtggcctgtcccaccctggccttggggacagccggccttcgcgccccgccagctggct

SEQ ID NO: 62990 - DNA, 122 bp, Homo sapiens
gggcgaggtacggagcggacggactggggctgagagctgctcggctctcagctacaggagcggggcggcggggcgtctcgggctgggggtggcagggcggtcggtccgtgccatccgcgcgg

SEQ ID NO: 62991 - DNA, 122 bp, Homo sapiens
cccgcgtagaacttgaatgcagctaagggacgtccagagaggcctttccttttctggtggcggtctggaatgtgctggtgtgcggatgctgtgtgggttcctccgcgcgagcgagggtggtt

SEQ ID NO: 62992 - DNA, 122 bp, Homo sapiens
cctgcccgcagccatccggaggcctaaacccctccctgtggtgctgtgctccaaaggtcacgctccttgtccactttcatgttcctgccgtactcctggttcctctttgaagtttgtagtag

SEQ ID NO: 62993 - DNA, 122 bp, Homo sapiens
gggggcaggtcctgcagcctcgtaagcctcatggaagagcttggtttgtatcctttggaacgaggagcagtggaaagagccttgtcagcagacaagtgacatgctcgggttggcttttaaaa

SEQ ID NO: 62994 - DNA, 122 bp, Homo sapiens
aatccactctttctccagcaacatcatggaataagtccatcaaaaccacctcaccctcaacggtactgtgcccaaacctcaaagtatttgtctaaaaagctcttgccattctgttttaccag

SEQ ID NO: 62995 - DNA, 122 bp, Homo sapiens
taatatagcctaaactcactgaaaaataagctaacttcatttcaccttttgtagcatacacgtagactcagagtatatactgaaatataatttgaaagctgatcattaaaaaaatcaagaac

SEQ ID NO: 62996 - DNA, 122 bp, Homo sapiens
tgcctacacacccaaaattgctagggctgtggactttctcatccgccgcctccagggcttcggttcttgagatttgcagaagtgcacctccacctcctgcccattccgctgtcgcgtcctaa

SEQ ID NO: 62997 - DNA, 122 bp, Homo sapiens
gagactagccccaggcagcagcagcagcagcagggtgaggatggttctccccaagcccatcgtagaggccccacaggctacctggtcctggatgaggaacagcaaccttcacagccgcagtc

SEQ ID NO: 62998 - DNA, 122 bp, Homo sapiens
ttctaaaatttaacaccttactgctgatctgcccaaaaccctctcaggtgaggtgaacctcgagggcatcccattcaatcacacagccagaggagggtggggtttcacaagaccagacttca

SEQ ID NO: 62999 - DNA, 122 bp, Homo sapiens
ttgcctccctcgaactaatggttcttctccttgacctcaagatgcactcttttctagagccggttgccctttctcaggttgtcgggtaatcaggtgggtctcccatccctccactcacggct

SEQ ID NO: 63000 - DNA, 122 bp, Homo sapiens
tcaagcgtggctctcagggtctcaggccccacaggcggtgtatgggttggggaggccccgcgttggggattctctcctccttctcctaacctgtgtcgggtccttcttcctggatactcacc

SEQ ID NO: 63001 - DNA, 122 bp, Homo sapiens
aacagtaaccacccaaggtcagggaaagggccttatcagagcaggtttctctccaaggggcggtttggccttgaccaggtgcactcacctgctcctgcctataagtgtgccccagcccatcc

SEQ ID NO: 63002 - DNA, 122 bp, Homo sapiens
cacgcaccgataaatgattaaaccaccttcctcaaggaggacgaaaaaggcaggaacatacgtctgagcagctgagggtaatacagacgactgatggtttcctttatcccctactgtacact

SEQ ID NO: 63003 - DNA, 122 bp, Homo sapiens
ccactttgatgactcgagcgcgtcctcgctgaagaacgtgtacttcctgctcttcgacagcgagagcatcggcatctacgtgcaggagatggccaagctcgacgccaagtagccgccgcact

SEQ ID NO: 63004 - DNA, 122 bp, Homo sapiens
ctactgagcctttcaggttcacaatcaatcagatccctactggctcacctagtctcccgacgccttcgcttcagtttggaaacgtccagattacgcagccccagcgagtaggtgggggctcc

SEQ ID NO: 63005 - DNA, 122 bp, Homo sapiens
cttctgctccccgccagcctgggctgagctggcaatgtccaccctgggctgcgagaccctcgtacatgcccactggggagttgggaggccggaggacccaagatacatgaacagcaaatgca

SEQ ID NO: 63006 - DNA, 122 bp, Homo sapiens
gtccccacgccggtctgggtcccaggggttgggtgaaacctgagatctaagccccgggagcgcggagaggagatggggggtggtctgcgaaagggtctcacccagctccaaagctactcatg

SEQ ID NO: 63007 - DNA, 122 bp, Homo sapiens
tcaggtccccagggcgcccttgcagacagcaccctgagcgaaggagctcagaaggcagtccggcttcacccagacccccaatcccacagaagcgccgtcccccagcggcacagcaccccctc

SEQ ID NO: 63008 - DNA, 122 bp, Homo sapiens
gtacagctgagggaggccgtgggagcctccctggactcatctctgcctctgtttcttccccgtgagacatgggagctgagacctgccgactggctgtgctcctgcagggattggaaagggct

SEQ ID NO: 63009 - DNA, 122 bp, Homo sapiens
gcctgtccaatcagcccattatcctgagcggctgagtcagtgaatgctggcagctgctaccggaaggccatgaaggagagttgagctggagaggtcatgatgcctggaaagctgaagttatg

SEQ ID NO: 63010 - DNA, 122 bp, Homo sapiens
aaaagcgctgtgacactcaccgcgaaggtcccggctttattcctgagaccacgaacccaccggcaggaaccaactccagactactatgtgctacagagaacttcttcaggccttgaaaatag

SEQ ID NO: 63011 - DNA, 122 bp, Homo sapiens
ttcctggcatagtcttcctcaaagaacccggtcttgcacttcttcagataactcaaatgtcgtctcagcaaagtctttcctagccactcaatgcagaacatggacaccttccctgtggccct

SEQ ID NO: 63012 - DNA, 122 bp, Homo sapiens
gcggttgcctgggcgaccggggaagcgttgggctgtaaagactagggcgccagcggctggcgaagaaggaaagagggtactctctggctgggctggggccgtagcgacgtccgccgcgaacc

SEQ ID NO: 63013 - DNA, 122 bp, Homo sapiens
ccatgtaggacactaagcgcaagcaggagagagaacccttggaagtgaggggtagggagccggaagggatggaaaggcacacagctcctgagcatgaattaaaccatttctcagatatctgc

SEQ ID NO: 63014 - DNA, 122 bp, Homo sapiens
gatcagcgccccgaggcagaggccggagggcgcgcgcactgctaggaagtgctggtcccccgcgccgctctgccagcttggtcccccggcagacgcccctgtacgatcgccgctcgccccgc

SEQ ID NO: 63015 - DNA, 122 bp, Homo sapiens
cggtagggaatggagccacctcgccgcggggcagggggcgcagcggtagactaggcaggacgcggcccggcacctggtccgtccccggcgggctggtgagggggccaccaaagacccctagc

SEQ ID NO: 63016 - DNA, 122 bp, Homo sapiens
ttctagaagtcaaaaagtacccaaacacacacacatacacacaaacttatgctttgtagacgggagggaggtttgccatatgtgcgacaaaccgaaggttaaatccttattacctaaaacac

SEQ ID NO: 63017 - DNA, 122 bp, Homo sapiens
cccgggtgaccttcagggtcccagggaccgtcagtctcctccgggctgcttgagactccccgaggacactgagataaagggcgaggacacagactaaatatactgtcacctcctcctccccc

SEQ ID NO: 63018 - DNA, 122 bp, Homo sapiens
ctcctggcgccccacgatggacgtggtccgagcttgccaggcgtaaagcctgtttgcaaacgcaaggcattcattaaagaatgactcttaatttgcacgattactgcctaagtttttacatt

SEQ ID NO: 63019 - DNA, 122 bp, Homo sapiens
ttccccgccctctttcccctcggcgcttcgctcctcacggacctcaggacggctctaactcggaaacagtccccaaacgggcccagatcctctggcggagcagaagagggccttgatgtaca

SEQ ID NO: 63020 - DNA, 122 bp, Homo sapiens
tcggtgggctcgaggtcatgtcctggtgaggaattacggtcccttttactgatgaggaaacggaggcgcagacggcactgggtccaagttgcccaggcctccgaggtgcgcgcagctcctag

SEQ ID NO: 63021 - DNA, 122 bp, Homo sapiens
gtggcattgtgttatcacgtgacccaggtgcgtacgcgacggagcggggtgtgaagatggcggacgaagaggccgagcaggagaggttgagttgcggcgaaggcggctgcgtcgcggagctg

SEQ ID NO: 63022 - DNA, 122 bp, Homo sapiens
taggtggccacccggggtagccctaattgtcataagcattgtagtgagcgagactccgctcgcagagtttagaccggccactctcgatccatgtccgtcgccttcttgaaatcatctcgatg

SEQ ID NO: 63023 - DNA, 122 bp, Homo sapiens
ccaccagcccctgaccgagtccagagggtcaccgaagacgccccccagtgctcgaacgcccgttggtgccaggctgcccggccctgagggccttgcctgaggacacccctttcctcccctcc

SEQ ID NO: 63024 - DNA, 122 bp, Homo sapiens
tgtcagccaccgcgcccggcccaccactcatttttatagacaattttttctaagggacctcgtagacaatactttggggaaccgcagagcacagttggggaaaacacagtaataccatctaa

SEQ ID NO: 63025 - DNA, 122 bp, Homo sapiens
gaaaatcctgggacaacgcgaaagcggtggtcgccccacactctgcggagaaagtggtttcgcgcacgcgcgccacgcccatcgaaccctcctaactcactatagacccgaaacggcactca

SEQ ID NO: 63026 - DNA, 122 bp, Homo sapiens
ggagcctttcgtttcctcgtggatcgtttgtagaaccagaaagctgcgtgatgtctctttcgcgcgcgcacacacacacacacacacacacacacacacacgctccccacccccacctgcaa

SEQ ID NO: 63027 - DNA, 122 bp, Homo sapiens
cctcaccagcccttccagaaagttatcaaaatcccacttctttacttctataaaacagagcgatactagccagcaggtgcacaaaccaaacctaatttggagttctgaggccttgagcaaat

SEQ ID NO: 63028 - DNA, 122 bp, Homo sapiens
gaccccagcaatggccccggatcggtcccgcgcggtcgcctccttttcccgctccgccgccgggacccccctagccagtgctgaatttcccaactgggaaggaccgagtcactccaccctcc

SEQ ID NO: 63029 - DNA, 122 bp, Homo sapiens
cttccctggggccttgagccgcccccggcacacctcgccaaactcaccttcaaacaaggacgcagaggtcatcagctctcccgctccagtgtggccctgcccacccccgcttcgttcccagg

SEQ ID NO: 63030 - DNA, 122 bp, Homo sapiens
ccacccagaatacaaggcaactttcatagggtatcttttacatcagtcgagggaacgctgcgatgtgatataagtggatgatggcatgagtcaggcatccaacagagcaagatgtggagaaa

SEQ ID NO: 63031 - DNA, 122 bp, Homo sapiens
tgggccgactgcaccgaccacagcgatgagctcaactgcagtgagtcaggctgggagccccggtctccccaccctccttccccaccctgcccgcgtcccatggccctgctggctgactgccg

SEQ ID NO: 63032 - DNA, 122 bp, Homo sapiens
ccgctcgcagcagctgcggcgcgcggggtgaagttgcggggctggcgggcgcgagggtggcggagcgcggagctagagcggcggagcgggcggaggggcgggagccgtgaggagggggaggc

SEQ ID NO: 63033 - DNA, 122 bp, Homo sapiens
ggtgctgcgcgcttgggagcacgtgggggaacacgcagggactgccggcgcgaatggcttcgaacgcatgcgccccacccgacatttcacagtcgccatgacgaccggtaggtccgcaacgg

SEQ ID NO: 63034 - DNA, 122 bp, Homo sapiens
aatctgcaaagcccgcgcgctctgaccccgccaggacctcgagccctcgctgcgcccccgcgcactctgcatcccgcacctcgagccagggaaacaatcccccaaggccccacaacctgcgt

SEQ ID NO: 63035 - DNA, 122 bp, Homo sapiens
gctgccagtactcaagggtatttccgggcaggtcaaagaacatcactaaactttctaaatcggtaacagaaatattttcacaatgtcttaggtagaggaaaaaagtcaaaaggaggacgttc

SEQ ID NO: 63036 - DNA, 122 bp, Homo sapiens
cctgtggcctgagtttgtcttgaatgagactgtgcctgaacttgaatgtaggacagatgccgtcaagtttaagtttttccaagtatctttcagtcggtttgtgcctctgggaaatgttgtgt

SEQ ID NO: 63037 - DNA, 122 bp, Homo sapiens
attcaatctcattcgcaggacaggcctccaggacacttcatttttccccctgggtggagccgtggccagccgggggctccacggagtgaataggaggcggctcaggcttcctggctcgcgtg

SEQ ID NO: 63038 - DNA, 122 bp, Homo sapiens
tactgagtgtgaggaatcttgtgtggctgctgaggaatttagctgccactttccaggcaccggaacaatgtgcccattcgtggattaaggaaaccatgacctcaagcctcctaatcctcctc

SEQ ID NO: 63039 - DNA, 122 bp, Homo sapiens
gagaacaagcctggcaggtgaccctcacagctcggaggaggcttcttctctagaagttagcgaccggctgtaccctttggctcgaaaaaagtagtgctagagatgtgactgtgagcattcgt

SEQ ID NO: 63040 - DNA, 122 bp, Homo sapiens
gtttggcccgcggcagggcgctggagcgggtggggggcgggcgcctggggcgcggggcggcggcggtgggagatgctcgcctcggctcggctcggctcggctcggctgggctcggcgcggcg

SEQ ID NO: 63041 - DNA, 122 bp, Homo sapiens
gggactgccttatgagttgcactcgctgatggaaatctcgggatgcagtcagaaggcccccggggctgtcgtccggaagcctctggaggtttcactggcaaccggaccctccctgagcatcc

SEQ ID NO: 63042 - DNA, 122 bp, Homo sapiens
ttcttctttcctttctttccggttacttttgctcccctcagtcactgataggacccttcccgaaaacctcagactctctaagtcccagcttggcggccccttccttccaagccgcgccccgg

SEQ ID NO: 63043 - DNA, 122 bp, Homo sapiens
cacacgtgggaggaggcagctggacgattcctgaaaggactttcccttgcttcctcatcacgtggaagagagcccacccggcacctggaaatggaaagccagtgaaggctgctttgggccgg

SEQ ID NO: 63044 - DNA, 122 bp, Homo sapiens
cgtcgggcaggcatcgacagctccaggagccctttccctgcaggcgggctggcgggtgagcgattccctcccttcccaggccttcccgggaatggaacgtgggcgcccgcgcccgggctccg

SEQ ID NO: 63045 - DNA, 122 bp, Homo sapiens
ggttagcagtcggtttcccggcggttccggtttggcggtctgtgagggcctgggcaatgccggcatctccttcggaaccgcaggggttttcgtcccctccccatccggagcagcctctttgc

SEQ ID NO: 63046 - DNA, 122 bp, Homo sapiens
aacaattttcttaaactgtgttacaacactacccgttcttccagttttgtcctaacaccgcgcggggcaggaatattccaggtatgttgtggaaataaagaccaggccgtccagatgaggac

SEQ ID NO: 63047 - DNA, 122 bp, Homo sapiens
cagagagaagaaactgggagttccgatgctgcatcagcagcctctgtgtacagactctggcgtccctgccccgctttagcagttcctacagacgcttgacctgccaggaaaggaaagaaacc

SEQ ID NO: 63048 - DNA, 122 bp, Homo sapiens
gtgggactcaggcaaactagaggccaaagtggttgcatgcagaagtccctcccacatgaacgttttccagaattgctcctggggtttgaatattctgcttggaacacacttctccagagatt

SEQ ID NO: 63049 - DNA, 122 bp, Homo sapiens
tctcaacctccctcttaaatcagaagattcaacagacttttaatttaacagcccagcttccggaccaccctgcctgtgcctagcactgtcctccccacgccagaccgagctccacatgctgg

SEQ ID NO: 63050 - DNA, 122 bp, Homo sapiens
agaagcaataatcgtgtaggtgtatggctatgtcccaccagaagtatttacaaaaacaggcggctgatgagggttggcctctgggtcatagtttgatagtttgtcaattctaggcatataaa

SEQ ID NO: 63051 - DNA, 122 bp, Homo sapiens
gacggccgcgccccgccgcccctcgcccccgccagcttctctgcatcctcaggcccatggcgagccccagcgctttgccaatctgtcctgcttagcggaaaaaccgatccagacccaggtcg

SEQ ID NO: 63052 - DNA, 122 bp, Homo sapiens
cgacagtgcgggctcggccctgcggaggcacagctgtgaggaggggcggccccagcccaccgcattccctgaggagggtccactcgcccacagggaggggaggccagtccccacctggtctg

SEQ ID NO: 63053 - DNA, 122 bp, Homo sapiens
accccactcagtccccatggaaggacagcttgagctggtgaaactgtggaatgagaacttcgagggaaggatagaggcacaagtccttctcaccatctcaagtggcctgcaaaacctaggct

SEQ ID NO: 63054 - DNA, 122 bp, Homo sapiens
gatagctagggtcgacttgtgtggattctagtagaacggagctgaccctatccgaacaggcgtaagtgaggcggctcggagcctggcgcgacaggaactcccgacctgtgtgggctgcgtgg

SEQ ID NO: 63055 - DNA, 122 bp, Homo sapiens
gcaggagaaagcaggctgccggcccctgcctccctgaatcctcagtggctgactggataccgcttctgggggttgctgtgcacatgaatgtttgctattgttccaggcgcacgtcggcctta

SEQ ID NO: 63056 - DNA, 122 bp, Homo sapiens
ggggcggggtggggggagtgcgtcggcgaggtgctgggcacggtctcccggacccggtcccgaggccccatcctgaatgtcttcatcgggcatcctgggtcctttgcagccgcggcatgaac

SEQ ID NO: 63057 - DNA, 122 bp, Homo sapiens
cgatctgctggctggggcgctggggatgcgaattcctagaagccttaagaggctgcccagcgttggaagttcgtatccccaagaatgctggaggttccggctcacacaccccctccgggcac

SEQ ID NO: 63058 - DNA, 122 bp, Homo sapiens
tcccctccctcatgctcaggagttggcagttgtagcttcctacatcacatctgcgggaaacggaaatttcttccttcctttttataaagagaggcagtagcctcagtgtgcagtgggtagat

SEQ ID NO: 63059 - DNA, 122 bp, Homo sapiens
gccgtgctgtgaaacagtgttaggaactaacttatggggagcaatttagtagcaaccacacgcagctaattgcagataggattgctcagggctggtgcttctggaaagagattaaatagcag

SEQ ID NO: 63060 - DNA, 122 bp, Homo sapiens
ccaatagtctcagttctttatgcaatttccaaaggattaaataaaagagaggagggttcacgtggttgattctttgaaattctatctcagagccattctgttccttatgtaaatgagggtta

SEQ ID NO: 63061 - DNA, 122 bp, Homo sapiens
cagtggtatggtggcggcagtggcagcgggggggccgggcacgggcggcacagcgggcagcgtggccatgacactggcagcggcctctcagcccagctgccgctagcccggcctggccccca

SEQ ID NO: 63062 - DNA, 122 bp, Homo sapiens
cccaggaatggcatgggtgggagggaggctcttgtctaggactcaggcgctagctttgagcggtgtctgtttgggggcctcagtccgtgtctgtaagtctccctagggagcggctctggggc

SEQ ID NO: 63063 - DNA, 122 bp, Homo sapiens
gagcgagaccttgtctcaaataaaaaaataaataaataaaagagggaaaaacattcccgacgaagagaaaaataaagactgaagaactgtggctgctctgagcttgcctttaggaacagaaa

SEQ ID NO: 63064 - DNA, 122 bp, Homo sapiens
ctcaggtgatccacccgcctcaacctcccaaagtggtaggattacaggcgtgagccaccgcgcccggcccgagaatcagcttattttatgagctgtagtattcagatgaagtcggggttatt

SEQ ID NO: 63065 - DNA, 122 bp, Homo sapiens
atttctcatttggggagagggactcctctggactgtggtctccttgaatttatgcattggcggtcatttcaaatctttggagctcttttgggtcagaatcctggtcattgtttttgaatcta

SEQ ID NO: 63066 - DNA, 122 bp, Homo sapiens
ttgtttcttcctgaggtgcgctggggctgggacccggtctgcagaaggtccaggggatggcgtcgggggattgaggagaggagaccaagccggccttgcctccgggaccagcgcttccaaat

SEQ ID NO: 63067 - DNA, 122 bp, Homo sapiens
gtcttaggacttccatagagagctgggtgtcccatcattagagctcacctgcaaagcttccgtgcccagagccctcctctcccacctgacaggaagcaaagggaagctccatctttccgtgt

SEQ ID NO: 63068 - DNA, 122 bp, Homo sapiens
cagaaagggccaaggcaaagttctaggaggacatgaaacaaaagtgatcagaataaaatgcgcactgctccaggaaaacccagaggcctcacatggctcccggggccactgcaccctgggcc

SEQ ID NO: 63069 - DNA, 122 bp, Homo sapiens
gcacacacatgcactcatacagacaggcggccggctgtcagcagacagcgcggttcccggcgctccaggctgcagcagcttcgtctgcccgcagcgccaccaccgtgcgtccagaggggaag

SEQ ID NO: 63070 - DNA, 122 bp, Homo sapiens
ccgtcgcgggggctgcggcctgagtcctccgagccccctgcgtgtcgctgtccagctctgcggggctcccctgccaccgaggccaatttggggacaggttcccttgagaaagggagcagggc

SEQ ID NO: 63071 - DNA, 122 bp, Homo sapiens
cttcacagtttgggccacgggggaagtaattccccagggaaccgcgggggtgcggttttgcgcaactgggtgactcgcgtgtccctccgcatttcatttgcaccaagggagcgcgtgtcaga

SEQ ID NO: 63072 - DNA, 122 bp, Homo sapiens
cgctagcggtgtcacgctaggccactaaagccactcccacttggcctttacgctgtgtcacggagcctaagccttgcgacccagtctagaccttagatcctggggatgcagttcagagagtc

SEQ ID NO: 63073 - DNA, 122 bp, Homo sapiens
aactagagctgctgttctcagtcacattggcttttaatgcccatagaaccagaacccatacgccctcctttctgggtgcccaaacccagcagggagaggtgggcagccccgcaggctctcag

SEQ ID NO: 63074 - DNA, 122 bp, Homo sapiens
ctgcactccagcctgggctacagagcaagaccccgtcaaaaaaagaaaaagaaaaaagaacgtcaatgatatatcggggaatgaaaagccaaccaatcaattgtattctcaaagagagtttg

SEQ ID NO: 63075 - DNA, 122 bp, Homo sapiens
aagacctgccaagccctgtgaccttgagattgggcatgtttgctactgcaaacgacatctcgttgaatgtttattgacttaaagttgtaaaccacattaattaggggagactggatttgctc

SEQ ID NO: 63076 - DNA, 122 bp, Homo sapiens
ccgcctgagcttcagcttgccttgtttattgtcagagggtgcgtttctgatttacgcatccggggttatcaggtaggacggcttaaaatggtgaaagaaatgcactcacatttcagaggctc

SEQ ID NO: 63077 - DNA, 122 bp, Homo sapiens
gcagggattccaagccgggcttgaacccaggtcttcggtccccatactcggcgtcttccacgattttgagcagaggacaagctttggcacgaatcagaaattaggttgaagaactgggcggg

SEQ ID NO: 63078 - DNA, 122 bp, Homo sapiens
tataatggagtgtgtttcaactgtgattgattttgtgcctcagggtacatttggtgatgtcggaaacatttttgacggtcacaactgtgaaggtactactggcaaccagtgggtaggggtca

SEQ ID NO: 63079 - DNA, 122 bp, Homo sapiens
ccctctgggactcaagccacctccagctttgcattctgtcatccctaagatagtgccttgcgtttaggggtcagaattgaatttcaatcatcacatcaataatccaagccacaacatggagg

SEQ ID NO: 63080 - DNA, 122 bp, Homo sapiens
tggcgagaagcagggccctaagaagccgggctctcctttcctggcccactccggcagccccgtctcaccagagggcttggccaggccgccctgcgtgcacacaggcccgaagccacgcagcc

SEQ ID NO: 63081 - DNA, 122 bp, Homo sapiens
ctactttccagaaaacatgaattagggaatcctgtggagggagacagggaaataatttgacgttgtcctgtacatactggacacaataagagttgggtggatgaacgaaagcagggatttag

SEQ ID NO: 63082 - DNA, 122 bp, Homo sapiens
agctggcgggtcaggcgggtggtcagtgggtgctggcactggtgctcagggctcaccaggcggaaacacaggctcttctcctccggtttgtctgctgcaggggccagtggggggcatgggca

SEQ ID NO: 63083 - DNA, 122 bp, Homo sapiens
gtggagcgagaggctgggaaggtgcttcaagccaggggtgcatgctttctcccacggacgcggggagatggcctcgctttgtacccccatatccctactcccgctgtggtcggctgcacagt

SEQ ID NO: 63084 - DNA, 122 bp, Homo sapiens
tgactaactgggctttctgtgttgcctctggttttccccggtggattagccaagggacgtcgggtaccttgctcagcaccagctctttgaccaggtaagtctgaggccacgcacctctgccc

SEQ ID NO: 63085 - DNA, 122 bp, Homo sapiens
gatgttacttaaaagggcttctaacggtccgagaaccgggcagggagagagatgcggaaacggtcgcagacaaagcggggcgaggttttgcccatgtgcatcccgcccaacccccctgcggg

SEQ ID NO: 63086 - DNA, 122 bp, Homo sapiens
aaacaaaatcaaatcttgtctggtagatccaggtccagagagcatcgcagacatcgatctcgctccatgtcacgtgaacgcaagaggagaactcgatccaaatctcgggagaaacgccatcg

SEQ ID NO: 63087 - DNA, 122 bp, Homo sapiens
ctacggaggccccagtgagggcaggcaggagggcatgtccagggtccctgacaaccaagtcggtgctcttctgatcagaagcctgtgggatctttgcggtcttccagcagctgctactgcac

SEQ ID NO: 63088 - DNA, 122 bp, Homo sapiens
cgttcgcctggctggggggcctcagaacgttatttccgggtgacaacctgcagggccttccgcccctcgcgacctctcgggagtcccttccccggcgcccccccggggctgcaggggctgca

SEQ ID NO: 63089 - DNA, 122 bp, Homo sapiens
gcggcggcacaaggccctggtcaggcgggcaagggctcagtgtagctgtgcttctgtcctcgggcaacaaggtgctgagtcatccttgcggcgaggccgtacagccgctgcgctggtagcgg

SEQ ID NO: 63090 - DNA, 122 bp, Homo sapiens
attcctctgctgaggggctgctccgcggtaactttcctcccgagaagcacaggaatgaaacggcgatgagccccgtaggtgaagatgatcgtctgttcacctgcagttcacagaacctttga

SEQ ID NO: 63091 - DNA, 122 bp, Homo sapiens
catgcaggggaaaaaacaccaccttggcacccgtgagtccccagccagggcatagtgccacgcagccacaggatggcaggtggaaagcaggacagcccaccctttgggcaggtcaccttctg

SEQ ID NO: 63092 - DNA, 122 bp, Homo sapiens
cgaatttctagctcctgcgtctccattgccggtcctaaaagtcgccgtttcactaagcttcggaacctgactccgagaaatctattcgttcgtcccaagatctcagccagaaagagaaatcc

SEQ ID NO: 63093 - DNA, 122 bp, Homo sapiens
tgagtcaggctccctaaatgccaccagtttcaagtcactgataggggccagattttccaccgccatcaaatttccatccaacaggatgggcactcctggtccaactgctggcatgcaaaccc

SEQ ID NO: 63094 - DNA, 122 bp, Homo sapiens
ctcaagctggctgtgcattgtaatggtccaagcatgttaataaatacctatgtccagccccgcccccaaagactccggttccactggcctagggtggaacccaggcatcaggagtttacaga

SEQ ID NO: 63095 - DNA, 122 bp, Homo sapiens
ctggaggtaatggtcgagcgcttgttgtagtgggccagacgggaagcctcgcctgcgatgcgttcgaagatgtcgttaacgaaggaattcatgatgcccatggccttggatgagatgccagt

SEQ ID NO: 63096 - DNA, 122 bp, Homo sapiens
gattttaattaaatgaccgatacttgcctaatcttttaaccaattctgcctattgattaacgtgttcagaatcacttcactgtgatgtaaatagctctcaggcagtagaaattttgagtaag

SEQ ID NO: 63097 - DNA, 122 bp, Homo sapiens
ttaaaaactgtgagagcctgtggtatttcaatcaagactgcctcttcctctacccccacccgactctgcagctcggtaagacagaaactccacactagtgtagacaagaaattagggctccc

SEQ ID NO: 63098 - DNA, 122 bp, Homo sapiens
gcaacccgcgccggacccttccttcctagtcgcggggagtctgagaaagcgcacctgttccgcgaccgtcacgcacccctcctccgcctgccgcgatgtaccgctacctggccaaagcgctg

SEQ ID NO: 63099 - DNA, 122 bp, Homo sapiens
acagacctccagctgaggtttcaggagtttcaagacctgccctgctggctgcctcagccccggctgcgaggttcccagcctggtgtcagtgctgatgctggtgagggagggaggcggatccc

SEQ ID NO: 63100 - DNA, 122 bp, Homo sapiens
tctcattcctgtgtaaaccaatgtctcatcacaccagaaaaacctgatcatatatatgctcgttttctgaataaaattcttctgggggcatttcatatataccagtaaggtccagtcttgat

SEQ ID NO: 63101 - DNA, 122 bp, Homo sapiens
gaacccgccgcggtaccagagcatcggggagtgggtgtggcagacagtccgcagccatggcgttctgggcctgtaccgcagtctcagctccctgctctacggctccatccccaaagcggccg

SEQ ID NO: 63102 - DNA, 122 bp, Homo sapiens
gcgcgcacacgtcggggggttggccaggaggggccattgtgtgtttctaggcggcgcccccgctgcctaggcaaccgcgcaggaaggtgtccggccacctgcgcgcgccgccggctcccctc

SEQ ID NO: 63103 - DNA, 122 bp, Homo sapiens
gggggcgcgcctgtactggtgagcgcgatgcttcgcctaggtgaacgggacaggtacacgcgtggggtgggatggagtgttcatatatgtggcttgtgatatgtactgaggggacgtggggt

SEQ ID NO: 63104 - DNA, 122 bp, Homo sapiens
taaatgcctctctctccagttctacttcctttcactcccctcttttcatctcttcgctcacgtttcaaggaaaatatcttgtctgacccgtgaagtgatctaggaactcagtctcatgatct

SEQ ID NO: 63105 - DNA, 122 bp, Homo sapiens
agagagaaaagtgtgagaaatgacttgggtttgtaattagagccactggtcaagagttgccgttcatggagagggaggaggagcagacagagttcaagttttgacttgttgagtataagatg

SEQ ID NO: 63106 - DNA, 122 bp, Homo sapiens
gagctccttggcgcctcggcaccattaccttcaattatcataattggtgcctctctccagcgtttgcatttcccccgagggatctctcactagttcccgttccttctcctcgccctctctcg

SEQ ID NO: 63107 - DNA, 122 bp, Homo sapiens
aactcacggagagagcagaggttgaggaagcctggcgccccagcgacaaagcagtgtccccgacaaaagaaagattcaatcttggaaacagaaacatgaagtgaatgtttaataccatggtc

SEQ ID NO: 63108 - DNA, 122 bp, Homo sapiens
ggacgttggggagggggctgtgccgggcggagagaactcagcgaggattctgaggtgagtcgagcggttttgaagccggactacctcaagtctctttcctcacttctttctcttcacttaaa

SEQ ID NO: 63109 - DNA, 122 bp, Homo sapiens
aggaaggagggggtctcccaaatcacctggctcaggggaggggacagcaaggcatgagagcgacttccccagcctgggccatcttctctagctgtcccagccagagcgctcagcctcccccc

SEQ ID NO: 63110 - DNA, 122 bp, Homo sapiens
aagctagaagtaagaagtactgaaattttagttacaagtttcatacaggtaaacccaaggcgctacaaatgaagaattaaaggaatgaaaggcgaaagaataaaggggccaaagaggtgatc

SEQ ID NO: 63111 - DNA, 122 bp, Homo sapiens
ttcagtctaggctaggctgagtcttgtaatgagtatggatttgccagtaaataagtcccccgcttctaacccctgtaataaatgcatttggagtaatctggcgatcacgcggtgtaattgct

SEQ ID NO: 63112 - DNA, 122 bp, Homo sapiens
ctctccgcctgggcacttgggctccgggcccttgggggcggcgtgtgggggggactttggcgacccgggtcagccggccgccccctgggctgctggtgggcgtcgggcggcggctcctcccc

SEQ ID NO: 63113 - DNA, 122 bp, Homo sapiens
tcaaaggcacgcattgtgggtaacgtagtccagcacctcggtgaccgcgcgagcgtgcggcgactctgcagcctctgggctactttcccagtcactgttccacacccgctccgctctcctct

SEQ ID NO: 63114 - DNA, 122 bp, Homo sapiens
gtttcttctgtcctcaaacactgttatttattttcaagataaaatttagtaacaacattacgaagtagcttttattcccttgggtgaataagatgtgcacatttaataataaatttgcttac

SEQ ID NO: 63115 - DNA, 122 bp, Homo sapiens
agggaggttgagtagaaataagcttatatgcagaatcagttgatacactgtcaggaatcccgtgcttaatatctgattcagaaaggcccttagacatacatatgtgctccaacttagtttta

SEQ ID NO: 63116 - DNA, 122 bp, Homo sapiens
ttccttgccatatgatctctataaaccaaatcactgttagccagggcacaggaccagaggcgccggaggctcatggataatgaatgccaaatgcatgtgacaatagactgatcagaaagcag

SEQ ID NO: 63117 - DNA, 122 bp, Homo sapiens
gggcggagagcgaggctgcgggaggcagcggtggcaggagcgggtgggcgggggcgctgacgtcagacccgggcccgggcgccggcggccgctcccctgccacatcctggtggccgcgctcg

SEQ ID NO: 63118 - DNA, 122 bp, Homo sapiens
aaatggtgagcgaggtgttttccgttctttccgtggtcctgagcccttggaatcggggtgcgctcacacactgggctcaggtccatccacatttcacacacccccaccctgtgtggccagtg

SEQ ID NO: 63119 - DNA, 122 bp, Homo sapiens
aaaatactaaaagttcacttgtgaagtagctgttgatttatttagctccgttggaccaaccgagagaagcttagcagttgagtgagtcattaaaataacagctcagctatatggctaggcat

SEQ ID NO: 63120 - DNA, 122 bp, Homo sapiens
gactttgatgagctcctctgctctgcctaagtggttctggaacagagagctgttgtgatccgacgaactttagaaagtcacactaactaagactacacaccccaagccagcaagaaaaagga

SEQ ID NO: 63121 - DNA, 122 bp, Homo sapiens
ggcctcctgttccaattccattcccaggcactcaacaagatagccgaggccagctcactccgctggtccccacgtgccaccgtctccctccgcaggtcatttgtcatcatccgtccacgtgg

SEQ ID NO: 63122 - DNA, 122 bp, Homo sapiens
aaaatggcaaaacctcgcctctactaaaaactacaaaaattagctgggcgcagtagcgggcgcctgttaattccagctactcgggaggctgaggcaggagaatcgcttgaaccctggaagcg

SEQ ID NO: 63123 - DNA, 122 bp, Homo sapiens
ttttctacaccctaacactttttatcttttgactgtttgataataggcatccaaacaccacgataaggtgatacctcattgtgattttgactttaattactctgataattagtgatgttgag

SEQ ID NO: 63124 - DNA, 122 bp, Homo sapiens
ctgctgagggaagatctatatgcctcaggtctgtaacacatggctccctccttccccgggcggagcaggcagccctacttcaaaggacagcctggttagtgatattgcagggcttcctggct

SEQ ID NO: 63125 - DNA, 122 bp, Homo sapiens
cgtagtcgccgtctggggagggcaagtccccagcgttctggggcatgcagtaggtggactcgccgctggaggagttgtgtaggctcccggagtcctgcactgatggggcgagcagcaccgtg

SEQ ID NO: 63126 - DNA, 122 bp, Homo sapiens
cgtttccctcccgggccggccgatccgccggggaccccgcggagctcaaggcccttgaggcgccgcgggatcccagtggccctcgccccgccccaaacccgaccccggtgggcgtcgacgcg

SEQ ID NO: 63127 - DNA, 122 bp, Homo sapiens
agagcaatgccccgtggggccaggacatcctaccgggcggcagcggggggcacggggagccgcgggcacgcgccatcctcaatgttcatgctccgcgtggacgctggggggctgtgggtggg

SEQ ID NO: 63128 - DNA, 122 bp, Homo sapiens
tgccaggctctccaatcgcatgtggaattatcgctctacccaggcggtggtgtcgatctacgttccaattggggccgtaccatggcggagaagactcaaaagaggtgggtttgctgcttgag

SEQ ID NO: 63129 - DNA, 122 bp, Homo sapiens
tacccgtccgacttcaaaagagagcattaagcagttggacacggaataagctaaattccccggagagccgcattgcccgctgcccatgcacattatattttctcctagtccctccccccgcg

SEQ ID NO: 63130 - DNA, 122 bp, Homo sapiens
tagtgttggtgggtatacctctcacgtaggtagttgtgtacagctatgtgtgggcctcagcgaggatgcgtgtgggtacatgcgcgtgtccccttcacagtttgtaggtgtgcgcccacagg

SEQ ID NO: 63131 - DNA, 122 bp, Homo sapiens
tgcccacttcaccccagtgtgtctactccttcaccgacttcaccccaggctcatctactccgctgctaaagtttctaagaggtgggggtagagcctctgtgcccccacccccgccccccgcg

SEQ ID NO: 63132 - DNA, 122 bp, Homo sapiens
tttacctacctaagatgtccacatgggtgctgattctcctggtgttccctctcggctactcggggtaggaaaagctggacatggtgctctaaaatggacccaccacctcatttgctgttgcc

SEQ ID NO: 63133 - DNA, 122 bp, Homo sapiens
ggctgagaaggaagtgcgctccctgagccagctcaagagttactgcaggagcctgcctgccgggagagccatttggagcctcggccggggctgggcctgcgttgggaacgcctactccaacc

SEQ ID NO: 63134 - DNA, 122 bp, Homo sapiens
gcgcgggaggcgagacgacctcacctcggcggcgcccaccccaaaccgccaccgcagagccgctcgctcttaaaaaagaaaaaaaaatgaaaggaagaaagaaagaaacagaggaaggaatg

SEQ ID NO: 63135 - DNA, 122 bp, Homo sapiens
gtgaattctaccagtgccatacacagaacaggagtcacactctgcggcctgccgaccctgcggagagaccagcggcccacgatgcccgttccctgctcctagcctgcccactcccttggggg

SEQ ID NO: 63136 - DNA, 122 bp, Homo sapiens
aagaaatacaaatggacaataagcacaatcaaaagctaaacatgaaagaggccgacagtgcgccacgtgctgcaggattcactctcaccacactcagcaccaggttccgtgacaggcgaagg

SEQ ID NO: 63137 - DNA, 122 bp, Homo sapiens
ggtggaggtcttgaggctatcagatcggtatggcattggcgtccgggcccgcaaggcgggcgctagctggctccgggcagctcggccttgggggcttcggggccccgagacgcggggcgtat

SEQ ID NO: 63138 - DNA, 122 bp, Homo sapiens
tcccacccccgatgctgacatcaaaggagcagagacacgcaggagactccaggcagcacccgaggccctggccgccagcacgtcataatccctgcagtcgctgcctttcagacttaaaaaga

SEQ ID NO: 63139 - DNA, 122 bp, Homo sapiens
ccacctcaggggcaggaggccaggggttttctgggggctggggtcctgccggccaagggtcgtcaggccggggaggttgaggaggatccgttctaggcggttcagggagccagactccagtt

SEQ ID NO: 63140 - DNA, 122 bp, Homo sapiens
atcagttgctgagcagaaacaagtggcataaaaagacaactatgatcaacaacaaggaaacgagcccaatgaaaaaacgtgcaaaagttcttaatagacacctcaccaaagagatatacaga

SEQ ID NO: 63141 - DNA, 122 bp, Homo sapiens
ccttcaggcagctctcaagccaatgacgctgcaacgatggaatttacagcccggtagagccgggcagctgccaagcggcggatcatcccttgtggtcctagagcccggtggatttcagcatt

SEQ ID NO: 63142 - DNA, 122 bp, Homo sapiens
acgaaccccttggagttctccagtcatcagaaataggtgtgcagtcatcccttggtatagcgtgggactggttccagcagataccgaaatccaggcacattcacgtctcacagtggggcctg

SEQ ID NO: 63143 - DNA, 122 bp, Homo sapiens
gggagaagtgtgtaccaagcaagagtcagctcggagcaaacaccaggggacaggcccagtcgctggtcctggacaagtaaaactttcccatcacaaccaccacgccaggcgattgctcagtg

SEQ ID NO: 63144 - DNA, 122 bp, Homo sapiens
ctcttcacctcctgcccactcagcaaggccatagaagcacaagtaattcttaggactgatcgccctttactctagtttaaggaagaaaaggagaaaggggtacaagctacccatggaagtgc

SEQ ID NO: 63145 - DNA, 122 bp, Homo sapiens
ttcttgtgaaattctagactctgaaccaggaagggtcactggcttgaggcagagccttcacgtgctctccagctcccagctccacccctgttcaatgtgcctttatctcacccctactccag

SEQ ID NO: 63146 - DNA, 122 bp, Homo sapiens
ccatgagtgaggaaaggggcccggaagccacaaggtctctctgggtctgtttacagcctgcgggaagaagtggcccggttcctgacctactactgcagggcacctacccgacttgacccaga

SEQ ID NO: 63147 - DNA, 122 bp, Homo sapiens
aaaccgtagatgtttattaataaaccggagtccgtgtcttccctcccctcaggcacgtctcgtcccgacccctccctcctcccagcccacacccttactgcgcccttggccctgggtccctt

SEQ ID NO: 63148 - DNA, 122 bp, Homo sapiens
tattgctctccaggacaatctggccaatgcttcacccctacaggtccctggtgcttccctcgttctttgattcctcctgtaggcaaggcctgccctatttctcagcaatccaacctgcaatc

SEQ ID NO: 63149 - DNA, 122 bp, Homo sapiens
cctcgccctgtagcagaaccccaacccccggcctgagactccagggatcggctgagctcgcgggctaacgctgtgaagcctgcccagctaccgtgacgtcacgagacccccgctatctcgtt

SEQ ID NO: 63150 - DNA, 122 bp, Homo sapiens
tgtgcccaccctcttgacagcatccctgttgtgggagcagatgtggcagaccctgaaagtcgggaggagaggaaaagaggtgctctgaggaggctgattttggctgggggtgaagaggagct

SEQ ID NO: 63151 - DNA, 122 bp, Homo sapiens
ccacacttactcaccgaggagctctcggattccgtggggctggacgggtcagtgtgataccgtgcacccacacttactcaccgaggagctctcggattccgtggggctggaagggtcagtgt

SEQ ID NO: 63152 - DNA, 122 bp, Homo sapiens
atttattgagtttgggaggtgcattacataaaaccttgaaccacacggtcactgtccctgcgcttgaaactgcctttgcaaaaattacaacagaaaattatgacagtgaaagagagctgacc

SEQ ID NO: 63153 - DNA, 122 bp, Homo sapiens
ccccaagatagccagcggccattacgcgcttgggtcgggggagatggagtcgcatttagccgcacagcagcctggaacctgaagttttcggccgctgagcgttctgggtgattgcgtagtgc

SEQ ID NO: 63154 - DNA, 122 bp, Homo sapiens
atttctcttacataggcagagacagagaaatttcagcaggattacaacatttttcatacacgatcagtgcgtacagtgacttgatcggttacagattgctgcattccaaggaaaatacttta

SEQ ID NO: 63155 - DNA, 122 bp, Homo sapiens
gtctctggtatctcgtcgtctctccgagtctctgtcgcctcccgggactctgcgctcccacgctcctgccatcccctgggaagctcgctgacacttccaggttcctgccacctcccctcccc

SEQ ID NO: 63156 - DNA, 122 bp, Homo sapiens
atgctatccgccgggagcgctggagccttggctctcaaaaccagccgcggtgctaaccgccgggatccctggcagctgacctccgcgttgtgtggttcccaatgtcctcttctgccttagtg

SEQ ID NO: 63157 - DNA, 122 bp, Homo sapiens
ccctggcgcagggaagatgcggcccctcccccgccctcagccccatcccctccggtgccccgtgtttagcctgagctcaggaggactcagaggcctggactcccagccttggccccagcgcc

SEQ ID NO: 63158 - DNA, 122 bp, Homo sapiens
tataagtcacagtgctctttcaattgtgagtcataagaatccagagcaatatttcagcttcgtcttcaccaacatccccagcctcctccctattcaagcctttcactgagccgctgacaaga

SEQ ID NO: 63159 - DNA, 122 bp, Homo sapiens
aagaaggccgtgctgggttccagtcctttcctgtccgaggccaatgcagagcggatcgtgcgcacgctctgcaaggtgcgtggtgcggcactcaagctgggccagatgctgagcatccaggg

SEQ ID NO: 63160 - DNA, 122 bp, Homo sapiens
ccaggaccacccaggagcagggctgctggggaagacactctgaggcctcctcaggggacccgtcgctcagactaaatgcataggggcccgcgatacgccccaaccctggccctgcctctcac

SEQ ID NO: 63161 - DNA, 122 bp, Homo sapiens
gtcggtcagatcccctgcctcggtgggggccaatgcagagcccctcaggatggggtgccccgtcaggggctggacggtcgtggggcgggtgcagggctcaggcctgccccctgagctacagg

SEQ ID NO: 63162 - DNA, 122 bp, Homo sapiens
caaccccgtcctgctccttccttgcaggtctattacctcggagagggggaggcctcgcgccggtggctacagcaagagcagaacagcacggggaagttgtgcctgtcacacatgcgggcggt

SEQ ID NO: 63163 - DNA, 122 bp, Homo sapiens
ccccctaaccactgcctcgctcaggctgccgatcggctcgttctctctgcgttgggaccgcggagggcattcgctgtgtgactcagggcaagtgtgcgcacctctctgagcctccgcggcct

SEQ ID NO: 63164 - DNA, 122 bp, Homo sapiens
tgggggtctcccggagttcgtccgccgagctggaccggagccgccccgcggtttcaggtgcgacccggccctgccccactccccgcgcccctccgggcggctgcccctgtcgcccggctcgg

SEQ ID NO: 63165 - DNA, 122 bp, Homo sapiens
ctcctaggcgtctctgggctcccgggagaccgcgggcgaggggctggaggcagtgacccacgacgggtcccccccccgcgcggtgagcggccagcacttcctcttccccagccctgggcctt

SEQ ID NO: 63166 - DNA, 122 bp, Homo sapiens
gaagcatattaaggaataagaaatccaggtacccagggcaccaggacatactggatgccacgaaaatgagaaatgtgctggttaactcaggtttctgtacaaaactctttaccttgctagta

SEQ ID NO: 63167 - DNA, 122 bp, Homo sapiens
attggagaggaatttgccaaagatctaccctgagataacgcctgtccagtgtcttcaccacgtgaataaccagcgctccaaagtgtttttctgctttgaaaaaaaaaaattccacaagcttt

SEQ ID NO: 63168 - DNA, 122 bp, Homo sapiens
ctggctggtttagtgcaggacatactaaggatctggttggcactgctgtttgagaaggcgcgtgagctgtgctgtctggtgactactgagcacttgaaatgtgactagtgcaactgaggaag

SEQ ID NO: 63169 - DNA, 122 bp, Homo sapiens
acctatcaagaatgaaaacaagaacctggtgcacctggtttttcaatactctactgtcatcggtatatgacagtaggtttatgtcataggtttatgacagctactcagtgactagctgagat

SEQ ID NO: 63170 - DNA, 122 bp, Homo sapiens
ttcccacaatccctgcattgatagggcttctcccctgtatgctctcgttcatgagccctgcgcttacagttatgacgaaaggctttcccacactcctcacacctgtaacgtttctcttcagt

SEQ ID NO: 63171 - DNA, 122 bp, Homo sapiens
gagggtgtgcgtgtgagtgtgtgtgtgtgtgtgtgtgtgtgcgagtgtgcgtgatggcttcgcagatttgggtttttatcacccagcagagccagcagcctcttcgccgcggcgccctagct

SEQ ID NO: 63172 - DNA, 122 bp, Homo sapiens
gatatcacacctgaggaatccacgtgtaagctattgctcttgtatgagttcaggtgcacacgcactgtggacgcacactgcactgtgccccccaacggctgacaacgtggagccgggatgca

SEQ ID NO: 63173 - DNA, 122 bp, Homo sapiens
cttgctttatccgcaggctgaacgagcgcgaccgcctgatcaagaggctgggccggaagacgcccccgacgctgttccggggcagctccctgcagcagggcgtcccgcgtgagtaccgcggg

SEQ ID NO: 63174 - DNA, 122 bp, Homo sapiens
gagggattactccttccttccctttgttatggtagttgttactgctctcctccctgccatcgctgctcccagctgttcactttggcatggtctcctaccctgtatcttgagttctgtgtgtg

SEQ ID NO: 63175 - DNA, 122 bp, Homo sapiens
ggtcagcatgcactgacctgaatgcccttttctacatcattaaacccctttttaacttcccgctgtggggatgatgtgtgtctgcaccggatccacactatgtttcttccccctttctgttt

SEQ ID NO: 63176 - DNA, 122 bp, Homo sapiens
tgcactgtcttttcatgatcatttgcatccattagagaccccgcatcctattggcttcttcgtactcctcccggacagaacgcagagcgagggtgagagcgagagagagcgagcgagagaga

SEQ ID NO: 63177 - DNA, 122 bp, Homo sapiens
ctaagaatcgctcacgccgtagttgggcgccgccatgtattgtcatttgtatgtacttggcgttcctgagcgctgggccagcgcttcacacgcactgccataaggagcttcatccaacccta

SEQ ID NO: 63178 - DNA, 122 bp, Homo sapiens
gatgcccaccacgcagatgcaggtgagttcgttgaggatgtcattctcattgtcccagtccggctccgggctgctggggaagtcgcggtaggccacgcagatagtgcggagcccatcgcaag

SEQ ID NO: 63179 - DNA, 122 bp, Homo sapiens
ctgtgaattgtgtttttggtagtatatggcattattctgaggaggggtcaaagactctcccgtatgttagaacggtcctgcacagaacaggctaacccccacccacgtcccccagtgtttga

SEQ ID NO: 63180 - DNA, 122 bp, Homo sapiens
gggcttggaggcaggtggggttgggcccaggagtccagagcctgcagggcggccccgaaccgcattgcggctgggtggtcgcgggtccttcccggccggcgcgcgcccgctggctctcatct

SEQ ID NO: 63181 - DNA, 122 bp, Homo sapiens
aaagtaatacagttgacccttaagcaacatgggtttgaatgagacagatccacttatacacggattttttcaacaaaagttgcactgagtgtgcctgcatctcccactcccctttcacttcc

SEQ ID NO: 63182 - DNA, 122 bp, Homo sapiens
aaagtgggcacattaccggaatagtgctggggagagtgctggattcttttccaccccaggcggactggtgagaagccaggcttggacctgtcctctgctcctagcttgcacactcagcccta

SEQ ID NO: 63183 - DNA, 122 bp, Homo sapiens
agcacccgctgctgcccacacggagcagctctcagggtctcactgcttgcggccgtttcccgccagtgcccccaacacacagtctacctctctgggcctcaaagtcctgaactgcaaaagca

SEQ ID NO: 63184 - DNA, 122 bp, Homo sapiens
agatgacagcagctcgaggtacatggattacgtaaagatacttggaaaagagcctgaccccgtatgaatacagcgccttggctctcagggatgatgctgtgggctaaagcccccatgtccca

SEQ ID NO: 63185 - DNA, 122 bp, Homo sapiens
gttcaagaagatctacgccaacttctttccctatggtgacgcctccaagtttgccgagcacgtcttccgcacctttgacaccaacagcgatggcaccatagactttcgggagttcatcattg

SEQ ID NO: 63186 - DNA, 122 bp, Homo sapiens
gaccccgccccagctgacacgggagcagccatggcccagacgagtggtaggaaggcccggcgtcatcgcacaggtgtttatggagcgcctgctgagtcgctgtcacttcctctcttccggag

SEQ ID NO: 63187 - DNA, 122 bp, Homo sapiens
gcgtctcctacctgctctgcccggctccgcggcgcggcggggccactgcctgcgctgtggcgggggcttcccgtcgcatatcccaagcaccgtctctcggcgccacaccgatggctccggcg

SEQ ID NO: 63188 - DNA, 122 bp, Homo sapiens
cacggctccggagaacctgaaccagagaaacgccattcgggcttcgtggggcgggctgcgcgaggcccgggggctcagggtacagacgctattcttgctgggagagccgaacgcacagcacc

SEQ ID NO: 63189 - DNA, 122 bp, Homo sapiens
agcgtgtaacgtgcgctatggagccgaaagtcgcagagctgaagcagaagatcgaggacacgctatgtccttttggcttcgaggtttaccccttccaggttagtttatccctcctgctgttc

SEQ ID NO: 63190 - DNA, 122 bp, Homo sapiens
tgcggggggcaactccacctcccctggggaggcctcgtccccgctgcagggagactaaagcgtgggtccgcgaccagccggtttaggaacgaaaactctggaactaaaaacaaaaaataaaa

SEQ ID NO: 63191 - DNA, 122 bp, Homo sapiens
catctggccagtgtttggcctggggctccatgccatccctggggtctgagcgattcagcccgtgcccccttcccgtctcatcctcacgcatccttggctgggtgcatgctgggtgtttcgag

SEQ ID NO: 63192 - DNA, 122 bp, Homo sapiens
gcgcgcggcacggagaccgcccgctgtgccccgcgctgcgctctctccgcccctctcccgcgcaggcctccctgtgccagccggctgtcgacccaggttaggaagcccgaggtcggggcgtt

SEQ ID NO: 63193 - DNA, 122 bp, Homo sapiens
gctggcctctgagtcggcttccttctacctggtgcccggtggcggcaccgagcggccgtgcgcctccgcctggcagctctgttttgcccgccaggagctggcgctcaaagcgcgcataccag

SEQ ID NO: 63194 - DNA, 122 bp, Homo sapiens
cctctgtcatctgtaatcaggtattttctgagaagtggaaaaaacaacagaatctgacaacggttgctggcagttttggggtcatcactctgtaaaacatgtgtttttgtcagtttattttt

SEQ ID NO: 63195 - DNA, 122 bp, Homo sapiens
agcctggaaatgttgacctccgttattaagcctggtcagtctaagactaattcttattaccgaagtaccattaggtaaatgtgctagctatagatttaagtgacataaaagatcttaaagaa

SEQ ID NO: 63196 - DNA, 122 bp, Homo sapiens
tgcaaggaccaggactttctctttccacttaaactcatacctgatccccctccaacagaacgaggtacagagcccttaacctgaaccatatccttaaactgctataattatgaagttggaag

SEQ ID NO: 63197 - DNA, 122 bp, Homo sapiens
atcctaatggcagatgttaaaatccaaccacatagccttacttgttgctccctaaacacccgctttatacatcactatgcctttaaacattaagttccctttaccaggaccaggctcaggga

SEQ ID NO: 63198 - DNA, 122 bp, Homo sapiens
gtgctccgggggcgggtccggaaaactgtccaatcaaggcacggggcggacaccgggaagcggattgcaggtttgcagtagtgtccaatcgaaggccccaggggtgaagggggcgtgtccaa

SEQ ID NO: 63199 - DNA, 122 bp, Homo sapiens
cagtggcggcggtgaccccgtcaccgcctgcgccagcgacacaccccctccctccgcctgcgtcgcggagtccccgaccctctctgtccagcgcgcagccgcctccccagtccaaagcggac

SEQ ID NO: 63200 - DNA, 122 bp, Homo sapiens
ccctctggggcaccaggctcggttcctagtgcacagaagggcgtcactaactatgtgatgcggaccgcagggcaccggggttaaggctgaatctgccaggtccttttccaggggcgcagaac

SEQ ID NO: 63201 - DNA, 122 bp, Homo sapiens
aagatgtcaattagcatgctataagagaaactctttctaaaacatgccccccccccaccacgggtggcatgagcagatatttaatgcacctgctgccttgcaaaaatatcaatcacattgta

SEQ ID NO: 63202 - DNA, 122 bp, Homo sapiens
aaggccgggcagtgcctggatgaaggcacaggaggccccctaccttctgtgagcgccccccgtcccccgcacagcgtgcctcagtttcgccacactcaacggccatggacctgagcccatga

SEQ ID NO: 63203 - DNA, 122 bp, Homo sapiens
gttgtgctgatggcagcagcagcccgtctagggtggccactgccgtgatgctggctgcagcgctccatgaagcgagtggagccaggaacaggcagaagccccgccccctcctgagttgatag

SEQ ID NO: 63204 - DNA, 122 bp, Homo sapiens
ggtcttagcaagcagtgggtccttgtagagtttctccagaggagcctgtacccctcaccccgacagactcaggtgtgaggacaggggaacctgatactgtttgattaaaagaactttttttc

SEQ ID NO: 63205 - DNA, 122 bp, Homo sapiens
ctggaggactggtttgccaactacaaattaaagttagagatcaggtgaaacttcggcctgcggacagctggtgacttttttcatatagtgaaaaaatggtttgttcatatctttctaaaaag

SEQ ID NO: 63206 - DNA, 122 bp, Homo sapiens
ccaaagagaagatatttactccagtgagtgcgaagtgagtgcctcgttcacacccacagtcgcgccgtcccctcttcccgctctggggccagcaactcttgttagaatgcagatgccttttg

SEQ ID NO: 63207 - DNA, 122 bp, Homo sapiens
cgcccccagcggctgagcggacggtgctttccctcactttacacaccagggaaggtccagcgctgccgagcagcctgctcagggtctcccgctcgtagaggggcagaccccacgcgggaccc

SEQ ID NO: 63208 - DNA, 122 bp, Homo sapiens
gtttctcctccacctgctcctccacgtgccctggctgcttctggctctgcacctggggtccgggtgtttcaagtggccaagtcagaaccacaaggcatcttatgctggaacctcagaagtca

SEQ ID NO: 63209 - DNA, 122 bp, Homo sapiens
aggcccgtgtctgtgtaccctgtgtctgcacctctgggcagggcctggctctgaccaacccgggcttccagtgtccacagacctaaggcccagggcgcctgggggctggagcaagagaagca

SEQ ID NO: 63210 - DNA, 122 bp, Homo sapiens
ccctgccaggtcaggcgtggggatgggggtctgggcccctcagtcctcccaggtgaaagccgggacaccaccctcacaaggattaccaggaggggcactgaccccaagggcacctggagaag

SEQ ID NO: 63211 - DNA, 122 bp, Homo sapiens
aacagatcagggcaagtgtgtgggtgatgtgaggtgtccttggatacacccaagtttacccgcccagccagtctcaagggctttggcaggtaattgatgccccttctcctctgaacgaatga

SEQ ID NO: 63212 - DNA, 122 bp, Homo sapiens
atccgcctgcctcggcctcccaaagtgctagtattacaggtctgagccaccgcgcctagccgagtttaggtttatttgaggaatgcaagatagtattacatgataatctaacgatgtaattt

SEQ ID NO: 63213 - DNA, 122 bp, Homo sapiens
ccgtttgttagatgctggtggccacccagagtgtgcccagagattgactcgaaggccacccgaggtgtctggctcaatttctgggtcggatcagggtcagggaatctgagtccccgggaggc

SEQ ID NO: 63214 - DNA, 122 bp, Homo sapiens
ttgctgcactgctgcacatagcagaggtgtggtgacgaccctgttttgtcccattgggggcgtttgctgttaggtctgcagaatcctcagttgctattggaaatggtgacatcactggcagg

SEQ ID NO: 63215 - DNA, 122 bp, Homo sapiens
cgggaggaggaggaggagcggcggcgcctgggcggcatgcgatggggaactgctgctggacgcagtgcttcggactgcttcgcaaggaagcggggcggctgcagcgagtaggcggcggcgga

SEQ ID NO: 63216 - DNA, 122 bp, Homo sapiens
ctatgcgaaggccctgagcacggtgccgggccagcccggctcgggagaagtgcgcggctccggtcagagcagccccccctaatgggatttctgctgtgctccccgcagggaacgacactagc

SEQ ID NO: 63217 - DNA, 122 bp, Homo sapiens
accatcagatctcgtgagaactcactcgctatcacgagaacagcacggaggtagccgccccgaggattaaattacctcccactgggtccctcccatgtcacgtggggattacgggaacaatt

SEQ ID NO: 63218 - DNA, 122 bp, Homo sapiens
ttcaagcacatccaggaatggaaaatccacccttctggtggcagagggctgatggtgctgcgtgctggatggacaacccagccagaatcagctttgcccagcagagtctgcaatgggaggca

SEQ ID NO: 63219 - DNA, 122 bp, Homo sapiens
tgtagctccgggaagagaagggccagagctctttcaggcaatgatgtcatctgcaaggcgcgccgtacgcggttcctggcttcgcctcccagaccccatgccttccagttctcgctgtctat

SEQ ID NO: 63220 - DNA, 122 bp, Homo sapiens
gtattttctgctcttttatcactgcttcagctagtaggtcaactgtggtttgcatgcccccgtgacgagtggtctgcaggtctctggtgtcacctcccagtacggggtcctctggggctggt

SEQ ID NO: 63221 - DNA, 122 bp, Homo sapiens
gccagatcagaaaagggagctcaggtaccttccagagagtgagacccagcgcccttgtctcgcacccagtaggctttcatccccgccatggcggagctgatccagaagaagctacagggaga

SEQ ID NO: 63222 - DNA, 122 bp, Homo sapiens
gggagatggaaactgaagcaagaagtggtctacaaacctagctcaaattgttgagattaccggccgtgccccttattcagatcaacccctcctcggctgatcgccggcgcgagccagcctag

SEQ ID NO: 63223 - DNA, 122 bp, Homo sapiens
ccaaggacaatgcatttttcatctcaccagccccaggacctcttccacccactccttactcgagggctatgcccactgtctgagagagaaactaataaacctgaaggttgagtaaccagaga

SEQ ID NO: 63224 - DNA, 122 bp, Homo sapiens
gtcacccaggaggacacagagcccccaaattaaacgaagggcacccatgcgagggctggccgaccctcgccacctatgtcttggtttcccccactgtaatactgggaaccccacttctccca

SEQ ID NO: 63225 - DNA, 122 bp, Homo sapiens
tgcactaggatgatctgcacaatgaatatattctgtactatacaacacgcaatcatatgccgacaattgaaaactaaacacggtgtggggagcgttctgggacaggtaagggcagggaccct

SEQ ID NO: 63226 - DNA, 122 bp, Homo sapiens
cgcaccgcgagggaggctccgggctccgcactcaagggcaagcggaagccgaggtggcggcgccggagccaggcatgtcccgctgcccagcgcggggctgagggcgcagacggggaccgcgc

SEQ ID NO: 63227 - DNA, 122 bp, Homo sapiens
taaatattgaaaatactttctcagctgcatcctttggcaaattccagattccttcctatccgtctttggttttgcaaggtccaaggtcagatatcctagtttccctctgcctaagcctcttc

SEQ ID NO: 63228 - DNA, 122 bp, Homo sapiens
acctcgtcatccgcctgcctcagcctcccaaagtgctggggttacaggtgtaagccactgcgcccggctttctgtccaacctccctgtacagctttgatcttgttctggatctaggataggt

SEQ ID NO: 63229 - DNA, 122 bp, Homo sapiens
tgacctcttggcaggctcagtcctgcagctgccccaagcagccagactgtccctggggctcgtccaggcccgggcgctggctgggaggggaggtgtctggcaggtcttggcatggaggagaa

SEQ ID NO: 63230 - DNA, 122 bp, Homo sapiens
ttgactccattgacagtcatagaacacttcacccaacaacaggacacatattattccctacgcatatggaacaatgatcatataaaccataatttgggccataaaacaagtatcaattaccc

SEQ ID NO: 63231 - DNA, 122 bp, Homo sapiens
gtgaggaccctgggcagcaggagcccccattgccttctgggatctgggctgatgctgcaacgctggcccggtggccccaggtggccttacggcctcaaggacaagtgggtgccagagcccag

SEQ ID NO: 63232 - DNA, 122 bp, Homo sapiens
gtccacctggaggcattcggagacccagtgattgtgctccgcggagcctgggctgtgccccgcgttgactgcctcatagataccctacgaaccccaagtaagaaaaaacgacgaccctctct

SEQ ID NO: 63233 - DNA, 122 bp, Homo sapiens
ctgatctttgcccagtgggcgtttcctttctctggaaacctgtctttctgtctgctcccccggcaaaccaactaatttaatacatttacaatttacacaacttttttttttttttccagttt

SEQ ID NO: 63234 - DNA, 122 bp, Homo sapiens
atgttcacctcccgctcgatctcctcccggctcaccccacgccggctggatgacaggcggcgcttcttgatgaacttggctgcgtactccttgcccgtgcccttctgccggcacttccgcac

SEQ ID NO: 63235 - DNA, 122 bp, Homo sapiens
gggaggagcgcgggttccatcgcgccagatggcgctgtctggcttttctcgggcctcgggcgccagtctccagaggtctccggcgcagctgcctctctagccggccgacgcgggctctgtgt

SEQ ID NO: 63236 - DNA, 122 bp, Homo sapiens
tgcgacaagtgacagcgcgggaggcagaggaggcgcccaagggtggggctggtttgcaagcgcaaagtgttgcactggggtaggggaagttagccacagctggtgataactggactaagtgg

SEQ ID NO: 63237 - DNA, 122 bp, Homo sapiens
cacaggagatggaagaggtctgggtggaggtcctatcagtgaggttttctttctgagcagcgctcagagcacacagggaaacctgttctccttccccgtgcttctccacctggaaccacagc

SEQ ID NO: 63238 - DNA, 122 bp, Homo sapiens
ataatcagagggagaggatttggagctgacccgcgttgagctgagtgttgctgcactttgcggggctggttgactggtacggatgattcggtagatggcattcttcccttggagtcaggact

SEQ ID NO: 63239 - DNA, 122 bp, Homo sapiens
aaaccgcgcacctctactggatcaatcaaaacagcgcctccggacaaacgggaatgggggcggcgcagaggcccttcgggaggtttcaggcaccatctgtgaggggcgcacccagggaagct

SEQ ID NO: 63240 - DNA, 122 bp, Homo sapiens
tccaggttgtgaagggtcccccggatgtgttggatctagggttgtgggaatggggccatacggagtcccagatggggcaccagaacttcaagaagggcagggctgagtgccccagggtgtcc

SEQ ID NO: 63241 - DNA, 122 bp, Homo sapiens
ggcggcctccggcggctccggccttttgtgcgggcggttgggtcgggtgggggcggcggccgcggaaggccaggccggtgccctgcggggacgcccagcgcagcccagccccgcgcagccca

SEQ ID NO: 63242 - DNA, 122 bp, Homo sapiens
agcattcaccattcccaccagccgagtatgagggttccggttccacaccctcccaacacgcgctctggtcgactgtgtgagtttcacccattctaacaggtgtgcaggggtattccattgtg

SEQ ID NO: 63243 - DNA, 122 bp, Homo sapiens
acaataccaagagtgaaccctaatgtgaattatggactttgagtaataataatgtgtcaacgtaggttcatcaattataagatgtgtactctggtggggatgttgataatgggtgaggctat

SEQ ID NO: 63244 - DNA, 122 bp, Homo sapiens
gaatgatgtgcctacctctagtagtgaccggatgacaatttccccagacggcaagaccctcgtcatcctcagggtcagccgctatgacagaacaattcagtgcatgatagagagtttcccag

SEQ ID NO: 63245 - DNA, 122 bp, Homo sapiens
cagccagtgcctcgctggccctggggagcgggtgggatgggcggaggaggtgacgccgtccgtccatggtccccagcagcacagggagagttctggccatgggcagggccctcaccagaagc

SEQ ID NO: 63246 - DNA, 122 bp, Homo sapiens
agctgtaaatagagactgacagtttattttcacgtcccggctcgaggggggcggcggggacggggggaacccatttgaaataaatacttgtgagtctctgacagactccagacgggccgtcg

SEQ ID NO: 63247 - DNA, 122 bp, Homo sapiens
gtaaaattcaatcccgtcgttctagcgctgcctgccttcctggttctcctaggtgagggccgccatcctgcgataatttacttcgagagctgcgaagcgctggcaagggtgcagtctggtga

SEQ ID NO: 63248 - DNA, 122 bp, Homo sapiens
agtgacggactgactgattctgattacactggtgaggaaccgcaggatctagaagtgactcgccagggctcccccatcctgcagagctgatcagtactggctcctctaccccaggctgcctc

SEQ ID NO: 63249 - DNA, 122 bp, Homo sapiens
tggaatcacatccagggctgctttataaacacggattgatgacacattatgcccccaccccgggaagcggcacacagtgctacaaacagctggtggcttccagccggctgatggcccctccc

SEQ ID NO: 63250 - DNA, 122 bp, Homo sapiens
ggcctcaagaggccttacacactccgctctcaaaaccctgcccagcctccatgagaagtccggctagcttgcaggagcatgagagaccacacagaccacagttgaatcacagtagttgttca

SEQ ID NO: 63251 - DNA, 122 bp, Homo sapiens
acagaacccggcgcctattattggccaagaaacttgagcagcctgttttgaaaagtccctcgctcagaaatgccagcttgcagatggctaatcaaagagacgtggatccaggaggctcattt

SEQ ID NO: 63252 - DNA, 122 bp, Homo sapiens
gtgagcgacggatgggctggctaattggcgcccagataggagggccggggcctgtggcaccgcccccctaagctttgctgattggctgaggcggaagagggtggtccttatggggcgcggga

SEQ ID NO: 63253 - DNA, 122 bp, Homo sapiens
ctcctattcctctttaaaaggagcctctgtgaagtaggtcacccagtgctttttgctccacgtttctgttctctagctgttgtctgtgtcctagagaaagccgggcccacttgcccccacct

SEQ ID NO: 63254 - DNA, 122 bp, Homo sapiens
cgccggcgccctcctccgcgcgcccccgccgccctcggccatggccccggccgccgcccgcgcgcccgcccccacagtgcctcccagccgcacacgccgggccctgggcccgcgccgcggcc

SEQ ID NO: 63255 - DNA, 122 bp, Homo sapiens
ccggggaggtgcttcactttcaactggttctgatgtttgagagctcaaggctactggctccggggtcacagccggtggctgcgggggcggctgactgtgctgcggttggggccctcctcgac

SEQ ID NO: 63256 - DNA, 122 bp, Homo sapiens
gaccctgggtggcaccttctaagggtgattctgggattctatgaattaatgcatggaaagcgcttgcgagagcgctagccggagtccgcgctatttaggtgtttgccaatattattgttgtt

SEQ ID NO: 63257 - DNA, 122 bp, Homo sapiens
ctttataggattgggctgccggtcgggcgcgggaggcctgaagggctccaatcagctgggcgcgggcgcgtcgccgttccggaccccgcgagatggggacgccaccagttcccctcccctcg

SEQ ID NO: 63258 - DNA, 122 bp, Homo sapiens
agccgagcgcgggagaccggacccgagagcagagctgctgtttcggcgcgggtcggctggcggccgactgccccagagcccccacccggcaccacacagaccccacccccgccctgcgccag

SEQ ID NO: 63259 - DNA, 122 bp, Homo sapiens
tcacctcatgtgaagaccagatccccggcccttgaccttcgcgacagtccttcaccttcgcgacagtccttctgagccagacctgtacagcctggaaacgctgtccttctctgtgacatgtg

SEQ ID NO: 63260 - DNA, 122 bp, Homo sapiens
caattttgataatactgctctatcactgtacatattggtacttgtcttagttgggttctccgggatgcagatgctgatataaagttttcagtgcaagagattcactgcggagcaatgtctgt

SEQ ID NO: 63261 - DNA, 122 bp, Homo sapiens
ccatccaggccagcaaaggctgctgcagctcccgtgggcccttgggccacagaccacagccgtggtgtgatccggcccacgggagcatctgcagatccaggaaaggagcagcccacgcccag

SEQ ID NO: 63262 - DNA, 122 bp, Homo sapiens
tgttttctgtttccaaccatgttttcttatttcctacgagtttatgtgcttggaagcgagcgtggtcgtggaaaacccgtaaccgctaaattcatctgggtccccaaagactgagccggctg

SEQ ID NO: 63263 - DNA, 122 bp, Homo sapiens
tggataggtctccgccaagccgtggctcctgtcgtcctgacatagacgccgccattttaacgctgacctccaggggctggtggctggacctgcgcggccatcactgcccagacccagcagaa

SEQ ID NO: 63264 - DNA, 122 bp, Homo sapiens
tacgggggccgtgagaggccaaacaacctccgcgaggctacccccgcagcgaccgctcggcgggcgctccattcctttaccggactgtacacctcgcctcctggggcctgaggcgggaaccc

SEQ ID NO: 63265 - DNA, 122 bp, Homo sapiens
ggacagagctccacctgtttccagggaagtgcatggggggctcccggaagccaaaggcagcgcccagaggcagtgtgaagaggccttcctcagacctcagggtttcggcagggatagtgggt

SEQ ID NO: 63266 - DNA, 122 bp, Homo sapiens
ggccaggcggtcgtgggccgagctggccatgaccacctccccgcgggcgtcctgcttgggcgagtgctctccgtagcgcccgcactccgtcttctccgtgtgcagctccgcgccgccgccgc

SEQ ID NO: 63267 - DNA, 122 bp, Homo sapiens
aaacaagctgtgcaggcatggtcccttaaggcacagtgggagctgagctggaaggggccacgtggatgggcaaagcttgtcaaagatgccccctccaggagagagccaggatgcccagatga

SEQ ID NO: 63268 - DNA, 122 bp, Homo sapiens
ttcacaggctccaccccaacccttccagcctctcccactccccagctccagagaggctttcggggtctgttacagctgcaccccactcttggtaccaatgctctgtctctttgcgtccagct

SEQ ID NO: 63269 - DNA, 122 bp, Homo sapiens
aggctctgccaggactcccaaacaggcagggcagaaatgtgcctgctgcagcccccctagcgacctggggggtggggggcgaggtggggtcgcgaagaggaaacagacctgacagtcacatt

SEQ ID NO: 63270 - DNA, 122 bp, Homo sapiens
atgatcgcagcttcagccttggtcttctcctggcgttctccctgcgtggtgcgtgggtcccgatttttaccctccataaggacatggttttatgggattgggccacctactccactgtgacc

SEQ ID NO: 63271 - DNA, 122 bp, Homo sapiens
tggtgcgtggttattttagacttctcatcatactccatttgcatatgacaaatatatacacgtagacaccattttagcagcttttgcagcatgcatgatggtggctgaaacttggccttcta

SEQ ID NO: 63272 - DNA, 122 bp, Homo sapiens
ccgtgagacagggccgtggaagctggggtgagcctggagatgcccccgggagcaccaaggcgtcagagcagctgaccagggccccaggcctcgccgcttccccaggcagagccggccccaag

SEQ ID NO: 63273 - DNA, 122 bp, Homo sapiens
cgaccatccacgaggctctgtggctctgataataaacttgtttttccttctgtttttacccgaggcttgctctggtacctggcagacgaactagctcagccttgccacacttcccaccagct

SEQ ID NO: 63274 - DNA, 122 bp, Homo sapiens
ctcacgtcacataaaccgggtcgcaaggctcagctcagcggggcccccccaacagtgttgcgggaccagcaccttctcgggctccggaacagcttctacccgagcagagcccgcccgtcggc

SEQ ID NO: 63275 - DNA, 122 bp, Homo sapiens
cactcggagcttctgaggcggcggcggcgggagccggtcagagggggcggcccctggcggcgacgcccccaagcccagccctgcccggccccgctccatccccagccagagcctggtctgac

SEQ ID NO: 63276 - DNA, 122 bp, Homo sapiens
tttgagcgacgttgtgtgtgaaacacgttggtgtttcaccgacgtcctcccctcaacacccgctagatgtccagccgcttgtcttcttccgcggatgtattcctctcgctgtccagcagctt

SEQ ID NO: 63277 - DNA, 122 bp, Homo sapiens
caaactcccgacctcaggtgatccacccaccttggcctcccaaagtgctgggattacaggcgtgagccacggcgccaggcacagattttattttaaagatgcgtgaattcaaatgaggtata

SEQ ID NO: 63278 - DNA, 122 bp, Homo sapiens
tgcattgggccttgggtgcctgtcacaattctgaattctccggaatgtgttcttctccctcgcctgtcaccttctagatgttcccaaacacatcacaaccctgtctatcaaaaacctccatt

SEQ ID NO: 63279 - DNA, 122 bp, Homo sapiens
ttctttctcctccactgcaaagttaaatgcgagaaggtagaaacccagaggccatgctggcgctgagagatgagccccactcaccagattcaagatcccaaggtaggcacagacacagggca

SEQ ID NO: 63280 - DNA, 122 bp, Homo sapiens
gggtagtttctctctttgggctgacaggctttgtcacccacacacatccagaggtgcccacgagtgtattcggggagaagcttcgagaacaagttgaagagcgactgtccttctatgagact

SEQ ID NO: 63281 - DNA, 122 bp, Homo sapiens
aggggcctgaggacatcatagtctcgaagctaactgttcctgatgaaaagatattcattgcgtgtctcccacatgcaggcagtgttgtaagcacggggacagagacgtacgtgagcagatgg

SEQ ID NO: 63282 - DNA, 122 bp, Homo sapiens
cttattcctcgtctggtgtctctggaagaaatgtgtatttctgtgagatatatttcctcccgtctccagaaatcttcatggaagagaagttcattgctaccatctgtacttggtttagaaga

SEQ ID NO: 63283 - DNA, 122 bp, Homo sapiens
tgggaaatggagttctcagtggtgctgagtccctggacggctggctggtcttggagagtgcggagttcgggcagcgaagctcctgggtcttggaggggaggtggtctgttgccctagtgggg

SEQ ID NO: 63284 - DNA, 122 bp, Homo sapiens
ctctgctccccagaggctcttttgtaagcttaacagaggctcagcaagctgccctcaccccgaagggctgtgggaggaggctgccctagtatcttgaagaaaaaagaaattgcctatcctta

SEQ ID NO: 63285 - DNA, 122 bp, Homo sapiens
gtcatggctcactttgacctccctggtctcaggtgatcctcccacctcagcttcttgagtcgctgggattacaggcacgcactactatgcctggctaattttcgtattttttgtagagatgg

SEQ ID NO: 63286 - DNA, 122 bp, Homo sapiens
ggggcgcggcggggacgtccacgaagggactcaaagagccagggaggtggcgggccgaggcggaggccaggaagggaagaggaaagaaaaattagcaggtgctggggaaggcaacctgtggt

SEQ ID NO: 63287 - DNA, 122 bp, Homo sapiens
ctgagtgaggagggtgtggagccaggaggtggggaccaggctcagccaggctaatcaggtcgcagggtgaaatttaaagggaggaggaggcaccagtccatcagaactcacacttcttcctg

SEQ ID NO: 63288 - DNA, 122 bp, Homo sapiens
caatcagatcccctccagcccgaccccagcagtcccactggccctcttcttgaggagccccgacatggcctggctccgaggccccaccccctaagctctgctcggttcccccctcccccgcc

SEQ ID NO: 63289 - DNA, 122 bp, Homo sapiens
aacagagttgtaatatacagcatttagaattcataatccttagcattatttctctgaactcgacatcctaaatagccagcgtttactaattccagagctgagtgtagttttgtaggaagttc

SEQ ID NO: 63290 - DNA, 122 bp, Homo sapiens
aagcccctgtgtgtttgggcctgagtagggcattcgcttcctaggaggaacccaggggtgcgcgccaagcatgggggtagggggaccgccgagtgcgcctgtggcttcgggagaggccaaag

SEQ ID NO: 63291 - DNA, 122 bp, Homo sapiens
tcccactgctgcgtttctgcacgctgacttgaagtgcagtaccgtgagattacgtgcggacggagctcgagacccgggggaccagggtttcccttcgcctatggccgatcagtcttgtctgt

SEQ ID NO: 63292 - DNA, 122 bp, Homo sapiens
ctcgtctctcccagcacaggagagcgccgtgggtttgctgaccgcgtccctgctgaaaggcgactccgggagcacaggcttctgccctctcctgatgtccctagcagcgccgggcacgcagc

SEQ ID NO: 63293 - DNA, 122 bp, Homo sapiens
tgaactcctgggctcaagtgttcctcttgcctcagccttccaatgtgttgggattacaggcgtgagccactgtgcctggcctacatgtggtaaaattttaaaatgtaaatgtataatcgcaa

SEQ ID NO: 63294 - DNA, 122 bp, Homo sapiens
atgtgaaaaggaaaataatgctaaattatccctcattttaatatttcaacctaaaagcatcgtcgaagccctccacttacaatcaagcaatcatgcattctttatttctttgggggatgtat

SEQ ID NO: 63295 - DNA, 122 bp, Homo sapiens
cttgagcttgaggaagtggtgcagctgctccaggtgcaagatctgccgctgcaggacctgcgcctccatctcgctctgggcctcctctttctccgcgcgctcccgcagcaagcccatcttgg

SEQ ID NO: 63296 - DNA, 122 bp, Homo sapiens
agaggcctctgctgtttctgttccctcttccattggtggaactgggaaactgtaaggagacgtgccctgccagatctcagatgactgcagcgctgcagagggagcaggcagtcactagggta

SEQ ID NO: 63297 - DNA, 122 bp, Homo sapiens
cctttccaagtgttcttcctttcagagataaaagcgccgaccctaaggacatctgttcaacgaatgtttttccctaatgacccccggaaagttggaaagccggggtagaaaagatttcttct

SEQ ID NO: 63298 - DNA, 122 bp, Homo sapiens
gccccagccggcccgcgagcgtgacgggaagctgctggaggtgatcgagcgcaagcgctgcgtgtgcaaggagatcaaggcgcgccaccgcccggaccgaggcctctgcaagcaggagagca

SEQ ID NO: 63299 - DNA, 122 bp, Homo sapiens
atgagatccaagtctaaacgcaagagctagattgagccgccattgaagactccttcccctcgggcattggcagtgggggagaaaaggcttcaaaggaacttggtggcatcagcacccccctc

SEQ ID NO: 63300 - DNA, 122 bp, Homo sapiens
cctgagtcactgggccacttggactggggacaggagatcatgggtttaagttccaggccccgtgtacacaggggagcacataaaggtaaatatgaggccgggcatgatgtctcacaccttta

SEQ ID NO: 63301 - DNA, 122 bp, Homo sapiens
gtctgaggggacgcagcctgcactacgcgccccaagaggctgtgcgtggcgagcaggtcacgtgacgggagcgcgggctttggaaggcggctgaacgtcaggccacccgccgctaagctgag

SEQ ID NO: 63302 - DNA, 122 bp, Homo sapiens
tctgagtttttcccccaccatttatgttcatacattttgcttagttaaacccagcttgctcgtcactggctacatggaaaggtgctggatatggatgattgcttttagtatcaaaatctgtc

SEQ ID NO: 63303 - DNA, 122 bp, Homo sapiens
cgagctctggacccgggtcctgcccagtggagaccgcggagttggtgccccgcttgcggccgatgctcccgggcctccgagtccacagcgtccggacaaaacggcctttggaagacctggga

SEQ ID NO: 63304 - DNA, 122 bp, Homo sapiens
gctgcccttgatatataatgttagcatatttacttgtgtctatttctagactttgtattccgttgtttgctcatttgcctgtgtgtttattcttgtgtcattactatgtcgttcttaaaagt

SEQ ID NO: 63305 - DNA, 122 bp, Homo sapiens
aaccctgctcgcccgcgccgaggcgggccacgtgacagcccggggccccgcgccccgccgcgccgccttacttggtgtactcgcgcagccccttggcgaaccacacgacgctgcggtacagg

SEQ ID NO: 63306 - DNA, 122 bp, Homo sapiens
ccccacatttactcagagcccttggcctccaacttttgctggtgggcgtaagccgtagaccggtgttttgatgtgcagatctctggtcttcgcgagatgggccttctccgtacacttggcct

SEQ ID NO: 63307 - DNA, 122 bp, Homo sapiens
ccagggccgtctctagaggcgggatgaggaggctggagctgcggaggtgttcctccacctcggccgcgctcaggaacgctggtacccggctcatctcgccacctgtgccttctaacctcagt

SEQ ID NO: 63308 - DNA, 122 bp, Homo sapiens
gtacaagctagctggcattagagtccagatgttactattaagcgttcttttaaatgaacacggaggaatgcttccattcagacagccccagtaagtacacccttgcttccagcttcttcttc

SEQ ID NO: 63309 - DNA, 122 bp, Homo sapiens
gccctgactccagccggcagcctggctccgcacctgcatcgaatctgcaggggtcctggacgcccccccacccacccaggtccagcctgccaggaaatccaggcagaacctgccgtgggggg

SEQ ID NO: 63310 - DNA, 122 bp, Homo sapiens
acctcaggtgatccacacgcctctgcctcctaaagtgctgggattacaggcgtgagccaccgcgcacggctaaagcttcagttcttaaccatcaggcgacagtgcgtagtctggtagcaact

SEQ ID NO: 63311 - DNA, 122 bp, Homo sapiens
ttcaactcacctgccaacctggcccgccaccggctcacacacacaggagagcggccctaccggtgtggggactgtggcaaggctttcacgcaaagctccacactgaggcagcaccgcttggt

SEQ ID NO: 63312 - DNA, 122 bp, Homo sapiens
caatgacagaagccacaatggctgggagatgacatgggcaacctctctgggagatacctgcgcagagaattgacggataagaagtactggccggatgaagagaggtaaggtaaaacaggaaa

SEQ ID NO: 63313 - DNA, 122 bp, Homo sapiens
aaacagatgtttctggggccaaaatttccaggggcttcccaggttttagactgtcacagccgggggcgtagcctttgacaagcagagtggcaaggaggagtcaagctgtggccagggatgga

SEQ ID NO: 63314 - DNA, 122 bp, Homo sapiens
tgtcccagaacagctcactaaaacatgctagagacacacagggcctttgcctcacatcttcgcctggcgtcttcggccaaccagaacctggcccgtgagactcgtgatctccttggcttcac

SEQ ID NO: 63315 - DNA, 122 bp, Homo sapiens
ggcccgccctgagccctgggaagctgcggttaatctttaagccagccttgcaaacaagtgcggccatttcaccagcccaggctggcttctgctgttgactggctgtggcacctcaagcagcc

SEQ ID NO: 63316 - DNA, 122 bp, Homo sapiens
caccccaactgtggactctcatgaccctccctgtaacccttagacatcaacgagtgcctgcgcttcggcacctgctcccagctctgcaacaacaccaagggcggccacctctgcagctgcgc

SEQ ID NO: 63317 - DNA, 122 bp, Homo sapiens
ccccagaaagagattctaatttggttgttctccatttctctttatatcatttataaagcacgcaaaacaatttctggcctctgatttttgaaaaccataaaatcatttcaccacttaagccc

SEQ ID NO: 63318 - DNA, 122 bp, Homo sapiens
aatggaattttgtagaccctcatattgaacacccccatgggattgtgatttgaatattttcggaagtaacctatcctattctgagttctgttctccatcaacactagcagtaagattcctac

SEQ ID NO: 63319 - DNA, 122 bp, Homo sapiens
aagtttctcaagccagtgtctctagggcctgagggctccaatccccagtgtgaggtgaggcgctcgggcctgggagctgatgcccagcatacagtcgggggtgcccctgccaggtgtggtgc

SEQ ID NO: 63320 - DNA, 122 bp, Homo sapiens
cttatttccaagaacgaggtgatgagaccggggctcccagaggccagcgataactgcagccgttgctctcgtaggtgaagatcccggatctgttttgtggcctagagattgtccccgcgttg

SEQ ID NO: 63321 - DNA, 122 bp, Homo sapiens
tgggaggtcacaacacatagagaccagcttttctatcactgcatattaaactcttgattgcgttccccagcagcagcctaagtgatgctaatagagttcccagtttataattaagtaggcaa

SEQ ID NO: 63322 - DNA, 122 bp, Homo sapiens
cgccacgcgcgccttcggtcctaacggcagtgccggccgaaacccggccctgctcggacccggaaggatccgaatccgcccccctgacagggtcctctcggccgaggtcaccccagctgggc

SEQ ID NO: 63323 - DNA, 122 bp, Homo sapiens
tggcagataagggtgtccccaaggccaactggtaatgacaaaccgaaggaagttgactctcgtctggctcctccggggtgggggcagggcgcgtgcgtgaggccacgtcgttcctagagcca

SEQ ID NO: 63324 - DNA, 122 bp, Homo sapiens
cttctcaaagctcaccagcttccaaaacctgaatcagatgaagaaagtcgctgctgatcccgctgcttttgcccctcttattctgaactgatgaccccccacttctcaccttaggtggaaaa

SEQ ID NO: 63325 - DNA, 122 bp, Homo sapiens
ctagaaaactctcacttcggtaataacaatttaaaacatgctattgtcttcattgacaaacgcttgcctctagttttgcaactaaggaaaatattgtagaaacaaacagaagtttaaatgtc

SEQ ID NO: 63326 - DNA, 122 bp, Homo sapiens
ccaggtgccggggcttcactcctctgcctccctcccgacttggtaccaccagaggatgtgcgggcctggagaacagccctagtgccccgcccacctgaggaactggctgaaggccttgtagt

SEQ ID NO: 63327 - DNA, 122 bp, Homo sapiens
gtgtatgttaggggaacaggagcccggcagggccgtcttgcagggctcagcagtgggggccgtggggttggtgcaccagggcaggagagctgcccggctcctgctaggtgtctagagggcct

SEQ ID NO: 63328 - DNA, 122 bp, Homo sapiens
gttgtacttgagactgtacgtggccttggggcgagagctgggattgagaggccggttggccgggatgaagttcaatgaatgcacagacagagaaagactcctgtgtttcaacaagctgttgg

SEQ ID NO: 63329 - DNA, 122 bp, Homo sapiens
aaccccgcccgggagccagggtttgcaaggggctaaaccggctggggagcctccctctcgcgggtccagcctcggcggcccgggacgccggtaggcggggcctgagcctcgccccgcccccg

SEQ ID NO: 63330 - DNA, 122 bp, Homo sapiens
acagtaataccaacgaccgttgactgtggctgtgccgggtactgcgctgagcgtttcgcgcgcattgtcatctcgcgctttccacagtctgataggcgaggtgttatttattacacctatcc

SEQ ID NO: 63331 - DNA, 122 bp, Homo sapiens
gtctgccattgattttctttaggacaaacctctctgcaaatgccacagatttacattagccgcactatagagacccagtcagggccaggcgcagagacgtggggaatgccacgtgctgattt

SEQ ID NO: 63332 - DNA, 122 bp, Homo sapiens
cacagcagcgacgacgcaggcggcggccccagcgactcgcaactgcctccctgaccacagcggccaccgcccaacacccccgagaagccatcgccaccaccggcaggagaacctagggtcca

SEQ ID NO: 63333 - DNA, 122 bp, Homo sapiens
gacgggtagatcacctgaggtcaggagttcgagaccagcctggccaacatagtgaaaccccgtctctactaaaagtacaaaaaaatgagccaggcgtggtgatgcatgcctgtagtctcagc

SEQ ID NO: 63334 - DNA, 122 bp, Homo sapiens
acaagagtccctcgggtagaccgcctgactctcggatcaactgaggttccacccagagcacgcccgccttcagtgagccgcaacccctatccctacggtctttatctgcaattctctacgaa

SEQ ID NO: 63335 - DNA, 122 bp, Homo sapiens
atgacgtgttctgccagcgccacgtcatgaggaagtgccggcccactgaagccgtggggacgcgcccagcggagctaatcaggtgccactgaactgaaggggtgaactagaggagaagaggg

SEQ ID NO: 63336 - DNA, 122 bp, Homo sapiens
ggccttgctgactgattgcctgcctgtggccccagttctgtaagcatcaggagctagagacgctgaaggacctttacaatcaggatgacaatcaccaggaattgggcagcttccacatccga

SEQ ID NO: 63337 - DNA, 122 bp, Homo sapiens
ccctgctggccgtctgccgcgccctccatcccggcccaccccagccctgctcccctcccacgctccgccggagcctcccctccagagcggaccatcacacacacctgtcgcttccacctagt

SEQ ID NO: 63338 - DNA, 122 bp, Homo sapiens
gactcatggtggagttttccaggctcgaggggactgttgacatttactctgctcctcccacgccacagagtctaactttttctatcttcccccaaacataactcattacctccagtttatcc

SEQ ID NO: 63339 - DNA, 122 bp, Homo sapiens
cacagattgccaaatatctagtagctactgcctttgaaaaaataaaacctatcagtggaccggtgcagtggctcacgcctttaatcccagcactttgggaggccgaggcaggcatatcacaa

SEQ ID NO: 63340 - DNA, 122 bp, Homo sapiens
agacaaagaactgtctttggttgagagggtgtttctgtccacttgctgtgccatgcaggacgtgagacgggatagggagatttcatgtgtgtcataggctgatgtggttctgccattgtaag

SEQ ID NO: 63341 - DNA, 122 bp, Homo sapiens
tacagcatctgattttagctgataaagccttcaattccattctgcttcatgcttgaaattcgaagcattctgaaaggaatgcagatgatttacttctaacttgctgtgttagctggagtaaa

SEQ ID NO: 63342 - DNA, 122 bp, Homo sapiens
gtaggccactgcgcacacccccggctcgcaggggacgctccgggtttgtgcggcggctctcggggcctgtggcaccagcttttgagtatttttggcggtgtcaagtcttcggcagcgagagg

SEQ ID NO: 63343 - DNA, 122 bp, Homo sapiens
ttaatgtctctcttctggtggacacggctgctgctttttgttcccctgatcatcaacaaacgtggttccaggcgaatggcagcaacagcctctggtggtaacagccctcagcctgtcaccta

SEQ ID NO: 63344 - DNA, 122 bp, Homo sapiens
gcactgggggtacccaccacttacgtctgcttcctgatttaacgcgtaggggctgtaaggcgcactgaagttctgtgagccatagcttggaccacaacttgagtgggagtaggacaccccca

SEQ ID NO: 63345 - DNA, 122 bp, Homo sapiens
gggctgagtaggaactgcagccgccacatcctctctttacccggggatgtgcaggattaccgtgaaatcatgactcgtcatcctgcgaattaccaatgggaaaattggagtctagaaattat

SEQ ID NO: 63346 - DNA, 122 bp, Homo sapiens
ccggggagtgacgggggcagtcgagatacggaaacgctggccctccaagacaggccagagcggccctatctggcctgcgtggcgcagtacagcgctagagcggccggcgggaggagtagagt

SEQ ID NO: 63347 - DNA, 122 bp, Homo sapiens
ctgtccctttcttccgcacaccccaacccacaggacacaccgtatggggggcacaggtagcgttagactggaacatgccaggtgggcaagtgcattctcggtcagtcaaggcagcacaaggt

SEQ ID NO: 63348 - DNA, 122 bp, Homo sapiens
gacaacatgtcaaaccttaaatatggctactaatcagaagtttaattaaaaaacttcagccgtacgatgaaggaagttatattcaccagggttgagaataaatggtaatgttttcaaagtct

SEQ ID NO: 63349 - DNA, 122 bp, Homo sapiens
cgagcggacggtcactatgtctctgcgcaggcgcccgcttccccgctctggactctactgcgcaagcgccttcattcattgcctaacctaagtggctaggtgtcggcaggctttgtgacagg

SEQ ID NO: 63350 - DNA, 122 bp, Homo sapiens
acacgatgagcccgcagcacggtcagcctgagacggttacaacatggtgagcctgtggcacggtgagcccaagacagggttacgacatagtgagcccacagcatggtcagcccgagacagtt

SEQ ID NO: 63351 - DNA, 122 bp, Homo sapiens
gtgtgggtccgtgggtgataattgagagcgtcagacccaggactgttcagggaggagccccggtcagactcccacgtgtgaagaccgggccccaagtggcaagggctggcctggggcgggca

SEQ ID NO: 63352 - DNA, 122 bp, Homo sapiens
gcccagggcgcggtgtcgctccttcggatcccaacctggacccccggttggaggtatccccgctgtgaagtggggcaatcagaggcacattgtgaattatcccggtcttaggcactttactt

SEQ ID NO: 63353 - DNA, 122 bp, Homo sapiens
ccccgccttgggccccaggcgccggcgcgggagaagccctgggtaagcccccgcccagcccgctgcttcttggaccgcagaatgaggcgatccgcgacgcccctccagctatacccatgccg

SEQ ID NO: 63354 - DNA, 122 bp, Homo sapiens
tgcaggcccatcctggggaggacaacagaccaccctcactagagagccccaggacagcaccgggacagaggggacagaggagacagaggggatggaggggacagaggggaccgccaggccaa

SEQ ID NO: 63355 - DNA, 122 bp, Homo sapiens
catgatcctcaagaacaagtaccgccccgacctgcgcatggcagccatccgcagggtcagcgccatcctgtgcagccagaagcctgtgatggtgaagcggaagcggacccgcgccaccaaga

SEQ ID NO: 63356 - DNA, 122 bp, Homo sapiens
tgtgacgaagactcagtgggcgagggtcagactccagcgggggcaccaagactcaggcaccgtggtgacagcagcaccaagggacaagcacaggagaaagacgcctcccctacaaagcctga

SEQ ID NO: 63357 - DNA, 122 bp, Homo sapiens
tgcagagggtgcggtccgggggtcagtgctcacctgggagggggcagtcgggggccagtgcgcacctggggagggggcagtctgggggtcagtgcgcacctgcggaggtgtgggggccgccg

SEQ ID NO: 63358 - DNA, 122 bp, Homo sapiens
caaagggcgggagtggggcccggctaccccctcccagcctccctcctgcaactgcttcctcgggcttggccggttccaggaattcaactatgaatagccaggcagggcccgcacctgcctgc

SEQ ID NO: 63359 - DNA, 122 bp, Homo sapiens
ctggcctccggactgtcacatgatcgaatctccgccactcccggagaagaggcggtgagtcggcgcctctacgggccgcaacgtaggacaaaccactccaggacgcatttgcactggaggaa

SEQ ID NO: 63360 - DNA, 122 bp, Homo sapiens
gtcaaaagtcagctaatgttagcagcatttggcataggaattactctcccagaccagagtcgggtactgtttcagatgccccacaattgaaggaaaatccaagtactgtgggagtggaacga

SEQ ID NO: 63361 - DNA, 122 bp, Homo sapiens
acagagaaagcccgtgtgtgtggtggagctctagacagcccgatggcagggggtgggctccgagctccagggcccattcttgggagagagcggatcctgtgtgattttacggaacttgtcct

SEQ ID NO: 63362 - DNA, 122 bp, Homo sapiens
aggccacagggtcagtcttcgcagctgaagacagcgccgcaataagcagagacctcgggacgatgaatgacgttgctgacaaagaaaatgatttttttaattgctttaacaaaggagactgc

SEQ ID NO: 63363 - DNA, 122 bp, Homo sapiens
ggaggccctgcggaccggctctggggtgcgttttcccgagttcgtccagtacctgctggacgtgcaccggcccgtggggatggacattcactgggaccatgtcagccggctctgcagcccct

SEQ ID NO: 63364 - DNA, 122 bp, Homo sapiens
taggcatgcctaggccctttaaggtggaacaggcccaggtttgagttccacgatcacgagcgtgcaaaaatctctgttattttcctcttgttgaggaaaacagcaatatttgccaatcacaa

SEQ ID NO: 63365 - DNA, 122 bp, Homo sapiens
ccaggagtttgagacaagcctgggcaacacagcaaagccttaaaaaaaatcacctaggctcggtggcctatgcctttactcctaacactctgggaggctgaggtgggaagatcacttgagct

SEQ ID NO: 63366 - DNA, 122 bp, Homo sapiens
ctgtgtcctggggttgggccgtggatgccacgttcccatgtctgtgtcctggggcggggccgtggatgccacgttcccacgtctgtgtcctggggcggggccgtggatgccacgttcccacg

SEQ ID NO: 63367 - DNA, 122 bp, Homo sapiens
aacttctgagatgcttcttcctcaatactgtagctgccgtgcatggggaaacacaggtaacgaactttggtatcttgtagtgggaagagttctggtggtacagtcagaacagctgggctcaa

SEQ ID NO: 63368 - DNA, 122 bp, Homo sapiens
cgcccaggggactggagggacgcactgagcatgtgcagatcagctcggtggtggctgccgcggccggaggcgagggcccggtgctgatgcgaaccgccggctcggcctcagcccgcgcgtgg

SEQ ID NO: 63369 - DNA, 122 bp, Homo sapiens
ggcagcagaggcccgtggaatggtctctggggtctgtgtgctgtgtgagtgctagaggtgcgtgggaaggaacgatggtggtcagctgctggcgagtgagtgtgactctccagtgtgactca

SEQ ID NO: 63370 - DNA, 122 bp, Homo sapiens
cgaatcctcccagcagctcaccgagcggctcagaccaggggtctgggagatagccccgtacgcactggatcattcacctgcatcccgtccaaagccagtccagtcgggtccaccctcagggt

SEQ ID NO: 63371 - DNA, 122 bp, Homo sapiens
ttaaatggctgaaggatgcctgttagtgatttgatttggttctaaaatggaggcctgacacggtgtggccgacacctggtatcccatcattttggtaggctgaggcaggcagatcacctgat

SEQ ID NO: 63372 - DNA, 122 bp, Homo sapiens
gtaagaaaagcagcgcgagcttggcggttcctctggccactttctcacagtgtctttgggcgtcttcttgactgaatctgactccattggaggctgtggtaaccgtgaactagctgcacgaa

SEQ ID NO: 63373 - DNA, 122 bp, Homo sapiens
ataatgttataattttggtttttaagcttagccatctggaactcatctctaggaaacaagcgatgcgagactaatccctgggagaagggaaactcctgcagtgatggccagctcaccagctc

SEQ ID NO: 63374 - DNA, 122 bp, Homo sapiens
agcaacagttacacaaacgtcccctcatacactgaaactgcagggaggggaacagtgcggcgcacccgagagggcttgagtgtgatgcgactgaagcactaaagagcagaattgatggaaaa

SEQ ID NO: 63375 - DNA, 122 bp, Homo sapiens
agtcacaggacgaagattccatttaacgccccgataaagcaaaaccactgagaaaacaaacgagaggctgcccaggcatgaaaacgcccaccctccgggagccccgggctagctgcacggca

SEQ ID NO: 63376 - DNA, 122 bp, Homo sapiens
tttcattaggggtgttcagacaaacataatggataaaaactgttcttgcagaaacagggccggtaggaccagaggctccccctcctgggtcagattatgcagtaaggagcttcacagaatac

SEQ ID NO: 63377 - DNA, 122 bp, Homo sapiens
caggcatgagccactgcgttcagcacccagaagaaatctttccaaagcacaactctgggccgggcatggtggctcacgcctgtaatcccagcactttgggaggccgaggccggtggatcatg

SEQ ID NO: 63378 - DNA, 122 bp, Homo sapiens
gaaggggttaacctgccctgcacttcctcctgtgtcctgttactgctgaggcagacctgccgggccagctgagcaactttcctcggagtgctgcctggcgctggctaggaggcaaacgcacg

SEQ ID NO: 63379 - DNA, 122 bp, Homo sapiens
cactccagcctgggcgacagagggatattccgtctcaaacaaacaaaaaatcactcgctgcgttttttattctgacatggtgcaggaaggtaaattcaagacaacttaggtactcagtttta

SEQ ID NO: 63380 - DNA, 122 bp, Homo sapiens
gagaggggactaaagcctaactttttaagtagactaatctttgtatcctcagctctattccgtcttttaccgacagctggtgcctgacctagaggcctactgcatcttttttgttaacagga

SEQ ID NO: 63381 - DNA, 122 bp, Homo sapiens
ggggagaaatggagaccagagcgcatatcgggtgagtgggtctcccactccctcctccaccgcctcaatttaaaactcaagagaaaaaccagcgccgtcccgtcgcccagcgcgaccaccgc

SEQ ID NO: 63382 - DNA, 122 bp, Homo sapiens
ggaaggagacccaggcctcacagggagcagacaggaggactagggggacactgctcaggccgcccacaggctccactgcccaccaagtgctctgaaaggcttgacaaataaaagcattgcta

SEQ ID NO: 63383 - DNA, 122 bp, Homo sapiens
gaagtccacggctgagccaggatgcaaggctcctggtcctgtttgcagccggccaagaggcgctgggaggggcaaaaccatacggatgcgctgctgtctgagaggaagggctgacacttgct

SEQ ID NO: 63384 - DNA, 122 bp, Homo sapiens
ggccgccgggctgctcacaggtgcacgggctgcacgtaactccgtgggaagaagccaacgcgcccgcaggaccggccccgccaccagtgggggtctgggcgctccaggacctcaatgatgtc

SEQ ID NO: 63385 - DNA, 122 bp, Homo sapiens
gccagctccggacatccgtccccacctttccgctaagcgcggcgcccgcggggcctgcctcggcggtcaggtcagcggcctccagcctcactctccggccccagcccgcagccgccgccgag

SEQ ID NO: 63386 - DNA, 122 bp, Homo sapiens
gcagcctccccacccccactccccaggggctgtgtcaggagacttcttctgttgtcatgacgaccccgcgagtgaggggaggtgtgtgctactggcatctagtgagtaggtccaaggatgct

SEQ ID NO: 63387 - DNA, 122 bp, Homo sapiens
cctgtggatggcccctgtcctgggtggtactgctgcaggacctgggtttccgggggtgtccgggagtcggatgggcctcactctcctggcctccactgggtccaggagtggcgatctgtgag

SEQ ID NO: 63388 - DNA, 122 bp, Homo sapiens
gcaggggcatttagctattcccatcctcatctagctccccactctggcttctcccgccagcggatgtgaccctggaccctgagacagctcatcctaacctagtcctgtcagaggatcgtaag

SEQ ID NO: 63389 - DNA, 122 bp, Homo sapiens
ctttcctgcagtcattcctaagcggtacttctctgcatctggcctttaacagtgagtggacggggccagtgttcttggagcacctactgtgtgcttgctctgttagttctttgtttccttcc

SEQ ID NO: 63390 - DNA, 122 bp, Homo sapiens
tccgcttgcggtcggtagtctctcctccccgcccatgggcggtggttggaggcaggggtgcggaatccggccgacctcgctgtcctcgccctctaccttgtggcgtcggtggggttggggag

SEQ ID NO: 63391 - DNA, 122 bp, Homo sapiens
cgtggggattctccgggtcccggtgccaagaaggcttcccaggcgcggggagagggttcacgtccccagcaaggctaggggtggcaggatgagaggccactgagcaagaggaaatcaatggg

SEQ ID NO: 63392 - DNA, 122 bp, Homo sapiens
ggaggctgcaggtacctggtggagggtgcgagttgaatagttcaggttctcaccaccccccgccccccctcaggagtccctgaggattcactgagacaatgagtagaaaatgtccaaggaag

SEQ ID NO: 63393 - DNA, 122 bp, Homo sapiens
tgggaccaaatcttgcctgatctctggtagtctgggcagatgttattccagtcctcattacgcaaatgaggcaactgaggcgcagcccaggatggtgacagccaggaagtggcagagtcgga

SEQ ID NO: 63394 - DNA, 122 bp, Homo sapiens
acatgtctgtcgtctacccgtcacacggttgtaccaggtagcctttgcttaataagccctcggagtactcgtcctttgagctcgtgggacttgcggggtggtcattaagcgttggtgtgaat

SEQ ID NO: 63395 - DNA, 122 bp, Homo sapiens
ctcgagttagtggggcggggacttggatatgggtatggaatttggccccagggctcgaatcggatgtatgcgactgatcgggttggggcaggttataggacgaggactggtttgcaaggatg

SEQ ID NO: 63396 - DNA, 122 bp, Homo sapiens
ccctctggcggcgttcacgtctgtgcgcgcgcttgagcgctagaagattgaggtggctaccgtaaatgcctgaaaaacagtcaccagctgggactctaccactgcctcgagaggggctatgg

SEQ ID NO: 63397 - DNA, 122 bp, Homo sapiens
gttttccagtcgaagttctcctctctgcctacatctcggattctgggtctcagatgcaatcgcgcacccaaattgcatcctgtgaacagaaaaagtctcaaacatgcgtacaaagaatattc

SEQ ID NO: 63398 - DNA, 122 bp, Homo sapiens
ccggctgctgaccctccgggacctgggtgaggggtgctagtgaccggctgctgaccctcccggacccaggtgagggacgctagtgactggctgctgaccctccctgaccggggtgaggggtg

SEQ ID NO: 63399 - DNA, 122 bp, Homo sapiens
gcccgactccgtccgcgtagcgcgcacgcccgcccgcacgcgtacgagtgtctacgggctcgtcgctggctgctcccaccaaccaccaccttcggccgccccgcgcgccagccagcccgtac

SEQ ID NO: 63400 - DNA, 122 bp, Homo sapiens
tcgcggtaggcccactggccctgcgtgtggaccgtgcggaagactgagtaggtgggggcccggggcccaggctggggctcagaggcgtgcctctggaaggagcgtccaaactgcagggcctt

SEQ ID NO: 63401 - DNA, 122 bp, Homo sapiens
cggggtcggggaggcgggccctgtgggacgccctgggcagaggactccctgcaggggctccggagcaggcccgggccccaggggcggtgtcacgggccagggcgccgtaggacaggaggtgc

SEQ ID NO: 63402 - DNA, 122 bp, Homo sapiens
taacgaaccacacatcaaaggatggaccaaagttcagatgtacacagtccagggcacctccgagcacagtggcagtgcccttggggattttctttccctcagtgagagacacgggggatggg

SEQ ID NO: 63403 - DNA, 122 bp, Homo sapiens
ccctctgtctctgcaggaatcacaagccattcctccaagacttgagtcagactgaggtgacgcctcccctgggtggcctgtctgaagacatccttgtcatcagggcaccatgatggagacat

SEQ ID NO: 63404 - DNA, 122 bp, Homo sapiens
tctgcaacatcctcttctccaacgagctgcaccgtcgcctctccccacgcggggtcacgtcgaacgcagtgcatcctggaaatatgatgtactccaacattcatcgcagctggtgggtgtac

SEQ ID NO: 63405 - DNA, 122 bp, Homo sapiens
gtgtcgcctgctgggtcttcacaccgagcccgtgccacgcagggtgtgtgtgtcgcctgccgggtcttccaccaagcccctccacccaggatgtgtgtgtcgcctgccgggtcttccaccga

SEQ ID NO: 63406 - DNA, 122 bp, Homo sapiens
tggtcttggtctttcctgagaaggccagtacctgaaaagtgagcattccaccttccaccccgccatcacatgggagtcttttttttttttttttaaatccccagtctgtttaccactttgtc

SEQ ID NO: 63407 - DNA, 122 bp, Homo sapiens
tgtgattcacccgcctcggcctcccaaagtgctgggattacaggcgtgatccacggcgcccggcccagtggagcaaggttcttaaccatgtgaatgaaccagtggaaaactttacgtattgc

SEQ ID NO: 63408 - DNA, 122 bp, Homo sapiens
atgtcccagcctcttggcgagagcccggccaccgccaccgccaccgccaccgccaccacccgccccagccccaccactcccgcaatgcccaagatgggcgtgcgcgcaagggtggccgactg

SEQ ID NO: 63409 - DNA, 122 bp, Homo sapiens
gcggcaccgtctcccccagtaacgcaggggccgcggcggcggcggctgcggtggcgagggcggcggcggggctgcttcagcctctgtggaaccagcaggaacccctacctgactccagagct

SEQ ID NO: 63410 - DNA, 122 bp, Homo sapiens
acttgctgccccgcccgtctcctgctgcccgggagactgcggagctgggactctcggcgccgctcttgccccttagtgaaatgaaagtcccatcaggctcggccccttcctccccgggcggc

SEQ ID NO: 63411 - DNA, 122 bp, Homo sapiens
atattttcccccttgtcttatctgatgctcaagagagaatagagtttgccttagcatctccgtagatttgttttttttagatgtatgacctgtcatcaataaacccagagacataaattagg

SEQ ID NO: 63412 - DNA, 122 bp, Homo sapiens
atgaaggagcaatcgggtttaggagtcagataggcttgggtttaaatcctaattcagtcacgtgaccttaggcaagttgtttaagtcctctaaacctcagtttccacctctgtaaaatgaag

SEQ ID NO: 63413 - DNA, 122 bp, Homo sapiens
gcacttgtacacggaactcttgtcctgagcggcccatcgtttgcagggctgcttctctcacggtgtcaccagttctcagcaaagccacgagtgtgtatgtttctcttctttatcaccttctc

SEQ ID NO: 63414 - DNA, 122 bp, Homo sapiens
acattgggcagtgcccacctcattgtgggccttgcagacatagactccagccatggaagacgaaaggttggtgaggcttaaagacccacggatgacatctgtggacacaatttagccatcag

SEQ ID NO: 63415 - DNA, 122 bp, Homo sapiens
ctcagccgtcctccggctgtccccgtatgtcaactaccagttccgtgtcattgccatcaacgaggttgggagcagccaccccagcctcccatccgagcgctaccgaaccagtggagcacgtg

SEQ ID NO: 63416 - DNA, 122 bp, Homo sapiens
gctagggctccctgtaggtcgggtcatactgtgcccaggggcaaagggcacctggaagatcgcggcggacctcggcgtccttgcgtgctgctctcccgccagccggcgcagcttgggtacgc

SEQ ID NO: 63417 - DNA, 122 bp, Homo sapiens
aacaaaagaattaggactctcttgtcctgttttaatctcaaagctgtccctgcgctggtgcggctggcccacttgtgcctttgtgaatttgcagagaagaggctgggcgtggggggacacat

SEQ ID NO: 63418 - DNA, 122 bp, Homo sapiens
gaagctgtgcaggtggggttgaaagccatgagctgagttgataaggaaaggcaatgagtgcggacagagaaaaaagtggctggaggactaagcccacgttcagagaacagaaagttctggag

SEQ ID NO: 63419 - DNA, 122 bp, Homo sapiens
gctggggagaggcgggggggggcggcccgtggggtccgctgggccctacccagccctgcccggagctgcccgaaacagcactcaggcctctgcgggccaggatgaaaggcacgtgggccgct

SEQ ID NO: 63420 - DNA, 122 bp, Homo sapiens
gcgttccaatccatgggcaaagcagctggtggtccccgctgaggggtgacggcgcgtccccgtgtttacggtccccgctgaggcgtgacagtgggtccccgtgcgtacggtccccgctgagg

SEQ ID NO: 63421 - DNA, 122 bp, Homo sapiens
cttcatcatattttcggacgaaatgggacagaagtgagaattaaagcggttctgaatagacgactggcctgaacccaatcccctgaaatggtaatatggttgttatttaaaaagtgtaggta

SEQ ID NO: 63422 - DNA, 122 bp, Homo sapiens
tctccctcggaggccgccagctgctgaccccggagcacgtgctgcggcaggtggacgtcacgtcctttgcaggtcacccctgcacccgggcctcaggccacccctgcctcaatggggcctcc

SEQ ID NO: 63423 - DNA, 122 bp, Homo sapiens
gccccggcgcggggtcgcgagggagggcggggagtcccgggcgacgggcagcggccgctgcgcccctgcacgagaccattcgagaagcagcggcgctgggtcaatcccccaggctagcccgg

SEQ ID NO: 63424 - DNA, 122 bp, Homo sapiens
taacccaaagccgggcgccggctcaatgaattctcttgcagaaactccagcggccagctacggctccctcgctcatggctggccggggactagccggctccagtcacgcccgcgcccagaca

SEQ ID NO: 63425 - DNA, 122 bp, Homo sapiens
agcgggccggcgggtgacatcacctcatttacataggagcgcccataaagctgcgcccgccgcaccccgcccgacaactcggtggtggccactgcgcagaccagacttcgctcgtactcgtg

SEQ ID NO: 63426 - DNA, 122 bp, Homo sapiens
tgaggggacaggcctcgggctcggaatcccggggttctgcagggctgcagggagctccctcgcagagacctgagcccccggcaagagtccaggcagcggtgccctgggtgaatgcagaggct

SEQ ID NO: 63427 - DNA, 122 bp, Homo sapiens
gcccaagaccaagacggtgcagacggcacttctccacccgctgcgggtgcctgaacgaaccgggcttcctcagtgacaacgatcttttcagaaacgccgagcccaggcccgtcggcagcaga

SEQ ID NO: 63428 - DNA, 122 bp, Homo sapiens
cccaccctgtgtaccctgggtccttctacattacctaagcaaggctctgagccaagggaacgccctcctctgacagaaaaataagactcctacaccaggccagttgcagtggctcacatctg

SEQ ID NO: 63429 - DNA, 122 bp, Homo sapiens
ctgaagtgagagcggttctggggaaggctttaaaaagcagatatggaccagggtagagttcgtacgctgtagcttttcaagaacaccgatctcattaattaaagaacagcaactatttaatt

SEQ ID NO: 63430 - DNA, 122 bp, Homo sapiens
gaagaaggaagactcccccccaccccaccaaaaaaaagccatcacacaactggctaatggcgtcatcgcattccacctggctgagatcaaagcagaaaaagaagggtgggaagtgggcttgg

SEQ ID NO: 63431 - DNA, 122 bp, Homo sapiens
tccaccactagagggcggaatagaacaaaccaagatgggtgcccctccagctctctatggcgtctgctcgccgagccccgcaaaagaggcggggattccatcatgtgaccggggtgctgggc

SEQ ID NO: 63432 - DNA, 122 bp, Homo sapiens
gcccctccctgccgtcagcacccacccgcgcggcagcggcggcggcggctggcgggcggccgcccttttaaatccccgggctcatttgcatggccccgccccctgagtgacacggctggcgc

SEQ ID NO: 63433 - DNA, 122 bp, Homo sapiens
ccccaaaccctgcaggtgaggccagctctcaggacatgactgcacaggtgaccagcccatcgggcaaggtggaagccgcagagatcgtcgagggcgaggacagcgcctacagcgtgcgcttt

SEQ ID NO: 63434 - DNA, 122 bp, Homo sapiens
tccccgactccaagagtgaaagctggggcagtgcccttgcggggatccctcggaacagcccgggcagggcgcaggcggaacgtggatgctagccccgagggactgcactccgccaggatttc

SEQ ID NO: 63435 - DNA, 122 bp, Homo sapiens
atccgtgggggaggagagagcctagaaccctaaaaactcctttggcctccagaaagaccccggtgcagctctctaccctaacccctaagcccctctcaagtgagagcctctcagttagtact

SEQ ID NO: 63436 - DNA, 122 bp, Homo sapiens
gcacatacgtggcctcccacgctgtggtctgcagagccgtgtagctgcacctttaccacacgcgtgtgagtttaacatgcacatatgtggcctcccatgctgtggtctgcagagccgtgtag

SEQ ID NO: 63437 - DNA, 122 bp, Homo sapiens
gtccctgggaccttgggacagggtctagaggcagaggattttcacgtgcagagaacataacgttccagaagaaggcaacaacgtggatacaatgatgcaagtttagaggttctgtgcatgaa

SEQ ID NO: 63438 - DNA, 122 bp, Homo sapiens
atcagacttaggtcacagaattcaatggtttctgactattttatttaaactggaaatcggcgggatggcaaggaatactacttgcttctatagtgtgtgatccacattagtgatttgtggaa

SEQ ID NO: 63439 - DNA, 122 bp, Homo sapiens
gccagagtggagagctctatctcgtagaaaaactcctagggacaaggccggccacccgttcgtgagccagctccccagcccctccctggcctccctccatgtcccgtcccctcctgggtacc

SEQ ID NO: 63440 - DNA, 122 bp, Homo sapiens
cgccctggcctagctgagcatctcaggaaagaaacagtaacttccctgcagaggctcacccggcctcatctgtgttaggaaaacagtagggaactatcaaaatatgacagaggaagatgttg

SEQ ID NO: 63441 - DNA, 122 bp, Homo sapiens
agccaggcccagacatctgggttgagggggctccagtcctgtacccactactgcaagtcacgtggcctggggcagggcttctcagagccctgtcccctcctgtgtagggcgggacgtcagag

SEQ ID NO: 63442 - DNA, 122 bp, Homo sapiens
ccccgagtggtgcggaaaggagaggagcaggcgagtaccctgtggacgcgcgtccagctgcgcaggggcccccacgcacccgtttcccgtgggtctgtttcccatgagccagtacctgtggg

SEQ ID NO: 63443 - DNA, 122 bp, Homo sapiens
gcgcactcacgatcgcgggcaggtccgccgagcgcagctcccccttgcggagctccagggcgtgtgcggcctcttctgggcatgcgcagaaccgctctatgtccagctgagggagtgcgctg

SEQ ID NO: 63444 - DNA, 122 bp, Homo sapiens
tttaatgaagttcagtgtgcgtagccacctggggctggtagcttctggactaggcagctccgctgtaggacctgcactggaaaaagttttcaaagccgggctgggtcctccctggctcatat

SEQ ID NO: 63445 - DNA, 122 bp, Homo sapiens
gttggatcttggccccttctctaaggcttttcttgcaggttccccctgcctatttatgggcggtataaaagttattgcggtttttgccattaaaaaaaaatcgcaaaaccgcaattcctttt

SEQ ID NO: 63446 - DNA, 122 bp, Homo sapiens
ccgtgatgcgcttgttctgctcctccaggtcggccacgttcctccgcagcagctccgtctcgtcttccaccagctgcaggtgctgccgcagctccgacagggattcgctctgctccctcatg

SEQ ID NO: 63447 - DNA, 122 bp, Homo sapiens
ccctgttccaccagctactgctgtctggctccccggaccttcggggtgagtcccctgagacgctggattcagcggccccagaactgcaacacaggatcatctggctgctgtgagaattcggg

SEQ ID NO: 63448 - DNA, 122 bp, Homo sapiens
ccggttgccaggtccccaaggacaccggctcggttgaggggagcgcggcatggggcggggcgggagctgcgggagccccgggctcaggcccagcctaggccgcacatccccgggctcgcgtg

SEQ ID NO: 63449 - DNA, 122 bp, Homo sapiens
tttagtccaaaacagtggcctcctataatttttgttgaacacccataaatgaaggcagcacgggaaagcatttgttatcctagtcactcttcctgcagagtaaagatgtgctctgcattcat

SEQ ID NO: 63450 - DNA, 122 bp, Homo sapiens
cggtcccccaatccacagccgcaagtttccccaacactgcgttacgctacgccacgcccccggaggttcctaaccctgcgtgaggctctttcacctgcctcaggttaagtaggcagaccccg

SEQ ID NO: 63451 - DNA, 122 bp, Homo sapiens
gcggccaatgtggctgagcaaaggagagcctacctggagggcacctgcatggagtggctccgcagacacctggagaacgggaaggagacgctgcagcgcgcgggtaccaggggccatgggga

SEQ ID NO: 63452 - DNA, 122 bp, Homo sapiens
catttattgagtatttaccgtgtagccagcactgttttacaggcactactcaatgtggtccgcacaatgaccccacgagagaattattaacactcattttaaggataaggaaggaaccagaa

SEQ ID NO: 63453 - DNA, 122 bp, Homo sapiens
aattcatttgctttccttaacgagagaaggttccagatgagggctgaaccctcttcgccccgcccacggcccctgaacgctgggggaggagtgcatggggaggggcggccctcaaacgggtc

SEQ ID NO: 63454 - DNA, 122 bp, Homo sapiens
tgtgtgcatcaatataaataagccggtggggcaactagattgcgtgcatccttccagttccgagtgaggctcctcaagtctaagcaagagaccaagttctttctcagccttgaacttgaaac

SEQ ID NO: 63455 - DNA, 122 bp, Homo sapiens
taatgatgccagaggactgtctttcacccataaaaactgaagccatgtgccagaagccctcgtggctcaagggctctgtccttggacacggatgagggcagctgggcggtgggaccgaggct

SEQ ID NO: 63456 - DNA, 122 bp, Homo sapiens
gggacctggagcagtgaggcggtcgagaatgggatgaagtgggaaaaggagtacgggattcgggcgccctggagatgcgttccggtgtactctaaccccacgctggtctagctctcagtttc

SEQ ID NO: 63457 - DNA, 122 bp, Homo sapiens
gccgggacccaagcccggatggaagaagaagcttcgttgtgagaggtgatgcctgcaacgcgaggctcgccctgcctgtcggggccggggctccatgcatgctcttcattgcagggaggagc

SEQ ID NO: 63458 - DNA, 122 bp, Homo sapiens
gttgtgtggaggggcagcccaaagcgactgattctcttttgtcttatcagtctgggtccccgacacgctaccttcggtttcaggctgcctaggaccggaaccagggatcgcaccgcagccca

SEQ ID NO: 63459 - DNA, 122 bp, Homo sapiens
ttaaaagccacgttccgaactgacaatcgctgatctcggctcgcgcagagactgcgggagcgtcggggccgacagagacggattacgtcaagaaatagttcctccacctacctcggtcggcc

SEQ ID NO: 63460 - DNA, 122 bp, Homo sapiens
gccaagccgaagtcaccgagcaggcacgggtagagatgggatgcccaggctcccggctgccgcccagccccaccctgcgccgaaggagactgagagccgagctgcgccggcggagactcaaa

SEQ ID NO: 63461 - DNA, 122 bp, Homo sapiens
gggttcacggcctctgacagccagacctcaacacggccagcacggtgtgcatggtgtgcacgcctcctgcgccggggccaccagagtgggctctcaccggaggagaaagacagtcggggaga

SEQ ID NO: 63462 - DNA, 122 bp, Homo sapiens
agtcagggagcagctcctggcctggccacagggcgttgggcaggtccccaggacagcgggcgggtgggggtaaagtgagcgtgcgggatctgacttcagaaaaggcagagttatctacccac

SEQ ID NO: 63463 - DNA, 122 bp, Homo sapiens
cagggggagtggactgcagagggggcaggtgaatcagtgctgagttcacggaaaagcaaacgaaaaaaccagacaggcgtttaattcgaggggagacaggctctgcaggaaaggacatggca

SEQ ID NO: 63464 - DNA, 122 bp, Homo sapiens
gaaacataatgagttcagtctgggacacattgagtgtgaaacatctgtgagtcaaccaggcgcaggtcttgagtaaaatgggactagaactcaaaagaaagacctgaactcaagttacaaat

SEQ ID NO: 63465 - DNA, 122 bp, Homo sapiens
tttgtctcagcccagaatcccaggtcctgggcctggttttctaatgctgtcatctcagttcgatattttactttagaacctggaatctcctacttaatatatgaccatgactttgaaaggca

SEQ ID NO: 63466 - DNA, 122 bp, Homo sapiens
tctgcctgcctcggcctcccaaagtgctgggattacaggcatgagccaccacacctggcccgactgaactttttattaatgataaatgtgttgtagaaaactgaactgttaggaacattgag

SEQ ID NO: 63467 - DNA, 122 bp, Homo sapiens
cagacattttttttcactgtcctgaaggctggaaataggagatgagggtgacagcgtggtcgcattctgaagagggtgatcgtacaggttgcagtctgaggacttgtcccctcacgtggtgg

SEQ ID NO: 63468 - DNA, 122 bp, Homo sapiens
tggaggagaagaaaggcaggtcctccacagccctgataaaatctccaagtctcccagtttcgggtccctctcctgggatgcagacccactgcctgcccagctggtacgatccacatgccctc

SEQ ID NO: 63469 - DNA, 122 bp, Homo sapiens
atggaaacacagagaaaattagcaacactgtagactcaaggaaaaccatatcaataatgacgctaacattccaattaaagagcagatattttcagactgtatttttaaaagcaagacaccac

SEQ ID NO: 63470 - DNA, 122 bp, Homo sapiens
caattcccccacgagccctggggagacccagcgctaaccaggggtgcccaagggaggagccgggagaggccctcctggaggtgggcacagcccaggcaaacatcagcagacggaaccagcac

SEQ ID NO: 63471 - DNA, 122 bp, Homo sapiens
ggtggggttgggatctttctcctggctgcctggcgtccatcttggcatcttcggtagcagcgcttggccccgccccctgttgacatccgggtaaatttgcaccattttcttgccttctcgct

SEQ ID NO: 63472 - DNA, 122 bp, Homo sapiens
aagaagggatctggaaggaaaacccacagggcagcctcagtatcagcagtccctgagtcccgcccctgggtggtgaatctgttccttgggattctggcatttcgccttaacacagaaggcgc

SEQ ID NO: 63473 - DNA, 122 bp, Homo sapiens
tcctgtggcaggggagcggcaggggtctggctccctggtgtcttgtgcttgctctcctagcgggggatacccaaggtatccccaggaaaggccaccacgttagatggaaagagggaagtggg

SEQ ID NO: 63474 - DNA, 122 bp, Homo sapiens
tctgattctgactcagaatctgtgacccactcagaaagtgccttccactctagggctgatcgctgtatggatagttcctgaagttttgttagaaatcccagctctgtcaaagatccctgctt

SEQ ID NO: 63475 - DNA, 122 bp, Homo sapiens
cgtaaggggaagggcccgggaatctggaccttgtctagagtcccggcgccagtaccagttcggagggcatcctggaggttgttactaacccgagcctcttccaggcttcccaggcaccaggg

SEQ ID NO: 63476 - DNA, 122 bp, Homo sapiens
aacataatcctccaaagaccgctcaacctccgctcccgacgactctttctagcctcgtcccgcaccccagctgtggccacacacctattaggcaaacatttatgaagcacccacttactggg

SEQ ID NO: 63477 - DNA, 122 bp, Homo sapiens
acactcagcagccctcagagaccacagagaacctctgaagcaagaaggaagagggccagtcgctgtgagcaggcgcttcatcaatcctgcctctgtgtggcctctaagggatccagtggcat

SEQ ID NO: 63478 - DNA, 122 bp, Homo sapiens
atttagagttcagctatattgttgcatgtagtgagaagggacttaattacaaacttaagacgtaagtgtgcaataaagtaagctaagaagaaaatatgcttctaagacctgtatttacttgg

SEQ ID NO: 63479 - DNA, 122 bp, Homo sapiens
taccccttgggcgatgggtgctggtgaaaagaatggaacccggactagggaggaagaaggcgagggaaaggtctatggtggcatctccttggtcccacccaagtgccggagatgcccccaag

SEQ ID NO: 63480 - DNA, 122 bp, Homo sapiens
tccccgtctgcacctctaggtccaatattggaaataggtgctgacgtttaaataacacagcgtcctcatactaaatctgggggggaactggtaactcgaaaaccaaatactcggtcttccga

SEQ ID NO: 63481 - DNA, 122 bp, Homo sapiens
cgaactccccagcacccccagcccttcttaaaaacgctgagtccgcgcatgcgcctcaggcgccctccgcgacactctagcggctctgcgcttcactgcgcctgagcttgagtctcaggcct

SEQ ID NO: 63482 - DNA, 122 bp, Homo sapiens
ggagcagccgggctggtgctgggccaggagcacgggcgaaggcgctgcattttaatgaatcgttattgccggcgaggcctttgtctttctttatccggtgcacaataaaagaattaattaga

SEQ ID NO: 63483 - DNA, 122 bp, Homo sapiens
aactgggcgacgtgccgctcgctcagccccaacaccgagtgcagctcgtcctgaacccagcgctccagacccgccggcgtcgccatggcgactcacgctccctgctcccggccctgaagcgt

SEQ ID NO: 63484 - DNA, 122 bp, Homo sapiens
agcatacaaaaccaggctctgctgcttgcagtgaatctctcctccattgtaactgagatacgtatatcctcttttttctttctgctgtttctgtgttaacggcaaatccacttcttaatttc

SEQ ID NO: 63485 - DNA, 122 bp, Homo sapiens
aaagccgggctgtgttgacctcgctgtgcatgctgggagttgtagtctcttcactgctcccgcccgttgtttcaggcacttcgggactacaatcccagcatgacccgggctcggggacgggg

SEQ ID NO: 63486 - DNA, 122 bp, Homo sapiens
tgatattttattgtctggatttctgaatagactgatgtgggggggaaagtggacatttaccgagcagctaatgccaggcactatgtcgagaactttaccttcataacctcactgaattctcc

SEQ ID NO: 63487 - DNA, 122 bp, Homo sapiens
atctctaacgcaatcctcagcctcttgttttgcagagttctccgcgccacggcaacttgacgagctaggccacgggccacatccccactaatctgattggttctgacgattattcaaaccca

SEQ ID NO: 63488 - DNA, 122 bp, Homo sapiens
cccccttgaacctcccgacccctcctccacaggtacgacaacgaatatggctacagtcaccgggtggtcgacctcctccgctacatgttcagccgagacaagtgaaacgggaaggtcctttc

SEQ ID NO: 63489 - DNA, 122 bp, Homo sapiens
agcaccttagcacttccatgacagtcctttataatctttccaggcacttttgtgaactcacgtatcgtgtaaaagcacagtgatgtattaagaaacttcaagaatacctttcaccagctggg

SEQ ID NO: 63490 - DNA, 122 bp, Homo sapiens
cgtgaccaagctggttacgccccagaggaggcgcccagccctgttcagaggatgtggggccggaaggactgtggaagttgtttttctctttcaaaagcccaacagactttcccaccccttcc

SEQ ID NO: 63491 - DNA, 122 bp, Homo sapiens
cctgcctggccacgtcacactggcagatgggacgcgggcatcagctcaagttctgtggagcgagagattccgtggcccgggctgacctgggcttggaggcctggagctgcctgcggcccccg

SEQ ID NO: 63492 - DNA, 122 bp, Homo sapiens
tttcaatttctaaagcaaagtgtttaactagataacttcatcccagatgataggactttacgtgaatctcattaattccatgtcttgatgtaatttgctcctaagattaaggttcccaccca

SEQ ID NO: 63493 - DNA, 122 bp, Homo sapiens
ctcacacccttgcataagttaaaataaatattacgtacacatctccatcacctaggaggacgtacataaatacatataaatattaattaggagcaataagaaataaattaacgacgctctcc

SEQ ID NO: 63494 - DNA, 122 bp, Homo sapiens
cctgcgttcctccgcctctttaaatggggcggggcaaggtggagaccgcgtgtgtggttccggggggtcccgggtccccgctcccgggaccttccccgggtggcaccacatcctcgcgggac

SEQ ID NO: 63495 - DNA, 122 bp, Homo sapiens
gctcggactgcgaatagttgcaccggcccagcaagttgagtttgcagagatgcaggttatcgcagggtctctggcagtacttgcgacggcagacccgggctcgagtggtggccaccaccgat

SEQ ID NO: 63496 - DNA, 122 bp, Homo sapiens
cccagcccctcgccaatatcaataattgccagtgtcatctgcctgcatggtgctttccaccggccgtcacctagcccaggactccttgaggggccgcaacaaaactcacacccccagatcct

SEQ ID NO: 63497 - DNA, 122 bp, Homo sapiens
cccttctctgaaaaatagccttgggcccaacaggagcaagcagcccctcccaggaagttacgccccagcctgggggacagcccatagccaaaaactgactgacattggaagctaggatagac

SEQ ID NO: 63498 - DNA, 122 bp, Homo sapiens
gggtccaggccctgattccggggatgcgacagcacccagaatgtcctgccttgtgtggcacgtgggaccggggactcgggccccagggctcccaaccctggctgtggagagtgggtggctcc

SEQ ID NO: 63499 - DNA, 122 bp, Homo sapiens
ttttcctgactattcctggatgttcattcttctagttgaaccttcaccaagaatgactagcggccaggcgtggtggctcatgcctgtaatcccatcactttgggaggccgaagtgggcagat

SEQ ID NO: 63500 - DNA, 122 bp, Homo sapiens
cgcccagcatcgttctaattgccggagacattgcctcagactgtgcgctgctagaggctgcgttcctgagcaggaagcccgtttcctgggattggaactacccttcttggccagcgggaagt

SEQ ID NO: 63501 - DNA, 122 bp, Homo sapiens
tgacaagcgagttattcagtgcgcgtcaccctgaaggactcatggacactccccggtttccgccaggtgctgctcgggcagccaagttcccaccctgggtcccaggaggcctttgtggcctg

SEQ ID NO: 63502 - DNA, 122 bp, Homo sapiens
acgccaaggaccgccaaggaagcgatgggctggccctgagccaagggagcacaacccgggcgcacaagatgccgcctccccggggatcgcgcccggcgccccctcccagcacccagagcgcg

SEQ ID NO: 63503 - DNA, 122 bp, Homo sapiens
gtgaaattcgcacccagacagtgaacctccggaatttgctgtgaacagtcagcaaagccccgccccaagcccttaacccctcctggtcgccggtcacgcccccatcccccggtcagtttcag

SEQ ID NO: 63504 - DNA, 122 bp, Homo sapiens
tttagaacctgaaaaacacacgtcctccaggggcctgggaaattcccaggtggccaccaccgtaaacagtatctcattgagtttgactaaactgtggcaggagttcacgcttctaaccacca

SEQ ID NO: 63505 - DNA, 122 bp, Homo sapiens
gggctcgggatcctgctgccaccaattcctggtgccccaggaggttgttgctttttctcccgggctgcccgggtcgggggtggggggatggggcggggatccagcgatgcggccagggagga

SEQ ID NO: 63506 - DNA, 122 bp, Homo sapiens
gccctctgcccagtcgcccctggtaaccaagaaagggcctgaaaatcctcaaagtgcagccgcccggggaggggccgtccacagtgtcagcgagacaagggcacatacaaaatgcggggtaa

SEQ ID NO: 63507 - DNA, 122 bp, Homo sapiens
ggcgacacgaacccggctgggacactgctaggcgcgcactgccgcccctgcgctcccggccgaaccccgccccgcccaggccccgcccccagccccccaggtgaccgcggctgggcggagac

SEQ ID NO: 63508 - DNA, 122 bp, Homo sapiens
ggccagcagccccagcttccccaggtatccccagggggcagccggggccacctcggtgtgcgggaacaggccatgacacacttgggcacacccacccactccaaggcacacatacgcacacg

SEQ ID NO: 63509 - DNA, 122 bp, Homo sapiens
ccgaatccagggccccgtgttcctgtccctactctgtcccggtgctgtgtggccgtgggccggttccaccctccacgctgttttcccgagtgtgtatgaagagggtcggttggccccgctct

SEQ ID NO: 63510 - DNA, 122 bp, Homo sapiens
tggtgctaggccatgctggctgctgtcactgagcgggactcaggccaagaggcgtgacctcgggccagcctgtctgttgtgcagacgcctcctctgcagaacgcatcagtttctattctgca

SEQ ID NO: 63511 - DNA, 122 bp, Homo sapiens
gtgagttggaagctgaattaccgcgagaagtacagtcttgccgaggagacctctgggaagcgtagtcagagacgtatcaaggccggacaagatggttcccgatcgtcagaattcctgtccgc

SEQ ID NO: 63512 - DNA, 122 bp, Homo sapiens
cccctcctgcccccccactccaggctctgagacagcccaggacttctcacccatgttcttcggccaagaccagagcttccacgagctcttctgtgtgggcatccagctgttgaataagacct

SEQ ID NO: 63513 - DNA, 122 bp, Homo sapiens
ttgtttcttggccaggaatcgcttaattctgaaagtctggtgagaagacacggcgagaatcggggtccagcacagatgatggcgacagcggagaagggaaggtaagggagggggctcaagct

SEQ ID NO: 63514 - DNA, 122 bp, Homo sapiens
tgctctggagcccccaccataggcagatggaagccaagctaagcctcctccctggactctcgggcttgacacattcctgtgaaacactatgtagccaccacatcctggcctatcccctggag

SEQ ID NO: 63515 - DNA, 122 bp, Homo sapiens
ctctctctctttctttttctttttatttatttactttctgaagaaagagtttcactctgtcgcccggcccgcagtgcagcgatgccatcacagctcactgcagcctccagctcctgggctca

SEQ ID NO: 63516 - DNA, 122 bp, Homo sapiens
aacccctttctgcccagcacggccatgggacagcacgtgaaatcaaacttccagaaagcccgaaaggaaacgtttgccctgggagcgctgcgtggtgcttcagctgaagtcttattccacgg

SEQ ID NO: 63517 - DNA, 122 bp, Homo sapiens
ttgatttacaaaatggcaattatagatccctggacccatctgttgacctctctaaccttgcgttgctgcaagcacttgacaacttgtagttctccaaactggtcatactgtttcatgcttcc

SEQ ID NO: 63518 - DNA, 122 bp, Homo sapiens
cacgccgggcgcgcgcgttcggggcgttccttgcagcggcggggcctgccaggccctccgcggccgccgccactctcaaaccccccgactgctcctgggtccctcccagacgccgtagtcgc

SEQ ID NO: 63519 - DNA, 122 bp, Homo sapiens
ggggctctagcgccccgatgtgccgacagccggagaacacaggcttcgcacagcttggtccggctggaatgaattctttcctgccactgagcacgaccatgacttaatgcgcttggcggccg

SEQ ID NO: 63520 - DNA, 122 bp, Homo sapiens
tgagcagtgggtggaacttaggcgggaggggcacagatgaggatggagaagggaagagcacgggaaaggtggcgggaacaaatgaccaacaagcaaagggaagaggacaattaagaggggct

SEQ ID NO: 63521 - DNA, 122 bp, Homo sapiens
cataaatgacctgatggagctgaaatgtttggcatgaggcccagtcactagggccctttgcgactgggctcaaggaacacaaaaacgttatcttgtttttcaataactaacatataggaata

SEQ ID NO: 63522 - DNA, 122 bp, Homo sapiens
ccggcaccggaggtggctctgagggcagggacgtgttggacacgctgactttgtaggctccgccaagaggcgccgcaggaggtaagacggcttcgggcgcgcggctctgccgggcgggcgcg

SEQ ID NO: 63523 - DNA, 122 bp, Homo sapiens
tccgggaagccttgaaactcaactcccgggtgggccaggaaggctgcccgacttgggcagcgccggccggagccttcttcaaagccgagctgttcgccgccctcgaggcccaggcgagcctg

SEQ ID NO: 63524 - DNA, 122 bp, Homo sapiens
gaggtgtgagtatggaaaggaccaccagggggctccgggatgcagttcaccagcccaggccgagaggaaggctcagtggtggcttcagcagcaagcctgggtctggcagaatcctcaaagaa

SEQ ID NO: 63525 - DNA, 122 bp, Homo sapiens
ttatccctgaaacccaatgttattgaaagtgtccctggcgtcatcagcatgtacgtgatccgggactctaggcattggtttgcctgcgatttctccaccttacacatagagcacagcccaag

SEQ ID NO: 63526 - DNA, 122 bp, Homo sapiens
cagaccagcagggcgacactccccggcagcaggctgagaaggctcaggacaccgagctggcggcctacctggagaaccggcagcactaccagatgatccagcgggaggaccaggagacggct

SEQ ID NO: 63527 - DNA, 122 bp, Homo sapiens
taaggtcgttgaaactgcactcgcacagcttgcagtggaagcgaagcactcgcccttcgtcgctgaacacctgagacacagaacagccgcacgcgcaccaggcacgaggcggggtgggatgt

SEQ ID NO: 63528 - DNA, 122 bp, Homo sapiens
taattttgttgatctttgtaaataatgtgattattgaataaacagaaaactaaactaggtcgtgaaatttcagaatagtctctgaaatctgatatctagtaagtttttcttctagaaggtgg

SEQ ID NO: 63529 - DNA, 122 bp, Homo sapiens
cttctcaaggggcctgcattccccaagccacgtccctgagattgggtgtccctcctgccccggctccatctgatgttttgcagggcctggaatggcctccctggcttacttctcagggtctc

SEQ ID NO: 63530 - DNA, 122 bp, Homo sapiens
tggtgagtcctgaggaagtttatattaatggcagaagtcggaggggaaacaggcatgtcacgtggtgacaataggagcaagaggaaggaggaggtcccatgccctttttaaacaagcagatc

SEQ ID NO: 63531 - DNA, 122 bp, Homo sapiens
tatgcaactcaagtcgcactgcgtatgcaactcagctcgctctgcgtatgcaactcagctcgcactgcgtatgcaactcagctcgcactgcgtatgcaagtcagctcgctctgcgtatgcaa

SEQ ID NO: 63532 - DNA, 122 bp, Homo sapiens
gacacacgctgaattcctgtggggtcccagatgttcaggaaagtgacctggagtagaaggcggggggtagcattgtagaactgccctctgtgagccagtgccttgcctagggcctcaggctg

SEQ ID NO: 63533 - DNA, 122 bp, Homo sapiens
tccggagggaagaggctgctgtggtgggaacaggctgggagccaggcctggcgctggggccggcaggctgtgttctgagagtgcctgctagaggagctctgtgttcccaaggagatggagga

SEQ ID NO: 63534 - DNA, 122 bp, Homo sapiens
agtcccaaggccgcctcgcctccctggctatttagtgatgagtcagatgatacctcccagcgcttcgccctcgccccctgacatcctccctatccctgctttaggggcttttcctctcttac

SEQ ID NO: 63535 - DNA, 122 bp, Homo sapiens
attaggccgcctgccctacaggcagatgggcacctttcgcacagaattccaccccacttccggcgacctcagtggcttaaacagagtgagcaggacatcatctttcggtgtggttggtggct

SEQ ID NO: 63536 - DNA, 122 bp, Homo sapiens
agggcccacagctggctgacttggccgcatccccaacgctggggtcctggtcagagcgggcggtggatggggcgtatgtgtgtgtgtgtgtgtgtgtgtgtgtgtgtgagagagagagagag

SEQ ID NO: 63537 - DNA, 122 bp, Homo sapiens
agtctctcatcacgaatcaggcttcgaaatgagggaaaaaagccccggtgaggccatcctcggaaattggggtcattctcatttgcaaagcggaggatcggagccccgtaatgcgggcaaat

SEQ ID NO: 63538 - DNA, 122 bp, Homo sapiens
tccatatctgtccaggagccgttggccaggcacttgcggaccttgggccccaccacctcgcgctccccccggcacacatactcaatctcatagtccactggcaggaagttgatagccttcac

SEQ ID NO: 63539 - DNA, 122 bp, Homo sapiens
gccctcaaccacctggatttgcacggacgcccggtccccacctcccggctcctgggcacccggccagtgcctttggcgcactcaagacaggggcaaatgcttgactctggaaaacccccgaa

SEQ ID NO: 63540 - DNA, 122 bp, Homo sapiens
cgcacgccgcgcccccgaagcctggctccctcgccacgcccacttcctgcccccatcccgcgcctttccaggtcttctcccggtgaaccggatgctctgtcagtctcctcctctgcgtcctc

SEQ ID NO: 63541 - DNA, 122 bp, Homo sapiens
cagacaaaggtccttcaagcatcccctttctcgctccctattgttaccctgctttcgtcccgctcaaggtcttgaagctagtgcataaccttacagcaggatcagaaatgcggagagtagca

SEQ ID NO: 63542 - DNA, 122 bp, Homo sapiens
ctggcctcggagtcagcagcccagggggatatcttgcaggccgccttccaggactcctaccgcaacctcaccctaaagaccctcagcgggctgaactgggctgagaaacactgccccatggc

SEQ ID NO: 63543 - DNA, 122 bp, Homo sapiens
agggattctgcatcatcacttacttcaatgctcttttcttcttgctggctaatgtgggtgcgctctgggaaatcaaagctgctcatgctgaggaattaactctaaaagctgggagtatccag

SEQ ID NO: 63544 - DNA, 122 bp, Homo sapiens
cagcttacctgagcgccgctcctcttctctcatgtccctcgggggccgtcacgaccgtcccggagcgatctctaggaacctgtcccgcagcgatctcttgcacactctccccattccgacca

SEQ ID NO: 63545 - DNA, 122 bp, Homo sapiens
cattcagtctccactgttacattctgcctccacattcaaggcctggctgtggtcagaggtcgctgaatgaatcatgttaaacaagagctttgctgatgttttagaatttctagggtgaccta

SEQ ID NO: 63546 - DNA, 122 bp, Homo sapiens
ggaacttgttccctgcccctccctgggatgcttggcctcctctgtcaaggacctgaaagtcggaggggaggaggtttctctgaccagagctgttcctggaccctctttggtggtgtcgctcc

SEQ ID NO: 63547 - DNA, 122 bp, Homo sapiens
ggatttgtaagcataacagcattcctcactgattactctgtccatgccacacaccacacgcgggcactgaactctactcgctgcacccgctgcacgctgtgctcatgacctgtgcccagcac

SEQ ID NO: 63548 - DNA, 122 bp, Homo sapiens
ggcactggaggggaaaagtggggatctgggggcccgatcctcaggcgcaggtggtgaccacgggggccagcgacacggggggcgccgaggatgcagagggtgcaccgcccttctccgccttc

SEQ ID NO: 63549 - DNA, 122 bp, Homo sapiens
aaagagaaaaatgggcaggcacagataattatttggtcccttagtcccctctgcctttgtcgtccatctcttcccacctctcttcatgcatccctttctccctcttccctttcaggatccat

SEQ ID NO: 63550 - DNA, 122 bp, Homo sapiens
cggactgacagaagcaggtgcccggagaggggcgccgggtgagcagcagcggcaggtggtcgtgtcctggccctaccggcaggtgccacctgtcgcctactttttccctgacgcagcaactg

SEQ ID NO: 63551 - DNA, 122 bp, Homo sapiens
actgacacacaattggtgactcacaactgacacaatcattacacacatggaatgactcagcggggacactcacatgcatgggctcacgctcaccgtgacgtgtagaagtggctgtgctcgtg

SEQ ID NO: 63552 - DNA, 122 bp, Homo sapiens
tctcctccttaaccaatcacaaatcaaaaacgctctatatccgacccatgggccacacgtcgtgatgtctgccttctcaggtcaaactgacatacggcctccatgtactgatttatgacttt

SEQ ID NO: 63553 - DNA, 122 bp, Homo sapiens
tagcacaataagccctgcatactcatcacttggcttcaatattatcaactcatagacaatcgtgtcttaaaactatgtgtttcattatagctgttctcccccttattacaccactggagttg

SEQ ID NO: 63554 - DNA, 122 bp, Homo sapiens
cagttctcgcagtggcaaaggcggcggcggcggcggcggcagcggcagcagcaggtggagcgagctacagcgtttggcctgaaacccactgctgcagccacccgggctggagttggcccgtt

SEQ ID NO: 63555 - DNA, 122 bp, Homo sapiens
ctcccgcccccgcggggcagcgcctcggtgcacccgcttggcagttagcccattagatctcgtactattgatccgcttctgagcaaaagctgacagcaccccctcccgggctccccacgttc

SEQ ID NO: 63556 - DNA, 122 bp, Homo sapiens
cggacccattcactgtgcactgaactcggtgggttggacccacccagggtgcactgaactcggtgggtcggacccatccagcgtgcactgaactcggtgggtcggacccatccagtgtgcac

SEQ ID NO: 63557 - DNA, 122 bp, Homo sapiens
acccggacctggcctgaagggggcgagcgatgaggctgcgccacctagtggctgcgacttcgagtctcctctagcaaaatcagatgttcttggccaacgttgccatttgaacggtaatctct

SEQ ID NO: 63558 - DNA, 122 bp, Homo sapiens
caggtgtacctctttcagagcgggctttctgagtcacaggtgcatgcacattcagcgtgacgacctgctgacctgctgacaacctgggtttcgtagaaaggtcatcctcttccagatactct

SEQ ID NO: 63559 - DNA, 122 bp, Homo sapiens
ttctattccttcccagacctcagccaggaaacaaagcgccaagtaccggacctaaacaagcgctcagtcctgagaaccatgactccgccgtggccctggagcctggggctggctcccagctc

SEQ ID NO: 63560 - DNA, 122 bp, Homo sapiens
agcaacgtctgggcaaatgtcagaggccgcagcacccaggcaggcctctgtcaaatgcaccgcccagaatcaggaatgagagaggccactgggcaagtaagcacacagagcagacaaaaagc

SEQ ID NO: 63561 - DNA, 122 bp, Homo sapiens
gcctgggggggcgccagcatgtggggcgggggcgtcttcatgggtctcatttgctttggccgttggagcgtttgcatttgctgccgtttgcttgagtgactgcgcagcaagactctgtgctg

SEQ ID NO: 63562 - DNA, 122 bp, Homo sapiens
ccagcattcctaattctaacaaggtgctcttgatccaaacttagggcatttgaggctctacgttctttctccccttcctttgtcagcaaaaacaagagtaggtcagtaaactgaaaacagcg

SEQ ID NO: 63563 - DNA, 122 bp, Homo sapiens
tgttatttttaaaagattcagaagaatggatgactcatactcttcaactagatttcatcacgggacaacagagtgatcgggtttatttactgtaattgactgcagtaggtcttacagttttg

SEQ ID NO: 63564 - DNA, 122 bp, Homo sapiens
cctcacatttgggcggtgtaaagcctaataagaagggcagggcttcaagaatggggaaaacgtgttttcaattcaaattaaacaaggagtaacaggcaccgctcctcagtccagaggcctgg

SEQ ID NO: 63565 - DNA, 122 bp, Homo sapiens
ccaaggccagcatcttaacttcaagcttctcaaactgcggcaacgcacattctcctggggcggcatttaacaccgacaataatgaaactggacctataaccgagcaacgagttaagtcggca

SEQ ID NO: 63566 - DNA, 122 bp, Homo sapiens
gctctctgtggccctggggtgggagggctgcggtcgagaaccccccacgcggcccctccccggaacccgcaggctgtgcaccctctggactgaagtcacccgtcagtcccggctgggggttt

SEQ ID NO: 63567 - DNA, 122 bp, Homo sapiens
ctttcagagcgttgactataaacctggcgaatggtaagaggcaaacaaaatcagctaacccgcccccacgctcctcatagatgctcagtccctaaaacgtccagtagggaagcccgggacca

SEQ ID NO: 63568 - DNA, 122 bp, Homo sapiens
ccggcggggagcttggcgccagcacagcacggctgggccgcgagagggacgatggggtgccgcctccggccggccccactttcgaaggaatctgccttgctgttcctgcggccgaggccaga

SEQ ID NO: 63569 - DNA, 122 bp, Homo sapiens
tttgtcaccggagaaaaccacctgtggtttgcaaagggcctcagtcgagtcaggggcaggcggggcagatccgagcccggcgggaggggcgaggcgcgggggcgggcaggggcgagggtagg

SEQ ID NO: 63570 - DNA, 122 bp, Homo sapiens
caaaatcagataattttttatgaaaaaattatctcttttccatggagagccacttaacatcgtaaagaagtaaatcatctttaacttaatatgtaaatataatgcaaccccaatttaaatac

SEQ ID NO: 63571 - DNA, 122 bp, Homo sapiens
tggcttcacgccagcagtcagacaagggtgagggctgaagtcagagatgagatggaatgacgccagggaaaagggtcccatgacaggcggctagatgttgagcacagaggagaaagagtagg

SEQ ID NO: 63572 - DNA, 122 bp, Homo sapiens
tcccgcggctccggagccggctgccaccagggggcgcgcccgcggtgtccgggagcctggcggcgcctgtgcagcggccagtgcacctgctcctgccctcgcctcggtctctgccaggaccc

SEQ ID NO: 63573 - DNA, 122 bp, Homo sapiens
ggcagagcaaggggtctgtctgctcgctcgctcatgcctaattatggtttatttcctccccgagtgacttctttgatacgtgaaggaaggggaaagaaatccttctcttataaacatgaggg

SEQ ID NO: 63574 - DNA, 122 bp, Homo sapiens
aagagatcctcccacttctgctgcccaaagtgctaggattacaggcatgagccaccgcgccgggacagttattttgtagagtgttctttaatttggatgtacctcatcttttatgtatcttt

SEQ ID NO: 63575 - DNA, 122 bp, Homo sapiens
tgccaggaccttgcaggtggagagcatagttgccaaaatcaaggcggaggagcgcaccgccgctaggatccaggcggagaagcccaccgcggccaggacctaaggatgcagtacactgctgc

SEQ ID NO: 63576 - DNA, 122 bp, Homo sapiens
gggctccactttttctggggatatctccaaggccccccagggagctgcgatttagcatcccgcaggcaccccttgctcacggaggtcatctgaggccctttgcatcctcgtcccaagtctaa

SEQ ID NO: 63577 - DNA, 122 bp, Homo sapiens
ccccctcccccgcaccgggaggggccgaggctgggctgctgctgccgaggtcgtgtgcgacgtgccgctcccgggccctgtgtccccagccccagcagggccgcgtggacggcgcggcgccc

SEQ ID NO: 63578 - DNA, 122 bp, Homo sapiens
tccattgtcaggcaccaggcgctgagctgaggctggatgttcatcactgtccttcaaccacgtaacattgaagtcccgggagaagtcctgggagttgaaggggacagcagtacagttgaaag

SEQ ID NO: 63579 - DNA, 122 bp, Homo sapiens
ggaggctgagacagaaggatcacgtgagcacaggaggtcaaggctgcagtgagcgatggtcgcatcactgcaatccagcctgggccacagagcaagatactgccttcaaaattaaaaaaaaa

SEQ ID NO: 63580 - DNA, 122 bp, Homo sapiens
tgtgatttggggaagggccgggggcccataagtcacgtgctcggggcggttgtgcaggagcggactgtcctctgggaacatagaagcgcccccgactagagtaggggcggggagggagcgcc

SEQ ID NO: 63581 - DNA, 122 bp, Homo sapiens
aagattagggaaactgaggagacgcggcaggtgcccagtatttatagttttgtccccaaacgggggagttatttgtaagcactggctactacccccgtcaatcacctaattgtccaaaaaaa

SEQ ID NO: 63582 - DNA, 122 bp, Homo sapiens
aagggagcttggattgaactaggtagggagtctggggtcttgggaagacccctgtgatctcgaaaacatgatgactgattcatagaaaggaaggcctggtcagtgcactggttggggaataa

SEQ ID NO: 63583 - DNA, 122 bp, Homo sapiens
aagagaatttcaagatgcaaagcccatccagcgacaatttggggaagctgcgctggggtacgtgagctttgctggcaagctgctcagtacagctggacataataggatgttggtctgggaag

SEQ ID NO: 63584 - DNA, 122 bp, Homo sapiens
cccgcgccatcgccccgtggcccaggacggggacctccccttagtccgtcctcccaccgccgggccctgccccgcatcccggccttatgcactgcccctcccacccggccccgcccaggcac

SEQ ID NO: 63585 - DNA, 122 bp, Homo sapiens
ggacattaacaatggacccccccaagacacagtgtctgtttccaaacccaattaggatttcgctgtttaattataagaggtttgggaggaataggcgcctgttttatagtgtttatttggcc

SEQ ID NO: 63586 - DNA, 122 bp, Homo sapiens
tggcggggtcgcaggggcgtggtctgcgggcgtgggggcgggacctcggggcctcgggggcggggcctgagggcgcgcgcacgcgtccggcgcgccccctcccggccgccatgttggctggt

SEQ ID NO: 63587 - DNA, 122 bp, Homo sapiens
cggcatcgcgtccttgtctgctgtctgggcacagcctagagaggccgcgggtcccctccccgtcccccaaggtctggagtggggtttgaccagcctgggatattaacaaatatcggtggact

SEQ ID NO: 63588 - DNA, 122 bp, Homo sapiens
tagcccacggaagttatgcagaagctcttctctcaggtgtcagaaatatggcacagaatgcgacaaaaacccatagttcatttctggaggaatcagaaacttacggggtggccttataattt

SEQ ID NO: 63589 - DNA, 122 bp, Homo sapiens
aagtaagaaagaaatagcaagggtcttagatggattccctctgaaaaacgcaccacatttcgtgtggtaggtaaaagaaggtgctgactccggattcccaaactgactcagctgttttatca

SEQ ID NO: 63590 - DNA, 122 bp, Homo sapiens
ctgcacctgcaggcccggctggtactgcgcgctgagcaagcaggaggggtgccggctgtgcgcgccgctgcgcaagtgccgcccgggcttcggcgtggccagaccaggtacggggtggggct

SEQ ID NO: 63591 - DNA, 122 bp, Homo sapiens
ccttaggagtcatcttggcttatatgacatgacctttgattgttctgattgtgccacattcgtgtggcagaagtgatgactcagggagaatgggtcattcctcagtcactgagggaagaagc

SEQ ID NO: 63592 - DNA, 122 bp, Homo sapiens
cgcgctcgcttgctcgcgacgcggcggagccagccacagccacccggcttcgcgctcctccgatgtcctcatttactgcaattgtcttcggcgagatctcagagccagggccaggaggcggg

SEQ ID NO: 63593 - DNA, 122 bp, Homo sapiens
gaagtctgtgaaatgtcataggctcagtcaggctctctcccctctttatattgctgggttcggtaactttgagaagcattttgcaaattgtcagccaacaataacatgaacttgattcttta

SEQ ID NO: 63594 - DNA, 122 bp, Homo sapiens
tggcatcttagcatctgtggaatacatgagtcctgataggggttgttaactcctagtgggcgtaggtgaatctttgggtataaagtacgtcctggggcaactatatgcctctgagtatggct

SEQ ID NO: 63595 - DNA, 122 bp, Homo sapiens
ggacggccccgccccttgcccgcttccgcgtcagtgcctcaccaccacctgcccgcgcgccgccccatataaaggcgccgccgtccttacccccaggactcggccccatggagacgccgccg

SEQ ID NO: 63596 - DNA, 122 bp, Homo sapiens
ttaatttctagatgatgaaatgggagctccaaagggtaacaagagtggtgcttgatgccccgttgagtcaatggtgggtcatggtccctgaccataatttccttaggtcacagacaccctac

SEQ ID NO: 63597 - DNA, 122 bp, Homo sapiens
tccaccagccgaaggcggggcctctgagggcactcccgccacacagcgcgaattgagcctcggggcttcctgggaattgtagttttagtcacggacacatcttttttattcgggccagtatg

SEQ ID NO: 63598 - DNA, 122 bp, Homo sapiens
gataaagcgcgagtctgaaactaccgaggccggcctgcgagctagcgcggagggcagccccgggccgccagctttgtagcggttcctgcttacaaaagggctcttcttggaaacggggctgg

SEQ ID NO: 63599 - DNA, 122 bp, Homo sapiens
tgtatccttgtgttaatgaataggtactaatctctcctctaggaaaaacccactgcctgacgttaacatctttaggcaaaagaaaaggcaaaactcaacaaattacattttgattcatccaa

SEQ ID NO: 63600 - DNA, 122 bp, Homo sapiens
gtctaaagtgtggcaagacatagtgcacaacacagggacaaaggcaggtttcctgcagctcgctacctaagtgtttctgtaggggaaggagccaattaagaaaaagtgttggtacagattca

SEQ ID NO: 63601 - DNA, 122 bp, Homo sapiens
gccgccccggtctggcccggtgagctgcgattttacggctcacaggcccgagtctgggtacgcccagctgtgatggtcgtgagcgtcaggaagggcagtggccccagttttatggtccaaag

SEQ ID NO: 63602 - DNA, 122 bp, Homo sapiens
accaaagggagcaggtcagttcatccaaagagggcttgcgggcagaggctaagagggctgcggcggcctgggagcagggctaccattgaacttagggtgaaagtccagtcgaacccaaacct

SEQ ID NO: 63603 - DNA, 122 bp, Homo sapiens
gtgggaagccaaggaagaggaaaaaagagtgaattcgccctaggatagggaaggagtagccgcgtgaggttgagtatgcccatttccgtgatttctctcgattcagcgagtcatacgttgga

SEQ ID NO: 63604 - DNA, 122 bp, Homo sapiens
ttttctccaggccaacttcaagtgaggtgtatcaactctatccgcacaaatttcttgccacgagagcagaagattatgatctctgatgctgccttagggctgaagacactcccaactcggcg

SEQ ID NO: 63605 - DNA, 122 bp, Homo sapiens
gtggcccgtacggggatacactcctccaggggcggtctctagtcctctctcatgaggaggcgccccactgcctcgttgcggtggcctctggggtaaggaatcgagacccaccctgtgtgacg

SEQ ID NO: 63606 - DNA, 122 bp, Homo sapiens
cagcacctgcacgggggaccgccagcacctgggtgagccagcacgtggactggggacccccgaggagacttgaacccaggtaggactaaggagtgcagggtccatatgaggaaatggtgggg

SEQ ID NO: 63607 - DNA, 122 bp, Homo sapiens
tgggttcctgggaggggccgctatgggtgtgtgccccgtgtcccagaggcgagaccgggtcggaacccgagtctcctccccaaaccaccacattggctctgggtcccgcgtgtcgaacccgt

SEQ ID NO: 63608 - DNA, 122 bp, Homo sapiens
cctgtgcgtctctcagcctggctcccagagcctcaatttttcgggttttggaggcgagaccggccaggaaggctgaggcatgattcaaaagccctggaattgtctggaaggggatgcaaact

SEQ ID NO: 63609 - DNA, 122 bp, Homo sapiens
cggtgagagggccgtggagtcccgcccctcgccgccgcggttggcgggagcgtgtcgtgacgtcacacagggcctctcgaagtgggcttgtgaatggctagattgggaagcaccggcggggt

SEQ ID NO: 63610 - DNA, 122 bp, Homo sapiens
gctggggttgtgtttagaaaccgatgagtttgtgaggcctccgggaggctcccgagggcgcggggactacgtttcccaggaggcctcgcgcggacgcccgggcggggctgtgcgaggggtgg

SEQ ID NO: 63611 - DNA, 122 bp, Homo sapiens
gccctattaatcgcattcccacctgcctttggccctcccagctgcctcgcttgcagaacacgatcgttcaaacggaagtcattcatgggatcgcctctccctgcagtaatccagagcagaat

SEQ ID NO: 63612 - DNA, 122 bp, Homo sapiens
tccaggtggaaaggtccttcttggccacagcccaggggtgagcaccggcacccaccccgacgtgcagacttcccgggcttgcctcacggggaaagtcctgcctccccagggctgccacaccc

SEQ ID NO: 63613 - DNA, 122 bp, Homo sapiens
gtgtagagataagagcatgcaagaccgcttgagactgggccactttactactgtccgacacggagcctcatttactgaacagtggacagatggttatgcttttcagaatcttatcaagtaag

SEQ ID NO: 63614 - DNA, 122 bp, Homo sapiens
cctgctcaccttctccgcagtcttcgccagcatacccatctttgcagacacagctgccatcgtgacactctcctcggccacggcagtcccctgggcatgtctggatggcacagtcagggcct

SEQ ID NO: 63615 - DNA, 122 bp, Homo sapiens
tgactgctgatggacccctggtgaatcagaacagagctggcacctgagctgctgagcaggcggctacttttggctcagtggagttttggaagacctttgagagacctacagcatcaccgggc

SEQ ID NO: 63616 - DNA, 122 bp, Homo sapiens
ttacttaaaagggcttctaacggtccgagaaccgggcagggagagagatgcggaaacggtcgcagacaaagcggggcgaggttttgcccatgtgcatcccgcccaacccccctgcggggtac

SEQ ID NO: 63617 - DNA, 122 bp, Homo sapiens
ccgcaagatggcggcagccgggcctcgggctgggtgggggcggaacttggcggaagtgcgcgctactcccctcgcagatgcaagtggggaggctgtttgtcccacagcgggcagggggaagt

SEQ ID NO: 63618 - DNA, 122 bp, Homo sapiens
ttggtgtatagcttccttttttgtgactatactccctgccaaatttcaatgttacatttacgtcatagaaaacatttggaagtttttttcatttttcaatgttttgtagcagtttaaaaaac

SEQ ID NO: 63619 - DNA, 122 bp, Homo sapiens
cggtcacggtacggacagggtagatcacaggctgagggacagagcaaagacccctgaggccggacacctggggtcctgccgggcccctccccacgagagttccctgtgtctgtgccaatcgt

SEQ ID NO: 63620 - DNA, 122 bp, Homo sapiens
ggttgcagagctgaccccgacacacccccaccctgggcccggcctgccctcttcctcttccgatggccctgtgtccctaccccaacctgtccctgagctgctggtctggtatggggagacag

SEQ ID NO: 63621 - DNA, 122 bp, Homo sapiens
tgattctgaagagtggatgagctctgagagtgaccctgaacagataagccttaagagtagcgacaacagcaagagctgccaacctagggatggtcagttgaagaaaaaggagatgcactcca

SEQ ID NO: 63622 - DNA, 122 bp, Homo sapiens
gatcagattcctttgatgatctgttgaaaacaccggaactgctccccagaaaaatacagacgcgcagagtttcagaaagcagaacccccctgttatctatttatttttccacaatatcaaaa

SEQ ID NO: 63623 - DNA, 122 bp, Homo sapiens
atcctctcttgagctacagcagattaactctgttctgtttcattgtggttgtttagtttgcgtttttttttctccaactttgtgcttcatcgggaaaagctttggatcacaattcccagtgc

SEQ ID NO: 63624 - DNA, 122 bp, Homo sapiens
cattctgctctcccagcaccgcatggctgagggtggaaaaaaataacatctgaaacaggccgggcttttgatgatacctccttatgacagacacatcgaaaaccaccgacggtgagtcaccc

SEQ ID NO: 63625 - DNA, 122 bp, Homo sapiens
tgtgtgtgtgttggggggggtgcgtctgtgtgtgtgcgcgcgcagtgcctgtctgtgtgccgacttctgtctctctctcacgtctctctctctctctctctctctctctctctctgtctccc

SEQ ID NO: 63626 - DNA, 122 bp, Homo sapiens
ctgtctcctaccagcatgaggttcttatccctctctagctcctgcaagcgccgggccagtcgctgcccctcctccttccgggcctcctcctgcagacgcctgagttcctggctccgctcctt

SEQ ID NO: 63627 - DNA, 122 bp, Homo sapiens
ttatagaacgcctactgtgtgccaggccccgctgctccagggccctggggtggggcggggcgggggtgggtccctgccctggtggtggtgcctggagacagacagagacaaattcacaagct

SEQ ID NO: 63628 - DNA, 122 bp, Homo sapiens
ggcggcggcacccccaaatagccccacccgggcggtccacgggccgggccctgtgtgctgcggccgccatcccctggaggacagtcagtcggtattcctgggtcctgtctgtccccaaccgt

SEQ ID NO: 63629 - DNA, 122 bp, Homo sapiens
gctgcatctctagtgtagcctgccagcctgcagtgccatcaccctagcttatggtgatgacgaggctgagcctcctgaaaggtctgtcaaggggcagcagaaccccccgcagacccagctgc

SEQ ID NO: 63630 - DNA, 122 bp, Homo sapiens
aggccaaatctaagacccagacacgcggctgctgttaatgcccactcctgcgcaccgcgccgttccaccgcaggcacaaccttcctaggcctgccccgtccccacacaggggttcccgcttg

SEQ ID NO: 63631 - DNA, 122 bp, Homo sapiens
cgggcaagacaccctcagagcacagggtgctgccaagagcccagcggagtgcagctcgagcgccgaggtcgccaacgttccacacactgttgacgcaggacacaagttcgtcacagtggtcc

SEQ ID NO: 63632 - DNA, 122 bp, Homo sapiens
taagcctggagtaggtgggcttcaagggggccagcaggcccacccaggcaaagaatcacccgggctgggattggggcagagcctggcccctggtgggcgtggtaggtggggcgggacccact

SEQ ID NO: 63633 - DNA, 122 bp, Homo sapiens
acctctgatctactaagccagaatctccagatgagggcaccccaagtagttcttaccaaccggggtatcttggaaatcccaggctagctgacatgtcctccacatgtttgattttattcttg

SEQ ID NO: 63634 - DNA, 122 bp, Homo sapiens
gagtggcgggaagagctggcccgctggggtgggttatttcggccgttctggcctcgcaggcgttttcgggatccctctaggcgccgcggaggtcctggagtctcgatggtcgctcgggccgg

SEQ ID NO: 63635 - DNA, 122 bp, Homo sapiens
cctctgctctcgctcatgcgcctcggtggcggttggtcggcggttagtgcggctggtggtcgccgcggccggggctcgctctcggggaggccggggctgatctcgcggcgcaggcggcggcg

SEQ ID NO: 63636 - DNA, 122 bp, Homo sapiens
cctcgtgggtagatcctgggaatgcatgtccagcttggtccccggcatgaggtctgcgctcgacagtgcctgccctgcgcctgttctggggagctcagcccagaccgggcctccagctccct

SEQ ID NO: 63637 - DNA, 122 bp, Homo sapiens
agggctggagcttcccagccctggcggggagctggcagtgaagccagactcaacgtgcatcgtgcgtctctctccacagcaggggagatggtgtgagctggagcgtgcacaacattcaggag

SEQ ID NO: 63638 - DNA, 122 bp, Homo sapiens
cgccccacggtgccccctcgagcgcgttctgtttctccgaagaacgaaacttccctccagcgccccgagtcccttccgaggcccgctcctgtcatcccgaagagtcttccctcagggcgacc

SEQ ID NO: 63639 - DNA, 122 bp, Homo sapiens
accctcaaaatgagacaagtctcaatcaatttaggaagtttattttaccaaagctaaggacgcactcctgtgatacagcctcaggaaatcctgacgacgtgtgcccaaggtggttggagcac

SEQ ID NO: 63640 - DNA, 122 bp, Homo sapiens
cctaagccaggagccgaggcggggcctgacatgcactcctggccttggcgggcgccgacgcgggctgatcttccagggagaggtcactccggtgtcccacgacagggagctatgggggctgt

SEQ ID NO: 63641 - DNA, 122 bp, Homo sapiens
ttctccttttcaacgtcccagtataacttcaagggagcgcaactccagaggctccctggacgaagctaccgccccggaatcagggccttcccaattctgccttcggggagggaggatggggg

SEQ ID NO: 63642 - DNA, 122 bp, Homo sapiens
cctcttcgctggcctctccggggccttgctgactagtggtcgaagccacaggaccaggtgcgggtggccagcgtaacccgggcagccccgctgcttcccctcggccgcgccaggacgctcgg

SEQ ID NO: 63643 - DNA, 122 bp, Homo sapiens
gaatacctgcaaaccgagggctcggcgtggtttttaaaggcttggctagcgtgcccccggcggtactaaaagagggctgcttgcgccaatctcattcccacaggatgcaagtacagaagcag

SEQ ID NO: 63644 - DNA, 122 bp, Homo sapiens
agcctgcgctctaacttcttttccaccccaaagattctttttttctacagcctaacctgtcggggcatcatttcctacccgctgttgcgtactgatgctctgctggtcagcttcctagggcc

SEQ ID NO: 63645 - DNA, 122 bp, Homo sapiens
cagccttgccagctcattgttttgctgcaggatctcatcatccttttcctccatgtagcgcgccagccgggccttggcgcgctcaatcttctcctggccttcctgcgcagactgcatgaggt

SEQ ID NO: 63646 - DNA, 122 bp, Homo sapiens
ctgcaagcaggagagctcgggaacctctcctccaagggagggaagccggcgccggctgcgcgtgacagccgagaaggagcttatattggcacgactataggaaaaagtctttaacgaggagg

SEQ ID NO: 63647 - DNA, 122 bp, Homo sapiens
ccacactcacctccttcccctctctctctctttctgtgtctgtctgtccatccttccgtccggctgcagtggatgtacatcattcccgtcgtcctgttcctcatgatgtcaggagcgccaga

SEQ ID NO: 63648 - DNA, 122 bp, Homo sapiens
ggccccatgagatcagagagggtggggagtatctggaggattttgcatccatagtgaggacgaagctgagataagcagagtttaataaacagccgctgtctttactaccactactcatttct

SEQ ID NO: 63649 - DNA, 122 bp, Homo sapiens
gagacaaggaacaagaaaggccactgagaatcctccaccagagctgccagggactggtagcgtagtgggcgccggcggcggcccccggcagccatggccccggccgcaccatccacgcctgg

SEQ ID NO: 63650 - DNA, 122 bp, Homo sapiens
agacaccttctggcccggtgagtgagcagaatcgggttactgggggaccagagctctgcgcgtgccaggctcctcacaatgcccacctctgtggcacccccaatgctggcaccacccccttc

SEQ ID NO: 63651 - DNA, 122 bp, Homo sapiens
ctgctcccggccgccgctttccgccggggcgagacccccaggtaggccccgtgccgcgcgcgtcccgtcgttaaccgccgccatggctcccgcagaggccgagttgcctcccgggagcgcgc

SEQ ID NO: 63652 - DNA, 122 bp, Homo sapiens
cgcggaggagtcggggccggagcccgcacgtgggtctgcgacggccccgccccctgggggcgtcccctcagggactctagccccggctggtgggccctgcaggcccgggcccgaccgcgtcc

SEQ ID NO: 63653 - DNA, 122 bp, Homo sapiens
agagcggccagcgcatgcccagagaggtcgtaaggaggacgaccgcccggagagaaaggacgcacgcttcccgccattttgttcagcttgccgggcaaccggcccctgctggggactacaag

SEQ ID NO: 63654 - DNA, 122 bp, Homo sapiens
attttccaggtgcgtccgtcacccctttctttgactcggaaagggaactccctgacccctcgcgcttcccaagtgaggcaatccctcgccctgcttctgctcgcgcacggtgcgcgcaccca

SEQ ID NO: 63655 - DNA, 122 bp, Homo sapiens
agatggactcggagtggctttctcctcattacttgtctcccaacaggtctattaaatgatcggaatgcccagggttggtacatttaaatttcatttcaaattaaaatcccaacagaagtcac

SEQ ID NO: 63656 - DNA, 122 bp, Homo sapiens
actaaatagtcttcaaaagcacaatcttaatgccgtgaagtattccattgcatggctatgcggattaaattaatttcctactggaggccgtttgtttcccatttttacattacaaataaatc

SEQ ID NO: 63657 - DNA, 122 bp, Homo sapiens
catccttcagtatgaaccgtgtagctctttgggaaagtaatgctctcttgcgttccgaagcgagggacttgtgccttttgaacattgtgtgaactaagaggagggtctgtcatgtcaaaagt

SEQ ID NO: 63658 - DNA, 122 bp, Homo sapiens
cgccccgcccctcccctccagagtctggtcccctttcaacctctacacttccagggagcccgagcctagccacagggagttgaggataagcctgtggtagagcggacacctgttgcttccag

SEQ ID NO: 63659 - DNA, 122 bp, Homo sapiens
ctagcgtcaacacggaggacaaaggtcgactggccttcagccccccaaggaagagaccttcgggtctgaccactctgttcagaagaggatgatatctttccaagcaaggccaggaggcggag

SEQ ID NO: 63660 - DNA, 122 bp, Homo sapiens
ctctctctcctcctttgctcgtgctgtggtatggagagaaggggagtgacgagagaaaaacgaatacaaatctgcaattgattttcataatgtttctgcggtgtttgcaaaccaatcgcctg

SEQ ID NO: 63661 - DNA, 122 bp, Homo sapiens
aaaagttacctaggaggtctgatttttcaaagaaatttgcatacatgcaaatgtgccgcccggcctcctcctcggttctctacgtgcccacgcggtggcccggggggtgcggggcaacctgg

SEQ ID NO: 63662 - DNA, 122 bp, Homo sapiens
gtgatctgcccgcctcagcctcccaaagtgctgggattataggcatgagccaccacaccccgccagctttcacttctaagatggcactttatccatgtaggtcaaaagttagcagataccac

SEQ ID NO: 63663 - DNA, 122 bp, Homo sapiens
tcccctcctgctcacacacacagaagcctgcacaccaatatttaaagtcccactgcaccacgtatatgtttcgtgtaccaagaaaacaacacacacaaacacatatgatggggactgtgcac

SEQ ID NO: 63664 - DNA, 122 bp, Homo sapiens
tgagtcagcgcgctgggggctaagaagctgggtgaatagtcacggaatctcactcacgctcggctcctccacccatcccgtctacagcgcgtgtcccagtccagggcgtgcgtgcgctcggt

SEQ ID NO: 63665 - DNA, 122 bp, Homo sapiens
gccgcagggagatcccccttcacccattgggatggcttctagccaagaaccagaaaataacgagtgttgtgagcgtgtggagaagtcggaacccttgtgcacggtgggtgggaaaaggctgc

SEQ ID NO: 63666 - DNA, 122 bp, Homo sapiens
aaggtgaagctgcgtgaggctcggggagcagctctggtcttctttggggcgtgcctgccgcgggccgcctctggctgtcttggggcagggggaatgtgttcctgtaacctctgtttcatatc

SEQ ID NO: 63667 - DNA, 122 bp, Homo sapiens
aaaaaaaaaaaaacaaaaaaaaacaaaaccaaaaagacgaagaagaagaacaaaagtcaacgtgaaatctccccagaggaaaaggaaccgcgctgtttgtccctcagtaactgagcaacacc

SEQ ID NO: 63668 - DNA, 122 bp, Homo sapiens
ctcccgctggtcacgctgctccttggacgaacgagcatagcgccccttaggggctgggcacggcatgtccaattcttaagtggttgcattcaacaaaccagtttttagtgagtgccctcctc

SEQ ID NO: 63669 - DNA, 122 bp, Homo sapiens
ggttttcaagctccaaacgcccagcttacctgggcatagaagccttcctgccggccctcccgtgggccccagggtctttgcacaggattttccacacacagtacaagtctgggtctcggctg

SEQ ID NO: 63670 - DNA, 122 bp, Homo sapiens
ctcggcagacaccatgaccaaccgccttctccaaaggagccggagcagcctgcctgtggacgacaccaccaagaccatcgccaagcgcctagaagcctactaccgagcgtccatccccgtga

SEQ ID NO: 63671 - DNA, 122 bp, Homo sapiens
cgttggatgagatgttctggggtgggagaggtggcgtcagaccctggtccccactgcactcgtgccgtccgccacctgccaacccctggccactcacctggaaggaaacgcagcccacgggc

SEQ ID NO: 63672 - DNA, 122 bp, Homo sapiens
gccgagagatcgataactaatttcaccgcggtagccgccccagtttttccccgataattgcgcgccggcagctgtgagcgaggcccccagcgcggcgcgaagcccctcccgcgccgatcaat

SEQ ID NO: 63673 - DNA, 122 bp, Homo sapiens
aacaggtccctgcacgcctccagcccagcccgcagcgcggcgcagctcggcgcagctcggcgctgggagctcgctccggacttctcgggattaacctgctattatgtcccggagcccttccc

SEQ ID NO: 63674 - DNA, 122 bp, Homo sapiens
tttctttacactgcttcctaatttcaaccaacagccctttagactagcggctcctctcctcggttctctagctgcggtgcagacaggtggtttcccaactaacaggggttcaggaaggctga

SEQ ID NO: 63675 - DNA, 122 bp, Homo sapiens
cgccggggcctctggggccaacggaagctccaggagcgcggtggagcctggagtggagggcgagggtcccaccgtgacccgcctggagggcagcccagctctgggacgcgaaaccgcctacg

SEQ ID NO: 63676 - DNA, 122 bp, Homo sapiens
tcaccgcgagggtccgcggcttcattcttgaagtcagtgagaccaagaacccaccaattccggacacagaatttcatggagcctggagcccaggtaagtagtgaaagccgtctagagatgga

SEQ ID NO: 63677 - DNA, 122 bp, Homo sapiens
aagctgttcgaggacatcctgaccaagatggacttcattcacatggcccagttcctgacccggctgcccgaggacctgcccgccgaggagctgtttgcctccatcgccacgatccagatgca

SEQ ID NO: 63678 - DNA, 122 bp, Homo sapiens
atacatccgaaggaaatgaaaccggtatgtcaaaggggacactggcacgcccatgtttatcgctgccctattcacaatagccaggacgtggaatcggcctaagtgtccccccaaagtcggat

SEQ ID NO: 63679 - DNA, 122 bp, Homo sapiens
gcccccgcaggcagcgcgcgaacgtgggcgtggggatggccaccagtttccggacagcttcgtgctgggtaagtagagactttccgtgtttaaaattcgactggatactgagggtggccacg

SEQ ID NO: 63680 - DNA, 122 bp, Homo sapiens
gctaaaagaatatataaatgcctgtattgactcactaatgaattacccaattaaaacgtccgggcaatgctgggcgctggaaagattgttaaatcaagacatattacaggagggatatgaag

SEQ ID NO: 63681 - DNA, 122 bp, Homo sapiens
aaccgtccggccgcggcgctggcttaagccatggctgagggtagctggattcctcaggcccgggcgctcctacagcagtgcctgcacgcccggctgcaaattcgcccagccaatggggacgt

SEQ ID NO: 63682 - DNA, 122 bp, Homo sapiens
gcaccgaagagcagcagcactatgatcatgtgggaggagcaggtggccaaggccttcctgcggccggcggcagaattcatcctgtggatgagatgcaggatgagggtgtatgagctggagat

SEQ ID NO: 63683 - DNA, 122 bp, Homo sapiens
tttttaaataaaatgtttaaatcaatggttcagatgtgaattgcaaaggtagccaggtagcgaagctgccacattcacagagaggagctcagctgctttccgcattattattacaaacctaa

SEQ ID NO: 63684 - DNA, 122 bp, Homo sapiens
tcgccgccaccgccgccggggtggggcctgggcctggggccgcgagtctcgttggggcggcgctcaccaagtccactgctgggcctggaccagggggtgtgctgtcgggtactggggggtgc

SEQ ID NO: 63685 - DNA, 122 bp, Homo sapiens
cgtcctcgccccttctctagccccactcctaatctggcgccgggcgggcccggcgacccacgtcccgccgcgggaaattgtgcaagcctttcctgtcctcgatcccgcccctctcctaagcc

SEQ ID NO: 63686 - DNA, 122 bp, Homo sapiens
agcccacacacaggctgcagcagtgtgtagctaggctggactgagctcccattcagggcacggacctatccctgatcaaaccccatgcagcgcacagccccccgtcacctctgtgggtcaca

SEQ ID NO: 63687 - DNA, 122 bp, Homo sapiens
atgaggatttcgtttcttaacctttctcactgctcaaaatgcaaactcagacatgagtgccgggcgctatccgtcctgctcacgtcttgttctcagggccgcaaggcgcaggggcagtaagg

SEQ ID NO: 63688 - DNA, 122 bp, Homo sapiens
gccccagcattggtgcaccaggtggcccccgaagtgcctccggttgtgaggagagtgggacgtgaagggccacaaccacagggaggccaggacccagggagaggccctgctcacctgtacaa

SEQ ID NO: 63689 - DNA, 122 bp, Homo sapiens
gtaaagcagtggttctcagtctggctgtgcattaaaatcgcctggggaagttttaaaaatcgccatgcccaagccaactaaatccaactccaggggagggtccaggcaagtgtgttttctga

SEQ ID NO: 63690 - DNA, 122 bp, Homo sapiens
gccagggctgcaacttgagttcctgggcccctctgcaaatacatctccaaataagaagaccgacggcctttttggcatgtaatgaaatacagagccattctgaagatgggctccttggccac

SEQ ID NO: 63691 - DNA, 122 bp, Homo sapiens
gtgcttccccaagctttcttgggacttagactggatccaggtccagctttctttagggaacgcggagggggagagtggggaggaggaagaaaattagcttcaagaaaggggatatggctcca

SEQ ID NO: 63692 - DNA, 122 bp, Homo sapiens
tggtcacagggcgggatctacgaaggatgcaggggcgaggccgggtctctgcaggatgtgcggtcgcgggtcggagtctataaaggcaaggggcggggtccctgggttgggtgaggggtgtg

SEQ ID NO: 63693 - DNA, 122 bp, Homo sapiens
gtgagctcagaagacaggtttcccacgtgtctaggtcttagaaggaggcacgagtgtgctcgggaaaaagcagctaagaggaatcagggaaaagagatggagccatgaaaatgaccctcaga

SEQ ID NO: 63694 - DNA, 122 bp, Homo sapiens
agccctgcatgttcacacccaccacaaaagactagcctgtgaaaacacaagaaatgtcatcgtcttcatgataactaggtcaatacacaccattatcaaggttacattcatgaaagcctttt

SEQ ID NO: 63695 - DNA, 122 bp, Homo sapiens
aaggcctctgccctgaactcacattttgaatggcaaaatacaatggaactgtctgcctaacgagctcatctggaactcccatgcctccataaggcggtggttggttggcccctttcacgact

SEQ ID NO: 63696 - DNA, 122 bp, Homo sapiens
cgccctcctgggtccgcccacaacagcaggaatgcccaatccgaatacgggaccccgccacgggcggtcagtcaactacatcacggccgtagattggctgatatcgagtctgtaggcgtgtc

SEQ ID NO: 63697 - DNA, 122 bp, Homo sapiens
gcttgagactgcccggccccgggagcagggcccacctgggtgaggggggcaggacagccacgcaggcagatgtctgccccatggccgggtcacagagacaggtgcatgagcagctgggtcct

SEQ ID NO: 63698 - DNA, 122 bp, Homo sapiens
gctgtgggaactcctgggggaggtggaggtggagccgtaccaggtatttcagccatgtcccgcggagatctgagccagagagccaaggatttgagtaaacggagcttctcaagtcagcggcc

SEQ ID NO: 63699 - DNA, 122 bp, Homo sapiens
tgagccaccgcgcctagcccattttatcttttctgataatgattttccttttgccaaaaacggcaagtgggttttagattaagtcactccttttaccaggcacagtaggagaccttgagtta

SEQ ID NO: 63700 - DNA, 122 bp, Homo sapiens
gaggtcccgggggtcacctctgaagtcctggggtcagggctgtaacatccgagtgcagggcgggggtcccagttcagcccgggacgtgaggttcttctgcgtcttctacacacccaaccacg

SEQ ID NO: 63701 - DNA, 122 bp, Homo sapiens
cctcttcctcccccccttcctcctccggcccggcccagaccggttccaacctgctggggccggtcccaactgcctccaactgccaccaacctctggtcgggctgtggggcgggaaactcggt

SEQ ID NO: 63702 - DNA, 122 bp, Homo sapiens
cctagggtgccctccctgccccgcccacctgcgtcccgcgggctcagcggtgttacgccgcgcccgccttaatatgattggtttttgttcctgtcactctaggatccaagcccgccattggt

SEQ ID NO: 63703 - DNA, 122 bp, Homo sapiens
gctctgggtgagtctctgcccttctgggctgggcgactgagatgggggactgctcttctccgagtgagctggctgagtgtgaccgtgagtcacgcccctgcttccctggagcctgtcccttg

SEQ ID NO: 63704 - DNA, 122 bp, Homo sapiens
tccagtaggattagcgttcttatgagaagtgacaccacaaagaaacaagcttactagtcacggtcccagccagtgttcaaatcccaaacacctgctctctgagccctgactattgctttgct

SEQ ID NO: 63705 - DNA, 122 bp, Homo sapiens
gcacgtcctgcgggccccggacaatggcccggcagacctctctgcgagagggccgtcgcccgggcaacggtggcatgtgcagccccgacccattcacggcccctcccgcagcccctttcttc

SEQ ID NO: 63706 - DNA, 122 bp, Homo sapiens
gagatctgggctacgccgggcgcccggagccctagtccagcccccggccatcgcggccgccgcccagccaggtgcaaaatgccgtgtcattgggagactccgcagccggagcattagattac

SEQ ID NO: 63707 - DNA, 122 bp, Homo sapiens
tgatatcccctcgttttggggatgactggtccctgtggagccgatgccctcgtgcaggcccgccccgagtccgaatccctccccgcgctgcctagcccgtcctcacctgctctcgtagccac

SEQ ID NO: 63708 - DNA, 122 bp, Homo sapiens
gcgtgcgcccgatcatctgactgctggggagtgcgggggcgcgggagccaggcgagccagcgcaggcgcgcgctgcctcctccgtccccaccgagtccccagcgcgtgcgcggggccgtggc

SEQ ID NO: 63709 - DNA, 122 bp, Homo sapiens
atctgataaaacgctagatttgaagcctttgtaaaaaggaacatcctctcccatcctgggcgtgctgccgggtatcgcagacggcccacgcccacactgcagaggccggcaccgagcccccg

SEQ ID NO: 63710 - DNA, 122 bp, Homo sapiens
cagttcttccccctcttgcgggcgggcgacagggctctcgggggcgtgggtctgtttccacggcctgcgtgccaagcttccatgggactcctcgtgcctgtcctcggagtcccggcgccgct

SEQ ID NO: 63711 - DNA, 122 bp, Homo sapiens
agtctcccccgaggcttgtttttgttcttattgatgctgttggctaataggtgccaaacccgatcttgttctagtgttgctgtccaaggaataagagcacacactgtggagtcagatctcag

SEQ ID NO: 63712 - DNA, 122 bp, Homo sapiens
ctcgccctctccaggggaggtgagggactcaagaatcgcgccctgcttctgtccccaccgcgccgtccccaagcccacgcagtgaaaagaccacccttgaggctgattccgggtccagctgg

SEQ ID NO: 63713 - DNA, 122 bp, Homo sapiens
acctctgctggctgcttcacctggagtctgagtccgactcatgtagcacttcactgtccgcgttagtttagccttcactgtcagcaactcgtcaccttgtcctcttgcagcgaaggtttgga

SEQ ID NO: 63714 - DNA, 122 bp, Homo sapiens
tttttcttcaatatctacacaataaaccaatcacaatgaaccaccaggcagagggcatggcgttgagctggtttgctcctattcttgggtatggtcctccagggcttcccatctgagcctca

SEQ ID NO: 63715 - DNA, 122 bp, Homo sapiens
gcatggaatatgctattgtgtaacttgaaaagggaatcttgaaaaggcaacaactacctccgtgaggtttaattttatgtgtcaccataggtaggttatggtggccagtcgtttggtcaaac

SEQ ID NO: 63716 - DNA, 122 bp, Homo sapiens
gaatctaagatcctttcctccacagtgttaaaatccatagccctctcaattactcttccacgctttgaggaaaaggaagacagggaggagagatctccaatggaaatttccttgttaataac

SEQ ID NO: 63717 - DNA, 122 bp, Homo sapiens
agaccacagaagatggcattgttaccttccaaattgggagttaaagtccacttggggtagcgcaagggagagaggaggggccgaaagagcctgggagggtggccctggccctgaatctggac

SEQ ID NO: 63718 - DNA, 122 bp, Homo sapiens
ctcgacacggaaaccccacccgggtctgcagccctcagacctcgacacggaaaccccacccgggtctagcagccctcagacctcgacacagaaaccccacccgggtctgcagccctcagacc

SEQ ID NO: 63719 - DNA, 122 bp, Homo sapiens
ctagcaccgcagcaggtggaggcaggactacgactgggactgctctttacccctgcctggcgtgcagaggggatccttgcaaagctgttatttgaactaaagtcaggaaaggtgtccctggg

SEQ ID NO: 63720 - DNA, 122 bp, Homo sapiens
ggcactgttcagcattgtcgcagggagagcacaggttgagcccatccctgggagagggtgcgtcgtgatggaaacatttgctcctgagcaggtaaccggtccacttgcagaaaccggtggac

SEQ ID NO: 63721 - DNA, 122 bp, Homo sapiens
agaactgttgccctgcaccgcttcattttgtgcagcctgaaaggggcaatcacataaggtcggttttgtaatatacaggtaacatacaggtaatgtaccctccacagggggtgctgccttag

SEQ ID NO: 63722 - DNA, 122 bp, Homo sapiens
gacagacgaggagatcctgtccaagtaccagctgggcatgctgcacttcagcactcagtacgacctgctgcacaaccacctcaccgtgcgcgtgatcgaggccagggacctgccacctccca

SEQ ID NO: 63723 - DNA, 122 bp, Homo sapiens
tgaaagacaaaggtcacaattagatgagactagaacatgaaggcaacttctttgctactacgccaagtgtcttagattacatgagtattgaggtaaatttctatttcagggaaatggcttgt

SEQ ID NO: 63724 - DNA, 122 bp, Homo sapiens
tacttaagcccttaaattgcaacaacaaaggcttggtttctcttttcaaccaaaacagcacggctgcctgattcaaatgctaatagccggggcctgaattggtcactaaatgagagagacac

SEQ ID NO: 63725 - DNA, 122 bp, Homo sapiens
cccagaccacgggttacagaggggtctgtccatggcgggcgcagggcgctttctttgcgtcggagggtgtctggagggaaggagaagcctctggagggagggagaagcctccggaggtcgcc

SEQ ID NO: 63726 - DNA, 122 bp, Homo sapiens
caagccccccatcccccctatctagtgctaggactttctggctccagaggtcaccgcggccgggcggaggctgccaaagcaaaccagccccgtgacttgtaggaagccagcgggggaggggc

SEQ ID NO: 63727 - DNA, 122 bp, Homo sapiens
ctgcctttgcgcagcagccggcgggcggccacgtcgcggcctggctggggtaggagagggcggtccccagtgcagttgggtgaactaccgttgcacactggagtttctggtgtctttgcttg

SEQ ID NO: 63728 - DNA, 122 bp, Homo sapiens
tgcccagcagtgggggcttggggacccccactgctaccctttcctaagcgggagccctggcgctgcccttcccgggctgcctggggccctcttcgctcccccctccgaggaccccgcccagc

SEQ ID NO: 63729 - DNA, 122 bp, Homo sapiens
catctaggcgataaatgagggcatcgcccactcctgccctacgtgtacctgagtatttcacgtgcggagcacagagtctaaaggacccgcaccacctacattagaaataagaaacgtaggcc

SEQ ID NO: 63730 - DNA, 122 bp, Homo sapiens
ccaagcgcgcccccacctctcctgtggtactggggtccctaaagccgacccccgctccggcggggctcgccggcccccaagtcgccagccgcttacctcacaatcccgcttggactgcatgg

SEQ ID NO: 63731 - DNA, 122 bp, Homo sapiens
catgcactgcatagaggtcaatgatgaatggtaaaaggtctgagtcctcagatcccctcccggcatcccagttatccccagctgcctctcctccatcgcacttcagaagtgctgcgatgggc

SEQ ID NO: 63732 - DNA, 122 bp, Homo sapiens
tgggcgctgagtgtttgggtgctgagtgtttaggtgctgagtgggcgctgtgtgtttgggcgctgagtgtttaggcactgagtgggcactatgtgggcattgagtttttgggcgctgtgtgt

SEQ ID NO: 63733 - DNA, 122 bp, Homo sapiens
atttcagccgggaacattggccccgagtgcatctgcttagatctttaagaagaattaatccgtggaaagcggtgccatcaaccgacactcgtcctcccgcccttccctgcccagtcctcgcc

SEQ ID NO: 63734 - DNA, 122 bp, Homo sapiens
accccggaagaggcggcgcggagggacagtggaggcgggggcggggcccagcaggggcggcgcagcctcagccacagagccggggtgtcccgggcgcacgcgggggtcactccctaggcgtc

SEQ ID NO: 63735 - DNA, 122 bp, Homo sapiens
gggctcacgaagccagctccaaaatccaggtctcctggtttccattcgaggcttgcccaccgatccaggccatttgctggagacctcaggtcggcaggaagccctcactggccacccaagcg

SEQ ID NO: 63736 - DNA, 122 bp, Homo sapiens
tggtttgatatgtccaagtggaggcatgaagttggtgcccggggagaggttcaggctggccgagaaatggctcaaatgaacacgaatgctctcatttatactttatggtaactctgtgggtg

SEQ ID NO: 63737 - DNA, 122 bp, Homo sapiens
gccctgttgtgtgtttttcccaaacttaagctgatatgttcttggccactcattaaccagcgagttttctgatcccagggccttgcctaagggatccatcccaggaccccccaggacccccc

SEQ ID NO: 63738 - DNA, 122 bp, Homo sapiens
ggtgtggggcattagttggggaggggcttgctaggaggaggtgacttcagaaggcatctgcggactgtggtctgggactctgctggatgtggcatggctttgccaccctcaactctggtgtg

SEQ ID NO: 63739 - DNA, 122 bp, Homo sapiens
gcgcctgccgactggcaccggcggctagctccgcacgaatgggaaatcccgggctccgctcgccaacctgttactgctgcagaacgccaggaagctcagcctgatcccacagattagggtaa

SEQ ID NO: 63740 - DNA, 122 bp, Homo sapiens
ttaaattctttgtattgagtagaaatgtattcccgccaggcttttagcctttgattccatcgtttgttccccaggagaataaatctaaatcctctcttccaggaagagacaacaatccttca

SEQ ID NO: 63741 - DNA, 122 bp, Homo sapiens
gagctatggagccagatgaaagacctctgcaacagcctgaacggaaccaggagggctccccgctctgcaatgggtcttgaagaacgaggcattttctaggaagatcaatgaagaaagatgtt

SEQ ID NO: 63742 - DNA, 122 bp, Homo sapiens
aattaattaatacccgtttgtgaatgaccactagataatggtgaggttggaactaagcatcggaaagctgtaaaaaaggcactaaacaggcattcactacaaggatatgtaggagatgggtg

SEQ ID NO: 63743 - DNA, 122 bp, Homo sapiens
gttttaggtaactgtggaaatgttcctcattatttattatatgtgctataaaggaattgacgaagtgttaacaaattttaaagggcatataaaaaacatattatgtacttttcatttattca

SEQ ID NO: 63744 - DNA, 122 bp, Homo sapiens
gttcttaatcttattcgttccctctttgtttatcacaaagctttgttggacaaaaaaaagcgagcaccaggtacggatggggatgtctctataaccaggctgctagaccctgtttgaacctg

SEQ ID NO: 63745 - DNA, 122 bp, Homo sapiens
cgctcctcggtcttggtgctgggggccggccaggagagctgctcgccagccttgagcttgcggatgtactcctcatacttagagaaccgcgcccgcttgctgagggtatcctcggaggtggg

SEQ ID NO: 63746 - DNA, 122 bp, Homo sapiens
gatattcaaaccgaaaccctttaaatacatgatattcacactgaaagatacagtcttgtacgtgcaggagagaaggcgagcgagggcatggcaggcagggcgtgtctgtgccaccaccaaca

SEQ ID NO: 63747 - DNA, 122 bp, Homo sapiens
cacagcatgcacacacaggctccctacccaaagacagctgtggccttctctccacctggccgctggttgttggggctgaggggtcccatgaaatttgttctggtttctatgatgtaaacaag

SEQ ID NO: 63748 - DNA, 122 bp, Homo sapiens
tgcctacctggtgggtgaaaactaaatgattcattccttacaggccgcacagtgccgagtcgcccatttctcagactgtttgaaattcaccatcccagcgcctttttctcaaatgatggtgg

SEQ ID NO: 63749 - DNA, 122 bp, Homo sapiens
cattgaaagtgtagtataagcgattgagcattgtcttaacatttgtaacttgtcattccacggctgtaatttgataaaaagttatgcatgaaacagttgtccgtatattaaatgcatgtaaa

SEQ ID NO: 63750 - DNA, 122 bp, Homo sapiens
ttacttacagaagaatagaaaagtcgaaacacaatagttcagaatagaacttttagtatgcgctggccacccacctagaaacactcaaagcccaacaagggtctaaataaatgttttaccag

SEQ ID NO: 63751 - DNA, 122 bp, Homo sapiens
ccacacacccttaaggtttttcacagcactctgacggtattatgtgtgttttgcaaatgacgaatcaacagtatgctgaataatcagcaatgaaacacaggagataaattaaatgtgttttt

SEQ ID NO: 63752 - DNA, 122 bp, Homo sapiens
cctttgggagtgggtaggagaatgccaaagaacaagaaattattaaagaaaactatggaacgtatctcagagaataaatattgatcaccactggagcacacagaaagactcttaatccaaac

SEQ ID NO: 63753 - DNA, 122 bp, Homo sapiens
gtgttgctgtgaagttattttgcacgttaattaaactcccgaggcagttgattttaataacgcatatcatcctggaaaataatggttgactcaacttaatcagttgaaaggacttaaaagta

SEQ ID NO: 63754 - DNA, 122 bp, Homo sapiens
aggctcagagcctgcgcagagcctgcccccggctccccagtgccctcaggcctgtgttcacgctcctctcgactgctccgagcccgggcggacctcggccacatccgtcctgccccgccctt

SEQ ID NO: 63755 - DNA, 122 bp, Homo sapiens
cccttctttcatacctcactgagtttggctggaggaataagctgatggaatgaatgaggccgcttggggtacccatgtgattggaggaggtaggatacttgatgtcagctcaagtaggcagt

SEQ ID NO: 63756 - DNA, 122 bp, Homo sapiens
gcagaggaaactgaggctaaggtctcttgggtcccaaaccaggtcctaagtagccaagtccgcctggtggcacagcccgggttttatacatggggaaattgggcggcgcatctggcggaggt

SEQ ID NO: 63757 - DNA, 122 bp, Homo sapiens
agatgcttccaaaaggtctgtcatcctccagttgaagtctgtgtgcctaccaagaatggccggaggactcgctgcttgacgggagggatgctccagcttggtctccagggacaactgtacct

SEQ ID NO: 63758 - DNA, 122 bp, Homo sapiens
tgagacattctacctcctctgtcttctttcctccagctgtgtagtagccagtagcacattcgtattgtactttgtccttcactttgaatgttttctgtgttgtggaataatttccattatat

SEQ ID NO: 63759 - DNA, 122 bp, Homo sapiens
cgtcggagcccacggcagaaaactggacagatgggtggacccccatgccggggtatcgcccgttcatctgtcagtctgcgcccaggtgggaattagcatcctcctcagatcctcccactctt

SEQ ID NO: 63760 - DNA, 122 bp, Homo sapiens
gagagcggcgcactgactcaaggcaagggctgcagctgcaagtggtgcgccctgcccagccggggattttcaggagggtcccgcctcagacggggcggacccggggcggggcaagggccaag

SEQ ID NO: 63761 - DNA, 122 bp, Homo sapiens
ttgcttctgttacatctatcttagattacctgctgcagaatgaggcatatattggctgctcgacggaagtgtgactttcttctctttcattatataaagacttgaaattgccccagtaatgg

SEQ ID NO: 63762 - DNA, 122 bp, Homo sapiens
gtttctggctctaagctgttttcccagggcttggctccggcgcttgcacagagataaacacggccattggcctggtgcacaatcccagcttgcctgcatccggcctcttccatcctgagtct

SEQ ID NO: 63763 - DNA, 122 bp, Homo sapiens
gggattcctggaattgttcctaaatagctgggtcttatttcctgacaatgccgcctgccccgaggcttgatgtaactctgcacagcttctgcagtttggagaggcagggaaatgccattttg

SEQ ID NO: 63764 - DNA, 122 bp, Homo sapiens
gttcctgaactcctggcctccaaaagtgctgggagagttcagacatgagtcatcacatggcgttcatttcttttttatggctgaataatattccactgaatggatctaccattgtttgctta

SEQ ID NO: 63765 - DNA, 122 bp, Homo sapiens
ggtaaaaccactttcttgttttaactggagatgaagctaccagttgcagatgagaggcgacgggggcattatttggcaacctggaattcacttcctgtaatcctacaccgcgacagcgccta

SEQ ID NO: 63766 - DNA, 122 bp, Homo sapiens
gcgtgcagaatcagaattgtttacaacctcataaatgtgtcaatcacacacaactccaggcgtatgctgagccgcacagtcccacgtggactcacaatgacaaagtcatgtgcaccctccgg

SEQ ID NO: 63767 - DNA, 122 bp, Homo sapiens
cctgccaggggcggctttgcaggattcttccagccgcgggggacggggacggggacggggcggggtcccaggcccatgccatccacctgccaagccgccgggtcccgggaggcgtttcccct

SEQ ID NO: 63768 - DNA, 122 bp, Homo sapiens
ccatcccaaatgtggggcacagaaccattccgacattctcctggccgcaccctcggggcacggtcaggcagcttccatcagtaggagagggttctgacccggattccaccccaggcaggggc

SEQ ID NO: 63769 - DNA, 122 bp, Homo sapiens
cccagccctaaccagagttaccagggcagcagcggctacaacttccggcccacagatgcccgctgcctgcccaggtcagtgctcctctgcccctcccccacaaaatatgctcccaattattc

SEQ ID NO: 63770 - DNA, 122 bp, Homo sapiens
gagccgggacctgaaagggaaactgccctccacgttcacgccttaccctgttcctcccagcgcagaatcccatgtgacttgtccagggactcccagacagaaagaagccgtgtgtgtatgtg

SEQ ID NO: 63771 - DNA, 122 bp, Homo sapiens
gggtggccacagccctcctggtgttgctgtctcccgaaaccatttcctcagctagccggccgcccaagccaggcctctacagcatcttgggcagagctgaggtggccctggagctggggcca

SEQ ID NO: 63772 - DNA, 122 bp, Homo sapiens
tcttcttgcaatgcttctctgacttagcttagtactggattgcaagcacagtggaacactcggggtagaagacacagaatctattttttttttttttttgagacagagtctcactctgtcac

SEQ ID NO: 63773 - DNA, 122 bp, Homo sapiens
ggttacggaagaggaagagacattacgagagttaaggacagtggctacgtctacctcagccggatggttcttagaaatggagactctgaggcctaaccccaggtctaaaaaaacagattctg

SEQ ID NO: 63774 - DNA, 122 bp, Homo sapiens
ctgaggttagagcccagccctggggtgccagccctggggtgccaggtgttcaggcacccgcgccccacgccctctggctgcgcctgcgcactgggcctcaccgcgctccttgcgttcgggga

SEQ ID NO: 63775 - DNA, 122 bp, Homo sapiens
agcctgaccacagagtgacacacgggggctacagcacacgctgctactccagcaaaataacgggcacaaatgacagctttgacacgacagtaacctcatggctttaagatgactctgaccac

SEQ ID NO: 63776 - DNA, 122 bp, Homo sapiens
gtgatctgcctgcctcagccttcccaaagtgctgggattacaggcgtgagccactgcacccggcctttttttggatttttagtagtgatgaggtttcaccatattggccaggctggtcttga

SEQ ID NO: 63777 - DNA, 122 bp, Homo sapiens
aagtgaagcagcagcagtgctcaaggcctgctggggtgtcttctgctaggatgcacacaccggaagaaatctaataagtcgggagtcatttgcacacatactacacagtattcacagtaagc

SEQ ID NO: 63778 - DNA, 122 bp, Homo sapiens
agcacccggccccaggacagcacggggccctgtcggaaaagccttccacccggggccaggcgtggtggggccatgctcactctaacggtgacaatgttgggatgctgggccttgaggatggt

SEQ ID NO: 63779 - DNA, 122 bp, Homo sapiens
ggtcggcgagggtgcctgcgcgcggctgggcctggggatgcaggttccagcctgcttgcgcgtctcacctgatttaggagcttccagaggccccagacagtgcctgtctttgcctgaccgcg

SEQ ID NO: 63780 - DNA, 122 bp, Homo sapiens
acactacaatctggtcattatccccctaccccaattcacctagccccgggatccgttttgcgtctgcacttcaggccgcctggttgtcgctgctgcagctctcatacctcggtgcggggcgc

SEQ ID NO: 63781 - DNA, 122 bp, Homo sapiens
tgggggtggagggggcatttcatggcggcagacgctcagtctgggaagatggaagagttccggagatggtgacacgacaatgggaaggtcctcatcacccctgagccaaacatgacacgacg

SEQ ID NO: 63782 - DNA, 122 bp, Homo sapiens
tgcgattggctgagaggctctgacgtccgtgtttccatgacgtgttggtgcaggagggagcggcgggggaggagggggtggccaggcgcgcggggaggtgactccgtcagtcacagctgctg

SEQ ID NO: 63783 - DNA, 122 bp, Homo sapiens
ttgaaaggaacacaaatgccatcaagattttgatatggatggccacatgtgtctaagccccggaaaaccatcctgagagatcaagaccatcttggccaggatggtcttgaactcctgacctc

SEQ ID NO: 63784 - DNA, 122 bp, Homo sapiens
acggagccgcaaaaggtgcatgggactcagttcccacctccaccctggctccatcaatggcgtctggttgaccagaggggtaaaattgattatctcaaggtcagaagcaccgccctgttttg

SEQ ID NO: 63785 - DNA, 122 bp, Homo sapiens
tttagcctttgcagaatttctcaagggtaacatcagcataatgacctctgtctgtaagcccgtgagtgtaagcctgtaaagtgctgtgctcatgcgagggatcaggtctgacctgggaaact

SEQ ID NO: 63786 - DNA, 122 bp, Homo sapiens
gagagaaagagagggaggcaaatggtgttttaaatgaaacgtgggaggggttcacttggtcgaagcaggagctgatgaggattccagatgccttctcttggccagatgtggagggcggggga

SEQ ID NO: 63787 - DNA, 122 bp, Homo sapiens
agtcaggagtgtatgtgaactgcgccgctcccctcctctggcccgaggacctgctccacgcggcagggctgttgcagcgcaccagcatctcccaaaaacgcggctctcgagcccttggaggc

SEQ ID NO: 63788 - DNA, 122 bp, Homo sapiens
agagcttcattgagacaaccgtctccttttagaggaaatggagcttgggagtggttaatacgtcacacatttaggttaaagtaaagctgacactagccccacagaaactttaatttgtgtag

SEQ ID NO: 63789 - DNA, 122 bp, Homo sapiens
cccaggcacccaccccttccctaggcgggcgggaggacgggcagttggtggttctcaccccgcctgccccggctcttcctgtagctctgagtcaagcggctccttcctctggagcccgcccc

SEQ ID NO: 63790 - DNA, 122 bp, Homo sapiens
cggggccgggcggggagggcggtgagggccggcgctcggggccgcgtttcattggctttccggccggaagctgcggcgcgacccggctgcgcatgcgcctctcacacgtgctgtcagaacgc

SEQ ID NO: 63791 - DNA, 122 bp, Homo sapiens
gtcagcggggtggtctcctgggtccccagcctcgccattctgtggggggtggtgactgggcgaactctcagatgcctcagcaccctcccaccccttcctcaggcagaacgagatcttgtggc

SEQ ID NO: 63792 - DNA, 122 bp, Homo sapiens
ggcctagatagtccgtgaacacgctgagtggccgaggttgtaaccagcgccttcctggcacgttgcagaaaacaacctctctaatatctctcaaaatcaaacctacaggtccagtgagccag

SEQ ID NO: 63793 - DNA, 122 bp, Homo sapiens
atccgaacctgggcagggcaaggagatcaggacccaaaccgggccccagggggaggaagacgcgagaaggccctcaccccaggccccaaggcctgaatcccaccagagtgtaacctttagac

SEQ ID NO: 63794 - DNA, 122 bp, Homo sapiens
cgcggagcgccggacagctcctgggaggcagaactcaggaccctacacgcgcggagaggacgcggggacagccgggctttgttttgtctcttgcctctgccgggagggcggagaagcctcgg

SEQ ID NO: 63795 - DNA, 122 bp, Homo sapiens
ccccttcctctaattctcatggaggacctgaagttctaggacttgagggcccccactctacgacccgcccccgcgcggggccgccctgactcctcgcaagtttccttcgcgtgcgaacgcct

SEQ ID NO: 63796 - DNA, 122 bp, Homo sapiens
gtcctggggacccgggttctcattctcctctctggagctggtgaggctgtccttgctagtcggtgacaactacagggccaaagggagggtgtgtcccaggaggcccagcccacctctgcctg

SEQ ID NO: 63797 - DNA, 122 bp, Homo sapiens
cacatcctgaaaatgggtatctcctgaggtgtaaacctcagtcctctgattctctcactacgtttctctgtcttggagtgcttctctatcctgatggcttcactattaccagttcactgttg

SEQ ID NO: 63798 - DNA, 122 bp, Homo sapiens
ggcagcgagttcgggagcccggggctcctcacctacgtcctggaggagctcgaaagaggtcgggctggcctgggggcccgcgggagcccgggaggcgggcccgttcgcgcgtctgggcccgg

SEQ ID NO: 63799 - DNA, 122 bp, Homo sapiens
agacaacagatctctgaagtgttcaaacacaaatcttcacagaaatgtgtggaggtgagtcggtgttagtctgattttctcaccactgtgttcaaccactctggtggcatctttcaatgtgg

SEQ ID NO: 63800 - DNA, 122 bp, Homo sapiens
tggacggatgcgtgccattgagccacatgggggcggccgtgttgcagcgcaggactggcacgcaggtctcggccatgcgcgcaccgccctggcccacgaagcggtaccagccgcgcaggtcc

SEQ ID NO: 63801 - DNA, 122 bp, Homo sapiens
tcagaagccattaactccggtgacactacatttcagcgaaaccttcgcgacccaacccctcgctccctctcgcccaaacgctgggtcaaccccacgaactggcggtggcaaggccctgggca

SEQ ID NO: 63802 - DNA, 122 bp, Homo sapiens
gagcgccggccccaggctgcggggtctgccgggcaatgtggtttgccagacgttagcgtccgggaaggaagagtttttcgccaataggctttcggcattaggttctcccgccgagcaccctt

SEQ ID NO: 63803 - DNA, 122 bp, Homo sapiens
ccatcatcagcagctcgtctccacggcccaaccacaccaccgcggggagcagccttctcccgggacctcgcctctaaatggaaaaccaaacagcccgctctcagatcctcgttccttagcaa

SEQ ID NO: 63804 - DNA, 122 bp, Homo sapiens
gcgtaaatgacaagcatctgggaccctccccttccctgatccctgccaccaccactcaatcggccagataatcaattgtttctgaggtcactttcacataatcttggcaactttagttgttg

SEQ ID NO: 63805 - DNA, 122 bp, Homo sapiens
gaggggggcgctggggcgcagtgacgggaaccaatgagctgccaactcgcgcgtctccggcgtgactgccgagattgacgtggaggacacgtcaaattgattcccgcacgctgcagcctccc

SEQ ID NO: 63806 - DNA, 122 bp, Homo sapiens
caagtgcagtgacccaaagtcccaagcacattgtgctggtgctgcctgcagtaggaactgcgtaagaagtcactgttgatgttgcttacagaactactgaaggcttggattttatttttatt

SEQ ID NO: 63807 - DNA, 122 bp, Homo sapiens
gaggggcagggccggccggggctggagcgcaggatctgcctccctgtgattggctggcggcggcggcccgggttaaccctctgtgtgccgcggcgcgctgtgctcggctctgtccaggactg

SEQ ID NO: 63808 - DNA, 122 bp, Homo sapiens
tctttggctgcgagacgccggatgacaagacacaggccaaactcaccgtggagagtgagccgcgggcgggaagggcggggcatcgaggaggagtgaggagggaggcggggcattgaggatta

SEQ ID NO: 63809 - DNA, 122 bp, Homo sapiens
ccacccaagagggcctccctctctccccaacctcggttcagtaaacccagggaccccatgcgtacctccagaagtgcagctgtgttctccaagcccagtgactgacagctccccctaatgcc

SEQ ID NO: 63810 - DNA, 122 bp, Homo sapiens
aatttttaaagagaaatgaaaatcttctgcaattcaagttatgtaaaaaggctacaagcacgtaactattttatttttaaaaaataatctctccatctgaagttttgacctcagtaaacaaa

SEQ ID NO: 63811 - DNA, 122 bp, Homo sapiens
tactgaaatacgaagcttcctgtggttgacagtggaaaaattgaggactgagcagttcctcggctgaaaaatgtctgaatgtcaacaggtgcagaagtctcttaataaagggaatcccaccc

SEQ ID NO: 63812 - DNA, 122 bp, Homo sapiens
ggcccccgcccggctccccgggctcaggcgcctgctctttcctttctgtccccctgtccacgatattttgttttaatcactgaagagaaaaataaaagtcagactgcggacggcatggccgg

SEQ ID NO: 63813 - DNA, 122 bp, Homo sapiens
cagtgaaatgtgctagaggctgggatgcagacaccaacatcgcgaaggttcacttcctatcgtggccgaaacgagggatcacaaacccgaaacagacgtcaccgggctaacgtcaagctgtc

SEQ ID NO: 63814 - DNA, 122 bp, Homo sapiens
gcccgtcacccccggcggccacagaaacgggtacccagtgtaagtcagggctaaaggaagcgggaattgactttcttaagctttgttttgattacagtgtaagatgtatgtatttttaaaat

SEQ ID NO: 63815 - DNA, 122 bp, Homo sapiens
gcagaggagccccggccgggaagtgtggatgcgtcttacccgaggccgggccgcctcgcccgctctagtccagcggagcccgagcgcctcggaccaatccccagtgattatgcaagacagcg

SEQ ID NO: 63816 - DNA, 122 bp, Homo sapiens
aggcctactatgagccagtttgatatggatcgcttatgtgatgagcacctgagagcaaagcgcgcccgggttgagaatataattcggggtatgagccattcccccagtgtggcattaagggg

SEQ ID NO: 63817 - DNA, 122 bp, Homo sapiens
gctccgtcctccggctgctgcccaaatcaggggtcgtggacaaaggatgcctggggcctgcggccctacgccaggaccccgcgccgaatactctgattcttcgggctccctccaagggagtc

SEQ ID NO: 63818 - DNA, 122 bp, Homo sapiens
aaccacaggcagcagagatgtggcactttaccaaactccacaacctgttgggactattaacgtgccgtgtgcaaacaaagcagatgtcctaggaagatccttctgctccccttcccaagcag

SEQ ID NO: 63819 - DNA, 122 bp, Homo sapiens
ggctgaggtgggatgattgcttgagcccacaagttggagacttcagtgagctgttgatcgcgtgccactgcactacagcctggctgacagagcaagatcctgtctcaaacagacaggcaaac

SEQ ID NO: 63820 - DNA, 122 bp, Homo sapiens
tttctgcacaggccaggtgatgaggggagggcagagctctcagcagaagggtctcagcggcgcctcctccctgggaaggatagaagcctctctgaaggggaagggactcgccccaagtaacc

SEQ ID NO: 63821 - DNA, 122 bp, Homo sapiens
tggcaattttcgggttctcgggtccgaggatggccaggccgtgtgtgctcttcccagtgccgaggtatctgagaggaaggcaggcgtggtcagcaaggactggcttctgcgtgagcgctgtt

SEQ ID NO: 63822 - DNA, 122 bp, Homo sapiens
tctttatccaattccacatgccataaatatggaacctatgattctcatacagggtgggcccgccttatgtatatttatggcataaccacaaggcagagagctcatctgcctgatggaatcca

SEQ ID NO: 63823 - DNA, 122 bp, Homo sapiens
gtgagttgaactctttcgtgttgaccggccactctccgtgctctggatgatgtcggaacacgacctggccgatgtggttcagattgcagtggaagacctgagccctgaccacccaggtacag

SEQ ID NO: 63824 - DNA, 122 bp, Homo sapiens
cagcactttgggaggctgaggtgggcgtatcacttgaggtcaggagttagagaccagcctcggtaacatggcgaaaccccgtctctacgaaaaatacaaaaattagccaggcgtggtggcgg

SEQ ID NO: 63825 - DNA, 122 bp, Homo sapiens
tgatttctcctggaggtccccggaggaaatccatccttgtcccttccgagctccggtggccgttggtgacccgtggtgtcccgcagctagtggctgcatcaccctgacccctggctccgtcc

SEQ ID NO: 63826 - DNA, 122 bp, Homo sapiens
agttgggaatttgagggttatgttatcagcgccgaaaggaatcagaattcactgacttggcgtctttcatctttactggcataggcctgaaaataaatctcatgtgagcttttagtccaacc

SEQ ID NO: 63827 - DNA, 122 bp, Homo sapiens
tcctgcccccacttctcggttttagttactacaaacgattaaagccattgggagcctcaacgtcccgcctggaacgtgtaggtgtcttagacagtggcaggtgcatcaggagtgggcttttg

SEQ ID NO: 63828 - DNA, 122 bp, Homo sapiens
tatatttcatatgtgaccacattcataaaactttattgataagtactttggtgtctgacacgggctgacacaaataggcttcttcaagagttgaggaagaaaacaaaatccctataatacag

SEQ ID NO: 63829 - DNA, 122 bp, Homo sapiens
cctgctgatgtacctgttcacgctgctgggcaacctgctcatcatggccaccgtctggagcgagcgcagcctccacacgcccatgtacctcttcctgtgcgtcctctcagtctccgagatcc

SEQ ID NO: 63830 - DNA, 122 bp, Homo sapiens
ggagttctacctccgagccaagcccagtggtggtcaaaaactacgaataccaggaagcaccgcggcgcggcggcccagagctccgcgcgcaggcctccccggcgcgccgaggccgccgccgc

SEQ ID NO: 63831 - DNA, 122 bp, Homo sapiens
gctgctgcaggttcagttctggggtacccagggcagtcttcaccaggcaggaggagccctcggagtagggcagggagagatggcaaagagatcagcaaagctcatgagggtgtttggaaatg

SEQ ID NO: 63832 - DNA, 122 bp, Homo sapiens
gtgctgggatcgcagggcgtgcacaccctgtgtgctgtggccgtgtgcctggcctctgcccgcctgtgtcctgctgtatcggtcagcttacctttcgccccagacctctgttgccctgagcc

SEQ ID NO: 63833 - DNA, 122 bp, Homo sapiens
aaagtctgatgctctaccgactgagctatccgggctcccgtagacaacagcttgttctgccgtttcttacataagaatgaggacccttgagtgattgcatcatccacactgtgagactgctt

SEQ ID NO: 63834 - DNA, 122 bp, Homo sapiens
tagccaataatcaatactaggttactgaatgggaaacacactgctgctgaatgcctaatacggtaagcactcagtaaatgattgttcaaggaggtgtagtgtgactcaaaacaaacgacact

SEQ ID NO: 63835 - DNA, 122 bp, Homo sapiens
actccccaccaccccgccaccaccgacgagccggcgcgaagtccgtacctcgatgtccgccgagtccttactgagcacaggggccatggcagtgcctacagtctcgagtctgccagtgacaa

SEQ ID NO: 63836 - DNA, 122 bp, Homo sapiens
agtacaaccctaggagtaactccgcctcatattcttcgttccctgcagaaaacagctttccgaattctcctggctcagtcgcgcctcaacctttgcacgcgccggttcctccgcctgtcacg

SEQ ID NO: 63837 - DNA, 122 bp, Homo sapiens
gcgcttccctacgtcactcggagcgccggcggaaacgagacgagcctcgccccgcacgtccggaagccacgcctccagcttccggccacacctttcggcgggtgacatctttgctgagggct

SEQ ID NO: 63838 - DNA, 122 bp, Homo sapiens
tcacctttcgctacccctggcttaatctaggtgagctgatgatagcattcagaacggttccgggaaaagaaacaggattcgatacttgcggcttctggcaggagcaggctaaaaagctcaga

SEQ ID NO: 63839 - DNA, 122 bp, Homo sapiens
ccaatagctcccccatgacacagccctcaggagatcctgagaacatgtgttcaagatggtcgggccacaagttggttttataaattttagggagatataaggtatcaatgaatatatgtaag

SEQ ID NO: 63840 - DNA, 122 bp, Homo sapiens
agtgaccgacaaggcagtgagcgcgtgcacagacttctaaaattacaggcagactcagcacgcctgtgggaaatgcctaacagatgcgtcacctagagcagctgctggcctccagcttgcta

SEQ ID NO: 63841 - DNA, 122 bp, Homo sapiens
ccaccccatcccctaggaatctgtcagttacagttcagaaacctgcattgaaattccagccgaggacagtatttcttcccactctatttgtcccctctcatctgtggaagctcagcagcatc

SEQ ID NO: 63842 - DNA, 122 bp, Homo sapiens
tgatgctacataaagaaaatcccgtaatacacacgatttctgaatgtcctgctgaacattcggtgagtgaaaactaattatctgagagttgaacctatctttgttaataaacacaaagcggc

SEQ ID NO: 63843 - DNA, 122 bp, Homo sapiens
cgtggaccgtggccaccgcgaagagcgaggtgttggtgtaggagaccgaggccagcccatcgcgcgccacgtcccagagcgcacggctgaccacgtgaacgccctggcccgcgcgcggcccc

SEQ ID NO: 63844 - DNA, 122 bp, Homo sapiens
taaccctgcctctgcagcttgctagctgtccatctttggtccatgacttaccctctctgacgctacatttctttaccttaactggccattaaggttccttctctgcttactttgaaaagagg

SEQ ID NO: 63845 - DNA, 122 bp, Homo sapiens
gttgccacaatgatcccccctctgggtgactctctgctcttttgacttctgggactactccgcagttctcttcccctctgcctcctgggtctccacagaagcctgtgtcttgttcccctcct

SEQ ID NO: 63846 - DNA, 122 bp, Homo sapiens
gggaggagcacatcttgatgcagagatgctgcagtggctccgggcgcgctcacacacacgcgccctcacccgccaccgccgccgcggccgccgccgcacccggacagcgagcggctgaggcc

SEQ ID NO: 63847 - DNA, 122 bp, Homo sapiens
cttttgcacctagtaactgcacctttagcaagtcacatgacctttctttaagcatcctctcgatagaaaagctttcctaaacagagttccttgttattctatatcatagccacttttccatc

SEQ ID NO: 63848 - DNA, 122 bp, Homo sapiens
ccgggggcgggcggtgggtggggactgctggggcgtcagcggcccaggcgccgcagggaccgcgaaagggttaacccggcggggggagggggagggggcgcgggccgcgcctgcgctctgcc

SEQ ID NO: 63849 - DNA, 122 bp, Homo sapiens
agcatgcaagagattgcaacacacggccttagatgagagaaacagccttgaaacagaccacggagaaaagaaggagaacatgaaaatgccacctcccccagttgtataagacctgcccagat

SEQ ID NO: 63850 - DNA, 122 bp, Homo sapiens
agctcaggggtgccaaaagaattcaccatttgttccagccaaagcctccctttcccagagcgcttcctttttttccttttttttttttttttttttttttgagacagggtctcgccctgcca

SEQ ID NO: 63851 - DNA, 122 bp, Homo sapiens
gcggctgctgctcttcaagctgctgctgtttgacctgctcctgacctgcagctgcctgtgcgaccccgcgggcccgctgccttcccccgcaaccaccacccgcctgcgagccctcggctccc

SEQ ID NO: 63852 - DNA, 122 bp, Homo sapiens
tgttgccatggttggcctcaggcatccggctcggcctacaggaaacacgcttgtaggactcgctagggcaggagagaatggggtaacgcggaagatggatttttttttttttttgaaatgag

SEQ ID NO: 63853 - DNA, 122 bp, Homo sapiens
cctccccactgcccctcccgccggcctcccaaagtgttggaattacagggtgcgctaccgcgcgtggccgcaaatatcttacagggttgatagaatagcaagtaatactatccttattttcc

SEQ ID NO: 63854 - DNA, 122 bp, Homo sapiens
ccccacggagcatggtcctattctacaccccacagagcacagcctgcaccctatggagcacggtcccatcctacaccccacagagcacagcctgcaccctacaccccacagagcacagcctc

SEQ ID NO: 63855 - DNA, 122 bp, Homo sapiens
tttcctagccggtgtagtgtgtccatgggaatccagggtgtccgtcccatggaccttcagcgctagggtcctggaaggacctagcttgcctaagaggaggatctgatgaagagtcctatact

SEQ ID NO: 63856 - DNA, 122 bp, Homo sapiens
gttttgaccctgcttccagggctcagtatcgtacctgggctgtggaggatacagaaatgccgaatgaacaaatgaacggatgactgggccacatgggtcccaggtgaatgaattctatctgc

SEQ ID NO: 63857 - DNA, 122 bp, Homo sapiens
cagtgtcaagactgcgccagctagggtggcggcgccgagggccacgcggggagggcggcgcgtgcacacccacacgtgctcgctcacccgcacacctgcaccgccacattggttacatgcct

SEQ ID NO: 63858 - DNA, 122 bp, Homo sapiens
ttcttcctgaataatgcaggagaataaagcagaaggtctacagacattacttatagtaaccgcaaataaaaaggtgtctaagaagaatagtctgctaacttagtttggagggagacagattt

SEQ ID NO: 63859 - DNA, 122 bp, Homo sapiens
ggaacagttaactctgcagagcacagtttccacatctgggctgagttcccaaagaaagtgcgcctaacaacgtcttgtggaaggcggttggcgtcaagagaagtaaagtgttcagatggcag

SEQ ID NO: 63860 - DNA, 122 bp, Homo sapiens
aagataataaaaaccttattatctaaggttttaccctttaccaaacagtgttgacagggacgctgtgaaaaagactgtgaaaaagaattggaatgaggggtggactgagtttcccggagctc

SEQ ID NO: 63861 - DNA, 122 bp, Homo sapiens
cggcatcagatcagctgtgctgtgtgtgcttccaaagacgtttctgatctgcagggacgtcgtcccgtgtaagagttcagcggtgcctccactctggacggcagaactgatccccagacggg

SEQ ID NO: 63862 - DNA, 122 bp, Homo sapiens
ccgcccaccggcggcgggcggctgaggtcagggccagggtcgctgtgcttcgtggcggcgcgggtcctccgtttcccaggaggaagaaaaaaagaaaaatggagtcgcagccggcttcggca

SEQ ID NO: 63863 - DNA, 122 bp, Homo sapiens
ctcggagcttatactcaacctggaaggggctgcagtgctgctgcctgaatgaaatggatgcgggtgaaaacactcccgagggggtacctgaagccctgggaacgggaggtggctgctggtgt

SEQ ID NO: 63864 - DNA, 122 bp, Homo sapiens
cccctcgtgagccgtagactaggagccccgggcgggctctgtcggccctgacactggggccggagcgggagccctgtattagtccattctcatgtcgctaataaagatctaccacagactgg

SEQ ID NO: 63865 - DNA, 122 bp, Homo sapiens
ggccgcagcgagagcggccggaagcggagtgcgaggccgggcggggggcggcaggaggggcgccgagccgggcaggaaattccacatcggctccctgatcccgggccagccgcggccggcca

SEQ ID NO: 63866 - DNA, 122 bp, Homo sapiens
attaaacattttatataaatgactcttaaagctttacaccttgggaccagtgtaccttctcgtgcagaatacatttagatataaaaagacgttattaatacattgcacagttttcaaaattt

SEQ ID NO: 63867 - DNA, 122 bp, Homo sapiens
gctgggcgaccgcgggtggcgagggatgcgcccctgcccgcactctgcgttctccgcggacgcgattggcctccccggctcggggcgccttttgcacctgcaaccccaggcgttgggccccc

SEQ ID NO: 63868 - DNA, 122 bp, Homo sapiens
gagacagagccgtgagggcctctggctgcaactcgcgagggtcggctttccctgggtctccgccctacgggagacagtgaaggcgggagcaaggccccaaccgagaaccccaccccaaaccc

SEQ ID NO: 63869 - DNA, 122 bp, Homo sapiens
ccccgggccgtggccttggggcaagctcggggccagcagatccggctttaaaggagaagccgtggccctctcgtcactgtgcagccgccagcgccgcgcctgcgaccccgggcctgcggaca

SEQ ID NO: 63870 - DNA, 122 bp, Homo sapiens
gtcgctgaatgggaacccggtgcagtgcattccaagcctgagctggttcaggtccgatggcggggcctgcccttatgaatcattcatgatctggccccgcccatacgcgaacgacgcgcgcg

SEQ ID NO: 63871 - DNA, 122 bp, Homo sapiens
cggcgattggtgtctctggccgctgcgctccaccccagcccgccatggcgtcaggcgccgcggccccggggaggtggctcccactttaagaagtgaagttttgcgcccctccccctccctgc

SEQ ID NO: 63872 - DNA, 122 bp, Homo sapiens
tccctttccaggagacacagatcgcggctgtgttttgtgtctggtgtctgcgtgaggctgcgcgccgaccacctctgggtgcgagcccatgtgtgttcttgcaggaggctctttggacacta

SEQ ID NO: 63873 - DNA, 122 bp, Homo sapiens
cctagatcaggcctgcaggctttgggggcccccagaaaatctgggacctcactgtgacatcgctgtaaccagccaggatctagggagcccagccgctggctcagggatgcctgcagatgctg

SEQ ID NO: 63874 - DNA, 122 bp, Homo sapiens
ttgccagtctttgtctcagtttccacatttgtaaaatggggctagctctgtagcatgcttcgaggaaaattaatctgtgagatgttctctcatacaggtttcttcctttggagaatctaatg

SEQ ID NO: 63875 - DNA, 122 bp, Homo sapiens
agggcggaggagcgggcgggatcccagcgccccgcgccccgcggccgccgccctccggggcgcccagccccacccacgtggaaccgccccgcccccgccgccccgcccccacgagggaaggc

SEQ ID NO: 63876 - DNA, 122 bp, Homo sapiens
cgctcaagaaagatgcgttctccttttaaacacaaaaatgtccattgatacagcagattccgttcataggcatccttaatcgcagaaacaggagggcggcccttttcctcaaggcgctctca

SEQ ID NO: 63877 - DNA, 122 bp, Homo sapiens
ctcttgaaatctccattttcaatcccttcgaaatcacgtatggtttccacaaagccgagtcgtgtcacgtggcaggtttacgtcaatagtccctctctctgctcctccattcgcaagtgtct

SEQ ID NO: 63878 - DNA, 122 bp, Homo sapiens
aataaaatctttttatttgtcgtatctaaccaatctaacccctagcgcagagctagggggcgttcccaccggtgcgcgggcgagctgagccttccttacgtctgctgtgcgtcatcagtccg

SEQ ID NO: 63879 - DNA, 122 bp, Homo sapiens
tgtaaaagcgcattgatctgaacatctgtctggtcaacagtccttcactaggtccctgctcggtgtctgaggctgcatttgttgggggagaagagtatcaaccatcactgacaccctgggag

SEQ ID NO: 63880 - DNA, 122 bp, Homo sapiens
cttggttgggctttgccaacatatcgagatgcttttcgccggcttccatcactaacctcccggaggtcatcaagccaaatttatgagtggccgctcgagtcacgtgactctatttaaggctc

SEQ ID NO: 63881 - DNA, 122 bp, Homo sapiens
cacccaggctggagtgcagtggcctgatcttggctcaccacaacctttgccttctgggttcgaacaattctcctgcctcagcctgcctagtagctgggattacaggtgagcgccaccacgcc

SEQ ID NO: 63882 - DNA, 122 bp, Homo sapiens
ttgtctgtttaaattccagaataaaatgtatggaagccagtttttttttttttttaatttcgtgtttatttggttcatacgttgaagcttagtttcacattttgatgttttactgctttgta

SEQ ID NO: 63883 - DNA, 122 bp, Homo sapiens
cagagttgtctgaacaaaaatgtcgctattttgcaatacattctaatcaggtgagctgctcggtcaaatttccgacagatcactattcatgttagtggcctttgtgaagcagcctgcaacac

SEQ ID NO: 63884 - DNA, 122 bp, Homo sapiens
cacccgggcaggctggagatgggagtcctcagctctcagctctgcatgcagcccggacctcgccttcctacggcctgacgtcaggccagcgcttggggctccttttgggcaaaggcagggtg

SEQ ID NO: 63885 - DNA, 122 bp, Homo sapiens
cagctgcaaggagagcccagcgccgcggctacaaagcactagggtggagctgcggaatagcgggcggggtgggagggcgttttcgaaggatcccagaaaacccatagactctgtctttaatt

SEQ ID NO: 63886 - DNA, 122 bp, Homo sapiens
atcctaaaatggtttcgtccctgtgcgtacaaatacaacgggacactcctggggcggggccgggctgtccgctctcaggaacggccctcaggtggatctacaccatggctgcctcttccttt

SEQ ID NO: 63887 - DNA, 122 bp, Homo sapiens
attgaagaatctaaattgcatagactgtgcaaagccagcatgaatagcttttgtctcatccgcatattcaaaatctttggagacagctgtcacattcctccccttcactggccctcagaatt

SEQ ID NO: 63888 - DNA, 122 bp, Homo sapiens
cactttcgactcaacaaaataagacctcagatttgatagcttgcagtaagtcccgcttggcgacgattaaacaccctgcaagtcgaaacgcgtagtctaatcaaatcctctccagcctgcag

SEQ ID NO: 63889 - DNA, 122 bp, Homo sapiens
tccccagcttccggaactgctgcggggagttgcgaactctggtcctcttggcagtatcggcggtgcgcctgcctgcctgctgtgactccagggactctaaagttagagacttcctttgcgtt

SEQ ID NO: 63890 - DNA, 122 bp, Homo sapiens
agactatgcagtgacaacacagactaatactaccagtagcctgactactactagaaactgcggcctgtgagatctgttaaaagttaagcctagaaaccaaagttccttcccaattaaagaag

SEQ ID NO: 63891 - DNA, 122 bp, Homo sapiens
gagtcagcctcaggcaaaccactagaggcagctcagatagaggagctctttgggaagagacgccgggcaggcagaagcagcaggtaccccctccacatccctagggctctgtgatgtaggca

SEQ ID NO: 63892 - DNA, 122 bp, Homo sapiens
agggagtggagaggactggctctgactctatctggtgacagaggagctgtccccgcaacgcgaggaagcactcagggtgccgggggggtggttcctaaccatgcccagtctctcttcctctc

SEQ ID NO: 63893 - DNA, 122 bp, Homo sapiens
aagtcgtggcggcgggggcaaaaagccgcaaaaagccgtggcttcgggggcaaaaagccgcggcggcggaggcaaaaagccgtgccggcgggagcaaaaagcaacgggggcgggggcagaaa

SEQ ID NO: 63894 - DNA, 122 bp, Homo sapiens
ggaccctcgagtgctagccccgcctccgctgtctgtggcccgcgaacacgatcttgtttccggcctgttttggattcatttgcacttgcccagtttacatgcaaagcataatctgccgacca

SEQ ID NO: 63895 - DNA, 122 bp, Homo sapiens
tggatttctcacctccctccatctttcatcctcctgacattcattcacttagtatttttgcgtactttcggtgtgcagtgaaccccgttctaggtacttgggtgacagccaagtactaccca

SEQ ID NO: 63896 - DNA, 122 bp, Homo sapiens
agccaatgcttctgactctatctgttgctgagctctgtgtagacaaaataaaccatctgccggctgatgtcacaagggctgccccgctcggcagcctcagtgagctcctctctagaatgggg

SEQ ID NO: 63897 - DNA, 122 bp, Homo sapiens
gtaaaagaggcagatcgtgatctgtttgagttgtacatccccccaggctaattcacctggcgtaggaggtgctcagaggccaccaacattgccacaaggtccatctttgtggatggggtagg

SEQ ID NO: 63898 - DNA, 122 bp, Homo sapiens
gagcacagctggctgcagccttaggccttctcatttgctgccttagactcggtctctactcgaggccctgaatgactgcgggactttttaaatagggaagaaaaagaaaacccagatgtggc

SEQ ID NO: 63899 - DNA, 122 bp, Homo sapiens
gtgtggttttgattctcagatggttgttttggccaaaagctgtgtggaagcccacaggaacggggcaggtgagaacacccatattttcttcatttgctctccagtcagtgccggcgttggtt

SEQ ID NO: 63900 - DNA, 122 bp, Homo sapiens
ccctcggcgcctgccctgtccttctggctacgggtccaggagggctggcatgagaccaatcgcgaccctgcggttccagagcctgcgtcccgcactgccgagaccacacagtctcctctctt

SEQ ID NO: 63901 - DNA, 122 bp, Homo sapiens
acctgtctctgtggcgtagtcggttagcgcgttcggctgttaaccgaaaagttggtggttcgagcccacccaggaacgcttgttcgagcttttaaagtattcatgcattgtcaatcactaga

SEQ ID NO: 63902 - DNA, 122 bp, Homo sapiens
acctcaagtgatctgcctgcctcggcctcccaaagtactggaattagtcatgagccactgcgcccagcctggaaatacatgactttgaaaatgcagtctcccattcagcttagcagttgtaa

SEQ ID NO: 63903 - DNA, 122 bp, Homo sapiens
gtcgcccactcgccgtccaccgagggcaggtcgcccactcgccgtccaccgagggcaggtcgcccactcgccgtccaccgagggcagggcctgcttctgcagatcacccacacaccatccac

SEQ ID NO: 63904 - DNA, 122 bp, Homo sapiens
gtgttttgcaggcagctgtttcctcctccggccctcctgttccccgggccgcctgggcaccggcgcctgcactctggcattcattgctctaccgtaagccttgtttctagccgttttcaatc

SEQ ID NO: 63905 - DNA, 122 bp, Homo sapiens
ggcagagagagaaatgaatcaaagggaaacggaatattttttcagacatattaatgtctccgaattacctttaagtaaatgaaggaattgggggtataaaaaaatttctggagcatacatgt

SEQ ID NO: 63906 - DNA, 122 bp, Homo sapiens
cctaaacctgctctgccactgagcatgcccagtttaatcgccggccgggactcttcccaccgccctgggctttaccctcctggttggacctgtaagggctcaggaaacaaactcgccaggag

SEQ ID NO: 63907 - DNA, 122 bp, Homo sapiens
aaaccgtcaactcccatcgtcaacctgacagcttgggcccagctgggctgagtagtgcagcggcacaggatcaaaaaataaaataaaggtagcaacacaccgccgtcagcctgctcgacctc

SEQ ID NO: 63908 - DNA, 122 bp, Homo sapiens
gcccgctgcttactgagtgccacggaggcctgcagggggagtgggcacacacaggagagacgcatgatttgcaatctcgttaatgagccgtagcacaatcacagacctgccctgacaaggag

SEQ ID NO: 63909 - DNA, 122 bp, Homo sapiens
gcgcagagttcccggatgcgatattccggtgacaccggacgctgggggcggggcctagtgcgacgagggcggggccggggccggcccggggcggggccgtggccgcagctgcctggcagcca

SEQ ID NO: 63910 - DNA, 122 bp, Homo sapiens
tggccttctctgtgcttgggcaccaactcaccataaggatgcgccggtagctgtcccggtcgatcccccagagcttgaggtccgtcttggctttcacggtcgcagccctgggggtgccgtag

SEQ ID NO: 63911 - DNA, 122 bp, Homo sapiens
aggctgtcggggctgcccgtgtaccggatcatgttttctgccaaggcaaggatcaccccccgacatatgtgaggccacacagccttagcccatcacttaccatgcatcccttgctccggcag

SEQ ID NO: 63912 - DNA, 122 bp, Homo sapiens
accggggacgctgcgggggctgcgctgggcagcgggtgcgggtgcgggcgccccccatcgcgggcccaggcgttcccccagcaggcccaggagcccccacgggtccaggtgcgcccctgagg

SEQ ID NO: 63913 - DNA, 122 bp, Homo sapiens
ttgcccgtgctgctgtgcagttcttgcctccctcacggggcgtcacccccagcccagctccgttgtacataaatgccttgtggcagagctcccggtgaacttctggatcccgtttctgatgc

SEQ ID NO: 63914 - DNA, 122 bp, Homo sapiens
ccgagaatgccgcggacttcggggagccccgcgcccgcaatgccgccacccccacccccgcgccccgccaggcctctcaccgactcccgccgccgagcgacaatcggtccacccgccgccac

SEQ ID NO: 63915 - DNA, 122 bp, Homo sapiens
taatgaaagcgggacgtcgctcctttagtcgtcctcagcttgtgctgcagtctgtctttccggcggggggacccaggcctgggacggagtctggtgttgtcagcacactgcccaccagaagg

SEQ ID NO: 63916 - DNA, 122 bp, Homo sapiens
catggcccggggcggcaaggagcgtgttgagtgggtcaacgagcttatcctgaagcaccacgtcaacgtgcgcactgcatacccctcgctgcgcctgctgcacgccgttcgcgggtgagcgg

SEQ ID NO: 63917 - DNA, 122 bp, Homo sapiens
tcagttaagcagagacgagccgaacacctggcacggtccttctctactgttctctcgaatcgttttctgagtgcatgactgagcctggcactgaagggatacttattttggggaaggaagaa

SEQ ID NO: 63918 - DNA, 122 bp, Homo sapiens
taaaataagtaaactataagtaagaaggaaaataaagcatatgaatgatcaggatcattgcgggtggagggctcaattttaaacagtatgagccaggatactatcggatactccctctctgt

SEQ ID NO: 63919 - DNA, 122 bp, Homo sapiens
aatctgtccataaatggagaactcagctcaggcctgaccaatcagggtttgttttcgtagcgtcactcctcagggaaaccgtagtagccaacaagcttggagctgctggagtttccaaagat

SEQ ID NO: 63920 - DNA, 122 bp, Homo sapiens
gaagtattattcagccataaaaaagaagaaaatcctgccatttatgacaacacatatgaacgtggaggatattatcttaagggaaataagccaattaccaaacgacaaataccgcatgatct

SEQ ID NO: 63921 - DNA, 122 bp, Homo sapiens
ccacgctggatctggaggacgtccggagctacagggcggagatttcatctcgaaacctggcggtgagtgctccagtagacacctgtgtgggatgctcatcaaagacgtggaaagtggcccca

SEQ ID NO: 63922 - DNA, 122 bp, Homo sapiens
ccggaactccgtggtggggttgttgaaggtgagcttctcgcagcgcaggtggttcacgggcgggttgccttccaggttcaggaacaggtcgtaggtgaagcagaccttcctcggctcctcct

SEQ ID NO: 63923 - DNA, 122 bp, Homo sapiens
aacctccagaaccttctggaaagacaggcagagcagcagtggagcgggcgtgagggtttgcgccctgctgtcccggcttctccgagcttctggcatgtggaccaccctgcaggctgctcacc

SEQ ID NO: 63924 - DNA, 122 bp, Homo sapiens
caagagtctaggtcagaacacagaacttcagaccctctaagtacagtcacaggagtaactcgtgcctgagctggaaggagaatcccaggaaaggtggggcctgaggtctgaagaccggcgtc

SEQ ID NO: 63925 - DNA, 122 bp, Homo sapiens
gggcgcacacgtagcgccggctgcgcgacagggcgcgcgcgacgctgccgacggcgcatgcgcggtccggcatgccgggcggaagccccatttgatttctaatgctatttatttatgtatcc

SEQ ID NO: 63926 - DNA, 122 bp, Homo sapiens
tgggaagcccaccaggcaacacatttctctggcctctccccacgatctccctccattgagcgctcactctatcttagagcttgagcttggctcagagcaaggcttggtgagtgtcgtagggg

SEQ ID NO: 63927 - DNA, 122 bp, Homo sapiens
gttatgctgtgtcgtttagggaataatgacaggaaaaaagtgtacacgtcagtacagacacggccaccacaggcctgtacattttctgtgaggctggttgaatccacacatgcagaactcgt

SEQ ID NO: 63928 - DNA, 122 bp, Homo sapiens
ggtttttgaaacttgactcttctccttagtagcccccggaccctgggcttgtagcttaaacggtctgcctccattttctcatctgcgcaatgtgggtaattttgcagagctgccttctttgg

SEQ ID NO: 63929 - DNA, 122 bp, Homo sapiens
tcgaggacagcctatacccggcagcaagtcctggaattagagaaagagtttcattacaaccgctacctgacccgaaggagaaggatcgagatcgcccactcgctgtgcctctctgagaggca

SEQ ID NO: 63930 - DNA, 122 bp, Homo sapiens
cagtgtgtctgttggtgttgggaatggcgggatccgggaaaaccacttttgtacaggtgacgtacacagcatgggtgtagtaggggagcgcaaaaggttgcctccggcaggcggaaggccag

SEQ ID NO: 63931 - DNA, 122 bp, Homo sapiens
accttcactatttgctcctagatcaagccctgcctgaagattctctgcctctgctcacaccgcactcagctcaacattctcttccttgccttttctgagataaaattctcccaatcctttaa

SEQ ID NO: 63932 - DNA, 122 bp, Homo sapiens
ttttaattataataggatagaaatgcatgctcccccctttttccataaagcattcattaacgtgttaaaggaaacgaaagaatgattaaaacctagattttccttgtgcggctttttccttt

SEQ ID NO: 63933 - DNA, 122 bp, Homo sapiens
gtctgatacttacgtgccgtcaattttctccatgccgtggaagaagctgatgcagtctgacgtatttctcaggttaaagcacttctcatcgatacactgggccgagcttttgtcttcgaggt

SEQ ID NO: 63934 - DNA, 122 bp, Homo sapiens
cccaggcggctccaagaagtgcatccaggttggcggggagttctacactcccagcaagttcgaagactccggcagtgggaagaacaaggcccgcagcagcagtggcccgaagcctctggttc

SEQ ID NO: 63935 - DNA, 122 bp, Homo sapiens
ttagccatgtacgcctctgcattccggtcactgggagcggggccgtgggggctgcacatgcgcactgcgagtcctcgcctactcccagaaaccacccgggcgcatacgcggtgcggccgctg

SEQ ID NO: 63936 - DNA, 122 bp, Homo sapiens
caacacggtgaaaccttgtttctactaaaaattcaaaaattagccggatgtgatggcaggcgcctgtaatcccatctactcaggaggctgaggcagggagaattgcttgaacctgtgaggca

SEQ ID NO: 63937 - DNA, 122 bp, Homo sapiens
gattatcccatctctcccatcccactcacctgtccatttcctggtttggacatggttttgcgggctcggtggaccttgggctgtccctctgggctcgtggtggctggagggggttcagaccc

SEQ ID NO: 63938 - DNA, 122 bp, Homo sapiens
gacagcattgtctgggctccggggccgtgggggaacatggtggtggaagggggcggaggccggtaagaccccggactcgttaaagggccctagagtcggtcctggatccaaaccccattcat

SEQ ID NO: 63939 - DNA, 122 bp, Homo sapiens
tcgccaaccccatgcctatgtgcgggtccttttgcgatgaaggagagaaaagcggcgctccgcgcacgtttatatagagttctaattgtaattcgacttttctgaatctaatcggaaaataa

SEQ ID NO: 63940 - DNA, 122 bp, Homo sapiens
ttgctactgcagctggtgagtgggcaggtgcagccaccatctgctctaggagtccaaatgcgcagaagaacctcgcacccaggacctggcccaggcaccacgaattccagaacatgctgggg

SEQ ID NO: 63941 - DNA, 122 bp, Homo sapiens
ccagtttccaggtattctgaacatttttctcttcttcagaactccttgaactccttgaatcggttagcttttatccagccagaagtgatggaaagcagcatttacctattaagaatccccca

SEQ ID NO: 63942 - DNA, 122 bp, Homo sapiens
gtctccattaggattttcagggcaggcaaaaactccatcctcacacatacacagaacttccggtttcagaaacatgggcagcccagggccaatcagggatgtgggaatggatccagggagca

SEQ ID NO: 63943 - DNA, 122 bp, Homo sapiens
tgatgataattctctggtgagtcatcttagtgctggtggttttactgtttactctggacccgtggtgcacctcctgagaggctgccagctatctgctgtgtatctagaaaggcagcatggcg

SEQ ID NO: 63944 - DNA, 122 bp, Homo sapiens
gccggagcggatcccggttatcgccttgggcccctcagcccctcagccccggaacccgcgcgccgactggaggctttgcggtcatccttcccacatgacccagggcgtacgcagtgctccgt

SEQ ID NO: 63945 - DNA, 122 bp, Homo sapiens
ggcagtgcccgtccacgcaggtcccgtggccgtggcagtcaggcggctggcagcggggttcgtgcacacacaccacggtggacacttggcggggacagcgccacatgttgtcctggctgtag

SEQ ID NO: 63946 - DNA, 122 bp, Homo sapiens
caggatggagcctccactgctgaggcaaggaaaagatttgtctaaaatattggctgctgtcgtcgatactgggacctcttgagccaggtcccttccacattctgatgaggtaaggctgctct

SEQ ID NO: 63947 - DNA, 122 bp, Homo sapiens
agctgacaccgccaccctaccctagcccctgacgccaacccgcctcacctcaggcggctccggcagcgctggacacaggaaactcctgggtccccgactccggctctcctcgaccccctctt

SEQ ID NO: 63948 - DNA, 122 bp, Homo sapiens
gcgcagttccggccgcgcagctctcgcggagaggggcgctcgaggcggtttgaggggacccggaggctcttacaaactggcagttcattgagaaaaggcagcttttagtcacagcccctctc

SEQ ID NO: 63949 - DNA, 122 bp, Homo sapiens
gtgtgtgggccgggggctgacctcggggctgtcagtgaacacacgtggtattgaggctgccgcgtttctccctgtagtggactgctgggacgggcccgatgggaagccggtcatctaccatg

SEQ ID NO: 63950 - DNA, 122 bp, Homo sapiens
cccacctcctccgccgggacctgtcgggaaagcgtttgcagttattgcggcggctggacacgccccgccgccgaagaggcgggagaagggcggggcctttctccgagttggcctatcactac

SEQ ID NO: 63951 - DNA, 122 bp, Homo sapiens
atgacaactcgtagagcttgggaagtgcttctgcaaactgctttcttaacgattggcgctcggaacagtcacaactgggcagagagatacctggaacaggctgggttcttgtgggactggga

SEQ ID NO: 63952 - DNA, 122 bp, Homo sapiens
acttgggagccgcgtgaccctaggggatgaaagaaacgggccacagagctgcttccacagcgtggctcagctccaagcacacagacccactcggcagtggcggtttccatgtgcagtgtcag

SEQ ID NO: 63953 - DNA, 122 bp, Homo sapiens
atgtcagtcctgcctttcagatcctttctactgggtgagccctggagtgctggttctcctcgcggtgctgcctgtgctcctcctgcagatcactgttggcctcatcttcctctgcctgcagt

SEQ ID NO: 63954 - DNA, 122 bp, Homo sapiens
gaggttcgtagcgtcacaagcgctctccctagaaagtgagtggcagtcaagcattataaacgtgtttcaactgtaaagagacttaagagatgggaaccggggcatataccaagttagctctg

SEQ ID NO: 63955 - DNA, 122 bp, Homo sapiens
gaagggctgggcaagaggtccgagaggtggtcggaaggtaataaggcaacaggggggagtcggaggtccccctattatttattagtcacagatggtatggctcctgcgctgagtggcctcct

SEQ ID NO: 63956 - DNA, 122 bp, Homo sapiens
gtggatgacgtcaccgccgtaggacctaagattgatgctggagaggttcttcagaccctgcgttctgacggctccgctggcaccacccagacgggtaaactagctcttccggtctgtggccc

SEQ ID NO: 63957 - DNA, 122 bp, Homo sapiens
cagacccaccagtaggaactgtcacagaatggcctgctgaactgggatgtggaactgtggcgggtggagaggtctgaataaaccgtctgtgtcatggccccgcctgcctctgagtggtcagg

SEQ ID NO: 63958 - DNA, 122 bp, Homo sapiens
gtgagagccagagcctgtaggagagacctgggcaggcctcagacctgaggagtggagctccgcatcactcaaccctgggggcggagctagcccaggctcccacacccgacgctctggcccac

SEQ ID NO: 63959 - DNA, 122 bp, Homo sapiens
agctctgactttgtcacctggcagcttggggctgaatccaggctcggctctgtcacttaccgacaagccctgaggcccattctctaacttccctaaagtctctattttctcataaataaaac

SEQ ID NO: 63960 - DNA, 122 bp, Homo sapiens
agcgtggtgcagtttgcgctggacaagctgggtgaggggctgggcctgaagcctggagtccgggaccgtggcctaggccttagggacaggaccagaattgggctgtgggtgtggccacagta

SEQ ID NO: 63961 - DNA, 122 bp, Homo sapiens
aacaatagaaatgtaacatgacccttgaggtgggtggctctgtctgcagagcacagccaccgctggatttctcagcaatgctgctggccttctatccagtgctttcctgatgcccttggtga

SEQ ID NO: 63962 - DNA, 122 bp, Homo sapiens
ggacccatctgcctcgctgcccactgctcaacccgtcactgggggctccaggcctgccaccggcttgtcctctgaagggataagcaagtgttctattcacagcccggagtgcccttctgccc

SEQ ID NO: 63963 - DNA, 122 bp, Homo sapiens
ggataagctcacccgagtcacactggaccagggctcagcctattccgggatgagctcacccgagtcacactggaccagggctcagcctattctaggatgagctcacccgagtcacactggac

SEQ ID NO: 63964 - DNA, 122 bp, Homo sapiens
ctgcccccaagctactcaggccaaagccaggtttcttcaaactcctcaggccctcaggcccggtggccctgctaactctgacccaaggcaaagggccctgggaaattcctgatggtgtctga

SEQ ID NO: 63965 - DNA, 122 bp, Homo sapiens
caggtctagtgaggatagaatgagacatagggcctcaaatccagcctaggtcatcatgagcgacttttctgggctctagcttccttatctgtgaagtgaggtggttgggctacatggacagc

SEQ ID NO: 63966 - DNA, 122 bp, Homo sapiens
aagtgacgtcgtcttgaggatggcctcgtgaggcggcggtgggcatgaaatgagatgaggcgtccagccctgcatctgcagcgtggtcagcacagaggctgacatccatggtcatgccggaa

SEQ ID NO: 63967 - DNA, 122 bp, Homo sapiens
agctgcatccctgctccccacatggaggacccaacaggaggccgtggctctgatgctgagcgaagctataggctcttgttggataaaagcttttttaacagacatggtttcaccagcgttta

SEQ ID NO: 63968 - DNA, 122 bp, Homo sapiens
gttggttgcatcaccctttggggatttgtttgaattattcagaaagctagtttttcccagcgacgtgattgcacagcatatcctggaccctcagttgccaggagatcttttttccctcctct

SEQ ID NO: 63969 - DNA, 122 bp, Homo sapiens
gttgactagagtaaggcaaggattttcacatagaatgcaagactgtaaccagtgtgaccacgcttgtacccaagaagaagttcctgaagataggatctggagctttatgtttttttttgttt

SEQ ID NO: 63970 - DNA, 122 bp, Homo sapiens
gctgctggcttccagtgacatcacatgactttggggccactgcctcatcccgtatctgcgcgtatgagatgcattgtctcttcctctgcagttgagctgaatgaatacctccgaagccgctt

SEQ ID NO: 63971 - DNA, 122 bp, Homo sapiens
tcttccggggtcaccaacacggctcgttctgagcctagaggcccagggcacagtgtgagccggaatacggtgtaggggacacagctcaggccccaggcactccctcctgtcgcagaagaaat

SEQ ID NO: 63972 - DNA, 122 bp, Homo sapiens
aacgtccgccagtgatgcgggagcgcccgcggaggagcctccttctccccacccacctcccgaactccggcagtcagtggtgcatatagacatatttctgggagctgtccatgagctcatgg

SEQ ID NO: 63973 - DNA, 122 bp, Homo sapiens
agtgagtgcattcaagtggaaggaacgctcccacggctacggtggctcaggccctttgctcggaccgggaccttacagttctaacccaggagcgttaaactctggaagactccgggccagcc

SEQ ID NO: 63974 - DNA, 122 bp, Homo sapiens
tagcgggcgcaggttgcattgtgcagactcccggggtcaggtcgcagggtcacgtgcacgcgtcgggcctcctccgggcgctcctattccagatccgccgacagagggcgccgggggcccga

SEQ ID NO: 63975 - DNA, 122 bp, Homo sapiens
acagccgctccctcaacactcccagtcctccacttcactgcagtggtgatctagggagcacgccacacatggacctgcggcactgcactttacagtttatgaagcatttccactgatgggat

SEQ ID NO: 63976 - DNA, 122 bp, Homo sapiens
catgggcacaaggcgaagctgcctgggtgtggccgccttgcatggactcctgtactcggccggcggctatgacggggcctcctgcctgaacaggtagttggggttggggccccagtggcttt

SEQ ID NO: 63977 - DNA, 122 bp, Homo sapiens
attgcaacagattcaaaagcggctggtttatcacagggttccttcaaaaaagttatttatcgctgggcacagtggctcacgtctgtaatgccagcactttgggaggctgaggcaggcggatc

SEQ ID NO: 63978 - DNA, 122 bp, Homo sapiens
ccccaggtccccagctccatgtatgcaaatcactgctttgcatgggcctggggccaggcgcggggctcctgccagggggcgtggccggcggcccccgccccgcgccgcgtgctcacctgggg

SEQ ID NO: 63979 - DNA, 122 bp, Homo sapiens
atggggcggggcggggcagggctggtgagcaagcccgcggggagcgagcgcggaggcgggcgttgctacggcaacggtgggcggccagggagttgcctgagggaaaaggggcagacgtccct

SEQ ID NO: 63980 - DNA, 122 bp, Homo sapiens
gttttatggttgacccaggaacagcaaaagcgttcagtaagggccactgagggttaatttcggggcaaggagagacagcaagcttccctaaggcctcagctgaggccaggctgggtctgagg

SEQ ID NO: 63981 - DNA, 122 bp, Homo sapiens
tactagaagagcagggctggtgttcgaggaggagaagttgaaatcctagagggaggaaggcggggaagccaatactacttgctatttccactgcaatgaacgtctctgtgtcatcaaaataa

SEQ ID NO: 63982 - DNA, 122 bp, Homo sapiens
caacactccagtttcttgacttcctcccttctccatttcctgaacctggatgggtgctgccggggatggtgggagggatgagacggaggaccccattcatttgttaggagatccagagttca

SEQ ID NO: 63983 - DNA, 122 bp, Homo sapiens
ctatgtgtggttctttctgatgattcacctttgactattactcaaggcttacaagggggtcgcatcaccttccaggctgttgtttgcttctgaacatggcttcgtgtgtgacaggagagagg

SEQ ID NO: 63984 - DNA, 122 bp, Homo sapiens
agcagcgctctggccgcgcggctccagctcccgggcgccccgcgtccccagcctccccaccgcgcagtcggctcctctgtcacctcgccctcccaaccatggggtcacggggctcccgcccc

SEQ ID NO: 63985 - DNA, 122 bp, Homo sapiens
ttgactcaaaacaggttgtgtagtgtggacatttattcaacaaagatttgagcgccctcccggtgtccagcactgttagccttttgcggagcccgcggtgactaaggcacatgacactcagt

SEQ ID NO: 63986 - DNA, 122 bp, Homo sapiens
atgcgacatccagggcctgggaataagccactttgtcattacccatcctgtagcaccgttcgcaacccaggcatccttgaaagaaccagggagatttctgcaacacagagaaggatgtgttt

SEQ ID NO: 63987 - DNA, 122 bp, Homo sapiens
ctcatctccatgaactcgtcgaacaggctgaaggtgttgaccgggttcagaaggtagttgcgccgccagtccctgagctcggggtcccggggcaggtgcccggactcggaggcccgcagaga

SEQ ID NO: 63988 - DNA, 122 bp, Homo sapiens
ggtagagtctccacagacgaatgaatgggccgggctgcggtgtctctcgcctgtaatcctcgcactttgggaggccgaggcgggcggatcatctgaggtcaggagttcgagatcagcctggc

SEQ ID NO: 63989 - DNA, 122 bp, Homo sapiens
ttctggcaaacggtgagatacagccaggcaaggaaccagattctgcctgtctttgtggaccgcatgaaggaatttgggctttatttaaagcagagtgggtggcctctgcagggttttaaaca

SEQ ID NO: 63990 - DNA, 122 bp, Homo sapiens
gaatggggctcaggaggtggcctttgaacaagctcagcggtgattccagtgcacactctacgaggaccatgctttgagagtggtttccttggagacagactggcttctgagctactcctagg

SEQ ID NO: 63991 - DNA, 122 bp, Homo sapiens
ttcttcgcttccttgacagcctggctgcaacaattcattcattagtcgcattccatgaggcgtggcctctgttttacctgttttcgttgttactgccacaatgtccaccaggtggtgctgtt

SEQ ID NO: 63992 - DNA, 122 bp, Homo sapiens
cacaaggaagtcagggaggggagatagtgttaggtgaccggcaggggtatgggattgcttcgtcttcaatcagtagtacagagagaaaggaggaagaaaaagagcaccttggtggagatgtc

SEQ ID NO: 63993 - DNA, 122 bp, Homo sapiens
ggtcgctttcctcaccttcctcgctgcgcgggcggcggttggtaaccggtcagaccagcccgagagggacctggtgcctgtacccaggcttctgtcgctctgtcgcctgcgctatgccctgc

SEQ ID NO: 63994 - DNA, 122 bp, Homo sapiens
tcggggcctccccaagccccgggctcccgtctgggctttgtgggttggcggtgtctgaatcgccgacgggccgagccgtgccgggaaggcgcgcggccccgcgcgggcacctggccgaggcc

SEQ ID NO: 63995 - DNA, 122 bp, Homo sapiens
ctcgccctccctgagagcggtaatccctttccaggggctggcaaacaatcatgccaaagccgcccgtgccccaatgcggacgcagcgaagccacggcagaagggggaaatcggttacctggg

SEQ ID NO: 63996 - DNA, 122 bp, Homo sapiens
ggggaagatggcaggcaagggtacccttggccaggactctggtgcccaccctgccacccccgcgctccacctgcagtgtttctgccctgtaaataggaccagtcttacactcgctgtagttc

SEQ ID NO: 63997 - DNA, 122 bp, Homo sapiens
tcagaagctccggggaggggcgccccgcattttgagctctcggggtgctgccgatggagccgttcgaggagagcagagccaagtgcctgaggcttctcacccggtcccacccccctccacac

SEQ ID NO: 63998 - DNA, 122 bp, Homo sapiens
cctttagaaggttcctccatgacgtgtagacataagcagaaagccgtcacgctgggaggtcggccgcgggtgcgtcttggctccgtcatgatcctggtgagggtggcaggtcaggattgtaa

SEQ ID NO: 63999 - DNA, 122 bp, Homo sapiens
ggcaacaccagctgcagactttatttcccgggcttttcctgcaacatcagcaaaaccttccggaagggtcggccgggccgctcgggaggaggggcggccgcggccccataggccccaagtgc

SEQ ID NO: 64000 - DNA, 122 bp, Homo sapiens
gttagggtgcttatggataaaaggtagttatttgccctttagactcaggattcctgggctcgggtgtttccagcctttttaccactaatgaccctttcagtttctccctgaaagttgtggag

SEQ ID NO: 64001 - DNA, 122 bp, Homo sapiens
ggctccgtcttagcccggccaggcccagccctgccggtcgtcggcccgggacatgcgcggcgctcaggcctgcagggtgccttgggcggccacaacaaagttaaagaccggagtaagagtct

SEQ ID NO: 64002 - DNA, 122 bp, Homo sapiens
agagatgatgggcgaggggtgggcggcggccctgcagcctagagttttggggccttggtgcgcgatggcaaccctggcaacgtttcccgggagctcagtttgtggcaggctctgccaagcac

SEQ ID NO: 64003 - DNA, 122 bp, Homo sapiens
aacttagtgcagcttttgcataagcatttgctgcttcgccttacatttttttttacattacggagatggcttctttccttaaatctcatgaaccaacctctactagcatccaacttttcttc

SEQ ID NO: 64004 - DNA, 122 bp, Homo sapiens
ggttctcacaccctccagtggatgattggctgcgacctggggtccgacggacgcctcctccgcgggtatgaacagtatgcctacgatggcaaggattacctcgccctgaacgaggacctgcg

SEQ ID NO: 64005 - DNA, 122 bp, Homo sapiens
aagcagccgcctcttcgggtgcgagtgggatcccaggtccgggatgtggtgggtgcggtgcgggagaggcacccgccgcccccttcactcggatgttagaggcaagttgttcgtgtgaactc

SEQ ID NO: 64006 - DNA, 122 bp, Homo sapiens
ggggaggtgcccaggctggagtggcggcgtcgggtgtggagagaaactggagataagggacgcgaatctgactcggtgactttgttgttgatgttgatgtcttcactggttgccattgccca

SEQ ID NO: 64007 - DNA, 122 bp, Homo sapiens
aaacgtctaatcttggccttatttggaggttttgttgctagataaaccactatgatcctgcgcccagctccctggtccctggctggcctggcctgctgcgtgccaaactctcctgaggttgc

SEQ ID NO: 64008 - DNA, 122 bp, Homo sapiens
cccacggctttaaacaaagcaaaacaaaaccaccaatcctaataacccccctccttgccccgtctccacgctgtgcggagagggctctagcccctcagtcggacttctccttctccttcatg

SEQ ID NO: 64009 - DNA, 122 bp, Homo sapiens
ttctccttcggggggtgtgtgaagggggcagttaattaaacacttagattccttccggcgcgccttgccgagctggggacccgtttggactcgatcctgtctcgtgtaatcccacaggctgg

SEQ ID NO: 64010 - DNA, 122 bp, Homo sapiens
ggtgacctggggacgcacaggaagcgagggcactgcggccgcggcgcgcatgcgcgaacacgcacacagagaggggtgcacatgcgcaggaatgcaccggaagtccgcctcccgggacccgc

SEQ ID NO: 64011 - DNA, 122 bp, Homo sapiens
tgtctccatccctcccggccagtatgtggtgacttcctaccaaaggccaccaggggagcacggccaaacccggctctccaacacggcaggaaacgtttccagcctaaaagccacttgtagga

SEQ ID NO: 64012 - DNA, 122 bp, Homo sapiens
cagaccccagctgaggacagagcatggaccccaggcaaatgcagtgacaatcacagagcacgctcctaccacagccacccacgcagcctgaggcatagccccctggaaactgcctcggcctt

SEQ ID NO: 64013 - DNA, 122 bp, Homo sapiens
gggggcaaggggcgagctatccctgacccctttcctccagggtttatgacccgcgaggagcgcaagaagtttgaaaacctgaactcatcctacaacaagtactgggtgccctgcgtctggtt

SEQ ID NO: 64014 - DNA, 122 bp, Homo sapiens
tcaacgaccatctgtaataatgcccagagcctctgccaggattccccagccctatgttcccgcggcctttgaggggaaagggccagggcctagacgttcccctcccgcgtggttttcccgtc

SEQ ID NO: 64015 - DNA, 122 bp, Homo sapiens
ggattataggtgtgagccaccacgcctgactgctgctattgtcaatagtgctatgctaaacgtgcaaatggaggcatccctttgatatacagatgcttattcctttgggtaaatactcaaca

SEQ ID NO: 64016 - DNA, 122 bp, Homo sapiens
ttttaagagccatatttagaactctggggctttccagccagagcactttcaacaatacaccgtgcttccttgagttaggatgtttagatgggccagatctagagaactgaggtctattcagg

SEQ ID NO: 64017 - DNA, 122 bp, Homo sapiens
gaaggcagttatgacagttgagaagtagtagaagacacggaaggcacagaaggcagacttcgctcagcacaaagaattttctgataaccatactggcaaaatgaactgggctgccttcggag

SEQ ID NO: 64018 - DNA, 122 bp, Homo sapiens
agtcctgacacttcctgttcctctcagctcctccttggaggaagtggtgggttgcaccaccgtggcccttcacccctgcccctctccgctctacagcagctctgatgtcagagagcggcccc

SEQ ID NO: 64019 - DNA, 122 bp, Homo sapiens
atctataataaatattcatctgcatgtatcatgcacttgagctgcatgactgatgaactccggctccggaaatgaaagggaaatgcaccaagacaaatgtcacctttcaatgcttctccaac

SEQ ID NO: 64020 - DNA, 122 bp, Homo sapiens
catccctctttccagtgttgcagtaaaagtgggctccccaatctccttgccctgtcccaccgggatgccactgcctaagcagtctcctgcttccagattactgtcgcttctgcctctgagcc

SEQ ID NO: 64021 - DNA, 122 bp, Homo sapiens
gtatatcacagtagtagtattgcttgtgtggcccatttactgttttccaggaggtctaggcgtaggttaccagagagaaacagaacatagaaatggcagttaaaaccaaaagagttgaaaac

SEQ ID NO: 64022 - DNA, 122 bp, Homo sapiens
cagccgcgctcactgctgggccggtcagaggcctggagccctcggctggagcctcagcttcgcaagtcagctaccttgggacctctaggatcttccgacatcccaaagctgtcttcccgtac

SEQ ID NO: 64023 - DNA, 122 bp, Homo sapiens
acgctcggcccgtcacatcccgcgctgcccacccagaggtttggttgagactgcaggtggcggcggaggtgccttagagattgctagcagggccggaggagaccctagcgccaccatgcgtc

SEQ ID NO: 64024 - DNA, 122 bp, Homo sapiens
tgcagctgaaacgttccggctccggctctgctggccggtctaaagcggcagccgccggggcgcaatgcgagcggctggcgtaggcttggtggactgtcactgccacctctccgccccggact

SEQ ID NO: 64025 - DNA, 122 bp, Homo sapiens
cacggaagccgggtagcgctgggcggctgcgtgtcagagaatgagtgtttcccgatggaacggcgggatagaaatggccgcagactctccctgcttccaaccaatttcgctttgcggtgctc

SEQ ID NO: 64026 - DNA, 122 bp, Homo sapiens
tgacctcgtgatccgcccacctcggcctcccaaagtgctgggattacaggcgtgagtcaccgcacccggcctatacaaggttttttattgagatggagtttcactttcgttgcccaggctgg

SEQ ID NO: 64027 - DNA, 122 bp, Homo sapiens
cccagcggaagtgacgcgctagaagtttgggtctacccgcgggccggggtgaggattttccgcctcgctcaggcctctgcctccttgtcaatctccgttcctcccccgccccgagatatgcg

SEQ ID NO: 64028 - DNA, 122 bp, Homo sapiens
cttaaagtgtttccacgttacaggcgacttaaaggcagccctggagcctgacgtataattcgagcgccgatgcagaaaggagtcaggtgtttttttttttttttttttggtttccggttctg

SEQ ID NO: 64029 - DNA, 122 bp, Homo sapiens
gtccctgcacgggacgagcaccatgtggcagctgcaaaccctcgccctgcccccggccctcgagtcacattgtgtcatgccacacggcattcggatcaggagatggctgtggcgtgctgcgt

SEQ ID NO: 64030 - DNA, 122 bp, Homo sapiens
cgggaaggggcggggcgcgggggttgggggcgcgggggcgggggtcggtaccttccttggcgcgcgcccccgggggcagcggggcgcagagcagcagcaccagccctagccccaggggccag

SEQ ID NO: 64031 - DNA, 122 bp, Homo sapiens
ttcagaggccgcagtatgttaaaaccgttcctatccgtagcatgagcgtcagtgggcccccggggggtctttctccttcccgccccgggcccagtgcctgccctggccttgctgagtcccca

SEQ ID NO: 64032 - DNA, 122 bp, Homo sapiens
aaatcaaaatattaaacagttcttatgcatcagaaacacagctggtagcatcttttccttcgaggctcagccagtgggcatgactgtgtggaactactttagaattctcagtattgtttaac

SEQ ID NO: 64033 - DNA, 122 bp, Homo sapiens
agcacagcgccggtgggctggcactgctgggggaccccgtacacgctctgcagccgctggcgcgggtgctaagcccctcactgcctggggccggcagggccggccggccgctccgagtgcgg

SEQ ID NO: 64034 - DNA, 122 bp, Homo sapiens
attgggggccggggtcctggccggatctgtaaacactcgactgacacttgttcattcctccgggcggaaggcctgtcccaaggtcggggccggcaggaggcgccctggaggccgcacctcat

SEQ ID NO: 64035 - DNA, 122 bp, Homo sapiens
cccaccgcagagaggtggctcttcctgcaatccggccgcgatgcgcctgctgtaaatcagcgtggctccccccaagtcaaaggccgtctgaacaaggtgacagagaaatgcaaggaggatgg

SEQ ID NO: 64036 - DNA, 122 bp, Homo sapiens
gtttttttttcctcctcgcacccccaacctgccagagcagccccacatcttcctcccgcccggcatctaccgccacccaagccacctgccaggatggggctgggagctgtcgggccgcgccg

SEQ ID NO: 64037 - DNA, 122 bp, Homo sapiens
taaattattcccgttcctataccacgggttagaaaagtgaggccctaagaggttcagcggcgtgctccaaggtctaagctggcatgtctcccgccacgactcagccagcattccatttgggc

SEQ ID NO: 64038 - DNA, 122 bp, Homo sapiens
actcatctaacttaaagaggcccatgaggggagtgggccggagatgcagaatggcgggtgcggggcttctcccaggcacggggccccacacggccctccgcagcccctgggtggtgcacagc

SEQ ID NO: 64039 - DNA, 122 bp, Homo sapiens
caacctcaggagtttcgcccctcagcctcccaaagtgctgggattacaggcatgagtcaccgtgcccggcttcacatctgtcttatatgcgggtggctgggtgtcctgagagacccccaccc

SEQ ID NO: 64040 - DNA, 122 bp, Homo sapiens
gaagccgggaagataccacatcgttaaaggcatattcatcatcttaagagcaggcagccccggggaagagtgtatttcagtttttgatagtttgtcaaggcacagtacagttcctttgtttg

SEQ ID NO: 64041 - DNA, 122 bp, Homo sapiens
tcatgctgctgcctctctgacctctgccctggcctaggctctacggtttcaagatccatccgatggcctaccagctgcagctccaagccgccagcaacttcaagagcccagtcaagacgatt

SEQ ID NO: 64042 - DNA, 122 bp, Homo sapiens
gtgtgaagtcacctcacacagcccttgtagtctcctgcaatttggctagcaaagctatgtcggtagacgcattcagaggtggcccactccggagagggacagatgttgccagcccctcacca

SEQ ID NO: 64043 - DNA, 122 bp, Homo sapiens
ctattatttttttctccctggcagacctttggacctgaacattagattataactggacctcggatgtaggcactttcattggcaccaagtgaaattatggaaaccaaaaacacactcgcagg

SEQ ID NO: 64044 - DNA, 122 bp, Homo sapiens
gcggccggaccggcagagtttcaagggctggcgcgccggcggactttccacactgtctttcgggactggggttaggagacagcccttggccaccactgtgtccttactttgtcgctttactt

SEQ ID NO: 64045 - DNA, 122 bp, Homo sapiens
agcctttgatgggaatcccacctgcacctgttccagtccccaaggcaaggcctggtggtgcgcacgtgttcgcgtagcaatcagatgcactgtgagactcgggttatttagctccagtggcg

SEQ ID NO: 64046 - DNA, 122 bp, Homo sapiens
tcgcagaccagctttcctgggagctggccccgctcccgcgttccccaccctgccgcaccccgttgctgcggcagacgcgaccccgccccccgcaacggactaagcacccccacttcgccccg

SEQ ID NO: 64047 - DNA, 122 bp, Homo sapiens
gtcctttctgttggttatctcaattctgtgcacaacagtcaaataagcagattttacaaacgaggagctggagccctgcaaagttaaaggactttcctaggatcctacagctaatatagaga

SEQ ID NO: 64048 - DNA, 122 bp, Homo sapiens
ccttcccagaaggagctgcccagacctgcgtgtcagcccttggtggtggccagggagaggcgcccggtgcagatggccccgggcggcccaggtcctctactgtgaaggagcagggagctgcc

SEQ ID NO: 64049 - DNA, 122 bp, Homo sapiens
ggcttccgtgtgggcggggctgctggccctgcggtctgagccagcggggagaggcccgggcggaggaggctgcggactcctagaggttcagtgccggaagttgggcctggaaagggggcacc

SEQ ID NO: 64050 - DNA, 122 bp, Homo sapiens
ttgaggatatcatcaagctcctgtttggacatagatccagtcttggagcccagcccaggccgcaccactagatgcgtcagcatcattttcttctttgccacctgcgtgatgcgctcctccac

SEQ ID NO: 64051 - DNA, 122 bp, Homo sapiens
gcattcacctcccacgaccgggagtcagtctctgtgtcaggagtaaggagtgaagagtctcgcctggatccacaaaagacgtgacatctcccacccagcgtcccactgcttgccgcctggct

SEQ ID NO: 64052 - DNA, 122 bp, Homo sapiens
cgagcaaagacctccaggccctccatgaggcggcggccaaagccacggcccctcagggcccgggccaccaccactgtctccactaagaggctctggggctggttcagcacccgtgacaggcg

SEQ ID NO: 64053 - DNA, 122 bp, Homo sapiens
cacactgaaacactgccatagcacagcagggcatagaagacaggctcatgctcccctggacgctcaggccttcacctcgggcacactaggtcttgtcattccatgtcaagaatagctcttca

SEQ ID NO: 64054 - DNA, 122 bp, Homo sapiens
gacgggggggaaactgaggcccagcaagtaaagggtagtactaggattccaagctagcttcgtcacacccctgaggctgaggtcttgaccacagatcctaattgccaacccatgaaagcctg

SEQ ID NO: 64055 - DNA, 122 bp, Homo sapiens
gtttataatttgtaactggaggtggccaaaggcataacctcactggatttctcaatctatcgtcgttaaatagctgtacattcagtgaaactagagacattgttcagtcttccatgatttct

SEQ ID NO: 64056 - DNA, 122 bp, Homo sapiens
tgagctgtcctggagacggggtactgtgcagtggtcggggtaggggtggagctctgccgtcgctgactcccgggctacctggagtgataacacagcccagtgtctgggcccctgcctgagac

SEQ ID NO: 64057 - DNA, 122 bp, Homo sapiens
cgctcgttccgcgctctccgcgcctcagcgagcggccaggctgcgggcggggtgggctggcgctcctgatccacctggaacacttttgcaaagacagacggtgagttaatcaccctaccggc

SEQ ID NO: 64058 - DNA, 122 bp, Homo sapiens
cgcgtccccccgacaccacacgcagtctggggaactcgccatcccgccttcccaactccccgccatgggccctcccagggctgcccctacaccaggcgccccgttcccaccccctgggcctg

SEQ ID NO: 64059 - DNA, 122 bp, Homo sapiens
ctcagtgcagcagtctcacagacacccaagataacgttatcctcacggaaacgagctcgacgaagtgacctacctcagagcctcaaggctatggtgatgctggcatgagaaacaacaggaga

SEQ ID NO: 64060 - DNA, 122 bp, Homo sapiens
aggcttcatgcgttacacctaagttctaggtggtttttctggctatgtgtgtctgtgaagcggaactatggagcactgctgatgcgggtagggacagacatcaaatacattacaaaaaaaat

SEQ ID NO: 64061 - DNA, 122 bp, Homo sapiens
caggaggctgcactgcaagggagcgtcagtggcccggctggctttccccggccctcagcccgcactcgtccaccaaagcaagctcctttgtggggctgccctgggaagccgggatcacgagg

SEQ ID NO: 64062 - DNA, 122 bp, Homo sapiens
tacatgtaaccattaccacagccaagtttggaatatttttatcaactcaaaaagaaacctcgcatcccttagctataactctccttctctcttccttctcccctacccccagacctaagcaa

SEQ ID NO: 64063 - DNA, 122 bp, Homo sapiens
gcccagacaccaacaccacgatcattcagctgcagcccttgcaggagcccgagagctgggcgcgcacgcagagtggcctgcagtcctacctgctccagttccacggcctcgtgcgcctggtg

SEQ ID NO: 64064 - DNA, 122 bp, Homo sapiens
tcagctctatccccggggcccgcaggacccaggggacccaccctcccgcgagcacgcacgcgcagggcccacctctgcgagttccaaaccctcggccctcgggtcgcctgccctgggcctgg

SEQ ID NO: 64065 - DNA, 122 bp, Homo sapiens
gatcatcctcctgaaggggtgctgcatggagatcatgtccctgcgggcggctgtccgctacgaccctgagagcgacaccctgacgctgagtggggagatggctgtcaagcgggagcagctca

SEQ ID NO: 64066 - DNA, 122 bp, Homo sapiens
ggcaccaagggcaagggacctagagctggtgccagtggatggcctggctccacaggaggccgcatgggtggggaaggccagtgcccgtgccagggtgcagggcaccgacacgggaggccatt

SEQ ID NO: 64067 - DNA, 122 bp, Homo sapiens
ccggctattccggggcttggtgcggtcttggagccggagggtggcccgtgtgagcgcgagcgccccggaccttcgcggtgcgcgtggactgtgcgcttcctcgtctttggtcggggtgaagg

SEQ ID NO: 64068 - DNA, 122 bp, Homo sapiens
cgtgatccacctgccttggcctcccaaagtgctgggattacaggcgtgagccaccgcgcccggccaattttacttggttttaatcagctcaaatgagagtttaaatagccgcatatggctag

SEQ ID NO: 64069 - DNA, 122 bp, Homo sapiens
ggttagcgtgctctctgtggttagcgtgctctctgtggttagcgtgctctccgtggatagcgtgctctctgtggttagcgtgctctccgtggttagtgtgctctctgtggttagtgtgttct

SEQ ID NO: 64070 - DNA, 122 bp, Homo sapiens
ggcaacattcaccagcacaggtgccagaaatgctcaaaataacagtaagaatggcaggcacgtcctcaaagggctcctttctcaccacatcttgaggtcttccaaaatctctaatccttcca

SEQ ID NO: 64071 - DNA, 122 bp, Homo sapiens
ccatccccgagagtcagtatgtggggtgggtgtggacagcgggtgtggacagcctgccatcgttttcctctctctctgtctccacgggcactgccaacgccccgtctttcaacctcctttgc

SEQ ID NO: 64072 - DNA, 122 bp, Homo sapiens
gtgcgcccggtgccggtcgcagtcccaaaagctcctggaggtgacatccaggagcaccaccgcgctgcccgcagggagacccatggcaaggcgcgcccactaaggcggccaaggaagaagca

SEQ ID NO: 64073 - DNA, 122 bp, Homo sapiens
ctggttgacttcatagcaacctaggtcttagcatccagaacttgttcatttgaagaactccgccctcggtctacttaggggtttattcctttcacttcattccaatgccactgctaaatcca

SEQ ID NO: 64074 - DNA, 122 bp, Homo sapiens
ctagcccaggcctcacagccgccttcccgccggtctcccactgccttggcggggcgctggcgccctctgctggccaagtctcgctctgcgcgcaaacgccccagaaatcagccggaagttcc

SEQ ID NO: 64075 - DNA, 122 bp, Homo sapiens
aaggaaggaagcgagggagggagggagggagggagcgagggagggaaggaaggaaggaagcgagggacagagggaggaaaaagagaaagttttctgccctagacactccagcctgggcaacg

SEQ ID NO: 64076 - DNA, 122 bp, Homo sapiens
ccctttccgagtcaaagaaaggggtgacggattcacctggaaaatcgggtcactcccacccgaatattgcgcttttcagaccggcttaagaaacggcgcaccacgagagtatatcccacacc

SEQ ID NO: 64077 - DNA, 122 bp, Homo sapiens
ccaaaggaaagcccttccttcagagcaagcgcaagacatatagccccgctcattgttaagcgaggccaaggcaacccttaggcgcgctctatttcccctttcgtagcgaaagggccaggcgt

SEQ ID NO: 64078 - DNA, 122 bp, Homo sapiens
cagagatcagagagcgggaggaagacagcaggagggacttggggagacccagggagaccccgaggggaaaggaacagagacaccaagactctgagacagaggatgccgcagctgaagaaagg

SEQ ID NO: 64079 - DNA, 122 bp, Homo sapiens
agtcgaggaaggcccagggttcggagcttgtgagtggacggtgctgccagccagaatttccgagctcgccttgggcccttaaagtctgtctcccgccgtctgagagcatcagggacgcgccg

SEQ ID NO: 64080 - DNA, 122 bp, Homo sapiens
tcagggatggctcccacggggtgtttccagttcccgggagagtcgagtaaggtcccggagcgcacggccctgaggcctggcctgggggctcgggagacagggcggccccagccggccgccca

SEQ ID NO: 64081 - DNA, 122 bp, Homo sapiens
gcgccccaagccccgccctgtcatggttttcctctccagagggtagccgctacgccttaccgactgcgtttcagtgctgtcccactgctcctgcacaccccacgcctgcgaccctacccacc

SEQ ID NO: 64082 - DNA, 122 bp, Homo sapiens
aagagtggggtgtcagtgtctgggaggcttcaccagccttagggctaccaggggattaagcgcagctccaaggttgagagtgagtgtttacttcctgcattctttcactgtccttgctctag

SEQ ID NO: 64083 - DNA, 122 bp, Homo sapiens
tatcaaattcaaccttggagttgaatcttgggcatctagaagcatcttttattagtcagccgtcgggatacagaagaaaacaggaacaggactctgtgcgacccctggtttactaacccaca

SEQ ID NO: 64084 - DNA, 122 bp, Homo sapiens
actggggactggttaaagccatacaatgggatgatcccatttttggtttgtgcacatgagcgtgcatacatacacattaagaagactgcatcaaagtgaataaggcagtttgcttatagata

SEQ ID NO: 64085 - DNA, 122 bp, Homo sapiens
cacaagctcagtgtcctgagtttggtcctcgccatcccgctgccaggtcagtgtgatctccgcagggtagaaacccagggcccagcacctcagggtggcctcatggtcagagatggggtggt

SEQ ID NO: 64086 - DNA, 122 bp, Homo sapiens
ttcctgtcctgcactgctgtggtgacagagtctttcttgctggcagtgatggcctatgaccgctttgtggccatctgcaatcctctgctttatacagtggccatgtcacagaggctctgtgc

SEQ ID NO: 64087 - DNA, 122 bp, Homo sapiens
cctgcccagcccccagcccggcaggtggatggggacgccggggcccccgtggcgcacctgcgtcttggtggtgagctggatcaccgccttccggaagttcagcttggagtcggtcgacccca

SEQ ID NO: 64088 - DNA, 122 bp, Homo sapiens
ggcgcgcctgcctgccctgctggacgagcagcaggtaaacgtgctgctctacgacatgaacggctgttactcacgcctcaaggagctggtgcccaccctgccccagaaccgcaaggtgagca

SEQ ID NO: 64089 - DNA, 122 bp, Homo sapiens
cgcaggaatatgctggaaggcggcgggcgggcgcccgcgaggtgctgaaaggacagttcccgccgccgaacttagcccgcgggtggggcggcccgggagccagcggggcacgtgagcgatgg

SEQ ID NO: 64090 - DNA, 122 bp, Homo sapiens
tagagccctcctttaatcctatgcttccagactccaaacctgtgcacttaactgttactccgtaagaaaaggtttgggtctgattcctcttctaggttataaatactagggagcttcctctt

SEQ ID NO: 64091 - DNA, 122 bp, Homo sapiens
atttagatattgtttgaagtgtttgtgatgctttacaaatgtcttttttagtgtgaagatcggagttgactattttaaagttggacgccatgtggatgctatgaatgaatacaataaagctt

SEQ ID NO: 64092 - DNA, 122 bp, Homo sapiens
gtcctcccccaatttccagactagcattttaccctgggtctagaattggtggtgataagccgacttagatggagtatttgagaaaaggggaggtgaccctttgcctgaatgggggagggggc

SEQ ID NO: 64093 - DNA, 122 bp, Homo sapiens
actccgtgagcatctactatgccccctatttatgttaggacaccagccctgctccaaaaccgttgtgtgcccatgtcagtcccaacagaaacctcccatcacccatgcagccttggctctct

SEQ ID NO: 64094 - DNA, 122 bp, Homo sapiens
agaccctatctcaaaaaagcaaaccaccaaaaaaaccagggacagctcaatgctcttttccgtttcatagctacttacactcagatttacaaatacctattaacttgtagacagggcaagaa

SEQ ID NO: 64095 - DNA, 122 bp, Homo sapiens
gcgactctccctgtgtcccgcaagtggtttctcgaggtacccctctgaggctgcagcccccggagcagacctggctctgcatagcagcaaaagcaaccgcctacctgggccggggcaggact

SEQ ID NO: 64096 - DNA, 122 bp, Homo sapiens
taggatcgcttgccagtcattagtctctagggaacggggctttgcccagctccccgaacccgacccaaaaggcaggaccaacttagaaaaaccagatgggcagtcgggctagggcaggctcc

SEQ ID NO: 64097 - DNA, 122 bp, Homo sapiens
ccccgcttcaaatcacactcatcttaccagggctaccagccacagcgtcctgcagccccacgcttgacaaaagaaacctagaggaaaggtgtcattaccaatctttacccccgaaagccacc

SEQ ID NO: 64098 - DNA, 122 bp, Homo sapiens
cattttgactgctctgaagtacatgcagtggcagtctttcttgttttatgtaaaagtgtacgtgggtggaaaggcaagaattatggcttatagaaggctgtagctatcaggggaaatcccta

SEQ ID NO: 64099 - DNA, 122 bp, Homo sapiens
ccacgccctggcacgcagccccaccggctgtgccgcctctcgttcctgtcctcctggcaccgccggccacccctcagcccagccctcatggttctctaagccgccgcctcctcaggaagcct

SEQ ID NO: 64100 - DNA, 122 bp, Homo sapiens
gccaggtgtggtggtgtgtgcctgtggtcccagcttctcaggaggctgaggtgggaggatcgcttgagcatataagccaagatcgccccactgcactccaacctgggtgacagcaagaccct

SEQ ID NO: 64101 - DNA, 122 bp, Homo sapiens
ggagcccgccgcagaccccgccccttctcctttccgactgggcaggcggggcaggaggggcggctaccacgcgggagcacccatggcgcatgctctctggtgggctagtcttcggacggcgg

SEQ ID NO: 64102 - DNA, 122 bp, Homo sapiens
tgaactcccgacctcaggtgatccgcccgcctcggcctcccaaagtgttgagattacaggcgtgagcccctacgcctggccctcgttccaacttttgattacgagacatttcaaacatacag

SEQ ID NO: 64103 - DNA, 122 bp, Homo sapiens
atcctgagagcactgaatgtcaggagctgtggttgaaggaccagagcagggcttggccttcgcagtttagctctttaaaatgccatcctgattcaggttttccttgttgattggcttatgac

SEQ ID NO: 64104 - DNA, 122 bp, Homo sapiens
tgcctaggtgaccacaggataaacagcctgctcaaataaaggacatataagcagcacagtcgaataggaggtaccaggttttagggtcagtgaatcatcataaaggttctcctgtcttttcg

SEQ ID NO: 64105 - DNA, 122 bp, Homo sapiens
atactggtgggggaggaaagagcaggcggggccacacctggcgggggaggaaagagcaggcggggtcacacctgcagggggacacacagcacagcctccctccactgccaggtctcccttct

SEQ ID NO: 64106 - DNA, 122 bp, Homo sapiens
accggccctttttgagcacctgggtgcaaagacaaaatgaacagtcattgcttttgctttcggaaatcttaaaggctagtgtaaggatattaattaaataatgacactaagttatgaagtct

SEQ ID NO: 64107 - DNA, 122 bp, Homo sapiens
cagactaagatgaaagtcgggccctcagaccacgagctccggaagaacaggcagttgtcgcggagacagcaaatgcagcatctacctgtcctacatggccctgcgctacgagactgctcgga

SEQ ID NO: 64108 - DNA, 122 bp, Homo sapiens
aaaacataatttatatatttgtgtatgcagtagggaaatttgtacctcattcctttcactcgagcttttatttccattgcatgtctctcctcaaatttgatcctaatgtacttagaagttgt

SEQ ID NO: 64109 - DNA, 122 bp, Homo sapiens
gtgtgtgcggtgccgaggagggcactgccttcaggatggaggctgtacaggaggggcggccggggtggagagtgagcaggcggctttgggagttggaggcagtgctggtggcagatgacata

SEQ ID NO: 64110 - DNA, 122 bp, Homo sapiens
tcaatgaggaagatgagtatgaagatcaggcccttcttcccacagcaatagtccccaatacgtagatttttgctcttctgtatgtgacaacatttttgtacattatgttattggaattttct

SEQ ID NO: 64111 - DNA, 122 bp, Homo sapiens
gcttttctggatataaaaaaggtacttctggatccgaaatatctaagctagatgtgagagcgtcagcttgctccactggggagggaacttcagagccagcccccctcacccaagtactactg

SEQ ID NO: 64112 - DNA, 122 bp, Homo sapiens
aacctggagagccgccctgcattacttccgctggcttccagttcctgttgctggacaccccggctcagctctggtactttatgttgcagtatttgcagacagcccaggtgaggaggcagggc

SEQ ID NO: 64113 - DNA, 122 bp, Homo sapiens
tggtcttgctgtgtgcttgcctttgctcactccctgtccccatctccttccccgcacagccgttcgaggctccatccagcaagttacccacgagcctgagcggcaggactcagccatccacc

SEQ ID NO: 64114 - DNA, 122 bp, Homo sapiens
gggcctcggctgtgtgaggactagaggcggccgaggcccgggccggttcccccgaggcggcgacggagacggctcccggcacttccccgcgccatcttaactgagcccaagcgctgagggcg

SEQ ID NO: 64115 - DNA, 122 bp, Homo sapiens
cggcgccggacgttgggctgcgcaggatttgagacgctcccctgaccaccacttgctctgcgctgaggtgctgggacagccatggtttcagacggtgaggaccctgcagggcgggacttcga

SEQ ID NO: 64116 - DNA, 122 bp, Homo sapiens
ccgcccgcgctcccggcctgctcccagcgccgcctcccccgttagaaacttcgcagacaccgcgaagctgctctttggagttggagaaacttaggaagaatgggaaaagccgaggaagtcgg

SEQ ID NO: 64117 - DNA, 122 bp, Homo sapiens
cagagctctgggtagcattgcttccaccagcgtctcctcatacccggcggctgcttcgcccggtctgaggtcatcttctcacttgttggggattatggttatctgaggttgcgtttgttgtc

SEQ ID NO: 64118 - DNA, 122 bp, Homo sapiens
cgtctggaggccgacccgagggctggccagggctgctcgcggaaagggcaagcgtggccccgcagtgatccacgaggctctggttagcccacccgcctgctgccgtgcacagagccgcgggg

SEQ ID NO: 64119 - DNA, 122 bp, Homo sapiens
gcctagccaacagctgtcctgttagccccaacagaatgctacaattttgttttcctttttcgtagatactaataaaaaaaaaaaaaagcgagacctaaacaaaaagtactaaatgtttgttg

SEQ ID NO: 64120 - DNA, 122 bp, Homo sapiens
caaagtgtcagtcaggttgtcctcagcccagaagactcttcctccagacatcctcatggccggctctgtcgccccctggaggcattagctcaaaatccaccttttaaatgggtcttatcctg

SEQ ID NO: 64121 - DNA, 122 bp, Homo sapiens
ctgttgagcctgttcgtaaagttcagtaaaaatccagttctcattccagaacagctgaatcgtagctatgaacgcggaagaacagagtcccaaccccagccgggcccgggtttcccggggcc

SEQ ID NO: 64122 - DNA, 122 bp, Homo sapiens
caagaagtgggagctggaagcctgcgtggatgcggccctgctggccacccagatggaccgcgtgaacgccatccccttcacctacgagcagctggacgtcctaaagcataaactggatgagg

SEQ ID NO: 64123 - DNA, 122 bp, Homo sapiens
cagtcaggtcgcagggccacagcagtcactctgcgactctctcttccggtgtttctccagcgccaagcgggagaagacggagcctgggagctgggactggaggagcgggaagcgcagtatcg

SEQ ID NO: 64124 - DNA, 122 bp, Homo sapiens
cgtctcaccggccacccgccgtcaccatggcagatgcccttggccggaactaataagaggcgtcggggccagcttccggtcccctgcagtgatagagggcttggtgcctagctgagtcctcg

SEQ ID NO: 64125 - DNA, 122 bp, Homo sapiens
ttaatcttgacttctgcatgtctcagggtaggtaacatgacagtggtgtaacctagttgccgttgtttactgattttactctgctgctctcatatgctgtggctttcttgctccttgacttc

SEQ ID NO: 64126 - DNA, 122 bp, Homo sapiens
gtttggactccagccagggctctgttcactggccctgggtgctgaggctgggccaggccacgtggcccatgagctggctggggtggaggggcagatgcgttgaggctaccccatggatccac

SEQ ID NO: 64127 - DNA, 122 bp, Homo sapiens
agtcccatgctgaatttgggaggtgcctgtgagccccgactaaaggagggcctggggatgcgggaaaggggaggtgtccctgtcacctgcaggcgctgtgcacagatgtccgcctgggaggg

SEQ ID NO: 64128 - DNA, 122 bp, Homo sapiens
gtttctaaattttcagaatggagggagggagaagatggagtgctaagatttgaaattcaacgtcactgctttaaattgctggtcttgagtgtggcctaacagtgaataccctgggcatcctc

SEQ ID NO: 64129 - DNA, 122 bp, Homo sapiens
ccgcccgcttcttcaagcagcccaccttctgcagccactgcaccgacttcatctggtgagcgcgcgcgcgcagggcaccttcccgggcccccgagggcagcgccgcgccagggaccccctct

SEQ ID NO: 64130 - DNA, 122 bp, Homo sapiens
tgggtgctgcccgtggccactccctgcgctggtgcagccttggttctggtggagcgctagcgcccccgggcccgcaggtgtcgggacgggaatgcttcccgctgaggccggtttctgcggcc

SEQ ID NO: 64131 - DNA, 122 bp, Homo sapiens
tcctgccttcctgctgggttcaaatgccaggcttggcggttggtggcacagactgggaaacgtgactcctacacctgggggtctgccctcagagggaaggccctggtcccccgaactggcag

SEQ ID NO: 64132 - DNA, 122 bp, Homo sapiens
cggcccctgctcatctcagccccaccactctggacggcccacttcccttcggctgctccacgtgtccctacaatccgagcccacggaccaagcctccttggagtgtccagctgcccaaagcg

SEQ ID NO: 64133 - DNA, 122 bp, Homo sapiens
acaaagggaggagggacttccctttgtttcccgatgtaaatgacctacggctgctcaagccgtcccttttctcgaccacctttccgtggacgtatgaagccccgaacctgtgcagtgcagaa

SEQ ID NO: 64134 - DNA, 122 bp, Homo sapiens
ccgtgcaggagccgggggtgcgcccgccccggctgctcagccccggcccctcagccctggcgcccaccgtcaggccggtgcccagcacgatcacgtcgtactcctcattcatggcggggcag

SEQ ID NO: 64135 - DNA, 122 bp, Homo sapiens
tagggagtccccgggcccttggtgtgctcacatctgagtgaatgctgttgtggccacaggcggcgggagtgggggtgctggatggcccagcccctctggggctccagatcggtaggagcggg

SEQ ID NO: 64136 - DNA, 122 bp, Homo sapiens
cattagaaggaatgttcctggaaggaaccaggactgcgggaaaattgcgaagtctgtaaacgtagttcttctgctgctgggccccattctctcagctgaaagttgctatggagcaggcaaaa

SEQ ID NO: 64137 - DNA, 122 bp, Homo sapiens
ccggtcagggagcagctctgggggaccaggcctggccacctatgatggtgttggtggagacggcttccgacgaggtcgggttcgtgcctaggcgtgtcctgcacattcgaggccacagacgt

SEQ ID NO: 64138 - DNA, 122 bp, Homo sapiens
tatgttgttgcgtgtattccagccctattttgcacatgaggaaactgaggcacagagaggcgtggcttgccccggaggtcacactagtcgatttggtcccaggccagggcgggttctgggtc

SEQ ID NO: 64139 - DNA, 122 bp, Homo sapiens
cccacctcccatgaaaactgaacccagcagctccgggatccggtgtctgcagctgctgcccgcgtgttgttctccctctgtgaagtccaggcagccagagacagggcagggcaactgggagc

SEQ ID NO: 64140 - DNA, 122 bp, Homo sapiens
gccctgcctgctccacctgaccccggagtcccttgggacagcaggactgggacttggccacggagaccattatctgatgtacctttagccagcgcgtccttatcttgacagtgggcagaaca

SEQ ID NO: 64141 - DNA, 122 bp, Homo sapiens
gtgatgtgtgaccctggacagagatcaaacagctcctttctagacccagatgacccagaacgcagaagcctagtagttggtatcaccagtgtctcttcaaaagggccccacaaaaggctgtc

SEQ ID NO: 64142 - DNA, 122 bp, Homo sapiens
tcccggggttgaggctctcaccggagaggggccctgggagatgagctggggcacgacccccgccccgggcaccgaggggggcttccaggtcagggtcggagaggcttcgggaggacgcggct

SEQ ID NO: 64143 - DNA, 122 bp, Homo sapiens
cgacctcgatgactcttacgacgagagcgatgaggaggaggtcagggcccacctccgttgcgtggccgagcagccgcccctcaaactggacacgtcctctgaggtactgggctctcctcccc

SEQ ID NO: 64144 - DNA, 122 bp, Homo sapiens
cgcagattcacctccaggtggaattctagctcgcgcggagctggagaatcggggctttcccgtgcggtccgacccgggtccaagccaacccccgcccgagtggcgaggccgcgaaccccggg

SEQ ID NO: 64145 - DNA, 122 bp, Homo sapiens
gacgtcccaaggccaatgagactggtgtcattccagaaaagggccactctgtgggcgggtcggtgggagggtacctgaaggtggggtcaagggaggccccaaaacagtctacacagcaggag

SEQ ID NO: 64146 - DNA, 122 bp, Homo sapiens
agctctctagaatcccagttaagaagtatttgccccttagaagactgagaggcaggaaagcgttgatgagggtggaatctttggcaggtgcctggcccaatacactgagctgtttggggggc

SEQ ID NO: 64147 - DNA, 122 bp, Homo sapiens
ccagagagtctggcgccagctgccggcaacggatagaggggctgtgtcatagacgtccgacgtgtctggtaaggccagagcgcctttcctcggtcctcctagacatggtgtccgctgactca

SEQ ID NO: 64148 - DNA, 122 bp, Homo sapiens
tgcagaggagaacaaaccataactggcaccagcctgaaccagcctttggaggccttatttcggtatttctgagggcagccctagcattggaggatgggagatcttgggaaaaatgttgtatt

SEQ ID NO: 64149 - DNA, 122 bp, Homo sapiens
gcgccacacggcggcgcagtgatggatgttaacagcagcggccacccggacctctacgggcgcctctgctctttcctcctgccggaggtggggggcaggctgcccgacctgagccccgacgg

SEQ ID NO: 64150 - DNA, 122 bp, Homo sapiens
ggggcccggcctgcgagcctcagggagcgtgagcggatccgagggtgtaatgtgtgtactcgagtgtgcgtgcctgtgtgtggctaaagatagtgtgtgagcgcctggacagatggttaccc

SEQ ID NO: 64151 - DNA, 122 bp, Homo sapiens
tttaaaggaggaggtatatagtatagcgccaacttcctgattaggccttggggaaggtcacgttttgcagtgacctgggcaccactcttaaatgttgttattattggaagagggtaccctca

SEQ ID NO: 64152 - DNA, 122 bp, Homo sapiens
agggttggaggcggggggtagggtagtaggtgtgtgtggagggggtgcacactcgatccccgaaccagacttgaacccctacccagccccgggtcccactcgccttgcgcgctccggccgct

SEQ ID NO: 64153 - DNA, 122 bp, Homo sapiens
ggtgagtgtatgtgcaggtgagggaccgggcaggtgagagtatgtgcaggtgaggggccccgcaggtgagggtatgtgcaggtgagggaccgggcaggtgagggtatgtgcaggtgagggac

SEQ ID NO: 64154 - DNA, 122 bp, Homo sapiens
gcctcacctcgggttgaagtcctggaagaggcccctcaggttcatggcggagaacttcaccgcggcgtcctcctcctcctcccccgcaccccgtgctgcacagcctgcgccttacagcgggt

SEQ ID NO: 64155 - DNA, 122 bp, Homo sapiens
tagagatacccctggcacacactcacatgtagcatccctcagctccacctcctgtggtttcgtggacatttgctcagacagctttggtgcacacacactagtgcccttctcacttagagctt

SEQ ID NO: 64156 - DNA, 122 bp, Homo sapiens
ctgtcagacttccctgtgcttatgcttgggctgcctactgctacagcaacctcagttgggcgcttcttcttttacgccatagtggcagcattgtcttcatggttctttaccctcctaactag

SEQ ID NO: 64157 - DNA, 122 bp, Homo sapiens
gaagactggctggagggactcagagccagggctgtcggagtctaagccccgaccaggagccgggtggactggcccctccctctggtcacagctacggagtctagatcctgactcagcggaca

SEQ ID NO: 64158 - DNA, 122 bp, Homo sapiens
caaaagagaagtgagtttttgccaggtgagggaagggtaggctggaagaagcagtgtggacgaaaccagagagaacatcaaaacaatagctaggagttgttaaactgcccagccacttccag

SEQ ID NO: 64159 - DNA, 122 bp, Homo sapiens
cacagcccccacagccagagccacagcctccagaacagccacagcagcccatgattctggcggattgagagtagagcaggtagaggagcaggtgagagggaggtgcaggtgtggagccccct

SEQ ID NO: 64160 - DNA, 122 bp, Homo sapiens
gcctgggtgcccggagtgtttgccactgagacctgggcctgcccgtggggggcacggtaccgagtttgggcagtggcggcaccaccggggagtggcctctggaggcgggaggctggagcaag

SEQ ID NO: 64161 - DNA, 122 bp, Homo sapiens
cagcggaattccctaatgccagcggaattccctaatgccagcggaattccctaatgccagcggaattccctaatgccagcgggggtctgaaaggtctcagctgcttaggatttcgttggtaa

SEQ ID NO: 64162 - DNA, 122 bp, Homo sapiens
gtgagtgcgcccccgcctcggggcgagggtaggggcggggaaggaggaccccaggggaagcgtcgctccccaaccctgcctgggacccgccacgcttagcaaaagcgggagggctggttctt

SEQ ID NO: 64163 - DNA, 122 bp, Homo sapiens
tggcagttctcagacgtaggaaataagtcagcaccgaagcagtggttaagccggagggctcggaagaacggcaccttttctttctcgaaaaagttatatgggggctgaatgagcttctggag

SEQ ID NO: 64164 - DNA, 122 bp, Homo sapiens
catgcttcacattcacctacccacaaactagtggatgataaattttggctattcagaagacgtttattataggagtatgtagattttccatagagtgctgttatgtgacttgaattttagtc

SEQ ID NO: 64165 - DNA, 122 bp, Homo sapiens
ccctcgcgctggctgtgcgcaccctggcgcaaagcactgcaggttggaggcggaaagcagcgcgctctggggccactggcgggtttttgctgccacctcgcggcgatggtgcatagcatgcg

SEQ ID NO: 64166 - DNA, 122 bp, Homo sapiens
acgtcgggccgctctacccagatcatcactccttaagaatctttggttctttaaagacaccggccccgaagctcacacctcgagacaccagcattcggcgttagacacacgcagaggggacc

SEQ ID NO: 64167 - DNA, 122 bp, Homo sapiens
cgttggcctgcaggatacccgttcatgccgccatactggggcctgggcttccacctgtgccgctggggctactcctccaccgctatcacccgccaggtggtggagaacatgaccagggccca

SEQ ID NO: 64168 - DNA, 122 bp, Homo sapiens
tagggccgcctcccccaccagggaggacgcgggtgcgcgttgtatttttagccagggcagcgcgccccggggcagcacacgtgcccccaggcgctgctgggcaagccccacgtgcgcttccc

SEQ ID NO: 64169 - DNA, 122 bp, Homo sapiens
ccatcttcaagctgcattgagcatgatgagagttcaaagcaagaagcagttctgcccagtcgaatcaaggaaaaccctccgaggagaggccatgagtcaggcctgggtctgtgtgcaggaac

SEQ ID NO: 64170 - DNA, 122 bp, Homo sapiens
gcggcgggctgaagggctgctggagcgcggccagagcggacgccgaggccgaggaggcgccgagagcgagtgagagctgctagccagttgtcacctctcacagagaggtaagtgtataatat

SEQ ID NO: 64171 - DNA, 122 bp, Homo sapiens
ctcctgttggatgcaaatagtttcacagaacatcaacactagacaaggccactccatgaccgtgatggatcaggacaaaaacaagacgactccataataacatctaaaccacaaaagcatga

SEQ ID NO: 64172 - DNA, 122 bp, Homo sapiens
ccttgcttcccccttacccccaacacacagtaggacctggctggctagcagaggaaagcacgctgggccgaggccaacggcagaatgcggaccgtggtggagggtggcggccaggggttgtc

SEQ ID NO: 64173 - DNA, 122 bp, Homo sapiens
gggccctccaggatctcactccaagcttgcacaatggcccacccatgccttctagtgttacgtactctgacttccagccctggaaaagccttcattaagccttactttacagatgagcctct

SEQ ID NO: 64174 - DNA, 122 bp, Homo sapiens
cgggtaggaggtgggcagagaaggtgggctgaggggaggagaaactgggctgcgggggtccgggagggtggattccgagaaactatgtgcccagctgaccctgcccgccccgccgcggccct

SEQ ID NO: 64175 - DNA, 122 bp, Homo sapiens
tcaagggctcactgcggctaagtgaacgctgactggtcctccagcgtgagctagaacagacgtctctatggtcaagtaaacagagcgtgtgctgtcttccccatgtggtggggttgcgcatg

SEQ ID NO: 64176 - DNA, 122 bp, Homo sapiens
gaccgggggacagtcttccagcttcagtgctgttggactgctcagggacctccaaccctgcgaacggccactgacatgtcccgtagacctcagcttcctctctgggggagggatctctgacc

SEQ ID NO: 64177 - DNA, 122 bp, Homo sapiens
cccagttgaacccctccttccagctcccgccatgtcctccctaatctagcggcctgtgcccgccacccctgcggttcaggactgcaggaactggagaggccttgccaggcatcccagagcca

SEQ ID NO: 64178 - DNA, 122 bp, Homo sapiens
ttccccgtggggcctggggtatggctctaagggaggagcaagtgtgggtgcgaatggggccgccccattcctgccgcctccgacgtgccccgccagccggccaccgacaggtctacgtggct

SEQ ID NO: 64179 - DNA, 122 bp, Homo sapiens
ccggcgatccctgagataaaagtttgcagcatgcggctcgtctgcagtgcgagtcacatccgccgcgccgcctcctgcagcaccaacgctcatagaacgaacaaatacattaaaaattaaaa

SEQ ID NO: 64180 - DNA, 122 bp, Homo sapiens
aaagaaatatatggaaggctgaaaaatcatttgctcaaatttgtccagatgtttttgagacgtgattggaatttgattgcccctttccgcagggtcaaaaaatattaatgtcccagaacttt

SEQ ID NO: 64181 - DNA, 122 bp, Homo sapiens
ggaaaaaatgcaggaacagccagatgccgggggattcccggaagtgctgctcatcgcccccgccgcccccacccacaggttccacccaatgctttccacccttaaggcccaaagagctggcc

SEQ ID NO: 64182 - DNA, 122 bp, Homo sapiens
tggcgggagagtgtgcggagctgggcctggcgctggggacggagtcgctgctgctgctgacggacacggcggacgtagactcggccgtggagggtgtcgtggacgccgcctggtccgaccgc

SEQ ID NO: 64183 - DNA, 122 bp, Homo sapiens
tctccatatgccattcttcattttccatcctccattctactttgtccacattccattctccgtattcagttttcctctattctccatgctccttttccatcctccatttgctatattccatt

SEQ ID NO: 64184 - DNA, 122 bp, Homo sapiens
ccgccgtcgctgacctgcggtttacgcatgcgcgcaggaccgcgcacagcgattgggcggcgtggcaggggtcacccactgctcttccggacgcaattttgaggaggtcggagcggaaggac

SEQ ID NO: 64185 - DNA, 122 bp, Homo sapiens
ttgaacttgctgtggaggggccgcagcggaagggccggccactgcatgggcagtagggggcggtcacgtaggcctctcacccgctccaagaacctgtgtcactgtcggaagtgtcacggcct

SEQ ID NO: 64186 - DNA, 122 bp, Homo sapiens
ggtatgtacagtagggtataatttttgttaaaataaaaacacaacacaacgtattttctacgataactagaaaaaaagacctggaaggctgccaggatacacaccaaactgttaacagcagt

SEQ ID NO: 64187 - DNA, 122 bp, Homo sapiens
gggtcccgggtggggtcggggccagagggggtcgctaggcgggtgttccacggctgatcacgcttcgttggccccaggcggtgggcgccggcagggcagggcgctgtagttgacgggagccg

SEQ ID NO: 64188 - DNA, 122 bp, Homo sapiens
agccacccgagggcagtcggggcaggtggcattccggacacctgggcttaccagggcatacgggaccccaggaaatgttatttttgcttaagtcaaatcatatgtggctgctaaggtgcttt

SEQ ID NO: 64189 - DNA, 122 bp, Homo sapiens
ggcttttaatttctccataggcctctggaaatgtcagccaagatccgagtaccatttttacgtcaggttgttcccattagtaaaaaggtaaggaagaaggccaggcactgtggctcacgcct

SEQ ID NO: 64190 - DNA, 122 bp, Homo sapiens
gcacttggacgggaccctggggctctgggagagatgggtgcggatccacggggtgggctccggggggcacacgggattgttctccttccccgtctctgtcgtgggccactggatggtccagt

SEQ ID NO: 64191 - DNA, 122 bp, Homo sapiens
caccatttgtaaagcagataaaagcaaaagggctctggttaaaatcatgggggagggacccgggtatgacttcctccatgtggttccccatacacacaagccagggacctctgaggaatcct

SEQ ID NO: 64192 - DNA, 122 bp, Homo sapiens
gtcaagccccggactgggacccgagcctcagctgtcatttaaagagataggctgcagccgcggctcccgggctccgacgctagggggcggggccgagagccgagcctgcaagaggtgcagct

SEQ ID NO: 64193 - DNA, 122 bp, Homo sapiens
cgctccattacccgccagttatcttttaagagaaaatacaaggcttcaaatgcacctgtacgacatctaagagtgctctggcagagtcacacctctgcaaggttagagatgtcaaagggagt

SEQ ID NO: 64194 - DNA, 122 bp, Homo sapiens
gggaggtgaggggcgcctctgcccggccgcccctactgggaagtgaggagcccctctgcccggccaccaccccgtctgggacgtgtgcccaacagctcattgagaacgggccaggatgacaa

SEQ ID NO: 64195 - DNA, 122 bp, Homo sapiens
cagcacccctgagctccggggaaggagagttaatgaaaaaacacttaaccgtctccgctgcggagagtcatgagctgtctggatgttatgtaccaagtctatggtcctccgcagccctactt

SEQ ID NO: 64196 - DNA, 122 bp, Homo sapiens
agattgttgcaacctcagaagggagaaagtagttttcagtcaataagggcaggggacccccgaggagagctgaaagaacagcaatccagcacccaagcaccgcagggcaagtgtgtgagagg

SEQ ID NO: 64197 - DNA, 122 bp, Homo sapiens
aggacttcaacttatgaattttgggggagagatagtcaacccataatgggcataagagaccgggagtggtatatgaaatatagtttgaattccacctcaagaccttgagcttatgacttctg

SEQ ID NO: 64198 - DNA, 122 bp, Homo sapiens
tgaggaggaatttaataataaagaacagttgggaaccagaaaaagaacaaaaaaggaaaacgaggcaatgcccgtgaggcaagggttggtacataatggttgtcacagagcaatggcgggcc

SEQ ID NO: 64199 - DNA, 122 bp, Homo sapiens
gcgggcgtccaggtaggagcagatctcgagcagcagctccgggggaaggctcagaaggcccggctcacttacggccgaaaccctggacgcggcccgaggctccgaagcgctcggggacgcgg

SEQ ID NO: 64200 - DNA, 122 bp, Homo sapiens
tcctgagtccatgaacttcttgacggttctcatggcctcctcctgtggacagggcagggccggcaggtgaggcacctgcacgcacacctagctcgactccccaggcccaccctgcagaccct

SEQ ID NO: 64201 - DNA, 122 bp, Homo sapiens
ggagtggcagaagagttgtgaaggctattggctagcaagggtggtgggcggggcgtagaccgagctacccagtttactggtcgatttcggatccagttttccagttatagccacgttggcac

SEQ ID NO: 64202 - DNA, 122 bp, Homo sapiens
gcacctccgcccgcgcgcccggcccccgcccgccgtctgcagccctcacccctgagccgacgcccgcccacccagcccctgtccgggcgccccggaaacgctgggtgacaagaagtgcctgc

SEQ ID NO: 64203 - DNA, 122 bp, Homo sapiens
gtccctactcccgttgtagttctgatcacactgatgtcctgcgtgtctaccattctaagccgtgggcttctcaaggcagggcctggattttgtcttaaacagttcagggtccccgggccctt

SEQ ID NO: 64204 - DNA, 122 bp, Homo sapiens
ttgcacggtggtgaggacgacctgagaaaacaaacacaggtcctccccacccagcgtggccgcgacctccgcacccggcgtggccgcgacctccgcacccggcgtggccgcgacctccgcac

SEQ ID NO: 64205 - DNA, 122 bp, Homo sapiens
gatccagctggtgccctcgcctgacgtttgaacgaccacctgctcacctcctcccttttgcgcgttgattcttcagacttcaaagggcccaccggtctgcttgcccaacgttattagtgccc

SEQ ID NO: 64206 - DNA, 122 bp, Homo sapiens
ttttcttaagaggatatattaatgacttaaaatgaatctctttgcacattttacaacactcgctaccactgacaaaaaagttgatattcttctaataaaaacatccaattcagagataatga

SEQ ID NO: 64207 - DNA, 122 bp, Homo sapiens
ctgttcttacttttatctcttataaatgctctgtccccaaaattgaacttccaagttgaacgtcttcacctaactttttatttatactaaggtcaagctcaagttccatgactctggaagct

SEQ ID NO: 64208 - DNA, 122 bp, Homo sapiens
gcctgggggttgcggagggcgggggaggtgggggatggcgggagccgggccgtctgtgcgcgtgtctgtgtaagaggaataggggacatcaagcatctcgactcgcctcctcccaccgctcc

SEQ ID NO: 64209 - DNA, 122 bp, Homo sapiens
atgagccaagaacatctgaccctgtatctcaggcttggcttcagacaacccaagctaagacgcaagcctcctggaccactccaacaccctaccctgacacccacccccgcacctcagcaatg

SEQ ID NO: 64210 - DNA, 122 bp, Homo sapiens
gctctccagcatcaggagtactggggattgcctgggggacgactcctagggctgggcgcccgtgggccctcccctgctgccactgcggcccacgcaagccgggcctgaagggcgcgagcggc

SEQ ID NO: 64211 - DNA, 122 bp, Homo sapiens
tccccctcggtgggcgtggccgcttcccagaatgccccgcctcccgcggcgcgctagctccggcgctggactccctccaggtcacaccgcctgaggtcacaccgtctgggccccagccgcgc

SEQ ID NO: 64212 - DNA, 122 bp, Homo sapiens
gctatatccctagtgcctaggacagtgcctgaaatataggaggtgatcaaaaattatttacggaatgaaggaatgattgcattcaggcaaaatgaatgcccacccaatcttattactcacca

SEQ ID NO: 64213 - DNA, 122 bp, Homo sapiens
cctgataagtgaaataatttgatctcagccagaagagcctggggaactggtgaaatcggtcggatttaggggagataactccccctggtgagaaggccttggtctagacacaaccatttggt

SEQ ID NO: 64214 - DNA, 122 bp, Homo sapiens
gtactagtaggtccacagcagctttatctgtagttgctcaaagccacccatggcagcgcacgcctgtaatcctagctactaatcctagtggaggtgggaagatcgcttgagccccggtgttc

SEQ ID NO: 64215 - DNA, 122 bp, Homo sapiens
ccgcctccgagatctgaagttagaaacgccggggctccgggtgcgggtgtaggaggctggcgccccgaggtcgccaccgagctggggctggcgctgccaccctcgccccttgcctgtccgcc

SEQ ID NO: 64216 - DNA, 122 bp, Homo sapiens
agaaaacataaagaggactctaccattaagatagtccttacaatttcgcaagccctttcacgtgcattatcttgtggatcctctcagtaatcccctgcaagaaggaatgaaagtgagtgttt

SEQ ID NO: 64217 - DNA, 122 bp, Homo sapiens
gcagcccccaccatcctcccacagtgggctctggctctaggtgggtccagggctgggcatcgcgggtctgcagcacatcctcctcagtattccagtgcagctgtctgaagttttttctgctg

SEQ ID NO: 64218 - DNA, 122 bp, Homo sapiens
tctattcgaaggccttgcaatgtagctggagagacacatagggctagtctgcagaagctccgggactgaggaagtcccggaggacagagacagcccaggagggatcggggagttgggatgtc

SEQ ID NO: 64219 - DNA, 122 bp, Homo sapiens
aaacgtcgtctcttccaaattccaccgcacagccagctctttctcttcactgggagggtccgcaggggctgacttgctccttaaggtcccaagactattaagcgacacccggtgaggccggg

SEQ ID NO: 64220 - DNA, 122 bp, Homo sapiens
ccgaactggaggggtagagaaggctctgccagcccctcgcctgcagcaggaaggtgggtacggaccagcagaagggaaagcggtgctgatctgtctctaaatacctctgccctcccgccccc

SEQ ID NO: 64221 - DNA, 122 bp, Homo sapiens
cataaccatgggcatccagatacacacccacacagccaccacagccacacacacatgtaccggccacacacacacaaccatttggggctaacagagacaccagaaccccaggctgacacaca

SEQ ID NO: 64222 - DNA, 122 bp, Homo sapiens
tggggccatggggtggaggtgggctgggagaagttggcaggagtggggaaggagagtgcacgaattaaatttctttagctttgcagagaaacctcagcagtttctctgtgctgcttgcaaaa

SEQ ID NO: 64223 - DNA, 122 bp, Homo sapiens
ctcctgtgcttgcttttggtgtgaagaccagtcagctgtgctccctggggactcccttcccgctccagctcccagcctctgagttctttttcacaactctctgtgccaactcaagagatggg

SEQ ID NO: 64224 - DNA, 122 bp, Homo sapiens
ggagccgcaaggccgggtggtagcggcggttcagctcctctagagctgtccccagaacatcggccacatcagcccggtcagccccacgcagtgggcagcggggtgagccatcggcgcaggag

SEQ ID NO: 64225 - DNA, 122 bp, Homo sapiens
gcgctggagcaactggggcgaagttgaactgggacatccttggagatgatttttgaaaaacgagcaagccatgcctggaaatgagggagagtgggaaagacactggattgagagtcagaaga

SEQ ID NO: 64226 - DNA, 122 bp, Homo sapiens
ccagggtctatgacgtgctgcggaggcggggagggggacaggaggccaccagatccctgacgtcacctgcccatccaggacaggaaaggacatcatcgtgcaaggagcctccgtggggtgtg

SEQ ID NO: 64227 - DNA, 122 bp, Homo sapiens
ctcagtaaacatcggatgaaagagtaagttaagctgaaaggactggggggcagaggtcggcgatccttaggccttggccctgagaccccaggcgaggtcagcaacccaaccggggtgggaca

SEQ ID NO: 64228 - DNA, 122 bp, Homo sapiens
gctccacagcttccagaatcctggactccagccccagccctgcctggtactcgctgccaccgtggacaagttacttatcactcaggagctccctgttcatagtccctcacctgaaagggatt

SEQ ID NO: 64229 - DNA, 122 bp, Homo sapiens
attgtagtattgttctcaccctcacttttcccattaattggaatcaccaatatcacataccgatgacagatacgagcagaaatgcgttcgccaaatatatcgactatattgttcggagtgtt

SEQ ID NO: 64230 - DNA, 122 bp, Homo sapiens
cattaattataccgtgagagacaggtgtagggagagagctggaggccttctcccattgtacggatgggaagactgaggtctacagagaagtcattactttttgcagattacactgcatgtca

SEQ ID NO: 64231 - DNA, 122 bp, Homo sapiens
gacagcagcgttccggatcctagacgctttttgacggctggtcctccccagaaaatgcgccgtgtgagcccaaacatggtggggtttacgctggaccccgagcttgcaatctgtgcttgaca

SEQ ID NO: 64232 - DNA, 122 bp, Homo sapiens
cccttgctactgaccgcatgaatgacctggtcttctctctggctcgcagttcattccttccgggagtcgagaggctagtttccgacactccagtcggaaaattccgtcaccttaccttagga

SEQ ID NO: 64233 - DNA, 122 bp, Homo sapiens
gagctacgtcgccaaccacgccactcagctattaatggtactgccgtgatttctaaccagcgggctggcttcagggtataccagttagccactgggctctgctgctgtggaggggataattc

SEQ ID NO: 64234 - DNA, 122 bp, Homo sapiens
catcctccctcccttcggtgcctctggtctgatgtccagtgaggatcaaagccaggagagcgagatggaagttttcctgctgcaacgcttaagctccggtgaacacaaggctggactgctcg

SEQ ID NO: 64235 - DNA, 122 bp, Homo sapiens
cgccggcttctcccgcagtgacttgagaagggtcagtgaaaacctcggccactgccgcagcgtctctagggagagagttaggggagatagtggccacagtcacagctgctcttgggagagag

SEQ ID NO: 64236 - DNA, 122 bp, Homo sapiens
tgcagccttagtcgttggaggctggagcgcaatggccctgccgtctgtggagcctctgggcggccttctttcctttctgtcaacctctcatttcacagaaaaaggctgaatttcattttttc

SEQ ID NO: 64237 - DNA, 122 bp, Homo sapiens
ctaacaggccttaaaccagtcccagcctgtgtccaggccttgcgtacccctgcccagcaccggccagtatttctttggaaacacccagaagcccaggtgcccacaaagctctgttcagctgt

SEQ ID NO: 64238 - DNA, 122 bp, Homo sapiens
actgtcgtctggcctcccgaagtcagaggtgatggcgatgcgcacggcaggggccctgtgcggaggccctgcccagctagttacaagccagctccaggcccagccacgcggtcagaccagcc

SEQ ID NO: 64239 - DNA, 122 bp, Homo sapiens
ccatttattgagcacctcaacttctctgatcttccatttcctcccagtggtgccttgatgcgggggggatgggggggcgggggggaagggggctgattatattttcataggagaaatgggac

SEQ ID NO: 64240 - DNA, 122 bp, Homo sapiens
tggccgctaggcgcgcgctggaaaccctttcccatctgcggagcccaccggagctgtgatcggaggaggaattcccccaggcagggaggaccgcagggcctttttcactcgtcctgaggggc

SEQ ID NO: 64241 - DNA, 122 bp, Homo sapiens
aaagtgggtccgtggccgcgctatgcatgctaggattagtagttcctccgtccctcatggcgcggggtcagggcggagctcaggttgactctgcagcagagaactacaattcccatggggcc

SEQ ID NO: 64242 - DNA, 122 bp, Homo sapiens
tggtgtgaccgagctctttttttctggcccctccatgtgccagctctttggccttgttatcgctgtggcttggaggagttcagtaaccttcccctagaggccacaaggccaggcagtgcctg

SEQ ID NO: 64243 - DNA, 122 bp, Homo sapiens
cttccgtgacggccacgaccggctctgcagggcaagctggcctctgcaatcaccgcgcagcggcccctcacaagtagcatttttgcacttggcagtctacacgctttttcattttaaaagga

SEQ ID NO: 64244 - DNA, 122 bp, Homo sapiens
cctggatctctgagacactgaactgcagagcccctcccaattcattttggaaatgtggcacgagtaagaagtaaagttctgttttatgtgacagatttgggggctgtctgctaccaaagcaa

SEQ ID NO: 64245 - DNA, 122 bp, Homo sapiens
aaagtcaaaagaacttctcctgaggtgttgtgctaggctcctcccatacatcagggagggcgtctgccctctaagagcccagagcacagagggtcagactagactaatcttttccttcaagg

SEQ ID NO: 64246 - DNA, 122 bp, Homo sapiens
ttctgggggaacgggcgcgggctccacgctggagtccggatccccacgggccctctcttccggcaccgtctccgcctccaccgcagcttctagagccacgtccagctttggctcccctgagg

SEQ ID NO: 64247 - DNA, 122 bp, Homo sapiens
ggcagaggagtcacttgagcccaggagtttgaaaccagcctgggcaacatggcaaaaccccgtatctacaaaacattagccaggagtggtggcctgcacctataggcccagctactcaggag

SEQ ID NO: 64248 - DNA, 122 bp, Homo sapiens
aactgatgctaaaacgagtgagtaaaagtctaagaagcaacaggaagttacacggcatcacgtttctccccacaaactggaaattacaaagcacagaacatcaacgtgacattggagaaacc

SEQ ID NO: 64249 - DNA, 122 bp, Homo sapiens
taaacagttccttcactttcttcaattcacagttaagagtctgccatattttttcctgaccgatacatcagcttttttagatggctttctttagctttgctttctccagaaactagcatgag

SEQ ID NO: 64250 - DNA, 122 bp, Homo sapiens
gagatgggaaagctcctttctaggcagtagggtctcctcattgctcctgcccagacaagacgtaggtgacaaggctgctgggacaggggatggaagctggggtatttgggaggggaatggga

SEQ ID NO: 64251 - DNA, 122 bp, Homo sapiens
atgcaaatttcacaatccccgttacttgcccagatacaacaattaaagcttaaaaggtggcgggagtgggggacttgaggactggtctgaggagaaagtgaatctcccaagggttcctaaat

SEQ ID NO: 64252 - DNA, 122 bp, Homo sapiens
aagtcttaagccagacttcaacgccttcttcacttcccataaaaccatcccagaggaacgcggggagcagcgtcctgcctgggaaccaggcgctccacatgaccactgcacgcatgacaaag

SEQ ID NO: 64253 - DNA, 122 bp, Homo sapiens
ggggctcgaaaaactttgcctccagctcgctccacccgcattcccttcccagttccgccccgcagccgctcactcacctccagacccagagccggcgggagccgcatctctatggtcggccg

SEQ ID NO: 64254 - DNA, 122 bp, Homo sapiens
agggtaagggaagaatgccgtcaactcacaggcactgcttgggtgacaaaggctggcaagcgcgaggacatccgcaggcagccaaaggagcaaggacttccgtgaagcagccgaagcgcggg

SEQ ID NO: 64255 - DNA, 122 bp, Homo sapiens
tcccgaactgcatacaaaacctgagtgggccagagctgctcctccagtatttaaacacctcgccaggtccctagttagcagcttccttcagctcatccaagaagctgacaagtactgttaga

SEQ ID NO: 64256 - DNA, 122 bp, Homo sapiens
agcgcacggcgatgacgtcagctacgcgaccgcggtctgccccagccgcgagtgcgtccccggaatcagccggcacgacaacccctaccatttgcacctgcgcagtggggcgcgccttctcc

SEQ ID NO: 64257 - DNA, 122 bp, Homo sapiens
ttgtttataggctcctatagacactttaggggcacctgaaaccacaaatatatggccctgcgccaaagacagcagatgttctttgggaccgtatggataaaataagagccaattatcatcag

SEQ ID NO: 64258 - DNA, 122 bp, Homo sapiens
tgttagtgtgaccgccaccgccgaggcaattcctaatgacagagcaggtcgggaggacagcgcgaggaagtgaatgtcgcccaacccgtttgaggccaggaggctttggcgttgcccagggg

SEQ ID NO: 64259 - DNA, 122 bp, Homo sapiens
cagtttgatggcacccaatatcctgaacacagggatcctggggatgtacacagcctctgtcgaggcgggtggaacagctccagcgatggctgagggtttgggaaagaaacaggtttggaaga

SEQ ID NO: 64260 - DNA, 122 bp, Homo sapiens
ggtttccctgagtcggagggggaggggggcgaggggcggacctggcccagccccgccccgcgccggagcagtgccggagccccgccagagcccgacttcagccccagccagatcccgcgtca

SEQ ID NO: 64261 - DNA, 122 bp, Homo sapiens
ctggccagtaggcactctttatgtattgcaggtggtactgagtaggcactttttatgtagcgcaggcaagagtaggaactcttcatgtagagcaagcagcactcagtaggcaccctttatgt

SEQ ID NO: 64262 - DNA, 122 bp, Homo sapiens
cccgcgggcctggtccatggtgcaggccggctcgccactcctcattctgcggcgcccgcacgctggggagcaggggaagaataataatgagtgttaggatcacgcacacagctcctagacta

SEQ ID NO: 64263 - DNA, 122 bp, Homo sapiens
ccgaagaacaggggcctgctcattcccggcatgctgtgcgtctcctctggaaggactgggcgtgcccggcgtgctgtgcgtcccctccggaaggactgggcgtgcccggcgtgctgtgcgtc

SEQ ID NO: 64264 - DNA, 122 bp, Homo sapiens
tgggggcaggtattcctgtgctggaaagtgccctgagcgagtcaggccgggctctctgagcgctattaatagcatggcgtggccctgggcaagtcacttcccctggcgggtaggggcgggaa

SEQ ID NO: 64265 - DNA, 122 bp, Homo sapiens
tcggcgggcagcctctgtgcggcggcgtcctggtagcggcctcctgggtgctcacggcagcgcactgctttgtagggtaagtaggacccccaggccttgcccagctggggtccccggcgctg

SEQ ID NO: 64266 - DNA, 122 bp, Homo sapiens
gcacgccccgcttcctctccccctccctcctggcttccactcccgggggagccgcggagccgagttgtttgcttgcgccgcgaccgtctggctccgaatcctccttgattagggctccgggt

SEQ ID NO: 64267 - DNA, 122 bp, Homo sapiens
tatgcttccaggatgcgccatctacagagcaacctcaggagagctgtgggaacagctgctcgggccatctcccgcgtgctacgatcagaggagaaaagctcctccagagagcatcgggaaaa

SEQ ID NO: 64268 - DNA, 122 bp, Homo sapiens
aaggcactgatccactgctggacagacccggggcagcctctgggtgaacagcagcgtgtccgccggcagcgaaccgagaccagcgagccgaccatgcggctgcacagacttcgtgcgcggct

SEQ ID NO: 64269 - DNA, 122 bp, Homo sapiens
tttccatcttctctccttttctctctgtcaggccttcttttatggcctgcactctaatgacgtttcttgatttctctttgtcgacaccaagtttttgttgtgcgtgctttcgaccctggtca

SEQ ID NO: 64270 - DNA, 122 bp, Homo sapiens
ctttggagtgacgagggctgggacctgttctcacctgggcatgtcactgctgcaggaagacggctgtctgagcttgggtcccaagcgccggatgaagggcacagcctagctggtggaggcag

SEQ ID NO: 64271 - DNA, 122 bp, Homo sapiens
gacacaaacacacaaaggcagctgtggtaatggggtggtggggtacacaaaagcagaaatcgcacttcacacatttaggcctcatttagacaatgaggaggctgagcctgtccctccacctc

SEQ ID NO: 64272 - DNA, 122 bp, Homo sapiens
agcatcatatcccctggctctaacagactttaattttaaaagtctaaaaagaaccatgagcggttccccctctttccctataatctattccagtgattggaaaacagggtggtgaggttggt

SEQ ID NO: 64273 - DNA, 122 bp, Homo sapiens
ctccagcgcctggacagggctgacccccagcaggcgctctgtgaaggtgtgcagagtgggcgaaggtgcatgcgcgggccgtggggcggggacaggtggaggagccagtcagacccaagtgc

SEQ ID NO: 64274 - DNA, 122 bp, Homo sapiens
tcagcccgacccgggttccgcctacgtccccgcccccgactccgccctcagctccgacctcgactccgcccccaggcccacctcagcgcgccccgactccgacccgactctgccctcagccc

SEQ ID NO: 64275 - DNA, 122 bp, Homo sapiens
catgctctgaataaacttggaagccagtttcctcgaacagtcaacagggcgcagacacagcgcacaggttccgtaatgtggcgctgtccggcagagaacatggccgcgcccttatggtgttt

SEQ ID NO: 64276 - DNA, 122 bp, Homo sapiens
tctccctggaggtgatgatcgagcgcttgttgtaatgcgccaggccggaagactcgcccgcgatgccctcaacgatgtcattaacgaatggccttggaagagatgcgggtgtcggggtggac

SEQ ID NO: 64277 - DNA, 122 bp, Homo sapiens
ggccttgatatttaaaactattcctgccaccatttcttctccttggccacttcttccttgcgtctccctgcatgctgctttatttgcttctccctccccaaccacctcatggtatatttaag

SEQ ID NO: 64278 - DNA, 122 bp, Homo sapiens
gagtatgggcggggctggctcccaggaagggcgtggcctctgtttgcccacgtctttgggcggggccaggcgggaaagcactgcgtgtccggggatcccccgcctggggcccgcccttcctt

SEQ ID NO: 64279 - DNA, 122 bp, Homo sapiens
tcccgagctgcgatgtgcaggggggtgtccccatggtagttgacagcatggaggtcacagcgcgcattcagaaggacttcggcgatggcggcgctgcccgtgaaggaggcccagtgcaggca

SEQ ID NO: 64280 - DNA, 122 bp, Homo sapiens
gctacacattttctccctgttctttgtgaaatgctaatccagcccagggttttcgttttccgggtgtaacttttcagaaattgtatatctgcatagcaaccccgcaagggctgcctatgtca

SEQ ID NO: 64281 - DNA, 122 bp, Homo sapiens
tatgaaggtgtttttgggatcagattagaatttcttgaaccggcagacttggagtgaagccgatggctctccctaatgtgtgtgggcctccatcaatcagttgaacgtctgaatagaacaaa

SEQ ID NO: 64282 - DNA, 122 bp, Homo sapiens
agtcagacttgctgccccgcccgtctcctgctgcccgggagactgcggagctgggactctcggcgccgctcttgccccttagtgaaatgaaagtcccatcaggctcggccccttcctccccg

SEQ ID NO: 64283 - DNA, 122 bp, Homo sapiens
tcctgcacagaacaaaggctgagtgaggcacagtgcccaggggatgaggaaggctgagcccgggaccaggcaggaggaacctgccgtgcactcactcagactcctgcagcacccggggcagg

SEQ ID NO: 64284 - DNA, 122 bp, Homo sapiens
gtagggtaccagggactgagttgggcctggggccgtgtccaaggtgccaatgatgcgggccgacagagcgggccgcactgtctgtctgtccgtctgtcccggaaagaactataaagcgctgg

SEQ ID NO: 64285 - DNA, 122 bp, Homo sapiens
cggggtggggctgctgtgaggggcagctcctcttgtggctggggcggagctgggggcacccggagttggggcgggagagacgggactcaggacttagagggagcggcagggggtggggctgg

SEQ ID NO: 64286 - DNA, 122 bp, Homo sapiens
gtgagctcagaagctctgtgtgcctcagttccccttcctgtagaatgggctaaccaccatcgccactattgtgaaggtgacatgagacactgagcgtcaagattcagcacaggggctggcac

SEQ ID NO: 64287 - DNA, 122 bp, Homo sapiens
gcgagttgcgtgtcttgttagtgcgaactggaacccaagtttcctttgggaagactttggcgaaagagtacaggaacaccagccactccagaaagagaccgctcctcttgaacccgcccact

SEQ ID NO: 64288 - DNA, 122 bp, Homo sapiens
ccgccatcttacggcgagaggggtctggggcggagctccgccagcggagactcaggttggcgacccgggagcggactgtggggaggccggtcccgccggtttcacagctcgctctcccctct

SEQ ID NO: 64289 - DNA, 122 bp, Homo sapiens
ttaaccagagcaagtgtcatgtctcccatctcttgagcattaaaattccactggcattaacgcttgtgagctcctttactagctatctgcacaggatgtatttcactgctataactgttata

SEQ ID NO: 64290 - DNA, 122 bp, Homo sapiens
gggagatcggccaggtgtggtcctttcaccctgcagctcagtgtcctgtgaccacaggcacgtgggccctgccctgagcgcctcacaccaacccgaggcgggaggaggaggagggcgtcctg

SEQ ID NO: 64291 - DNA, 122 bp, Homo sapiens
gggggtggagagaggggagggtaaaaatggtgatagggttttgcagcgctcatagttccccgctagaggcactaatacagcagctgagcctagactctcccggagcccgatggttgcttagc

SEQ ID NO: 64292 - DNA, 122 bp, Homo sapiens
tgttcctcctgctctgggcgcttcttcctttctgtttccctttcagtgtggaagagtggccgcttgcccagcaggacggtcccaaatagcatggcttttccaggcacggtgctgtcggccgc

SEQ ID NO: 64293 - DNA, 122 bp, Homo sapiens
aaaccatggtgggccccagctgtggtgcgtgctggggtagaggcaaggaagtgatgggaccgcagagatgagacccccagggatgagatgggacccccaggcagggcccagggtccagggcc

SEQ ID NO: 64294 - DNA, 122 bp, Homo sapiens
cagtgctgtgcattcagtggtggaagcccattcacggtgttgtgcattcagtggcggaagcgcattcacagtgttgtatattcagtggcggaagcacattcaccatgttgtatattcagtgg

SEQ ID NO: 64295 - DNA, 122 bp, Homo sapiens
ccgcgcacctgggcagcccccgggggccgcgctgtgccacggccggggccgctgcgactgcggcgtctgcatctgccacgtgactgagccgggcatgttcttcgggcccctgtgtgagtgcc

SEQ ID NO: 64296 - DNA, 122 bp, Homo sapiens
ccaccctgaccctgccctccccccaggtggaggtggtcttctggctgttgtccatgttggcgacgcgcgaccaggaggatacagcgcgcacgctgctggccatgtccagctcgcccgagagc

SEQ ID NO: 64297 - DNA, 122 bp, Homo sapiens
ggatccgcttgaactggggcggagagaaggtgaagaccgtgatgatggggcaccgtgggccgaggcaggtgagctcagcgatctgccccacctcaccttgttggaggccatctcccccaccg

SEQ ID NO: 64298 - DNA, 122 bp, Homo sapiens
ctgtctcattgtgaaggctcctggcagggattttgtgctcactgctgtctgtcttatgttcgcttctttctcagagcatttctttaaaagaattctggaattataaaaggtcataatccagc

SEQ ID NO: 64299 - DNA, 122 bp, Homo sapiens
cagcgcacaaccaggcaacgccctcaggagcatcattgttttctggacctggttctttctcgctctgccctccaggggccgctgtgtttctcggaatgcgcgcgggatgcccggttgccacg

SEQ ID NO: 64300 - DNA, 122 bp, Homo sapiens
ccgccaaccacatgcagcagcatctgacttttaccaagagccctctgggcacctgatgtccgggaagtaggcagtcccctgccatcagtgactcacagacccatcagctgcttgtttccaag

SEQ ID NO: 64301 - DNA, 122 bp, Homo sapiens
acctctgagaacccttctaaccccaaatctcaccctatgaatctaagaacaccaacccctcgccatcctaagtatcacagagccaggcaagcatgggtgagagctcagaccatccttgttgg

SEQ ID NO: 64302 - DNA, 122 bp, Homo sapiens
ggaaagaaggctttctgaagtctgtttgcacaggtggcatttgcttccaattgtagctagcgcacagagctttggaagcctgtcattatgagatacagtcggtttacctcaggagtcaattc

SEQ ID NO: 64303 - DNA, 122 bp, Homo sapiens
ggcctcaaaggtccttctgtccagcatagccgggtccaataaccctccatcccgcgtccgcgcttacccaatacaagccgggctacgtccgagggtaacaacatgatcaaaaccacagcagg

SEQ ID NO: 64304 - DNA, 122 bp, Homo sapiens
gcgtgtttgttccagggactttgttccttcttacccaagtgaaaatgcctggaatatagccgaggcttcatgtttaccctacagaaacaccctcggcggctctacgacgtcggtgacagcac

SEQ ID NO: 64305 - DNA, 122 bp, Homo sapiens
tgtgtgtgggagccagagaaggcaggcacattcatttgacacctactgaatgccaggcaccggtaaagagctcatacccatgatctctttggtttctcacccaagttggggatagagactcg

SEQ ID NO: 64306 - DNA, 122 bp, Homo sapiens
gctgaatagtatttccagagcttggcaaggttgtaggaaaagccaacaggaagtgacttacgctttatttcaaagaaaaaaaaaatgtttaaacagttctaattatattttcattacccttt

SEQ ID NO: 64307 - DNA, 122 bp, Homo sapiens
aggggaaccacccatagcgaccattgtttttacagtcagtcaccttgctcccatgtcttccgagtgacccatagttgactggggccagcgaactagacattagccccgtgcatgtgctggat

SEQ ID NO: 64308 - DNA, 122 bp, Homo sapiens
gcactcacacgggtgtactgcccctgccgctcccatccactctcaactgctgtcaacggccgggtatgggcccaacgctccagctccatccattctcaggagtagttgatttggcagctgag

SEQ ID NO: 64309 - DNA, 122 bp, Homo sapiens
tccccagaggacagcggccatgggcagtgcagccagggaggggcagtgccctgttctgtgcgcggcatgtccaggaaatgcgaccccggggccagcggcttgttctgtgcgcggcatgtcca

SEQ ID NO: 64310 - DNA, 122 bp, Homo sapiens
atcttttaattttgggccatcctaaagaacaggtggtgataaagatgtgcttcttacctgcgcccgtctatttatgtaaccccatttaaaaactgatcattttattaataaattaaaaaaat

SEQ ID NO: 64311 - DNA, 122 bp, Homo sapiens
acaacctccggcttgcaaaaccgcttgcaacgggattgcagaacgtcacgtgctttccttcgctctcttagtaatttaaatggtttcttggcagtggctgacggaactctgctcccttccag

SEQ ID NO: 64312 - DNA, 122 bp, Homo sapiens
aggagggaaggacctgggtgggggcggtggggtcccatcctcagctccaggctttacctgcgagtatgtggaaggggctatgaagggagaggcaagggtggggactaagggaggcccagggc

SEQ ID NO: 64313 - DNA, 122 bp, Homo sapiens
catctgggcagtggaaagtttgactctctgggtccttgtttgagtgagtgcgagtgtgtccgttcctttgctgtctgccccaggcgggggagggggggggaggtggtgggggcgagggggcg

SEQ ID NO: 64314 - DNA, 122 bp, Homo sapiens
cgggaggtggggagacctggtttgggtctctggagtgagcccgctgtgtcgcagcgtccccgtggggacccttggccggtggctgggtcacagtttcacacactggatggggcagggaactg

SEQ ID NO: 64315 - DNA, 122 bp, Homo sapiens
ttgcatatgccagctttttgtgtagacttttcagaatggtgatttcaggtcatttccaaccgaaggactctttcagttcataataacacatattttaattagctatctttggattgttcata

SEQ ID NO: 64316 - DNA, 122 bp, Homo sapiens
cttccctgaacccaaacacaaacactttctctctgctttttaaaaaattggttttggggccggacgtagtggctcacgcctgtagtcgcagcactttgggaggccaaggcaggcagatcact

SEQ ID NO: 64317 - DNA, 122 bp, Homo sapiens
tgcagcttcagagccaggcgagccaggaaggaccagcgggcgaggtggtgagttgtgaggcgcgcccagtccctctgttcccgcctggcacttgctctggccgcgcccgccccatctgccac

SEQ ID NO: 64318 - DNA, 122 bp, Homo sapiens
cgcccccactgtcatggtcccgctgtttgtcttctcccttccgacctcccgtggccccagcgcggccagctcacagtaggtgctcgggcagcgtttcttcagggacctagacggcctggaga

SEQ ID NO: 64319 - DNA, 122 bp, Homo sapiens
ggtcggggcatcggggcccagagagcggctggtgagtacttggtcggagcgcgctgtgagcgcccggcccctgtccgggaggccctgatgcagccgggttccccgcccactttccttctttt

SEQ ID NO: 64320 - DNA, 122 bp, Homo sapiens
cctccaaatttaataaaaacattaattatagcccagcacttcccccttggaagccgaaagcgcctctgacagagctcaattcggtggtttttcctctacttctcctccaggggcctccaatc

SEQ ID NO: 64321 - DNA, 122 bp, Homo sapiens
gcagctggcccttatgggcaccggcccgctcccccgtcatccacctctcccgaccccgcccgtccctgacatcccaaaggccgcaggagtagtggattgtgtcaccagggaccccaccactt

SEQ ID NO: 64322 - DNA, 122 bp, Homo sapiens
ctttacagatgccttaaattcttgtacttgtcgcataaatttttgggtagatgcaagtaacgtcttatgggagaagaaccttttttaaaatttgaactcagataccacatgggtaaggattt

SEQ ID NO: 64323 - DNA, 122 bp, Homo sapiens
gagttctagtgacatctggctgtttaagtgtgtggcatctccgcactatcctctctcttgcgtctgcattccacgtgaaccgcttgctcccacttcatcttctaccacgaggaaaagcagcc

SEQ ID NO: 64324 - DNA, 122 bp, Homo sapiens
gcctggacggtgttagtctcctggaagcagctcgcccaggcaggagctgctaaccagacgcgcattgtgaaggagaccgtggaaaatcaaaagtgggttcctgcaaaaatgtagcattggtt

SEQ ID NO: 64325 - DNA, 122 bp, Homo sapiens
caggcaggacttacatgaggtcgggccggtggcggtgcaggatggcgcagaaagccaggccgtcgcggaacgacgtggtcatgttgcagatattcacgtcgcggtagccctcgcactgctgc

SEQ ID NO: 64326 - DNA, 122 bp, Homo sapiens
atacactgaataattgacaatccctctgatgcaccttgtgcttttatcattacacatctgcgtatcgttttaccacgtccaaaatgctaacatgtcaaaatgtggggaaaacatcctcataa

SEQ ID NO: 64327 - DNA, 122 bp, Homo sapiens
ggccgccaggcgtacttaggcccgggccgccacctggcttcggcccgccaggcattttgccgcctttgggaccacccggacctgggccctgcttaggccctggacccgggcccgggactgcc

SEQ ID NO: 64328 - DNA, 122 bp, Homo sapiens
tttggggtcctgctttccccgagcatcgcggcctctgagctcatgcggaacataaaagctcgcaaggcgtagaactttttcacgttttcatttgtttcccgtaggggccccgagaacgtgca

SEQ ID NO: 64329 - DNA, 122 bp, Homo sapiens
gctgtatgtgtgcaggtctgtaatgcttggagcatcagacagcagcagagagatccccctcggtgaagagccttccctggaggctgcaataactcactgcatgtgaggcctgcatctatgtg

SEQ ID NO: 64330 - DNA, 122 bp, Homo sapiens
tgaccctgcgcggcgactacagggacagaatttggctttccttctctttccaatatgcagcgtttcgtttaaaggctgcctcgatccagtgggctgaccagtgacttgtgcaaaagaaaact

SEQ ID NO: 64331 - DNA, 122 bp, Homo sapiens
gtagcggcttggcttggctttgcattctttgcttggcttggcgttggtcgcttggattgacgcttcctccttggattgacgtttcctccttggattgacgtttcctctctcgcgttcctttg

SEQ ID NO: 64332 - DNA, 122 bp, Homo sapiens
agcagacgaagagcagatcgagctggaagggtttcattccttagcgcagcgaaggaaagccggcggggtaacttggctgtggttagtttctcttccttggcggctctcggtgctcagcctcc

SEQ ID NO: 64333 - DNA, 122 bp, Homo sapiens
ggggaacttgttgcttatcagcgccggcagactaccgctttaataataataccagaaaagcgcagcagggagggggtggggggcggcaacggcgacgactaacctcgctgtttacgtgaccg

SEQ ID NO: 64334 - DNA, 122 bp, Homo sapiens
agcaagcgaaatgtcctaagagagagaagagaagaagagaacagtacaaaggggaaaagacggtttttgcaaggagttcaggccatgtgacctgagggtttcacggtaagaggcagggtaca

SEQ ID NO: 64335 - DNA, 122 bp, Homo sapiens
gcatcaccctttcatccaggtgcccattcccttctctctagtcctgcaatacctaagcatcgatctgcctttagcacatccatccccgccttattctccacgcaggagctgagtgacctgca

SEQ ID NO: 64336 - DNA, 122 bp, Homo sapiens
agctttgtgcttagctgtttttgactgacatcatcaattttattttatgttggtcacctccggtaacaggaaaaaatggcctagggttgataacacatgctttttttttcttttagtattaa

SEQ ID NO: 64337 - DNA, 122 bp, Homo sapiens
gattgtttcttgggctgtgcagaagcttttcagtttgatgcaatcccatttgtatgttttcgctctgacttctttcttgatggcaatctactcaaagaaggacgccgacttcaaacactgtg

SEQ ID NO: 64338 - DNA, 122 bp, Homo sapiens
taagtccaaccggttccccgcataggtggctgcagaggcgaggtgacggcgcgtgcggaacgaactctgcacccccaggaatggggagcgctggcttttccgtgggaaaattccacgtggaa

SEQ ID NO: 64339 - DNA, 122 bp, Homo sapiens
cttatttgtctggtcacattcggtgagtcccaaagaaagctcaacaggcctggctcaggacgactatctgctcttcgtcttgcccagagaccacccatcaaattactggttggaggtcattc

SEQ ID NO: 64340 - DNA, 122 bp, Homo sapiens
ctctcccccagagagaaacagaggcggtgacgctaggaagaggaggagagaaggaggccgcgggtccctgtcgcctccaggccaggcaatccactccaggctcgcaatccaccgacctggag

SEQ ID NO: 64341 - DNA, 122 bp, Homo sapiens
ggagcgagagcaggtggaaggtggtgcctatgtccaggggagcaagtgagcctgaatcagcgatcatcaccaccagatactgggagtccctgggagagatcaggcacttgacaagccctgcc

SEQ ID NO: 64342 - DNA, 122 bp, Homo sapiens
gtggacccgcggagggagcggtgaccgggcgccaggtgcccacgtgtggctgtggctcagcggcctgcaggctgggcttggccctctgacagggatggggccgtcccccggtccgaccacct

SEQ ID NO: 64343 - DNA, 122 bp, Homo sapiens
aagttgacggcatgtacccatgaggtcatatggagaattcccaaggggcaccctagcccacgttcactattgaacacaacggaagggggaattattgtgcttcttgctttgattcccaagct

SEQ ID NO: 64344 - DNA, 122 bp, Homo sapiens
ctactttccccaatttgccaagaagccctggtgtcccagtgaactgtcccaccgagaccccggcgacagactcggctgatggatcccaagggcccctcccctccccaggcccaggtgcccgc

SEQ ID NO: 64345 - DNA, 122 bp, Homo sapiens
ctagtctgtgagcgcaggcgctgatgatggtgaagcatcttcacaactatcagacacagacgtcccggggagcaggtcctcggcggcagacgcctccgtcccggggagcaggtcctcggcgg

SEQ ID NO: 64346 - DNA, 122 bp, Homo sapiens
ggacaggcgccagcacatttctgcagcttcagcagctctgctcagacacctggggagggccgcagggcccgggcgggggacgcgcgctcttggcccaggcccgggcgcggccccctccccgg

SEQ ID NO: 64347 - DNA, 122 bp, Homo sapiens
agcgtggatcctcgttagggcatgcagggatgaaagagacatggcaaatgaattttggatcgctaggatttaggaatctttgttattggctgagctgaggatgatttaaagttatccctgtc

SEQ ID NO: 64348 - DNA, 122 bp, Homo sapiens
cccagccctgcccggcgggcccggagccagagccgcgaggagcaggctgtgctgcttgtgcgcagggatcgagacgggcagcactcatgggtgccaaggggcaggggcagtgggggctcggg

SEQ ID NO: 64349 - DNA, 122 bp, Homo sapiens
agatcccccatttcccatcaggagctcacccgacccctaggtaaggaggccgctaggagacgctgtggccacacggtggcgctgtcggcccgggactgaatggagggcccgaggggcgcaag

SEQ ID NO: 64350 - DNA, 122 bp, Homo sapiens
taacccggactgggtctacgggctcccggaggcgcgcagagcttgtcctgcctcggctcccgcctcttctgggctctttgcacgccttgggctcggagagaaacaacaacgggccctcgaac

SEQ ID NO: 64351 - DNA, 122 bp, Homo sapiens
tattgattactcacagtttgcctctgagacgggaagcactaggaggagacacgccagcagcgccccgcagcgcccacccaggaccctcatttcgaagcgcgcggaggcgccggcagggacgg

SEQ ID NO: 64352 - DNA, 122 bp, Homo sapiens
tcctgagatggcaagggtggggctggggtaactacatccccagagcctgtgtcggcatcacgctctcctgtttactgagctccgccaggaacttgccgcagccgccccgagtctccctccct

SEQ ID NO: 64353 - DNA, 122 bp, Homo sapiens
ggaaagaaagaaagagagagagagagagagagagagagagagagagagagagagaacgaacgaacacgaaccagagaaccacgtagcctactgagcatgcccaggcccctgctagacccatg

SEQ ID NO: 64354 - DNA, 122 bp, Homo sapiens
gggcaccagagttcagggcagtcggagacacagcgaacaataggactgtgacatgggggtcgctcttccccgcagcagggcggctctttgtccccttccctgcccccaggctcctccgcccc

SEQ ID NO: 64355 - DNA, 122 bp, Homo sapiens
gggatgatttctaacatgaccaaatcactctgggttcataaacggtgtagtaaagtgatccgcatgtgtccagtgtggagaagaataggagagaaggcatctgaggagacaagactctacac

SEQ ID NO: 64356 - DNA, 122 bp, Homo sapiens
cgcggcccgcagctgccttggcgctgcctgtgctcctgctactgctggtggtgctgacgccgcccccgaccggcgcaaggccatccccaggcccagattacctgcggcgcggctggatgcgg

SEQ ID NO: 64357 - DNA, 122 bp, Homo sapiens
atcagctcggtccagaagctggttctgtatgagactagagctgtgagtaccccctcgcggcggggcgcaggcgggaggatggatgtctgccggtgggtgtggggccgtaggacagaggctgt

SEQ ID NO: 64358 - DNA, 122 bp, Homo sapiens
agccccatcgccagactcaacatccaccctcacttggccccgaccggttcagccctctggcggcaaagtaacggggtgcctgggggaagcagcaacgactccgcttcctcaccccaatctgc

SEQ ID NO: 64359 - DNA, 122 bp, Homo sapiens
accacctgctctccgatgggctctgttttctttaaaaacctgagcctctgttttgttctccgttgcacctggtgacccaggccgccctcgacctctgtgcctgaataaacccaccgggcacc

SEQ ID NO: 64360 - DNA, 122 bp, Homo sapiens
aagagaagagaaggaaacagagggacagggcagccaaattcgccatgtgcctagtggccccgcaaagacccgcctgggcagacgcgcgtccctacgatcgggcatccgtcttggactttact

SEQ ID NO: 64361 - DNA, 122 bp, Homo sapiens
ttagaggcctcagagaatgtcaaaggttggcgctggctgccttgggcgctcgggagaacccgagaggggaagcggtccccggaaagagttcaggacacggggcctggaggatggggatggca

SEQ ID NO: 64362 - DNA, 122 bp, Homo sapiens
gaggagcgcggaattggttgctcctccgaatgctcgatcacccgggccaagcgacactggcgtccccagggccccgctctccgtactccacggggcccttaggctcggcgcctggacagggt

SEQ ID NO: 64363 - DNA, 122 bp, Homo sapiens
tccaggcgagagagggggccagagtgctcgcacttctcctaggggcaccatgcccaacgacgaggcattcagcaagccctctacaccgtcggaagcccctcacgcccccggggtaccgccgc

SEQ ID NO: 64364 - DNA, 122 bp, Homo sapiens
taaagagggactggagagcggtccatctgacttctgtgggggatgggcaggagtcaggggcggacgcctgaatcttgtttctcagaagagccgagaggcctaggctcaagcttggggcgatc

SEQ ID NO: 64365 - DNA, 122 bp, Homo sapiens
aaacagccaaaacctgattcttttttcccatttaagagtttatacaggccgggggccgggcgcggtggctcacgcctgtaatcccagcactttgggaggccgaggcgggcggatcacgaggt

SEQ ID NO: 64366 - DNA, 122 bp, Homo sapiens
ggataaactctgtcacagaagagtttttggctgccattctttttggtcaggcaggagagtcggaggggacaagagaagaggaccacttagaaagaaacatcaccaccacattcttagtctct

SEQ ID NO: 64367 - DNA, 122 bp, Homo sapiens
agtatatttgggggtaaaatacttttatttcctccagggcctgctatctgtcatgtgatgcgacactagagtcaggctgaaatcggtattttgttgctgcaaagagctgtttgttttgtcag

SEQ ID NO: 64368 - DNA, 122 bp, Homo sapiens
aatgtgtgaatactactgggctatatatttttaaaaaataaagtacaatcgtcttaagaacgcaaaggccaaggggcagaaggctatttcttaaattttaagaaaccacctagttcacaggt

SEQ ID NO: 64369 - DNA, 122 bp, Homo sapiens
cagccgtagcacgaggggctcctgcggggagtccggggctggcggtgttgctgtgaaccccgtgctgggctctggctgtgcagcttgacctctgtgtctcaggctgggggtctctgcccctg

SEQ ID NO: 64370 - DNA, 122 bp, Homo sapiens
cccgccaagtgctccaccccaccccgcccctcctccaggctcataggagccacccccttccgggtcctgcccgggtgatgctgggccaggagctttgtgtacacccctccacttcagctgag

SEQ ID NO: 64371 - DNA, 122 bp, Homo sapiens
agcagctaccaggtaggaaccgcggctgcgcggccagcctgcgccagcgccagcgccgcgcgcccccgacacttgggctcgtgcccaggcgccctctccgccgcgctccctggtggccgctc

SEQ ID NO: 64372 - DNA, 122 bp, Homo sapiens
ttgcagccgacaatgaaatcttggcagctaattgcagtcgtgggagatgcccttcaggtacggcgagcgaagaagactctaaaacactgtcagggaaggagagaaagagggagagagggagg

SEQ ID NO: 64373 - DNA, 122 bp, Homo sapiens
tggagaagaagagagggcaccaaggacgaggcctgaaggaggtagcccctctctctggggcgagccggcctcttccaggcagcaacgtacattccgccggggctttctggagaccggcgtgg

SEQ ID NO: 64374 - DNA, 122 bp, Homo sapiens
cccagaaagtgactcagtgcaagaggacagttttgactccttacgatttcatctctgacccgaccaattatcactcctgactcagtggtcccctacccaccaaattatccttaaaaacacca

SEQ ID NO: 64375 - DNA, 122 bp, Homo sapiens
agacccatgttgtgggagacgattgcggcggcactcggaacttttgtctacctttgtacccggctaacactcaccccaaatacaggttgagtgtatttaaccaggaaaaaaatcttagttat

SEQ ID NO: 64376 - DNA, 122 bp, Homo sapiens
gaagcaggtacctggagctgggccttgacccgggactccaccttgtcgtacttgggtgagcgccacagagctttcaggggcctgggctggccctgctcccggctgcgctcctgttctctgaa

SEQ ID NO: 64377 - DNA, 122 bp, Homo sapiens
caagccagaggcctggtcactaaggctaggctttgattggccaacaggcagggcttttagcgttcttggtgcccccaatctccccctcctctcaacatatatacttcttcctctatgttaag

SEQ ID NO: 64378 - DNA, 122 bp, Homo sapiens
gtgtgacaggagtggagtgggccaggaggagtgaaagctgttttgagtaggaaggtgagtcgtaagtggtgggcccacaccctgtgaggcctataggctttcactctgagaagaagagctgt

SEQ ID NO: 64379 - DNA, 122 bp, Homo sapiens
tgcagagggtgtactgggtcccccagcagtgccagcccactggcgctgcactcgatttctcgctgggccttagctgccttcccagggggcaggcctcgggactgcagcctgccatgcctgag

SEQ ID NO: 64380 - DNA, 122 bp, Homo sapiens
ggcatcttgacttccggggcacgtcggctccaccccacttgggtgacgtctgacgtctgacgtctaacaactttggtgcttggggaagcagttaactatttgaaacccttaggccctcttcg

SEQ ID NO: 64381 - DNA, 122 bp, Homo sapiens
ggcctcacacctggggcccctttccaccctatgcctcaggcacggggtatgtgctgtcagcgtctgctgtgcagctcattctcaaggtggccagccgggcaccccttctcccattagaggat

SEQ ID NO: 64382 - DNA, 122 bp, Homo sapiens
ggcgtcgagtcttccagccggagagaaaaactcacctaggaccggacctgggcctcgccgcgctgggagctggcattcccaattcaggaccagacacggtggaggggccctacaacttgtgt

SEQ ID NO: 64383 - DNA, 122 bp, Homo sapiens
cgtcacccgactccgcgggccctgagccttgatagcctctgtacttctctcttcaaactacggtttaaagaatgactataaaatcgggagcgtattgaaggtttttaagtgaggcgacactc

SEQ ID NO: 64384 - DNA, 122 bp, Homo sapiens
gcggagcctctttaaggaagcccgagcccgggccccctgcatcgtctacatcgatgagatcgacgcggtgggcaagaagcgctccaccaccatgtccggcttctccaacacggaggaggagc

SEQ ID NO: 64385 - DNA, 122 bp, Homo sapiens
aggaggagccccgttgggcgcacaagtttccatgccgctgcgtgtggccctgccgcggggcgcacctgtcagcgggagagacgctgcacaccagcagcccctcaaagtttcggaggcttgat

SEQ ID NO: 64386 - DNA, 122 bp, Homo sapiens
tcaagacacctcggactgcagctcagagtcgtggcaagtcgtagctagtccactgagccacggtccgctcgctaggtttctcctgcgtgtgacaggacgagccaccccctttgccggaggcg

SEQ ID NO: 64387 - DNA, 122 bp, Homo sapiens
cgcccagagctcccggcgagcgccgctctgtgatttggtgagaggctgtcaaaccggtgacgtgagccaggagtcacccagcagaagacaaagtcactcgcgctctgggcggccaccgcgcc

SEQ ID NO: 64388 - DNA, 122 bp, Homo sapiens
gttgtcaaacccactgaggacccatcctgcccccctctacctgatacgcttccagctgctcgtgtgtgaagactgtctgcttgttgcccatggtgtgaaccacagcccagacttggggatgc

SEQ ID NO: 64389 - DNA, 122 bp, Homo sapiens
tacaactttttttttttgagacggagtttcgctgttgttgctcaggctggtgtgcgatggcgccctctcggctcaccgcaacctacgcctcctgggttcaagcgattctcctgccttagcct

SEQ ID NO: 64390 - DNA, 122 bp, Homo sapiens
tactgaaatttagttatcctttttatggctgttggatatttaggttgttttcaacttttgcgtattatgaatatagccgctatgaacatacttgtgttctcaactggccctggaattcttct

SEQ ID NO: 64391 - DNA, 122 bp, Homo sapiens
tgtgcgaattcggttctctagggagctccttcttcgcctgctggccttacctgggctccccgcttctctggaggggaggcggtgcgggaactcccgtaggcgtgagctggagcgcgcgcccg

SEQ ID NO: 64392 - DNA, 122 bp, Homo sapiens
ttctcggagacaaatctggttgccatggagaccatgctgttgtcaaggtggctgattggccggcgcgggatgcggggacgtttccttgggcccccggcgggcgcagccctcagcccacactg

SEQ ID NO: 64393 - DNA, 122 bp, Homo sapiens
caggctggggcgtgactgcttctggttgagggttgctgcctgtgcaggtggccctcttgtcggtcttgtctgctgcatgggggtgtggcctcctgtggatggcccctgtcctgggtggtact

SEQ ID NO: 64394 - DNA, 122 bp, Homo sapiens
tgctgcctccccgcctctttttccaatttgtcccacaggactccagattcgtgttaatggcgaagaattatctctgtttcaatcttggggcctgggctggctccataacaattataatctcc

SEQ ID NO: 64395 - DNA, 122 bp, Homo sapiens
cttgccgacctggaagcaacagcagcatctcccacaagagcgtgcaaccccaaggctgctcgccgaggcagctcagccatcccggcaggcgctctccttccttctctcttctcccctctctc

SEQ ID NO: 64396 - DNA, 122 bp, Homo sapiens
agccttggttctcaaactgggttccttgggacctccggggtgggggggttccaggaggcacgtagggtaccttgcagggtcctaggagggaaacccaggattccaggagggatcccaggaac

SEQ ID NO: 64397 - DNA, 122 bp, Homo sapiens
acattgtgagcaaggaggacagcagcaggaatgaggctcagaaggtgaaaaggagccacacggaggttcttcctagtccactctgggttttaaaagtgtcgggaggctgaggcaggagaatg

SEQ ID NO: 64398 - DNA, 122 bp, Homo sapiens
tagggccgggcgataatggcggcgtcgaggctggagctaaacctggtgcggctgctatcccgctgcgaggcgatggcagcggagaaacgggacccggacgagtggcgcctggagaaggtgag

SEQ ID NO: 64399 - DNA, 122 bp, Homo sapiens
gttttgggagcggtcggtccccgagggcgtccccgctgctggtgctagggaagtgggcggcgggccaggccacctgcagagtgggctcaggacagctgttggtgcctcttctctctcacacg

SEQ ID NO: 64400 - DNA, 122 bp, Homo sapiens
ctttaactttttttttttttgtaggatgtgtttcttggtctctctaccatgacctgggaccgatgatctattactttcctttgcaaacactagaactcactgggcttgaaggttttagtata

SEQ ID NO: 64401 - DNA, 122 bp, Homo sapiens
agagcctggggacagagctgagagaggctgaggaggctcatcagaggcatgcaatgcacacgtggttagccagttggctccctgttataattacagatttggtatatcaataagttacccaa

SEQ ID NO: 64402 - DNA, 122 bp, Homo sapiens
ctggagggagacagcgcggtgcgctcctgccggccatgctggctggggtggtgtcttaggcggttccagccgttagtcacagggcggccggactacaatcccagcatacaacgggagtggag

SEQ ID NO: 64403 - DNA, 122 bp, Homo sapiens
ttgaaaaaggaaacaaacttccctcgagccgtgcccgcgtggctctggggcggacggttgcgttcgaaagggcatttttcaaaagaagggtttcaggaacgcaggggtgtgggccccccggg

SEQ ID NO: 64404 - DNA, 122 bp, Homo sapiens
ccctggtgtttaatgctctgggtaccacctaaacacgttttcgaaaaccattcccaggtccgacgctttggaacaccctcaagctaatagcatctcggctgataccatgagttctacgtcag

SEQ ID NO: 64405 - DNA, 122 bp, Homo sapiens
ggaaacaccttcttaagggttggagttatctttgtgcatcccatccccaccccaccaagccgcccttggccctgccctcaggagcttctgcttggccttgctaattcctctcttctccctga

SEQ ID NO: 64406 - DNA, 122 bp, Homo sapiens
ccccaccgaagccgcacacttgggccctcctgacaggcagagccggtgacagggctcgggcgaggccttcaagccagaacggagagctcagcaagcccaggcagtgggacggcagagtgtgg

SEQ ID NO: 64407 - DNA, 122 bp, Homo sapiens
gccggggctgcccagccatgctgtgctgcctgctggtgagggccagcaacctccccagtgcgaagaaggaccggcgcagcgaccctgtcgcaagcctgactttccgaggtgagagccccgtg

SEQ ID NO: 64408 - DNA, 122 bp, Homo sapiens
ccccaaggcctggcagcaacgctcctacgctgccttgggccgcaggcctgctaagccctccgctctcgcttccctgcgcgcgaaataagtcccagggccaatgtggcctccccacccagtgc

SEQ ID NO: 64409 - DNA, 122 bp, Homo sapiens
ctaatctcgggtttggggatcttgctcctcagcttgtccgctccgaggaggtgcacagggcggggaaaaagggatgaatttccctttataccgccctgctcagatatttatatgttccttct

SEQ ID NO: 64410 - DNA, 122 bp, Homo sapiens
gatgtagtgtctgatggaagaggtggtggaggggggaggctgttttgatgcagagtcatccgagatggctcagaaggggcaccatgaggagccagggccatgtaccacattctgtggaggtc

SEQ ID NO: 64411 - DNA, 122 bp, Homo sapiens
cagatacgggacgtgacttggtcacccatctagtaacaggccgtgaccagagccggatcgcgtccctcgctttggtcacaagcttcctggtgctctccaaacacagcgtggtagccttgctc

SEQ ID NO: 64412 - DNA, 122 bp, Homo sapiens
gttcagcaagtgatgctatttcagtgaatcagacgctctggggctctgcaaggaaacgcacggactgggagaaggaagtgggagcctagagttttgctctcggcaaaacaagaactcggctt

SEQ ID NO: 64413 - DNA, 122 bp, Homo sapiens
cggggcctgggctgcggagggggccgccctgacccgcgtctccccccagggcaaaagccccgcaaggcagtgtgagctggagccgccagcctggggacctcttttaagatgacccgtacgga

SEQ ID NO: 64414 - DNA, 122 bp, Homo sapiens
aaaagaaggaggtaaaaataacatacaggcaaagcaaaacttggaaaatgtgtttgacgacgtccagaaaaccctccaggagaaggaactaacctgtcagattttggagcaaaagataaaag

SEQ ID NO: 64415 - DNA, 122 bp, Homo sapiens
aagcaaaaccacagaaagccccaagtgtaacctgcaccataagtgtccaagagacagtggcgccaccttgtgatgggcctggcagacagcgggactgtcgcagcggctggagtctgagaacc

SEQ ID NO: 64416 - DNA, 122 bp, Homo sapiens
gtcttaggcctttccaggcgtggaaggggtacccggaccgcctgcgatctgtccgcttcgcgtggggaatgcagccctccagcaggacttgcaaggaagggggtcttgcctcccgcccaggg

SEQ ID NO: 64417 - DNA, 122 bp, Homo sapiens
aacaaaaggatgcgctctggccttgccaacttcagtgcctgggacaagccggctcgtgcccgccgcctcggctgcagggccctccacctgcagcgctttcgtccctacctggcgttcaccgt

SEQ ID NO: 64418 - DNA, 122 bp, Homo sapiens
gagaagcagttacttttcagttacaagacccatctccctagtctcagccttacaacaccacgggactaaggaagagcacttccttgcctccgtaaggccagaggaagaaccatcccaatcat

SEQ ID NO: 64419 - DNA, 122 bp, Homo sapiens
cactggaggcctggaaaagccgagctgctcggctgtcggaggccgagagggcctggaccccggaaggagctctctccacctgtggctttcaaggggctcaaaatcccagatagaagaatcga

SEQ ID NO: 64420 - DNA, 122 bp, Homo sapiens
atcgaacccatgccatttgagcacggctgtgtgccagacactgctaataccgagatacatcgtcacgtggagtcctctatcggaacaaagccaagactcacagagaggaagtgacaagcccc

SEQ ID NO: 64421 - DNA, 122 bp, Homo sapiens
tgtagcctcccagccacagcccagaaaccataagctgtttccacgtgaaacatccaaacacggtctcccaagcctaagtctgctaccatcaaggcttctgtataaaaggcaaatgaggaggc

SEQ ID NO: 64422 - DNA, 122 bp, Homo sapiens
ggggagagcaccggtcatgggcccactcaggcactcatggagagcctggtgtgtgttgtacggttctgtgagcagggatgacgggggcgttattcctgccaccagtcctcaggtgagggagc

SEQ ID NO: 64423 - DNA, 122 bp, Homo sapiens
ctgagatgcctcaataccctggacaccccagaacctcagattgcgtggctggggctcctgcggccaccctgctccccagaacctcgtcgtcttcccggtgccctgcggcaggaacacagggc

SEQ ID NO: 64424 - DNA, 122 bp, Homo sapiens
gcgttttctgcctgcaaaagccgccgggccgccctgttaggctaaatgtgcagcctgtggcggcacaggccgccggcgggccgaagccgatttacactgttacattttaatttgttcgatgt

SEQ ID NO: 64425 - DNA, 122 bp, Homo sapiens
cacacctgtacagtagggcagtgcttcccaggctgtctgcttacattttagcttgtcttacggttacatatggttttagtattttcatttaaaaaatctgggttggttccataaatttggaa

SEQ ID NO: 64426 - DNA, 122 bp, Homo sapiens
cgctgcgtccagagagatggggccgagcctccctgcggagcagaaccgtgggacggagggcggtgggctccgcagggagggggcgcagtccgggacagaccccagcacaggctccttccacc

SEQ ID NO: 64427 - DNA, 122 bp, Homo sapiens
ttttgcctgtcactgccttacctcatcctctatcactttcgagaaggaaacaaaggcatgcgtgtaaatgtccaactctctgttctcattctgaagaggatgcaaagttggacgggaagtaa

SEQ ID NO: 64428 - DNA, 122 bp, Homo sapiens
gaaacatatgcacacacctggggggatcattgtcctctgaaggctccccagctctgtcaccgggctgccatggtgtttcaaagcactattgttctgggttaagaaagactgtccaccaaagc

SEQ ID NO: 64429 - DNA, 122 bp, Homo sapiens
ctggcccctacccacctcgggacctcacagcacgccctcaggccgtgtcgaaaggaaggacggcaaaggtcccttactgaaccttttaagagagcctgcgcctggcagttgtcgattgcgga

SEQ ID NO: 64430 - DNA, 122 bp, Homo sapiens
tggataaaaccaaaagatctgacaatcctaggcctccattttcactggacaatttggaagcggagttgatgttaaggtcaaatgtcatttacatggcacctatgctgttgtttttcttataa

SEQ ID NO: 64431 - DNA, 122 bp, Homo sapiens
cttcgctgcatgctgggtggcggggagagaccgctctgaggaggtttggtctgtcggccacgccgtaggccgcggtgcattctgggtcctggcaatatggcgtcctccttgatgggctgatg

SEQ ID NO: 64432 - DNA, 122 bp, Homo sapiens
gcagatgaatgcctactttttggacaagaaatctgcaaaaatggtttctgtttgaacactcggcctgggtatgaatgctactgtaagcaagggacgtactatgatcctgtgaaactgcagtg

SEQ ID NO: 64433 - DNA, 122 bp, Homo sapiens
ttattttcagtgagtcataggtaaaatattcttcaccaggcgaggattgagtcgcagtcgcgtcaggaactcgcctccaggtactgagcgagcgagccccgacggccgcggtgggtggaggg

SEQ ID NO: 64434 - DNA, 122 bp, Homo sapiens
cacccaaagcgctgggattacaggcgtgagccacagagcccggccgacaccatttttaaacggaaagatttcatatgcagatccaaatttgcagggtttttgttttgttttgttttgttttt

SEQ ID NO: 64435 - DNA, 122 bp, Homo sapiens
gaaccagtttattggttgaggtggtggggaacaggggggttggaggcacaccatgaggagcgagggctcagctctccccagggccctggaaatccatgccctccaccaagtcctgcaggtag

SEQ ID NO: 64436 - DNA, 122 bp, Homo sapiens
gcacaatcctgctggggagtttggggaacaagtgaagaatgcacatctcagttatcccaccggggtgcgaggaaactagggtaacttgtttgacaaccagctcctgtcgattttccatttga

SEQ ID NO: 64437 - DNA, 122 bp, Homo sapiens
agtacatctgcggcaacagcactcggcatccagcctacagtgctgtgccctggcacggatcggatgcctgtcaatgccacctttcaaaaacctctgtagtcaacaccgaggggcaatggcaa

SEQ ID NO: 64438 - DNA, 122 bp, Homo sapiens
gacctcggcagcgggcacttggtacagcccggcaggctgacgctgccgccgagggcgccccggctaccgccaaaccgtgacaacctcggtgtgcccggggcccccatctggaaccggccctc

SEQ ID NO: 64439 - DNA, 122 bp, Homo sapiens
agcgtgtggttagcgtgtgctcagcgtgtggttaccgtgtgcacagcacgagcttgaactcgctttgtcagaactcggttctttgtggtctgcagaaaccttttctgagcagcagctttagt

SEQ ID NO: 64440 - DNA, 122 bp, Homo sapiens
ccctcagatagaggagcagaagtgccgtcaggggtgtaggagtaagggataaggaggggacggagtcccagaaaagctgaaggaaatactgtctgtgtcaacatctgggaagggatgagaac

SEQ ID NO: 64441 - DNA, 122 bp, Homo sapiens
actctgcctttgggccgtaggttagtgtggggccgtgtctcagtccacccaaggtctcctcggatcgcctggagaggcactcggacctggtaagaacgctgtgggccgggtggaggctcgat

SEQ ID NO: 64442 - DNA, 122 bp, Homo sapiens
gggcttaatagaattgctgctacagtctacttcccttttgtttcccatgtattttttcatcggcttgcatcacgtggatttatagattaaagtgaaaaacccgggatatctgtgttattctc

SEQ ID NO: 64443 - DNA, 122 bp, Homo sapiens
ggggaagactgaactgtccgtttctttctgctctaaagtgtcctctggagaggacgctggcggagctggtgctctcgtggtggcaggccaccaccctgtggaggtgtccatgcattgcaagt

SEQ ID NO: 64444 - DNA, 122 bp, Homo sapiens
ccagcaggtgatccacttctgtgcacagtttttgcttcctcactgtgagtcctccttccccgaaagtgcaaagagagcaagctgatacctgcaggccccagagccccaggactattccagct

SEQ ID NO: 64445 - DNA, 122 bp, Homo sapiens
gcccagtcccggctgacgagccagagcgaggccatggccctgcagtcgatccggaacatgcgcgggaactcccactgtgtggactgcgagacccagagtaagtgtgtgcggtggtagcaggg

SEQ ID NO: 64446 - DNA, 122 bp, Homo sapiens
gcgtgagccactgcacccagcccacctgtccctcctcttaaggatgggtggtttccagaccgcactgggaatttcagggttgctttgagccaggcgctcctaggttctggcactcctaggtt

SEQ ID NO: 64447 - DNA, 122 bp, Homo sapiens
cctctccctccccctcctcgctgctggagcacaggctccaggggccctgggtatttttagcgttgtgacctgggcggcagctctaagagcctttcccgggaatcggcgtcagcgcctcgctc

SEQ ID NO: 64448 - DNA, 122 bp, Homo sapiens
ctgcaacctccctgcctgattctcctgcctcagcctgccaagtgcctgcgattgcaggcgcgcgcctccaggcctgactcgttttcgtatttttttggtggagacggggtttcgctgtgttg

SEQ ID NO: 64449 - DNA, 122 bp, Homo sapiens
tggaaggtgtcagcgtgtggctgtgtgatcttgcatgtgtctgtgttctgcaggaacatgcgtcagtgtgtgtgcatcagtgtgcatctctatgtgtcatgcactggtgtgtcttcgtgtat

SEQ ID NO: 64450 - DNA, 122 bp, Homo sapiens
gagaagggggaggagggggcggtacctgcgaggtgggggagtgcggcccgtccgcggtcccgttcttggcgtaggaggaggaggacatcgttcagagccgccgcatggccagcccgtgtgcg

SEQ ID NO: 64451 - DNA, 122 bp, Homo sapiens
ctgtgccagtccctctccaggacagtggtctggtgcacactggatgtaagttccttcccccgctagttggggcacggaagaccctagcattcctggtgggtagaaggctggaagtcgtttct

SEQ ID NO: 64452 - DNA, 122 bp, Homo sapiens
cctacacagagcacagctcccaccctgcagcaccgcccagccggggccaacaccagaggacgccatcctccttaaggccacaaagtgtatggtcctagggcatctttcctgaaagagacaat

SEQ ID NO: 64453 - DNA, 122 bp, Homo sapiens
gcggccccgcggcgaggtgagctcgggcggggtgggggcttccgggcttgcagcggcgggcgcggcgtttccctgtggtgacaatccggtttccgctttcggtgcgctcacggggccgtgcc

SEQ ID NO: 64454 - DNA, 122 bp, Homo sapiens
cagagaaggtagggggtgtggctaagggacacctcgttgcagccccacccttgtcctggccgttcctgacctcccatgtggccttggtcggtggcgctgacctccctgcccatcaccctacc

SEQ ID NO: 64455 - DNA, 122 bp, Homo sapiens
gaggttggaaagacagtgagcacttctgtgcccagaccaattagggggagtttttgtgtgcggcgctgcaggacagagaccggatctgtttatttacctcccctcggccagtgcccagctga

SEQ ID NO: 64456 - DNA, 122 bp, Homo sapiens
gggcgggggcgatggggccgggggtggggtcacccaccctacaggtctctgccgtggatgcggttgccttggcaacggggctagggtgggggcatttcaccaatgaggtgctctcggtccgg

SEQ ID NO: 64457 - DNA, 122 bp, Homo sapiens
ccatcaccatcatctgccgactctcatcatgcacaggatatgagcacctccggaaggtaccgaaggacacaggcttgcccagctgtgatccccagagccagtaaggcataaagaaccccacg

SEQ ID NO: 64458 - DNA, 122 bp, Homo sapiens
agtgttgtggcctttaggccagacaaaaacgcaggtgatgcctagaagccaactagttgccgtttggttatctgtagggttgtggccttgccaaacaggaaaaatataaaaagaataccgaa

SEQ ID NO: 64459 - DNA, 122 bp, Homo sapiens
gcccactctgtcccaccccgccctttggctggtatcaaatactagactacctttcatttccgggtcactgtagatgcgatggcgccgattccaaagactgtggggcggatcaagctaggtga

SEQ ID NO: 64460 - DNA, 122 bp, Homo sapiens
tagcaagctctttggtggcttttgtcagaatggtggggtagcaggaggcagtgaggtcagcgggcattatgccgtcctgtggcctggcagggagtgaaattggccatgcctcgagagtaatc

SEQ ID NO: 64461 - DNA, 122 bp, Homo sapiens
tattgtggtgatggagatgcagtcacttattgtccaggtgaggcccaagagccctgtggccgccacctgaggtgggctggggctgctcccctaaccctactttgcttccgccactcagccat

SEQ ID NO: 64462 - DNA, 122 bp, Homo sapiens
atcactagcaccaaggcctggtgatgggcagacaaagaggcctgtccatccatctcataccggcctcatagccttgtggcctggaatggagctgggggctgatttcaatcaaactaggccag

SEQ ID NO: 64463 - DNA, 122 bp, Homo sapiens
cctaattgctctcccagcatcagcagcatctataaagcatcctgggaattgcttgccctacgttcagagcagctggtcacatgagcctgaattttcagttcagttcattagtcagccatttt

SEQ ID NO: 64464 - DNA, 122 bp, Homo sapiens
cccagagggcctgaaggtgcaggagaacgaggacaaccttgctctcatccacgccgcccgcgacacactcaagctcatccggaacaagttcctgccggctgtgtgctcgtggatccaggtga

SEQ ID NO: 64465 - DNA, 122 bp, Homo sapiens
gaaaccgaacattaaccgtagccctaacgcggctgagggatccaggccttgcctctgggccgggtgagagacagacactcgccaaccagtccgcagtggctccccgtgtgtgcgaggctccc

SEQ ID NO: 64466 - DNA, 122 bp, Homo sapiens
ttctctccttggcttaactagtcccggtttttcattctttatccgtgacttttagggaaccgtgggggggaagtctggtttccgtcctgctgctttccttcaactacaagatggcttctcaa

SEQ ID NO: 64467 - DNA, 122 bp, Homo sapiens
cctgcagattttggacttgcccgtccccatgatagagtaagccagttccttacaatacatcgctctctttctctctcagtgcacacacatatgcacatacacacattcaattggttctgttt

SEQ ID NO: 64468 - DNA, 122 bp, Homo sapiens
tcaagtcatcccctttctccctgatctttccttctgtcatcttcacaggtaatagggaaacggagtagtataaaggaagagtatagactttggagttaagacagcctttggactttatccac

SEQ ID NO: 64469 - DNA, 122 bp, Homo sapiens
ggagacgccaggatgcagagtgccagggtcaggcagggcaggaacccaggctgccgcagccgaaggagagaaaccaaagttccagccaacccagccaagcgaagtgtagccaagagctggga

SEQ ID NO: 64470 - DNA, 122 bp, Homo sapiens
acttctaaacatcggaagaaaaactctagagacactgcttttaagaactaacactcatcgcgagggtctgcagctttctcaagtcagaccaagaagccatcaattttgaacacactggcacg

SEQ ID NO: 64471 - DNA, 122 bp, Homo sapiens
ggcgacagagcgagactccgtctcaaaaataaaaattccggtagagtaatactcttgtaacgcagtgtgcaattgagcagttgctgactgctgatttagagttgaaatccgactatatttat

SEQ ID NO: 64472 - DNA, 122 bp, Homo sapiens
gcgccaaggtgagtaccgacctccgccagggggcgatccgggccgccggaagtgggcgggcgttggagggctcgctgcttaccctcagggcttccatccgcagcctccgggagaacacgggc

SEQ ID NO: 64473 - DNA, 122 bp, Homo sapiens
agtcgctccacgcggaggagctggttggcaggggcatccccatcgagcgagtcgtctcctcggagggtggccggccctctgtggacctctccttccagccctcgcagcccctgagcaagtcc

SEQ ID NO: 64474 - DNA, 122 bp, Homo sapiens
ataagtacctactccggaaggcaaattatctttccacaccagaaaggtttataaacaagccgggtgtggtggctcacgcctgtaatcccggcactctgggagggcgaggcgggaggatcgct

SEQ ID NO: 64475 - DNA, 122 bp, Homo sapiens
cagattaatctagaaagaatagacacatttcttacggcgcccaacacgggctcccctttccggggctaggtggctttagcctagagttcccaactgtgggccaggaacccacccctcagccc

SEQ ID NO: 64476 - DNA, 122 bp, Homo sapiens
caggctggagtgcagtggcgtgatctgggctcactgtagcctctgcctcctgcgtgcaggcgattctcccacctcagcctcctgaatacctgggactacatgcgtgcaccaccacaccctgc

SEQ ID NO: 64477 - DNA, 122 bp, Homo sapiens
cggggcgcggcggcggggaccccggggctcgcctccgcccagggcccccctccacgccctcgggagccccgggcccccgctgagcactcctcccgcacgcctgggtccctccggccggcgcg

SEQ ID NO: 64478 - DNA, 122 bp, Homo sapiens
tatagttttcacctcgctgtaatcaggggtcctgctttttcacttgatgatatacagagacggcttcccttgtacggggacttcctacccatcaggtctcacggccgcacaatatcccatcg

SEQ ID NO: 64479 - DNA, 122 bp, Homo sapiens
tgaacccgggaggcagaggttgcagtgagctgagatcacgccactgcattccaaccagggcgacagagtgagacgccgtctggagaaaaaaagaaagaaaaaaagaaaaagaaaatgagact

SEQ ID NO: 64480 - DNA, 122 bp, Homo sapiens
tccctgcgacctgttctgctagcaggggcgggggagagccccaataagccgccccagaggcggaccgtgcaaattcctaagaaaaagccctctagaaaacaccaagcccttccaaaagccgt

SEQ ID NO: 64481 - DNA, 122 bp, Homo sapiens
gcaacttgtagctgctgaaagacgcctaaagcaaatacaagccaggtgccaggaccttgacgacgctggggttggttctgttattctgcatggttcccgtgtttagatctttcacaatcatt

SEQ ID NO: 64482 - DNA, 122 bp, Homo sapiens
ctaggtgtggagtaggctacaccactgagctctgtgtaagtccgtgcaccctatgttgctcgcacagccacacaatcgcctaaggacacatttctcagagagtacccctcatttctcagagc

SEQ ID NO: 64483 - DNA, 122 bp, Homo sapiens
ttgctttctaagtatgcttttagaatgtagctgtcagaagagatacttcaggaactgtgacggtgggcacaggggtaggtgaaacactgtccactttgattgcctaaactgagctgcattga

SEQ ID NO: 64484 - DNA, 122 bp, Homo sapiens
gccttccgatggtgggtgtgaattacctgacggcagtggtaaggagcacccttcttcagacggggctgtggtggcaccagctcccaagtctgaagaaaaagatgctgctgagatccaaaagc

SEQ ID NO: 64485 - DNA, 122 bp, Homo sapiens
gtttgtcgctgtccctttgtaagggtccagctccactccactcctcatactcacctccctcgcccccatccccgcccagaagactttggtagctgcctttgcttaaaaaaaaaaattctaaa

SEQ ID NO: 64486 - DNA, 122 bp, Homo sapiens
cctggtgcagttgaacgggtaaagaaacttagagattatgcttttgttcactttttcaaccgagaagatgcagtggctgccatgtctgttatgaatggaaaatgcattgatggagcaagtat

SEQ ID NO: 64487 - DNA, 122 bp, Homo sapiens
ccctctaggtgctgtcagtcctgcggggccagaagagatcaacatgctcaggcctcattccggggtttgaatctcagctctgccactcaccagcaagtgaccttgggctagttttttttttt

SEQ ID NO: 64488 - DNA, 122 bp, Homo sapiens
gcgcccgcaggccgagcccctgcagcctccttgctgcgcaatgtcccggggcccccctcccgtggccgcttcgccctcctggtgacgtcctgctgcaactccccgagcactgcctgtcttcc

SEQ ID NO: 64489 - DNA, 122 bp, Homo sapiens
caaatctcttttattacagaggggttgtggtaaaagatcctgggcatccactggttatctcggagtggcaggggcactcagtccctccgcaggttcttaagccgttcctccaggtctgcatc

SEQ ID NO: 64490 - DNA, 122 bp, Homo sapiens
ggaggaatgggtgatccggggaagaagcccctgagcaaagtcccagagatgggaagtggccggggtacaccacaaccccaggcagtccagccaggtggatcaccatggcagccaggtacatc

SEQ ID NO: 64491 - DNA, 122 bp, Homo sapiens
cggatgcttttcccccgtgcttacttgcccaccaaaagaggggaaaaggtgggtgcacagcgggttctcagagggtgctcctgagccccctggagctccgggtactcggccggccggcggcc

SEQ ID NO: 64492 - DNA, 122 bp, Homo sapiens
acagggcacctcttggggcaggcagggagcttgtatgtgccatctggggccaaagctccacgattgagtcataagttaagggtagatggagattttccgccttgagcagaaacgtggaggaa

SEQ ID NO: 64493 - DNA, 122 bp, Homo sapiens
aggcaggtggaatctgggtgagaggtgaggtaagttgactgggatgaaggcaggcagtggcggattagggacggatcaggctgtttttctaaattatatgagaaaggtggaccattttcaca

SEQ ID NO: 64494 - DNA, 122 bp, Homo sapiens
ccctccgcaccagtgcgtggaggtgtcaggctcccgctgcgggaggcgggagatttaaaccgcgcgacctggcgtccgcgttcgcccccctcgggcgccggcctgaccccgccaccggcccg

SEQ ID NO: 64495 - DNA, 122 bp, Homo sapiens
gctagaatccgtccagtctctgctcgcgcaccgtgacttctaaggggcgcggatttcagccgagctgttttcgcctctcagttgcagcagagaagcccctggcacccgactctatccaccac

SEQ ID NO: 64496 - DNA, 122 bp, Homo sapiens
cattatttttcatgtttatttcgggctggagccagagctgcggtattcatgagctctcaccgtctgtttttttttttttttttttttaatcaatccctttgtttctttaggagagaaagaag

SEQ ID NO: 64497 - DNA, 122 bp, Homo sapiens
tacagatgagggagccgtgtgggaagatgccgacgggaggacacatgtgacagagacggacgtgggagccgtgaaggaagatgccgacggaacgacacatgtgtgacagagatggatgtggg

SEQ ID NO: 64498 - DNA, 122 bp, Homo sapiens
gcccccagtctcctccccacttcggctcggtcccatctctccaggacaaggcgccagcaacggagccacaggccgcaccagcccgtctttgatcccgggtgttcggactcagggcctccacc

SEQ ID NO: 64499 - DNA, 122 bp, Homo sapiens
agagataagaggctggggtgcggaaataagcgactggggggttcttgccccctaggaaagcgggacttgccgctaagggtgaagtccgtgaccggcgccggagttttgggttcacggataaa

SEQ ID NO: 64500 - DNA, 122 bp, Homo sapiens
gtgctttggggcccagagttagaaatgtgattctggaaggtcgaggaggccttttggtcccggtggcacaaaatgacagcgggggctgttatatttctggtccgtttcacggagccagctct

SEQ ID NO: 64501 - DNA, 122 bp, Homo sapiens
tcccttcctggtttctccgagggcaagaggggtcctcccttgtcttaaaggtgccgcagccgccggcccccccacgcccagcccgccccccccagcctggcctcggaggccagaacaggctc

SEQ ID NO: 64502 - DNA, 122 bp, Homo sapiens
ctccctgtttccctggaggtgagtgggagcagttccctcacataagagtctcaaacactccggcttcactgtgcccaagaacagcacggtccggggtggtccagtctgatcccaaccggccc

SEQ ID NO: 64503 - DNA, 122 bp, Homo sapiens
tacatgcgggtccgtgtgtacatcacatcggttacatgtgggtccgtgtgtatatcacatcggttacatgcttatccgtgtgtatatcacatcggttacatgcagatccgtgtgtatatcac

SEQ ID NO: 64504 - DNA, 122 bp, Homo sapiens
gtggtgcctaggaggacctgcagaggagtttctgcctctctgctcaggccagttctccagcgccctctgtggcggctgagagcaggccctctaaggaagagagctccgggcatagagagctc

SEQ ID NO: 64505 - DNA, 122 bp, Homo sapiens
ggacggcaggtgttaccagggaagctaaaagtacagcttttgctgacgttaagtcagatacgcctgggaaaacagacctgacacccattttaatccacctactcagttccaggcagctagca

SEQ ID NO: 64506 - DNA, 122 bp, Homo sapiens
cctgctgcctctcatgcccactgtccattactcacacaaaggcagagtgagcctctcaaacgaaaattaggacatatcctatgaacacctcagcccttttctttcctaggcacaatgaaacc

SEQ ID NO: 64507 - DNA, 122 bp, Homo sapiens
tgccaagagcccgtggtgggagatggacgaccaccgtggctgcagctcccaccccttccacgcggtgtggcagacgatggtgcagcctgggctcagagcagctcacatcacgtacacggcac

SEQ ID NO: 64508 - DNA, 122 bp, Homo sapiens
gaaacagaatccccgcgtgccccttcctcactaccctccaaatcccgctgcagccattgccgcagacacgatgccgaaacgaaagaagcagaatcatcaccagccaccgacacagcagcagc

SEQ ID NO: 64509 - DNA, 122 bp, Homo sapiens
tttttcagttactctggtaacacctgtgacctgagggttattctattcgcgttagcaactcgcgcgggttgggaggcgccaatgagagcagggcttgaaactagcgcttggcgtctgatggt

SEQ ID NO: 64510 - DNA, 122 bp, Homo sapiens
aacttgggagggtgactcccttctattcccagcactatgccggggactgtggcaacactgcggttccagctgctgccccctgagccagatgatgccttctggggtgcaccttgtgaacagcc

SEQ ID NO: 64511 - DNA, 122 bp, Homo sapiens
gcgtctcgggagccaggttggcggtgcgatgaggcgcagcaaggcctacggggagcggtacgtcgcctcggtgcagggctccgccccgtcgcctggaaaggtgagtggatctcgaagagacc

SEQ ID NO: 64512 - DNA, 122 bp, Homo sapiens
ccgggcctcctcctgccccctccccactggcgggtggggtgggaagggggcgggtgcagccggctgagagcttgatgatttcctgccctcgcccggcgctcaccacagcttcctgccgcagg

SEQ ID NO: 64513 - DNA, 122 bp, Homo sapiens
ttttcattacttctttcagtttgggggaatcttcctgcacatttgactcggctctgagtgcgcagaccaacgtgtttcctctttctccagcctagggcggtgccagcccagggagcctgcgc

SEQ ID NO: 64514 - DNA, 122 bp, Homo sapiens
cagcagcggccagccccgcgttgtaggaaccagacagcggggcttggcagtgcgcttgggcgcagccgtgccgctgctgccggaccccagtgctgcctcctcaacacgggcagtgccaggag

SEQ ID NO: 64515 - DNA, 122 bp, Homo sapiens
ataatcagctccccatgggctttccttcaccatggcttctccccttcagcacgtgctactcgtggaggttgttggtagggcctttaaatatacttttccaactcaaagctgcccttgccata

SEQ ID NO: 64516 - DNA, 122 bp, Homo sapiens
gtgtgacctcagacaagtcatttcctctctctgagcctcgttttccttatttgtacaagacgataatatcagtttcaaaagattcatgtaagcctttgtctagtcaacaaatgtttcccgag

SEQ ID NO: 64517 - DNA, 122 bp, Homo sapiens
tgtgaagccctttaatggagggagcatggagccaccgtcagacctgatcttcacggatttcggggccctctgctggttgcctacacatccaccccctccctaaaccttcctcgttgacacga

SEQ ID NO: 64518 - DNA, 122 bp, Homo sapiens
taagaccccaaccctggctgacaccttgactgtagctttgctgaggacacagctaagctgcgtccacatttctgacccacagaaagtgtgagataataaacacgacttgttttaagtctcta

SEQ ID NO: 64519 - DNA, 122 bp, Homo sapiens
gtttccaggcctgaactagtaaacccagcaatgagaatcagccagcattagcaagttttccgtgtgggagtggggtgggggtggggactggagggagcaggcgctgaaccaggaaaggagga

SEQ ID NO: 64520 - DNA, 122 bp, Homo sapiens
cactccggtctcccacagtactgcatgtccataaactgtttccccatgcaccctggttaccgcgtcccttctcggtgcttccctgtctctcccattttttttccaacatgaaagcgtctgga

SEQ ID NO: 64521 - DNA, 122 bp, Homo sapiens
cactggatgcctgcttcttgaggtggtgccgcgtgatcagcgcttgatctatcacagcttcgaccacccagtgcctcagacgctgcttgcggttcaacaccggcctgcgctgatcagctttt

SEQ ID NO: 64522 - DNA, 122 bp, Homo sapiens
gcaggtctttggggagcgctttgagtaatattagagctttcactaaaccctggcctattacgtcccctcccctgagatttacctttatatactcaagttctttcatgccaggaaggtaggct

SEQ ID NO: 64523 - DNA, 122 bp, Homo sapiens
agccacttcacctctgcaagtctttactccctctatatataagctataaaataagggccccgcattaggtatctgacctcaaacaggcttcctgaagccaacaaaatcactctaattatctc

SEQ ID NO: 64524 - DNA, 122 bp, Homo sapiens
tttccgtgtcctccgcgcgcttcatttttatcaggctcctgggtgtgtgcagggagggaacgcaggcacggaacgcaggcgcggaagatgtaatttgtgcattaggaagcctccgctcgagc

SEQ ID NO: 64525 - DNA, 122 bp, Homo sapiens
gttgctggccgcgcggagcaggggtcggcttagctcggggactgaggggagctcctcctgcgccgctcacccggcgctcgccgaacaggtccaagcggctgccctggggcttgacattgaag

SEQ ID NO: 64526 - DNA, 122 bp, Homo sapiens
ggcgcttgtctttttcgctctagcctaaacacttgagcctcggcaaacgggcagaggcagcgggaatcagggactacacccccgaacccagtacccgggtccccgacttccccgagcctacg

SEQ ID NO: 64527 - DNA, 122 bp, Homo sapiens
ggggccccgctgtctgaactcacagctccctgccgagccccctctccggggtgcacataacgctccagcgcgcgcacacacctcggacagtcccctcgcgtctcacgtgacacgcggcccgg

SEQ ID NO: 64528 - DNA, 122 bp, Homo sapiens
caagtccccagcactggccggcttccggggcgggtggaaaggagccacaagcgccgcggtcgtcgcagccccgccggcgctcagaccacaattgtgggagccgccatcttgagaccgtcccg

SEQ ID NO: 64529 - DNA, 122 bp, Homo sapiens
gaacgttactttattctttctctccaaagcccctttaaacagatctgtccactctttctccgcaggcgtcccagaaacgctcggaacagatctagggcacaagccttggccttcctggtcgc

SEQ ID NO: 64530 - DNA, 122 bp, Homo sapiens
gatgaggaagtgctggtgagagcgggatcccaaaccctgaggtgttggggagcctgaagccgaggactgcccctgtcatctggcccagtgccctcggctgtgtccccaccatggccctcacc

SEQ ID NO: 64531 - DNA, 122 bp, Homo sapiens
ttacctagatcttaatttctagatttaaaaagaagaaaaaagggatcaagtaaggaacagcgaagtaaagaatatctaagattaaaagtaggaatagctacaattacctagatttcaatttc

SEQ ID NO: 64532 - DNA, 122 bp, Homo sapiens
tggaggtgattgaaggaagatattgtattgtagagggactaccagatgacagttcaggaacgctttcagaggaatttttttaaggctcagctgacagcactacagtcctgcctgctgggaag

SEQ ID NO: 64533 - DNA, 122 bp, Homo sapiens
atggctccgaccccggcttctgtggttggagggcagcaccttacttagactcccagcgcacgtggagcagtctgccggtcggttgtctggctgcgcgcgccacccgggcctctccagtgccc

SEQ ID NO: 64534 - DNA, 122 bp, Homo sapiens
catttcttcataaagccctgaaatttatccatcaagctgtatttcccattaaaatgtggtcgcaaggtggtatccaattctgcagaaaacatgtagccacaagcctctcgttgccagtttat

SEQ ID NO: 64535 - DNA, 122 bp, Homo sapiens
aatacaaatgatcagagctactccggattcagaaattgtgggggtgggtggacaggcttccgggcttccaacttctgctcggatttgctgtgcagctttaggcaaaatgtcttgccctctct

SEQ ID NO: 64536 - DNA, 122 bp, Homo sapiens
tactcagctccagagtttatcctctaacattttccttaagattgccttaaacatatgctccgagtcttgtacctgcaaattgtttatatttgaaggagattttatagaggaaaaaattaaga

SEQ ID NO: 64537 - DNA, 122 bp, Homo sapiens
gccaggcatctcacagataaatctattacatgcaaaatgaaccagatgaaatagtacagacgtatccacgcaaacatatcaccactattatgaaaaacaatttaaaggccgttcagctcaga

SEQ ID NO: 64538 - DNA, 122 bp, Homo sapiens
gctgcccaagactggaagggaaggcagctcttaagaagcaaagcaagtgaatgggaattacgctccacactaagggaaatgcattgggagagggatacatttggggaggaagaatgaaataa

SEQ ID NO: 64539 - DNA, 122 bp, Homo sapiens
ttgcatttcatgggagagaatcaatgagccttgttctataacctacgcttgtatgtataccggtagggagagaggtacgccctttccccacatttcctaaagacatgcagtcattttgctgc

SEQ ID NO: 64540 - DNA, 122 bp, Homo sapiens
agagcctccggagaacagcccgcttggctctgcaagtttgctgtgggcggtgaaagtatccgctgacaaaccatccaacgtcggtttggaagcccaaggtcccataaaaagtgggacgaaaa

SEQ ID NO: 64541 - DNA, 122 bp, Homo sapiens
gccgcggcccgcgtggcggaacctggcaccaccgcagagcgctgggcctccactgcccgccgccctaggcttggaggactagagcgcaaggaggggtatttgctgctttccccgccctctaa

SEQ ID NO: 64542 - DNA, 122 bp, Homo sapiens
ccgtgcatactgggaaggctgatggcagaggctaaggaaggggagaggccaggaaaagtgcgtgaagatacataccaaacacacaacgctcaactctcgcagagctttctctaaatgcatct

SEQ ID NO: 64543 - DNA, 122 bp, Homo sapiens
cctttgtgtttcactatttcaggatgcaaactgagcaaggaactgataccagggccagcacgacagcaaaacctcctaatgttttaaaatttaaacggctcacacagaaatgagagttccaa

SEQ ID NO: 64544 - DNA, 122 bp, Homo sapiens
agcacctgcactcaggtcctagcacacacaagggagacttcgttgacgacgtagctatgtcgttgttacttttccccactgactagtcttagcagctctaaggagccccgcacacatgcttt

SEQ ID NO: 64545 - DNA, 122 bp, Homo sapiens
agcaatcctctcacattggcctcccaaagtgctgggattacaagcatgagccactgcacccggctgaggatcacttttcttagggtagatttctggatttataatcattgattgaaaggctg

SEQ ID NO: 64546 - DNA, 122 bp, Homo sapiens
ataaggtaggtgttattatcctccttttatagatgaagaaaccaaggctccagagaagttcggcaccatgcccaagtcttgcagcttgtaaatgatagagccagcttttgaaccttggtctg

SEQ ID NO: 64547 - DNA, 122 bp, Homo sapiens
ctgagaaacccaacaagatgaattcagtcaggatggtgcaatttcccacttccatgtccacggaggtgaaagcctgactatcatgagaagggaaaatcatcacttagtgttttttctattca

SEQ ID NO: 64548 - DNA, 122 bp, Homo sapiens
cgggagtgccacgacagccacacctgggccatgctgccaggctggctggtagtgatggaccggagtctgtctgatgggctcaagcatggctgcactcagtggttgacaaaaactataaccac

SEQ ID NO: 64549 - DNA, 122 bp, Homo sapiens
tcaaggggcatccacggagctgggtcagcaaacataacactggtcatctgagcctgcgcccgcccttcctcccaggccagggcgcccccaccccctgggtttttcctccgtggacgccgctt

SEQ ID NO: 64550 - DNA, 122 bp, Homo sapiens
ctggctcacacgcgtgtgcctgccctcccagccccagaacatgcagctagaggtgggcttcgagagcctggtttagatgaatgggagcaaggtcctcgacagagaagggtgtggggagcgaa

SEQ ID NO: 64551 - DNA, 122 bp, Homo sapiens
agcaataggttatccagctgcccagatttttttcttttttgctttggctgcaactcgacccgtgggaacttaattggcaatgtaaattagacaatttacaaaaaaacacctccttttacttt

SEQ ID NO: 64552 - DNA, 122 bp, Homo sapiens
gatgaaaccactgacatcagctggtctgacgggccccacaggagctgactcaccaaagaacgcagtttccacgtcctgattatttcatccccctttcctcaaccaatcaatgaccccaactt

SEQ ID NO: 64553 - DNA, 122 bp, Homo sapiens
gggcaccgtgttccggaagcctggccccgagcgctgtgcggggcgcccggggacgctcagcgagtgtctgtcccagccctgagctcagtgaaagattgcagagtcctgggcccacgaggggg

SEQ ID NO: 64554 - DNA, 122 bp, Homo sapiens
cactctcctcagatgaagacgcggaggcctgagcgctgggggtcgcccggggctgcacagcgggtcagaggccaaccctgggcggagccaggccacaccctccctcaaggattcacagtctc

SEQ ID NO: 64555 - DNA, 122 bp, Homo sapiens
gcggcgccccctagcagggttaccaaagaacggaagtgtttctcatcggacagtgtaaaccgtttctcccacttcactaggaagaaaggggctggcttatttttacaattaaaaaaaaaaaa

SEQ ID NO: 64556 - DNA, 122 bp, Homo sapiens
agtcaccgccgccggcgcctacttcctctaaggccggggctgactttcaggaaatgatgccggccccgtaagtcagggcaattaccggcagtgcgaggagaattactgtacggggcggatct

SEQ ID NO: 64557 - DNA, 122 bp, Homo sapiens
cgttaaatacttcacaagaaataaagggatctgtcatcacttctgctgggacatctgcgacgcctccttcaagtgtgccaagtatgaatgcgtgctcagttatggcaaacaaactcactcag

SEQ ID NO: 64558 - DNA, 122 bp, Homo sapiens
tggttccccacagtggagacaggaacacaaaactgaacgtggaccaggacagcttacccccggaatgtgaatttttctaatgttcattttccaataatttccctattccccctgtttcccaa

SEQ ID NO: 64559 - DNA, 122 bp, Homo sapiens
cttggccctgcaccccctcggaggtgaatggagcctccctggtgtgagaagtgcaatccacgtggttggggtgtaggtctccctcctgatctaagagggagaaaatgagatgggtgggcact

SEQ ID NO: 64560 - DNA, 122 bp, Homo sapiens
aaaaggcggaatgggaggggcccggccgccttgccccactcccccgagacgctcttaccgcgcccggccctccatcagttatgcagccctcagccggctgctggcgttcccggatgtgcggt

SEQ ID NO: 64561 - DNA, 122 bp, Homo sapiens
gagatgctgaggagggaacgcccgtaaggcgctcagaacagtgcctgccactaaggaggccgtaaaagtgagttgttgttgtgcggctgctgttgtgattgctcgggacacgctgaggccca

SEQ ID NO: 64562 - DNA, 122 bp, Homo sapiens
ggggcctggatattccccccacgcaccgcgttcctgaccgtggggaggagcagagccctgcggtctggatgttccccacacaccgcgttcctgaccgtggggaggagcagagccctgcggtc

SEQ ID NO: 64563 - DNA, 122 bp, Homo sapiens
atgttctgggaacatttccagagcatgcttcaatctctcagtatcttgcaggagcagcagcgttttcatgtggtacaggatggacacgtctgagggcagcatgctgtgtgacgcaaggcggt

SEQ ID NO: 64564 - DNA, 122 bp, Homo sapiens
tgggctacgccaaatctgcaaccagcaggctgggcgtggcgtgacagcgcgggcgggtagcgttacgtggcggggctgcagtgtggattagcccctcagcccttttggattaattggtgtgc

SEQ ID NO: 64565 - DNA, 122 bp, Homo sapiens
cgtaattggttccatgtgtgcagtaggagagtcagtgagagggtgagagagacggggagacggaaacctcttaaccacggctcacacggcgtctttggtgaggtggtttaggtttacatctc

SEQ ID NO: 64566 - DNA, 122 bp, Homo sapiens
ccatccacaaggttttccttgtagacgtcatcactgtagacaatctgggtcctcttgtcccggtggcaacccttagggctgttctggacagctagggagggaggagaggaacagttaaggtc

SEQ ID NO: 64567 - DNA, 122 bp, Homo sapiens
gaaggtagaaactgaccacatagcagcagccgtgagcctgaagcccagtgctgagttggccgagaactggtgggctggaaataggcccagattttggtggcttctgggtaaatgtagagcta

SEQ ID NO: 64568 - DNA, 122 bp, Homo sapiens
cgagcctcccgtcatagctcagggaggcaaacagccacgggtcagccgaggaccagtccacggcatagacgctgtcctcgtgctcctcgtaggtggcgatcacgttgtcctgcaggggctcc

SEQ ID NO: 64569 - DNA, 122 bp, Homo sapiens
cgagggactctctttcttcagactagtttcttatttttgtctttgcctttgagaactacccgaggagccggggagtctgatctgccttttcttgtggcttgcggaaaggccagactgttggc

SEQ ID NO: 64570 - DNA, 122 bp, Homo sapiens
taaactgtgtgccctctcggggccaggtaggagcctgagagggaatgggagaagtggtcacgaatgattgtgaggactgcagaaagaagacagggctgagaagagtgtgatttcccctagaa

SEQ ID NO: 64571 - DNA, 122 bp, Homo sapiens
agtgcagtggcagaatcacagctcactgaatcctaaactcttgggttcaagtgctcctctcgccctcagcctcccaaatagcttggattacaggcacatgcctggctaattttttaattttt

SEQ ID NO: 64572 - DNA, 122 bp, Homo sapiens
tcatccctgctctgcccggagctgacggggatgccccagcaggccctgcctttctctggccgtcagtcccttcatgtttaaagtagagaacgggctagacagctggaaagccactctccacc

SEQ ID NO: 64573 - DNA, 122 bp, Homo sapiens
ttctttgactaggaaagggaactccctgaccctttgcgcttcccgagtgaggcaatgcctcgccctgcttcggctcatgcatggtgcgtgcacccagtgacctgcgcccactgtctggcact

SEQ ID NO: 64574 - DNA, 122 bp, Homo sapiens
gctgatacaactcagtttttactttagctctgggagttgtggaaaggtgctggtatgggccgcagaatacagcctttggatgaatatgaagacaatcctgaaagaacttgttcagagaggtc

SEQ ID NO: 64575 - DNA, 122 bp, Homo sapiens
gaagccctcctccaattaatgtgctattgctcctttaaaaccgagaacaaacggcgcggccgctcctgatcccggaggctgcagagcagtaattgtcacttagccacttaactccccgccgc

SEQ ID NO: 64576 - DNA, 122 bp, Homo sapiens
cctcaactccaaagccacttctacatctttaggtgttacagcagcattccacattgcagtcgcaaaattggcgttaagtttcctagaaatgcgacaacaaagtacctggatggcttgagcaa

SEQ ID NO: 64577 - DNA, 122 bp, Homo sapiens
gggccgcacggccgtgggccgctggccacgcagcagcagggtcttcgggccgtggtgcgccgctgggtgactccacttccttagaggatcgaacccacagaggaatgtgtccagcttagaag

SEQ ID NO: 64578 - DNA, 122 bp, Homo sapiens
ccccaggctgggagcagccatcacagaagtccactcattcttggcaggatggcttctcatcgtctgctcctcctctgccttgctggactggtatttgtgtctgaggctggccctacggtgag

SEQ ID NO: 64579 - DNA, 122 bp, Homo sapiens
ggttgctagagaatgttagaggatccctctctggattggagatagggaaagaaagttgcacggctgctgaggccccttctaggtggcaaggctgtgctccctggttctgatgatgtgcctgg

SEQ ID NO: 64580 - DNA, 122 bp, Homo sapiens
taatcctcctgtgcaaaaacaacaagtcccatgtaggattgcgtgcatggtctaattacacgtaacaaaacatctcgtctcaggagacaaggagtgcttggtagtaaattaagagatgcaaa

SEQ ID NO: 64581 - DNA, 122 bp, Homo sapiens
gccttatgctgtggcaggagagggtctggcttgcctccctaagcaagcccctgggctcaccgcgacaagcatgaagccctttccctccagacccgccgaggcgccctccaggatccggagtc

SEQ ID NO: 64582 - DNA, 122 bp, Homo sapiens
ctcaggtaatccagccacctcggcttcccaaagtgctgggattacaagcttgagccaccacgcctggccaactatccacttttaagcatggaatgcagatcaggatcaagaatttaaccttt

SEQ ID NO: 64583 - DNA, 122 bp, Homo sapiens
tcgggttgcattcgccataagagagccggtagacccctgaaatcccgggaccgcctcccacgcaaaacgtgagacaaacaaaaggaaaggcggaaacgcagaaacgcagaggtagccagtgg

SEQ ID NO: 64584 - DNA, 122 bp, Homo sapiens
tcctggcccctcttcctggctcccacctggcacccaggtgtaaatggctgtggtttggggcgttccagtccctccccatctgacctctgcttgccaccttctccgatccaggctattgcccc

SEQ ID NO: 64585 - DNA, 122 bp, Homo sapiens
cacgaattgctcaatatctaccaaagaccttcactctcaacgagttcctgcaatttgctacggtttgtttctaatgtgtggatgttgcggctgcttggccgacctcacgtctggctgctgag

SEQ ID NO: 64586 - DNA, 122 bp, Homo sapiens
ccagaactgggtcttggaccctctcccaagggtgaggggtgttcccgtggtggtgcagggcggttgggggtagggggtgctgggaatggcaggtacgagtccagtcagcagatctgcctgcc

SEQ ID NO: 64587 - DNA, 122 bp, Homo sapiens
gtgcgtggttccgcggtggccgcctcttcctgccgcgcaggccgagggtcccgacggcgccgctcaccgctccgggactcagcctttctgggcccggcctgcggttccctcggggccgggga

SEQ ID NO: 64588 - DNA, 122 bp, Homo sapiens
caaatatagctgataccatatttcccagccatgtgttcaagaactgttaattacatacttcgttttcaattgtggcccccattttgtctaatggcagaaaaataaatctagtcagttccagg

SEQ ID NO: 64589 - DNA, 122 bp, Homo sapiens
tgcccgagtgagcctgataccagcacagccggaagcggcgctcaggtgtgaactgaggctcgaggtcacccgctgagatgcgaagaagccggtgagccccacaggtcctccggctcaaaagc

SEQ ID NO: 64590 - DNA, 122 bp, Homo sapiens
tgagccgtgcaatagagagcggcatcatccctcacagaacgggggaggagcaggaggggacgacagggaggagacttgcctcccagggaaagacagcacaacagctacttggaatagtcccg

SEQ ID NO: 64591 - DNA, 122 bp, Homo sapiens
aagaaatttacagacgtacgagagctcacactggcctgtcaggaaccttctgtcaagatgcgatagcagggtgggcttcagatgagaaaaagccagggactggcacatgccctttctgcaga

SEQ ID NO: 64592 - DNA, 122 bp, Homo sapiens
cctttgttcacggtgtgaggtggggactctaaaataccttgcagcagcccctctgggacccggctgatggagacagtgatgctcacacacgtgagtgtgtgctctgtgcagatgcagctctg

SEQ ID NO: 64593 - DNA, 122 bp, Homo sapiens
gggaagttcaggaaatgctgcacagagccctgacctaggcccctggcactctcccgcccccgggatccccatccttacctgggcccccagtagccggcactgcagacacagtcccctgtcac

SEQ ID NO: 64594 - DNA, 122 bp, Homo sapiens
caggttgatctggccgttgatggcggcctctgagtcctggtggtagttctggcgcacctgcgaggtggacgcagttgtcatggcagcaactaaggagaggtggcggcggtggctgcgcggcg

SEQ ID NO: 64595 - DNA, 122 bp, Homo sapiens
aagacccatgacgcctcgggccagctagtcctcatcagccaggagctgctgcggaaggagcggtgaggcggccgtggggccggctgggtcctccctgtggccctggcccttgctcctcttct

SEQ ID NO: 64596 - DNA, 122 bp, Homo sapiens
atgccgggatgggtccaggctcctgtgtggactcgatatatcagagcaacccaatcttgccgggatcaaccctaaagggaccgggctacggggccaggaattgaagtgatgggttcaaagag

SEQ ID NO: 64597 - DNA, 122 bp, Homo sapiens
ctgcctgcgccctcattgggcgagaggcgcagccagcggcacttcaaagcgggtgctcctcgcacttaggctgagtttagccggcgggagcctggagtccgctcggcacgagcgcggggacg

SEQ ID NO: 64598 - DNA, 122 bp, Homo sapiens
cttagccgtctccaagaagcgcagcggccttctctgtggccgcgctcaagtaggtgttggcggctacgatatgaagatcggcccttgccggtcgcggtggcctacgtttgtaatctcagcat

SEQ ID NO: 64599 - DNA, 122 bp, Homo sapiens
aatactcacagctgacaattactgagcacttgctctgtgccaggaatcacggaagcacctcgcatgcatttcctcaatactccctcccagtaacggcgaggacacaaaactggtagagccag

SEQ ID NO: 64600 - DNA, 122 bp, Homo sapiens
gagcagcctaccacagccttgacctcttcccacaatcgaaggcactacatctcatcaaagcgtccacggcccacagagtcaaagacgtggtaggcactgaccgtgcacccaccaagccgcgt

SEQ ID NO: 64601 - DNA, 122 bp, Homo sapiens
tcctgcgcccagcaccccaggcttggttgcagtggaggcagattggtggggagccctctgcgcttccagaccccatctcaacacctcagactggcagtgcagctccaggcaggtccaggaag

SEQ ID NO: 64602 - DNA, 122 bp, Homo sapiens
gcaggaaccatgccaggagggaacagcatgcacagaacctggagccgaatagaacactcacgcctcacctgatatgtttgacgaattacaggttgttcagtctggtttggtcagagtgtgag

SEQ ID NO: 64603 - DNA, 122 bp, Homo sapiens
cgtttctccgccccctccccgcccaggctcagtaaacagggcttgagcgccggggcctgccgggcagggctgagtgtctgaggacaaggcgctggctttgctaatcacatcacaagaccttg

SEQ ID NO: 64604 - DNA, 122 bp, Homo sapiens
ttatcaaaacccaaaatgaaactgtatcattataaataactactccttgtgcaaagtcaccgaagggaacaaccatttgctatttttgaccaaccagctcctatcccctcaatatccatttc

SEQ ID NO: 64605 - DNA, 122 bp, Homo sapiens
agcttcagggattgcctggcttcctaagtgcccgtgttgagagttagaagcgggatctgccggcagctaagagactgagcatgacggcggaaacatctaattttattagtttttgcttaaaa

SEQ ID NO: 64606 - DNA, 122 bp, Homo sapiens
tcaacagcgacgtcctttctctgttggactcggcaaggaactacatttcccagcaggcaccggcgcagaggtcgaggggcgaggtcgccatctttttcgtagtcctctccctcatttccgca

SEQ ID NO: 64607 - DNA, 122 bp, Homo sapiens
caaaacagagagcccactgtgggggctgatagtccagtgggaaggggcagatgcaaataacgaaatacacgaagtaattgcaggttataatctgtggtctgaagggtgtgggagtgagcagg

SEQ ID NO: 64608 - DNA, 122 bp, Homo sapiens
gacatgagctggaaggtgcgccgggcagctgccaagtgcatcgcagccttgatcagctcgcggcctgacctgctgcccgatttccactgcaccctggcacctgtgctcatccgccgcttcaa

SEQ ID NO: 64609 - DNA, 122 bp, Homo sapiens
cctccctcaccccgccctgctccaccacctgcggggccggggggcggcgaggaacccgaccggccctgctacgcttgcgcccaccttccagatgtggaggcgcgtgctcccagatgttgccg

SEQ ID NO: 64610 - DNA, 122 bp, Homo sapiens
aaaactcctaaattatgtgccaatgtcgcttgatgccaaaataaaaccaacaaaatacaacgataatttcgattttgtcctgaggttatatttacctgaaaaattagtatggagtataaaca

SEQ ID NO: 64611 - DNA, 122 bp, Homo sapiens
taaacagcgctttgggagctccccccgccaacacccgccgccccgcaccttccctctgctcgaacctgtaacagaattcagaactctggggcagttctttggagttggagctcctagggcaa

SEQ ID NO: 64612 - DNA, 122 bp, Homo sapiens
cagccccgcgggagtgcgcagcccggccggctggggcagcctcccgggccgcggcgggcgcgggggcttcgggttacagcgtccgtcgctctcttgaagtcacacctgtctccctgtttatc

SEQ ID NO: 64613 - DNA, 122 bp, Homo sapiens
caaactatatttctgaagtgtagagagacttccatagaagaacaagatacttccatatgccgttcaagcaaaagtctggggtttcctttgaagaacttttagattgatccacagcaggacaa

SEQ ID NO: 64614 - DNA, 122 bp, Homo sapiens
agggtgcagggaggagaagggacctgctttctcagcaacccagcaacttggtcccattgacgtctttcccacacagtacccctccagcctgctgagacctattaactgctgttctggggccc

SEQ ID NO: 64615 - DNA, 122 bp, Homo sapiens
gacagacaggcacggttgcagcaccctccctcaggcagcccagagccggactggctgccacggtcagcgtgggctctgcagacagaacccacctcccccggctaagtcaggcacttgggcag

SEQ ID NO: 64616 - DNA, 122 bp, Homo sapiens
ctcgctcccggaactgtcatgcgggctgacagctggcacaccctcctgtcgccctccacccgcctgcagaaagcccactccctacagtcaccttgacattgctcacctgcctgggcctcagc

SEQ ID NO: 64617 - DNA, 122 bp, Homo sapiens
tcctccgccatcctatcaggctgaactggtcccaggaaaatggccaggaccctccgcggccggcacttcagggctcacaggccgccccgcctttaaatttaaaatttcccaaacgccgcatc

SEQ ID NO: 64618 - DNA, 122 bp, Homo sapiens
gcttgccgcagcgggcgccgattggcctctgctgctctcttgggggcggggctgtcctggcggacacgcccctctttctccccaggccgaagcctcgggacggccctggaagccggtgagtg

SEQ ID NO: 64619 - DNA, 122 bp, Homo sapiens
gtgttgtacctgagtgaggtggggagaaagtaaggatgtgtgagcatgcagctctttgcccgtttgccttgggaaatgagtactggcttaccgcgtcctatgcgacagccttcgaaaaacaa

SEQ ID NO: 64620 - DNA, 122 bp, Homo sapiens
ccgtcctcgccacccacgatgttgaagcccaggcccgtggagccccggtggatcacaattcgcctcggttctcggggaatgtcttcctccccgagcaggtccttggccactggagagtagcg

SEQ ID NO: 64621 - DNA, 122 bp, Homo sapiens
gcaacttctgtatttggagaagtatcgtcctaaaatgcggctgcgtttcaaagattccaacggtcatagaaacaactgttgcattcaataaaattggggtgcctaatgctactggaagtgga

SEQ ID NO: 64622 - DNA, 122 bp, Homo sapiens
gctccacacggactacacacactgtatcttgtcatttcgtcctcacagcaaggactgatacgtaagctcatttttcagatgaggaaaatgagaccggcgagaggctgatatgcttagcggta

SEQ ID NO: 64623 - DNA, 122 bp, Homo sapiens
ggcacagtctgccccagcctggcacacagatgtacaggatacacactacccagcatggcacgtagttggggagcaggggctaaggcctttcaatgctccaaagtgtctggccctttactgct

SEQ ID NO: 64624 - DNA, 122 bp, Homo sapiens
cgccttcctcaacttcccctgttccctgccaggcagcgtccctcgcagcgacgttggctgcgacaagtttgacctgcagcgaggacaccaggatttctcagtttctccaaatccaagcccga

SEQ ID NO: 64625 - DNA, 122 bp, Homo sapiens
ggccctcccagagtttccattgtcctgttctatggtcaaggcggggctgcaaaccaaccacgccccctccccgcatccccggatgcctgtgggggctgcagagtgatcgaaatgtcaggtaa

SEQ ID NO: 64626 - DNA, 122 bp, Homo sapiens
actgcatggctgcttctgcaaggagggcctggaaactcgcagccacccgcataggggccacggtgtttacaatggagacacaggtgactatgaggtctggcttcctcagggacgctaaattt

SEQ ID NO: 64627 - DNA, 122 bp, Homo sapiens
atgagtgcgtaccgaggagatccagatggcagtgtcctgctacctcaaacgctggcagtacgtggactcagacggtcccctgaagcaaggactgcggctgccacagactgctgaagagttgg

SEQ ID NO: 64628 - DNA, 122 bp, Homo sapiens
attctgggccaagtgcagacttagattctgggcacccaagacttaggcagacgcgcccttcggagacttaatgagtatgaactaaggcgcgggtgcgttgtaaatgtaaaatgcagtgtgga

SEQ ID NO: 64629 - DNA, 122 bp, Homo sapiens
gcgttgcgcgcccgctgcccgctgtcaccgcccacccgacccatttcgaggccacggactcgaaagttattcgaacagaacagccggcgtgagcctggcaggcctttggtgcattttcttta

SEQ ID NO: 64630 - DNA, 122 bp, Homo sapiens
ttcgccctcccctggtggcttctggctctttctcgcagagaccgcagggaggtgttcagccgggagcgcccagagactacaattcccagaatgcgttgcacccaggtccctcagctcttccg

SEQ ID NO: 64631 - DNA, 122 bp, Homo sapiens
gtaaagcacagttcagaaaaaagcgccatttataaaaatagttgtaatataaaaaggaagcgtctgtaaagcaaggagtggagtggttcagtaaatggatgtctgcacttgctgttccttcc

SEQ ID NO: 64632 - DNA, 122 bp, Homo sapiens
gcgctcaggacagaggtggaaagtgggtcccgggagccagaaaagagagagaagggcagacggctgggtggcaaatacaaaaatagaaataatttagggggatgcccgccaggcttttgcgc

SEQ ID NO: 64633 - DNA, 122 bp, Homo sapiens
gagttgcaaggaaggtcactgtgggatcagcctgagcccaaaaggatgggctaatgggagcggccgcaggtgcacgcgcgctcggccgctcccattagtgttacgtctgccgggggaagaag

SEQ ID NO: 64634 - DNA, 122 bp, Homo sapiens
ccggggaggttttctccataaacttggtggaagggcagtgggcaaatccaggagccagcccgggcttcccaaaccccgcccttgctccggacacccccatccaccaggagggttttctggcg

SEQ ID NO: 64635 - DNA, 122 bp, Homo sapiens
agcgccggggccagcgcgccctcccgccgcgtctgcggagctgcgggaaaagcaggtccccggggggtatcgagtgtccagggatatccacgcagacatccttgtacttgcaaatacaaaga

SEQ ID NO: 64636 - DNA, 122 bp, Homo sapiens
caaacaaacaaacaaacaaataaaaaagctgccaaaaaaagcagcaacttaaaccgggaacgcatggaagaaagaagagcttattttgacttgcagacacgttatccaggtgcctcaaggga

SEQ ID NO: 64637 - DNA, 122 bp, Homo sapiens
agatctctaaaaacatatgccaacttgcatatagccagactcaagtcttttaacttctatcgataaactcattgatcttccccaaacatattttttgaacctagttttattttcatcttaca

SEQ ID NO: 64638 - DNA, 122 bp, Homo sapiens
acacccaggatttcgaattgggatttgaaggaatattacaataggggcataaacaaaatgcgaaaggaacccaaaggaaaaatcccattctgacatcagaatgacatcacaaataaggtaac

SEQ ID NO: 64639 - DNA, 122 bp, Homo sapiens
ccttgtgcctgtgcgtctgagagaactggggcgtctccttgaactgggacgtctcctcctcgtgcctgtgtggtctgagagaactggggcgtctcctccaactggggcgtctcctcctcgtg

SEQ ID NO: 64640 - DNA, 122 bp, Homo sapiens
gaccagggaccttgtgggctggtgcaggcccctgaggtttctagtgaatttgtggctgcccggctggtgggtgcggatcagcttggagctctgcttccaggtccacacccgcctcagagtcc

SEQ ID NO: 64641 - DNA, 122 bp, Homo sapiens
cgaagacttagagaagggacgcaagttccttcgcggagccagaaggaatccgtcgagaagcgggacctcaagctcgcggcccaaaagcgcggccccgccacgacgcctgctagctggcccca

SEQ ID NO: 64642 - DNA, 122 bp, Homo sapiens
gaagcagagtcccagcacttgggctcactttgtcctacagtctgggaaagcctgtctgcacgaagcatgaaaaacgtattaaaacgcagtggcccagcgggggagcgtgaatgagagctcgc

SEQ ID NO: 64643 - DNA, 122 bp, Homo sapiens
tttttaaaaataaaaggcaaagtcctcaaaaccaaaaccaaaaaaagataccccctttgccgacctgccagcccaagttgttttgtcaggacagacaggtctggcatttcaacaccagaggg

SEQ ID NO: 64644 - DNA, 122 bp, Homo sapiens
tatctcaaaaaaaaaaaaaaaaaaaaaaagtaatgaaaacttcaagggagtatccagattcgtggactctgactcaaaaagctcttgtcttggttactggccagtggtgttttcagaaattg

SEQ ID NO: 64645 - DNA, 122 bp, Homo sapiens
cggatgggtaattttcaggctgtgaaccttggtgggggtcgagcttccccttcattgcggcgggctgcgggccaggcttcactgagcgtccgcagagcccgggcccgagccgcgtgtggaag

SEQ ID NO: 64646 - DNA, 122 bp, Homo sapiens
cgtctcctcgccatggccagggcagcctgatccgcagggctggcagatgcaggagcctcccgctcctgccttttccccgggcgggcgcacaccggcctgaagtcgggaggctgcggcaggaa

SEQ ID NO: 64647 - DNA, 122 bp, Homo sapiens
ccttatgtggaataagggtctttgcagatgtgattaagcaccttgagatagggcaattatcgtggattgtcaagatgggccctaaatgccacctcaaatgttctcctcacagagatgcagag

SEQ ID NO: 64648 - DNA, 122 bp, Homo sapiens
gtgtactgccacaacacaaaaaaacaagttcaaagctgctttggagaacacatcttcaaacggtgttggaattttttctttcaatttttatttttatttacttgtttatttatttttgagac

SEQ ID NO: 64649 - DNA, 122 bp, Homo sapiens
aagaaactgaggcttggtgggggtcccggcaacttcctttcgctctcgttacagtgcagccgtcgtttagcccatgggctaaaagttccgcctgaatgcctaataactgttgaaactaaata

SEQ ID NO: 64650 - DNA, 122 bp, Homo sapiens
cgggagcgtgaccgctgaagcacagcatcacaggggcacgtttaggcctctggatggctgcgggcgggcctgactaatgtcaggccttccacaagaggtggtggagcagagtcttctctaac

SEQ ID NO: 64651 - DNA, 122 bp, Homo sapiens
acaagtactttatgatttgttctgggaggagtaggtcaggtgcaacttggtgtaagttatcgcctggtcctttagtgcctactttcatagtctggcaaaggtagagtgacagtttatgagtt

SEQ ID NO: 64652 - DNA, 122 bp, Homo sapiens
gcgactccgagcctcacagccccacttccggccaactgcccgctacttccgcctgctgcgcgagtgacggatgcggccgaggctcaaaagactctgtcagcgtttcccaaggacattttcca

SEQ ID NO: 64653 - DNA, 122 bp, Homo sapiens
gtctgggtggcctggcttgctgaagcctccagagccctgcgagctgacttctttttggggcgacatcagcggtcgggtcgggtgtctcgcctctgttccgcccttccctccatatctcagat

SEQ ID NO: 64654 - DNA, 122 bp, Homo sapiens
atcaatcagagaaggaaaacggctcaggccgggcaccttggcaagtgaggactctgcacccggggcaccggtgccagcccgcgctgcagggcaacgcccacccgcccacggtgcccggcgcc

SEQ ID NO: 64655 - DNA, 122 bp, Homo sapiens
tactacttgcagccacaaaatactatcaagtaatttttgcaacaaagatacaaaatttaccgctcttccattttatgttgttcattttaaaaataaacggcaaaatgccaagtgtgttaagc

SEQ ID NO: 64656 - DNA, 122 bp, Homo sapiens
gcttccctgaatgaaaatcccaaactgggaaggcttaacaagctccaaactccactcacacgccactcagggaatccgaggacctggggcccacgtgtagtgttttcgcgtgggcagacaag

SEQ ID NO: 64657 - DNA, 122 bp, Homo sapiens
cggggacggcgctggaggggcgggtcgggtaggtctcccggagctgatgtgtactgtgtgcgccggggaggcgccggcttgtactcggcagcgcgggaataaagtttgctgatttggtgtct

SEQ ID NO: 64658 - DNA, 122 bp, Homo sapiens
cgtctccctcgctacgcagcgagacccgggcctcccggccccaggagcccccagctgcctcgccaggtgtgtgggactgaagttcttggagaagggagtccaactcttcaaggtaactgtct

SEQ ID NO: 64659 - DNA, 122 bp, Homo sapiens
gccgcgggcgggagccggggctgcgcgcggcgctcgtggccggcgcgcggtctcggcagtcgccgaacttcactgtcaactgacgtctgctgggcttgactagggaaaaagctccctctggg

SEQ ID NO: 64660 - DNA, 122 bp, Homo sapiens
aggagggctggctacaaaattgggcacggggataaaattaacaagtgtggcggccaagagcgtgggagggactgcaatgtctcaatataaccctagaatgaagacgcgtcgaatcctgaaac

SEQ ID NO: 64661 - DNA, 122 bp, Homo sapiens
acccaggtccttcgaagaaggttgggaccgagctgctgccgcgtgtgaaggtgtgtgtcgcggctgggggtgccacaacgggccatggagcccacctcccagagggaggaagtctgtgcaca

SEQ ID NO: 64662 - DNA, 122 bp, Homo sapiens
aaaaaaaaaaaaaaaaaaaaagtagtattctttctctttctccattcattctttcataaacgaacatttattgcattttgccaggcactgctttgggcacctcaaaaatgctgatgatattt

SEQ ID NO: 64663 - DNA, 122 bp, Homo sapiens
ttaattaattccatgtaacgaagctcttccttaactttttgctcgattgtctacgggtttcgattgttcaactgcttttacagagatgtattttgtgtggaattgggatttctgtggacatc

SEQ ID NO: 64664 - DNA, 122 bp, Homo sapiens
aaatgtgagctccatgataagggactttttcttcttcaccaaggcactcccagctcctaacgcagggtctagcactagtcaatagtcaatatttgagaaataaaatatcccctggttggaga

SEQ ID NO: 64665 - DNA, 122 bp, Homo sapiens
ccctacatccatcaacaggaaaatgggtaaagaaacagtggcacatccatacaatgaatacgactcagcgatcaatgggaatgaactcttgatacaaaaacctggatgagtctcaagagcac

SEQ ID NO: 64666 - DNA, 122 bp, Homo sapiens
tgtgagcgccggctgtacgcaggtccctgctgtgcgggtgcccaagagggctgagggctgcgtctgccatggtgtctccaccttggacaccatgaatcatgagaggttctcagggctgcctc

SEQ ID NO: 64667 - DNA, 122 bp, Homo sapiens
ggggcctgagccgagccggagtctggctgctcccaccgcccgcacggtgcccacgccgggcgctgcacaagcagaaagacggcactgagttcaagagcatctacagcctggacaagctctac

SEQ ID NO: 64668 - DNA, 122 bp, Homo sapiens
ctgtgacgctgtagtggggcctgcaggtgacccagcagccgaggagtggtccccgtggagcgtgtgctccagcacctgcggcgagggctggcagacccgcacgcgcttctgcgtgtcctcct

SEQ ID NO: 64669 - DNA, 122 bp, Homo sapiens
agcacagaatggagatctaaatcccacaggtttatctccaagatccatgctctcaattgtcgcatgataccgtttcccataaccactatgcttaactgccctaacaccatgcaaatgcctgt

SEQ ID NO: 64670 - DNA, 122 bp, Homo sapiens
ccaccctgtgctcttatacatcataccactaacagctactttttcagtttattataaagacggtgtcttgctctgttgcccaggctgtcatttgtcgaaggatcacagaagttggagttctg

SEQ ID NO: 64671 - DNA, 122 bp, Homo sapiens
cagccaggcctgtgttcagctgctatttatcttcctcgccttgagacagtggggtgttgccggacgttttcttgcggtgtgggtgtgtttcgtgggggagataacaatgaatatccagagag

SEQ ID NO: 64672 - DNA, 122 bp, Homo sapiens
tattggtcccaagttacaaaagtgtgaaaatcaaccataaaacttaatcatctgctgacacgtttcgctgctttcactgcagtgtcaacaatacagatttaaatagttacttctgaaatgtt

SEQ ID NO: 64673 - DNA, 122 bp, Homo sapiens
gcgctgctccctctccaactggggccatctattgccaccatgcggcttcccagtgaaacccgctattaataagaaggaatgaaaaaaaaaaaagaaagaaacaaacctgccagaactttcca

SEQ ID NO: 64674 - DNA, 122 bp, Homo sapiens
ctccacttcccaaccccagctacaaatggggacagcaagagagagaaaacctggggagaacggaagaaaccatgctttgtagaatggatcctgcttcagaattgctgatctcatcaaccaca

SEQ ID NO: 64675 - DNA, 122 bp, Homo sapiens
ttggaagtcacggtggccgagtggttaaggcgttggactcgaaatccaatggggtttccccgcacaggttcgaatcctgttcgtgacgggttttttttttttttctttcttcttcttattat

SEQ ID NO: 64676 - DNA, 122 bp, Homo sapiens
cggggcggggtcgacgccgaaagaggcgggatctttgaggtgaaggcgcttctcattggacgcccaggctgaggttctttctttcagaatgaaagggaggcggggtcgcccgggaggcggag

SEQ ID NO: 64677 - DNA, 122 bp, Homo sapiens
ctctaggccaggctgtttccacacctatgacccggtgttaaaaccaggcccatgtgtgaccgtgtgggccacagaatataaagtagacaccccgtttttttggattgtttcctaatgttcat

SEQ ID NO: 64678 - DNA, 122 bp, Homo sapiens
agctccattttgagatctataagcaagggttgactctcgagttcattggagaagttacctcggctcactacaacttctgcctccttggttcaagccattttcctgcctcagcctcccgagta

SEQ ID NO: 64679 - DNA, 122 bp, Homo sapiens
agctgcatttggaaacactgagagtgcaaagcctgcagcttcactgagtgctgcgtgtgtcgccctgaacctcaatgatgtgtctgcctctttctggacagcgctgcaactccaagtgtgtc

SEQ ID NO: 64680 - DNA, 122 bp, Homo sapiens
tgagaagatgaaatctgaggggatctgtaccaatgttgaaagtatctgttagcggccgggcgcggtggctcacgcctgtaatcccagcactttgggaggccgaggcgggcggatcacgaggt

SEQ ID NO: 64681 - DNA, 122 bp, Homo sapiens
ggcaggagaattgcttgaaccccggtggtggaggttgcaatgagccaagatcacgctgatcgcaccactatactccactccagcctaggcgacagagtgagactgtctcaaaaaaaaaaacc

SEQ ID NO: 64682 - DNA, 122 bp, Homo sapiens
accgtggtgtgtgcctgtgccactttgaatcacatttgggtatctattggaaggcttcttcgggactgttgtgacaccaactacactatggactgatccctgtcagaaggtaacaaaggggc

SEQ ID NO: 64683 - DNA, 122 bp, Homo sapiens
tggaaagcagcatcactgccaagacacatccggagtccacacacaaatacaggaggctgccggcgaaactctcccgcagccacaagagtcccggggcccgcgcgcagactgcgatccagctc

SEQ ID NO: 64684 - DNA, 122 bp, Homo sapiens
gtggcttagctcaggatgccaaaggctctctatgccacagtccaccgaaactcccagggacgtgcagggagggagagacgccgcctccccgggaaggctcctggcggcatcagatggaggga

SEQ ID NO: 64685 - DNA, 122 bp, Homo sapiens
ggaggtgcacagagtccgaaaagcgtttcttccgcccttcctcttatcaccgtatccttgcgctcttcctagagcagccgctgcagcagcatcgcttctacgctgtgccctgcgagcgcgcc

SEQ ID NO: 64686 - DNA, 122 bp, Homo sapiens
cgcacagcgccggcgtgcagggggccttgggtgccaccgagtccgggaggaaatctaggccgccatccgtccggagactggcacctgtgaccaccacccaacatgtattgaacaagggcttg

SEQ ID NO: 64687 - DNA, 122 bp, Homo sapiens
cccgggtaggcaattgccctggtggaacacctcgtcagagcagtgtgtggcaggcccccgcggaggatcaacgtggtggctgaacaccgggaaggaactggcactagaagtctggacgtctg

SEQ ID NO: 64688 - DNA, 122 bp, Homo sapiens
gtcaagagatcttgctgcctccgcctcccagagtgctgggatgacaggcgtgagtcaccacgcccagcctagacacagttctgaagggacaaagggggcctccgctccctcctttcaatctt

SEQ ID NO: 64689 - DNA, 122 bp, Homo sapiens
aaataatttatggccatccatgtaacacttaaaagccactcacccagtactgttctagagcgagctcatcccgactgatgagaaacaattattaaattttcaggaaactagtgagccagttg

SEQ ID NO: 64690 - DNA, 122 bp, Homo sapiens
aaaagcagcccaacagatccagagtgtgaggcaccctacaggcaatcaaccaagtaacatcgacagtcattggtattgaggaaacccgccaaggctgctctagacttgggtcggcaaaccac

SEQ ID NO: 64691 - DNA, 122 bp, Homo sapiens
tgtgcttccaaggggagccagggggttgggtgcttttgtgaaatgcccgagtgttgttttcgacatgaaaggaccgaattcctagaatcagaccctgctggggctggaagtggccagacggg

SEQ ID NO: 64692 - DNA, 122 bp, Homo sapiens
gttccccagtgtggattcttatgtgtttggtgaggtctgaactcccactgaaggccttcccgcactcctcacattcatatggcttctccccagtgtggattctgccatggatggtaagggaa

SEQ ID NO: 64693 - DNA, 122 bp, Homo sapiens
cagttagtctcttctagaccctctctaagcctcagtcccggggatcacaggcgtcatcctcgctccttcacttatgcacctgctgctgcttccaggaaggcaaacccccgggccacgggcag

SEQ ID NO: 64694 - DNA, 122 bp, Homo sapiens
gagccacacgtttgcttcttccctgtgttcccagctggagggacatgagtgtccctgggccgtcgtctccggacggggccctgacacggccaccctactgcctggaggccggggagccgacg

SEQ ID NO: 64695 - DNA, 122 bp, Homo sapiens
aggggtcagggagttccctttccgagtcaaagaaaggggtgacggacacacctggaaaatcgggtcactcccacccaaatattgcacttttcggaccagcttaaaaaacggcgcacccacga

SEQ ID NO: 64696 - DNA, 122 bp, Homo sapiens
gctgcgtgaccccgagggcaggagggccaggtggggccaggccttgcctgactggagctacggtccctcctctccaatgctgcccttcattcattccccaggctcgggttcagcgtcttctc

SEQ ID NO: 64697 - DNA, 122 bp, Homo sapiens
ggtcattgccctccgtggcccaaggaagggaacagaaacaacagccaagaagacaatagccgccgggaagtcctcacatttctggagaaatagagcccattaatgaatgaagttcctccagc

SEQ ID NO: 64698 - DNA, 122 bp, Homo sapiens
ttgttctttctgttgttcagatgtgttcggagtttcttccttctggtttgttcgtggtgtcgctggctcagaagcgaagctgcacaccttcgcggtcagcgttacagctctcaaggcggtgc

SEQ ID NO: 64699 - DNA, 122 bp, Homo sapiens
gttttcatccctaagctctagactgttttgtggtcagtaccatttccttactatcaaaaacggccgcgggcagaaaattacgataagtaaagcatagtctcttctcgcctttatggacatcc

SEQ ID NO: 64700 - DNA, 122 bp, Homo sapiens
aggccgtgcgcccgccgggctgcgggggccgtgggcagggggcgcagggggcgcagggggcggccggcgcggcggctgaacccgggctgacgaggcccagccgcctgcggggcccggagcgg

SEQ ID NO: 64701 - DNA, 122 bp, Homo sapiens
ccggattcatctcactatggagtgccagacagtgggcgaaggatagtgggtgcagcgtaccgtgtgcaagccaaagaagggcgaggcattgcctcactcgggaagcgcaaggggtcagggag

SEQ ID NO: 64702 - DNA, 122 bp, Homo sapiens
aggatcactcctacctttcatagcttcccataactagtctatttgtcaacctgaggcccacgtaacaccaaagccatgtgatctgtatcctagaaatcaagggaggtctgtcagcatatgga

SEQ ID NO: 64703 - DNA, 122 bp, Homo sapiens
gatgaacatggcatcgaccccactggcacctaccacggggacagcgacctgcagctggaccgcatctccgtgtactacagtgaagccactgatggcaaatatgttcctcgtgccatactggt

SEQ ID NO: 64704 - DNA, 122 bp, Homo sapiens
ttgtgggggatggccctggggccccacgggcagctgcaggtgggaacagcctcaggcagccgccgccaggacctgctcagggaatgtggtctccagagatggggacacccctcggtcccggg

SEQ ID NO: 64705 - DNA, 122 bp, Homo sapiens
tcaagcaagatcctagcaaccagagcttcagggtgggggtgggggcggggggacgctgaccggctcccacctgcttgctcctagaaagatcctagctcagattaaagggatgaagcgctaag

SEQ ID NO: 64706 - DNA, 122 bp, Homo sapiens
gagatggggggctgtgcttgggtggagaatcttcaagggagtgaaacagtccagcttcttcgtagatcagcgtctaaaaggacagcagggggaaatgccttttaaattttttttattaaaaa

SEQ ID NO: 64707 - DNA, 122 bp, Homo sapiens
gggggaggctctggggctgaggggaacaattctcacgtgtttggtgcttagagacctgcccggggcgttgggcaggccctccgggggctgaattaaaaatgctttatttccaactcatggtg

SEQ ID NO: 64708 - DNA, 122 bp, Homo sapiens
cggcgccgggggacggagccgagtgtcatttgagtcttttgtcagggatcagatcggtatcgggacctcctgctgcctttgcatttcctgcaactgacaccagcggccagtcgcatttcctg

SEQ ID NO: 64709 - DNA, 122 bp, Homo sapiens
tcacaaggaaagaggcagaaagatggctttcccagaggtgaacagaaacaggaccagacccggggaatcaaatggccattgactgaggactggaagagtgagcagatcagagagggtgacgg

SEQ ID NO: 64710 - DNA, 122 bp, Homo sapiens
actcagccaggtgggcagctggattctcctccacagaacccgtgggctggcccacacatgcgactcagagcaagagaaagaccattcctgtccacctcctgcagcctccgcgcgcccaagca

SEQ ID NO: 64711 - DNA, 122 bp, Homo sapiens
gcgtgacctgccccgcacgcgtcctcagggccgccccagcctccagcccctgggggccggcgttcctgggctccgcccccgtccccgcccctcgaccgccgctgctccgcggggactcgggg

SEQ ID NO: 64712 - DNA, 122 bp, Homo sapiens
agactagggctgatggcgttgggagtcttgcagagtttgcactggcaaggcaggtgcggccgggctgcttttatccgggaactaagcgggagggggcccagaggccaacgctgcaaggatct

SEQ ID NO: 64713 - DNA, 122 bp, Homo sapiens
gggagggtcaactggtcaaagcccattcatacatgcaacaactagaaaccacagtattgccgcatcagcacaagattttaatttacggcgcattgagccccaccgtaccttccgccaacacc

SEQ ID NO: 64714 - DNA, 122 bp, Homo sapiens
gtcacctgagatccaggagagaatacaagatgcacaaggggccaggtgcagcagctacaccgccagcactgcgggaggccggggcgagaggctacatcaccagcactgcaggaggccggggc

SEQ ID NO: 64715 - DNA, 122 bp, Homo sapiens
catttccgccctcagaaaacactgggggcgccgggcggggagaccctacagtaaaacaaacgacacttggggggcagccccacaaaagaaaacttgaggtggagttttccggtcacccaaag

SEQ ID NO: 64716 - DNA, 122 bp, Homo sapiens
aatgtgtccactatgacttccttatgtatactcagtctggccactgagtatgcctaaaaacggagcacacacctaccgttagctgcggaggctactgttgctcttcctctttgctcaatttc

SEQ ID NO: 64717 - DNA, 122 bp, Homo sapiens
gacttgtgcagaatgtttccaggtagcaaacgtggacaagccacattttaagcactcagtcgtcacatgtgcctagtggctaccatactggaaagcacagttctaaagcattctgacaggaa

SEQ ID NO: 64718 - DNA, 122 bp, Homo sapiens
gtctctaacaccctaaatcttagaagagactctaaccatcctaagtagggcctctaaccccgctttataaacttttaattgactcccatcttaacagttgcaatccatggaggaatgcttga

SEQ ID NO: 64719 - DNA, 122 bp, Homo sapiens
ggaattcagtttattcattaactctacattgtgagctagaagcgggacttctccctgaggcgtggagcctcctcagagcggatctgctgacaaacaatcatcagtggatctcacctgttcta

SEQ ID NO: 64720 - DNA, 122 bp, Homo sapiens
gccccaccccagaatcaaaccgcgaaagagcagcgccgagcgccacccgcgttccggccgcgcccattggttcccactgggcgcctgcgcgttgcgctctctaggcttctcgccgacgggca

SEQ ID NO: 64721 - DNA, 122 bp, Homo sapiens
caaagccagcatccagtcagctggcgcttcatgactagagtttcacatactctgtggcagcggcagccccagccccagcctcagcaccaactccagcccacaacaggaagcacaggaaagga

SEQ ID NO: 64722 - DNA, 122 bp, Homo sapiens
tttgaaacagaggcttgagttcgggtccacaggccacaggacaacagaggcagattgcaccgtggaagtgatatattcaactcggaaggcctggggctggcaagtgctactgtgctctttgc

SEQ ID NO: 64723 - DNA, 122 bp, Homo sapiens
ggggaccttctggatgccttgcttagggctgtgatatgcatgaagtacaaaggaaggcaccgaaatgaggggaaaacaccagtcatctgaaacacctggaggaagctattgacaggggaggg

SEQ ID NO: 64724 - DNA, 122 bp, Homo sapiens
gccggccttcctgggagactgcctggccctcttcctgtggagggtggtactcagggtccgcggggaagggacactttccaagcatcaaggaggcgccaacccgtgctacggtcggcttctag

SEQ ID NO: 64725 - DNA, 122 bp, Homo sapiens
gtgacttggttttcccacttgagtctttcttcaggtttaacattctattgtgttttgcttcgggtaagtggtatctggggtctgtactgagtttgatatgccccgcactgaaatcattctga

SEQ ID NO: 64726 - DNA, 122 bp, Homo sapiens
ttaagttagtgatgcaaagtggaataaaatctacttgtcatttattgactcccaagccagcgttcctttaacttcacaaggattgttgcaagaaagtactcagtcctggggctagggaggag

SEQ ID NO: 64727 - DNA, 122 bp, Homo sapiens
caatgaggagcttcggtctgctgtgaagaaggcagagagcgagcgcatcaggtggggtgtcgcaggaggaccagtcctgagtcctcatgggatcccatccctgaaacctaacttcaccccca

SEQ ID NO: 64728 - DNA, 122 bp, Homo sapiens
ctggaaaaagaagtcagtgtccagcaggtaagctgggcaaggtgaggcacggacgagcctcgtctccacaccagggcaggtggaactgacatcagtggggccctgacgcagtgttaagagac

SEQ ID NO: 64729 - DNA, 122 bp, Homo sapiens
tgattggttggcctattctcaggagaaaaaaatacgttaagatgaaaacttcgattcatacgatgagagcaatcctggacaggaggtcacccagcctctgtttgacactcaattttggggac

SEQ ID NO: 64730 - DNA, 122 bp, Homo sapiens
aacttaaatgaggctggttaaagttaaaatccagtccaactggtgttcttagaagaggaacgttgggcacataatgaaacttagagatgtgtgtgcatggagggaagaccgcacaaggacac

SEQ ID NO: 64731 - DNA, 122 bp, Homo sapiens
cgcccagcgcgcatgctcgcggctcggcgctgaaattcaaatttgaacggctgcagaggccgagtccgtcactggaagccgagaggagaggacagctggttgtgggagagttcccccgcctc

SEQ ID NO: 64732 - DNA, 122 bp, Homo sapiens
agcatttcaaacaatttcaaccctgctggactgcatcaagtgagggccgggatggaaaagcggccgtgccgaggtgccccggaagcagcctccggagtgtgcgtcagagtttctggccattt

SEQ ID NO: 64733 - DNA, 122 bp, Homo sapiens
gaaaacagccagtgcaaagactccttgtcaggagctagactggtgcatgtgaggaccagccggtaggccttgtgactgcagcagagagctcaagggaagggtgatagcagatgagactgcag

SEQ ID NO: 64734 - DNA, 122 bp, Homo sapiens
ttagccaggagcaggggatccttggctggcgggctgccaggagcccagggaggggctcagcggaggaagtgccgtgcatacacgtggcctcccagcctgcagcccgtgggcgcacgtgacca

SEQ ID NO: 64735 - DNA, 122 bp, Homo sapiens
ggagggaacctgtgcccagcttgggtgtttccgggctgagcacgcgcctctggctggcttcggccccccgggaccctcctctcctgtcccctgctctcttgctcccacttttcctacctccc

SEQ ID NO: 64736 - DNA, 122 bp, Homo sapiens
tgtgttgatttcatctcctgggtgtgggtgcttgtccatttcagatgcgtgacaggtgcccgtgtgtgtgtgtctgcagtttgggactgtggaagcacgagcttacataagtggttaggcaa

SEQ ID NO: 64737 - DNA, 122 bp, Homo sapiens
ccgtgctcggccccgggccagggtcccccggtacccgaccaggccccgccctagagggctcggccctgggacaaatccgccgctcggaacccgcccagcccgaccacgcccgggaagggggc

SEQ ID NO: 64738 - DNA, 122 bp, Homo sapiens
tgctcgaaccctgtgaccctcctgccccgtccttccagggttcagtggccaagggttcctcgcgtaaatgaccatcactgttttacatggatctcatctcatgagtccatggagggagagca

SEQ ID NO: 64739 - DNA, 122 bp, Homo sapiens
ctggggaggcacagcagctctctgtctctcagctggtgggttgtgcagcctggcctcccccgcaaaggctggtcccattcctgcccacctgtcgttgggttgccctcaggtttgtgccctgt

SEQ ID NO: 64740 - DNA, 122 bp, Homo sapiens
taaaggttgcatcatattccattatatgtacatacacatttcatttatccatttatccatcgatggaagtaattactttttaaaaagcacaccagtacttacacataaaaatgatgctgtcc

SEQ ID NO: 64741 - DNA, 122 bp, Homo sapiens
agtaatgctggcaccagccctgtagggtctcctgaggactaagcccctgaccaggcaaaacgtggcggtgcctagcacgtgggagacactccacagctgtgttcagctcaaccacagggacc

SEQ ID NO: 64742 - DNA, 122 bp, Homo sapiens
gggagcccccacgtggaggaaagtgcaatgcttctggtcctcagtctcctgctgcaccaccgctcctccagcgtggagtccacctccaactgctttttctccctctgaagctgcaaaaatgg

SEQ ID NO: 64743 - DNA, 122 bp, Homo sapiens
cgctcgctgacctggcgctgctgcccctggtgcctgacggaggatgagaaggccgccgcccgggtggaccaggagatcaacaggatcctcttggagcagaagaagcaggaccgcggggagct

SEQ ID NO: 64744 - DNA, 122 bp, Homo sapiens
gctctttgcctcggatcagctgaatggctggggcgttcaggaagcttgctctgtccagctcggaatcactccccctctccagggtgtgtgcttacacgcctctcagtcagcgcaaaaatccg

SEQ ID NO: 64745 - DNA, 122 bp, Homo sapiens
ggtgatccacccacctcggcctcccaaagtgctgggattacagacatgagccaccgcgcccggcaatgaagactccttatctcagggtacagagtagttacagtaaaaaaaatgacatactt

SEQ ID NO: 64746 - DNA, 122 bp, Homo sapiens
catcgccccgcgcccggagagtcgggacccatctggcccattgtgctgtgccctgctgtgcgttatcacatcaaggtgcgcgccggcagaggcttcagcctggagctcagggtggcgggcat

SEQ ID NO: 64747 - DNA, 122 bp, Homo sapiens
tgcgcatctcttctgtgctctgcgggagccaaagcagctttcggccctcggggctggtggcgccctgggaagctgcttggctcaggggaaggagcagggacccccgcccgcccgtcctcgaa

SEQ ID NO: 64748 - DNA, 122 bp, Homo sapiens
gctgtcgcaccgctcactcccatgctgttacaggtcacctcttgcaggggcatatttgatcgctgggcacttagtgtttgttgttccatcattatgcaaacagccgcctcttgatgaacctt

SEQ ID NO: 64749 - DNA, 122 bp, Homo sapiens
ttttacaacgctactctgatctgagcccctgtggcctcgggatccccaggcgtctgttcccgagaacgcggggcagaaagcctagtcctgcacgcagtaccaacaatgcggagtcagcgggt

SEQ ID NO: 64750 - DNA, 122 bp, Homo sapiens
ctttctagttagtgtactgtgaccccatatagacttcagccccaaaatgcatgaccatcacgtttataaagagctactcagaacaagttaaacctacaggcaatgccctctagcaaactaga

SEQ ID NO: 64751 - DNA, 122 bp, Homo sapiens
ccacgcctccgccctgggagccgccatcttgccacttcccctcgcccggccgtccgcgggcgtcaatagcgactttcagcacaaaacaaagatggcggcggcggcatctcggaaatgcccgg

SEQ ID NO: 64752 - DNA, 122 bp, Homo sapiens
cacagacacacacactcatgtttggtcactcattcattcaacaagtacttgttgaactcccgttatctgttggccacaagtgaacacagaacacactcaaaaaaacataaaacataaacaca

SEQ ID NO: 64753 - DNA, 122 bp, Homo sapiens
aggctacatttgtgattagaaaggcggagtctcgcctttccaaacactcagggctcagtccggcatttgagcgagtccacattccctgagcacaccccggccgggtggtggggaggtgatgt

SEQ ID NO: 64754 - DNA, 122 bp, Homo sapiens
cctagtctgcctattaggcgcgctgaggaatcgtgacacattgtttatccccgcaattagcgatgcggcccttttcaggccgcccgcccccgggccccccgcccccccccccccccccgcgg

SEQ ID NO: 64755 - DNA, 122 bp, Homo sapiens
tgctcatcctggtgtgcacggctccggagaacctgaaccagagaaacgccattcgggcttcgtggggcgggctgcgcgaggcccgggggctcagggtacagacgctattcttgctgggagag

SEQ ID NO: 64756 - DNA, 122 bp, Homo sapiens
tggacgcacagccctgggcttcagccccgactgtcccagtggactgagcagggcagctggcgaggcaggaccctacccccaacctcggagctcggggctggggagggagacaggtgccagcc

SEQ ID NO: 64757 - DNA, 122 bp, Homo sapiens
attccgagtgccccggcacaccccggggcttcgctttccgcctctcacagtaggaagcggcgagccgcttctagtgcccacgccgctcctcggctgcccggcctgggttttccaccctcgcc

SEQ ID NO: 64758 - DNA, 122 bp, Homo sapiens
cggcgtggggcgaggttctcgctacggcttcgttcccgtcctcccgcggccgctctcccccggaagccctcggaggcagcacgatggacgtggccacactgccctccagtggccagctcgcc

SEQ ID NO: 64759 - DNA, 122 bp, Homo sapiens
aggggtagcaatcaaggctcccaggtctcctactgcttctttcttttgataaattgcaagcgggagatcagctgatcaggaagaccttcctgcagtgatcaatagaacttgattccctagca

SEQ ID NO: 64760 - DNA, 122 bp, Homo sapiens
gaactgatcatacaacagaaacggaggagcgtacagggtctgggaaccaagacagcgggtcgacattatctaccagccagaagcaaagggactcagagggatcaagtccagctgctggtctg

SEQ ID NO: 64761 - DNA, 122 bp, Homo sapiens
gcgtcccgggcattgaccgaacactgaaggaaggctgtctccccaagaagagtccgtgaccggtgttggatttctgaaacacggataagaggaaggttctttgtctcaattttgaaaagaga

SEQ ID NO: 64762 - DNA, 122 bp, Homo sapiens
ctttcctagtcaaagaaaggggtgacagatggcacctggaaaatcgggtcactcccaccccgatactgcgcttttccgaccagcttaaaaaacggcgcaccaggagattatatcccgcacat

SEQ ID NO: 64763 - DNA, 122 bp, Homo sapiens
aaaagcagcaaaagaaaagtaagcagtcaggcggaaacggcccctttcctgcctccttcccgcccggcgctgggccttgcgcagggcccggacgcccccaagcggccacctctctgcagctg

SEQ ID NO: 64764 - DNA, 122 bp, Homo sapiens
cggaggcatggcgacaaggcacgcagggagcaggcgcggaccgggacagcgtgcggcgaccgggaaaaacaggacagaaaaagacagacagcttttaaagctcctggattaaccctagaggc

SEQ ID NO: 64765 - DNA, 122 bp, Homo sapiens
ggcagcgggcaggacccccaggatcccggacctcaaggagcaggggaacgcctggagccacgacctcacactttgccaagacaccaaacaaagacagcggcaccccagcccagccacaggat

SEQ ID NO: 64766 - DNA, 122 bp, Homo sapiens
cctgtcctcgtcgctccgctgctcccggcgcgtcctcttagccccgcccccccgcgggcgcgtcctcgcggctagctcgccccgcccccactggctgggcaccttccgctggtcggcgtgga

SEQ ID NO: 64767 - DNA, 122 bp, Homo sapiens
agttcggcagtaccactgccgtgagattcgtttccttggcctctctgactccatttttctcgggttttatgtggctgctctactccttccattgtgttctctctctcaactgccgcccccgt

SEQ ID NO: 64768 - DNA, 122 bp, Homo sapiens
aaagacttccccaccaggtcttctgctcgggggttctgcaccccgtccagcagtaccttccggctcagcacaacctcccccgagccatcctcaatctgagaagggagaggagggctcagaga

SEQ ID NO: 64769 - DNA, 122 bp, Homo sapiens
agaggggcagtcggagagccatgaaattgcgacctgctgccaccagagggcagtgttggacgggctgggaggagcgccgccgccgccgggagggtgcaggagagagctgtctgccaggggaa

SEQ ID NO: 64770 - DNA, 122 bp, Homo sapiens
ggtgggtcgcttcccaaactctagtctggcgtctcagctctttcctcacctttataaccacgcagccacataatcagaactgtgacgtccgtgtattaaactccatctgcttttagtacgga

SEQ ID NO: 64771 - DNA, 122 bp, Homo sapiens
gtcctgagatgcgctttgatgatgacgtagaatagagtcgtccaagcctagctacccgagcgctcccatggtaacaggcggtggtgaaagtggttgggagcagcagtcgtttgttaccacct

SEQ ID NO: 64772 - DNA, 122 bp, Homo sapiens
aatggcgtgaacctgggaggcagagtgagccgagatcgcgccactgcactccagcctgggcgaaagagccagactctgcctcaagaaaaaaagagttggagaaattagaactctcatacatt

SEQ ID NO: 64773 - DNA, 122 bp, Homo sapiens
gggcccccagcaggggaggggcctcaagaccacgcggaacccctgggtgggtccccagctcgcttcagaggctcagagcagggtcagggacctggctccccggggccggagctgcctctacc

SEQ ID NO: 64774 - DNA, 122 bp, Homo sapiens
gcctcagatcttggctcggtcggggcctgtaactccaggctgcacggcgcggaattggtacggccgcaccaggcgcgctgcgaggaggatgggcctggccggggacccgtggaggatccgcc

SEQ ID NO: 64775 - DNA, 122 bp, Homo sapiens
gcccgctccggcttcgcttcccagccccgacccaaccagacaattaaggggctgcagagacgcaaaaaagaaacaaaacatgtccaccaaccttttctcagacccgggagcagagagcgggc

SEQ ID NO: 64776 - DNA, 122 bp, Homo sapiens
cagcctcccaccttctacccagactgtgactcgcactgcaaacctgcccgtggcagctaccgcatcagcctaaagaagttctgcaagaaggactatggtaggtgccctcaggcctcccgcgg

SEQ ID NO: 64777 - DNA, 122 bp, Homo sapiens
gttcgttcaagcgtttcttctcttttctgtgcacgaactgcgtggcccgcgtggaatttgcgccgctgtccatcctctgcctgctcccggccgtaggagctgcgagacctgcaggtgagtgt

SEQ ID NO: 64778 - DNA, 122 bp, Homo sapiens
tgtctttgtcctgccatgcaccgttccctctgctagaaatgtccttctcatcctttaacccgtaatatctgcgtatccttccagacaaaacttcagccttatcttctcccagccatctctcc

SEQ ID NO: 64779 - DNA, 122 bp, Homo sapiens
ggactgcaaatcctttaaacagaggccccagagctaggggttttcccaggctctggtgggcgtgggctgacagtcgctgggagccccgcaacaggggggatgtccaggcaggtatgcaccca

SEQ ID NO: 64780 - DNA, 122 bp, Homo sapiens
tgtcttggttcatttcctctctgtgcttcttcttttttttctctgtcatactttctgattcgctgaggacactttgtagtttagggacaggtaagaaagcttgttctcatctggcctctttg

SEQ ID NO: 64781 - DNA, 122 bp, Homo sapiens
aggtcaacaagacctttgcaggcagtactggggacaggaggcagggttatttttcaagcccgctcactcctgttacagagctggctcacgaggctggaggaatctccaaggttgctcagaac

SEQ ID NO: 64782 - DNA, 122 bp, Homo sapiens
gaagggtgggccacccgcagcccagcatgcacagagctccctgggaggccaagtggcctacgcctgtcaccttcacctctgcatctcaggggcccacaggaagtgcctgcttggcctcagtt

SEQ ID NO: 64783 - DNA, 122 bp, Homo sapiens
attctgatgtaactataactcgacaaattatgatattttcaacttacgatgggtttattgcggggagggggcagccctatcgtaagtagaggaactctatacacgtttgaaaatatcgctgg

SEQ ID NO: 64784 - DNA, 122 bp, Homo sapiens
gagatcctggaatccaggagcaagtgaataaaggggctaaggagatagcgagggggaggccgagagaagcagcctgagaagatgcagacctccatggcggttcaggccagctcagggaggct

SEQ ID NO: 64785 - DNA, 122 bp, Homo sapiens
cagaccttagacccaggtaaggcagcagcaccagggaagccctagggtaggaggtgccctcgggtaggaggtgctgggtgagaacggttggtgagaagaagcgcctcccaacctctctgcag

SEQ ID NO: 64786 - DNA, 122 bp, Homo sapiens
cgagccaatccccatggactgggtgtgtcttccaagcctgggcaaccaaccaaaacctggcgtagggccagctgggtgcagaggagccagctcagggtgacacagcatgggcacaggatccg

SEQ ID NO: 64787 - DNA, 122 bp, Homo sapiens
ccccctcccccggggtcgcgcccgcctcgcgccgccttttccacgcggtacttgtggcggcgcaggcactcggtgaggctccgtggctcctggtcctccaggtcctctggcagctggaagtt

SEQ ID NO: 64788 - DNA, 122 bp, Homo sapiens
gcacatcactcaacctcactggtttcagttttgttgcccatatttggtgctgatgttatccgacatccctttcaaacattctattaaaaacctcaagctacacgagtgcacgtggtttaaag

SEQ ID NO: 64789 - DNA, 122 bp, Homo sapiens
atctggccattcagcccaggagttgcagccaggagcagatgtcccttacccaggtgctggcgtcgccactctagcccaaagggagggggacccggagccagagatgaggcggcctcggaggt

SEQ ID NO: 64790 - DNA, 122 bp, Homo sapiens
gtcttccagcctctgcatgcctcagttctgaaagaacatttgaagggatgacaggccaggcgtggtggttcatgcctgtaatcccaacactttcagaggccgaagcaggcagatcacttgag

SEQ ID NO: 64791 - DNA, 122 bp, Homo sapiens
ctggaatcacccccaggccctggggccaggatcgaggctgctctgggaactgggcttacacgggtgtgggtggggacctctgggatcttagaaccaggaaaataataaagcagaggcttgat

SEQ ID NO: 64792 - DNA, 122 bp, Homo sapiens
aagtcggagcagtgacttaaggatgaaataagagggtgcgtgcgaaggcgcttctcaccgcgcccggcccccagctcaaatggaatcgaggctgctgttagggtgcgctcatgtgtctaaac

SEQ ID NO: 64793 - DNA, 122 bp, Homo sapiens
gagttgggagagggagcttcagtgcatgtggcagtgcgtgtgctggcgcgtatcattgcacgtatgttttccctcttaccgtaggaaaaatgaaaaaagaaatccctcctccataatcgcag

SEQ ID NO: 64794 - DNA, 122 bp, Homo sapiens
ggctcctcattgttccccgaggctcttgcctaccgtggctgcaggctggtgggattccggcgtgggcagcagctgcctccccttgctccagcgttggggtcgctgccatcggctgagggttt

SEQ ID NO: 64795 - DNA, 122 bp, Homo sapiens
gctttttgagaaatctcttagaatattcaaatctgtgaaggacaagcaaaaacacttcatcgtaaatcccattttcatgaagcaaccaccatcagcagcttgatggctacatgcattcaaat

SEQ ID NO: 64796 - DNA, 122 bp, Homo sapiens
ggctgaccgtccttcgcctccgcccccacatacacaccccttcttcccactccgctctcacgactaagctctcacgattaaggcacgcctgcctcgattgtccagcctctgccagaagaaag

SEQ ID NO: 64797 - DNA, 122 bp, Homo sapiens
agaccatggataggaaacacctcagcacagtgcctggcacctagcaagtgttcaatgaaccgtggccttatcatttgtacatgggaatccttgggagggagttggtgttgtacactgcaaag

SEQ ID NO: 64798 - DNA, 122 bp, Homo sapiens
gccacgccgcgcagtgatgctgtggagtccgcgcccttgtgccgttggaggtccaggcgccgcagggaccctgcccatgagtggcaaacgtcacaaatcccatactccgtgacataagcaag

SEQ ID NO: 64799 - DNA, 122 bp, Homo sapiens
tgggtgtggtggctcatgtctataaccccagtggtttttgagaggctgaggcaagaggatcgcttgagcccaggaattcaacatcagcctggtcaacacagcaaggccccctctctacaaaa

SEQ ID NO: 64800 - DNA, 122 bp, Homo sapiens
acactgagctgtgtgggctgtgtctgcagactggacacttcacacatctttaaattgtttcgttggtcttttctctcaaacagaattattctctcactaaaaaggctagaatggacaccgat

SEQ ID NO: 64801 - DNA, 122 bp, Homo sapiens
agctctggcctacgcccggcaggcctccagccaggagtgcatcgacgtgctgctgcagtacggctgccccgacgagcgcttcgtgctcatggccacccctaacctgtccaggagaaacaata

SEQ ID NO: 64802 - DNA, 122 bp, Homo sapiens
gcgccgcctgccagcccgtacacattgctctgcgacgagaagcgcgtgaagctgtcctcgcgcaacggacaaggccccgcggccacggccgcctcccccatcatgcccctcagttaagcacc

SEQ ID NO: 64803 - DNA, 122 bp, Homo sapiens
aactcttctggcaaacttactgatccctgagagcacatctggacattctcaggggttctccgaccacagttgagaaacacaggtctacgatgtaattgttaggagtgaaagctcaaggtcag

SEQ ID NO: 64804 - DNA, 122 bp, Homo sapiens
gggactgttctgtggggcccgacggcgatacctactggggcagtggcctgggcggggagccgcgcacggactgtaccatttcgtggggcgggcccgcgggcccggactgtaccacctcctgg

SEQ ID NO: 64805 - DNA, 122 bp, Homo sapiens
aggaaggccagggggtggcccagtcatcgccgcggggcccgggtgggaggggtttggcagcggcaggcgcggcggcggcggcggaggcggaggcggccccgggctcgggcggctgggatgga

SEQ ID NO: 64806 - DNA, 122 bp, Homo sapiens
tttccacttcatactttttcagaggctttcagcctttcatttatttcaaaaccagagaatcgacctagctttgataaaaatgcaactacttaatttaggcaatggatagctcctgacaacac

SEQ ID NO: 64807 - DNA, 122 bp, Homo sapiens
acctcagaaacctgggccgagaggctccccacaaattcgacagatggtaattgtcagcgccgggagagcccctgggagaccacctcttgcaacctggcatttcacaggtggggaaaccgaga

SEQ ID NO: 64808 - DNA, 122 bp, Homo sapiens
aataaaaacggctcatatacaaagtgaagtctagggacacccacagtacggagggctgcccggacctggcggccttacctggttgaagtgcagctggccaggctccgggacgcccacgcggg

SEQ ID NO: 64809 - DNA, 122 bp, Homo sapiens
gggacctgccaatctgcatttccaaccggcgcccaggtgacgctgactctgctggtctaccgtcttgggggtcacctaatttttcagcgatgcctcccagctggggaggccaagaagtgcct

SEQ ID NO: 64810 - DNA, 122 bp, Homo sapiens
gacagggaccagcagggccaaggacaaggtgcaccagtctagcggtcctcccggaccggccggatcttcatctcagagaacttgagtgagtactgccagccggtccaggaggaccactccac

SEQ ID NO: 64811 - DNA, 122 bp, Homo sapiens
tattctcccagcactgctcagcttgctcagtccttctgcctcccaggacctcagtttcaacgcctttaacatggggcagggcatttagccttaaaggggccttagggctgtgagggagcagt

SEQ ID NO: 64812 - DNA, 122 bp, Homo sapiens
gcgtctttctggatcatgttccttcggggctgaccctttcggggagtttggcttttaaagcgcggatctcgcgacgcgcggcttgcaggactgcggggcccggcggccgagacgcggcatcc

SEQ ID NO: 64813 - DNA, 122 bp, Homo sapiens
agaataccaatgctgacactgctagcatcctgtcagattggagaaagaattaaattcccccgtattgtggatggttacatgttctttggtttatctcatggcctatttaaagtctgtgggag

SEQ ID NO: 64814 - DNA, 122 bp, Homo sapiens
cagccacctttgagatccacctgtgtctcccagcggccgaatccaggtttccttcctattcgcacttggagaactcatgcagattgccgtcaggagtggcctcagagatccggagtgggcga

SEQ ID NO: 64815 - DNA, 122 bp, Homo sapiens
ctgggacgtgagcaagccgggggagacgggagagccatggggagccagatcccaccttcgcgtgaccttgggcaaatcacaacctcgcctaaggcccggaatgactctgcgcggagaggaag

SEQ ID NO: 64816 - DNA, 122 bp, Homo sapiens
aatgcggcataaaagaggtgggcgtcgtacgtcgttacgcagcgcggttgctgggcacctcgactatcacctgaccgtagtaatatctcccgctacgcgcgttgtgaccaatgctgcataca

SEQ ID NO: 64817 - DNA, 122 bp, Homo sapiens
gatagatttcttttctctgttcaagccctgacctagagagctgggagcatccataggcaccgggttctgatgcggcctactgtcatgtgatgtgagttcctggagggcaggagttctgacct

SEQ ID NO: 64818 - DNA, 122 bp, Homo sapiens
aaagagcagtaatcacgatcttctcctcacagaggagtcggagcaagccagttatctaaacgtggaaagaaacttaagaacaaagacttgaattccttgaacaaaaaaagctttaagagaaa

SEQ ID NO: 64819 - DNA, 122 bp, Homo sapiens
aggggcgaaggagccaggaggctgagaactgcatggtagccctgcctgcctgccgcgctgcgcgccccaccccagccggcggccccgggcttgcaccgggcggggcaggggagcgctgcctg

SEQ ID NO: 64820 - DNA, 122 bp, Homo sapiens
tagattagttggtgacatttgagctagctaatgaaaaatgagatgaaattccttagatgtcgaagagggttctagcttgagaaaacagtatgtgtatgctgagtaaaagaagttagggactg

SEQ ID NO: 64821 - DNA, 122 bp, Homo sapiens
cagaagaccgacgatgaactctgtagacatagcatgtcttttatccttcacaaagccattcgcaatgacttctttcagagctatctctacctgctggaaaaaattcccctgggtaagtgagt

SEQ ID NO: 64822 - DNA, 122 bp, Homo sapiens
cttaactcttgtgacatttagatttgtcttcatctattgttgcaatgtgtctttctctgccgcttttctggtagcaccccgccaccaccaccccccaacacaccttcctgttcctctatttt

SEQ ID NO: 64823 - DNA, 122 bp, Homo sapiens
ccagcaacccacagagttgagaaatttgactggcattcaagctgtccaatcaatagctgccgctgaagggtggggctggatggcgtaagctacagctgaaggaagaacgtgagcacgaggca

SEQ ID NO: 64824 - DNA, 122 bp, Homo sapiens
cttgagctggcctttgtccccgaggatgtagagggctgcttgctgtggccacaggaagcccgggtcgggggccgggggacacccgttggcctggggtggggccatcgcctctctgccagcta

SEQ ID NO: 64825 - DNA, 122 bp, Homo sapiens
ggggggccgaagaggagcgcccgggcaccccggagttggccccggcccccatgcagtcagcggctgtggcagagcccctgcccagcccccgggcccagccccctggtggcaccccggcagac

SEQ ID NO: 64826 - DNA, 122 bp, Homo sapiens
aagggggcccccctccccaggaccccgcacagggctggggctgcaggccggcggtgtgtgcggtgcagagccctcccaggggctctaggcttccctgcctttgggatgaagctaacagatgc

SEQ ID NO: 64827 - DNA, 122 bp, Homo sapiens
ctttgcgttgtaattcactgctgtcatactggagcccttttggcctgccattaatgtgtacgtggtagagaggtattctttaatcttatgattaggtcattcaggaaggctagaagatgtta

SEQ ID NO: 64828 - DNA, 122 bp, Homo sapiens
gtcagcctggctgtagtgtttaactgagtctcgtggaagatccatgcttaaaatgaatgtcgtggagaattgtattcacctcagtcattcaagactttggcatagaccccattccttgagga

SEQ ID NO: 64829 - DNA, 122 bp, Homo sapiens
cctctgcgcggagatctcagcagcaagacccccggaaaggggggtgcagtgggaaacagccggcagctcattaagaccgagataactaagatccgggttgcagtttttatgtttcgcagttt

SEQ ID NO: 64830 - DNA, 122 bp, Homo sapiens
tccggggagaaggacgcttcctggagggggcgccattctcctgagatcgctcttaccagacgcgaagccctttccctctttttgcctcagctcgggagtgtcacctcgctatcccactccag

SEQ ID NO: 64831 - DNA, 122 bp, Homo sapiens
ccctgacgtgagttctcgaggtaggatccgggtttctaccgagaaggctagggatcggcgcggggccgcgcgatggggggaaggtgccaagggctctaactacctgagaggcgcgggaccgt

SEQ ID NO: 64832 - DNA, 122 bp, Homo sapiens
tttgaatgaattaatgaagcgataagacaaccccacgatgcaaaggcaggccatgttggacgccagtgagcccctatacgtgagaagctaaatcaccgcagcagattaagagcctcccccaa

SEQ ID NO: 64833 - DNA, 122 bp, Homo sapiens
gcaaattcaacgcccagaggcaggaacaggtgtcggccaatcagaagccggaacaggtgtcggccaatcagaagccaggcttgaaccgctcgcccatgtcccgccggcggaagagactctcc

SEQ ID NO: 64834 - DNA, 122 bp, Homo sapiens
aaacttgccaaactcttatacttcattctcttatcacagaatgtagtaaaagcaaagtcacgattctttcaaatttattgaattcatactacccattgaataaaaaattccattgtccttcc

SEQ ID NO: 64835 - DNA, 122 bp, Homo sapiens
cagctgagtgcctcctagcactgaggaaagcagaaccaagctttacaacaataaactctccgtgctggtcagagaccgcccacctctaacaggtgcttacccagtgtacttgaaatcctcca

SEQ ID NO: 64836 - DNA, 122 bp, Homo sapiens
ccctctgggccgtgcccggcctggctaacaaagccgccgcggcctctgttgtgtgatgtacgcgtgggggcttccggcgggcggggcggaggggctgccacccaccaccgctgcggccgccg

SEQ ID NO: 64837 - DNA, 122 bp, Homo sapiens
gaagttgtgactggctgcctctgagagtgcaagtagccatgcaaagttgggaaaaccagacggcggccggagccgtgaaccaggggcaaatggaggatggtgttggggtagtcactagcctg

SEQ ID NO: 64838 - DNA, 122 bp, Homo sapiens
cagatcagcagataaaatgatgcttatttgttactctagtgccaaaaatatgtgcattaccgtgaaagtctgtgtccttttgcctgggaaaataataatgaaatgattgttaagtgtttaca

SEQ ID NO: 64839 - DNA, 122 bp, Homo sapiens
cctgacagggcccaaggtgcccctcagctaaagcacaggacacgcgggcagatgcacgggcgccatggcagggcagggcctcagcccctcagctaaagcacaggacacgcgggcaggtgcat

SEQ ID NO: 64840 - DNA, 122 bp, Homo sapiens
aagccacaccttcaggtcactccaatgaggagactggaggggacagaggagagaattccacgcagacacagcaagtaagcgtggcttgtaaacctgggactttggcaggtggggctgggagc

SEQ ID NO: 64841 - DNA, 122 bp, Homo sapiens
gcaggaagcaggaatgagcccattccattcaatacactgtcactggacacctactatgtgcgtgactgtgtggcagatgttctactggacataaaaacgaattcagtgtcccatgctcttta

SEQ ID NO: 64842 - DNA, 122 bp, Homo sapiens
tgccacttgggggagctagggcccaggcctcctaaccttggggcagccccggaggcacaccgacttctcatctggatacttctccagccgctggggccccttgctggaggatttccggaaca

SEQ ID NO: 64843 - DNA, 122 bp, Homo sapiens
gtcctctcctgacttgtgtggcctgggtcccctcctggaatgtgagcccccctcacaccccgaggagtctctgcccccattctgggaggtacggaaaggcaccctctgccttatttgctgaa

SEQ ID NO: 64844 - DNA, 122 bp, Homo sapiens
ttatttttatttaagaatgtcctgatggttgggttcagtggctcacgcctatagtcccaccgctttgggaggccaagacaagaggatctcttcagcccagaaattcaagaccagcttcgtca

SEQ ID NO: 64845 - DNA, 122 bp, Homo sapiens
catctatatatatggacttatctttatgtattcaaggccacaagggtacactgatcattccgattttaatcccacacaacaggattcattccagttttctctccatatacataacttccttc

SEQ ID NO: 64846 - DNA, 122 bp, Homo sapiens
aatgatccctgtttcaatagatccctgtttattgggaaggatatgttcgattcttaaatacgccatctgacaaatcagaagatggaaggctaatttatactggcaatatggcccgagcagtg

SEQ ID NO: 64847 - DNA, 122 bp, Homo sapiens
aaataagtaataaataaataaggaggccgaggctcccagggtgcgggagaggcagagttccgacctggtggggtttcctgtcaccagttaaccctggagggtgccctgtaagtgtcccaggc

SEQ ID NO: 64848 - DNA, 122 bp, Homo sapiens
ggcagggctgctctccctggcccctgcagcccctcatgaactttccaccctcagtgcccccggctgagcagagaggcgtcccaccattcaaccaaagaaagtcaacattgaacattaaacct

SEQ ID NO: 64849 - DNA, 122 bp, Homo sapiens
aactcatccgcccgcctcggcctcccaaagtgctgggattacaggcgggagccaccgcgccgggccatcttagatcttagagcccactttagtccttgaaatacatctgagaagccaatggc

SEQ ID NO: 64850 - DNA, 122 bp, Homo sapiens
ttgcattgattcaacttttaattggcggcaccgtattctgctggtgagagcaagagagggcgtgtggatctctgtgtccgtggactgaccgtgggaggcctcgccatccatccatattttga

SEQ ID NO: 64851 - DNA, 122 bp, Homo sapiens
ccaggacccctgtccagtgttagacaggagcatgcaggtgcgggcatgctggggctggcccgagaagcgcctgtcggaggactctctttgccccttccccctcctgtttgacatcttttctc

SEQ ID NO: 64852 - DNA, 122 bp, Homo sapiens
aaaactgaaggagacctctgtaacacatgcccactggggcttcgggagctgtaaacaccccgaactgaattccacacgctgctgtggggccagagcccagaaacgctccccacgacatgccc

SEQ ID NO: 64853 - DNA, 122 bp, Homo sapiens
gggcgaacatcctgtcacttacctagagatgttctcacgagagcttgcgcctaccaggatcggcggggccagcagcggctcccggagtggagggaccctgataagtactgcccctcttacaa

SEQ ID NO: 64854 - DNA, 122 bp, Homo sapiens
aggggacgcggcgcggtggggcggcgcggcccgaggaggcggcggaggaggggccgcccgcggcccccggctcactccggcactccgggccgctcggcccccatgcctgcccgaccgcgctg

SEQ ID NO: 64855 - DNA, 122 bp, Homo sapiens
gccatcgcgcagggaccaccgactccgccgccgtccctagaccgaggcgacactgccccccgccgctcagctccgtctcctgcccccgcccgaggtccggacttgtctatgtggagctcgga

SEQ ID NO: 64856 - DNA, 122 bp, Homo sapiens
gaaacacctgacctggtgcatcgcgcacccctccctggccaggctgccctccctggcacacgccccgcgctggccggcaacaaacaaaacccacacggacaaaggagtctttacaagaacag

SEQ ID NO: 64857 - DNA, 122 bp, Homo sapiens
tccggccacttctcggacccctccttcggacttggcgaccccgattttgccccgctacctcgggttccactttctgccgccaggccctcttgggacgcgccctgacacaccctcctccgccc

SEQ ID NO: 64858 - DNA, 122 bp, Homo sapiens
gaaacttactgccccaagggtttcggtaccatcatctactcctcagagagcaagccaggccgttttactcagaagctcattaaggttcctaattcactcacaatctcttcctacagtgttgt

SEQ ID NO: 64859 - DNA, 122 bp, Homo sapiens
caggctggagtgcaatggcacgatctcagctcactgcaacctccgcctccctggttcaagcgattctcctgcgtcagcctcccgagcatctggaattacaggcacgtgccaccacgcccagc

SEQ ID NO: 64860 - DNA, 122 bp, Homo sapiens
acccggggcctgagggccacttctggtaacttaggctatggcttagggcgaggtttaaaacgtaagaaaggaatgactatcttgagcctccagggagatgcactgcaaatccccccgcccca

SEQ ID NO: 64861 - DNA, 122 bp, Homo sapiens
ccttatcccgcgtggtgtttatcagagtggggtgtccaccttatcccactctgtgtttatcggagtggggtgtccaccttatcccgtgctgtgtttatcggagtgggggtgtccaccttatc

SEQ ID NO: 64862 - DNA, 122 bp, Homo sapiens
agcttggtagggaagtccttgtgtttgtccgaatctgttgaaaggacatccccacgcccgcgtttcctgtaatctcggagggtcctagcgcccgacttctcaggtcagcctcgggtgacaag

SEQ ID NO: 64863 - DNA, 122 bp, Homo sapiens
tggggtggagtagggagatgaaacccaagctaagtaagataatgaccataatatatcattcgaagaaggatacttgtgaaagtaaagggaggctctattaataatttcactggattaatagg

SEQ ID NO: 64864 - DNA, 122 bp, Homo sapiens
ctctctccccctccgtcgccctcctggcgattggtgaattcccaccaaaataaatcgttccgggtaatcggttttcatagcacattcattctattaaagaggactgtttggggctcgctaat

SEQ ID NO: 64865 - DNA, 122 bp, Homo sapiens
ggtggaaacactggggtccggcactgtgctcttgtcttttcacctgcatttgtggccctgcggggagattctcaggactagcattgctacgtgcttcttttctgtattttatttatttattt

SEQ ID NO: 64866 - DNA, 122 bp, Homo sapiens
gccaacacagagggccaggattctgcctccatggcctggactcctccacacacagtcagacgagtcaggttcttgcagaccttcaaatctccattcatatcccccttcaagagggccgtttt

SEQ ID NO: 64867 - DNA, 122 bp, Homo sapiens
ctctggaaataactgctcaaagccagaagttgcggggactagtggtcgcggacgtccttccggtcctaaatcttaaggggcaaaggacatactctgggactgttaactaggccctggaggcg

SEQ ID NO: 64868 - DNA, 122 bp, Homo sapiens
tcttgtagttgatgaagctttggagaggctttcaaaccctggggagccacagctgggtgccgactggactcactggcagagaggcaggcggtgaaggccaagcctcgccccccaggaaggcc

SEQ ID NO: 64869 - DNA, 122 bp, Homo sapiens
aaacaagattacgcctgttaacttcaactaatagaaatgtgggtttaacaggaacttgcacggctccggcgccggcgccgctgcagcccgcgtggcccgggccgggccggttctgtttggct

SEQ ID NO: 64870 - DNA, 122 bp, Homo sapiens
agcacgtcttctggctggactctggggtctcctggcctggctgtgtctcctggttctcagcgctcgcctcccacgcggggcggagtatgggagtgggctgctcccgcggaagaatcctgggg

SEQ ID NO: 64871 - DNA, 122 bp, Homo sapiens
ttatctacgagtcatcatggaagttaaagagctgctggtggccatggtagcctgcctggtcgcatgacctcaatcctctctctgaaccagcaaagctccctgacccacgagtctcacaaaaa

SEQ ID NO: 64872 - DNA, 122 bp, Homo sapiens
tcctggcttagaggatagtggcttggaacctttgccctgccgcctaacacacaatgcttgcgtatagtatggtcttatactgaatcaaaacatcttatccagtatttacaagcaccaagaga

SEQ ID NO: 64873 - DNA, 122 bp, Homo sapiens
atttctactttcttttttttttctaattggacactgaagccaaggaagtcagtggtcgcccggaagcaggatttgcacccacatccttgcccggggcacattggacaacagggctcagttgg

SEQ ID NO: 64874 - DNA, 122 bp, Homo sapiens
tcaattggaagctcccggaggacagctggtctcacctaaaaacggaggctttccactctacgtcacccgccaggctcccagaacattccaaggcctcttctgggtcttctccttggcgctgg

SEQ ID NO: 64875 - DNA, 122 bp, Homo sapiens
tagcctgccctggtcctattcactggtgttcctcccaggttctaacttcctgagctgggccggtccagagaactcccattcccacgccacccacaggtgctgatgccgcgctggggtaagcg

SEQ ID NO: 64876 - DNA, 122 bp, Homo sapiens
aaacccatcaaggaggctttgtgaccccagtgatattttttgcagaacgtggtggattttcgatgtgaccacaatgacatccgccttgcagtggcagaacagatgcaattgcacaagttctg

SEQ ID NO: 64877 - DNA, 122 bp, Homo sapiens
ttcctaccatttccatttctgttaaagtggatctgcatatcttcagcttactaggtgacccggatgctgacatctgctgctgcagaaaggaagacttttcattgtaatttcgcttagaccct

SEQ ID NO: 64878 - DNA, 122 bp, Homo sapiens
ataggcttcttgtagatggtaatgagcttgtccaggaccacgatggcggtggtgaagacgcggtaggagtgcaggaaggtgttgaggaagtcgatgctcaggaagcgcaggtccgtcagcct

SEQ ID NO: 64879 - DNA, 122 bp, Homo sapiens
ggcgtcatcccctgagaggtgggcatatgtccctgtgggcgggtgacagcaaggtcatcacggggagggggcgtgtccctgtgggcgggtgacagcaaggtcatcacggggagggggcgtgt

SEQ ID NO: 64880 - DNA, 122 bp, Homo sapiens
ccatctccatccagacatccggcctgatgacacaggcagggatcccaatcgccagggtctcgaacagaaggggcagcatggctgtcagctgggctggggcgcatggggatgaggggtgcacg

SEQ ID NO: 64881 - DNA, 122 bp, Homo sapiens
cccgcaacgcctccacctcagctccccgcccggccgagtggccctagggggcctccgccccgcctccccactgcccaagaccccgggggctgggcggagaagaccagcccggcggagttgcg

SEQ ID NO: 64882 - DNA, 122 bp, Homo sapiens
gtgaccgcggtacccaggtcatcccgccctgatccccgcaggcgagtgtcggtggcctttcggcttgagtgccgcttggcaccgaaatcaagagttcacaactgaacttttagaatctccaa

SEQ ID NO: 64883 - DNA, 122 bp, Homo sapiens
ttgttataggagtgaacctgtcttgcagatgatcgttgactatgcaggtaaaatagattgcgatcattgtcatcctgctcagaaaacccacctggataggaccagtcctgggactgggagcc

SEQ ID NO: 64884 - DNA, 122 bp, Homo sapiens
ttaggaaaagtggactcggtgctcctctgcgccgcattcccgcagcgggatttgtgaaagcgaacttgagccccacactgcagaagccctgaggtcctgtctcaaccagaatccagcaccca

SEQ ID NO: 64885 - DNA, 122 bp, Homo sapiens
acatcctccttcaggaacacggggagcagaggccaaagcactaaggggagggcgcatacccgagacgattgtatgaagaaaatatggaggaactgttacatgttcggtactaagtcattttc

SEQ ID NO: 64886 - DNA, 122 bp, Homo sapiens
atttatttatttattgagtgtttactatgagccaaactgtgtctctgatggctttctttacgtgttctccactgagccaggctctagagaggacaaccacacccacaagccatatttgagat

SEQ ID NO: 64887 - DNA, 122 bp, Homo sapiens
tcctcacttcccagatggggcggctgccaggcggaggggcgcctcacttctcagatggggcggccggtcagagacgctcctcacctcccagatggggtcgtggccgggcagaggcgctcctc

SEQ ID NO: 64888 - DNA, 122 bp, Homo sapiens
caccctcacctgccctcccctcacctggcctccttccgttggggaaggggttgtaaggggcggcccccaaactgtctgtcctggtgccctgcagagaaaacagtacgtgagggccgcagtcc

SEQ ID NO: 64889 - DNA, 122 bp, Homo sapiens
gagggagctggttggaaccggtcggaagtggctgtggcagtactcgggtcttcccgcagtcggctgcaaaatccgcggccccgagttcttggcacagctcggccctcagtccccttaagcca

SEQ ID NO: 64890 - DNA, 122 bp, Homo sapiens
ggcctgtccggcggtgaccatgacccatgtgttggggaccacagcggtggccgaagtgagcgggcatctggggaaaagtttgatcaagttctgctctggagacttggggcccgagggcatct

SEQ ID NO: 64891 - DNA, 122 bp, Homo sapiens
ccccttccttgtgccgaggggaacacaggccagaacagggaggggacctgccaaaaggcacgtaagcatttggccctaagccagagctggagctcaggcccccagagttccgtccagggcac

SEQ ID NO: 64892 - DNA, 122 bp, Homo sapiens
atgacaagtagcccatttacactgggccactgctgtgtcccaagtactaaatgttcatctcgttgaatcctcactgcaactactgtgaagtagttcttgtcatgttatagagtttattttca

SEQ ID NO: 64893 - DNA, 122 bp, Homo sapiens
ttggtcctggttttgcctcctagaggtgcccaggagaaggtcaagctcccctgcacaggtcgctctccagaatccaaccccagaagtgcttttttattttccctggacatagttcttgcttt

SEQ ID NO: 64894 - DNA, 122 bp, Homo sapiens
tcggtgtcccactacctgggaaaggctccttcatccactgaactatccaggaatggaggacgtgcttgccttctcaccttccacccaaaggtaacacacgcgacgtgtgcacttgttttcag

SEQ ID NO: 64895 - DNA, 122 bp, Homo sapiens
tcgctaatggccaaaattactcaaatcttacttttggacttttaaaatatatttttactgcgttatagttgaaatgtaggtatggttgaaacgtaaatctagatcttaagtgtactattcaa

SEQ ID NO: 64896 - DNA, 122 bp, Homo sapiens
gtagctaaagcacctcaagcaagggtgtctcccttagaaatacatgtgcctccaagtcctcgaggctggcatcccctcctgctccatctgcctctgcctgctgggcagaccagtctgctgtc

SEQ ID NO: 64897 - DNA, 122 bp, Homo sapiens
gcctccctgcggagcagccccatctcctggaagtcctcaggcaggtcaaggtgggaggtccgcaggaagttgaggatatagcggaacactttgccgtcacggtcaatgaagcagttgccctg

SEQ ID NO: 64898 - DNA, 122 bp, Homo sapiens
tgcagcggggctgcctgtgtgtctcaccaggccaccaaagctggtcctacacccaccccccgtcagcaagagtgaaataaaatccatcccaggggtttccaacacaagccgcaagaccacca

SEQ ID NO: 64899 - DNA, 122 bp, Homo sapiens
ttctaaggaaacttctcacattaggtgctgggatgtacggaggaaaaaaaaaaaaaaacccgggtgccagccagaaagaaaatgtagagccagttataaaaaagggtccatgggctgggtgc

SEQ ID NO: 64900 - DNA, 122 bp, Homo sapiens
taccttccccgatgcccatccgcccagaatcttccttctgggatgccgactttttcaacacgtgccaggagcccttcctcggcccggaatccccagagtgcccacagtggacagggcacctg

SEQ ID NO: 64901 - DNA, 122 bp, Homo sapiens
ttctttgttcgacgtgccaagaacctggacagctctcagccgagacccttcatctggtgacgaatggacgttgagtgagtgctcaagctcagacagctgcctaacaaggttctcgaagtccc

SEQ ID NO: 64902 - DNA, 122 bp, Homo sapiens
tataagaagaggagacagacacagaggaggaggccacgtgaagacaggcagaggtcgcagcgcttgtggccacagcccagggatgcctgaaggtgcagaagctggaagaggcgggaggagtc

SEQ ID NO: 64903 - DNA, 122 bp, Homo sapiens
acaggagagtgagaaccagccagctggcagggatgctctgaggaaaatgggaggcagccccgctagaaccctagggggtgaccacaggcagccagtgggcctgcagatgccactctccgggg

SEQ ID NO: 64904 - DNA, 122 bp, Homo sapiens
gtctgtgcttttaaggggagcttagtcaagcccagctctgcactgctgcagtgtgtgtgtcgctcaccatgagacaggagagagttttgaggaagggagtaaaaaactcacttgttgatttt

SEQ ID NO: 64905 - DNA, 122 bp, Homo sapiens
aggactgaggtttaagaaagttaagttgaggaacctcatggtggatccttcagtagagtacgaggcaagatcatttgcagaagtgcaggaaaaccacgtaaagtgggggcttcaggagagca

SEQ ID NO: 64906 - DNA, 122 bp, Homo sapiens
aatggggtatggatctctgccccacctttgcctaagatccttgggaagatcacaagccatcgtgagagaaattagacaatctcagagcatggctgtggagcactggttggggggtaaagaag

SEQ ID NO: 64907 - DNA, 122 bp, Homo sapiens
tagcctttgctcccctgcctggaatgttcttcgatcagatatctgcctggcttggctcctcgttccatcagatctcggctcaaatgtcccctcctcaaaccggcctcccccgccctgcccct

SEQ ID NO: 64908 - DNA, 122 bp, Homo sapiens
ggttggaggaatagttcagaggctgagatgttgcacccacagctgagaatccctttctagcgctctgtgtcctcacaactccccgggaatcatcctcccctggagagttcccaaagcccttg

SEQ ID NO: 64909 - DNA, 122 bp, Homo sapiens
ccagtttatctggggtgggatgatatctcgtaggagttttgatttgccttcatctgatgacgaatgatgttgagcaccttttgatatacctgtttgccatttgtatgtcttcttttgagaaa

SEQ ID NO: 64910 - DNA, 122 bp, Homo sapiens
aatctcacccatcagtattttcaactattatgcaagaacccaaaccagaaaaggaggttccggggttttcttgaaataggctgctttattcctaacagtagtagttctgactcacagtcgcc

SEQ ID NO: 64911 - DNA, 122 bp, Homo sapiens
ggaaatggctgcaaagtgggaagaggtcaacgtgaacgatgagggtcaaggacaagcaggcgcgtgtgtccccagcactgaagggcagctgtagttttgggttgcagaaccagttccctccc

SEQ ID NO: 64912 - DNA, 122 bp, Homo sapiens
ctcagcgccacccgattggtgaagcctctggcgtcggccaataggacgtggctttgttggcgtgtgccgcggccgcgcgagtcctggaaagcgttgttggcccggttgctctggagccgggt

SEQ ID NO: 64913 - DNA, 122 bp, Homo sapiens
ctaggcttgccggcagctgtttgaaggagtcactcgcatggaccagtaaagcaaaggcagcgatgacgcctcgcggtgagggccagaacccaagtccagggaaaacgctcctttagcgccac

SEQ ID NO: 64914 - DNA, 122 bp, Homo sapiens
cttcgcagggagccgcaaccacgggaccagccccgtgaacgacccaggtagggggacgtgcgccctttgcagtcagagtctcccccagaagctggaggcaggaggagggtgcttttggggtt

SEQ ID NO: 64915 - DNA, 122 bp, Homo sapiens
ggtgttacatgtgaccaagtgggatgtgaactctccaaagcattctttttttaaccattacgatgagctaagcaagggaaaacagtttgcaaactgctgttgtaattattaccgctgtagct

SEQ ID NO: 64916 - DNA, 122 bp, Homo sapiens
acccaagcccccatccctccgcggtcaatctcagcaccccaggccccgcccctgaggctccgcccagcatcccaagacccgcccctggtcagccctgcccatcagaggctccgcccccaggt

SEQ ID NO: 64917 - DNA, 122 bp, Homo sapiens
gaccagaggtgatgctcttaatcataacatgctattgctctcatacagcctagaggggttcggatgatgtttcattgctaagacatccaccgtacttctattaaactgtcctggtgagataa

SEQ ID NO: 64918 - DNA, 122 bp, Homo sapiens
tggggtagaatttcgatgtttggaagggatgtggagggatgttatgaagaggaagcctcacgccataccaccttgggtcttggtgttaagtcattatcaaccattacatttgctttaaagca

SEQ ID NO: 64919 - DNA, 122 bp, Homo sapiens
cacctcgtctaggccacagccttgcctggactgaggcagggacctccttaggagcctttccgggttcactcttgagccgctacatccgttccctgacgcagctgccaaggtgacttctgaag

SEQ ID NO: 64920 - DNA, 122 bp, Homo sapiens
ggacatcagattgatgccgaacttggtgcagtcacctgatcggcagagcgcactacagcccggaactcctggactccagtgatccacctgccttagcctcccgagtagctgggactacagcc

SEQ ID NO: 64921 - DNA, 122 bp, Homo sapiens
gaaaaattatttgctttgagagtgtatgcatgtatgtatatatatgataaatgattataacgtgtgtgtcagtgacaatatgtagtctttggttgttagttatatactgtctacctgtgaga

SEQ ID NO: 64922 - DNA, 122 bp, Homo sapiens
tctttggggattagtccagaagtttttggtgacatttatgaatattattttcccaagaagcgtggtgacctacatgaaatacttttaaaacttgttttttaagatatgcatggaaatagtag

SEQ ID NO: 64923 - DNA, 122 bp, Homo sapiens
ggagcctggcgtggtagggctgtgctgcgcggtccttcccattcaccctagtctggcgctcgccggcgtgggcgggccggaccttcgccgcttccaggaagggccacaacggccgtcggacc

SEQ ID NO: 64924 - DNA, 122 bp, Homo sapiens
tgccaccacgcccggctaattttttgtatctttagtagagagggggtttcaccatgttggcgaagctggtcttgaactcctgacctcaggaaatccacccgcctgggtctcccagagtgctg

SEQ ID NO: 64925 - DNA, 122 bp, Homo sapiens
gcctttagttcagttttgctctgtaaatcacctaatatggggagggctgagtcgtccagccgaatgagttgggttaacaccagcgccgcagatcgatgttcccactatccaaacgtcgggct

SEQ ID NO: 64926 - DNA, 122 bp, Homo sapiens
gtccagagtttcttccctctggtgggttcgtggtccagagtttgttccttccgatgtgtccggagtttcttccttccggtgggttcgtagtctggccgaattcaagaatgaagccggaggac

SEQ ID NO: 64927 - DNA, 122 bp, Homo sapiens
cagcgcccggctgctattcaaatttcacgcaaatctgatgtatgctttaagttgtgtatgcgtgatcacattctcagtgtggaagttgaaagggttgaacaaatattcccaaccttcaaaag

SEQ ID NO: 64928 - DNA, 122 bp, Homo sapiens
aaagggcccgttcccccggctgggaaaaaagcaggagcccagggcggcggcagctggacgcgggccccgtggaactttctcccgtcagtcaggggccgtatttcttagccatcctcctctga

SEQ ID NO: 64929 - DNA, 122 bp, Homo sapiens
ttcaacctcatctcatgcaatgattttatatattgctgtcatggcatttatcctgcattacggtaatctgcattagaatgtgtgctgttaggaatatgaaacattgtctaatttgcttcttt

SEQ ID NO: 64930 - DNA, 122 bp, Homo sapiens
tttaaaaaatccttcccttattggggcaacacccttctgagagtaagctacccaatgcctcgggtttataatgttttctgatatggctcatagaaacaggaagtatttctgcttctgtgaca

SEQ ID NO: 64931 - DNA, 122 bp, Homo sapiens
ggctccgagacctgcaggaggttgaagtcgcgggtgatctcctggctcagggcccgcatgcgggagtagcaggtcgggggagtgggccgcgcggcgggggctcccgccaggagcagcagcag

SEQ ID NO: 64932 - DNA, 122 bp, Homo sapiens
gagaacggggcgcggcgcgggtgacgctgtcagggccgcggttcctgacgcccaggcgctcgccaggacgagccaggcagtgatttgaggcaccggcttcaccttcacccatggtccggaga

SEQ ID NO: 64933 - DNA, 122 bp, Homo sapiens
ctagagtgcagtggtgtaatcttgactcactgcaacttccttccgccccctgggttcaagcgattctcctgcctcagcctcccaagtagctaggattacaggcatgcaccaccacacccggc

SEQ ID NO: 64934 - DNA, 122 bp, Homo sapiens
agtgtgaaaagacagaggctcatctccaagccccttatttgtttctaaattcaggccagacgtctaaacgtttgttttgtgcttgttttgaacattccatcgtgatgcccaaggacgcttca

SEQ ID NO: 64935 - DNA, 122 bp, Homo sapiens
gaagctcccaaacgtctaggactgagccattaaagtggactccaggtgcccaaggcggttcgctccaaggcctcacggccccctggctgctctactcagagaacacgctcggagatatttca

SEQ ID NO: 64936 - DNA, 122 bp, Homo sapiens
tggcttggtggaaagtggggcgtgctgcctaaagtgatagtttggaggccttctctgtgccgtcgctatgggaatgccagctatatgttggctgggtgcggggcccagtcgccaggccacac

SEQ ID NO: 64937 - DNA, 122 bp, Homo sapiens
ggacaataggggcgcggggcggggagcgcgggatgcgtggccagctgagcgggttcactgcgcggtgaactccgctgggcctgagggtctcgccctttagatcccagcctctcctttcttcc

SEQ ID NO: 64938 - DNA, 122 bp, Homo sapiens
cagaacctgccttctggagaggcgccatgtgtgtgaatgaacctgctgtttggaaggcaccgctgtgtcgtcgcactcagactccatgaagccaccgctgtgtcgtcgcactcagactccat

SEQ ID NO: 64939 - DNA, 122 bp, Homo sapiens
ctggactcgtcacctgcccctccccctcccgccgccgtcacccaggaaaccggccgcaatcgccggccgacctgaagctggtttcatggcagcctcaaagaaggcagttttggggccattgg

SEQ ID NO: 64940 - DNA, 122 bp, Homo sapiens
gcagagcgaggatgagcagggcagctacgggaggatgcccaccactgccaaggcgctctccgatgacgagcagggtggaagcgccttcgtagcccagagccatggtgcaaacagagtgcatc

SEQ ID NO: 64941 - DNA, 122 bp, Homo sapiens
agggagaggcatgggcgggaaccggggctgcacatggcacttgcggaccagcgggagttccgggtgggagtgggctctgtggccccccactgagagcggctggcctaccggccggccccgcc

SEQ ID NO: 64942 - DNA, 122 bp, Homo sapiens
gccttctgaggggaggtcccacggggcagaggcacagctgggatcacagctactgtttgacggcacattctgcaccttgaatgtggcctggggttacctcactgaaccccgtgcagtgccct

SEQ ID NO: 64943 - DNA, 122 bp, Homo sapiens
cggagctcagcccgcagtggttgcagctctcactcgccgccggctctgatcgcccgcggtcggtttcaagatagggaagcccacattccagccacagtgattaagaggtgtcagctaatgag

SEQ ID NO: 64944 - DNA, 122 bp, Homo sapiens
tggaagtcgacgttcgatgcccacatctatgaggggcgcgtcatccagattgtgctaatgcgggcagcagaggagccagtgtctgaggtgaccgtgggtgtgtcggtgctggccgagcgctg

SEQ ID NO: 64945 - DNA, 122 bp, Homo sapiens
cgctgggcagctgctgtgcttgtgtctcctccaccctgagagtccgatccagccaagatccggacgcagttggagtgtgtcccagacctttgtcctctcgctgggcgaaagctgtgagtttc

SEQ ID NO: 64946 - DNA, 122 bp, Homo sapiens
atgcttgaagcacccgggtcctgtccatagtcccagctggggcagatagggggcactggccggcccctctgcatgcaaggaagaccttgtcatcactagtcccctcatctctcagactggga

SEQ ID NO: 64947 - DNA, 122 bp, Homo sapiens
cgggtagacaatgtgctaaagctgtggatcatagaggcccgggagctgccccccaagaagcggtactactgtgagctctgcctggatgacatgctgtatgcacgcaccacctccaagccccg

SEQ ID NO: 64948 - DNA, 122 bp, Homo sapiens
ctgcaccccggcgggcgcacagacggtccccagcggcggcctgggccagcggcgaagcagcggcagacggttctccggcccccgccgccccctcaccgctcccggggcaatctggcgctcag

SEQ ID NO: 64949 - DNA, 122 bp, Homo sapiens
gtttagacctagaaggaagtggcatttgattggttattataagtgaaaagggcccctccccgggtgagatatgccagccccataattaggacctgaaaatctctgccaggcctgcctttgtg

SEQ ID NO: 64950 - DNA, 122 bp, Homo sapiens
gccccgcaggcatcgggccaatctcagagggcgcgcacgccgcatcaggaccccggaacccgccccgttggggatagggacagatggagaatccagctcagacccaggtaagctgctttgga

SEQ ID NO: 64951 - DNA, 122 bp, Homo sapiens
aggtaggcaagcaaacgtctattggctgtggacttaacaggctcgcccacaggtaccttccgagcatgcgtggggaagtagcacgcaggcgcggcacgccccgcgcatgcctggtgcacaga

SEQ ID NO: 64952 - DNA, 122 bp, Homo sapiens
cctgtgctatttttagccttgagggccacgtggtgagacccagctttgccacggctgggacggtggaggaagggggctcagcgaaagagggtgaggggaaggaatgacagagtgcaagaggc

SEQ ID NO: 64953 - DNA, 122 bp, Homo sapiens
tctgtgtaataatagacatgaaacattttcctcttttccacagagggcttaactgagaaccgtattgatttttattttagttacctccctctagttttatgtgaaattagtagaatcaggga

SEQ ID NO: 64954 - DNA, 122 bp, Homo sapiens
ccatggccaggtggcctgcatcatgtccatatatgggcatttgagaggcgggcaggcccccgagtgtaggggctgcctatgtcacagctggggcgatacaagatgactcctccgtgggagca

SEQ ID NO: 64955 - DNA, 122 bp, Homo sapiens
acccacgctgcccgagtatttttagcagagggtcagatgcctcttaaacctcagctgagacgtgaatttcctccctgacagctgcggccaggagccgcacgtcctgcctggcgggcgtgggc

SEQ ID NO: 64956 - DNA, 122 bp, Homo sapiens
cgccaggctgccttcgaggtggagggggagtcctcgggtgccgggctaagtgctgaccgtcgccgttccctctgtgcccgagagttccgcaaactgggcttttctgtgagtatcacccctac

SEQ ID NO: 64957 - DNA, 122 bp, Homo sapiens
ttaggagcccggagccagagacagtgctgtttgagattaggccccctctggtgtgcccttcgagaattcccattgtggggcactgctcagttgctcccatctggtatgggtcaaataatcag

SEQ ID NO: 64958 - DNA, 122 bp, Homo sapiens
cccttcaacctcctgcgggacccagaggtgcccgggcccgcgggacccaggggtggcgcgcgctgcccccaaccccgcaccatcccgagccaaatgtgagtcctccaacccctgccggaggt

SEQ ID NO: 64959 - DNA, 122 bp, Homo sapiens
ggggaagaaggaagagcttagaatttaagtccaaagatgtggaaacaccaggctcttccccgtccaggcagctcatcagagcctcgttagctgccttaaaagcccattttatttccgcagcg

SEQ ID NO: 64960 - DNA, 122 bp, Homo sapiens
acttgaaatcttggctgaagggaaaggtgaaaccgggacatctcacgtggccagagcagacggaaatgagcaaagcgggaggtgctacatgcttttaaacaaccagatctcgtgagaactca

SEQ ID NO: 64961 - DNA, 122 bp, Homo sapiens
tagcgatgttccccttacaatgaaagtcaattgctgcataataactgggccaaagaatttcgttagtttaaattttaaaaattagtattgcactttgctttcaagtttgggtggcaagtacc

SEQ ID NO: 64962 - DNA, 122 bp, Homo sapiens
caggatgaggcagcacatgggtgtaccgaggcagcaggacacagtgttgaggagcatgggcgctggacacagatgctttgtgttctagccctggttctgccacttaaactaggctgcatgtc

SEQ ID NO: 64963 - DNA, 122 bp, Homo sapiens
tcaggaagtcaggtggcctcctctccagctgcatcctcctcagggtatcctggagtgcctcgctggggcgggcccgagacagcacctgccgcagtcgcaggtggttggccatggctgggtgg

SEQ ID NO: 64964 - DNA, 122 bp, Homo sapiens
tccatattacttacagatgtggaaatccaggcactgagagggtaacaagctgggtgggggcgggggtggtcaaatgaatgtttcatgggtgaggctaggatttgaaactggatctgtcagaa

SEQ ID NO: 64965 - DNA, 122 bp, Homo sapiens
gtcctggatgagctggacgatgcgctggttcctgttccggaactcctcgcacagaaactccgacagctgcagcatcagctcgcggcccaacgcttcgttgccgtgcatgttccccacatact

SEQ ID NO: 64966 - DNA, 122 bp, Homo sapiens
ccgttcggaatcggagaatctcccacgggatctagggatccggaatacggcctgacgtcccgttccaggaatctaaagtccagggagaaatcctagctcggacttgcaaggtcctgaggttc

SEQ ID NO: 64967 - DNA, 122 bp, Homo sapiens
ggatgagtcaaaaggcgttactgttgagtcagacatagaatacatgaatacctagaaattcgtaaatgattctccaaaggctgttgaaatagcgttttcaggccgggcgcggtggctcacac

SEQ ID NO: 64968 - DNA, 122 bp, Homo sapiens
gcacttgtagtcgataatgccatattgcacattttaaaatgtaagagggtagatttcatgcgaagtgctcttactatgataaatgttttaaattagtatgattttcaaattctgtataacaa

SEQ ID NO: 64969 - DNA, 122 bp, Homo sapiens
agccagtggtgtggaggttacccaggagtcacccagcacggcggggtggtaggttcgggccgccccagcgtgaactctcccgctcccgccctgctcctgggcccgtggtctggctcttcctg

SEQ ID NO: 64970 - DNA, 122 bp, Homo sapiens
cctctagaacgagctggaggattctgcctaccgatacagagccttcgagtcgtccggggccgccattacaatccacctccatccgcttggaaatggccttcgtcccggcctatgactggtcc

SEQ ID NO: 64971 - DNA, 122 bp, Homo sapiens
cgccggtgaagggctggggcaggaagcgctccagctccaggaccacttttccgattaacacgtgcacccacttggggactctgtccctagaaacaaaaagcacaagggcgtctgacccgctc

SEQ ID NO: 64972 - DNA, 122 bp, Homo sapiens
gggttacaagtgagcaaggcaaatgacattatgtgaatacagtttaaacgataacacacacgggtaacccagtgcaggaaataatacaactttccctcccttgttttcatttgcattttact

SEQ ID NO: 64973 - DNA, 122 bp, Homo sapiens
aactcagtgtggatataactgctgggacgctagcagcggtctctttggaaattgccagagcgcgccaccgcggctgctgggtcactgggcttctgtgttatgatggatgctgtattcgtcat

SEQ ID NO: 64974 - DNA, 122 bp, Homo sapiens
ctccagatcatccagcctcagagaggttgtgttcatttcatagatcagggacccatgatgcgtgtttctctctctctctctctctcacacacacacacgcacactcttcagttaaggcacga

SEQ ID NO: 64975 - DNA, 122 bp, Homo sapiens
ggtgggcgtctcaaataccccctgtaaggccctgtaggagcaaagccttggactgggttgcggcgcttgtgtgtgcattgacttctcctgtgaaacgtacaggaacatttaagcgtgccgtt

SEQ ID NO: 64976 - DNA, 122 bp, Homo sapiens
cccgcccgtgcctggcgctccagacctgggatcctcccggcggctctgcccagctctgcccgccttctttgcgggcttctggaatctgccttcctacatccaggaaagggaggaaagccctg

SEQ ID NO: 64977 - DNA, 122 bp, Homo sapiens
gcctctcggggtggggcaaagttgggggccgggagcggcgggggcgggggcactcggcaccgcggacccccccatactccccccaccgccggccgccgcctttgtctccgagctggtacccc

SEQ ID NO: 64978 - DNA, 122 bp, Homo sapiens
agttaacggggcgggggatggggacacacacacacttgcttgcaggattgagtcaagtgtcggagggaggggggcccggcagcagcgccagcctgtccgggctgcggtgccagcgtgcgaac

SEQ ID NO: 64979 - DNA, 122 bp, Homo sapiens
ccaaggacgggcacctactcatggatggcggctacatcaacaatctgccaggcaagtggccgcccgcaccacccgcacacgcaagcacctcccgcaccacacacacgcacacgcgtgggcac

SEQ ID NO: 64980 - DNA, 122 bp, Homo sapiens
ctgataaattcttaggtgttgctggtgctgctggtctgagaaccacatatttagtagtaacgctatagattatatgagggtacaaatccaaattgctgtcatggttatcaacaagactcaga

SEQ ID NO: 64981 - DNA, 122 bp, Homo sapiens
aattttgtaattagtgatcactgttcctatttatttatttatttatttgagacggagtttcgctcttattgcccaggctggaccacaatggcgcattatcggctcatcacaacctccacctc

SEQ ID NO: 64982 - DNA, 122 bp, Homo sapiens
ccgctcgggcggccgcctcctacccccaccgccgcggagccccgcgatggtggccgcccgcgctcccgcgctgtagccgggcgccccctaagtttgggagccttcgccaccgcggcgcggag

SEQ ID NO: 64983 - DNA, 122 bp, Homo sapiens
cctccttaggaacgggaaggagccccggcccagtgcactgacgtagttagcctaagatcacgtagctggttggtcacagaatcatgactttaattcatgtcttctgactctgacctggcacg

SEQ ID NO: 64984 - DNA, 122 bp, Homo sapiens
ggccccttatatacctgctcggattccccggggttggggcttggtccgcccctcgcaacccggaggacccgtgattgacaggttcgcagtgatgcgccctggccaatcattaccgagccccc

SEQ ID NO: 64985 - DNA, 122 bp, Homo sapiens
tgtggagagggcaggaagaaaggcatgaggatgggaagcagacaggctacgtgggaaaggcgagaacagattccaggcagcatggtgctagcccaaagcagcaaacctggcatggaccaaat

SEQ ID NO: 64986 - DNA, 122 bp, Homo sapiens
agatgattggcgaagtgaaagttgcccagttccaaaatggccaccaccgcactttcctggcgtcggagcgactacgtagtgacagaaggaccatcagcaggtgggtgctcacagggactgtg

SEQ ID NO: 64987 - DNA, 122 bp, Homo sapiens
gaatctctcccgggaaagcccggaaagatgccagcggcccctgaagcagggagacccctgcgcgtgcgcttctgaggcagatgcatcagggaggccttcctgggcgagagggaaaggataat

SEQ ID NO: 64988 - DNA, 122 bp, Homo sapiens
tgtggcgggcaaaaaataaaggagcagattgtgacagaccattcccatcggccatgcgggcgaacccaacgtccttttacattgaagaacccaacggggccttttacattgcggatgatgga

SEQ ID NO: 64989 - DNA, 122 bp, Homo sapiens
ttcccatctccaaagcccgtggtgctgggcacggcagagccgtaggcggagacagggagccgggaggagcgtcagatgcctgtggcctctttacagctctgtcccctgccttatctcgctgg

SEQ ID NO: 64990 - DNA, 122 bp, Homo sapiens
agcacagaggaagctttgcccttccctagagggttaatggctaccaacgtgagaaggtcacggagttccttaatgagagggagcctagcctagaataggggatgaatgagaaattgttctga

SEQ ID NO: 64991 - DNA, 122 bp, Homo sapiens
ggggtggcacagtaggtgacagcagcagctgcaggtggtggctggggacccgcgagggggcgcccctctgggtagggtctggctgagcgggcttgcaagcccgggaggcggctgagagaccc

SEQ ID NO: 64992 - DNA, 122 bp, Homo sapiens
ggccaggaagctggcgctgctggacaggagccacgcaacactcacgcccggggggaagctcgcacccacccaccctgagacagccacagccacagccaccaggagcaggctgagcccgtggg

SEQ ID NO: 64993 - DNA, 122 bp, Homo sapiens
gaggagccaatgaagggtaatccgaggagggctggtcactactttctgggtctggttttgcgttgagaatgcccctcacgcgcttgctggaagggaattctggctgcgccccctcccctaga

SEQ ID NO: 64994 - DNA, 122 bp, Homo sapiens
cttttcttcgtgaaattacaaaagcctgacaaatggctgcaaatgtccctgctcttccctcgcttctcatgagattcgttgctatccccaatttgatcttatttccagggcagcctttcctc

SEQ ID NO: 64995 - DNA, 122 bp, Homo sapiens
ggataattttatgaagctcaaaaacacccaaaattaaacaacatattctctaagtacatacgtgggatatgtgataaaactaaaaagaaaacagggaaggatcagcaatccagaaccaattc

SEQ ID NO: 64996 - DNA, 122 bp, Homo sapiens
ggcccccacgctcctgcaggacccccgtccccagagtggacccccaacaggaccccacaccgccttaaccaggttccaaatgtgctggggtccccagtcccctctgtgggaccacgacccct

SEQ ID NO: 64997 - DNA, 122 bp, Homo sapiens
cgcgagagcccggggcgagtgggcctctgctcgtgggtggttctcgtggaggtcagctcccgcgtgtctccgctcgacagggtgcttgggcaggtaagggtccgctcagtagcccaaccctc

SEQ ID NO: 64998 - DNA, 122 bp, Homo sapiens
ccctggtctcctgcactgagctgtggtgagcacatctgggtcccaatggatgcatgcatgcgttgtggggtggtggtgtcctgggttgggtcgatgatgagaaccttatatgttctgaagag

SEQ ID NO: 64999 - DNA, 122 bp, Homo sapiens
tgccgggccggagttgaggagtgtgtgttctgtttctcccctgtgccccgccctctccctcgccctcccgccgaccaggagagggcggagctggccgcgggacggaggcacctggtaggccc

SEQ ID NO: 65000 - DNA, 122 bp, Homo sapiens
aacgagcgaatggaagaagtaggacagacaccagacagagatcaactccagggactcttccggacctgcagggcaggcagagcattcggttgctaggcagctgcgcctcctgggagggtggg

SEQ ID NO: 65001 - DNA, 122 bp, Homo sapiens
ccggggagggactggagcggcgggacaccttcggggagcgtgcaaaggtggaaccgcagccgccgccacctctctctcccctggggatgtgcaaaattaccatgaaattatgacttgtcatc

SEQ ID NO: 65002 - DNA, 122 bp, Homo sapiens
gcgtgagggaaggagaggggcggcagggacggccgctggcgccggtttctttgtctgagccggctgcgtcccgcgcccctcggggctcgcagtctgccagtccgggcggcccgcactcgttc

SEQ ID NO: 65003 - DNA, 122 bp, Homo sapiens
gtcttctcccggcttcacggagggagtttcttgggctttgcagagtctcggagagggtgccgggggatggggagtgagagacccccagggacttggtagtgatcttattcccccattctccc

SEQ ID NO: 65004 - DNA, 122 bp, Homo sapiens
ccgccggaatccagggcactgttccctcctatttggaaggccccagggccctttcatccgcgccgcgcctcgctcccgcccccgtgactcgaggcgcagcgtgcgtggtgatcccggcccat

SEQ ID NO: 65005 - DNA, 122 bp, Homo sapiens
cctgggcctctggtaactgtcactggtcactatttctgcctattactcagtgtccttctacggggccaccactggtggacatcctgcttgtcacccaatgtcctcacgttttctgttgcttg

SEQ ID NO: 65006 - DNA, 122 bp, Homo sapiens
aatatcacagagtgtacaccactgtgatattaggggtaataacaccttccccaaatataacgaatactatcacagggtgttcacccattgtgatatgagacataataatatctccccaggat

SEQ ID NO: 65007 - DNA, 122 bp, Homo sapiens
tgcattgtaggagagggactaagtgctagagactatgtcgctttcctgagctaccgagagcgctcgtgaactggaatcaactgcttcagggaaaaagaaaaaaaaaaaaaaaagacttgcct

SEQ ID NO: 65008 - DNA, 122 bp, Homo sapiens
gtcacaagaaacttagataaacctaagttacaccctcttgtaaattcctatattgtaagccggtcacgagatgatatgtggtaaagttaactgacaagcaaccccagggtctctctccccca

SEQ ID NO: 65009 - DNA, 122 bp, Homo sapiens
ggcggagttctgtcgccgggatccttccgctgggctcagccgtttccggagtctgcgctgcgcccggttccgccattgcggctctcctggcccctggagcctccgcccccgacccgagctct

SEQ ID NO: 65010 - DNA, 122 bp, Homo sapiens
aggggctgcacccctccccagaaaccctcctggcttgggatgaggggccccaggccccaccgaatgggttccagcgctgttgagtggctctggttctgttgttggagacctgagccctggct

SEQ ID NO: 65011 - DNA, 122 bp, Homo sapiens
gtcgccttggctccatgggggccgccatctttgagtatctgacgtacacaaggcaaagggcgcgttttggcgctggtgaccgggggtgaccgggggtgaccggggatggccgggaagatgaa

SEQ ID NO: 65012 - DNA, 122 bp, Homo sapiens
ttctgtgagcaaaggaaaaaagagattcccctcactgtgactaaaccgggcaggtcagcccgagggtcccagaggcactgctgtccactcagcctcttgggctgaggccctggagaggaggt

SEQ ID NO: 65013 - DNA, 122 bp, Homo sapiens
cttctcttgttacagcatttatctcaattgtattggtgttgcccctttaataatctctgccggcactagactgtcagctccatcagggcaggggccaggtaagtcctgcccttctgcatttc

SEQ ID NO: 65014 - DNA, 122 bp, Homo sapiens
ctgtccataggtaaggcagctgggctcacagccccttttttctgagagtgggagccaagtcgggccgcaggtgatatcatcttcgcagttggcgaacctggagatggcgagtggagaggtgg

SEQ ID NO: 65015 - DNA, 122 bp, Homo sapiens
atcccacacttacagtgttatttgttaatcatctacttctctaacagtgataaaatcttgcgaatatactaaatgatgcacttgccatgtcagagtaatccctagagaaggagtgccgaagt

SEQ ID NO: 65016 - DNA, 122 bp, Homo sapiens
aactatctttcagaaatgaaggagaaattaagatattcccagataaactaaagctgagcccgttagttgctagcactgggagaaacactaaagagagtcgtttgggctgaaagtgaaagaca

SEQ ID NO: 65017 - DNA, 122 bp, Homo sapiens
cgtacatggcgagaccacagacacggcgagacaacagacatagtgagaccacacacacgacgagaccatggacatggtgaggccatggacatgagaccacagaggcagtagggcacgaacat

SEQ ID NO: 65018 - DNA, 122 bp, Homo sapiens
cagaccggcgagagtcaccagccaccagttctggtttgggggtggggagcttcttgggggcggatagagggggtatataaggagatggggaggaaaaggactgggaaagagggagggaaggg

SEQ ID NO: 65019 - DNA, 122 bp, Homo sapiens
ctcaaagagccggcccgatcatcgcctcctagaatacccagctcaacgtctacctggagtcggctctacaggacgcgctcatctcaaacccagagctcaggcttttagggcagagagcgaga

SEQ ID NO: 65020 - DNA, 122 bp, Homo sapiens
acccacaccgggccctggtgcgggtcgaaggccacaggctgagaatttgctgggaggggtcgggaagaagcgtaggagcgctgaccgcctccccttcctctttctctgtctttgcgggcggc

SEQ ID NO: 65021 - DNA, 122 bp, Homo sapiens
tcttgaacacttactcagtgtttcttagattctcattgttttgatgttgttgaaggatatcggcctgttgtatagaatgtccctcaatttgggtttatcatttgttcctcataattggattc

SEQ ID NO: 65022 - DNA, 122 bp, Homo sapiens
cccctgaccgccctttctgcccttgccactggccaagccactatctatctccttccccagcgctgaccattcagactatgagaacattccaaccatgaactcagactatgagaatatccaga

SEQ ID NO: 65023 - DNA, 122 bp, Homo sapiens
accagtagccactatcaccagccccgggcagaccactaagaactgtggaggtgcgcggggcggctcagggctggcgcatttggtgaggagctcagacaacgaggcccttagggtcggcttag

SEQ ID NO: 65024 - DNA, 122 bp, Homo sapiens
cctgaggagagacggtctggaagggccgaaaccctggaattctgggaaatagtgtaccggcgttggttcgcggtgcctcctgggaaatgtcgtttttccccttaagacaaagcaagcaccct

SEQ ID NO: 65025 - DNA, 122 bp, Homo sapiens
gctttctgttccatggaatgcaaccctcagtcaggacggcacccagctgtccccagatttcgcaaaaccagcctggcttttgtcttctgttgagtcagcccaggacacaaggggccagatgt

SEQ ID NO: 65026 - DNA, 122 bp, Homo sapiens
gaggctattatcgcacattgtgcggtggatatagtcacgcgctgggtcgtagtagcgtgtcgtttatttcagtccagctcactcttggtagaatccctttattcgttttgttgtttttgata

SEQ ID NO: 65027 - DNA, 122 bp, Homo sapiens
ggtgatgtggatctgccttggggcaggaaaggggaaggggaggtcaggcctagtggctcacgcctgtaatggcagcactttgggaggcagagtcatgtggatcacctgaggtgaggagttca

SEQ ID NO: 65028 - DNA, 122 bp, Homo sapiens
aaacacacatgcagactgaaaacgagagaaccacggcccctgctacagcgaacactgccacggaatggtgtctgcggaagaccaatatcataaggtggaaaaataaaggaaataaaagagca

SEQ ID NO: 65029 - DNA, 122 bp, Homo sapiens
gttgcaaggtggggagggggcgggcgcggtcctgtcgctagtgactgcagatttcctctgcggggcacttcctacggcctttgatctttccccaggaactgccgagggccgcgtttgcctct

SEQ ID NO: 65030 - DNA, 122 bp, Homo sapiens
agtggagctacatttgcagggagagagaagagcgaaaaattggcgcgcagagctgtaaagcgtttttctccaggtcacaccgcagcctgtaaatttgtgacacttggaccgattatgggaca

SEQ ID NO: 65031 - DNA, 122 bp, Homo sapiens
tcctagatgcctctgagggtggttttggtgcagaagggaccgtacagatctgtctgagggcggggaagggaaggacacctagcactaccttgaaaccacttgctgaaaccgtaaccctgcaa

SEQ ID NO: 65032 - DNA, 122 bp, Homo sapiens
atttcatatcagtttcttcataaataaatggcagctgtctgcctctgcatcgtatcagtgcgcatcagggctgccctgggtcttgtagctgagaggcaccactcacaatgtgctgtgcccca

SEQ ID NO: 65033 - DNA, 122 bp, Homo sapiens
gtttccataggtggtgcttcaaatgccattatttctcactgaatatttaaagagatccctcggcaaagatggatctgcgcactcctggggtgtgagcggctcgcatctcccagaccccgggg

SEQ ID NO: 65034 - DNA, 122 bp, Homo sapiens
cccatcctacctgctgcgccccgcgccgcgccccgcaccccgcccgccacggcctgcgtccgccaccggaagcgccctcctaatccccgcagcgccaccgccattgccgccatcgtcgtggg

SEQ ID NO: 65035 - DNA, 122 bp, Homo sapiens
ggattggtggatggtcaagccccttctctttagcccctcctacaggcgttccgcccccttcgattggtctcgcaagttgattggtcaatcccctggtgctagtcctagtcttggttcggacc

SEQ ID NO: 65036 - DNA, 122 bp, Homo sapiens
gagacactaacagaactgggatgggcgatgttggctgaacggatccacctattattagtgcgcggggattggctccttggcgcagcgtacccgaggtggagccaatcaggatgctggggctc

SEQ ID NO: 65037 - DNA, 122 bp, Homo sapiens
gaatataatgtggcagcaggacgactcctgcagtgaacacaaagggcactgaactcctaacgcttttccccagtggcaagcagcaatggagaaatcagggttccatcctctctgcccatagc

SEQ ID NO: 65038 - DNA, 122 bp, Homo sapiens
gatggaatatcctaaaagatctgcctggctgcctcaggactcatttcttttcaggggagtcgggtgcagacaatattacttgagcacaatagtgccggatctctccttgagtggatcttaac

SEQ ID NO: 65039 - DNA, 122 bp, Homo sapiens
atgactcaggggaaggcatttcagggtaattctgattaatctaactcagtggttctcaatcgtagctgctcaataaaatcacctgggggaactgttaaagcagtcagggttaagaaactata

SEQ ID NO: 65040 - DNA, 122 bp, Homo sapiens
gttgaaggtagtttcatggatgccgcgggattccatgcccaggaaggaaggctggaagagcgcctcagggcagcagaactgcttttgccgatgatgatgacctggccgtcgggcagcttgta

SEQ ID NO: 65041 - DNA, 122 bp, Homo sapiens
tggataataagtcatgcctcgtgagtaaccagtgttacccggtggataagtgttgcctcgcggttaaccactcttacacagtggataataagtgttgagttgcgggtaaccactgttacttg

SEQ ID NO: 65042 - DNA, 122 bp, Homo sapiens
cgccattggctcggagttcctgggaggcaggccgagggccggatcccagttctgattggccgttgctcaacacgtgtagtggggatgctctctgattggatgcaggattggcgggaaggcag

SEQ ID NO: 65043 - DNA, 122 bp, Homo sapiens
ccggctggccggtccaccccgtcccggccccgcgcgtgcccccagcgtggggctaacgggcgccttgtctgtgtatttctattttgcagcagtaccatcccactgatatcacgggcccgctc

SEQ ID NO: 65044 - DNA, 122 bp, Homo sapiens
acacagcctcagatccccgtcaacttccactgaataagggagatggggaggaggtctcagcggttggcctcctgcaagcccagatgcctgccagcctgggcctgcttccttagcgctgtgag

SEQ ID NO: 65045 - DNA, 122 bp, Homo sapiens
tcgcacacgcgcgcactcgcagcctgtctgaagtgcagaggttcaggcggccaagggacccgcgccggtttccgcgggcgacctgcaaatcctgcccggggcccggcaggcgctgcgtcccg

SEQ ID NO: 65046 - DNA, 122 bp, Homo sapiens
gcagcaaaaaatatagtcaatcccatatggagtcagtttccttacagtctacctcagaggcgatttctaaagctgagaaaccatgtctgctgtggagtctcattggaggcttttaaaaaccc

SEQ ID NO: 65047 - DNA, 122 bp, Homo sapiens
gaaactcacctgtcaggctgccagctctgtgttttgcattgagtggcctctcatacccaccggcctacataaaccaccctgggtttcagcttccggattgctgaaggtctgggtggtagggt

SEQ ID NO: 65048 - DNA, 122 bp, Homo sapiens
gccagctcctcgcccaggatgcccaccctgcgcgccagcccgtccagcaggcccgcgtggcgcctcagcagcagctggctactgttgctctccacctgcagctggtagagctccagctgcgc

SEQ ID NO: 65049 - DNA, 122 bp, Homo sapiens
ttcccacttgggatggcagtgggcagatctcagtggcatcccatcccccaaaccaaccaacgcacatcatcactttgtacttttgcttttgtaatactgggattaaaaaacaaaccaactgc

SEQ ID NO: 65050 - DNA, 122 bp, Homo sapiens
aaaaatggttatacacattaagttagagccattttgtgaaaactaattcagttttcttcccgttgcttggtacatacacactattcagtgaaatattagcttttattcaaggcatgacatag

SEQ ID NO: 65051 - DNA, 122 bp, Homo sapiens
gctcatgtttggctgatgtaatttcccaaggcaaggacaagactgacaggcaggaacgcccggggaggtccttgggggagatgaacatcctctttttatcttcaaagcaaatgttcaggaag

SEQ ID NO: 65052 - DNA, 122 bp, Homo sapiens
ctttagacgctaaaggcctgaggccactgcagctgccgcagctctccctctgaggtcttgcgcccgaggtaggggcggcttttatttttttttttaatccttaaaggcggagacggcggcgg

SEQ ID NO: 65053 - DNA, 122 bp, Homo sapiens
acttatctgagatgcctaactcactgcatctaattagtcaccactccctggccttaaccacgcggagggaagaggaaacagcaggagctactcggagcagctgcccgggacctgaggcgcgc

SEQ ID NO: 65054 - DNA, 122 bp, Homo sapiens
ttgagggtacggccaacctgggaccctacttcgaggggctccgcaagcactacctgctcccggccatcgagtgagtgctgtttccgcgactctaaccccgccctcccacttcagtttcgcac

SEQ ID NO: 65055 - DNA, 122 bp, Homo sapiens
tcctcagatcccaacttaaaatcccttcctctgggaagctggttccaattctggactggtcgggctccttccctgctctgtgcccgctgggacagtagtcttcagtcatacatccactcagc

SEQ ID NO: 65056 - DNA, 122 bp, Homo sapiens
ttaactctcccgtgtccgcggcgtaaagggctgctgcagagggctggaggggggagagcgcggagcgtcctcagagcctcagtacttctgaccccaataccttgccaccctcctcccctgcc

SEQ ID NO: 65057 - DNA, 122 bp, Homo sapiens
tgacaccctaaggctgcgtctctggccctggggtgggagcgctttctacatgtgctctggcggccctggaggccatgtgaggtcggacagttcacaaaaccccatttagggcagtcgtcatt

SEQ ID NO: 65058 - DNA, 122 bp, Homo sapiens
tataaaatctccatcaccccacttatttttccttggctctctccagtttactaaaatgcacggtctttgggaattgagtttttctggagcacccttcttgtgaagcaacagaggtgacccga

SEQ ID NO: 65059 - DNA, 122 bp, Homo sapiens
ggagctgccggctagtcccacacattgcacccgcattcctcagcccttgggtggttgatgcgactgggtgccgtggagcagggggtggcgcttgttgaggaggctcgggctgcgcaggagcc

SEQ ID NO: 65060 - DNA, 122 bp, Homo sapiens
cagagagtttccaagtgtgaggactggacatgccgctgccggctccgagacgggggcccacgggcaaggacagagacaggcctctacttgctaaggctgggccctggctgacagccagccag

SEQ ID NO: 65061 - DNA, 122 bp, Homo sapiens
gcccccgccccgcagcggcaccggcagcgtcactgccctgcgtcctggggggccgggcctcgagcatcctccagaagtgcagggccgctactgcgtctcagcccccatagcctcatccgcca

SEQ ID NO: 65062 - DNA, 122 bp, Homo sapiens
tccgaagactccagattccgagagttgcggaaacgctacgaggacctgctaaccaggctgcgggccaaccagagctgggaagattcgaacaccgacctcgtcccggcccctgcagtccggat

SEQ ID NO: 65063 - DNA, 122 bp, Homo sapiens
cgtctcacctccgcctaccgctctttcttttctaaacttggggcttccccactccatcgccgctaggtaaccataaaggggcagattttgccaaatatgtagcatctagggacatcagcctg

SEQ ID NO: 65064 - DNA, 122 bp, Homo sapiens
ttgcagaacaggaaacagacccagggagaagtttagtccccccagatctcattggccctccgcacaagccaagccacagccactcctgccacacaatcggattgctttcagcactcgcagcc

SEQ ID NO: 65065 - DNA, 122 bp, Homo sapiens
tcctccccaattaatgatttctattagctgctggctttgtcttctctcctttttgtggcacgctccaggtgaccggcttatctctcagcgcccgggttgggatatgctgtggacagactcaa

SEQ ID NO: 65066 - DNA, 122 bp, Homo sapiens
gcaggagcgagctaccggccggaggacacggggggacgctgggaactcggggtgaagggacgggactcagagtttcgtcagattgggggcggggagaggaggcccgggtccgaggatggaag

SEQ ID NO: 65067 - DNA, 122 bp, Homo sapiens
tggccccaccctcatattttattgtggccccggcccataggttgggcttaagcctctggccggcaccagtcacccacagccctgtgctccttcaactaggaatcgagctgccaggtcctgtt

SEQ ID NO: 65068 - DNA, 122 bp, Homo sapiens
gacagtctccaggtaggataatccgtcacactagatgcatatagcttcatgcaagaagagcgactgttgcgctgtcttctaccccctttggccgcgatcccgtgacaatgccggcatccggg

SEQ ID NO: 65069 - DNA, 122 bp, Homo sapiens
tggagaaataaatcctgcccgcagcagcagcagctacaattacggctctgtttttgcgagcgcatgagggacagtgtccctgccgctcttaaatgacaggcgtctattaaagatagcttttg

SEQ ID NO: 65070 - DNA, 122 bp, Homo sapiens
gctgagcacgctctggggctctcccccccggcccacgctctcctgagaggccactcgctccggggctaatcatggttaatcccacatgatcctcgcctgacatccagtccccctcctcaggc

SEQ ID NO: 65071 - DNA, 122 bp, Homo sapiens
gtcaggccgtaaggttcagggaccctgagccagcgccgagggtacccagctggcaccgagcgtgccgtgcagcctcacccagccgtagacctcctcgccctcacccggccgtagacctcctc

SEQ ID NO: 65072 - DNA, 122 bp, Homo sapiens
gacatcatctttggctgcagcacagaagacgccggggcaggacgctaagccctggagccccgcgggccggccacccagctcgccgggagtccgcggccctgggtctgccttccgccagaggc

SEQ ID NO: 65073 - DNA, 122 bp, Homo sapiens
agggttggcaggctggcagtggaacccctgttgtctgtgccctgtggggaaaccctgtaacgtgcatgtcatcacccacagagtggtctggtgaaggatggtccacctgaatcagattccac

SEQ ID NO: 65074 - DNA, 122 bp, Homo sapiens
gaggcagccgactggctttttatattttcattttttaaaaaagtaaacaatagtatccctcgatgatgggaagttctcaggtttcacctttatagtctgaaagtacacacagaatgccacct

SEQ ID NO: 65075 - DNA, 122 bp, Homo sapiens
actacaagcaagaaacacctgtgctacacatccaaggaatgaaatgactttattctttgtcgtaaaatctactaacatatttggggtaataactgaggaatagcaggcatccacagaagaca

SEQ ID NO: 65076 - DNA, 122 bp, Homo sapiens
gcggggcgaggaggcggcagcgcgtttaagtgacgtcttggctgtccgcgccggcagaggcgagggttctggggtttctgggactgtctggtgtgttttctgtctattgaaccctttccttt

SEQ ID NO: 65077 - DNA, 122 bp, Homo sapiens
gcttgcgtgtggtggtgagcgcagcgccgaggatgaggaggtgcaacagcggctccgggccgccgccgtcgctgctgctgctgctgctgtggctgctcgcggttcccggcgctaacgcggcc

SEQ ID NO: 65078 - DNA, 122 bp, Homo sapiens
tatagcaatggctgtttaaatgagtctcctttgttctcaaacagcatatctttaacttatcgaagagtagctagtgggagtgggcttaactaggagcctgaacgtctgtccacatttcaatg

SEQ ID NO: 65079 - DNA, 122 bp, Homo sapiens
gcttcttcgtgctctgggaagcagggaaggcaggcagggagaccagcagttgtaatccagcgctagaacaggaaaaattgataaactgagaatacagaggaaactgagaattattgtcccca

SEQ ID NO: 65080 - DNA, 122 bp, Homo sapiens
cggaaacttgaatgagttagcccgtgctttgaacttaggagttctaatcaactttgcaggcgaggacactgaaatagttcaagactttgttttcagtgagtctctctggtctcttctctttc

SEQ ID NO: 65081 - DNA, 122 bp, Homo sapiens
agtactctttttcttccagttgagtatgaataaactgagaaaatattgcctgctagaggtcgtcacgaaacttgctttgctgaagagataagaataattttaagtattccattaatgtttag

SEQ ID NO: 65082 - DNA, 122 bp, Homo sapiens
agagggagaggccgagcgcccgagttaggctggtggatgcgatgcggggcttggaagcggcgctagacggtgcctgtcagctctggccgcaaccctcagttgtaaaatgaggctgatagtgc

SEQ ID NO: 65083 - DNA, 122 bp, Homo sapiens
gacacacagtaggtaatgcttactggatattaatctaaatcttgattgagcagatagatgcgcatgctattcttggaaaagatagaacaattaccttggctgcccatgtcctatctttccag

SEQ ID NO: 65084 - DNA, 122 bp, Homo sapiens
caggtcagcagcctccttaggcccaccgttgctcggggttggtgctggaaggtggtcagacgtgggaggcggagctgctcagacacagcccttgtgggtgtgaggaggctcctggcgcgggt

SEQ ID NO: 65085 - DNA, 122 bp, Homo sapiens
cccaccgccagtgcgccgggcaggttgaaaactgcacccacgtttgcagcctctgctctccgcaggagacaggaatccagggctttgccgtcgtcatagcaaccagaagttccgcggtcccc

SEQ ID NO: 65086 - DNA, 122 bp, Homo sapiens
tgcgcccggtagtttggaagtcaggcttcgagacattctcaaaggtacagagcccacgctcgactacgagatgccaagcgcaacctgcctgggttgtttgacccgagttttattcagggcat

SEQ ID NO: 65087 - DNA, 122 bp, Homo sapiens
ttggcatcatcccaggtgaagcctctcctgttttgcctccacatgtcagcaaatcatgcccgatgtctggcttgaacctcttgctatgatctgggcccacttccttctgtctcatcccaaag

SEQ ID NO: 65088 - DNA, 122 bp, Homo sapiens
tgcccatctctgtggcccgcttgtgccccgtgccgctgggccgactaagagcctcgggctcgcacctcccagtacaacctagggacgtcaggggtcctgggacccacgagccgctctctgcc

SEQ ID NO: 65089 - DNA, 122 bp, Homo sapiens
agctggagcctggatggttgggagggactgtgtgcatcagagcagaactgggggaaatggcgaaagcaaaagccaggaagtttaggtctgggccgcttggaagagggagaaaggaccggaac

SEQ ID NO: 65090 - DNA, 122 bp, Homo sapiens
ccgcggccgcccccgccgtctcctccccttggtccgagcgagcgtctcagcagcggccgccgcagtaggtggccagacgcagcatgaggaggagatgccagacacaaaagccggcccggagg

SEQ ID NO: 65091 - DNA, 122 bp, Homo sapiens
tgcagcaggacaggaggcaggtgtgtatgggtgaaattattttgacaccctagagttaaccgggccttagagtcagtacattggttcaagtaacaaatatcaaagcagaactcttagtgtgg

SEQ ID NO: 65092 - DNA, 122 bp, Homo sapiens
cagtagctcctcccacttcccgtggttttcggttgaaccgaaacctggccgttggctgagcgagcgcggggtgtttgggatgcggcacggcgagggggagcaggcttggctcgggcgtaggg

SEQ ID NO: 65093 - DNA, 122 bp, Homo sapiens
gaatttcaaaaacttactataaaaaagttaacatattgtattagtaattttttcttttggcgacatgttgagatgatcatattttgaacatattggattaaatatattaaaatgaagttcat

SEQ ID NO: 65094 - DNA, 122 bp, Homo sapiens
cgcggctgggtctccgcccctccctcccgggctgcaggcggcggcatcacacggggcgggcggaagcctaaccagtgtgagactatttttagcaccgtggccagggtgtgaatgtctacaga

SEQ ID NO: 65095 - DNA, 122 bp, Homo sapiens
ccctcgagaaccacaagctcctccccctatgtttcccgctcccccggagtccagaagccccgcccctggctggaacttcacgccctccggacggattgcccctatttctccattttcccgct

SEQ ID NO: 65096 - DNA, 122 bp, Homo sapiens
tgacctaatgggcgctggagttcgcaaaacgtgacccggaaattggtcacgagcaggcgccgtgggcttgtggacgcctaacttgcgcgctgagatttccggcgtgggagcagaggtctgag

SEQ ID NO: 65097 - DNA, 122 bp, Homo sapiens
ggggagctgtgacccagggattggtgaccgtgggctcactcagtgatgacgacaggaagacggatgtttttcacacaagtgcctgaagagaaaatgcacattaatttttttttctcttggat

SEQ ID NO: 65098 - DNA, 122 bp, Homo sapiens
caaaataagaatcagtgagtcgtctaggaaaagcatcgtaactgagtgttggaaattggacgtatgggtgaggagaccacatcctgtttttgcaagtttgtgaattgatttgcaaacgtggt

SEQ ID NO: 65099 - DNA, 122 bp, Homo sapiens
ctgcttcttctctccgagtgccgggttacagtgttaacaagccttgggaagggacctcggcgcctcgcgctggctgtgccccagtgccttcgcgtggtggcggcttgctcatgcttccgagg

SEQ ID NO: 65100 - DNA, 122 bp, Homo sapiens
gagggtgaaaggagggaggagaagggcggggcacggaggcccgagcgagggacaagactccgactccagctctgacttttttcgcggctctcggtaagtttccagtccgttattcagggctg

SEQ ID NO: 65101 - DNA, 122 bp, Homo sapiens
tcaatattcgagttcttttggaacactctggaaagatgatatgtctttatataaagtccccgttctgtgccaatgcaccaactattatacattgccccatagcactttcaagattttctaac

SEQ ID NO: 65102 - DNA, 122 bp, Homo sapiens
tccttttcagatattattgatcacccttttgttatcaacacacagagtaatcctatctgtcggttgacaaccttcagtgatttttagtagaaagtggtggagagaagacctgggattcaatc

SEQ ID NO: 65103 - DNA, 122 bp, Homo sapiens
aattttccctgacataaaatatatatgttcatagtacaaatgcacgcaaatatttgtggccgaatctcggcaacccgctggaaaggattaaacgtgcggttgccgtgactaaacgcattcat

SEQ ID NO: 65104 - DNA, 122 bp, Homo sapiens
aggggaggtagtgccggagacccggtgctcggaggctgcccggagccgcgaagggaaatgcgctttgcctcagatttgaaggaaatccgagtggctcttgtgtgaaatcacgcagagctcct

SEQ ID NO: 65105 - DNA, 122 bp, Homo sapiens
gacctgccggcgtctgtcggtgtgctcttccactggcgtgttccccttgagtcctctggacgtccagccgcttgtgtctctgcccgctagggcgttgggtttttatgggtacaggatggggg

SEQ ID NO: 65106 - DNA, 122 bp, Homo sapiens
caaaacaaaacagaaggctaaaatttgcaggaaaaagaaaatcagtaaaccgggaatcctcggactggattgtaagcaagatttcaatgaataagaagctgaaggtattaaggctgtgatat

SEQ ID NO: 65107 - DNA, 122 bp, Homo sapiens
cctcgtgcctgcccagcccctcctcagcctctgcagagctgggccgggaagagccccccgcgctgtgcccactgtggcccgcgttgcaccctcaggctgcacaaaggccacgtgttacctgt

SEQ ID NO: 65108 - DNA, 122 bp, Homo sapiens
cctggtgtcaaaaactaaaaaccatctcgaatcggcgcccccgccacaagcattttttctcgtcggcagctcagttttcagctgtgcttagtctggtttccgctcctctgggttttctcgtt

SEQ ID NO: 65109 - DNA, 122 bp, Homo sapiens
cgggctacagccatgagctgactgagcccgctttttcatggagcctcattttacatggaacggcacccaacagacaaatcatggttattgagacttaggtctttgacagacacctttgcaaa

SEQ ID NO: 65110 - DNA, 122 bp, Homo sapiens
aagggactgtaactcctgtctcaggaatggggatagatgggaggttcttgaagccccaggcgaagctggtacctctggctacagcttgctctctgagacctggggcttcactcggatcacgc

SEQ ID NO: 65111 - DNA, 122 bp, Homo sapiens
tggcagatcagaggcaggcgggccaggggctctggtttacacaccaaacctccagggcttcggctccaggggccagcagctgggtccaccctgagggagagtccccaggtgagcgagaagct

SEQ ID NO: 65112 - DNA, 122 bp, Homo sapiens
agtcaccaagaacttccaagctgctgcattcagtggaagtttgttctcatctcccctgaccgagcagcagcatccgataaagttggccattcctttttttttttccacacacttctttggct

SEQ ID NO: 65113 - DNA, 122 bp, Homo sapiens
gaagaacggatcacttaaattcagagtggcatttttatttctgagggagctgggctctcacggaacgtgctggagtgacagcctggaagagcgaaagccgccccccctcccgcttccccgca

SEQ ID NO: 65114 - DNA, 122 bp, Homo sapiens
tcccactattagaatactagtgaggtaggtgtggccacactgtgatggcaaattgagcttcggtcacaaacatgccttactgttccccccagtctactgacatcagcttcctttacatagcg

SEQ ID NO: 65115 - DNA, 122 bp, Homo sapiens
tgctacccccctccccgtaggggcggtggggggatgttgtctttgtgcacagcttgcagccgaactcagggcagctttcagttgctgctgggctggcccaccgggtgcccaggattcagttg

SEQ ID NO: 65116 - DNA, 122 bp, Homo sapiens
cggcgacccctactctgtggtggttctgctgcagggctacgcggagccagagggtgtgggcgatgccgtgcgcgccgacggctccgtgaccctggtcctaccccagacccggggcccggcct

SEQ ID NO: 65117 - DNA, 122 bp, Homo sapiens
gaggacaggttgcctgctcgagaccatatagctcctaagtaccagagtcaatgtttgaaccgagtcttacctgcagtaggagaattatctcagcatgactttgaaactctttctgtgagctg

SEQ ID NO: 65118 - DNA, 122 bp, Homo sapiens
ctgtgggtgggggaacccggagaggggaggggagaggatggggaaggagaggggaccgtgcggctcccggaaccgtctgcccagagcggcagcgcctcccggtcactacaacaacggcggcc

SEQ ID NO: 65119 - DNA, 122 bp, Homo sapiens
caaggcggtcaccaagtacaccagctccaagtaaactagttacctgggtaaaagcgctaacgacccaaaggctcttctaagagccacccatgttgtcatttaaagatctgtaattttccaga

SEQ ID NO: 65120 - DNA, 122 bp, Homo sapiens
tccgtggccgtgcggccggctagaggctgcggcccagcgcggagcaggggggctggcaggcgtcggggcggtcgggccggtcccgcccgccccttcccctccacaggcccgccccggggcct

SEQ ID NO: 65121 - DNA, 122 bp, Homo sapiens
gctgcgccctggcctgaggggagagagaccccatcagcggtgcgagcgggggtttggcctcgctggactttgtgttccccacctaggaaaagaggaaaagggggcagagtgtctattggttc

SEQ ID NO: 65122 - DNA, 122 bp, Homo sapiens
atgtctgtacacaccacagcagagaaggaacatgtcacaatcagctaaggctgaggataacgatgggagcaaggtcccttgtagatgacgaggggcaggatctaatgcccaaaaggcagggt

SEQ ID NO: 65123 - DNA, 122 bp, Homo sapiens
gctcccaaagcgagaacgtgaccctgtcctgcacccagccctccactccagggcctccgccggtacacatcttcggcctcagcctaacgcactctagcaggcacagaccgccacgcccccac

SEQ ID NO: 65124 - DNA, 122 bp, Homo sapiens
gttgtacagtgcttccaccgagaaagcacctacccaatgaaacgcctgtggcagaaaaaccgagcccaagcccttccagcgaaagtgctgaaagagcgcctcctcggccaatcactgggctg

SEQ ID NO: 65125 - DNA, 122 bp, Homo sapiens
cgcgggctgcaggtgtcccggcctctggcggcgccggtgcggcccggaggtgggagcccgcggagccactgcagtagctggagtcccgccgagtccccagccccaaggcagggcaggagcgc

SEQ ID NO: 65126 - DNA, 122 bp, Homo sapiens
tccagttcagtggagcaatgttcgtcaagccatgacctatagaaaagagtttaggatgcacgtacaggcctgagacttgaacttgcttctaataatgaggcagtgaccagcaaggctgactt

SEQ ID NO: 65127 - DNA, 122 bp, Homo sapiens
agtttactcttcataaaaaccaagcatttgtgtgcactggtcctgcgggagcctggtgggcgcggccatggcgcgcgcttacctggccggttgaagtccatggacggctgtttgcagtcctg

SEQ ID NO: 65128 - DNA, 122 bp, Homo sapiens
gttggatgggtgggctgtgaggaaagaagatgagcctgcatagcgtgggtgggtctcctccgatccgttgaaggcctgactagaacagagataacaccctgcaccaggaaggaactctgcgt

SEQ ID NO: 65129 - DNA, 122 bp, Homo sapiens
aacgccagcagtggacccagggaagcgcccccgcagcggggctggcagctcagggggatacgcagctctgcgcagcgacgcgctctccccgcgaacaaaagggggggaccctccgggctgag

SEQ ID NO: 65130 - DNA, 122 bp, Homo sapiens
acactagaccatacaggtcagaacaaactggaatggagtcacttgtgttaactgccacatcgtcaagctgaacagggaaacaggtcagttttccaaaaaacagaagatttgagtaagcaaga

SEQ ID NO: 65131 - DNA, 122 bp, Homo sapiens
ctcccctttggcattttgaaggaattcatccccagtttttgctggtagccgggagggaaccgtgctctccccctgaggaaggccctttggagtaactgcagcaatgagtgcccgggctgtgc

SEQ ID NO: 65132 - DNA, 122 bp, Homo sapiens
ctcccccaagccccgggggctgttgttaacggcgccaacatgggtctgagtaacaaaagacgcctgtccagggggtgaatgagtttggactccccactgccaagtatcccccgcgcgcccaa

SEQ ID NO: 65133 - DNA, 122 bp, Homo sapiens
tccctacctttccaaactttggccgcctggactccaccttgtagagccacatgcccgcctcgccccaagggcagcactcggacagagcagtgccccttctagtgcgccacccacatgggtgc

SEQ ID NO: 65134 - DNA, 122 bp, Homo sapiens
cccctgggaaggtggacacgccatacttaattcacggcaggagtgaggtgctggagcccacggcctgggcctccccgccgggccctgccgacctccatgggaatagtgcaggcccagggctc

SEQ ID NO: 65135 - DNA, 122 bp, Homo sapiens
cagccacctctgtcgagagatgcaatttaccaccagctcggaggtcaccgtagaggaacccggccgcctgcaggcgcttttctgctgctgcaaaaaccactgaaagggccactttgtgagcc

SEQ ID NO: 65136 - DNA, 122 bp, Homo sapiens
gctttgtctcctgcgccagatacccacccattcccatggccacgagccctagcggccctgcgggactctatagccaccccaacagaaggaaggggctggcatccagtaccgaatcctcgaac

SEQ ID NO: 65137 - DNA, 122 bp, Homo sapiens
tctccccacacaaagctcagtgactgctgtcagctcaccttggctcatgttccgtttccacgcctccatgctggccaaccgtcctttctgctttgacacctttgatcaggttacattcaggt

SEQ ID NO: 65138 - DNA, 122 bp, Homo sapiens
ggttgctcggatgaggtttgtgtgggtgcgggtgaggtcagctcgcgacctgggctcccccggagaggaaagctgcgggtggagagagcgcagggagtttcagggcccaggcactggctttt

SEQ ID NO: 65139 - DNA, 122 bp, Homo sapiens
tctctccacgtgaaccacacgtctggagcacagacaggcctctcaaggtcattgatcttacgcatttactgtttaccgaacaaatgtctgactgtgtactcgggtgtactccgcagcattgt

SEQ ID NO: 65140 - DNA, 122 bp, Homo sapiens
ctccacctatcccagccgagcggagtgacaccctcccctctttccttctctactgatcttcgccttccgcccgccccacagccgcccaatggagggctgaagtaggacagatctcgccaatc

SEQ ID NO: 65141 - DNA, 122 bp, Homo sapiens
cagcgggctcgcccttgtccttgcagcgggccccggatgtgggcctcaggcggggacaggcgcccgcagggaggcctccagggccgctatgcacctgcgcgcggcaggcggcccggaccaca

SEQ ID NO: 65142 - DNA, 122 bp, Homo sapiens
ggttgtgacgtctctgggagtgacgcgccggcgcgggcgcggtgcgggtgagctggtcggcgcttggcgctgcctggaccaatcgcttggcagcgcatctgaagctgttgtgatcgctgggg

SEQ ID NO: 65143 - DNA, 122 bp, Homo sapiens
ctctctgggtcacagactccacctggaactggcagcgtggcctccaggcttcaggccattcgtggcttgaaggtggggtttcacagaaaacccaccccttcccacgtaggaacctgtctgcc

SEQ ID NO: 65144 - DNA, 122 bp, Homo sapiens
cggccctgcccttttcctcctcggccaaggaacccagtgagtcacaaaattccactggggcgggctctgtgccaagctgagtgatggtgggaggctctggctctgctcccatcccctgctct

SEQ ID NO: 65145 - DNA, 122 bp, Homo sapiens
acatgcactgtctcacagaggaatgactcacaaggtagatattaatcttcagattttgcacggcagttatgcctaaattaaaatattatctaaaaataatatctaacactcaaatggttaaa

SEQ ID NO: 65146 - DNA, 122 bp, Homo sapiens
tgcagtgtatttcttactgtgctttaaagaggaacacgttttaagaacccccgcgcggggcggagcagggcggagtccccggcgggaagggacccgagacctcggctgcgcctgcgccgacg

SEQ ID NO: 65147 - DNA, 122 bp, Homo sapiens
gtgcccccaccctctctgttaatgcctctattgtgtaaaaacgtctttagataaatttgtcgggcttggagcctggggtggccatttctttgcactttatctactacaatccaagaccagca

SEQ ID NO: 65148 - DNA, 122 bp, Homo sapiens
gctggcgtagggccgccatgttgcagcaggtgaggggctgagggctcgctgggagggtggcggctcctgggactggctctgcaggttccgtgggactggagcccgcgtcccccgcgcccgct

SEQ ID NO: 65149 - DNA, 122 bp, Homo sapiens
tcagtttgaaagagaagttgagaaagcggccgaggggcgaatttggctgcactacacgctcgccacaaagaggaagggccgccggccgccggggccgagtgcgcttccagcccaggcggagc

SEQ ID NO: 65150 - DNA, 122 bp, Homo sapiens
aagaggaagaaacaaagggccaaaaaaccccaaaccttaaatcaggtcctgagtcagatacgctgtaacaaattctgcttcaagtttaatattcttgttttgatgatgtttaaaaaaagaaa

SEQ ID NO: 65151 - DNA, 122 bp, Homo sapiens
agctcccaattaatagttgacagtgaataagtatgtaaataaggaatagtccaacagcatcgagatagatcctgaacaggcgctgttagaatagatacaacctagccgggcacagtggctca

SEQ ID NO: 65152 - DNA, 122 bp, Homo sapiens
ccttactcccactgagcccgcagggagtaacgcagtaaacaaacctggaagccttccccgcgtgggaggtgggtacctgtttttatgggaggctgttcaggtttcttaactgctgtgtagat

SEQ ID NO: 65153 - DNA, 122 bp, Homo sapiens
aggatttctaagcttagagtgcctcctatttaaagaagacccctaggaaagcacagcacacgctagatccaggtcatccacttctcttaagtgatcttcagagatcaaaaggtaaaggccct

SEQ ID NO: 65154 - DNA, 122 bp, Homo sapiens
gcctgattttgtcactgaacgatgagcatgatttttccaggcggtggaagcaggtgctcccggcagaagaccccatataagcaaatatctagaagccacaaggcatggccttcaacaagagc

SEQ ID NO: 65155 - DNA, 122 bp, Homo sapiens
agagctgcccacctgacccacagacctgcagacagaagcagagatgcctcacttgaaccccgggcaatctgcagatggcagcaaaaatcaatggttttacaacactgagtgttgggaatggt

SEQ ID NO: 65156 - DNA, 122 bp, Homo sapiens
tggacacagaaacatgagtttgcagttgaatcattctacatttaatcacatatgtgcacacgtagaagactgttatcactcatcatttctccttgatgttaaacatgtgttgggaattttgg

SEQ ID NO: 65157 - DNA, 122 bp, Homo sapiens
tgtttaaacctctcctggtgttttgtgctcaagaagttggtatcgggttgttttaacagtcgtcatctttatcaagtaatacggaaaaactgggcagagcttttaaagaatgaatgacgatg

SEQ ID NO: 65158 - DNA, 122 bp, Homo sapiens
tccctccctccctttctgctgtctctctgagggctggggctgctgccgccgctattcccccgccacccctccccaacgcctgctggtttccggggccggccaggaagtggagggcggtgatg

SEQ ID NO: 65159 - DNA, 122 bp, Homo sapiens
ttggaagcccctacttcgaaatgtcctgacattctgagctaaaccaatgtataccttatacgtattgatttatacctttgcctgtaactattgtctccctaaaatgtataaaaccaagttgt

SEQ ID NO: 65160 - DNA, 122 bp, Homo sapiens
gcacagacggcagtccctgtgcagcagagacggcttccagggcttggaacggccacgcttcgacgcgaagggctcctgggcctgcccgagctcggagctcacccggcaaagatttaagatgt

SEQ ID NO: 65161 - DNA, 122 bp, Homo sapiens
gagggtgttttggaggaagatggtggcagaggaggtggcgagaaatggctggattccaggcgcattttgcaagtgcagctaacaggatttcctgacagatcaaatgtagggggtgagagaaa

SEQ ID NO: 65162 - DNA, 122 bp, Homo sapiens
ttttgctgtttgggtttgcactgtctttttgagctgtaacacagcaaaggtttgcagtttcgctcctgaaatcatcgagaccacaaacccaccgggaagaacgaacaactccagacgcaccg

SEQ ID NO: 65163 - DNA, 122 bp, Homo sapiens
acgtttctcctgccgtctcagcagagccctcctcccacgtcgccccattaccgcagcccacgcagggccgtcagctttgtcaactttcgtctggctaatttcactggaggcgcctctttatt

SEQ ID NO: 65164 - DNA, 122 bp, Homo sapiens
agagagaaggcgtctgcaccagcagagctgtctccaaaggggaccacactgcagggcagtcgggaggaggtgggacatggacatccccaggttgtcacccatgagcaaggtccccccccagt

SEQ ID NO: 65165 - DNA, 122 bp, Homo sapiens
aaaggagaaaaaaatgtctgaccacaaccggaaggttagcggtgggataagcctgacaaacgtatgctgggcagaaaaagaggtcaagagcattacgtgtcaagtgtctagactcatcagct

SEQ ID NO: 65166 - DNA, 122 bp, Homo sapiens
atatggctgtcagcctaaagcaaccaccgtgtccagctactgccctgctgcctgggccctcggggtgcagccctcacctcccagagcactcagagtgccagccttaagggcttctcactctg

SEQ ID NO: 65167 - DNA, 122 bp, Homo sapiens
ttgctcgtcctccagtcccatgtctggctacggttctagatttaacacgagcagcaacagcggcacctcaatttttgtatttttagtagagatggggtttcaccatgttggccaggctggtc

SEQ ID NO: 65168 - DNA, 122 bp, Homo sapiens
tgcctggactgctagcaagctgggcggcattccggtgagggcgggtgccggagctggggtcgatgggtgctgctgaagggtgcggagggagtgggcgaggtcctggggggagtcggggtctg

SEQ ID NO: 65169 - DNA, 122 bp, Homo sapiens
tttactgcatttattttgcaccactgtcagctggagactgggtagtgatgaatttacaagcgaaaaaggtacagagtcatcagggagaaagaaaacttcacaaacataccctcaaaaggaga

SEQ ID NO: 65170 - DNA, 122 bp, Homo sapiens
aaagaggaaattttaaaatgctaataacgcagccttcttgccttgtctctatctctgatccgggtaaaatgtatactcctctgcccatttttctttgtcttcatctcctgaaatgtagacat

SEQ ID NO: 65171 - DNA, 122 bp, Homo sapiens
tggctgtgctcagtaatgtcctcatagattgcttgtatcttcagctgcgtctgtggcctgcgggtctggtccagagtggaagctcccagagggccaggcctcgggttctgtaattctgttgg

SEQ ID NO: 65172 - DNA, 122 bp, Homo sapiens
aagttgaacaagtggtgttcacattcggacgtgtgttaggtagaagtgtgtgtgcacctgcgtgtgcgtgtatgttccacacgctgatgcaggaggtatacgcacagatataattgtctttt

SEQ ID NO: 65173 - DNA, 122 bp, Homo sapiens
ggtattccaccgtgtggctgaactatcatttatttattcaaatttctattaatggacattcggtagtttccaaccttttgctactgcagctaatgccgcaaatgagtatctttgttagtgcc

SEQ ID NO: 65174 - DNA, 122 bp, Homo sapiens
aggccattttgggactgtaccctaaacatgcacttgaatggaagttctaaactcagggatcgtggcggtgtggctggaggacaggaacaggctcagaggccggccccaggtaggaggggcga

SEQ ID NO: 65175 - DNA, 122 bp, Homo sapiens
tatgacaggaaaacagaaatgacgcggaagaagtctccccccgctagcgaaaatgcctcccgaccgcacatgcatggtgcccagggtaccctggacctcactggttcctggacacacagtgc

SEQ ID NO: 65176 - DNA, 122 bp, Homo sapiens
tgtgtatgccgtgtgcctggcactgtatagcagctcaggtttggttttgcacttttctaacgtagaaagtgcttttgtagacatcatttcatgaattcattaaagcaatcctgtgagatagc

SEQ ID NO: 65177 - DNA, 122 bp, Homo sapiens
tgatttcaatgtgaaaatgttttgtgaacaaacacttatttttatcctatgtgttagcctcgcttcatagttaaaaagccgagttataaagctcttaattacatctcaattggtatcagcaa

SEQ ID NO: 65178 - DNA, 122 bp, Homo sapiens
gaatggggcagggaccaggggcaagatgcaggaagcggtgatccatgggacatggcaggtcgtctttcagtgctgcaggcctgggctcggagggcagctgggggcctccgtgggcacatctg

SEQ ID NO: 65179 - DNA, 122 bp, Homo sapiens
gtgggcaggatacggggttcacctgcagatgaacagggcaggaaaagcttgatggggtgtcgggggaatctggttggccttaaagggaatttggggtcctgttcctgaatttggtaggcagc

SEQ ID NO: 65180 - DNA, 122 bp, Homo sapiens
cgactcggggtggggacacagccatggaggaaaggtttgagcaatggagggttggagaatcgggtgccgaaaagggggacttacttgagaactgtatcctaaggtggcttacataatgtgtg

SEQ ID NO: 65181 - DNA, 122 bp, Homo sapiens
gtcagagggctcggggccccggtaccgctccagcagccgccgaagggtggcgtccacctgcggggaagcccgtgcagctcaggacccaaagctctgcaccccaccccagccctctggtcacc

SEQ ID NO: 65182 - DNA, 122 bp, Homo sapiens
ccggagccggagctggggccagaacccgagcagtgagttcctccactggctgccggctggcggcgctcgccgccttgggcaggacccacctcgccttcctcccggcgtggcagatgctccag

SEQ ID NO: 65183 - DNA, 122 bp, Homo sapiens
aacttgggtggggccagagcattcctggccccgccccctgcagcgggccgctcgctcatgcgctctggcctcaggctcgctgtcgcgccattttgccggggtttgaatgtgaggcggagcgg

SEQ ID NO: 65184 - DNA, 122 bp, Homo sapiens
gaggtagaggagaaagctgagtcccaggggctgaaagaagccatgggcgtctgaagcgagcgacaagttatccttgggagttggaaatgtgagagggaggggcgaggccgaaggaggctgag

SEQ ID NO: 65185 - DNA, 122 bp, Homo sapiens
tccctccctagcagccgggacaggggtcgcggcccctttaaatggcagcgccgctcgcagcgcccagcgctctgcaccaggcgggcgggcggtgccagcaaccaaccccattggctggctcg

SEQ ID NO: 65186 - DNA, 122 bp, Homo sapiens
atggagggggcgggcaggtgtacagggtggagccttcctgatcccagggctgaaggatggcggtcctggcccgccagctgcagcgtctcctctggaccgcttgcaagaaaaaggagagggag

SEQ ID NO: 65187 - DNA, 122 bp, Homo sapiens
taggcggccagcagggcagaggagggcgagaggtctcaggtcttcggcctccaccaagcgcgactcccactgctcgggaagaagaggggctctcgccgctctgaggccacgaacagatcccc

SEQ ID NO: 65188 - DNA, 122 bp, Homo sapiens
cgaggcccaccctgcaggggcgaggccacggtttgtgttatttcccatgatgactccaaacgcacccgagtcccccgggcctccgcgcctccgtgtgcaggtcccccgggcctccgcgcctc

SEQ ID NO: 65189 - DNA, 122 bp, Homo sapiens
aagggaggcgggaccggttactactaattgtgttcggcagcactggtagccaggggaaggcggggctagatacgatagagagagaccttactgaactgaaaaaagtgcgggcggggtagagg

SEQ ID NO: 65190 - DNA, 122 bp, Homo sapiens
agtgtggaaacagcaggtgtggtctgcttgcaacagaggttctcctcccacttttagggacggctcctggtggaatcacaaagagcaagctcctttcaagcctgaggccccaattcctttca

SEQ ID NO: 65191 - DNA, 122 bp, Homo sapiens
aactaggcaactattatagcgtagtagtgaacaccaatgttactgcaaccaggctactcacgttcaaatcttcactcttctggtatttaaatgagtcacctaatctccttgtgcttaaactc

SEQ ID NO: 65192 - DNA, 122 bp, Homo sapiens
tggaatacaagattgggaagccccattcccctcttcccatttccaccctccatgttatgacgatagaaatgtgaaaatgcttccttggggtgctttcaatacatgtgcagtggaaacatatg

SEQ ID NO: 65193 - DNA, 122 bp, Homo sapiens
agtgatttgtctccgcgctgacaggctgcggggcacagaccgagccctcggggaggcagccgttagtgctgcttgtaagatcagtcagtggtcgcaagagaaagggcttgacctttcaaggg

SEQ ID NO: 65194 - DNA, 122 bp, Homo sapiens
ttccctctctcctatattagttctcttgggctgccataaaaaaataccacaggccaggcacggtggctcacgcctgtaatcccagcactttgggaggccaagacagacgaatcacttgaggt

SEQ ID NO: 65195 - DNA, 122 bp, Homo sapiens
gagccaccgcgcccggcctgtgccttccttttcttgttgtttgtgagagcaaggatgggccggccatgtctcctagtaccagggaggctccccctgcagagggctgagggaagtgctggagg

SEQ ID NO: 65196 - DNA, 122 bp, Homo sapiens
cgcgggcccgggcttcaggctgtggggccgggagtgcggggcgggactgctgcggccccgcgtcctgtggagtctgcggcgcggggagtgggggtcggggcggggaggaacgtggggtgcgg

SEQ ID NO: 65197 - DNA, 122 bp, Homo sapiens
aatagatcctattttgtagcatccgggaggagccggtccatctataaaaacctcgataatcgtgcctcgtttcctgctttcactgcgtgccatgccctcggtgattagcgtgtttttcagac

SEQ ID NO: 65198 - DNA, 122 bp, Homo sapiens
gttaacaaagcaccaccgcatctatgagctcgttgtcaagggctgaatttgaaaactatccgatgtcgtgtgatctcacagccagacatgtattatgttttctttctgtgggagagggggca

SEQ ID NO: 65199 - DNA, 122 bp, Homo sapiens
agtgtctccgccggttgaaagcgcgtgtctgcgtcgggttctgttggagtgcgttcggtgcgccgtgggtccgcgctgcttccacccaacttcctgttaggtaagaggcgcgtgaggctcct

SEQ ID NO: 65200 - DNA, 122 bp, Homo sapiens
acctgctcacaccccaggggtcagctccgcggcttcttcttggtgaagcctccctgacatcgcctctggcactgataccaccctctgagccccagcacagtcccagcaaaagccgcgcactg

SEQ ID NO: 65201 - DNA, 122 bp, Homo sapiens
gggagctccatgggtgagggcggcaattatcgaccccgactttcgcgaggactgacagcccgagcggcctcgcagacctacctgacgcgagcacagcaggccaagtatctctaagaaggccc

SEQ ID NO: 65202 - DNA, 122 bp, Homo sapiens
agaagaaagatcggatgggaactgatagcaccacagtgcccactaactaacatgtcccctcgccctcttcaattcagcagagcttttttctgctttgaagcctgatgagagctgctctccac

SEQ ID NO: 65203 - DNA, 122 bp, Homo sapiens
ttgtccgggtgctggtcagggcgcaccggcaccgtgggctgcggccccggcggcagaaggcgctccgcatgatcctcgcggtggtgctggtcttcttcgtctgctggctgccggagaacgtc

SEQ ID NO: 65204 - DNA, 122 bp, Homo sapiens
cctggccgaagcctgtcactctcggaaggggccgcgctcggacaccaggggcggtttacgcgtgactggacaccaagagccggagaagtttagagactaggacactgtggcgtggcccgagt

SEQ ID NO: 65205 - DNA, 122 bp, Homo sapiens
tgggacggcattcatctctctgttcccagccccacccacgcggtggcagggaatggttgccgaatggacttggggaaggtcctgcatggatggacatcctaatcccctaccagtcccctagt

SEQ ID NO: 65206 - DNA, 122 bp, Homo sapiens
cttggttgcacatcagaataaacacacattcctgggatctaccccagacctgctgaatcacgatgctcagctggggcaggaagtgattgtaaagttccggaagtgattgtaaatttcccaaa

SEQ ID NO: 65207 - DNA, 122 bp, Homo sapiens
gtcggcggagcgcatttatttgcatatttctacctttgttccctgccagcggccaatcagcgcgcggggcgagacgaaggggctgggcggggctcgggctcctgctccggctcagctgcggc

SEQ ID NO: 65208 - DNA, 122 bp, Homo sapiens
gggccccttagttcctctccacccctgctgatctcagctatttgaatacagaaaagagaacgcagcccttctgagacagccaggccttttattttgagacttaggatctcagacccaaagca

SEQ ID NO: 65209 - DNA, 122 bp, Homo sapiens
acttgacctccccgccacacccactaatcttcaggaactcaagttctcgcttttcccagacgcacgcaagaaccgtgcaccatctcgctcgctctctgcccgcccgcgccttacaccttccc

SEQ ID NO: 65210 - DNA, 122 bp, Homo sapiens
gaccgttcctctgttttcgcttgttcctactaacagcgagcttccgccaatacttgttctcgttcttggttccgagcgtcccgggagccgggaagggaaggattgtctgcagggattggagc

SEQ ID NO: 65211 - DNA, 122 bp, Homo sapiens
tgtagacaccaggattctccccatttcacagaggggtaaactgaggttgagagaggtgaccgtagctaggacagagactcagggcaggaaaagggcccaggtcctcatgagcgccagattcc

SEQ ID NO: 65212 - DNA, 122 bp, Homo sapiens
ctgagctgcgggttttcttttcccacgccagagctgcctggtgccaggacgagcgtaacacggacccacagtgtccccagaagggggcaggcgttctgagagccacaaaggtggggtggaat

SEQ ID NO: 65213 - DNA, 122 bp, Homo sapiens
tgtgtgtctgtgtgtgcacgtgtgtctgcgcacgcacgcttgtgtgctcatgtacctgggcgggcctgtgtttacatgtgtgtgcacagctgagtgcacgtgcaaagccgatgcatgtgtgc

SEQ ID NO: 65214 - DNA, 122 bp, Homo sapiens
agcaagtccacctccccacggggagttctggagcatgagtgtactgcagagtaggcccaccggagggaaggggactgggcttttctgtcccttcactagtcagtcattgtccacaggctgag

SEQ ID NO: 65215 - DNA, 122 bp, Homo sapiens
gagcctgggacgggtgaggtcgcgcccccgagagtttgcacttcatcctgggagaaatggcggggccgcgaagaagtcccgagcaagcgatggacaacataggagaagggctgcatcccgga

SEQ ID NO: 65216 - DNA, 122 bp, Homo sapiens
cccagccctgaggtttctgtttactggcctatgaggatgccctttcctgtgcaaagtaagcgcccctgtgtgaatgcttttcttttttttttttttttttttttgagacggtcttgctctgt

SEQ ID NO: 65217 - DNA, 122 bp, Homo sapiens
aggcgggcggcaggtgccgccgcagcctctggctggtcccgcgtctccgtcctccggcggcgatgagctgggccctgtcgggggctgcacctgccggctgcccatcagcaccggcctcctgg

SEQ ID NO: 65218 - DNA, 122 bp, Homo sapiens
cgtggcagggccttttgcaacatttagggcaaaccacttggctgagctgtcaagtcagcgcgcgggtaatcagcagatttattcgaggaaatatatttatggtcctgaatggctgttaaatg

SEQ ID NO: 65219 - DNA, 122 bp, Homo sapiens
acagtgctgcccgccaggtgcccttcccgcacgcttgctgcagtcagccctgcaccgctccgccctccgtcctctcaaggtgcgtccctggcagccggagatgcacatgagatattggcctg

SEQ ID NO: 65220 - DNA, 122 bp, Homo sapiens
cgcgactagagctgcagttcagaaggtctggttcgcctgagcctggagagtcaagggccgcgccttctcactgttcccaccctcaagcccaaccccactcccaaattcgcacgcacatggac

SEQ ID NO: 65221 - DNA, 122 bp, Homo sapiens
tggaattgtagccctgcccagggtggtttgcaagggagaggaggtttcacagccaagcatcggggtctagaccctgcaatgcacggggatgggctccaatgtcccctcttagccaccaggtg

SEQ ID NO: 65222 - DNA, 122 bp, Homo sapiens
aaaattatttcttcaaggatttttctccctgttcacttttcttctttcctttgaggactccgattgtgcagagagtgacagctttacttctgttttccatactgcttagcttttctcacatt

SEQ ID NO: 65223 - DNA, 122 bp, Homo sapiens
ggtgagcgtgtgggcgcggggcagtcggccgaggagcagcaggccccagccgctgtctagcgtgagccccagggacacccctcacctgagggatgaatgtgcagcccaggatcttgggctgt

SEQ ID NO: 65224 - DNA, 122 bp, Homo sapiens
ctttcagttcatttagataggtgccctttgggcccttgaaattcaacggctatgtgttcacgttcagcacgctcggctgagagctttcatttttagggcaaacgagccgagttaccggggaa

SEQ ID NO: 65225 - DNA, 122 bp, Homo sapiens
ctccagccgggttgggcagtgccaggctgctcagggcccctcctcaagcctcccagcccgcgatgctcctcaccctggccagcgcttcctgctgctgggggctcaggtccccgactcggctg

SEQ ID NO: 65226 - DNA, 122 bp, Homo sapiens
gatccccgaggagggcttcgggggcccagccctaggatcccccaggaacttggccaccaccggctggatagcattgtagccagcactgtcacctgtgagaaaaagggacactggagacccag

SEQ ID NO: 65227 - DNA, 122 bp, Homo sapiens
taggtaggtggcaactggagtctgggagttcaagtgcatccagcctgcccttcccccacacgccccaagagaatgggaagttcagccaagactcgcagcacctgcccgcggctccaggccgg

SEQ ID NO: 65228 - DNA, 122 bp, Homo sapiens
tgacgacggcgccggcgggggaaggggcggtgctagaacaggttggggcggagtcagggtcggtccaaatttctggaatgggggaggcctgggctgattaaaattgagagtgaagggagctt

SEQ ID NO: 65229 - DNA, 122 bp, Homo sapiens
ctggcctggcccagggggctccatcacggttgcaagctgcaggccgactgggtcttggcgcgggcccagtaagctgctttcagggagtctgtgaggagctgcctcttgggtcagccacctct

SEQ ID NO: 65230 - DNA, 122 bp, Homo sapiens
tggtcacctctcatcctccacccagctctgatgctcactgcaaattgtttgccaacctaacgggtgaaccctcagctgttctgatgagtactcctctgactgctggaaggtgacaggaagga

SEQ ID NO: 65231 - DNA, 122 bp, Homo sapiens
cggacttgcaggaaatgcagccgggaggatgggcaggttgtgggatgctccgccgttccgcgaccacccgcctccccggcccagcagaaccgggtccaggctgggggaggtgctagcggtgt

SEQ ID NO: 65232 - DNA, 122 bp, Homo sapiens
agattagggatgctcacccacaatgggtaatcccacagacctcaggcagaatgactcacacgggggccaaacagagaaaatatctccattatagtattttatgatggttacacattacaaat

SEQ ID NO: 65233 - DNA, 122 bp, Homo sapiens
tgatgagaaccctgtctcccaaatgtttgggggtcagcagcacccccgagcctttacctgcgccgtcccctccgcccgtaactctcccacacccacccacaccgagataggaccccgcccca

SEQ ID NO: 65234 - DNA, 122 bp, Homo sapiens
tgggtggacatgggcacaggggcttctcagatgagctaggagccgtcctgagggggtgaccggtgccttgggtccagagttccggacccccaggaaatcgcaggtcgcggggagcagcagag

SEQ ID NO: 65235 - DNA, 122 bp, Homo sapiens
gcgtctggcccaggcgtcacagctgtgcagggatggctggagctgggtccccagctgatgcgttctaccccctccccccggtctgactcccaaactggggcaaactgacctcgacaggggct

SEQ ID NO: 65236 - DNA, 122 bp, Homo sapiens
gagtaatgacggtcctgtggtatttcctgcacccccagagtcccagagtttgttaaggaccgtgtaagaggacaccacgctggcttttcagtgggcgcgtctctcctgggggcatcaccaga

SEQ ID NO: 65237 - DNA, 122 bp, Homo sapiens
caatccacaaagaagaagtcacaatgttactgtgacatagtctttgatgtcacatcccatcgtttctaccagattctatttgttaaaactgagtcactcagtacagctcccatgcaaaggta

SEQ ID NO: 65238 - DNA, 122 bp, Homo sapiens
tggcttgttaattttcctgcagccaactctccaaatttgtctcaaaaagcatcacttgttcgttgggttactcccggtaagacttggttgaacctacggaggtttaagtaccttcccctgag

SEQ ID NO: 65239 - DNA, 122 bp, Homo sapiens
gcgacagtaggaagtgacgttacttccctttttccggtccgccggattatgaatgacggccggcgcgagtattttccacataaggtggctgtcgtttttctcctggcgtctgtggaggcgag

SEQ ID NO: 65240 - DNA, 122 bp, Homo sapiens
ttttcacacccatgagatggatctgaagcttaatacagaattgtaatgcgaaaagcaacacgtgaacaaaataaatggacacataacagcagcgtaaatgccaggcctgagttaagctcctg

SEQ ID NO: 65241 - DNA, 122 bp, Homo sapiens
ttccactctcacgttgtacacccctcatttctctcttcctggaggggctccctacctgagcgcgggaatcatcttccttcctctctcctggagtctgcctgacttggtgtcccaagacaggg

SEQ ID NO: 65242 - DNA, 122 bp, Homo sapiens
ccacccggccaccccatgagccgcgcgtctggctcttcggtggagtgagcctagaaagggcggcgttcgtccagtgatcagtgctacccgaggttgctttttgcatgactgcttgcagttaa

SEQ ID NO: 65243 - DNA, 122 bp, Homo sapiens
tacatgtactgtttattaaatggaaatggatcaccacagaggccttcatccccgtcttcacgttgagtgggctcaggaggagaagaggggttgttcccacagtctcagggtggcagaggagg

SEQ ID NO: 65244 - DNA, 122 bp, Homo sapiens
ttgcactgcctggtctaacctgtggctgctggtgaccaggctgtgtcccccggacctcctcggccttcaatggaggaaggtcagatttctcagtcagattttgcttggagagcccagctatt

SEQ ID NO: 65245 - DNA, 122 bp, Homo sapiens
ctgttttctcacagaaagtttctctaggctggtgccgagatgcatttggtgaaacacccccggccccccgcaaaaggctgctttgtacatagtcacaatttactaaattgtgaaattaacat

SEQ ID NO: 65246 - DNA, 122 bp, Homo sapiens
gaaactttgagaacacagactataaaggcagcagcccgaacactgtcagactctaattggcgaccctgggaaacagttgccctgctattctttaaagaaagacgtttattctgatgataaaa

SEQ ID NO: 65247 - DNA, 122 bp, Homo sapiens
gtccccgggagcgtagacacctaagccaacgggaacggaagacccttctacctactaggccgcggtagcttctcctcccgcgatttaaatccaccggaattcgaatccttccccatagctct

SEQ ID NO: 65248 - DNA, 122 bp, Homo sapiens
ccacgcccccatcgcaggaggtgtacacccactctgtgatattttttgtaatgtgcagggcgggggaggataatattcttcttaatagcgcagggtgtgtatatccccccagtgatacggtc

SEQ ID NO: 65249 - DNA, 122 bp, Homo sapiens
cagcactgaggggttctgacacactgacggtggcagtgccacactggggaaaagtgcccccgaaagggaggtgtctcactgaggaagggaggggtctccgagggacagcgttctttgagggg

SEQ ID NO: 65250 - DNA, 122 bp, Homo sapiens
ggaccaaggcctctgactcagaagccaaaacatggcagtgttgcagggcgcctggctcaacggcacgggaaattaacctgcttgttctcacgttaaatgctttatgaaaattcaccgggcgc

SEQ ID NO: 65251 - DNA, 122 bp, Homo sapiens
gcccctttaacaaacgcgcactctagccccgactcggcacagaacgacccggggaactaccgccgaggccgagccgagacgagagacatcaccacaagcaactcacctcccatcccgggcct

SEQ ID NO: 65252 - DNA, 122 bp, Homo sapiens
tgtggcattagctggaatggcctgtgactcagttacttggccctgctggctggaagcttccggccgcgtgatatgatagggtcagggcagcaaaggcccttgggcaaacgtccgagccgggg

SEQ ID NO: 65253 - DNA, 122 bp, Homo sapiens
gatgtagggcatcctaccgagaatttccggaaccacgtgcgagatgatgccagtcatgaacgtctccgcgcttcctttcgctttggaaatatccttaagtagaaattttctgagctttgcct

SEQ ID NO: 65254 - DNA, 122 bp, Homo sapiens
ccacctgtctgcctcatttgccttgctcaccattaagagtcaagctccactgcagtagtccgcagagtcggagcagaaattgtgtggacaaacgctcccgggttgcccggacgacaggcccc

SEQ ID NO: 65255 - DNA, 122 bp, Homo sapiens
cgggtagtgggactgtggccttgcgctatgccctgtgcttccgtgggacgtgtctaggaacgggtgggctttctgcgggaggcgggggtcgggcagggctgctggtctggagtgcttgtgct

SEQ ID NO: 65256 - DNA, 122 bp, Homo sapiens
ctgcctggaaggatacgggcgtggcaggactctcacgcacggtgaccacgctggccttcacgaggctgtggttggcggaggcatgctctgtaaggacattgcccttctccacatctaggtca

SEQ ID NO: 65257 - DNA, 122 bp, Homo sapiens
aggagattcaaagtcagctgttaccacggctacagaaatgccagtcttttcctaagagtgcgaatggacacacacatgtgcatacgtgcacacatgcaccctcaggctctcacggagccctg

SEQ ID NO: 65258 - DNA, 122 bp, Homo sapiens
cctgcagcccagtgacttggggcccgggccccttctccagggccctgaccccaaagtggacgccggcagggatgtcatctgtcctgccttcctcctgtccaccacaacaacagcagccaata

SEQ ID NO: 65259 - DNA, 122 bp, Homo sapiens
ctcgatctcctgaccttgtgatccacctgcctcaccttcccaaagtgctgggattacaggcgtgagccaccacgcctggcccaattaggatggattgtaaaatgtttgtgcttatgctctga

SEQ ID NO: 65260 - DNA, 122 bp, Homo sapiens
acactatttgaaaactttcacagtggaactgtcaagtcggagcattcttgtttaattgcgcgggcacaatggtggctctggggctaccccagcctcccccagaccccgcagagcttagcggg

SEQ ID NO: 65261 - DNA, 122 bp, Homo sapiens
gtggaaggaagtttcgttttctgtctaaacatgtgggacctgggtgtctacctctccagtcgagagctctctgcaggctctctcccaacttcctgcacctcctcaccctcaccttacccgtg

SEQ ID NO: 65262 - DNA, 122 bp, Homo sapiens
acatgcctcagccaggtgtgtggcagggctggctggggaaggtaggcccagctctagctgcggaactggagcaggctgtggaggcacagaagtggcagggaaacactcaagtttgtcgttgt

SEQ ID NO: 65263 - DNA, 122 bp, Homo sapiens
gaggcaggaggatcgcttgagcccatgagttcaagaccgcaggaagctgattcttaccaccgcactctagcctgagtgatagagcaagactctgtctctaaaaacaaaaccaacaaaaaaca

SEQ ID NO: 65264 - DNA, 122 bp, Homo sapiens
aagcctcacagcttgcggtgttgacagtattctagaagaccctacacccctgtggcttctcgatgactaatgtggagccagcatctgtcagcacaaactcagagtgattacccagaaatagg

SEQ ID NO: 65265 - DNA, 122 bp, Homo sapiens
gctctctccggtcgagggtctgggcgggttccgcagatccaccttggggtggatctcagacggggagactctgggcgacccgggccgtccgtgggggatggggaggggtcgtgacctgcgcc

SEQ ID NO: 65266 - DNA, 122 bp, Homo sapiens
ggggttgtggtgggcactgcttgggtggtctctgcttcatcctctggagctggacagacacgtgtggggagagtgaggtccctgggttctcagttcagcatagaaaggatgtgtcacaaaac

SEQ ID NO: 65267 - DNA, 122 bp, Homo sapiens
cccaacacccgacgggggccgaggccaggctgcccctccctgtgggctcagggtctcctgcgggctaggcagccaggagctctgtccgcaaaaccaaatctgggtgtcagaggccaagaccc

SEQ ID NO: 65268 - DNA, 122 bp, Homo sapiens
tggcagcctttaaagctagaaggcactgctcagaggaactggttcctttgaatccttttccgtcaccatgcaaatgtttacaagctctaatcaggagaaatgaaaaatcacatgtctaattt

SEQ ID NO: 65269 - DNA, 122 bp, Homo sapiens
accgcacaagtatgcagctaactacttccgcttccgcttgcgtcccctgcgtccctggctcgaggttttccgccattttgagtgtggccctagattgttctcaatactctgtccttgggttt

SEQ ID NO: 65270 - DNA, 122 bp, Homo sapiens
agaagctaattgcagaagacagccatttcaagtcttcaacagcaaggctgtacctcctcacgtgacttcagtgtagactttaagaacctaaactaacgcttctcgcgagaggaaagattgac

SEQ ID NO: 65271 - DNA, 122 bp, Homo sapiens
gtcatttgaagtcatcgaccccggggcagccccaacagttctgtgcgggcctgcgcgcaccgccctcaccttgcgcgccaggcatctcacctcagccgggcaggtgcagaggtgacaggcgc

SEQ ID NO: 65272 - DNA, 122 bp, Homo sapiens
cggcgcctgccgggggtaggtgagcgccggagccggaccggggacgcgtgatgggtagggcgcggggcggggtctgtggtgggaagcggcccgcaggccgggagagagggtgcggccgggcc

SEQ ID NO: 65273 - DNA, 122 bp, Homo sapiens
ggctccatcaggctcagcctccatggagtattccagcagcgtagccggcttctgccctcccgaggtcccagccagaagttgctgggtgccggtcacacttagtggtgtgccaggcgctgccg

SEQ ID NO: 65274 - DNA, 122 bp, Homo sapiens
tcagcatgaaggttgggagaagcagcagcaagagatggccaaagaaacattctgaagcaacgctcaacattgaatcatcaggggtgagcatgggaacaggctactcagggatcaaagagcat

SEQ ID NO: 65275 - DNA, 122 bp, Homo sapiens
cactcctttctgtggctgagggacttcccttgcgtggagaggccacactgtttgtcctctcgagctgacggacgtgcgaggttttcacatcgtggctcctgtaagcagtgctgctccaaacg

SEQ ID NO: 65276 - DNA, 122 bp, Homo sapiens
ctgtgggttggggaagagtactctcgtttacagcgaaagaactgaggatccggccggacgcggcggctcacgcttgtaatcccagcactttgggaggctgaggcgggcagatcacctgaggt

SEQ ID NO: 65277 - DNA, 122 bp, Homo sapiens
ccctgcccttagtggagagctggagcttggagacattaccccttcatcagaaggaattttcggatgttttcttgggaagctgttttggtccttggaagcagtgagagctgggaagcttcttt

SEQ ID NO: 65278 - DNA, 122 bp, Homo sapiens
gcctccgctcctggacctgaggaggccctcacaacagtcacagtggccccagcacctcgccgggcagctgccaagtctcctgatctgtcaaaccagaactcagaccaagccaatgaggaatg

SEQ ID NO: 65279 - DNA, 122 bp, Homo sapiens
gtatatattggtattcatatacaaaggcgctgcaggacaggaggagcccagctttgtggacggcccagctgtgcaacctgcccccagatgtgagcctgcaggcggcagattccgcttagatt

SEQ ID NO: 65280 - DNA, 122 bp, Homo sapiens
ttaatttccaagggttttaaaacaggtcagggagactcctggggtggccaccagaaatgccgttgagaatagaagacaccaatgctgaagacagtgagtatctgattatctctaaacagaac

SEQ ID NO: 65281 - DNA, 122 bp, Homo sapiens
agaccggggctggccgaggccctcccggggcgcctcccctgcacctctcgccctggctttcgcctttccctgggaactttcccgtctgagttaactattaaccaccggcgagaggcaatttt

SEQ ID NO: 65282 - DNA, 122 bp, Homo sapiens
cctcaggaaacttacaaatatggcaggaagggaagcaagcacgttttacatggcagcaggcgagagggagtaagaacagagaatactgccttataaaaccatcagatattgggagaattcac

SEQ ID NO: 65283 - DNA, 122 bp, Homo sapiens
ccaggctgtggtggcagctggagagagaaggctgggcccgagctgaggctgtaggatgagcgtctctggggagctgcagagaaacaaaggccaagtatatggtcatgtcagcatcaaaaccg

SEQ ID NO: 65284 - DNA, 122 bp, Homo sapiens
taacctacagggcgaccccaaaacccgacagcggagcgtgggaacctgtggcccgcgaggcgcaggcttgaacccgaaagacggagactcacccgagagcgccagtagccccgcgagatccg

SEQ ID NO: 65285 - DNA, 122 bp, Homo sapiens
gtgcagctactgaaggagaagcaggaacacaacagggaatgcagacgcctaccaggaaatcgatgtgaactgctctcaattatgcagcaaatactaagaagaaaggacaatgctgaattcaa

SEQ ID NO: 65286 - DNA, 122 bp, Homo sapiens
tcaggggtggagtcttgccacggtgcataataatcccagagttacaagatccacagagcacggtgcggcccacaaaaacagctcttctgaccctcctcttgatcatgccgaacatgatctga

SEQ ID NO: 65287 - DNA, 122 bp, Homo sapiens
cagccaagatcggaggctgatgaggtctcagcaggggaaaagatgtaacaatagagaggtcggagggtcgcgttcaatgcctgtgcaagaaaggcctggagccacccttggcctgcttgtga

SEQ ID NO: 65288 - DNA, 122 bp, Homo sapiens
atattatcagtgaatttatgaattaatcaataaacaatgtagtaaagaatgaagagaaagcgggccttcctggaccaatgatgacaactgccggcgtatgagtgttgggtgatgaataatac

SEQ ID NO: 65289 - DNA, 122 bp, Homo sapiens
cccggtcttcccctgggtcctaaacaccctgcatgcacctcaatacacgagggtgacccacgcaaggccctgtcctcctcttcaaaagtgcccaccccggggccgcgcactgtgacgcccag

SEQ ID NO: 65290 - DNA, 122 bp, Homo sapiens
ccgctcccgccggcgagcaaggtaagggagcgggacactgaggcaggctcggggcccaggcgtcaccggcgcgtcccggtctccgcggcggccacgcagccgattagatgtctccgcgggga

SEQ ID NO: 65291 - DNA, 122 bp, Homo sapiens
gaagtgtgagtcccttgctttaggcactgattatataaggtgagattaattttcccacatcgtgtatggaatccatctccttgcttggcagtcatagttctgcctcacttaaatctatttgc

SEQ ID NO: 65292 - DNA, 122 bp, Homo sapiens
tgaatgcccgctccattcctcgctgcctgtgtgaccttagggagttaacctctctgtgcccgtttccttatctgcaaaatggggatcgtggtagcacccacctcgtaaaagtgttgtgagaa

SEQ ID NO: 65293 - DNA, 122 bp, Homo sapiens
ccagagggcgcacattcgactccacttctctgtgcgggcatgctccagcctgggtgtgagcggcggcacctgccgggagaccttcaccctttactaccgtcaggctgaggagcccgacagcc

SEQ ID NO: 65294 - DNA, 122 bp, Homo sapiens
cagatagggaaagcgcaggaggtgagcgtgcaggtgggcgaggtgcaggctctgctctcccggcagcccgtgcaggccacaggcttcctgtctctgctcatctaacctgaaccatcctagga

SEQ ID NO: 65295 - DNA, 122 bp, Homo sapiens
gcataaagcgcatgcgcgcctgcctgcagccgcgattgaccttcccagtcaagccggtgacgtcttgcgtcgcagtggatgtgacgcaagagataggaaagtcccgcctttcccacgcggca

SEQ ID NO: 65296 - DNA, 122 bp, Homo sapiens
gttgcacttagaacaaaatccacatctctccttctgatcttgggtggtggctgtgagatccggccccaactggcctctcagatgaagttcccccaaccccaagctcactctagccccaaccc

SEQ ID NO: 65297 - DNA, 122 bp, Homo sapiens
tggagggaggaggaggatcggtctgaatatgcatgaggcacccagcactgccctcttccccggcagctgctcgggcgggggcgaaggagggaaggggaggggaggggaggaaatgaggctgg

SEQ ID NO: 65298 - DNA, 122 bp, Homo sapiens
gatggctgacccggctgcggggccgccgccgagcgagggcgaggagagcaccgtgcgcttcgcccgcaaaggcgccctccggcagaagaacgtgcatgaggtcaagaaccacaaattcaccg

SEQ ID NO: 65299 - DNA, 122 bp, Homo sapiens
gtgccagcggcatgagttgggcatcaacaggccaccgtgagggaggcactgggccgcacgcgggctgccgggaggccgccgtgggggcgagagctgggcctggagaggcccctgggaggcaa

SEQ ID NO: 65300 - DNA, 122 bp, Homo sapiens
cccgctgcttccacacagccgccacacttaggagcgtggccccagatgctggggaataaccgagggtagtctgaccccagagcagcacagcccacagtggacgccacatccaccgcagcggt

SEQ ID NO: 65301 - DNA, 122 bp, Homo sapiens
gtccaaggccccgcccccgcggcgcgagcccgggcctgagctgggacttgggccccggggcgctgctcctccgcaaccgatccaccgcatcctggcaactgagcaggctccgccacccctag

SEQ ID NO: 65302 - DNA, 122 bp, Homo sapiens
aggggatgcggaagcggccctccagcacccgctgtctcagcgtcggcaggttaggcccatcgaaggggagagaaccgcagaccaggacgtacagcaccacgcccaggctctgttgaggacca

SEQ ID NO: 65303 - DNA, 122 bp, Homo sapiens
ctaccgcatacctcgggagatcctcttctggctcacagtggcttctgtgctggtgctcatcgcggccaccatagccatcattgccctctctccaaagtgcctagactggtggcaggaggggc

SEQ ID NO: 65304 - DNA, 122 bp, Homo sapiens
tgtgtaatgtttaaaagccaagttgttgtatttaagggggaggtggtgaattgtagttcacgacccactctgggaaaaaagaaaacagtgcaggctaaggagattattttggtcggctcatc

SEQ ID NO: 65305 - DNA, 122 bp, Homo sapiens
gcgagacacgcctgggcccaggtgtggcgtctctgtccccatctggttttaggtaacaagcggagcttctgaacttctcggctctcggcagcggctgtatttcctctggcctggttgggctt

SEQ ID NO: 65306 - DNA, 122 bp, Homo sapiens
tctttctccagttccagggtctggtgttttgtataggggcaccgctttttccgagtggagcgcgcatgaagccagttggctgctgggttatctgcggggaagagaaacactgggtttaggag

SEQ ID NO: 65307 - DNA, 122 bp, Homo sapiens
gaagccggagccaattggctccctctggaaaaatctgtgggcagggtaaaggtgagcgggcgcaggcgtagtgaaattctcagagccctttaggccccgcccattccctccgagtcggtgag

SEQ ID NO: 65308 - DNA, 122 bp, Homo sapiens
gcaaccaaaagagggcccaagcccgggccgcggtgctgggctccatcttcctcctcctgccgaaggacccagcacgtgcacaccggaagtaccccatctacggtagcccaatcgcggctcgt

SEQ ID NO: 65309 - DNA, 122 bp, Homo sapiens
cacgtcggtggctgggaagacatttgagatcagtgtggagtgatggtccacatcggtggccgggaagacctttgagatcagtgtggagtgatggtccatgtcggtggccgggaagacctttg

SEQ ID NO: 65310 - DNA, 122 bp, Homo sapiens
taattgacatttgtcgtataaattctaagctgtttgatttaaaatgcactcatgcgcacccgcggcactagaaaaccagggaattaaagtcaaagcaaatacaggatttcagtacagcgcac

SEQ ID NO: 65311 - DNA, 122 bp, Homo sapiens
acctagaaaagaatcgtgacgggcaggaaaccattacaccaccacctgggctgtgctctccggctcccgccgccacccccgccctcgccttcgcctccgcctccggtgagttcagggcggtt

SEQ ID NO: 65312 - DNA, 122 bp, Homo sapiens
acgaccccagcaccttcagagaaaacggaccctcgtgccgagtgaagtggttcaggcgaacgttatcaccacacgggggactcggcggcttctgccccaggcctcaaaggagaggggatcca

SEQ ID NO: 65313 - DNA, 122 bp, Homo sapiens
tcgatatcactctgacacctgccaaggaagtcaggaatgaggagagacctctgtagcatacgccagcgtatgtcaggctcaatccttagagactgaagactaatccctccttgatgagctat

SEQ ID NO: 65314 - DNA, 122 bp, Homo sapiens
tttctgcttcttatagtaagcggcgggctcgccagcctcgagcgaaagtgtgactgcgaacgggcaggcgcgcgcggggctcggcggaggcgcgcttgggctcccggcggcgacgactacga

SEQ ID NO: 65315 - DNA, 122 bp, Homo sapiens
ctgctgcagccaacagtggccaggcttgcctgcagctgcagctacaaacctctgtctggccgagctctgtccaggcagctatttatacttgctctgaataccacggctgctctgcttgcttc

SEQ ID NO: 65316 - DNA, 122 bp, Homo sapiens
cctgttccttggcgtgtgcctggatgtgatttgcttccctcagtaccagaccgcaggcttcgtgtgaattgacagaaaataagaaaccaccagcagaaagcatcttgtctggctcttttcca

SEQ ID NO: 65317 - DNA, 122 bp, Homo sapiens
ctcatcctcctctcttccctccactttcctcctctatagcatttgcctgtaaacccttagcgcttatttagttaaactgctctgagtatttcaatgacatatttggggattcttctgccctc

SEQ ID NO: 65318 - DNA, 122 bp, Homo sapiens
aggctgccgggctcgagtcccagctcggccccctgtcgccacgccataactgcctcccagcgtgtttcctctgcagacggtggctcatcacagtgccagctttttgggcagtctggaagaat

SEQ ID NO: 65319 - DNA, 122 bp, Homo sapiens
ataggacccatttgggcagacacaggccacggaaaccacagggccagcgtcttgagccctcgatcagacgcctcccgcccaccgcggccgcttctccacgcttttgcccagatctctgcacc

SEQ ID NO: 65320 - DNA, 122 bp, Homo sapiens
acccccgctgaccgcaaggcgatctccgactccgaacgaacgcctcgttgcagatcggctcgatcaaccatcaagacttagaaatggaggctgtcgatggacgttctgagcacattaaatta

SEQ ID NO: 65321 - DNA, 122 bp, Homo sapiens
gggcacaggagccagggaatgggatgagaaatgttccttgcaatgccggaagccctttcccgaagtcacacattttcatgaataaactagggatgagttaagctggatgttagagttggatt

SEQ ID NO: 65322 - DNA, 122 bp, Homo sapiens
gcccgtctcagctctccttgcaaaatgattggtcaaagtttttccgactgcctgataaagcgtcagctccgacataaatcaatcgggcgagggggctgcgctctcgctgtcatccgtccgca

SEQ ID NO: 65323 - DNA, 122 bp, Homo sapiens
gagagcgcgcgcgcgagagggatgggctacaaaccaggggtcaaacagcctggagaagtccgagtcccaccccaaagtcctgcaggcggcggcggaatagtcggtgcggggccagcatcagg

SEQ ID NO: 65324 - DNA, 122 bp, Homo sapiens
gtaacatccttaaaatccccttctgcacacattccccaagtttctgactctgtatatttgcgaagccttgtcattcttatagtgtaaaagctgctcccgcctaggtcctagctggcacctgt

SEQ ID NO: 65325 - DNA, 122 bp, Homo sapiens
cgttctctgcccctcaccctattctcttcttcttggggatgtcaattcctgttctgagcccgccccccacccaggcccttttccggtggtatgtgccagccggtcctgcatcccacatcccc

SEQ ID NO: 65326 - DNA, 122 bp, Homo sapiens
aggcgattctcctgtctcaggctcccgaatagctgggattacaggcgcgtgccactacgccgggatttttttgtatttttggtagagacggggtttacatcctgttagtcaggatggtctca

SEQ ID NO: 65327 - DNA, 122 bp, Homo sapiens
cggtatccagtggcgctgaattggaaaaagaactgggtgggtggggcctgctggccagcgcggaaaaagctcgggcctgcgcattggagctcttgactggcccgccccccaggtgcagcggg

SEQ ID NO: 65328 - DNA, 122 bp, Homo sapiens
cagacgtgccattcccggcttccccgggaacctcccgcttccaccaacaactccgcgacgcgcgcccagcctcacctctccgggcaggtccaggcagcccatggtggggatgcgcccccctc

SEQ ID NO: 65329 - DNA, 122 bp, Homo sapiens
ggaggagtcctgcaacctaagatgccaaatcttaggttgtagtacagaggtgtgggttggcgcacaggccaccagccatctggctggtgagggagacaggaggagaaggcagtagaagggga

SEQ ID NO: 65330 - DNA, 122 bp, Homo sapiens
tgcacacacatgcacaccccagctggcacagtaacggtgccacgtggataccaatgcacacgcccctagagtccaccctcatgtggcttcatggggcacccacagctgtggccaggagtgta

SEQ ID NO: 65331 - DNA, 122 bp, Homo sapiens
gctgtccacactcccctccgcgagtcacttagtggccatctcggtcatcagaccgactgtcgcggtgttgcagtgcttctgttcgtctaacccttattcgacttaataatggccccaaagcg

SEQ ID NO: 65332 - DNA, 122 bp, Homo sapiens
agggcagtgggcagggcggccagacctgcggatatgggtggtaggctgtgactcagccctcggggtgagagatggagagagctagagaaagggcatgggggaggggagccctgcagatgtgg

SEQ ID NO: 65333 - DNA, 122 bp, Homo sapiens
tctgctggattatgaagggagttcaaaggatggccctaaagccaaggtgactggctaaagcgttgacattgaaaaagggtctttcatctttgtgtctacattctggttgaaagtcattatca

SEQ ID NO: 65334 - DNA, 122 bp, Homo sapiens
tgacttcatgatccgcctgcctcggcctcccaaagtgctgggattacaggcgtgagccaccgcgcctggccaagcatcagcctattgaattccatatgctggaggcagagaaggccgctatg

SEQ ID NO: 65335 - DNA, 122 bp, Homo sapiens
ggccgggccccgggtacctggacggctcgcggtcgggaagatggcgccgggggcggggtgcgctcggtcagcgactcggcattcgcccctcatgtctgcgcctgcgcgcgtcggggcgaccc

SEQ ID NO: 65336 - DNA, 122 bp, Homo sapiens
cctggcctcgcctccctcctccgctgggggtctaagcctgcgcagtattgcgaacgcgggcggcgtttcccgcatgcgcagtcactgcccggcccggctttttcagtaggagccccgcgcgg

SEQ ID NO: 65337 - DNA, 122 bp, Homo sapiens
ttatggatccaccaggagccattaacttctgcgtctacctagcggttggaaagtggccagcgtagctgaacagtaaatgaagctgacgggtcagcaggtgttacagatcaggagactcgacg

SEQ ID NO: 65338 - DNA, 122 bp, Homo sapiens
tggaggtattagggtcagatgtagcaaaaggagatattcacactaaaagaaaatagaaaccgaagccaacccagggaagagctgatttacactccattctcgggttgagctccctgtgtagg

SEQ ID NO: 65339 - DNA, 122 bp, Homo sapiens
tgcactccagcctggatggtcagagagaaactctgtctcaaaaaaaaaaaaaatgttaaacgtaatttttagataattcacagggaacttaaagaagttataaagaggccgggcgcggtggc

SEQ ID NO: 65340 - DNA, 122 bp, Homo sapiens
gggttttcaaatcaaagtggaggcttaggaggatgggaaccagctcatgaagaggagtgacgtggtcatttttgttcttttggacagattcacagtaattggcaatgtggagaaaagagaag

SEQ ID NO: 65341 - DNA, 122 bp, Homo sapiens
atttcacagccacaggggaaaccctcttgtgacttgcttttgaccacacacggcttcacccggctggtggagacttaggagcttctggatgcctcaggagtggagttcactcttagaggaca

SEQ ID NO: 65342 - DNA, 122 bp, Homo sapiens
cgcaggagtgaatgcaaaatccaggggactcagggtcatgttgggagccccttctccccccgagagtcagggagctgttgaggtgggatcggtcagggtcgcgccacgcgggtcccttccct

SEQ ID NO: 65343 - DNA, 122 bp, Homo sapiens
ccagctcggactcgcctctgtctgactttgcaggtgtcgccggaaggtgcgttgggatgccggagcccccgggccttggagatgaaggcaggcccctgctccacccaggaaggagggaggca

SEQ ID NO: 65344 - DNA, 122 bp, Homo sapiens
tcctctttggacgttctctgcctcagtgtcaggcctgcgaaatgggagtcaagcccgtcccgtgggcctaaagcgactagtagctgggggggagggagccggaggacagtggtgctttttct

SEQ ID NO: 65345 - DNA, 122 bp, Homo sapiens
tcactcccaagctctgatctatggattgttttgatttcctcctttgaactcttcctatcccgctccagcggcagacagagatactgaattaagcgacagacaagttggagacaatgagcgcc

SEQ ID NO: 65346 - DNA, 122 bp, Homo sapiens
ttcaacagcccttggggtaccgaggtaccgcagtctcttccacctgctttgaaaccagcgcggagatcctgccccgctatccgcttcaggcgcgacatgttcaaagtcctaggtccagaagc

SEQ ID NO: 65347 - DNA, 122 bp, Homo sapiens
gccgcggcgcgcggggaggagggctgggagcgcccggagccgcgctgaactcgccggggacgtcgggcgcccgctccttggctggctcgcttgctctctcgctcgctctctcgggtcggctc

SEQ ID NO: 65348 - DNA, 122 bp, Homo sapiens
cgatagctgaagcagcggtgctctcattggctggtagttcgtcctgacgaggcgggaccgcgcttgaggaagcctcctacaattggcaggaatctacgtccgtcaccttgcacccgccccgg

SEQ ID NO: 65349 - DNA, 122 bp, Homo sapiens
ctgcagagctgaatccaggggccggggttccaggggagcccccagggcaggtggcatggtcggagaccttggacttgccccaccagtagcctatctggtttggctgcagtagaaacggttgg

SEQ ID NO: 65350 - DNA, 122 bp, Homo sapiens
ctgtaaaccctccaccctggagctatagccccacattacccctcacagctgacgcttacacgtcacgttgtctaattctccccaggggccctgtgagctgggattatggttcagagaaagct

SEQ ID NO: 65351 - DNA, 122 bp, Homo sapiens
agtccgatttctctctgctgctatgccttgctgtttccccaggaccttagcaccactcttcgtattctaagcaagttttttcagtctttcatggcatatgtcatggcacacagagaaaaaga

SEQ ID NO: 65352 - DNA, 122 bp, Homo sapiens
gggcaggatctccttgtcctactgctgtggctgctgtcccccaggtgacccccgtgctgccggcccagcagggtccatgtgcctaacagctggcaggaccttgttcctgtcctcctgccaca

SEQ ID NO: 65353 - DNA, 122 bp, Homo sapiens
ggtaatgctccttccccctccactcacctcctgctgcgatgccctgttcctaacaggtctcggaccaggcttgggattggggacccctggtctagcaggctccagcatcagaaagggctggg

SEQ ID NO: 65354 - DNA, 122 bp, Homo sapiens
gcgtatgagtggcagagcctggctcaaacccgggtcttctgctcccatgtcacacacactcggtctgggacctcttctgtgcaaatatcccattcaagagggcctcctgattattctaccac

SEQ ID NO: 65355 - DNA, 122 bp, Homo sapiens
gcctgtttccttgcttcccaagggggtggtgtggaggggaagggggaatgatttttcttgcgtctcccggaagctgtgctgttagacacaattacctcagctaggtcactgagaccaaatca

SEQ ID NO: 65356 - DNA, 122 bp, Homo sapiens
taaataaagttttattcgaacagacacactcctttgcttatgtacagtaatgtctatggccgctttcactctatgatggcagaggtgagtagctgtgacaataaaatagagtatttacaatc

SEQ ID NO: 65357 - DNA, 122 bp, Homo sapiens
agacccccatctctatataagtgaagagtgattgagttgtcctgcagtgagagaaacaaccgcaggatagggtgtctcatctctagtgcccagtacggtgcccggcacccagcaggtgctga

SEQ ID NO: 65358 - DNA, 122 bp, Homo sapiens
gtggggtggctgctcctggcagggagttgtggaccaggtgatccagacgcaatcccagcccgccaagtgcgtcagccgctaccactgagcgcccgggtgcagaggcggtgcagggcggggat

SEQ ID NO: 65359 - DNA, 122 bp, Homo sapiens
aagggaaaagaaagaaaggacgtggtccgtcagctattgctctccgggggcagctacttccggtccccctgggagctgtcctgcggtctacgttcccccgaggtgctgggactgcggccgca

SEQ ID NO: 65360 - DNA, 122 bp, Homo sapiens
tagtcgtacccccaacccctagtactccagccctgtaagggttaaaacccagggagctcacgtgacctagtgtaaaccatgaatcattcccattgctcccagtgctgagcctgctgcccagg

SEQ ID NO: 65361 - DNA, 122 bp, Homo sapiens
cgtagttctctaaggcagatactgagcactgacactgaagagcctgaaacgaggggactccgcctcagcatgctttatagccgaggttaaggcacacgcagttcctggactacatgttctga

SEQ ID NO: 65362 - DNA, 122 bp, Homo sapiens
cgggctctaaaatgggcgctcggtccctgggggctgcatccggaggctggggggactggtcgagggagagcgggcggggggcagcgcggctcccggttggtctccgcagccgggggagggcg

SEQ ID NO: 65363 - DNA, 122 bp, Homo sapiens
ccatgtcagagaggtgaacagacttcatgtcccactggccccgggccccgggtgggggcacgaggtgggctggccctgagctccagctaccccacacaggccgtgggatcccctgtgtacca

SEQ ID NO: 65364 - DNA, 122 bp, Homo sapiens
ccaccaagctgccaccaacagcagtagtcagcagcccaaacatcatcagtttttttcagtcgacaaatactttgagtgcctctcacatgtcaggcactcttctaggttctggaaattcagca

SEQ ID NO: 65365 - DNA, 122 bp, Homo sapiens
agggctctgcacacttagagcccaccatgaagcatcttttctgttgcttcactgactcaccgctccttgagaacggagatgagtgaggaatgagtcagttgtctgcccgttcatacatcatc

SEQ ID NO: 65366 - DNA, 122 bp, Homo sapiens
tcagggagtctactccacttgcaggacctctttgattgagttcactaaacctcacagggccgccttccccgtgttccagttagcaaggggccctcaacgccgcggacacagcgcaacctccg

SEQ ID NO: 65367 - DNA, 122 bp, Homo sapiens
caaggccatctcttatccctgctgcctgatccagatgtacttcttccatttctttggcatcgtggacagcgtcataatcgccatgatggcttatgaccggttcgtggccatctgccacccat

SEQ ID NO: 65368 - DNA, 122 bp, Homo sapiens
aagtggaggtgtcgccgggcccaaatagggcccagtgggtggctcccccgtcgccagccccggctgtagatgcacgggcagcgccacctgcccccagcctcccccgttagtcttcctctttc

SEQ ID NO: 65369 - DNA, 122 bp, Homo sapiens
aatctgggtggccggaggcctgggtctcttccactgcattccactggtctgctcatgaaacgggaggcggttcagccgcctgtgggagataaacacgccaagccttcagaacaactgcagaa

SEQ ID NO: 65370 - DNA, 122 bp, Homo sapiens
ctgtttaatgactgacaattaggcttcaatggcgttcacgttgacgggtgctggatcgcccggcttggggcgtctcacgtggcttcagccctgccctccctgcggatctggctctggtaccc

SEQ ID NO: 65371 - DNA, 122 bp, Homo sapiens
tgaaattctcttctgataaacatcttcccgggataacgaacatctccaggatgtgagagccgagcgcgtgtccgcggagtgcttgagcaacgcagaatggcttcggtgctgcgttccttaga

SEQ ID NO: 65372 - DNA, 122 bp, Homo sapiens
gtactttacagctccccacacctctatggcccagatccaagttgccccttgggtgggcagcgtctaatcctctgggaatttgggcagtaggagaggcagctgctactcccaccactctcagc

SEQ ID NO: 65373 - DNA, 122 bp, Homo sapiens
gcagcacagactgaaaagtgttttgtctgaagagcagaactgtcttataccagccctgtgcggccaggcaggaaggcttccgtggtgcggccacgcgtcctccctttctcaacagaagctga

SEQ ID NO: 65374 - DNA, 122 bp, Homo sapiens
aacagtacgtcctgccttcttcctaaagccatttccttcaacagcgataggagtgcagaccgtctgcaagtcattagtacgctgctgtcttcactgtcacaaggaccctggaaaccactgaa

SEQ ID NO: 65375 - DNA, 122 bp, Homo sapiens
cagaagctgaagtagtctataaaacagagaagatagataactctcacccttcctcacttccgttatctatcagggccagcctgctgtcaggactgccaactgccatggaatcatctattggt

SEQ ID NO: 65376 - DNA, 122 bp, Homo sapiens
agggccctggggagccacggaaggctctaggcagaggcagggcctcttgggttagaaggacggcctggagttgggatcctgccacccggcacttaccagcagacaccccaccatgagattat

SEQ ID NO: 65377 - DNA, 122 bp, Homo sapiens
gctactctggagtccaggaaaccaactggagaatcagcccggaggcgagtctggcagggacgttgggagaaggcgcccaagagcactcaccaccttcgccgcggtccccagcctcttcctgt

SEQ ID NO: 65378 - DNA, 122 bp, Homo sapiens
tggggctggctatttcctttcctccaggtgactgaggttctgctataacttcagcaggttcggtgcttgttataatagaaagatcagaaagctctggagtatttcaaaatggttccttctcc

SEQ ID NO: 65379 - DNA, 122 bp, Homo sapiens
tctgagccattgtctctcagggagggcatgtagattctaaaaatacacatggttagatggcgagtatttgccaagtcacgtggcaagaacgccttcccactgtggctggcaggcagaggggt

SEQ ID NO: 65380 - DNA, 122 bp, Homo sapiens
aaaagttaaagagaaacacctaagcccttattcctttgctgagacaagctatctttgtgacgcttgcaaacagattgttgccatgggccacattcacacagcactcttgcaagccaggtacc

SEQ ID NO: 65381 - DNA, 122 bp, Homo sapiens
gaaggaagcacgcctggagcggatccgaaactactgagaggggccagggctggccgtgggcgcaggccgatccttacattcgaggccggcccagctctgtagcttccccctctgggcctctc

SEQ ID NO: 65382 - DNA, 122 bp, Homo sapiens
cgccggagagttccgcgcgtgtcctcgggctgtccgcggggaagctggtccgggagtgggcgcccgcccgcctgcctcgcgccttgcgcccccggcaccgcttccagaagggaaagtcgccg

SEQ ID NO: 65383 - DNA, 122 bp, Homo sapiens
attcccaggcagaggccttctctgtcaccttggtgggtgaataattgtgccttttgcatacgccttgtcatcagcagcaggaatgagggggccccaaggaccgccctggcagcacgggcgtt

SEQ ID NO: 65384 - DNA, 122 bp, Homo sapiens
ttctcaagaaagagccagttcactgttaagtttgtctcccattaggtaccctttgggactcgcttcgtacatataaatgtacttgtatatgtgggtttttttttgttttttgttgttgtttt

SEQ ID NO: 65385 - DNA, 122 bp, Homo sapiens
atacctttccatgtcaaccaatatgcatctatcttagctagcaaataaattcaattgctgcgcaatattccactatatggatgacttgattgttttcaccaatcttttggacaggtaagtgg

SEQ ID NO: 65386 - DNA, 122 bp, Homo sapiens
ttaagaatcgtgagtgcccaccaaatattctgtctttcgtgggttggttggagagtccagcggcccgggcccaacctggctgcggagggctcgctccacgttggctcgtgtgtgggccgggt

SEQ ID NO: 65387 - DNA, 122 bp, Homo sapiens
ttttatgagtctgtgctgtgaagagtggtgtctcaagaccaagggaacaatagaggaagacgtattcagctttggtcttgtgccaacatttcctagttttaggttagcaaattcagaaatct

SEQ ID NO: 65388 - DNA, 122 bp, Homo sapiens
ggagacaggaggatgttccaatgtcccaaggctcctgcgtttttgaaagcctttgcacctcgtttggggattcctggagggaggcctgcgctcattcatgggctggaactgagggaaattgt

SEQ ID NO: 65389 - DNA, 122 bp, Homo sapiens
ggggacccacttcggaatctcaggatggctgtgcagagactcagggcacgggcctggggtcggagcaactgcaatcacatcctgacttgccccctcgatgctgtgtgacccggggcctgtcg

SEQ ID NO: 65390 - DNA, 122 bp, Homo sapiens
ctgggagtggggagaaggatgcacgactgaattatcatgataatcttctagtaaagactccgcgggagactgagaagctgggagagcaaaatatgcagcaagtgccattaggataaagaggc

SEQ ID NO: 65391 - DNA, 122 bp, Homo sapiens
ctaaaaaatgtcatggaaagagtacgccccgtgtacccaccacgcaactgaacagtaacacggcacggggagcgtgggaggctccggcttgtttctccgcccctgtgtttccgcctaactcg

SEQ ID NO: 65392 - DNA, 122 bp, Homo sapiens
gcgcccacgcgcacgcgcccagcggctcagggctccctggctctcaccggctctgctgcccggaggcagccgcttaccctggagccctgagaggcccctttgagtctccagaccttccaggg

SEQ ID NO: 65393 - DNA, 122 bp, Homo sapiens
cgcgatgggtcggccgtggggagcggggcgggaagcgcttcagggcagcggatcccatgtcggccctgaggcgctcgggctacggccccagtgacggtccgtcctacggccgctactacggg

SEQ ID NO: 65394 - DNA, 122 bp, Homo sapiens
cctgtgggaaacgtagtccaacaacgaaagagccctgaagctcaagcggagcccgctggccgcaggggccgcaccacgccccagaccctggagtttccgggtgcgcagacccttgccatcag

SEQ ID NO: 65395 - DNA, 122 bp, Homo sapiens
tccgcgtggagccctgggcctggcagacacaagtttctctccctcccatccccagaccatcgagaacatcaaggtggggctgcatgagaaggagctctggaagaagttccacgaggcgggca

SEQ ID NO: 65396 - DNA, 122 bp, Homo sapiens
cagggctcaaatattccgtgccgtgtcggatcaaaacacacggcgcctgcaggcccatctcgaggctggttggacagccacggcccctccatgtccccactcccgtcagcccgtggtggccc

SEQ ID NO: 65397 - DNA, 122 bp, Homo sapiens
gggtcagaagtcgaggactcagaggtggaattcttatgggcacccacagggtagtcgatccgctctcctctggaagatggtcacctttcgaggacctgaagatttttttttaggtggcaccc

SEQ ID NO: 65398 - DNA, 122 bp, Homo sapiens
tataggtaagaacattgaggctcagatggagtgaactacaagcagaagcaggcttggcttcgccccctgcaccatttgagagtcccaggtatgtaaagtcattcaattcagtcatctactct

SEQ ID NO: 65399 - DNA, 122 bp, Homo sapiens
ctcacagctcctgggaacgctgtcctctcagataagccatttcttacatagttgatggctcgatatctgtggtggcccagattgttttgttttgtttcgctttgttttgttttcttttgttt

SEQ ID NO: 65400 - DNA, 122 bp, Homo sapiens
gacctcctgttggacccccacgttttggctgtatcctttatcccagccagtcatccagctcgaccttatgagaaggtaccttgcccaggtctggcacatagtagagtctcaataaatgtcac

SEQ ID NO: 65401 - DNA, 122 bp, Homo sapiens
ctggttacagggagctcatgtcgcacctcagctgctctctcaaggctgcgtctgtcatcgcgggaggtgtattttagctcaaattgccccactggcttcccataattgtctttcaccctttg

SEQ ID NO: 65402 - DNA, 122 bp, Homo sapiens
aaaggaggaacttgaggagaagcagacactatttctccttctctgtttctcctggcagttcgtggctactccatggggctggatggctactccaacaggatggagacatttttaagattcag

SEQ ID NO: 65403 - DNA, 122 bp, Homo sapiens
ccacccctgcgtctggcgctgtcgcagcaactaccctcggactggtggggtaaggcgaggcgggtgaacagtgctcagggacagctgagagggctcaaaacacagatttagaaaagagattt

SEQ ID NO: 65404 - DNA, 122 bp, Homo sapiens
gctctgtggtcagtaaccttttcatatggagctcagcacagcagctacaggagtaagctgcgtgtggaaagaaagaaagacaatctcatatatcctttcattattagacggccccgtggcct

SEQ ID NO: 65405 - DNA, 122 bp, Homo sapiens
atgctctaaaatttctctgagcacattaggatacaaaccagttctttttaaatccagtaacgtcaaattccaaaatgccactctttctatgtaagacttcctgacaaccaggtaataattaa

SEQ ID NO: 65406 - DNA, 122 bp, Homo sapiens
ctgggatagactcggctagacagttcccccgggtagcaggatcctccagggctccaattccggggtgcaaggaccctccccgactactcccgagctgcaccccagctcgaagccacttgctg

SEQ ID NO: 65407 - DNA, 122 bp, Homo sapiens
tggagtaagaggttacagacaagcaagaggaggctgaagggagccatgcggcagtggatgcgtcttgggacatctgtaagaactcatgtttgactttgtatggatatagatgtcatatatgg

SEQ ID NO: 65408 - DNA, 122 bp, Homo sapiens
tatgctgtggattaatgggctttatgagttcactttagaacctggggacattttccaatacggtttttgtgagaaaatcagtgccagggcacaggaagctcagaagcaatgaaaacccaagt

SEQ ID NO: 65409 - DNA, 122 bp, Homo sapiens
ccctggaacagtcccagaaaataacctctctctcatactcttggatttgtcagtcatcatcggaggaactagccaagtaaaacatgcaacacacacaaccattactgcatttgctaccacag

SEQ ID NO: 65410 - DNA, 122 bp, Homo sapiens
gcccgggttcctggccctggtcgctggcttccaccaccagctcatagctttccatgtgctcgcggtccactcggccgctggtgctgatgaggccggagcgtggatcaatctcgaaggcggcg

SEQ ID NO: 65411 - DNA, 122 bp, Homo sapiens
ctcaaactcctgggattaagcaatcctcccgccttggcctcccagcgttctagaattatacgcgagcgccaccccgccccgctggggtgttatcctttagcggccagccagaggcctcccat

SEQ ID NO: 65412 - DNA, 122 bp, Homo sapiens
tttattttttatttttaaaaaagctctaaacactgaataaataaatgttttgtgacaacacggattcataaactagagggagatttttttgtacactatatatggagacatttcttgctaaa

SEQ ID NO: 65413 - DNA, 122 bp, Homo sapiens
aataatataatggcgcggaaactgtgggcggtggtggtgacatttcccacgactcagtggcgcccccgggcggctcccaccctccctccggccggcgcgtctacgcagccccaagtgctggc

SEQ ID NO: 65414 - DNA, 122 bp, Homo sapiens
tactttaaattcttttgtaatgtctttaatagagacacattttaagaagaattttgttcacggctacgaaagacattcataaatgagtcagagaagaaaaaatagaaaaggtagtgaattat

SEQ ID NO: 65415 - DNA, 122 bp, Homo sapiens
agcgggcgcctggcggctgagcggtgggagttttcggctggcgcccggcggggaattatccgaggagccctaacttgtataaaagcagagtccatttaaagttgggctggatagcctctctc

SEQ ID NO: 65416 - DNA, 122 bp, Homo sapiens
ctgcctgcctttctaaggtcatctctagttacagtaatactgtccagtgccgcctaaggacgtttcagtcaatgagagaccacagatacaatggtggtcctataagattatataatactgta

SEQ ID NO: 65417 - DNA, 122 bp, Homo sapiens
cacttccgcctccctcgccaccaccccggaagcgctcgccgccgaccaggaagaagaacccgcctcgcagcgtcctcttctggcaccccagggtggccttgttgtctgtttcccggccgagt

SEQ ID NO: 65418 - DNA, 122 bp, Homo sapiens
ggggatgaaatgtcattgtgtatggaaggcggggctcatggctgattggcaataaaatggcggctgccgttgtcattgtctccatctcaggatctcacctcagagacccttcctcccctacc

SEQ ID NO: 65419 - DNA, 122 bp, Homo sapiens
acccccagaggacgaagaggtcaagaaccttgcagaaaagttggccgagttcatagcgcgcggggatcccgagatggaaaccatcgccctccagaaaaaccgcgaaaaccaggcgttcagct

SEQ ID NO: 65420 - DNA, 122 bp, Homo sapiens
tggctttcatcccctgccagaagctgctttttccggggcaaaacctctgccttggattcacgcatgttcctgtccacattccccacgagttgctctccttaccataacggaaataatttgta

SEQ ID NO: 65421 - DNA, 122 bp, Homo sapiens
gtcctcacaatagccaggtgatgtaggcctcctcattcattcaccagtacttctgggcctcgctactagcaaaaaaaatggccaatacagagcccctaccatcataggggcaaagaaaagtt

SEQ ID NO: 65422 - DNA, 122 bp, Homo sapiens
tgcttctttacttctggaatctgttttcatgtcccgtctctcaggggcctttcttgtttgcgtgactggcttaaacttaccaaagggcaatgctatgctggaaggccagcctctgcccatca

SEQ ID NO: 65423 - DNA, 122 bp, Homo sapiens
aaagccttgcgtcgagcggcagtactttgatccaatgaaaatccaagacaggggcatttccgtgtgggtctacccccgccccccccagggcgggacttgtggcgtcttcgcagcggtcattt

SEQ ID NO: 65424 - DNA, 122 bp, Homo sapiens
ccataaaccaaaccacttgtttatctgtcattcccacagagatagtaatgtaattactctcgtaattatcttcattagtgtcaggcattatctacaattcattcctctgctcgaagagtatg

SEQ ID NO: 65425 - DNA, 122 bp, Homo sapiens
aagccgaagattccagcagcccaggggatttcaaagagctcagactcagaggaacatctgcggagagacccccgaagccctctccagggcagtcctcatccagacgctccgctagtgcagac

SEQ ID NO: 65426 - DNA, 122 bp, Homo sapiens
tgtgaacttcctccttcttcctcttcattttgcagaagccgtggagaccacagaagcaggcgaaagtgaactggggcatgccctacgccaggctgggggaacactcaccagagatctgcagg

SEQ ID NO: 65427 - DNA, 122 bp, Homo sapiens
atggacgagggctgcctagcccaggtcagactccggccacaacagggcatgccttcctcccgtgatctgtgaacacagtattgccagaggagcaggtcgaagatcccaggtaacccaactgc

SEQ ID NO: 65428 - DNA, 122 bp, Homo sapiens
ctgcagccggagcggccctaattgcagtcacagatgtggcagccaccagcctctcccgcgcgatctgccgtgtggcgtgtgcttaattagtccctgattactcatttgccgggtgctgtgtg

SEQ ID NO: 65429 - DNA, 122 bp, Homo sapiens
gaaaagtcacctttcagcaaatggttgtaccgccctcacctaaggggcctctttatactccgtggacatccagggcagaccctgcttgggcaggcacagtctaaatggcccagcctcaaagc

SEQ ID NO: 65430 - DNA, 122 bp, Homo sapiens
atggggctgtgtcactgtgggcatagcagctggtactactacaatatcctcacagtgacacgagcccccacaaaatcctcctgtccccgcgggagtcactgagtcccctcttgctgtctctg

SEQ ID NO: 65431 - DNA, 122 bp, Homo sapiens
gagccaaacccagtctcaggcgcccagagctgactcctcctacagcccccataagggatacgctaatgcaggaagaccaaagtggaagaaccatggccaaggccactttgcaatttgggttt

SEQ ID NO: 65432 - DNA, 122 bp, Homo sapiens
tgcacgtctgtaggaatcctcgtgcctgacaagactattctggcttgcttattcagaatccgtacttcacccgtttcttcccactgttctttttgttcaagtcaacatcccccttattctaa

SEQ ID NO: 65433 - DNA, 122 bp, Homo sapiens
aaaaaaaaaaaaaacaactactccagacagaccttctccatcgaccgtttagtatttttgcgtgccctacaagcatttttaaaagtgaaagcatggggccgggcgcagtggctcacgcctgt

SEQ ID NO: 65434 - DNA, 122 bp, Homo sapiens
cgcttgcacctttgctctcacagcaagcgagtcctggccgcagccgctggaaaaaggtgccgcagcgcccagtttacctggaattcagggacctgaccctgactctatttccggctagtccc

SEQ ID NO: 65435 - DNA, 122 bp, Homo sapiens
atcatcctttgggtaagcattggcatcgaagaagtcctgtaagaccctcagctggtagtccgtaaaccttgttcttgaagacctcttgcttccccagtactcctgctttggaggttccggcg

SEQ ID NO: 65436 - DNA, 122 bp, Homo sapiens
ctccaaggatgaaaagagccgtttgtttcgtctggggaccgtcgcgtttggcccttcccccgcctccaacaattcccggcgaagccccgcggcaccaagccgggcctcccacccccccggcg

SEQ ID NO: 65437 - DNA, 122 bp, Homo sapiens
ataacaacattcttcttgaagtgctgaacaataggcctttggagagactgtgataaaccacgtcagactccggacaaacacgagtgtaaaaataggcatcagaggcattgacacagccacct

SEQ ID NO: 65438 - DNA, 122 bp, Homo sapiens
attcacccacatgcttgacagccatgttcatgtactgacgtgttcccgacagctcagctgcggttatttatttcgtcaattagctctccaggagctaaggatgtggccctcaccagaatgtc

SEQ ID NO: 65439 - DNA, 122 bp, Homo sapiens
atgcaacaggtcccatcgtcagccagccacactcactcactcacactacggagtcgacgccggactcactcacactacggagtcgaagccggactcacactacggagtcgacgccggactca

SEQ ID NO: 65440 - DNA, 122 bp, Homo sapiens
ccacccagcgcagggaccaacggaaaacccgcgcggcgccaggaccagggggctgcccgacgccgctcgcggactagttcctcagactgtgggactccctagtgccggctttgcccagggct

SEQ ID NO: 65441 - DNA, 122 bp, Homo sapiens
agatgttgtagactgttgctcggtcagtgcaaatgagagctgctagcctcgctgtaacctcgctggctgggtactctcagagattgttaagagttttaaaatttttctaatcactaagcatg

SEQ ID NO: 65442 - DNA, 122 bp, Homo sapiens
actcagtgcttgctttgttgagcatgacagtagccactggtattccatgaattctcttaacgggaggaggacatgaggacacaggcatccgacatctgtgccttcctctttggtctgcaatc

SEQ ID NO: 65443 - DNA, 122 bp, Homo sapiens
tctcccgagggtgccgggccaccggccgcccagggctgcgtgccccggcacagcgtcatccgcagcctgttctaccaccaggcgggtgagagccctgagcacggggccctggccccggggag

SEQ ID NO: 65444 - DNA, 122 bp, Homo sapiens
cgcccaggcacaggggatccagggagggcagctggtagatggccaggctgttggggttttcgccgccggtggccagaagcgtcttggagggattcagctcgatggcatggatgccgcagccc

SEQ ID NO: 65445 - DNA, 122 bp, Homo sapiens
ggatttttttttccatctgaagactttttggaagtagaataggtccacattttaaatacacgatgacatttgggtttaaaaatagagatatgcactgtcatgcattttgtggcgagctggag

SEQ ID NO: 65446 - DNA, 122 bp, Homo sapiens
gggtcatacctcccacatggccgatgggataaggggtagtggccatgttcctccccagcacgatctcaaaccagagcctgaggcatgggagaggccagaatacagtggtaagaagggagtca

SEQ ID NO: 65447 - DNA, 122 bp, Homo sapiens
agaagacaaaataaacatctggaaagttaatcaccaacaaaagaattaaataaccataagcgtgataattcaacagccaccgcatggaagcaaatgaataacttctcattggtggtatggac

SEQ ID NO: 65448 - DNA, 122 bp, Homo sapiens
gaaactgttgttgattttgcgggtatcaatgtcctcctccattgacagcaggcttacttgcgtgggaaccagaagccggcagacaagtatccatgatccctccccgcagccagtctcacagg

SEQ ID NO: 65449 - DNA, 122 bp, Homo sapiens
cctgacaactcgtggtcacaggatcaagatcctcgtccctaagaaaggaacccagatcagcgctccttcacacgaacagatgttcatgccccatgatgggctgtatcttctgaagcccagga

SEQ ID NO: 65450 - DNA, 122 bp, Homo sapiens
aaatcccagtgaaaataatcacactaaatactatttgtagcagcccagagacatggaacacgggctgaatcctttgcgtttctttgtaattggaaaaggatgtttttacatcttgacatttt

SEQ ID NO: 65451 - DNA, 122 bp, Homo sapiens
taacgagggtaaaaaaccacgcctttctctcagggttattgtgggtattcattgagaagacgtgtgtggagcccggtgtccggcacccagtgagagcctggaacaatcattaggatgtctga

SEQ ID NO: 65452 - DNA, 122 bp, Homo sapiens
agaggaggatgcatgctaacaaggcccccagcttgcctggggactgagtgactgtgtgtgcgctctgtccaggggcttctttttagagacgttcctgcaccatgtctgctgttgaaaggaga

SEQ ID NO: 65453 - DNA, 122 bp, Homo sapiens
atgcacagggaagaggcttccctgtaccagtgactgggcgaccgagccgggatttgggagcggggaggaggctggagctggaggagaggaggggtttccacgggagtcccctcctccccact

SEQ ID NO: 65454 - DNA, 122 bp, Homo sapiens
ccactgtgctgagtcaaagggtgccttgccctggtctaatccaggacatagccgtggatacgtccaaaaatccccagaacctagtgagccctctggctctgggagcccctatctcaggaatt

SEQ ID NO: 65455 - DNA, 122 bp, Homo sapiens
caagttaaatgctacctccagctggcaggcgtcatgggcaaaaacgagtgcatgcaggtgcggacaggacacttgaagaatgaggccaggtggagattgaggccaggtggagaatgaggcaa

SEQ ID NO: 65456 - DNA, 122 bp, Homo sapiens
gccttcatcatgggggacgtgagcagaccgagtgagagctgccatttttctgggtgtgggcggacagttgtgcaggcccatgttatagacagagagactgagggcgagaggcgccgcccgcc

SEQ ID NO: 65457 - DNA, 122 bp, Homo sapiens
agcagtgtgagaatgggctaacacatacaacttgctttttttttgtactcaatattgagtcgtgagctttgcaccacattagaatgtctatttaagtcattactttaaggtcggttctattt

SEQ ID NO: 65458 - DNA, 122 bp, Homo sapiens
ctgggtgtggctgggcgccaataaaactgtatttattaaaacaggcaaggggctgggctgcggcagggcccaggtgcctgggaaagaggtgggaccgggccccaacccccagctcggctccc

SEQ ID NO: 65459 - DNA, 122 bp, Homo sapiens
gccagactctggccagttctacatgttcaaagctctaaacatgctcaaagaaaagaaaaccggaaaaataagctaccatagtgatgcttttttcatgccatgacagtcattcctcctttcac

SEQ ID NO: 65460 - DNA, 122 bp, Homo sapiens
ctcccctatgaaagcttgtcagtgagacagaagaagcaccagaagcccccagcgagagcccgacattggaatacctagcttctcaggatccactgggcctcccactatggcctcaagccagc

SEQ ID NO: 65461 - DNA, 122 bp, Homo sapiens
tttattcaatttgcgaggagcctgcgaggcgcaggtgcgcggtgactctgtggttcccaccgcacccgctgccctctttggtcctctcgctgtcaccggcgggcagtaacgttccgggtgag

SEQ ID NO: 65462 - DNA, 122 bp, Homo sapiens
tgcttactatcgctggaatgacatgggcagttatactgcatgggtttgttcactgctgatcgttcagcacccacaatatgcctggcatgcgagcagcattcaataaatatcgctgaatcact

SEQ ID NO: 65463 - DNA, 122 bp, Homo sapiens
gtttttccccaaggaaaaaacaagaggggtctctgaagaaaccaagcctatttcccaaatcgcctatggtcatctgcaaaaaaatggaagggaggcccagggccagggatgccgaggtggtg

SEQ ID NO: 65464 - DNA, 122 bp, Homo sapiens
accccctactctcactccacgtgaggggataggatggagcaagatgaaggctgagtatgacgggcccacaagtcctgttcttggcccgtgttctctaatcataattacagccactgcctgtt

SEQ ID NO: 65465 - DNA, 122 bp, Homo sapiens
gctgaagcagtgcgaagagtacggggctcctcttcagaagacctgagttccgaagctgcccggggcccgccggcgctcacccacactcccgccctcaaccccacgaccctcactgtcctcgt

SEQ ID NO: 65466 - DNA, 122 bp, Homo sapiens
agaaacatgagctcccatcacaaagcacccctgcaccttgacatcatggtgaggcagcggcgcacgctggtgccagccactgtgatgaatggccaaattccatttgccctttcacaatgcac

SEQ ID NO: 65467 - DNA, 122 bp, Homo sapiens
ggcaatttgggtgactctggagtggttgcatgaccccacttatctgtaaaatggagagaacgttcttgcttgtgtctaacaatgtgcttaagcttgaatgaagcaatagttgagcataccca

SEQ ID NO: 65468 - DNA, 122 bp, Homo sapiens
cattgccctggagtgccagagaagtgtggaaaatcccaggcatcccccaaagccctggcccggcccacccagaggaccccttaagaggagtgatcttactcagggtagtgcctgacgagaag

SEQ ID NO: 65469 - DNA, 122 bp, Homo sapiens
gctggtgcaggcttgctgggggatgtcggctgatgcgagctggagagcgcgtgtggcggccgcggcgccagtgtttgtgtgtatgtgagaaagcaaggggcgagcgcgagtgcgagtgaggc

SEQ ID NO: 65470 - DNA, 122 bp, Homo sapiens
gtttgacacacagacctcagcgaagctgtatgtactgcctaaaagtaggaaagatctccacgttgatttctgaattgtaaaaggcagggatatgttttggacttcttgtcccttactgtgaa

SEQ ID NO: 65471 - DNA, 122 bp, Homo sapiens
gtgctgcagggtcttcagccgcccccagagggctgtcagaagtctccaactcttgagttccggcgtgccccaacctctgtttccaaatttttccagcggacgcgcgcccttttctgggaacc

SEQ ID NO: 65472 - DNA, 122 bp, Homo sapiens
atatattgcctgggaggcaggctgcccagttctgagtagtcagtctttggcctgactccacggagcctcattaatctcccattaatcacattaataagcagttggcctcctctcctcttccc

SEQ ID NO: 65473 - DNA, 122 bp, Homo sapiens
aattcctcttttcggcaggggcattgatcaatcgataccaagcaggggtcgggatcgatacggttccggggtctttggatactggggtttgatatctttttcttccccgaccctcccccttc

SEQ ID NO: 65474 - DNA, 122 bp, Homo sapiens
cactctgtttgtaatgtctgcaagtggatattcggacctctttgaggccttcgttggaaacgggatttcttcatattatgctagaaagaagaattctcagtaacttctttgtgttgtgtgta

SEQ ID NO: 65475 - DNA, 122 bp, Homo sapiens
cgcgctgcagagaggcgggcacgatctctggcggcaggtgcaggtactggcggaggtgggcgatgccttcattggtgaggtaccagtaaaagtggcaccaggcaaaggtctcgcggaccagg

SEQ ID NO: 65476 - DNA, 122 bp, Homo sapiens
ggctcctaaggccaaggattgattcacagttgttgacttagtccatcttccccactagaccgggacctccccaagggcagacactaggtttgaatcaccttcgagtcccaggcattgtccag

SEQ ID NO: 65477 - DNA, 122 bp, Homo sapiens
gccgccgcgcgtgcgcagtccttgtttttgggctccggcgcggctttctagagatatctacggaaagggcggggcctcccagctccttcgcgatccttcctggcgccggccccgcccttcgt

SEQ ID NO: 65478 - DNA, 122 bp, Homo sapiens
agggaagcgctgggcggaagtggctgtggctttgccctttggcctttgctggctgtgtggcggctccgcggttcgcaggtcgttcgctgagcgtctctgcttagccgcggtcatgagccggc

SEQ ID NO: 65479 - DNA, 122 bp, Homo sapiens
cctccctctccgcgtccctgaagcccctgcctgcgctgagttccttggagctgggggctgcgataccagtctcttggagggtggtgcccggcgcggccgcgcccctttctctatatccattc

SEQ ID NO: 65480 - DNA, 122 bp, Homo sapiens
gtcaccggagcctgctgaggggtctggttcggggtctggatggggctcgacttcacgcctcggcctcgcttctccatctcgctctgttctccaagacgcccaccgcctccccttcaccgccg

SEQ ID NO: 65481 - DNA, 122 bp, Homo sapiens
acccttctgggccgccccacctgcgaggatgggagtcagaaagcccagggcgggccacaacgtggtggcattaatcatatgtggccacagtggctcgttaaggagatgatacattttgtgga

SEQ ID NO: 65482 - DNA, 122 bp, Homo sapiens
aggctctggagtccggcattgcatagtcctttgtgactgacacgtggttccaacgctcatcggtgctgcagcacgcataggtgcctccctgtttttcatggctaagtaatattccaaggtgt

SEQ ID NO: 65483 - DNA, 122 bp, Homo sapiens
ggacccggttgataggcagagcctggcgacttcgaagactcgcccccagtcaaagagccccggggattcgtttccgtacgcagcctggaaaccagcctgggcctatcctgcgcgccgctgcg

SEQ ID NO: 65484 - DNA, 122 bp, Homo sapiens
cagatctaatcgcattatttccctgctgttaacacttcaaagccttcctgttgctctaggcgtaaaggcaaaactccttaacataatttacaaggacatgcctggcctaaccccttccctgt

SEQ ID NO: 65485 - DNA, 122 bp, Homo sapiens
gccaagtctcgcgctcggccaggagccggggagtaccccaggtccccggtctggggccgccgctatcctaccctgcggcgcgcactcctgacctggccccgccccccggcggccgcgagtag

SEQ ID NO: 65486 - DNA, 122 bp, Homo sapiens
tcaggacccaggcctgacagagtccccggcagctacagaagtgcatgctccctctctgcacgggccacttctggtacctcttggtgttgaagtaatttaagtcagaaccccttttattgccc

SEQ ID NO: 65487 - DNA, 122 bp, Homo sapiens
aggaaatgatgcagggtgaacagtgggaaggaggcggcggacggaggggctgggggaagtcgctgtgcctaggacacccacgtgcgaaggccaacaccagcgctgcaggacgccagttggtg

SEQ ID NO: 65488 - DNA, 122 bp, Homo sapiens
gaggctcctggtagccccagagctttccatatcatcttggcaaagcccttttcctccatccgtccatcagcagggctgtgagtgtggcaaggtgagatgacagatttccaggcaagggctgc

SEQ ID NO: 65489 - DNA, 122 bp, Homo sapiens
ttctccaaacatgagaattttcaaacaggagtctcagataatatttccttctcttcatctcgacttcctctttcatttaccttactttccttcacttatgcttgtttaaaaaccctggattt

SEQ ID NO: 65490 - DNA, 122 bp, Homo sapiens
cgctttggtcaggacagatcagccctgtgtgtccccagcctctcccctgctcccccatcccgggcttcccagtgtccagaactccaggtctatctaagcacacgggggtggggggtgagagc

SEQ ID NO: 65491 - DNA, 122 bp, Homo sapiens
tctcaggcgcctttacccggttctttttcagtttaggccaaaatgcccacagggtggtggcgacgggggcggggcttggtgggcgggactgactaaggggcggggccagggtctcacaccct

SEQ ID NO: 65492 - DNA, 122 bp, Homo sapiens
gcacaatcaggtgtgtgaggggctttgggctgggaggccccggctcctacactgtggctccggaagggctgctgtgctagagcttgtcaggcccggacctggagagggtggagggctctcac

SEQ ID NO: 65493 - DNA, 122 bp, Homo sapiens
agctggaggaggaactaactgtaagtgtgtctcgaacttgcgcgggggcttcagcccgcccggggctgcggagctggccggtaaaggctctcgggagaggggcgcggtgtctccacggtgac

SEQ ID NO: 65494 - DNA, 122 bp, Homo sapiens
agcagacaatggctccaagtagacgtctctaggtagatggtgtcttcaggtagatggtatcggaattaaactggagcacgcccagccggcgtcggctgcaaaactgactaatctgttgttgg

SEQ ID NO: 65495 - DNA, 122 bp, Homo sapiens
gtcgcgggagctacggctgcgggagttaccctttattctgtgatattttgagctgttctgcgtctcgcaggcccttctgaatttcctggacctactctcggaaccctcaacgagctagcgat

SEQ ID NO: 65496 - DNA, 122 bp, Homo sapiens
ccacagagggtcaggagtgttggcacctgtcttccgggtcagttcacccgtcccctggaccggcaccgccacagagggtcaggagtgttggcacctgtcttccggatctgttcacccgtccc

SEQ ID NO: 65497 - DNA, 122 bp, Homo sapiens
gacgtcaagagcgaaagctcggaggcgtcaaaatgagcagcaagtccaggcacaaggcgtcgggcgcggagagtacggcgggtgccgggggagggagatgaggccgcgaagacgccggggct

SEQ ID NO: 65498 - DNA, 122 bp, Homo sapiens
tcccgctatgggcgccgactccggggtccgtgctttgcctcccccggctccgaggaaacgcgccaaggagctgaggaaatccggcgcagactctcccagctggcaccaaagccttccgcttc

SEQ ID NO: 65499 - DNA, 122 bp, Homo sapiens
tctcttgtgatgtctgtgaaatgtttagaatgacaaagtttttaaaagacctgctgactccgcctgaaaaatgtgaaaaacctcccatttagagacctattatgtccagctagcctgcattt

SEQ ID NO: 65500 - DNA, 122 bp, Homo sapiens
cagcgccagggcaggctcttctacagcgcgggacactgtaggcaagaggctgccggtgttcgtgaccgcgagctctcggccgggcccagctactgcagtatcggcgctggaaaggcgatcaa

SEQ ID NO: 65501 - DNA, 122 bp, Homo sapiens
tggcggcgcgggcaggtcccgggtggggtggggggaagtccggttgatcttgctgttacccgggtcttaattggccttttcagtcattaggacgcggatccatgttgctgcgggctacagag

SEQ ID NO: 65502 - DNA, 122 bp, Homo sapiens
aatatatttttttaaaaaatgaccaatttgctccactgcaattcttaaggctgttttagtcgccactttaatttcctggctggcttgaagtcttctgtttactagcaagtcaaacatagaga

SEQ ID NO: 65503 - DNA, 122 bp, Homo sapiens
ggggcgggaggcgcggggcgcggggcgcgcgcgccccctgccggccggcggacccgttgccggcgcccccgccccgcccggcctggccctgccctgcccacccgagcctgcgccgcgcgccg

SEQ ID NO: 65504 - DNA, 122 bp, Homo sapiens
aaaaaacaatagtcaggctgggtgcagtggttcatgcctgtaatcccaaggcgggaggatcgcttgaaccaggaggttgagaacagctagggcagtatagtgagaccctatttttaccaaaa

SEQ ID NO: 65505 - DNA, 122 bp, Homo sapiens
attgctatttggatggacccccaccactccgagacccccgagaacccgccacgtttaccacgcaggattgttcgttacagtgggagaaacagatggaccgagagagacagagtgacagatga

SEQ ID NO: 65506 - DNA, 122 bp, Homo sapiens
tttctctccttggttcctgggtcctggcaacgtgttaaatgtaccacccatggttgtaggcgtggtcctccaagccgtggaactggataaactaagtgatgggattaaccatactttaccca

SEQ ID NO: 65507 - DNA, 122 bp, Homo sapiens
tattaactcatttaatcctctcaacaaccacatgaagtcagtagattaccattcccatttcgtagatgaggaagcaaagaagtaactttctcaaggtcaactaccaggaagggtcacgtgga

SEQ ID NO: 65508 - DNA, 122 bp, Homo sapiens
aactccctctatcaagccttttcataagggcacctgatcccattcgcaaagctctatcttcgtgacttgacttaatcacttcccaaaggtcccacctcctaatacttacactgtttcaacag

SEQ ID NO: 65509 - DNA, 122 bp, Homo sapiens
ttttctttgtgtgtgtgtgtgtgtttgtgggtggcagagaggagagagagagagagaggccgcagtgttgctaattagaggtttagaaagaaagaggagagcctggcccatataatcttcat

SEQ ID NO: 65510 - DNA, 122 bp, Homo sapiens
gggcaagctggggaggcctaagcggactgggaagttaggctttccctccacttcaccagtcggctgcccctgcggaaaccggcccgacacacctcgctcctaaagccagttgcggtggtggt

SEQ ID NO: 65511 - DNA, 122 bp, Homo sapiens
attttcctaggatgggaatagttctctccatttccacagggtgctggcaagatttggtgacgtccccagtgaggtgcttggcacacagtgagggggtggtctcttctgcacgaccggggtcc

SEQ ID NO: 65512 - DNA, 122 bp, Homo sapiens
cggaactggggagggggtgctggccagggtgggctcaggccctccccactaaggccagctcggcccagggcctccctgcgcagcccagcgcgccttgtcggagaggctcctaggaccggagg

SEQ ID NO: 65513 - DNA, 122 bp, Homo sapiens
agccaagctgagaggaggaatccacaagtagcagctggctgcagggtaccacagaggaagcggcgtgatggcgaaacaaagccacagaagcagcgtcttcctttctagagcagactgaacag

SEQ ID NO: 65514 - DNA, 122 bp, Homo sapiens
acggcggcacgggggaacacagcaaagcctcagcagcctcagctgggccaccatggccaacgtgggcaggactcttgtgcgtgctcaccgcgccgtgacatgagagcagcacgccgcctctg

SEQ ID NO: 65515 - DNA, 122 bp, Homo sapiens
catagcaggcccctccctttatcccagacccgccccggccctccgtagaccacgcccctccgattccgggcccgccccaatccttggtttctggtcccggccccgcccctccgcagacctgg

SEQ ID NO: 65516 - DNA, 122 bp, Homo sapiens
tagaaccagcagtgggcggggccagggcgggacctgtgagtctctcagcatcgttcccagcgcagaggcatttttcgggttttggaggcgagaccggccaggaaggctgaggcatgattcaa

SEQ ID NO: 65517 - DNA, 122 bp, Homo sapiens
accctgccttctcccaactctgcgaggcggggaggacggatgtaaagcaagctgcacttccgctgcctagagggcgctggccgggcccggcgccccaacctggctttgcagcagcggctccc

SEQ ID NO: 65518 - DNA, 122 bp, Homo sapiens
aaagtggtcctttcaaatcttcagaccactagcagtgtctctgcctcaatattatctccacgcagaatttctttcaaaattcaaaattcaaaatctatatgctcctgggatatgtaatccac

SEQ ID NO: 65519 - DNA, 122 bp, Homo sapiens
gtgtgcagtgtttgtgcatgtgagcatgcacgtgtatgtgggtgaacacatgtgtgcatgcgtttgtcactgctctggctaggcccagctgccccactcatatgtgcacccaggacactggg

SEQ ID NO: 65520 - DNA, 122 bp, Homo sapiens
agtgtggtcggggtccccttctcctcccctgaggagccctggggctggcacttggtgtcacgcttgctgtgcgcgtccctgacggcggtgtcgtcacccttgaggtcctgcacgaggttata

SEQ ID NO: 65521 - DNA, 122 bp, Homo sapiens
caggttattctgaagaagctggatggcatcccagactgtgacattagcccagtgcagattcgcaaatgcacagagaagtttctttgcttcatgaaaggacattttgataacctttttagcaa

SEQ ID NO: 65522 - DNA, 122 bp, Homo sapiens
tgcccaggccgagccctcaccacgcagtcccacctgccaccctccctccccggccggggccgagccctcaccaggcagtcccgctgcagcgtcttgaccagggcgctgaaggtgtcggcgtc

SEQ ID NO: 65523 - DNA, 122 bp, Homo sapiens
ctaggtaggtccgctcccactgttgatttatctgatagtgttttccattgtcataacaaccggctgcaaataattgaaggaaaacgttacatttgcatttctccttttcccaaaattatgga

SEQ ID NO: 65524 - DNA, 122 bp, Homo sapiens
catgacaccaagacctcacacggaggcccatagccgcttggataaactgtttggagctggcgtcctttaagactaggagggtctcctaagagggccctcatagaacaacaaaggggactgag

SEQ ID NO: 65525 - DNA, 122 bp, Homo sapiens
ggggaattgttcaaacagaggctgttatgactattgctacagtgactgctgttgtagtcacgctgagtgagaaaaagaggttgaagagggtcaggggaggagtcctgggaagttccccagtc

SEQ ID NO: 65526 - DNA, 122 bp, Homo sapiens
agcctggtgggtccctggtgccgtgggaaatcttcctcatcaccctggtctcggttgtggcggccgtggggctctttgctgggctcttcttctgtgtggtgagtgcctaatatgtaagaaaa

SEQ ID NO: 65527 - DNA, 122 bp, Homo sapiens
caccttgtcagcctcgggctcagctgccagcaccggggcctctgagggcgtgacggtctccgtcgctccagtctctgtgcgctgcagctgcgactccacgtactccctcagtgactccaaat

SEQ ID NO: 65528 - DNA, 122 bp, Homo sapiens
gagagccttcctgcatagcaggcccagcataaggctctgatgccaggcctggcacaggcccggccgcagcgatgccagtgtgtgactgaacaaatgaacctttggccctgtctacgttgtta

SEQ ID NO: 65529 - DNA, 122 bp, Homo sapiens
tctttcaacggaggagggaggcagagggctcactgattagtgaactttcagctgacaccacggcttcagggccatgtgaacattctgtgctgcagcgacgccctgcctgaataaccagatgt

SEQ ID NO: 65530 - DNA, 122 bp, Homo sapiens
tgagggaatccattcttttgctccctagctgctcaacttggggctcctccttgcttggttcggaagcagccccagaaaccctcaatgcccccgagtccttagtcttgggatgccccacatct

SEQ ID NO: 65531 - DNA, 122 bp, Homo sapiens
gctcctcatgtaggacgcggttccctcctctgagatcctgcagactctcaggtgctcacacgtgggtgtgcagcggattcagccggcagctctttaaagcggcaggcagatggaaattcgag

SEQ ID NO: 65532 - DNA, 122 bp, Homo sapiens
cccgacacaccctgctgcccttcggacgcctccacgtcagcgaccctctcccgcggtttccggaagcgcctggaaacacgaacttccggtctcttaggctccgggccacagagacggtgtca

SEQ ID NO: 65533 - DNA, 122 bp, Homo sapiens
gggcccggtgcatttagggacttgggagagatccgctgcctcattggtttcaggacctgccggtcatcacggcggtttagccaaccaggtcccccagggggcgggctgtgacctgggccgag

SEQ ID NO: 65534 - DNA, 122 bp, Homo sapiens
aactgcaaacccccagccccagatgttaggcatttacaaactttgttgctgatttatcagcgctcctctgcaattttggggacaggagcaaacacaagcttaagtcaccacgcaggctgcaa

SEQ ID NO: 65535 - DNA, 122 bp, Homo sapiens
agaaaagctgcacctgcaagagcgatggtttcggctgcgtatttggaataacgaagtcagcggtcaggagcaaggagaaggcacacatctcgggcctcatttctgtccccgagcgctccccc

SEQ ID NO: 65536 - DNA, 122 bp, Homo sapiens
agagccatgtgaggactgagtgagataatctgcagtgcctggcacaccacaaggactcagcgagcttggccgaggttgttgttctgtttctactgctgctattgcctctgttcccagcagct

SEQ ID NO: 65537 - DNA, 122 bp, Homo sapiens
ttctgagaggctcctaaagaggcgacccccatccctcacggctgagaagagtgtgatcatcgtttaaggttaaggtccaggttggaagacctccccaaatttaaaccttgctacaaagtatt

SEQ ID NO: 65538 - DNA, 122 bp, Homo sapiens
ctggatgggccggagcccgtggatcccgccacagcaggtgggggtggagagccgaggtgccggtgcgtccctgggttgccgcacgtatatccctgagctcgtccacccagcaacaccccagg

SEQ ID NO: 65539 - DNA, 122 bp, Homo sapiens
acaagtagctggacatcgtgaggaacacatcgccggaagaagacacaagtggctggacgtcgagaagggcacgttagcagaagagcacacggacagacaccgacaagccggcaggccactga

SEQ ID NO: 65540 - DNA, 122 bp, Homo sapiens
ggttggaagtggggtgagcggcgggtgaggccctccaggaccgctcgtttgtagactgagcggtaaagggaggcgatgtttgctgacccaacaaagacagcacgtggagcaggcacaaatgg

SEQ ID NO: 65541 - DNA, 122 bp, Homo sapiens
cgctcatgtccgccccctccccgcagagaattaccttttccagggacggcaggaatgctacgcgtttaatgggacacagcgcttcctggagagatacatctacaaccgggaggagttcgcgc

SEQ ID NO: 65542 - DNA, 122 bp, Homo sapiens
aacccctagaaacaggaagagccaaatgaggttgtgtaagtctgaggcagaaacattagtcgtgagagcaagacttgcatttgcaagagccaggctgtgtgtgtgtttgtgtgtgtgcgtgt

SEQ ID NO: 65543 - DNA, 122 bp, Homo sapiens
ggttccgtggctcgcggattccgggagcaccccagggagtggcacttgcacgccgcggaccgcagggatccccaagccctgcacccagattcttccccgccacggagagacaatcatgacaa

SEQ ID NO: 65544 - DNA, 122 bp, Homo sapiens
catccccacagttctgtgaacggctctgatatcacagaaaggacgtcacccccacagctccgtgaacggctctgataccacaggaaggacgtcatcctatgtcatccccacagttctgtgaa

SEQ ID NO: 65545 - DNA, 122 bp, Homo sapiens
atgtcaacactctacttgctgaccacatttcccagagctatgacgatgagaggaagactgcgctgtattttggcgtttctaataatgacgttcattgcacagaagtccttctggctgcaggt

SEQ ID NO: 65546 - DNA, 122 bp, Homo sapiens
tataatttacgaagaaaatagaaagttttgtttctctgagttgaaatttgccaagcacggcgggaaatattgcaagtttttggcacaaggctttgtgcttcccttataatttgagatctgcg

SEQ ID NO: 65547 - DNA, 122 bp, Homo sapiens
tctatgtgccttaactttgtcatcatttaaactgggcaaaataatagcacttgtcttaatcgggttaatgtgaggactatagtatacatgtcatatgctttgaacagtgactggaactgttg

SEQ ID NO: 65548 - DNA, 122 bp, Homo sapiens
cttcgcccgcccccagccctgcgaaataatactgtcgctttgtcactaaggggctaggagcgattaagagagtacagctcccaggatgtacggcgatggcacccgtttcaactccgcccctc

SEQ ID NO: 65549 - DNA, 122 bp, Homo sapiens
tcttctattgtgaacccattcagagtgagcctgtaatgtgtcgccttccagtgcactaagcggtaatcacacctggtgaatatctaattgggcagacaagaggcggggagtgttcccgttca

SEQ ID NO: 65550 - DNA, 122 bp, Homo sapiens
cggcctcttctgccccattcgctcctctgtgacacaaatacttggggaaagcgcagggctcggacagcgagggtgtggggcgctggctggtgctgctcttagagaatgttttctcttgttct

SEQ ID NO: 65551 - DNA, 122 bp, Homo sapiens
tccagagaagaaacaaagggacaccaagagtgagctaagggcagctgtggctcctgaatccgatggagtcctgggctatgatcaatgtctgcctcatgctccaaagctctgaaatgggcacc

SEQ ID NO: 65552 - DNA, 122 bp, Homo sapiens
tttattttctctctcccccaatgggtttgtcagcagttgcaggacaaggattgacctcatcgcccacgctgtctctcggcccagtgtagggataggaacactgtaggtgtgcaaaagaatgt

SEQ ID NO: 65553 - DNA, 122 bp, Homo sapiens
gtcaccttctcaggtaggatttcttgagtgctctatttaaaattataaatagatgcctcacgctggcatttcctgctttgctttcttcgatagcacttcctgccatctgaaatgctgctgtt

SEQ ID NO: 65554 - DNA, 122 bp, Homo sapiens
ggccgccgccgctgctgccaccacggtgtccacccaacgactctaatgtgggaagtctggcggtggagggtgtcgcgggctctccggcagacccgtagctggtggtggagctgagggccctg

SEQ ID NO: 65555 - DNA, 122 bp, Homo sapiens
tgtgtgcggcctggcagggcagaagtcacagctataactcagctcccggcacgccgcaaccgctcccagcgatctccacgccgcctctgactgacagcccaatggcgcaggcgcgcgatggc

SEQ ID NO: 65556 - DNA, 122 bp, Homo sapiens
ctgggggaaccctgggcaccctgtgaaccctgtggtctgcactggctgccctgctgctgtcgcggggctgcgggcggacgacctgagcccgagctccgagggcccggagcggggcgccaggg

SEQ ID NO: 65557 - DNA, 122 bp, Homo sapiens
gatagccgtcaaagctgcagctgaggcagccaggtgacccctaaacccttcagggtcccccgggccagctgagctgcccgctggcctctgaggggagctcacccatctcccggtggctcttg

SEQ ID NO: 65558 - DNA, 122 bp, Homo sapiens
tccaaatcgattcacacaccattcctcctcagcacacctgccatgtcagatggagagggacgcatgaagtgagaagaaaattacgtgttcgttaggccgccgccacctccgccgctgccgcc

SEQ ID NO: 65559 - DNA, 122 bp, Homo sapiens
atgtggcggggtctttgtctctcgctgcagtcggagtatggtctagtgttcgctgttctgcgtcctctggtcctagaggcccatcctctgtggccctgtgacctgcaggtattgggagatcc

SEQ ID NO: 65560 - DNA, 122 bp, Homo sapiens
cgggctccagtgactacacttttagagccagttttaaaatacaaggacttgcagatcccacgtccagactgactcattggacttggggatggaaatctggcattccacccctccctgccccc

SEQ ID NO: 65561 - DNA, 122 bp, Homo sapiens
ctaatgctgctgctgctgtgacaggaagcggagctcaggcggtaatgcttgctcgcccttcgctcacttcctgctgtgcagccccattcctgacaggccatggacctgtaccggtctgcagc

SEQ ID NO: 65562 - DNA, 122 bp, Homo sapiens
acactggcataaaggcgttcgatgttccactatctttcctgcaggtgttcagcacatgatcggtggtttctagggtctgccatgggtcttactaattatttggaaccaaatataacagaaaa

SEQ ID NO: 65563 - DNA, 122 bp, Homo sapiens
gaacgagcgagtaacgaatccaggcatggagggtgctgtcctccacttggctgctaagctcggccctccgcatgatgccttcacaactccccaagaagcggtgctgtctgctccttcggcct

SEQ ID NO: 65564 - DNA, 122 bp, Homo sapiens
tcgattccatcctgcaacccaggagaaaccatttccgagttccagccgcagaggcacccgcggagttgccaaaagagactcccgcgaggtcgctcggaaccttgaccctgacacctggacgc

SEQ ID NO: 65565 - DNA, 122 bp, Homo sapiens
ggatggcctgagggactgcatcgccaccggcatccagtccgtgcgggactgcgacaccaccgctgtcatcactgtggcctgcctcctggtcctcttcgtgtggtactgttatcacgtgggca

SEQ ID NO: 65566 - DNA, 122 bp, Homo sapiens
gggagattttacaacccagtcccatttcaaagagaagactgaggccaggagtgtcttacccggagtagccaggtgagtcagtggccaggaagccaggacccctctgacagtttatgctttat

SEQ ID NO: 65567 - DNA, 122 bp, Homo sapiens
ttaaagtactgttgtgcggttctggtatacccttagagccgcgatccacaaagcccgtaccgccttattcagctgccctcccctcaggatctccaacctctctactcttgccctgactagga

SEQ ID NO: 65568 - DNA, 122 bp, Homo sapiens
ggaatggggaatggggtgtggtcacgtggggttagggccccctccaccccgcttgctcttcgcaacggaaattgctactggcctcagaattccctgagcaaacgttgcttctctatctcctt

SEQ ID NO: 65569 - DNA, 122 bp, Homo sapiens
gggcctctgttccctggcaacctggcgggcagggcggagctgggaggcctctgtgcccatcgaggagtcagagtggaggctgcagactgtggagccgggagccggcaggtgaggctgggggc

SEQ ID NO: 65570 - DNA, 122 bp, Homo sapiens
caggccccgcgctatggagttcctctgggcccctctcttgggtctgtgctgcagtctggccgctgctgatcgccacaccgtcttctggaacagttcaaatcccaagtaagcctcgagactcc

SEQ ID NO: 65571 - DNA, 122 bp, Homo sapiens
tccatccgatccccaggaccacgagggctggctgcccctccaccttgtcgggcatgacagcgcctcctaccagaatcttcaggaccgcatagattcctcccaccagtgctaccctctcccgc

SEQ ID NO: 65572 - DNA, 122 bp, Homo sapiens
cgtgctgaaggtgcccctgagcagcagaagtcagaggaggtgcgggctgcggatgcgagccggggccttcacacagagcctgagcatgagtttctgagggaggtgagactcacaacacgaga

SEQ ID NO: 65573 - DNA, 122 bp, Homo sapiens
tgaatacttgtgagtaaaaacaatcaatgcagaagaaggaaaggtagaactcaaaaataacgcaggcgccataacagctattcaagtaaaatgtagtgcgtatatttccagtcataaatgtt

SEQ ID NO: 65574 - DNA, 122 bp, Homo sapiens
aggcctcaccgctcggggctgaagctgaactggtgcagcaggcggtcggccagcagcgagcggtactcattgatgaagaggtccttgctgccgtagatgctgaccagcaggctgatgatgtc

SEQ ID NO: 65575 - DNA, 122 bp, Homo sapiens
ctgacaaagtcccaggtctcatcctctgtggcaaacttcttaaatctggcagcaggaaaccggtccacctgtgctttgcactcattcccggtcagaaagaccccggtcttgccgcccctcct

SEQ ID NO: 65576 - DNA, 122 bp, Homo sapiens
ttttctgcaaaggaacacgtggtaagtattttcggccttgacggtcacatgtctctgccacgagtcgtctgccttggggcgcaaatgcaggcttgggcagggaagaaataacaaaacttgct

SEQ ID NO: 65577 - DNA, 122 bp, Homo sapiens
atttagatttcaagacttaaatgcaaatgtgctgggctattttttctcctatcatctgcacgaacttgcaaactgaagggatggaaaagtcatgcttgtgggctttccagtaaaaattactt

SEQ ID NO: 65578 - DNA, 122 bp, Homo sapiens
aaacttgtgttgacaatactggaccatcctgtccagcacaaggctctcttccaaaaagtccgatccatttcacccactgtactctggatgcccccactcttctggaccaaatcacccttccc

SEQ ID NO: 65579 - DNA, 122 bp, Homo sapiens
agcagccgtaacgattgaggctggggagttcaagaccactgggggtaactgatcgcccatcgcccttcgtcctggaagcccagcgcccgcgctcaccgcgcgtctctccgggagcacctagc

SEQ ID NO: 65580 - DNA, 122 bp, Homo sapiens
gccaagtaggggattgtgtgagaggcgccagggccagatcctgcaggggtttgcaggccgcggtgagggggtcagattttcttccaaagccgccttgctctgtgcaagcgcactatcgcagg

SEQ ID NO: 65581 - DNA, 122 bp, Homo sapiens
ctcttcctccagccccagtggagcatttgagcagacagaatgctggggggtgcaaagagccgggtaggcatttagagaacttgaagacattcagggatagtttcttttctttcttttttgtt

SEQ ID NO: 65582 - DNA, 122 bp, Homo sapiens
tccaactggttccaacctcaccaccacaggttaacttcaagttaggtcccacatcactgccgggttccagctgttttcaggaccccctgcagcagcagttttcttggccctgttttcagtcc

SEQ ID NO: 65583 - DNA, 122 bp, Homo sapiens
gccctccccagcggtggcctggcacctccagaggtcctagtgtaggtcagaggtaaccatcgtcataacaccgtgcatgtgcaacactctaaactcagtccaagcagggcaggggagggggt

SEQ ID NO: 65584 - DNA, 122 bp, Homo sapiens
gcgggctgggcgggagcccgtgctccagcaggaaggcgtccaggtctacgtactccacatcgccgaacggcagcgtgcgctcccacagcagtggcgccaacagacccggggcgggcaccggc

SEQ ID NO: 65585 - DNA, 122 bp, Homo sapiens
ctccagggaaggcaaactctactgcaagaacgacttcttccggtgagtactttcctcccacgcctctgctgctacctccccgcgggcccttcccggccagcttcggatcagaggttagcgtg

SEQ ID NO: 65586 - DNA, 122 bp, Homo sapiens
aggaataaaggccactctccagactggacgtggcaccaagagaacgtggtgaacgggaaccggctctgtttggggagggccctggccttcagctcagagggcaacacacagcagaagccgcg

SEQ ID NO: 65587 - DNA, 122 bp, Homo sapiens
gcagctattgaaggctgtctgcgtgcagatgctgccagaagttaggaagagataaagccccgaggaggtaacgctcaaccagtgcagagtcaataaatgaatgtgtcactccccaccctcat

SEQ ID NO: 65588 - DNA, 122 bp, Homo sapiens
atctccatagaagatccttcccctttactggttgtataaacttgatggaatacttaacctcgctgagccacagattttcaatctgtaaaacagaattcctttcccattaaattcacactatt

SEQ ID NO: 65589 - DNA, 122 bp, Homo sapiens
tgagtgagttggcagaggggctggcattgcagttctcggtgacagagggtgtgtttgcatcgcaggcctcctatttactaaatgggtatattcaggatagacttactaagcagtgtgatttt

SEQ ID NO: 65590 - DNA, 122 bp, Homo sapiens
gcattctgggaaatgtagttcaccaacgcataacgtgttgctgagggcgtgatgtgaacccggttccaggagcggacggggcgtccggaaaagggggcggcttcgactgcggctctgattct

SEQ ID NO: 65591 - DNA, 122 bp, Homo sapiens
cggggcttgggtaggaaggcgggggctggtggggcaggtgggcgctgggctgtctcctcccgggccacggaagcctgggggtaggggtgtggagtgagggacaacatccggggacgccttta

SEQ ID NO: 65592 - DNA, 122 bp, Homo sapiens
ttttgtgggtgggctctaaatttggtttaagacccagtgcggtggctcacgcctgtaatccgagcactttgggaggccgaggtgggcagatcacctgaggtcaggagttcgagaccagcctg

SEQ ID NO: 65593 - DNA, 122 bp, Homo sapiens
ccgctcatctccaagttgaatcagtaggtccagtcttcctccattgacttccggttcctgcgtgctgcgcccaaaagcgctcggcctgcactcggcggaaaggttgttgtccaagcggcgtt

SEQ ID NO: 65594 - DNA, 122 bp, Homo sapiens
ttgaaatgccacagacattccccctgctccgcccctttcccccggatacccagtttctcccggaggcagccaatgatctcagaggctgtatacccccccagagttattttatgcatatcaag

SEQ ID NO: 65595 - DNA, 122 bp, Homo sapiens
tgtgatccacctgcctcggcctcccaaaatgctgggattacaggcgtgaaccaccatgcccggccactcaataagtgtctaatgaatagggacagaggtagaaggtgagccttggaaagtac

SEQ ID NO: 65596 - DNA, 122 bp, Homo sapiens
cctttttgtttccccctcaggtctctccacgctgcacttgacaccctcagggcggaatggcgagttctagacccagctctctagacccggggcttcatgggggacacggactcgacgggaag

SEQ ID NO: 65597 - DNA, 122 bp, Homo sapiens
ttcacgagtggtttcacagccccaaacttggcttccaagggcaggacctcactgctccgacgtgcagcctccagcctgactccgtgacttgtttggacgcgtggcgcttggattagtgactt

SEQ ID NO: 65598 - DNA, 122 bp, Homo sapiens
atgccgagcatccggtgggtgggcggggcgtctcgagggcggggatctctgaggaaggcgcggggttgtgtccggaggggcggggcttcgcctgcagggcgcccagtgtctgcaccggcggg

SEQ ID NO: 65599 - DNA, 122 bp, Homo sapiens
ggtgcaggatataatctcctggttcgccgttttttaagcccgttggaaaagcgcagtattcgggtaggagtgacccgattttccaggtgccatctgtcacccctttctttgactaggaaagg

SEQ ID NO: 65600 - DNA, 122 bp, Homo sapiens
ccaggacgcagagcagtcagtatttaggtactgtttttcacattccttacatgggaatcacgtcaacaggattcaatttgtgactcaaccattaatactttgtgacactggctaatttattg

SEQ ID NO: 65601 - DNA, 122 bp, Homo sapiens
atcttcctcccgtccatcaggcatttttataagaaaatcccagagtcagcgttgcagacccggctgaggggacagagccgaggggacagatactctagggtggcagaaacagctgtgaagtc

SEQ ID NO: 65602 - DNA, 122 bp, Homo sapiens
ccgtgataactgtgagagacttcagggggctctccagtaggtcaccggggctcacagggacgacccaatagatagtctctggggggttgccaagacactttgggtctatctagggctttctc

SEQ ID NO: 65603 - DNA, 122 bp, Homo sapiens
aaggacccaaggaaaggggagccagggtcctacgttgtggtgcagtgcctcccagtcatccgtataaacaataaattgggcaataaatagacggtggacaaggatcggagggacaggcagag

SEQ ID NO: 65604 - DNA, 122 bp, Homo sapiens
ttcgtgtgaggccacaaaagccttaatgttcagtctccagctacctcagattttggagaacgctgtgtaccatcagcagcttgaatccccaccctctaacgctaatgctcatctatcaaact

SEQ ID NO: 65605 - DNA, 122 bp, Homo sapiens
tccaggactgaagccgcagaggccactcccacaggtcaccagaaactaagacgtgagtgacgcccggcagtggccgactcttccgccgtggctgtgcccatgggagacgtgagtgacgcccg

SEQ ID NO: 65606 - DNA, 122 bp, Homo sapiens
gagtcaacattttttcctgtgggctgcgaggaccgcttctggaaggtcgctgggaagccccgcccggccttagggctgggaggggattggctgcccagttgctggggctttgctctgagcca

SEQ ID NO: 65607 - DNA, 122 bp, Homo sapiens
tgtaaaacaggcagccgaagactcatttctggagcatgatttgagagtcttttgcataaacgtggtagtcaaaacaaagggaagggctgattggcaaaacacagtgtgtgtctgtaggaatt

SEQ ID NO: 65608 - DNA, 122 bp, Homo sapiens
gggatacccatcaccaccagggagcagaatccgttccagggattggggtgagtccgacttcgagcagcagctgccccccaacatcatgtacccagcccgtgactacgtggagccctgggctt

SEQ ID NO: 65609 - DNA, 122 bp, Homo sapiens
ggcgtctgcgggttggtggggcacagccgggtggggtgagtgcccaaggttggccgtccgcgtctcctgtgggcttgtcggggaccggagggccggggtgtgctagctgggtcccgagggtg

SEQ ID NO: 65610 - DNA, 122 bp, Homo sapiens
ccgccccgtcccgccgagctgggcctccgtctgtggcctgcgcagccagggtcgccaagccgcctggaatggctcaggcttccaaaaggagcaggcgccaaaaagagctttgcccgccgggt

SEQ ID NO: 65611 - DNA, 122 bp, Homo sapiens
ccttgccggggtgtcaagccacgatgaattggttagtacaggcatgtttatagactgcctcgggaacctcgtatctgtgtggtaatgtcagagataatgttatgattcgctggacctgaggg

SEQ ID NO: 65612 - DNA, 122 bp, Homo sapiens
ccagcctgtgccgaccgggagctgtaggacggtctgtgtctggggctgcttatgggtattcgcgtgcgtctgccggtgcgcggtccgagcctactcacgagagcgtgtgtgtgtcttctgtc

SEQ ID NO: 65613 - DNA, 122 bp, Homo sapiens
tcatgcaagagagaatggagggaaagctgggaagcagctgagtgagccatgagaccagagcggcctccagtgtaccctgaagagcactggctgcctggcaggcaagccagccactggaggga

SEQ ID NO: 65614 - DNA, 122 bp, Homo sapiens
cagacctcaccgtccgggatcgcggacgccgtccgggctcagccctctccccaccgcccccggagctgcattgctttgtttaacctctgccagaccgtttcgcacaaactcttgttgcccca

SEQ ID NO: 65615 - DNA, 122 bp, Homo sapiens
tcctttctttttgtgactctcaaggaaagtcggttttctgagctcttactggcttagtagcgtggcgttcaacgcagagcattctaggtaatgtagttttcatagatcccgaggtgggtgcc

SEQ ID NO: 65616 - DNA, 122 bp, Homo sapiens
gctggctgggcccagctgcctatgtaaggccttctagtttgttctgagacccccaccccacgaaccaaatccaaataaagtgacattcccagcctgctcgtcctgtcctggtgactggggag

SEQ ID NO: 65617 - DNA, 122 bp, Homo sapiens
gtaataccacctctgtggccatgcctgccccgcccactctgtatatatgtaagttaaacccgggcaggggctgtggccgtctttgtactctggtgatttttaaaaattgaatctttgtactt

SEQ ID NO: 65618 - DNA, 122 bp, Homo sapiens
aattagcttgaactgagtttgtattagaatttataatttttactgcatattgcagttactcgtatattactgacactggaacagacatgttttaacaaactggttgagccgtatcagtgcga

SEQ ID NO: 65619 - DNA, 122 bp, Homo sapiens
aactctggagaaattccccttccatctagaagactcagaagagtctcagcttagtcatatcgacttactgctcacgcccactgttttttccacctcctaccatcctgtattcttaaccttct

SEQ ID NO: 65620 - DNA, 122 bp, Homo sapiens
ttaggttgaaccattattggcagtttttaatggtttaaccctagtagtatcttggtgtgacgatttaaaaggtattttattttttgccaatactgtttgacggttgttgaataattgatatt

SEQ ID NO: 65621 - DNA, 122 bp, Homo sapiens
cttgttttctacaattgattcagaacataagtgcctatgcataaaaaggagaaagagacacgtaattaatatcggtcacaaaggattagcccactgctgggccatccaggagaccttgacca

SEQ ID NO: 65622 - DNA, 122 bp, Homo sapiens
tggatggcaggatccatacatattgcatcatatccatgaaaaggctgctccctgggcttgcgcggtgggcagcctgcggggccgtatactgtggccctgggtgacatgaacttgaagcctct

SEQ ID NO: 65623 - DNA, 122 bp, Homo sapiens
acgggcggcgtgaagaagccccatcgctaccgccctggcaccgtggctctgcgcgagatccgtcgctaccagaagtctaccgagcttctaatccggaagctgccgtttcagcgcctggtgcg

SEQ ID NO: 65624 - DNA, 122 bp, Homo sapiens
cccgcaggcgcaaggcagcactgtctccgccgattgtccctctgggaagtggagtctggccggcggaactgcagcagccctgagacttgtgggaattcggcccaagggttcccagggcaacg

SEQ ID NO: 65625 - DNA, 122 bp, Homo sapiens
acgtcctgggtgagcagggtctgggcgacctcagacatgacactgatggcatcccccgtgcgcttccggtcgatgaagatgactcctgccagccagcaggccagcccggcagagccagccca

SEQ ID NO: 65626 - DNA, 122 bp, Homo sapiens
aaacagcacccattagactactttatgacatccccctgcagagatcaagagttctgcaatcgcagcttcacaatcctgagagactaccaattcaaccagccttcaggactggcacacttctg

SEQ ID NO: 65627 - DNA, 122 bp, Homo sapiens
aattgttttggagtaacttcatccccttttgcagcttgatctttaatgtcatattcagtccgacatctttgaagtagaaattggcggaaggtgctactctctgtgctaactgtcagatgatg

SEQ ID NO: 65628 - DNA, 122 bp, Homo sapiens
gcctgttccacagcaagctgcagaaggtgctggtggaggatcccgagcgcccggcttgcgcgcccgcggcgccccgcctgcagatgcaccacgtggcccaggtgctgcgggagctgctgggg

SEQ ID NO: 65629 - DNA, 122 bp, Homo sapiens
cttcccagccggcttgcaaggtccccgttcacccgattccccaaaggagacctcctgtcacgacaacgtgagtgctccacagccaggggaggtgctgcagctgcagaggatgggcacgcggc

SEQ ID NO: 65630 - DNA, 122 bp, Homo sapiens
acgtgcgcatcctgttactgggcgagggtaggcgccggcccgggggtctcggagctgcggcggccgtgaggcggggtgagggtctcgggggtcggggggcgccgtgaccttggccctcgcgc

SEQ ID NO: 65631 - DNA, 122 bp, Homo sapiens
gcagactttgcacctctggctccagggagctcacaggcaggggctggtccagcccagaggcgatgaagacagtgacgatgatgatggtggtggagatgcaggcgctgactcaggtagctccg

SEQ ID NO: 65632 - DNA, 122 bp, Homo sapiens
ggacagggcgggctgggcgaggacgctcccggggcctggaggcggagtcgggggcgggcgcgcgcagtcatctgactcggtgactcacccgcggccgcgcttcctctgatccgggccgggcg

SEQ ID NO: 65633 - DNA, 122 bp, Homo sapiens
gtagcaaagcaaaataagcgcggggtcccgcacggcagcgcgggtgcagcgcccaaacctcgcgagatttgttggctgggccaagtaccacccaccaaatctcgcgatacctaggcgcctga

SEQ ID NO: 65634 - DNA, 122 bp, Homo sapiens
ctgggcttaggtggatgggaagccctccaatgtcactctccccttgtactacattgcccccgtgattcaattacctcccaccgtgtccctcccacaacacgtgggaattcaagatgagattt

SEQ ID NO: 65635 - DNA, 122 bp, Homo sapiens
tttttgtttgagaagcggtgggtggaagccacgaatcccacacgacatctggggaccaaacgcccagagtctggaggatgatttgggagaggaaggaagatggggtcagggtagggacacgg

SEQ ID NO: 65636 - DNA, 122 bp, Homo sapiens
agccaaggggttcccactgcgtttctgttgggttatcccaaacctgtgataggatagtagcgccctccctgcctccggtcgaataaacactacaacgtctgacactcggtgctgaaaggaaa

SEQ ID NO: 65637 - DNA, 122 bp, Homo sapiens
cccatctaggagcattgccttttccacgaaggaagcccaggtgggacaatcagcatcccccgtggatagaatcagatggcagcctgtgctgcacagcttgggtttggaaatggcagaagaga

SEQ ID NO: 65638 - DNA, 122 bp, Homo sapiens
tgaccttcatctctcttgctgcaacgcgaggctcaggccggtagcggggactggatcctccgttagcagatttgcctctttccaccttgacttctaattttcatcccagggaggaagatttt

SEQ ID NO: 65639 - DNA, 122 bp, Homo sapiens
ttcaaatcttagctctgccttactgtgagcttaagaaagtgataaaacctctctgagcctcggtttcctcatctgtaaaatgggggtagaagtggtattcacttccctatgctgccacaggg

SEQ ID NO: 65640 - DNA, 122 bp, Homo sapiens
tcgaagaagcaggcagccctccggcccctgctgggcagcagcagtctgacctgagccccacgctggtgcccaacccagcagcctccacctccgcctcaggagccagtcagtcccagctcccc

SEQ ID NO: 65641 - DNA, 122 bp, Homo sapiens
ccgccttttgtggatggccgtaggcccgcggttgcacgatgcatgccgggccttgtagtccgttcgcggagtcctgccgccgaaggccacgcgggtgaactgcatttcccagcgccccacgc

SEQ ID NO: 65642 - DNA, 122 bp, Homo sapiens
gtgcctcattacaaatgcatatgatgtttgagtgctgttgtttgaaattatttttcttttcgggtcttcaaaaattcaagaaaagttgatgattgacttgaagattacaaaatttaaggttt

SEQ ID NO: 65643 - DNA, 122 bp, Homo sapiens
accctggaatgtgggactggaacccatacctgtctgtcggtcaggatccccggctctgggcgcttccaagatgaagccagaaggatgtagagcaccagcagcccaaaggccaccaccagcat

SEQ ID NO: 65644 - DNA, 122 bp, Homo sapiens
ccagggagggagtcggcgacgggaaggacctcacccctgcttcttagcaaacattagggtcgcagttttctaacagtggggagggggcgaggcccccccccccccgcccggcaaaggctgtt

SEQ ID NO: 65645 - DNA, 122 bp, Homo sapiens
aggggggagagaagaggagagcctaggtgccctcctctcccctcccccccggcggcggcgcgcgcacggccctcgccggcctcacccctccgcaccccgcccgcctgctcttcaccggccag

SEQ ID NO: 65646 - DNA, 122 bp, Homo sapiens
tgccgggagccaggcccagggacacaacctgcgggctctgctttctggagctcaccgagccgtgagcaggatggctgggacacaaggagtgtccagggagcttccccagcagtggaagtaca

SEQ ID NO: 65647 - DNA, 122 bp, Homo sapiens
agcctcctgtttgttttttgtcccgttgctttgagggctggaatcaatgtcttttcctctcggcgtgtttgtggtttcatctcagtgtgtccaggctcggatggcttcccgggagtatctcc

SEQ ID NO: 65648 - DNA, 122 bp, Homo sapiens
gggacagtcgcagtttgggccccttgaattttactttcaagtaatgggaaactgaggaggcgggcgctttccccagcgtttttaggggcccactaagtaaggcctagcgggagccagatttt

SEQ ID NO: 65649 - DNA, 122 bp, Homo sapiens
caggcggggaggcgggggcacgtgtttggatgtgggtgcttgtgtaaccagttccccaagcgccagccccgacagcgctccttcgggaggctggtccgagcccctgtttccgccgcggcgca

SEQ ID NO: 65650 - DNA, 122 bp, Homo sapiens
atgctcccattttacagataagaaaactaaggcttggcaagattaaggaaccaggtaacacggtatgaatggcaagaacaaatgtaagaacctgcctatggctagatgtggggatgaggcag

SEQ ID NO: 65651 - DNA, 122 bp, Homo sapiens
gctagaggctctgtgcctgccccagccggcagtccacgctggcccttggccgctgccctgcgccccagcccgccctcaccgcccggctctgggggctgtgcctcccgcttccagacgcccgc

SEQ ID NO: 65652 - DNA, 122 bp, Homo sapiens
gtggaggccggggcactcagtcacgtgtgtgccgggagcacaggccttcctcgccgtgcgcggctcctgagctctgagtgaggcagacggtggcagtgacccatccttttctggtaacttct

SEQ ID NO: 65653 - DNA, 122 bp, Homo sapiens
cctagcatgttaattcgaggtgttttgaacgtgcatatacaggaagtgcagccgtttggccgttgagttagtgctccatccagccttgttagaaaagctttcgctgaatttttaatttagtg

SEQ ID NO: 65654 - DNA, 122 bp, Homo sapiens
aagacaccagtggaaagaggtatgatgtggcaacatggcagggtggcatcttcacttactcgaacaagagggtctactcttctctcttcttctcttcctgccctccaaaccaccacttccat

SEQ ID NO: 65655 - DNA, 122 bp, Homo sapiens
tcctttcggtctggggccttttcaacaccccctgtggccggggacagctggggcagaaaccggcaggcggcagaagcctcaagcagctctgacctctggcacctccccaagacccagagcac

SEQ ID NO: 65656 - DNA, 122 bp, Homo sapiens
catcggcggaactgcccagcacctctggcttggggtggcgggacgcagccacccggtcgacgccttcaggcgagaggccgtagattccctggttggagtcccgtttcctggtgccgggatca

SEQ ID NO: 65657 - DNA, 122 bp, Homo sapiens
gtagtctcaaaggtggcataagcatcctggaacgcaaacggcatttcccagaaaactacgcgacaatctgagcctggtcttgcccagagctggaagctgaggtctcgcccctgccggcgttg

SEQ ID NO: 65658 - DNA, 122 bp, Homo sapiens
tggcctccctccagttccctggaagtgggcctgtggccagcgcgggagcagcagcagaggcggaggccccagcgcgtctctctcctccccctcagcctgagcccggggaggccaggcggccc

SEQ ID NO: 65659 - DNA, 122 bp, Homo sapiens
tggaaacagcctggcagactcccatctctcctggtgccatctccggagcggaaagtggagcgccccgctggcgaccaaggccgcactgagagccctggtttggtcaacagttgggctccaag

SEQ ID NO: 65660 - DNA, 122 bp, Homo sapiens
aggctttgttcctgtgtaaacggagcgcacgtacctggagcgcggcgggcgcccgattagcgccctgaatggaggtgatgtaacggtgatgcaggctccagcccaccctcgccgaaagcaag

SEQ ID NO: 65661 - DNA, 122 bp, Homo sapiens
agggtccccagccctactcccgccgctctgaaaataataaacgactttattcttggattccgttggcatctgctatttctgtaacagagaggagcaatgggccctgagtgtgtaaggcagga

SEQ ID NO: 65662 - DNA, 122 bp, Homo sapiens
catatccaattgccgggctcctgcaggattggccagaacaacgcggaagtgattacgggtcgcccagcaacgggcggagtcctggcccgaaactggatgcgcacgccccttccctgcggcgg

SEQ ID NO: 65663 - DNA, 122 bp, Homo sapiens
atcctgggcaacaaggagatgccatctctacaaaatatacaaaacattagccaggcatggcggcgcacacccgtagtcccagatacttgggaggctgaggtgggaggatctcttgagccctg

SEQ ID NO: 65664 - DNA, 122 bp, Homo sapiens
gcccacttcaacagagggcccctgaccatagcccagaggcttggacaagcccaaaggttgcgccctttcccccgcagaaggggtgaggtgggcgccgctgcagttcccgcggatagagaagg

SEQ ID NO: 65665 - DNA, 122 bp, Homo sapiens
cccccaggaaccaggccagggcagctgtggatggacaggagaggacaaaggtgcaaggagcggattgctccaggacagacagattcaaatacctacccctggcagtgtagggagcatcttgg

SEQ ID NO: 65666 - DNA, 122 bp, Homo sapiens
gccaagaaaagggtggcaccaaccacagggctgccagcgcttcctgagctgacatggaggcggcaccaagcgggccccgcagagccaccgctaaagacgcagtgctgccgatgcggagatga

SEQ ID NO: 65667 - DNA, 122 bp, Homo sapiens
tgcggtgacacctgtgggcacaggtgagcggcgggagggctacgcggcccgggggcggggcggccgggacccggggcctggaagccggggcgaaggggaaggaaggcctggcctcccgaagg

SEQ ID NO: 65668 - DNA, 122 bp, Homo sapiens
taataaacccacagcaagacctagggcgggggtgaaccacagcgcatgcgccgtagggagcgacctcaacagctagggtgctgtttgggcggggcctgggcggggccagacgcgcgcgagat

SEQ ID NO: 65669 - DNA, 122 bp, Homo sapiens
tgcaacatgaaaaattcagacacatcaacccaaattgcgtgtatgtgtatgcttcctgggcgtgtcccctagatgcctcctctgtccacctgatgcccacagcaccagcctccagcccccca

SEQ ID NO: 65670 - DNA, 122 bp, Homo sapiens
cggttcgcgcccagttagccccgagcttcggagacccgagagaccagaggatggctgacacgaaggggcacccgagacagcgcctgggctttttcccgcccgcggttccaccgctctgaaac

SEQ ID NO: 65671 - DNA, 122 bp, Homo sapiens
ctggagcctcggagaccagcctgggggccaggcgggtgcacaggaccgtcggagggtggtcgatcccgggctttctgtgttctctgcacgcccatgagctcctaatgatcccctataaatca

SEQ ID NO: 65672 - DNA, 122 bp, Homo sapiens
tagcaacgcctcctcttcctgtctcagagtgtctgtgagtggactgagctcaagtgagtgcgagttcttgcaaaaactagtcaagaggtaaacatgcaccagatggtacaaacattacaagg

SEQ ID NO: 65673 - DNA, 122 bp, Homo sapiens
aaagtaactttgcaaaatagattaaataagaatctttagaagaggagattaccccttacccgggattatccaggtgggcccaaggtcatcagaagggcctttataagagggagacaggagtt

SEQ ID NO: 65674 - DNA, 122 bp, Homo sapiens
gcgaaggtcgctgatgcccagcgaaggacattcccacatgtgcacgcacgcagagtaacccgcgcacactcacacaccccagtttcagaaggcacactacatggcaacctccttgtcccaag

SEQ ID NO: 65675 - DNA, 122 bp, Homo sapiens
gccggagccctgggctctctgccctgtgggtcgctgaaagcagagactcctcaaaccaaccgaaccgggcgcattaaccctctcgcctgcaccccgctgcctcccggttgagccccgaggcg

SEQ ID NO: 65676 - DNA, 122 bp, Homo sapiens
ccttcaaacagacgccgtgggtccttctcatcaagcgtcagcagttcccgggcggccttgcggatgttggccaaggtaaatttgaccctctagacctcacgtttgttccggaacccatactc

SEQ ID NO: 65677 - DNA, 122 bp, Homo sapiens
gggtagtgtttatttttcagtcattcattacattaacagattagtcacctactacatgcccgttagtgtgcttgtcccttgtgagagattagtgagtggtaactagagatataattcccgct

SEQ ID NO: 65678 - DNA, 122 bp, Homo sapiens
ttatatactccactcccttttcaccatcataatctgttggttctaacttcaaagttcatacggaatctaaacacttttcaccacccccactgctaccacccttctccatccttgatcatctt

SEQ ID NO: 65679 - DNA, 122 bp, Homo sapiens
ggaaacgaatactggaagcctgtggagaagacactggagcagatacgtatttcaaaacaccgggcttaacgttaaaactctcctctaggccccatctaggaatctaagtgggataagctaag

SEQ ID NO: 65680 - DNA, 122 bp, Homo sapiens
tgactgccattagttgattcattttcctcattatggattgtattttcctactcttttgcacgcctggtaatttttttttcttttcctttctttttttgagagaggttctcactgtgttgccc

SEQ ID NO: 65681 - DNA, 122 bp, Homo sapiens
ctaatcccagttctgctcccttaactaaaagggaggggcagacccaagttctgctctctacgtcaccaaaggaggttggagccattttgaaccctgcgaccctagtgttttccctcttttcc

SEQ ID NO: 65682 - DNA, 122 bp, Homo sapiens
ctgatttggcaacagtgcgggcggtcctcgagctctatttttactgtctggtatttaaaccgaaacacgcgtttctaagcaataagaggccaccttcagtcgcaagttgcaggccaggcctg

SEQ ID NO: 65683 - DNA, 122 bp, Homo sapiens
tcaggaggttcccgggtgtgctcggtcatggagtgctgcccaactccaccccccgcacctcgctcattgaagaacaggtgcacaccgacaagccggggcagaggagccacctccccacctcc

SEQ ID NO: 65684 - DNA, 122 bp, Homo sapiens
ggactttcctacgaagccaaggcacaaaggggaagtggatagtccgtatcgattttaccacggaggaggtcagcgatcagcttcaggcctggctagttttcacagtttcccttgctggactc

SEQ ID NO: 65685 - DNA, 122 bp, Homo sapiens
gccccacgcctgcaggccacatacctgggagagtgtgggccttccgagccttctggctcccggccccacagaggaattacggtcccatgtccctcacaaggacccttgcagagggagcagtg

SEQ ID NO: 65686 - DNA, 122 bp, Homo sapiens
agcaaaggtgatgcaagcgtttctggtgagacctacccttggtttagggtggggagggaccgcataacagaccatctgtagactccttcggaaagcagcagagacgctgcagagggcttttc

SEQ ID NO: 65687 - DNA, 122 bp, Homo sapiens
aacaataacgtactcaccgccgcggacaatcccccaccccgatccctcgccagaccaggacgcttcctcaagcccagccttctacagagagtgtgaacggtacagccccggcctgacccggg

SEQ ID NO: 65688 - DNA, 122 bp, Homo sapiens
ccagcaaacagtttatgttggggagcaatctagagatttcctgagataaggatgctattacgggctgacaaatgtggaacggagcagagtgggcagcttttgtccagactgacccagggtga

SEQ ID NO: 65689 - DNA, 122 bp, Homo sapiens
ataaatcaagctttggaagagaaaaatctctatctgaaggatttttttttttttcaatgacgagcgtgcccactatttccctagaggaatatttcggtccaggaaggaagatagtgcattca

SEQ ID NO: 65690 - DNA, 122 bp, Homo sapiens
ggacagctggagagtgagttgccacacagatgttcaaatatcatcaatttccatcaatgccggcagcccctgctccacccatccccgcttcatgaaggagactgcagaagtccagagggcag

SEQ ID NO: 65691 - DNA, 122 bp, Homo sapiens
tttttccctctccttccttttacaggtaaccttcctattaaaagtagtacaggattccttcgagtagctcaagataaaacctggagtgattcctgactcctctccttttctcatattccacc

SEQ ID NO: 65692 - DNA, 122 bp, Homo sapiens
ctccagctcccctcagtcgccaacggcctgatccctttgcggtttccccagtggcttctacgtacacagagagttgcttgcgcccagatgaggccacgtgtacctagggtgagctcccaggt

SEQ ID NO: 65693 - DNA, 122 bp, Homo sapiens
ctcttttatctataaaataaaaatttgtctagactattgtctttggcctgtggattcccacgtgctggcggagctctgcaggcagctctcacgtgtgcggggtaaacgagctcgggggcttg

SEQ ID NO: 65694 - DNA, 122 bp, Homo sapiens
tagtcccaaacaggaggagaaagggcaatgttacttagcttccggtgcctagaggatctgcgtgttctctgtccagtcccaatgttaccgggccttggtttacttcctccattcaggtccct

SEQ ID NO: 65695 - DNA, 122 bp, Homo sapiens
tcaacacttccctttgagtgtaatgctgcaggagtacagtccagaccctcagtggaatcgcggtcggtttagctccggcagttgggtcccagggaattctgggaagtgtagtccagacgctc

SEQ ID NO: 65696 - DNA, 122 bp, Homo sapiens
ccggcggcccggcccagtcgggtcagaagagttcggggggtgctgaggccgatcggagaacgagcggcgggagcccttgggcggaggatgggctgcaggcgggaggggtcgcgggctggttt

SEQ ID NO: 65697 - DNA, 122 bp, Homo sapiens
acgtggcggccaggcagaggcgccacccacctcccagacggggtggctgctgggcgggggcgccccccacctcccagacggggtggccgggcggagactctcctcacttcccagacggtgcg

SEQ ID NO: 65698 - DNA, 122 bp, Homo sapiens
ctcaagtgatccacccgcctcgccctcccaaagtgctgggattacaggcgtgagccaccacgcctggcctaaacctgcttctgaggactatgcaagcttaaatctacacttctaagggttga

SEQ ID NO: 65699 - DNA, 122 bp, Homo sapiens
ttcaagaatgaagccacggaccctcgcagtgagtgttaagttcttaaagattgtgtgtctcgagtttgttccttcagatgttcagatgtgtccggagtttcttccttccggtgggttcgcag

SEQ ID NO: 65700 - DNA, 122 bp, Homo sapiens
tttttgacatggagtctcggtctgttgctcatgctacagtgctgtggcacaatctcggctcgctgcaacttccacttcccgggttcacgggattctccttcctcagcctcccgagtagctag

SEQ ID NO: 65701 - DNA, 122 bp, Homo sapiens
gggccccccaggactgggccttcccggcctcaaaggccaacgtggtttccctggagacgccggcttacctggaccaccaggcttcctgggccctcctggccccgcagggaccccaggacaaa

SEQ ID NO: 65702 - DNA, 122 bp, Homo sapiens
gtcccgcggctccacctcagccccgggagcccggagctgggagcagacgcgaggatagagcgccggtgaggcggggcgaggcgccgtgtgcaccgcagcgaccaatcggagcgcagcaagtg

SEQ ID NO: 65703 - DNA, 122 bp, Homo sapiens
cggggggctccctgggccgggactggagcgcaaacggttgggagactgtcggtgtctgcccgcccgtctgtgcgtctgtctgtgtcggtgtgagcgtctgaggcgatggggaagacagcgcc

SEQ ID NO: 65704 - DNA, 122 bp, Homo sapiens
ggagaaacgaacactttttccatcatcagaatcaccccttacctctctcttacagtcatgcgtgccttacactttacttagttaattcccaagagaatcttcagttcttcctgaatatgatt

SEQ ID NO: 65705 - DNA, 122 bp, Homo sapiens
gggcgaccctgcgccgccgcctcccccgcctcgccggcggccgggattccgccccacccccgccccctcgctcgctccgagtctttgttgcgggctccgccccccgccccgcccccagctcc

SEQ ID NO: 65706 - DNA, 122 bp, Homo sapiens
gaggctgggacagagcacggggcagtcagatggggtgaggcgaacaaaggcctctctctgcgagagaaatcccgactggctgcggggcgcactcaggccacaatggggctttctccggccac

SEQ ID NO: 65707 - DNA, 122 bp, Homo sapiens
tcaggcttaatgatttattcaagctgcagcgcatccgggcgttgattggctgcaggcatgcgtccgctgtcagctgcgcgcgccgggaactctccaggctacctgaagctggggggaggaag

SEQ ID NO: 65708 - DNA, 122 bp, Homo sapiens
actgcggctccaggccgcggagggaaggctgagcttgcgtccaggccgcgtccccgggagcgtagacacctaagccaacgggaacggaagacccttctacctactaggccgcggtagcttct

SEQ ID NO: 65709 - DNA, 122 bp, Homo sapiens
ccagaacttccgtctctacccgtcacctgctcccaatcaaaggagcttaatagacggcgacgttttcgactgcccagccaccaggcaggctgaaagtgcatggagggcatcatccaccttta

SEQ ID NO: 65710 - DNA, 122 bp, Homo sapiens
ctgtttctcccatggcatggctggccctgtgtcagttaaagactttgtttactgcaatgccgtggtctttttgtagcaggcaaaaagaacccattgggtggttacaatggtagataacaggg

SEQ ID NO: 65711 - DNA, 122 bp, Homo sapiens
gggaaggaaagggacagtgtcaggagcccggcccctgcggaaaccctgaccgtccccttccgccagccctgcccctcaacagaggcacacccctacctggagtcgcagggcaaggggctcta

SEQ ID NO: 65712 - DNA, 122 bp, Homo sapiens
gtccgtatttcataaacacacgtatgtgtgcatgtatgtatttcttatggacatcacgtacgttggcccttcatatctacaggttccgcatccacagattccaccacccgcagttgggaaac

SEQ ID NO: 65713 - DNA, 122 bp, Homo sapiens
agagcttcctttgtctcctatgcctcctccccccatcccggctctcctgcgggcaagcgccgaggggacaccggggagtaccccacctgaacctctggggcccacaccaggccccagtcttc

SEQ ID NO: 65714 - DNA, 122 bp, Homo sapiens
ggactttttggagggaatgttacagtacattgttgagacagccgctagcctgagcaaccgcgcctgctctggctgagaatacaaggctccaaagcttccatcttctgatggagcagtttctg

SEQ ID NO: 65715 - DNA, 122 bp, Homo sapiens
caacctggcgcactaggagccctccgaccggcaccgcccccacgtgttgcacgccgcttccgctttccggcccagacctcaagaccgcttccggaagcctctcggcttccgtctggccaaac

SEQ ID NO: 65716 - DNA, 122 bp, Homo sapiens
aattattagggacctggcagcgtgattggagtatggatgtttccgtaaaagctggaattccgtaaaagcattgacgcagcccctacactccatcccaaccaagaaactgcatttcctggggc

SEQ ID NO: 65717 - DNA, 122 bp, Homo sapiens
actctatctgtagcttaaactaacaaacaaacccacacaaatcacattttgttcttcaggcgattcaggaaggcctattaggcagggactgccattttctctctgagacaaacatcatgcca

SEQ ID NO: 65718 - DNA, 122 bp, Homo sapiens
gtttgccggggaggagtgggtttggaatcggggttaaaggaaagagatccagatgtcgcacgtgacctaagtgagactgggcgagataaaagaaagagcatatggcaccgagggagagatgg

SEQ ID NO: 65719 - DNA, 122 bp, Homo sapiens
gctcggggccggagaccgggagggcagcggggagactgggtggggtcccctagggttacccgaccctggcgcggaggatatgatgccggccacgccctcgccgagcggggcggcaggtgcag

SEQ ID NO: 65720 - DNA, 122 bp, Homo sapiens
attattcactgcttatagatcagccggataagtgtgcaaagaaacctttcttgttgctggcgattaagtccctcactccacattttgccagaaggcaagcaatccgggaatcctggggccaa

SEQ ID NO: 65721 - DNA, 122 bp, Homo sapiens
ggagagaacaatcatgaaggaaaagccagttaggtgaatggttttcagtgaaggatgggacgtgaacacggggccctgtgtgctggagcttcagaaaatggggtcaacccccaggcaccttt

SEQ ID NO: 65722 - DNA, 122 bp, Homo sapiens
ccccgcctcccgtcttcagggggcctcacgtctccttttgagtcagaaggtcgcagtggtcggcctccgggaatcaggcatctgagtgcagggggcccccgggctcaggtggggctgacacc

SEQ ID NO: 65723 - DNA, 122 bp, Homo sapiens
caactttccctcttaagccccgaaggaatgtcggcggatttcctgaaacccgaccctggccgcccgccggccctcccgcccctcacctggaccggctcccccgggaacagcaggaggggcgc

SEQ ID NO: 65724 - DNA, 122 bp, Homo sapiens
gaggacatcacactcagtgagagatgccagacacagaaggacaaatcctgtgtcactccacgcatgaaagtgccctagagtcatcagatccagagatagaaagtaacatgggggctgggcat

SEQ ID NO: 65725 - DNA, 122 bp, Homo sapiens
ggtgtcctaatgaaactgttactgtgatcatatcagctctctagaacaaattcagaaagacggccctttgtaacaggcagactgggtgggcaggcgttcgtttgtaaagagatggctttcct

SEQ ID NO: 65726 - DNA, 122 bp, Homo sapiens
ggtatgggagcagccagatcagtgaatccatcacctgggctttgccggggcctgcacccccgcctcgggaagtgccctcttcaggagaaagtcctatttctctgtaagctgccttctcgtgt

SEQ ID NO: 65727 - DNA, 122 bp, Homo sapiens
ataattctaaaagaaacttctagagatcatctggcaatcgcttttaaagactcggctcaccgtgagaaagagtcactcacatccattcttcccttgatggtccctattcctccttcccttgc

SEQ ID NO: 65728 - DNA, 122 bp, Homo sapiens
ccccgcattttctttacggtggacatcgattctgatagtgggcgcaagcagagaggaaaacgagagcagtaagcgtgtattcacagtggagtctgtaattaccaaatgcaaagtcatagggc

SEQ ID NO: 65729 - DNA, 122 bp, Homo sapiens
agcctcttcctgggctgttcagaggcatgatccagactcagacctacctggttcctgcaccgcgatcacctagttccggggatgtgggtatatcacagtccctggccgagcctcagctttat

SEQ ID NO: 65730 - DNA, 122 bp, Homo sapiens
tgaggcgctgttcgcccgtggaggggtcaggttgtcgtgaccttatctttacccttaggccgtccatcccggggcctggggtttcctgcgccagtcacggtgggctgtgtaggtggccatgt

SEQ ID NO: 65731 - DNA, 122 bp, Homo sapiens
aatgttttctttagatttctgtatgagtggatgcacagtgctccgtattgtgtggtggggcggggtgtgtcttcttattgatgaaatacactgcgcaggtcaactcggtaaattgaaatgag

SEQ ID NO: 65732 - DNA, 122 bp, Homo sapiens
gctgctcccattctcagacaggaggacagagctgccagccggacagaacgtcagtgctgacgtcagcgttcacgtgtgcaggaggagagccctgagggaccccgctggggactggtgctgtt

SEQ ID NO: 65733 - DNA, 122 bp, Homo sapiens
gcggagaaccggagaaaagggcggagaaccggagaaaagggcggagaaccgggaaaagggcggagaaccgggaaaaggtcaagacctgtacgtacctctcgcgcaggctcgggttgcgttct

SEQ ID NO: 65734 - DNA, 122 bp, Homo sapiens
ctttcctctttccagagggaaggcaagttgtcagggacaaacacatcaggtggacatgaccgggtccttagcagtcaagagagatgtggtccccaccaccagttggatttgggaacctcatc

SEQ ID NO: 65735 - DNA, 122 bp, Homo sapiens
gtcctctcaccaacaccacaccccaacaagccagcctttggtaagctcggtgcctgctgacgaactctgagatcccaatggtgtgagtctgactttggaaagaaaaagggactaaagagaaa

SEQ ID NO: 65736 - DNA, 122 bp, Homo sapiens
gtggatcggcatgtgtggacgacgctgaaggggcgggatgggcttcagggcccaagggagcgagccttccacacagccagtgttctgggcaattacatggtggtctatggtgaggaggctcc

SEQ ID NO: 65737 - DNA, 122 bp, Homo sapiens
tatgtgtgtgtgtgtgtgtgtgtgtgtgtgtgtgtgtgtgtgtgcgcgcgcgcgcgcgcacgtgtgtatgggtataggagaggtagtagcagcggtcatgaaggaatctttgttgggggtgg

SEQ ID NO: 65738 - DNA, 122 bp, Homo sapiens
tgactcctattggaaagtggttagccttagcactgagaagattggctcatggtcacgtagcgtatctcccagatggaagtctaatgtcttgacaattagtcaatagaaagataaacttgttg

SEQ ID NO: 65739 - DNA, 122 bp, Homo sapiens
ggatgggacagcaaccggggacggacgtggggggtgcggagcgctgtcagcccaccttagcgcttcccagtgcaggacactgttcacaacatgctgccaggtaatggggtgggacaaggccc

SEQ ID NO: 65740 - DNA, 122 bp, Homo sapiens
ccacaggtctttagaaatttttcgttgagtgaaaattcttcctgggtccctcttccttcacgtctctctcacctatgacaacttcagattgtgcaccaaggatgggagggaagttatcggga

SEQ ID NO: 65741 - DNA, 122 bp, Homo sapiens
cggctaatttttgtattttttgtagagacagcatctgatcctcaggctggtcttgaactccggagctcaagcaattcacccaccttggcctcccaaagtgctgtgactacaggagtgagcca

SEQ ID NO: 65742 - DNA, 122 bp, Homo sapiens
ttgccaaagatgctgaaaagcaggacaaggagaggggcccgcaccccgagggtccagctgcgctctacgcggggtactcccctccggtgtcttcggaagcactgaagggacatctggggacc

SEQ ID NO: 65743 - DNA, 122 bp, Homo sapiens
ggctcctcgtggcctttccactaaccctaaccccaaacccgagatgtagctcagaatccgcgacccggccgggtccaccacagccttcagcagcgacactcgcagcctctgacctctcagcc

SEQ ID NO: 65744 - DNA, 122 bp, Homo sapiens
cgcgctgtagaaaccggcccgcgccgcgtagcgcaatgcccgcacgccacgtacggggggcgggtctccgaagcccaggctggaggtcccaccctgccgctgggaaggaacgagcccattgg

SEQ ID NO: 65745 - DNA, 122 bp, Homo sapiens
gcgtggagcggcggagccggagggaagcaaaggaccgtctgcgctgctgtccccgccccgcgcgctctgcgcccctcgtccctggcggtcgctccgaagctcagccctcttgcctgccccgg

SEQ ID NO: 65746 - DNA, 122 bp, Homo sapiens
ggctttccccttttcagctcttggacctgcaacaccgggagggcgaggacgcgggaccagcgcaccctcggaaggctcgatcctccccggcagggcgcctggccaacgagtcgcgccgcctc

SEQ ID NO: 65747 - DNA, 122 bp, Homo sapiens
ccttttttctttttttgagacaggttttcactctcttgcccagtctggagttcagtggcacgatcatggctccctgcggcctcaaccttccaggctcaagtgatcctcccacctcagcctcc

SEQ ID NO: 65748 - DNA, 122 bp, Homo sapiens
acaaagctcagacactgaacaccccaaaagtaagtaacagacatatatacaatgaatgcccgaaaagtaactaacagacatacacatctatgaaacagcatgatataatggcacatgtctct

SEQ ID NO: 65749 - DNA, 122 bp, Homo sapiens
ccccgtcctgccctgatgcaggccaggattggggcagacccctggcgagggctgtgaaggcgggagccctgtcctcatttgaggccacacatccttccacagccagacccctaagtcaggcc

SEQ ID NO: 65750 - DNA, 122 bp, Homo sapiens
acgtcttcttggataacgagctgctgacctccaagatcctgtctgtgctgcggccgcagtcggagcggggcttccgcgccggggacctccgctacccgacccactttctcagcaccaactct

SEQ ID NO: 65751 - DNA, 122 bp, Homo sapiens
agagtcaggtcattcttcctggacttctgtccacttccattatgggatgtctccactgagcgttgcctacatcatctctgaatttgaggcctaaagtgtgaccagatttaatcaaatcctgc

SEQ ID NO: 65752 - DNA, 122 bp, Homo sapiens
ctcaccgccggttccattccaaccagggactgtggaagcctccgctgatttctgtggagacgatctactcaccacgtaggggctacagcagctcggacaccggaaaaagatctagagctcga

SEQ ID NO: 65753 - DNA, 122 bp, Homo sapiens
ggcactcgcccgagcagcagggggcgtgtcttctgcttccttgacggacagctaaggatgcgggagaggatgaggtaataggagccggggcaaggaaggagttggggtgcgcgcgcgtgtgt

SEQ ID NO: 65754 - DNA, 122 bp, Homo sapiens
cgctggaaatgctattgcaccggaatggaacccattagctacagccaggctaacgggttacgaacagtgctccctgggagaaccaggctgggatgagacagtctggcaaggccatttgaaga

SEQ ID NO: 65755 - DNA, 122 bp, Homo sapiens
cgacccctcagatggtacctcgagtccttggtcgcttctgaccccagacgccttcggccccgaccctgccctgggaaacgtggcctttgtggcatctcagaaacaaagcccgtgattgtgag

SEQ ID NO: 65756 - DNA, 122 bp, Homo sapiens
cgccgcggccagagtcctgcaggcccagtggaaggtgtacaagcacaaggtgaggctccccggggcgacccgggctgctccctgtgagtcttcgtgctccaaggcaagccactcactctcca

SEQ ID NO: 65757 - DNA, 122 bp, Homo sapiens
ggtgagggcatgaaaacaagaggtctagctttaacaagctgtgagagctgattcatgccccggcacagctagagggagggaggtggccatggagggggcactggactgggcacttccccagc

SEQ ID NO: 65758 - DNA, 122 bp, Homo sapiens
ggacccgcagtttgcgcgtgcgcggctccgccccaggctcctccctcgcgctggcactcccgccttcgcccggccctccccgcgctttacggcccggcacgccacttttactgcagtcgcgc

SEQ ID NO: 65759 - DNA, 122 bp, Homo sapiens
agaagcggcagcagccggcgggttttgagcttccgagtcccgggtgcgcaagagtgtggacgccacccctccagggctgccaagcctccagggctgccaagccgagaggctccaagccaagg

SEQ ID NO: 65760 - DNA, 122 bp, Homo sapiens
aagtagggctgaagtagataaccagggtggaacgtttagctcagtgtctgactcacagcgcgagctaaataaacgtcagcgcctgactgctaaatgttcggccgctttcttaactaacatct

SEQ ID NO: 65761 - DNA, 122 bp, Homo sapiens
acaacattggggagaggagcgagatcgcggaagccgagggtgcagagttgcccttttaagcgccctccaccccctcgcctggaggcgcacgcggcccctttaaggcgcggggcattgtgggt

SEQ ID NO: 65762 - DNA, 122 bp, Homo sapiens
ggtgatctgcccacctcagcctcccaaagtgttgggattataggtgtgaaccaccatgcccggcctattttaatttttttagacacagtgtcttgctgtgttgaccaggctggtctcaaact

SEQ ID NO: 65763 - DNA, 122 bp, Homo sapiens
aaatgaaagatacttaggtaatgctgggattcagagaccacgtcaacagtgtacacacaccgtctaaggaagtactcaagaagaaataccaactgaattagaatcatggcctccgaagagga

SEQ ID NO: 65764 - DNA, 122 bp, Homo sapiens
cggggcccaccttattccagatgaaggtgcccagcaggttgttgtctccgaaggggttgtcggtgttggtgtagcccatgtactcctcaccccagcccatcttctcccgcttcttgcgctcc

SEQ ID NO: 65765 - DNA, 122 bp, Homo sapiens
tgaccaaggagagagtgtggggacaaagcaacctatccaccatccctcagctctcatcaacgtatgccctgtagttggtgatttccacggctaaaaccaaaattacacactctcccactaag

SEQ ID NO: 65766 - DNA, 122 bp, Homo sapiens
cagaggcacggcgggctccagcctgcccgctcagcccttctctgactggagaggaaagcacgtgtgcccatcagcccacgagctgcagccaccagccccacggcctcctggatgaactccat

SEQ ID NO: 65767 - DNA, 122 bp, Homo sapiens
tttgcagccaaatgcaagggatgttaaggcaagaccctccccacagggcagtcagagacccgcagccgacagactaagcctgcagcttccaaccaggctccccgagatgttccctggtggtg

SEQ ID NO: 65768 - DNA, 122 bp, Homo sapiens
tgttccaccgctgttctcggcctttctgatttctcggtgattctgttccgccgctgttctcggcctttctgatttctcggtgattctgttccaccgctgttctcggcctttctgatttctcg

SEQ ID NO: 65769 - DNA, 122 bp, Homo sapiens
ttgccgtcctcgtggccttagcccggactgtgagtctcgagcggcttccgagaggcagctcgggtgtcttcgcagagacagatgaggtgggctggcgattccctagcctcagatggctctgc

SEQ ID NO: 65770 - DNA, 122 bp, Homo sapiens
gcggccagactcgccgcgctcacgcggaggaagcctcggctccggggacttggcccgctgcgcgcctgctgcccgccccctccaccgctgccggcccggccctgctggcccggccggccccc

SEQ ID NO: 65771 - DNA, 122 bp, Homo sapiens
cttttttttattttttttttctttttgaatgtcatgcaataattcacagtcccaagcccacggttttcaaacaaggtaggaaaaaaggaaaaaagaagcaaaggaatcggtggtgatggtgg

SEQ ID NO: 65772 - DNA, 122 bp, Homo sapiens
gggcggcctcctattggcgcggccgtcgccaggggtggggacaggaccggcggctgctgacgccatcccggccagaaaagccctggccagtggcgggcgcgacactatccgtgcggccaggc

SEQ ID NO: 65773 - DNA, 122 bp, Homo sapiens
ctacccaagcccacctccatttggaaaattcaaacctataatttgaggtacctgggaagccgctttcccagggcggaatggtcacggaaactgggtaggctgggggccttcttggggaatga

SEQ ID NO: 65774 - DNA, 122 bp, Homo sapiens
agagggcagcggtcacaggtgcatcccatgaacccacagggcctgaaactccgggtggagcgtcaacatggacctgggcgcagactgaaagcactgcctctcacccgagtcagccggggttg

SEQ ID NO: 65775 - DNA, 122 bp, Homo sapiens
cacggcttcctgcgtctgccctctagaggcccacagaagcctcgcacctccccagcccggcgtctgcgggtgaattgtctgagcaggagcacaacagcttaagcttcatgttctccgggccc

SEQ ID NO: 65776 - DNA, 122 bp, Homo sapiens
ccggcccgagtgccgcgaggacttcgtgctgagcatcaccggcaagaaggcgccgggctgcgtgctctccaaccccgaccagaagggcaagatgcggcgcatcgactgtctccggcaggcgg

SEQ ID NO: 65777 - DNA, 122 bp, Homo sapiens
gccgcccttaaggaatgaggggagcacgtgacccgctgggggggcggcggggggagggggcgggcggactccgagccattttggagccggtgtcagtttccactctgccttcagcggtgcat

SEQ ID NO: 65778 - DNA, 122 bp, Homo sapiens
ctggcgtgggtacttgtgcagaaacttcccgaggtgcttctgagactgcacagtgaagaccgccgcaccggaggtcagcgctccgccgcggactcccggctgactctgccactctcccagga

SEQ ID NO: 65779 - DNA, 122 bp, Homo sapiens
ggtgcgagcggcgggggcggggcccacgggctggcagcccctcagggcgttaggaatccccgcccaagcggccaccactgcccactttcgccccccgcagggctggaggcgccttgctgggc

SEQ ID NO: 65780 - DNA, 122 bp, Homo sapiens
ggaaggaagtaggaggaacagagcagtgagtcagtagtgaggatgaggcttgaggctttacgccaagctcctgaatgatgtttatgagaaagaatttgacctccctgagaggcagagtagag

SEQ ID NO: 65781 - DNA, 122 bp, Homo sapiens
ccccccggagcccccgattggggcttgcagacctggcccgtgggcggattttctgcctagcgcagccgagaagcagaggtgccaggaaaaccaagagaggggcgctgggggtgcccatcccc

SEQ ID NO: 65782 - DNA, 122 bp, Homo sapiens
taacaaatggtttttatttcacagttatcaggggatgtacatctctccctccgtacacttcgcgcaccttctcaccttttgtcaacggcaaaggcagcctttttctggccttgacttatggc

SEQ ID NO: 65783 - DNA, 122 bp, Homo sapiens
tcgtcgctttgtccatccattcattcattcaggatcgttttcactgtcggtccgggacttcgaccagaaccagggagaggtggtgaaacattacaagatccgtaatctggacaacggtggct

SEQ ID NO: 65784 - DNA, 122 bp, Homo sapiens
ggtcatttaggcagctgcggagatcatagagatgaaggactccagaggatcgctccggtccgcctggcgtcacctcgcggacaggcggaggcgggacaggtgctgtgtctcttcgcaggata

SEQ ID NO: 65785 - DNA, 122 bp, Homo sapiens
cctcctctttatcatcttccccgccactcatccatctctagtgttttgttcttggagtcacgtggtcctcaggctctgaccacagcaaaagaaaagctggatgctggagcttaagctgggat

SEQ ID NO: 65786 - DNA, 122 bp, Homo sapiens
ctaactcactatagacccgaaacggcactcacggggcgacagacctgctagctgactgcccgcgtctactgccttcccacggtgttccagcagaacggcacaactaacccacagccaaacac

SEQ ID NO: 65787 - DNA, 122 bp, Homo sapiens
cagccaccatgagggcaggaaagcagcccaggctgaaggcgtgcatacaggagcacgctgcgtgagcctgtgcaggaccccagcagtgctgctgaccatgagccaccaggtaaagggcctga

SEQ ID NO: 65788 - DNA, 122 bp, Homo sapiens
tgcaggtatgcggagtctgggtcatccaattctgagagatccaactccttttcctgcagccgccggatctctgccacatagagcgccagcagctgctccaaacgctggatctgccgccggga

SEQ ID NO: 65789 - DNA, 122 bp, Homo sapiens
acacgcagccccctgccctcgggtggtgctgggtctccatgcgccacgtcagaagcgcagcgtgcccgtcagtcccatggcgggttgtcattttctcggcacacgtgcactgcagtgtggct

SEQ ID NO: 65790 - DNA, 122 bp, Homo sapiens
cttccacccttcatacatcatgtttatggcaccttttccatatttaaacacgtacagacacgcagatgcttagcactgcgccacggtggtctactgcattcagcacagtcacgcactgcaca

SEQ ID NO: 65791 - DNA, 122 bp, Homo sapiens
ttggccgcatccccaatgagccgctcggtgtctgtgaaggccacgtagctgggggtggtgcggttgccctggtcgttggcgatgatctccaccttgccgtgctggaacacccccacacagga

SEQ ID NO: 65792 - DNA, 122 bp, Homo sapiens
acctgcgcaggtcccggagggccgctggtgtctgtgtacagggcgtgctgtctgtggaaacgcgagggcacactagcactttcctgtatgtattattatacttcagtttttaggaagtgcat

SEQ ID NO: 65793 - DNA, 122 bp, Homo sapiens
cccagaaaagtccaccactggcacagatctcaaaaaatgttctgtatcctattttgtttgcgctgacatccttacaaacgtgctttcagctgttggctcccagactcctgggcaaccttttt

SEQ ID NO: 65794 - DNA, 122 bp, Homo sapiens
gtgtcaccatatcagggaggcaggacagtgtctgatgccaccagggccaggccgacttcccgccctgctcagtcccgggccccgacggacccctgtgcggaacgactctgggtcccacagaa

SEQ ID NO: 65795 - DNA, 122 bp, Homo sapiens
acactggcctctccaagaagttcacagttccatgagcgaggcttaggaattcccattttacggaggaggaaccaatctccaagcttaagaagctgcagctagaaatgagcaaccctgtgcct

SEQ ID NO: 65796 - DNA, 122 bp, Homo sapiens
tgaccgccacggccactgtgctggtgtcgctggtggagagtggccaggcacccaaggcctcgtcccaggcgtccgctggcgccacgggcccggaagctgcactggtggatgtcaacgtgtac

SEQ ID NO: 65797 - DNA, 122 bp, Homo sapiens
ggctgggtgtctgggaagcgtggactagatcttagcttgtctgcatggtgctcaaggggccgagggtggagcttggctcgctgcctgggaacctgaccatccttgcttctcggggcagatgg

SEQ ID NO: 65798 - DNA, 122 bp, Homo sapiens
cggggcgcgcgcgtcgccgccactacccgctgcggagtgaacggtgtggagcggaggccgcggaggctcctcggtccttcagcacccctcggcccgacgcacccacgcccctcaccccccga

SEQ ID NO: 65799 - DNA, 122 bp, Homo sapiens
aatgaccgtgatgatgatggcggcgatgctcgcagctgccttgcaatgagaacatgtgaccgcatggcagggctgtgcccgggtaggattcgtgaccccgtcagcagcaacaccggccacat

SEQ ID NO: 65800 - DNA, 122 bp, Homo sapiens
ctcacatctcgcaggctcttcaatgcggaggccaagttatttataaaacttgcccatccccgactcttctggactttaacgctcttgttctattagatttagtacaaatagaaataaatttc

SEQ ID NO: 65801 - DNA, 122 bp, Homo sapiens
aggaaacaggaactgcctcggggcagccagccccgccccattgacgtgcagaccttgaatcgaaacccaggctcctgcaggcactggcacagctacagcgagggcctcggccatccaagggt

SEQ ID NO: 65802 - DNA, 122 bp, Homo sapiens
agtggacagtgccgtacagtaatgtctacggggagttccaggagagctcggctactcctgcgcaggataacctctcccccaccacccgagtcccgtgctcgcgggcaggacttttccgaact

SEQ ID NO: 65803 - DNA, 122 bp, Homo sapiens
tctctaagtccaaggacacgccggtccgcgcttaagtaccggtgtaagtgcaaccaaactcgctccgcgctcccgcgccctgacgtgcggccgagctggcggctacgcagtaacgtcgccgc

SEQ ID NO: 65804 - DNA, 122 bp, Homo sapiens
ctactaataataatagggacgctgagaataacaactacgaccagaaccgaacagcgaaggcgcccctgttgtgtgttagaagtcggcgccccccgagttccgcagcagtcaacacctgccca

SEQ ID NO: 65805 - DNA, 122 bp, Homo sapiens
ggggctcttgattgagatagaagcccatcctacatgaagcaattcctcattgagttctctcgtcctttatccttgttggaaacatcaggcaaagtcactcttggtcttaaagtacttttaca

SEQ ID NO: 65806 - DNA, 122 bp, Homo sapiens
ggatcccacaggcgccccgcgacatcctggagtcgccgggagtggcgctgcggtgaaagccggtgcctagagtgggcttaggggtcccattccactcggaaagtcctctcacctccccaagg

SEQ ID NO: 65807 - DNA, 122 bp, Homo sapiens
aataagaatgctccctggtggatttgttggtaaataagacatctcgcgtcgggggcagctcgccggggcgagggcgaggacagcaggaggtgaaccgcgtcgctggccgccgcctccctcac

SEQ ID NO: 65808 - DNA, 122 bp, Homo sapiens
cgtcctcggtccccaggaccacggcttctttcctgccaggtaggtcgccagtagtgcgcacgcggctccccagctcccatccctgggccggcctccccaggcggatctgtagcgcgagtgct

SEQ ID NO: 65809 - DNA, 122 bp, Homo sapiens
acatacacatctaccacttcccttcatgcaattcctgggtgcaatatcaatccaggtgggcgctgagcacagcagcagcacacacccaacacacaaagcatttataaatacctcaggtatga

SEQ ID NO: 65810 - DNA, 122 bp, Homo sapiens
gcagggagggctcaaaggcagctcggagcggccgcagggccgtgcagatgtgcaaagagacgcacagagcacgggcgctttgcagacagcaagcccatacatccaatatttaccaccaatac

SEQ ID NO: 65811 - DNA, 122 bp, Homo sapiens
cctatggggatgggtttcctttcccccgacctatgcgctcctgaggcagggattctgactcgcttgtccttgcagctcctttgcctggcacagggactggatcgctcagtgggtgataagct

SEQ ID NO: 65812 - DNA, 122 bp, Homo sapiens
atatctatgttctgaaaatgaaatcggaatgtgctcttctgtgtggcactcagaggtcatcgtggcagcgtgtttgaaactccggcagactcgcccgagttggtaagagccagttatccttg

SEQ ID NO: 65813 - DNA, 122 bp, Homo sapiens
gacaggaaggtgggcttggcggacagaggctccggcctgtcaccaggctgcggaaggggccggatatattcaccgatcgcagagctgcctccaatagcgctctcctgacctggccacgaaca

SEQ ID NO: 65814 - DNA, 122 bp, Homo sapiens
gtccccaccctgcccggggctcgggaaacccctcgagctgtcagctggggggctgcaaagcggaattcccggcgccccagccggcgctaagacggaagaaactttccgattgttagcagtcc

SEQ ID NO: 65815 - DNA, 122 bp, Homo sapiens
taccgcaaaagtctttgatccttttccagctgtggacacagagcacccaagagactgtcgcgatgtgcggccgtctctccccttcccccaccttgcaagtctctggaatacactgtccctag

SEQ ID NO: 65816 - DNA, 122 bp, Homo sapiens
ctccagaactctggcggccgggccagggaggagcgtggactgtcccatggaaacgcggcccgggagggcttaactgaggacagctgacataagaagctattgacaaaacaccacacactggg

SEQ ID NO: 65817 - DNA, 122 bp, Homo sapiens
tccatctactctcattattgttccactttttcctgtgtttcctttattagtaaatggcatcgccatccttccagttgcccaaaccagaaacctgggagtcttcctcaactcctctcccatct

SEQ ID NO: 65818 - DNA, 122 bp, Homo sapiens
gtttccactttgtacgtgtcggctatgtctttagcaacaacctgcaacttctcctcgttccgactaatcaggattatattgagacctcggcttgctaactcttcagcgtaggcttttccaat

SEQ ID NO: 65819 - DNA, 122 bp, Homo sapiens
ccacagaacaaaactgaacagtcgctttaagagtagaggcaactggagaatgagagttcacggaagcatgaatcagcctggatactgaaatatacaaggagcaaagctccttcatgaaccag

SEQ ID NO: 65820 - DNA, 122 bp, Homo sapiens
ttaagaagtactcatgcagatatatatatatatatttttcccagtcctttttttaagagacggtctttattgggtctgcacctccatccttgatcttgttagcaatgctgtttttgctgtta

SEQ ID NO: 65821 - DNA, 122 bp, Homo sapiens
gcgggctccaggccagctccacctgcctgggccttcccacctctgggcggggatggtgaccgcaccctgaaatcccagagtcaggaccaagggaagagtctcagaggcccctttattgcact

SEQ ID NO: 65822 - DNA, 122 bp, Homo sapiens
ggttgcagtgagccaagatcgtgccatttacactccggcatggctgacagagcgagaatccgcctccaaaaaaaaagaaagagagagagagagaaagaaaagcaaagcacgcttggtgaccg

SEQ ID NO: 65823 - DNA, 122 bp, Homo sapiens
gccttatggacagcgcttggtcattgacatcaagtctacctggggggacagacactatgtcggcctcaacggaatagaaatattcagttccaagggtgaaccggtgcagatttcaaacataa

SEQ ID NO: 65824 - DNA, 122 bp, Homo sapiens
gttcaagttcatgtgttaactgagctttgctgtagccctctgcagttgcagcagccgactcggagtccatgggcagaagtagctcagctcagccaccaccatgacacctagactcgggccct

SEQ ID NO: 65825 - DNA, 122 bp, Homo sapiens
cagactgggcagaggctggtgttcctgagccctgaggagacatccagaaatagatgggggcgtgtcacgtttctgagcagctgtgtgggggaggttcaaggggtggggactaacaatatcaa

SEQ ID NO: 65826 - DNA, 122 bp, Homo sapiens
gggtgccccccccccggttttctcgccctgtagttcggggctggggccctggcggggattcgggctctttttcacgtctcttttccgccccttctgccgctcaggaggcgtccgtgttggtg

SEQ ID NO: 65827 - DNA, 122 bp, Homo sapiens
catctctccactcggtcccaatattagagtttcttcaggctgcttcatttttccacgatgcgcctctcagcgaggctgtattttgtaggaaagttccagtgaacgatgtaacaggtggagaa

SEQ ID NO: 65828 - DNA, 122 bp, Homo sapiens
cactctgctcctcctgcgcggtgagggggtggtacacgcgccctacctcggagtgtgtggcgccatgatgcagggaagatggcttcgtttcggaagctaacgctttctgaaaaagtgccgcc

SEQ ID NO: 65829 - DNA, 122 bp, Homo sapiens
agggaagcagcaggggttccttaaatatgcagagggagcagctgcctttgatctctccagcggcagaagcagccacttcccgctgagctagagtgtgcatatgtgcctgagggtggcatgtg

SEQ ID NO: 65830 - DNA, 122 bp, Homo sapiens
acgaacaggctggcaagtgaccaaaagagacccggggagcatctgggcttccaaggtcctcggtacggcccaaggcagcgaaggacgcgcggctccaggctgcgggagccaggacgaccggg

SEQ ID NO: 65831 - DNA, 122 bp, Homo sapiens
tgctggtctccagcttggtgctggctctccaggcttttatttgccagcattttggagccacgccctcttggagatcggctttcaaaccagcctcccctgcctgaagcctcagagcgatccca

SEQ ID NO: 65832 - DNA, 122 bp, Homo sapiens
ccccttactgtttacctttttgaatccgtttcttcatctgtcaaagagatagcacaactacgcattctcaaagggttatgacgaggcttggaagcggggggcgtacatgaaatgttggtctt

SEQ ID NO: 65833 - DNA, 122 bp, Homo sapiens
tgagatttattgtttcctctctgtgtgaccgttcagcatggagcctgcctgagtcagctgcgtgtacatattctagaccctttcctctaccctatctgctgcagatctgctattttctccca

SEQ ID NO: 65834 - DNA, 122 bp, Homo sapiens
gccccgcgggcgtctgcgtggtaaaccaccccggcacgcatttgtgttcgaatatccgagcgtctttccaaatgcttgccggccgttttccttgcccattgggttctcctgttggttttgag

SEQ ID NO: 65835 - DNA, 122 bp, Homo sapiens
agtttgtctcgttacctttgcaggccctgagtataagagcatgaagagctgcctttatgtcggcatggcgagcgacaacgtcgatgctgctgagctcgtggagaccattgcggccacagccc

SEQ ID NO: 65836 - DNA, 122 bp, Homo sapiens
tactgtccagtggcggtcagggaatctgcggaggtttgctggtgtgttgcaacttaggggcgaaaatgccccatgatagagttgtgctttctaagtggatttggaagtggcatgaaaaccgt

SEQ ID NO: 65837 - DNA, 122 bp, Homo sapiens
catactgtagacgaggatagagtattaaagatctcaatttagcatgggcgttaagaaattcgacaagaggaattcagtaatttaatctaacttaaaggagcaaagcataaggtgccaaaaat

SEQ ID NO: 65838 - DNA, 122 bp, Homo sapiens
agtgaaggagatggttcagccctaagacaaaagaggcagctgctcagctggagtccttcccgctgagaatcctgtgactggagacatgtgcgaggagacagagaccctcctaagaccagttt

SEQ ID NO: 65839 - DNA, 122 bp, Homo sapiens
cgaaggtgtcgcggtgtctggcccatcaccggccgagttttgccgcaagcaccggctacccgctcccgtgccgttctcctgtgctggcccagccgagcccagcaccaccatcttcacccagc

SEQ ID NO: 65840 - DNA, 122 bp, Homo sapiens
gcgggacacaccagttgcgttgctccacgctcgccagcacagggcttgattggggcgggccgcgtgctggggcgggctggctctgtgctgctgtgggccgacccaagtgcccgcctgccctc

SEQ ID NO: 65841 - DNA, 122 bp, Homo sapiens
tgcgggaggccaggttgtttttcatcattcagaacattgcctgaagcaggtccaccgtgccgttagtaacgaggaacatcgagccaaggcacctgtgccgtcagacgttgcctagcgttaga

SEQ ID NO: 65842 - DNA, 122 bp, Homo sapiens
ccttccctggtggaacctctaccgacatctcagaaggatgtctccagaatagacgttgcacggatgggggcttgagtaattcagtcctgagctggacaagtcggagcggtgccacttctggg

SEQ ID NO: 65843 - DNA, 122 bp, Homo sapiens
tccctctccatctgggttaggctctatgcagacgacagggaaaggcagtaaagagaaaaacggctcatttctagggccttcatagttctcctgtgaccatgtagcccaagacctcattatgg

SEQ ID NO: 65844 - DNA, 122 bp, Homo sapiens
cggcgtccactcccggctccgcccctcggctttgaggcgcagattcgaatcccggctcgccgcctccctgagcctgggaaatgaacgttggctactggaagccctctcagggcagacccccg

SEQ ID NO: 65845 - DNA, 122 bp, Homo sapiens
tctacctctaactagggtgttgtagcagccacccacccaccaagtctgtcttccagaccacgtatgctttcctccacctttgcatcttttatcttctgccagcccagatgcttgctgactcc

SEQ ID NO: 65846 - DNA, 122 bp, Homo sapiens
caatacccgcctccggttggttgcggttaacccttgggtgtcgcggctcggctgagggagcgcgcccgctgattggtcgaatttgaaaaccttttgcccggggagaaaaggcgaggaggagg

SEQ ID NO: 65847 - DNA, 122 bp, Homo sapiens
ctgccttttggctactgtgagtaatgctgccaggaaacaactaaggcttttaaatgcaggcgttttaaaccgggggcaaggaacattactgcttgaaaagaagtcaccattcctccatgcct

SEQ ID NO: 65848 - DNA, 122 bp, Homo sapiens
gcagcggggcgggcgtgagagggaccctggcttttccccgctcccggctcccccaatgcccgccatccccgctcaccttcaaacctgcccgagaagctgtcggtggcccggccgcgcttctt

SEQ ID NO: 65849 - DNA, 122 bp, Homo sapiens
ggaatgtttaccagacacagagcccagagggacagcgcccagagcccggatagagagacacggcctcactggctcaggacagggggcacagccaccagggtccccttccccctcctcagctc

SEQ ID NO: 65850 - DNA, 122 bp, Homo sapiens
tccaggtaaaaattataatcaggatcacaaaacctctcccccaccattactaatgaaatgcgcaaaagcatagtaaaagccagccctccgcaccgccttcaaataatggagcaaattatttc

SEQ ID NO: 65851 - DNA, 122 bp, Homo sapiens
tcataaatcgggggagcctctcgatggcgggatccagcggagacacagagccagagagcgcgtgggtggatatcaggagagttttctggttcagttgaggagtggggtgaactcctttgatc

SEQ ID NO: 65852 - DNA, 122 bp, Homo sapiens
aactacagaataagataaacaagaaagaatatataatatgttatagaggaagaagtatcgcggagaaaaatgaagaagggaagaggaatagaggtgacgcaattttagaatgtccagagaag

SEQ ID NO: 65853 - DNA, 122 bp, Homo sapiens
cagggactagcacttggtaaatatgtagagtgagtggtattaccatttctattattcagacggagactccatctccatcagccctgcttctgtagtggctgaccacctcctcttctgggttt

SEQ ID NO: 65854 - DNA, 122 bp, Homo sapiens
aaatactccctgtatggatgggtgtcagcttttagcctggttttgctttctgctgttacacggcagcactaagttgagtgcaagttctcacaattgctgtgctctccctctccctagcacag

SEQ ID NO: 65855 - DNA, 122 bp, Homo sapiens
gttgccagacagccatcgttggccattacctccaggggcaggatggtacctgggccacagcggcagacacaatgtggtcttgtagaagttggagatgttggccgggcatggtggctcatgcc

SEQ ID NO: 65856 - DNA, 122 bp, Homo sapiens
cctggaaaacaaggtcacgttctctgcccaacagccctcttgcctcatcgttctaggctccggggcttgtgtggggacagccagcctcctcgtgttgatttctgatcacctggtacctggtc

SEQ ID NO: 65857 - DNA, 122 bp, Homo sapiens
ggggctaaaagcccagggtaattcaaggctcaaaactcatgtcctcagctctgcacatgtcggaatgggacataactcaccacggtgagacccactggctggtccactgtggcgcacgtcat

SEQ ID NO: 65858 - DNA, 122 bp, Homo sapiens
tgtgcggcaaactgtccaatcaggtgcgccgggaggaggggcaacttccaaagcccgaagcggtctcatttcccgccggccccccattcgggtccgggttttagttcctcggggagcccctg

SEQ ID NO: 65859 - DNA, 122 bp, Homo sapiens
ccgttatctatagatgcgagcgtgacgatcaacagcaatgcggggttagtggttctagaccgatggcactgacgtggagggctcagggcagaaatttaaggggcactgagacataggactgc

SEQ ID NO: 65860 - DNA, 122 bp, Homo sapiens
tatactatgggctttgaagaacgcctgtccagaacacccaacaagctccattatgtcaaacgctcccgcgcctctgtgatgtcaccacgacgcgctgggcgctctgcgacttggcagacgtc

SEQ ID NO: 65861 - DNA, 122 bp, Homo sapiens
ccagaacggatcgcgtggtcacgtgacagcggccaacatggcgccgcccactgtgtggtacggcccacgtggttccgacagtcaagatggcgggagcagctacccaggcttccctggagtcg

SEQ ID NO: 65862 - DNA, 122 bp, Homo sapiens
caccagggggcgctaggacgccacgacctttcactatgtgcaccagggggcgctgccgcccgccttggccatcccgggctgggaagtccgacccttcgattaagccccgcctgattgggaaa

SEQ ID NO: 65863 - DNA, 122 bp, Homo sapiens
cagtcgctctatagggagcgcccgcggacctcactcagaggctcccccttgccttagaaccgccccacagcgtgattttggagcctccggtcttaaagggcaggaaatacactttgcgctgc

SEQ ID NO: 65864 - DNA, 122 bp, Homo sapiens
gtggtcaatgtgtcaactgcacgatccgggcccctcaccacatcctctgcaccggtcagtcgagccgagtcactgcgtcctggcagcagaagctgcaccatgtccatgtcacccacggtcat

SEQ ID NO: 65865 - DNA, 122 bp, Homo sapiens
ccatcgcgctcaggaaatccttgcagactccctccacccggcttactcagctctgggggccgcccgaaactggggaagggacaaggctgaagctccgccgcctggccctaggggcggaaagt

SEQ ID NO: 65866 - DNA, 122 bp, Homo sapiens
gccagcaggtgacaggacaaacgcagtctccgctttcattaagctcacactgtagtaggacgtggcaaagggaagttcagaaagggtggcccgtgccacagaggaaacagatcacggaagtg

SEQ ID NO: 65867 - DNA, 122 bp, Homo sapiens
tccacccgcctcagcctcccaaagtactgggattacaggcgtgagccaccgcgcctggcccgggaccaaaggtttaaaataagtatgataaatgtatttaatagatactagaatttcttaga

SEQ ID NO: 65868 - DNA, 122 bp, Homo sapiens
ggccggcaaggcagagcccaggagatgagtaagcggcagtgggcgggagtcacagcggtccgcgggtgactcagcgtccaggaatcccagggggccagaaagaagattttggcaaagaaagg

SEQ ID NO: 65869 - DNA, 122 bp, Homo sapiens
acgagcacgcatccatgtttacaaggggcagaatcatttacacagcacacactggggcttcggggtggacccccgtgcacacactacatacccgtacagcccacaagcacgcagccacacgc

SEQ ID NO: 65870 - DNA, 122 bp, Homo sapiens
gcatgttttctctgaagggttaactaaaaaaaaaaaaaaaaaaagcctttgtgtctgtttcgagttctccagttgaaatactgtactcattgaactgcaagaaataaaacctgcaagtaggc

SEQ ID NO: 65871 - DNA, 122 bp, Homo sapiens
tttgctttgagtccatcaaaacatgacttcatttagattttatctcaactccactttcctcggaatcctataataaattgctgttttcctttgtttggtgatgtgcgtagctcttctggtgg

SEQ ID NO: 65872 - DNA, 122 bp, Homo sapiens
caattggtttcttactttagctttagggatgcaggtccaaactggatctccaactggatccgtgatgaccttcaaccctctgatccccaagaaaccagtcttggtcctcatctaaactgagt

SEQ ID NO: 65873 - DNA, 122 bp, Homo sapiens
gaaaatggcagccaaggctgcatcgggcggcgaagagggcagtgtacccagggagcggggcgctggccaggccaggctgggaatggaatctgtccctagcagcgaggctggcactgaccccc

SEQ ID NO: 65874 - DNA, 122 bp, Homo sapiens
gctctggatacacgtggtacgaccggatgaaagtcgggctcacggtgctgatgacaacatcgtattcctccacttcggctcggaggcagtcaaagaagcccagggctgcgtgcttggaggca

SEQ ID NO: 65875 - DNA, 122 bp, Homo sapiens
cgcctatccatagcaaaatggaggacttctccagggaactgcaactcccaagaagcaatgcgagggaaggtggcggtcactattttttccccgtctgcacctctaggtccaatattggaaat

SEQ ID NO: 65876 - DNA, 122 bp, Homo sapiens
ggcccgatgccaacctcactgtggcacacccggggccctgcgaatcgggtacgcatggcccggggcccccaccccagcacttaggtttcctagaggcactgctccccgacccctgacagcat

SEQ ID NO: 65877 - DNA, 122 bp, Homo sapiens
aagatagactttggagacagacctggttttctaccccagatttgccacttactagctgtgcgatgttgagctggtattatttagtctgagctttgctttcctcatgtgcaaaatgagaataa

SEQ ID NO: 65878 - DNA, 122 bp, Homo sapiens
ccctcccacgacaggatatttctttctgaactcctgctgccctgggcaggttggtggggccgggggtgtggacagtgcccagcacaggctggacagggtatcccatttccagcccaatctcg

SEQ ID NO: 65879 - DNA, 122 bp, Homo sapiens
tgagacctctggaggaagtgtcatcctctggctttgtgtggtactcattatggtgcagtgcgggcatgaaatgaagacacccaaataggcttacagatacgatatgttttaaatgttcgtat

SEQ ID NO: 65880 - DNA, 122 bp, Homo sapiens
agccccgctcccggggctctctcctggagaaccccggcttgggtttcaggagccgaggcacgaacccagggcctaccccgaggttctggttgatggattttgcgggccggggtcaggggatg

SEQ ID NO: 65881 - DNA, 122 bp, Homo sapiens
ccgctgagtgcaaacgcggcactcctgcacatgtcgcctcgcaccgtggcgggcgtgtcccgtggaaagctgcccatgctgcccacgccctccctgggggccccttggctgcctgcactccc

SEQ ID NO: 65882 - DNA, 122 bp, Homo sapiens
agggagagagagggcttcacctcatgatctacaacatttccacgatgtaccaccgcgtcccggctccccgatccccttggaagaattcgttctctcggtcagagcgacctcgcacgctgatc

SEQ ID NO: 65883 - DNA, 122 bp, Homo sapiens
tgaccagaggagaagaaaaactctgtggtgacaactgacgggatggtacagctgtgtcagcgtggacgcctagcctgaattacgggtggttttgtaggattgcgctgtgtcagcgtggacgc

SEQ ID NO: 65884 - DNA, 122 bp, Homo sapiens
acctcaggtgatccacctgcctcggcctcccaaagtgctgggattacaggcgtgagccaccgcgcctggccaggctgcacacattcttattaggattccaccttgttctggtgttgtagaga

SEQ ID NO: 65885 - DNA, 122 bp, Homo sapiens
ggacagagtgagcgcttgatgatcccgtctaaaagtctcaaaatgagccccctttggtctcgctctgtcgccccaaatccctctcccgcctcagctgcagtttctccagctcccgaggaagg

SEQ ID NO: 65886 - DNA, 122 bp, Homo sapiens
acagccataggggcggtggttagggaagtggtagtgcggtgaagcaccactgaaggtgagcgtggcgaagtcaggagccctctttagagccaaaataaggtttttctctcgaagtagtgaga

SEQ ID NO: 65887 - DNA, 122 bp, Homo sapiens
gttcttacattggcaggaaggactcacggttcaaaccaagatactgtatttcagacatttcgtaatcaaaatctggttttcagtggccattgagaaaggctagagaccaacaaacttacttg

SEQ ID NO: 65888 - DNA, 122 bp, Homo sapiens
tcctcccatgacttatgaatataccttaagcatagttgtttataatgggatgtttctaaacgacctatccttatcctggtaccacgctgatttgagctacagggcaaatgggtgcaccatgg

SEQ ID NO: 65889 - DNA, 122 bp, Homo sapiens
agtctaaagtaatcttggtctcttccggccgccgtaaaggggttgggtttagtgttctcccgccaatttaagcctgtggcatggaacctaaagactagaggcggttgtgtgagtcaggaaga

SEQ ID NO: 65890 - DNA, 122 bp, Homo sapiens
ctcagggtgggcacaatgtcccgcaccctccgcacagacacacaaaacttacagagtggccggaaaagggacagctgatcaacagcctggagcgcaccccggttctggcaaagacagaggtg

SEQ ID NO: 65891 - DNA, 122 bp, Homo sapiens
tattggctccaaggtctttatctcccagccctttgggggtatgggagtaaaggaggaaagcggttagtgtctcatttgtgagaatttgtctaaaatctaaagccattttattaccctatttg

SEQ ID NO: 65892 - DNA, 122 bp, Homo sapiens
cgggacccaagcagtttttccgagcagccgccaggctcagccccgctcccagcctcgctgcgcagccagagacctgctatggccacgtctatactcggggtaagtcgcaagcgcggcaacgc

SEQ ID NO: 65893 - DNA, 122 bp, Homo sapiens
tttcctgcctccctttgccgttttgctggttatcaaagacctttgctgcgagacccaggccggcccagcccagcgcctcccatcctcctgtgaagtcatccgctcagttggcagggttccca

SEQ ID NO: 65894 - DNA, 122 bp, Homo sapiens
ccgcctccccccctgccccagccgccccccggccgcgcggcgccccgcaccctgcagggacggctgccgcatcgctgggacaaactcggcagcggaggcaaagttatttcccctcccaggca

SEQ ID NO: 65895 - DNA, 122 bp, Homo sapiens
gccgccccccctcgcactgcgcggctgggccgccggttcaaccctggaggcagccaaagtcgcccaggtcctcaggcaaacctcagggctgcctttgccgcccagaaacgcaggtggacaga

SEQ ID NO: 65896 - DNA, 122 bp, Homo sapiens
tatccagcccccgctgagttttgccgggtcagcggctgcactttggttctcgcggagcgccgcctaaccccgccccacccgcgctcgccgcctgcctcacgtgacgtccgtggagtctcgtc

SEQ ID NO: 65897 - DNA, 122 bp, Homo sapiens
cctggtttctcccgccaggcccggccttcccccgtacactcacgcggcaacccccaggcgcgggtttggacagggcttccagaatgggaggagccctgacttccaattgtacaaagttttcc

SEQ ID NO: 65898 - DNA, 122 bp, Homo sapiens
cttacaatgtgtatctaaaagcttcctcctgagtgtctgcctcaggccagggctctctgccgggcaccgaaacctactcatatcaaatgctaactatgaagcaaaacactggccaacaatga

SEQ ID NO: 65899 - DNA, 122 bp, Homo sapiens
acacttggtgaaaaagcaaggtgcggtgtacctggagcgaacaccatgatttcttccagccgctacgcccccagattaagagagaaagacaggcagacggaggatgggaagaaggccggact

SEQ ID NO: 65900 - DNA, 122 bp, Homo sapiens
gagtactccagaagcgaaggctactagcacggacaactgcagtgtcctctctgacacatccgccatggctgccgccggcgtgcagcgcggtctacggcgcggcggcggggtcaaaaggcgcc

SEQ ID NO: 65901 - DNA, 122 bp, Homo sapiens
tcggggccgcgggcgaagcccgggctccgcaggccggcggccaggggcggctacgtacctcggggggtcctgtccagcctctagtggacggcagtctgcatcaggaagaaccgggccagcgg

SEQ ID NO: 65902 - DNA, 122 bp, Homo sapiens
ggtttcactatgttggccaggctggtctcgaacttcggacctcaggtgatccacccacctcggcctcctaaggctgggattacgggcatgaaccaccgtgcccagcctttatttttcatttt

SEQ ID NO: 65903 - DNA, 122 bp, Homo sapiens
gtgggcagtgatgggtaagacttatgaatggcgtaagccaccacacccggcccctaaacccgcactttgctaactgtttgctttgtgatgttcaggctagttgcctaaactctcggagcctg

SEQ ID NO: 65904 - DNA, 122 bp, Homo sapiens
ggcggggagggcgtggagggcggtaaatgaggcgagcacagggcgggacatgggcggggccggcggcggcccccccgggcaggccaatgggagggccgggtgcgtttgaaaactggggtggg

SEQ ID NO: 65905 - DNA, 122 bp, Homo sapiens
ggaaggccgtctggctccacttgcccgtgaaggtgatgctgtatttggccagggctctggcggaacagatggactctcccccaagaggctggccggcggcgccgagagtggccaggaggaga

SEQ ID NO: 65906 - DNA, 122 bp, Homo sapiens
gttgagtccaggatcccgggtgccttcaggggtggccgttcccatgcagagctaggaggccggtggcaggcaggcccccgaggagtcccctccaggcgtctctgtctgtgtcaactccatcc

SEQ ID NO: 65907 - DNA, 122 bp, Homo sapiens
ggcggcaagcgcaagaacctcatccccctgcgggccagcaagatccgcgagaaggtggaccgcgccgttgaggccgctgagcgggccgccaccatcgccaagcagaaggctgagatcgcggc

SEQ ID NO: 65908 - DNA, 122 bp, Homo sapiens
gacccctctgtggtcgacagcgacagtttcaaaccaattaaaataagcctggcgtttctgcgggctgccgcccgtgccgccaccctgggggtctctgagggccttgcttgcaatgagcaaga

SEQ ID NO: 65909 - DNA, 122 bp, Homo sapiens
gggagcccctcaattcctttcacacaccccctttcgtctaaggcagctctcacggagaagcggtttctcacacagcggtagacgactccatggaggccgccatcttaactgccctccttccc

SEQ ID NO: 65910 - DNA, 122 bp, Homo sapiens
taagaacaaaacattcttttacataatatagtacaattatccaaatcaggaaacttagaccgatgtaatactatgatctaattgacagtccaaattcaggtcctgccaattgccccataatg

SEQ ID NO: 65911 - DNA, 122 bp, Homo sapiens
gaagaatggatcgattagagaggcggggcaataccttttacctgctggcaggtgaaatttcgcctcctggcggcgtcacctaaagtcctctccctccaaggcgcgccctccgcggccggcag

SEQ ID NO: 65912 - DNA, 122 bp, Homo sapiens
aactccgtctcaaaaaaatatatatatatatatatttgggtaggaagcacaagtagggaccgtgcttgctgccagaacaaccaatagaaactccttgaaggccttcctggcacaaacgtagt

SEQ ID NO: 65913 - DNA, 122 bp, Homo sapiens
cacacactcatcccacttgaatcttggggcaggaactcagaaaacttccagcccgggcagcgcgcgcttggtgcaagactcaggagctagcagcccgtccccctccgactctccggtgccgc

SEQ ID NO: 65914 - DNA, 122 bp, Homo sapiens
gttttggcttgaggaccacatttcactttaatatttctgaatcagattggtgcttcctatcggttctgccttaatgctccagctatcatctcaatagcttatataaagttaattaaggctat

SEQ ID NO: 65915 - DNA, 122 bp, Homo sapiens
cctctccccgggctcctactggcctgaggttgagggcggctgggggctcggggcaggctccgcggcgttcccctccccaccccggccctccgttcagccgcgctcctccggggctgcggttc

SEQ ID NO: 65916 - DNA, 122 bp, Homo sapiens
gctccacggagccaggagcctttgacgaaaggcagcgtaggcgagggccttcatgggactcgtagtacaaggcccatcacaagggtgcgccgtggagaaaaggggtgatacccttcgcctcc

SEQ ID NO: 65917 - DNA, 122 bp, Homo sapiens
gacctcaggtaatccacccacctctgcctcccaaagtgctgggaatcaagcatgagccaccgcgcctggcctgcttaagtgcttaaaattgacttggccgggcacagtggctcacgcctgta

SEQ ID NO: 65918 - DNA, 122 bp, Homo sapiens
cccatctgccaggagagcctgaaggaggccgtgagcaccaactgcggacatctcttctgtcgagtgtgcctgacacagcatgtggagaaggcctcagcctctggggtcttctgctgccccct

SEQ ID NO: 65919 - DNA, 122 bp, Homo sapiens
gatctacaaaccagcccccaggagcagcaggccctggcaacctctgtgctatggagtccacgcagaacagggacttcaaagtgcttggggtgtgctggcttgggagtcatttcgctgagaac

SEQ ID NO: 65920 - DNA, 122 bp, Homo sapiens
cctgagacgttcacagactcagagggaggagcggcagtgcggacttgaaagcaatccaggcggagctgccaagaggcttagccacaagcacggatccagccacagagctggggcgaggctgt

SEQ ID NO: 65921 - DNA, 122 bp, Homo sapiens
cggcccatccggccggtttcgcttcccggtacgctgcagggtcagggtcgcggcccggaacgtggggattggtccgggcttgagctcctcggccttccacgccgcctcctcccacagctgcc

SEQ ID NO: 65922 - DNA, 122 bp, Homo sapiens
ggtgtgcacacaatgtaaatgaaataggagcccgagatcagtctgaatggttgcagaaagcgatcaatgggaggctgaagtgaagttacaaagttatgccctatgaaaacatctgattggac

SEQ ID NO: 65923 - DNA, 122 bp, Homo sapiens
ggtgatccatccgcctcggcctcccaaagtgctgggattacaggcatgtgctactgtgctcggccctgatcttgagattttcaatggccagcttcctggcacctgaggagtatggcttgcca

SEQ ID NO: 65924 - DNA, 122 bp, Homo sapiens
tctgtggtctactgtagctaccaaaaatgtagctggttataacatggggagagccagagtcggaggacctgacttccaattctgacttggatactaatatcacatcattgtacccatttcaa

SEQ ID NO: 65925 - DNA, 122 bp, Homo sapiens
gagggggccaacggtgctagaaacacacccaggccaggtgccgggcctggaccgggcaggcgctttacatacttgaccttgtgggaccccatttaactgatgagtcaatgagagttaagaga

SEQ ID NO: 65926 - DNA, 122 bp, Homo sapiens
ccaggcgctcggaaactatttacgggttgcctgaagctgctgtcacactcccgtcctttgcgaagttccaggtagtggaggcaacctccaagaggcaatccattaccaaccaactcatgacc

SEQ ID NO: 65927 - DNA, 122 bp, Homo sapiens
gtgttgcaaataaagcacattcgtcgttttgccacagttaggacgtgaagttctctgaatcgaagtacggtgtcagtggatgggacagaatagtacggtagtgagtttgcagaaccctgttt

SEQ ID NO: 65928 - DNA, 122 bp, Homo sapiens
ggagttcaaaacgaaactgggctcaaatgctctccccagcccggagagccctgtccccatcggccactctgagctcgaggcctaaagggacagtgaggaggaccctgcccaggctctcccgg

SEQ ID NO: 65929 - DNA, 122 bp, Homo sapiens
ctgccagtcccacacagtgcacccgcactcctcagtccttgggcggttgatgggaccaggcgcggtggagcacggggcggcgcctgtcggggaggctcgggccatgcaggaacccactgcag

SEQ ID NO: 65930 - DNA, 122 bp, Homo sapiens
ttttcaaggtttaactcctacccaccctcaactttggtcaaagcaatttcttttcagggtcgtgtccaatcggagatcaaacaatgatgactgaaaccaattccacggtgttcaagggtcag

SEQ ID NO: 65931 - DNA, 122 bp, Homo sapiens
ggtgccattgattcttgactgcaaaataccttgaaacccttatataaagactgaagtcaacggagcctagtgaaagacttactttgtggcttgtggttgaaagtcacatcaaaagacaaatg

SEQ ID NO: 65932 - DNA, 122 bp, Homo sapiens
ttgcacataaaaagtaaggtacaatctgtactaacagttggggaacccaatagctgagggcgcgaaaagggtgcgcggttagaataactcagtggggtgggggaagggtagatgctaggccg

SEQ ID NO: 65933 - DNA, 122 bp, Homo sapiens
gtaaggagatacggtcttatttaaaggctatttgatggagtgggggttattctaggcattcgtgggaatgtcaattgattttaaaaagagtaagccttaaacataaagattcacaaatctta

SEQ ID NO: 65934 - DNA, 122 bp, Homo sapiens
gagcagccgcggatcggagcatccgctggtccaggaccccccctcccgcccgccaggccacgttgttcgggcagctgtcacctccctcggccgccgcagcacctctcgcccccgcagcccgg

SEQ ID NO: 65935 - DNA, 122 bp, Homo sapiens
tcctaagcgaatctcgcacaaatctcgaggcatattttgtacaaggggacactggccgcgcgcatcgcaatcgcatctcagcgacagaagcggtcacgtgccttggcgcgcttccgcaccgc

SEQ ID NO: 65936 - DNA, 122 bp, Homo sapiens
gcagggctgtgagggaacagtcaaatgcccagagaaatgcaaacggtgtgcatgtgattgcggtttccaccatgagcttccacaccatccagggcaaattatttcatatgtagctgccacat

SEQ ID NO: 65937 - DNA, 122 bp, Homo sapiens
acaaatacatactaacagacttgaacaatccctagcacattgtccaacagcttaagtctacgtcccttgaatgaccccagctcccacattaaattgtctgcctgagaacgctcatgatgata

SEQ ID NO: 65938 - DNA, 122 bp, Homo sapiens
tgtcagcttcttcttgatggcgtccttggagctggcataaatcattttgctcttaaggggcgcagactcgggggccctggacagaaacacgcgtcaggcaactcccagcaacagcaaagcca

SEQ ID NO: 65939 - DNA, 122 bp, Homo sapiens
ttccgaaattaaatcagcatgtagaaagcaagcctcctcatgctttttaaagtgtaatctcgcgacctcgcggcgcgctctgggaagaccgattcatctcttcccctcgccctctttccccg

SEQ ID NO: 65940 - DNA, 122 bp, Homo sapiens
cctctttgcggttaagaggaaggcttctgtttcccgcatgtccctgggaacggaatgtctcggtgtaaagccgactattcgttctattttgagacaggagaaaaccgccctgtggctggagg

SEQ ID NO: 65941 - DNA, 122 bp, Homo sapiens
ctcgcagcatgttaatgaattcattaattaatttcactgcccacatcacccctccccaggcggcggctctcgcggggagccgtgcgctgccaggctccgcaggccgcccgggagggggccct

SEQ ID NO: 65942 - DNA, 122 bp, Homo sapiens
tttacttttcgaaaagccaccgttgaggtgaaatggggacccgtagctccagagaaacagcgggaggcacaacctcctctgtgaaattcctctgtgagtagccagagagcgccagagaactc

SEQ ID NO: 65943 - DNA, 122 bp, Homo sapiens
taaaaatagattgactgtaatgagtatttgaataaatcataagaatggccgccctgcgatcggctaacatcctgccgatggctgcccggtgagtgagcagggcgccggccctcccgcctaat

SEQ ID NO: 65944 - DNA, 122 bp, Homo sapiens
gaggcggggagccggcgccgggagcggtggactaggacccggtgggagggaagggccaggcgtccagctcgtatctcctctcgcaaacgcctgctggtgcccggtttcgccggggaggagga

SEQ ID NO: 65945 - DNA, 122 bp, Homo sapiens
ttatgaccaatttttgcttaccaaggattatttttttacctcctgtctcgtctccccacacgaactcctgtcatcagttcttgggtacttggggatctagcaggttcatgtcatacgggtcc

SEQ ID NO: 65946 - DNA, 122 bp, Homo sapiens
gcgccgcccgacgtccccctttggttactctgactgcccgctgatctgtataagaggatccggaggggaaataatgcaaggtggaagtcagagtccggagcctggtccagggtctctgcact

SEQ ID NO: 65947 - DNA, 122 bp, Homo sapiens
gtgcctcagtttctcactcctccactgcacaccgcacccagagcagaaagagctcagaaacggtctgtgtgtatgtgtggatgttagaacatctggagttaagggctggattctccacaagt

SEQ ID NO: 65948 - DNA, 122 bp, Homo sapiens
ccaacccctctatgtagtgccgctcttggggacatgggtcgcccatgagagcgcagcccgcggcaatcaataaacagcaggtgatacaagcaacccgccgtctgctggtgctgtctccatca

SEQ ID NO: 65949 - DNA, 122 bp, Homo sapiens
gtggaatgtgtctggccgaggaccatctgtggcaaaaggttacctgatgtccaggaaggtcgagactctttgtgatccaaggcgaggggtccccacgtagtgagtaaagcttctttgatgct

SEQ ID NO: 65950 - DNA, 122 bp, Homo sapiens
caggagacaggaggcctgtgagctcacagctgaggatatctggtcatcagctgagatggacgtgctcaggtcagaggaaggagccacctaacacagaagcaccgtaggaggatcctgacctt

SEQ ID NO: 65951 - DNA, 122 bp, Homo sapiens
ccgaacctcgattctccttcccggcccgatgcacgtcactctagggttctcagctgagttcgcccgcctagttctttggttcgcgtctccgcccgtgttgttttctgggtttccttctcgcc

SEQ ID NO: 65952 - DNA, 122 bp, Homo sapiens
gggccctttctgtgtcagatatcagttttgactctgaggttccatctctctgaggaaattcgcacaataccagttagggagacatactgtgtgtttcccaatgtcactgcccgcatgttcaa

SEQ ID NO: 65953 - DNA, 122 bp, Homo sapiens
tcaggtgttcagaacccttggaggctccagctctcagtgttctctggagggactgtgacacgagcagtcgggcacagagcaggtgacaggacggcactttctagaacactgccacccacatg

SEQ ID NO: 65954 - DNA, 122 bp, Homo sapiens
tcaagggagtcacccattcctgagtgagtcagggtcactcactccatgacagctgtggctcgccttacatgagctaaattgggaattggaatgtcatgcagatgccccttgtctcccaaccc

SEQ ID NO: 65955 - DNA, 122 bp, Homo sapiens
gagaaaagttgcttgttcctgaaatgcagacacacctccaatccagagagcaagtcatctcgtggaggaagtggtagctgtaaaaattcaaatggaaaaggcataggtaagagacaaatttt

SEQ ID NO: 65956 - DNA, 122 bp, Homo sapiens
tccaaaggtttttaaaacatgaaataaaatgtcaactactagatgtgaggcacaaacctacggaagtgactgccacttacagggagcatcaaaaagatgaagaccaagactgcagtgggcag

SEQ ID NO: 65957 - DNA, 122 bp, Homo sapiens
agggacgtggacacctactgatgattggctgcaaattacacggggaacaagaggcgcacgcgggccagcgctccttttcacaaatcctctcctcggcagaggagccacgttttccctgctcg

SEQ ID NO: 65958 - DNA, 122 bp, Homo sapiens
gcttggacggcggggcggggactgtaggcgcgcagggctgggcctggagggcaggcggggcggggcccgttaggcgcgcggggcggggcttcggccgctgggcggagccgtcaatgcgcagg

SEQ ID NO: 65959 - DNA, 122 bp, Homo sapiens
gaggagttaaatctggactccaaacctagaatctggagccaagaggcgcactttgagttgcgctcctggccccccttgcagagacgccagggttggctcctgcggacctgtttactgagcca

SEQ ID NO: 65960 - DNA, 122 bp, Homo sapiens
acggaacaggtggagccgcggcggggctaggcggggcggggagtgaaacagcataggctccgcccctcgcggcgcttcccccggaatagcgtcatcagttctataagagagcgtgtgccgaa

SEQ ID NO: 65961 - DNA, 122 bp, Homo sapiens
acttatgctttaaaccaacagatccagagacaatggccccgatgggatggagcccgaaggcgtcatcgaggtgagactggagaaatggaattctgtcctcccccattacaactttcagccgt

SEQ ID NO: 65962 - DNA, 122 bp, Homo sapiens
tgatcacacaagcattagcaagatgattctgctcctgtcttgaaaagtgttctttcagcacggacctccgtctgttacgttcagaaacgacatgactctcatcacccatgaaacgacggggc

SEQ ID NO: 65963 - DNA, 122 bp, Homo sapiens
cagggaattacaaggatgcaccctggctgccttttgtcaacagcatccataacatggccacgtgcaagcgggccacagctggatggtgttataacttggcagccacccttctgccttcccta

SEQ ID NO: 65964 - DNA, 122 bp, Homo sapiens
gtggcagactcccagtgtgtgtggcggcgcccgcaggaggcagtccctctcagccgcatccgccttgaggttgttctcagttctgatgtggccccaaagagaaccagttccattatggatta

SEQ ID NO: 65965 - DNA, 122 bp, Homo sapiens
tccccacgggtcctggcattctggaagaacacgactcagtagctttccccttctgggcctcggtttccctgtctgccaaaggtgcagggagatgagctcccagctcatgcctctgggcctcc

SEQ ID NO: 65966 - DNA, 122 bp, Homo sapiens
gatcctgggtccatctctgggaccgtgtctggggtactgattctgcccctcgaggggagccgggcatttatccgccaatgcctgtccctcgcggtgagggcctctcctgggtgtcggacccc

SEQ ID NO: 65967 - DNA, 122 bp, Homo sapiens
gcccgcctgcgcctcctgagccagagcctgttaggtagggaggggcgctacctgcttccccggaggacagaaggtgggacctggctgggatccaagtttaccaaaggtacctgccctgggag

SEQ ID NO: 65968 - DNA, 122 bp, Homo sapiens
tgcactatataaatgtatctatctagaattcagggatcggtgaaacaaaagacatcgcatcggcaggtctgtttgcaacttctgggatacaccaggtgttagcggtgatgacttctggatgc

SEQ ID NO: 65969 - DNA, 122 bp, Homo sapiens
gtcactgtgtttctcagagccgggatttccctccctcttatgaaatccatcatggtttcacggccccacagctgtctctaggagcctcagaaggatttagccagtaacactttgagctgctg

SEQ ID NO: 65970 - DNA, 122 bp, Homo sapiens
ctcctgaccatagttttgcggtgtggttttgttccagaataagaatgtgaagatcatgtacgataggtagatccaatgaccagttgtaccttgttttattttttgagtctagatgagggcag

SEQ ID NO: 65971 - DNA, 122 bp, Homo sapiens
ggaacccccagctcccgcctggaaacccacgtgtgcagtcataaaaagcaccgacaaaggcgagggccggtgctgggagcggccgcacttccccgcaggcctggcttcctttaatcctgagc

SEQ ID NO: 65972 - DNA, 122 bp, Homo sapiens
aactcctagattcacgtatgtaaacacttgtttgccatcttctcttgaatgactaagacacgtcttaaatataacatgtccaaaatttaacacgtcttcccttataaacctctttctttcag

SEQ ID NO: 65973 - DNA, 122 bp, Homo sapiens
aatcccaggaagttgcatagagagggagtttttgccagcctgggtcactgatggccagtccgggtcactgatgtctccccaggggcaaggggacagtgcctggctaattgtgggtttcaaaa

SEQ ID NO: 65974 - DNA, 122 bp, Homo sapiens
caggcctccaagaattctcccaggaaacaaatgtccagcaggaccatggctgggctgtcacgtccagaagccaccaggccacagcaggggccccggcaggcaggccaccgtcggaagccggc

SEQ ID NO: 65975 - DNA, 122 bp, Homo sapiens
gagtgcagcggctgagaaggtcccttcggtgaaggcgagttccgggacaacagagagggccgcaccgtttccgagtctctcggaggctcagttctcagcgcaccattccccacagctctcct

SEQ ID NO: 65976 - DNA, 122 bp, Homo sapiens
ctcggaggagcccactgtgccatcaacaaaccctgaagcccccaccggctgctgctgacccggccacacgccaccatcttcagcaaaccctacgatggccgcagagtgagcaccagcattta

SEQ ID NO: 65977 - DNA, 122 bp, Homo sapiens
gtgaacgctatcaaagtatgcttatctccgaacctttcttaaaccagagtcttaagggatcgtctctgattaggtctagaattcctctccatagaagataacctacttctcgcgcaaatctg

SEQ ID NO: 65978 - DNA, 122 bp, Homo sapiens
agagattagatggggtccagagagcagggatgaacttacccgtgtggattctggcaactccggcagggagggctccagcaggcgctgagggaagaactttcaagcagagccgggtctcttca

SEQ ID NO: 65979 - DNA, 122 bp, Homo sapiens
aacaactggctacgatcctaacaactaatgacagggacatttatctccctcatgaagaaacggtcccaggaccatctcccacccagcatccattgcggttccctgtgcaagatgagtctctg

SEQ ID NO: 65980 - DNA, 122 bp, Homo sapiens
ggggtctggaggcacggaggcgtccttggtccccgaggtggagacactgctgttgtcttacgcgactggtgcgcgcgtggggctggcttcacaggcgttgcattactccttttgccttgacc

SEQ ID NO: 65981 - DNA, 122 bp, Homo sapiens
ctccttggcctggctgccacccttccaccctcgggggagaccccgcgctctgtgctcactcggggaagagaggctcaatcacggcctggaccagcactagggacctaaacgctcttctcagt

SEQ ID NO: 65982 - DNA, 122 bp, Homo sapiens
ggagaaggaatttcacttcaatcgctacctaacgcggcgccggcgcatcgagatcgccaacgcgctttgcctgaccgagcgacagatcaaaatctggttccagaaccgccggatgaagtgga

SEQ ID NO: 65983 - DNA, 122 bp, Homo sapiens
ttactcaaagacgtgctccgaagtccagatcttcatggtgccggcaccctgagagatgtccgggtagcgccaggggacaacgaggcacagaggctacacctgcccctgccccgcccccagca

SEQ ID NO: 65984 - DNA, 122 bp, Homo sapiens
gagtcgactaccggcgtagtagtgagccgagtcaatgggagcgagcctggacggcgcagacgccgtaagagatgccgccatcgggcgaaataagtggaacccgggggagaaagggaaggatc

SEQ ID NO: 65985 - DNA, 122 bp, Homo sapiens
gtggcttccggcacccttaccccgccctcgccatgaacgcctcgatgtccaggtgagtcccggggctggggctgtccgcatgtttgtcttagcaaccacgccatttctgaccacgaaacagc

SEQ ID NO: 65986 - DNA, 122 bp, Homo sapiens
agttttctccttcctgagtgctatgttattgtgcctgcagatgttgtaatgggctgtacccgttggcctccagccaggaagtagtgtttgcgaaagagcaccatctgcagtggtagtggtgg

SEQ ID NO: 65987 - DNA, 122 bp, Homo sapiens
cagcagcaagacaggcattgtctgtctgcagaacgatgcgggcattgtccacagtatttgcgaggttctgagcccttaggtcctggatagtcttgaagtaatggctccagtgtctgatctgg

SEQ ID NO: 65988 - DNA, 122 bp, Homo sapiens
ctcccggacgagctgcagtcctcggacgcggcactagccattctccccgccgcccgccttcgggagcccaggatgggctgcgttcctttctggcacagctgccccctcagtccagacagtag

SEQ ID NO: 65989 - DNA, 122 bp, Homo sapiens
actcagaccccctctaggaagcctgctgctctgagcagagaggggcctgtgtgcccccagcgtgagcacatgtatacacatgcgtggagctcaggactaagcgtgttcacctcgtacacggg

SEQ ID NO: 65990 - DNA, 122 bp, Homo sapiens
ggggcgggcacttgtcccagccacgtttctgctgactgagcagccttcttcatgagctcacgcctttccagagaaatcccttaatgcctccattctgctggtggcatatatagggagggctc

SEQ ID NO: 65991 - DNA, 122 bp, Homo sapiens
tccgggccgccggggaaagctacgggcccggtgcgtccgcggaccagcagcgcgggagagcggactcccctcgccaccgcccgagcccaggtaaccgcgccatgtcccctccccttcccccg

SEQ ID NO: 65992 - DNA, 122 bp, Homo sapiens
agcccccacagaggccgcaggggaaaaacaccggtgggattcatcagcccccacagaggccgcagggaaatgcagcctggtgatttccgagaagtcccagttcccgagagcaacatggaatc

SEQ ID NO: 65993 - DNA, 122 bp, Homo sapiens
gtagcacaggcctcggctcagtcggagcgccaggcctcagggtccgggcgggggctgctgcgtcacaccaggcagcctgggaacgcaactgttgggcaaccgtggtggcctctcgccacctc

SEQ ID NO: 65994 - DNA, 122 bp, Homo sapiens
ctgatgacacattcagcagttctgggcccagacctctggccccacctgctctgaggtccccggggggagttttgtccaagccctcccagaggccaccactagcctgcacctagcacccctgg

SEQ ID NO: 65995 - DNA, 122 bp, Homo sapiens
cttcggcaccagggtcagtttctgactcttcatagaagtctggagaaaggcggtctcgcccgtaatcgtctgcgagcaagtgggggtgaagaacagagcggcagtgagcctaactgaggagc

SEQ ID NO: 65996 - DNA, 122 bp, Homo sapiens
ttgataattgaactatgattcaagagttctaaatattgatgggaggagaaggcggaaagtcgcagtcatctctaagaatctgatgaaaattcacagctagtatggcactctcaggtgagatt

SEQ ID NO: 65997 - DNA, 122 bp, Homo sapiens
ccataaaggcgaaaccgcactgacggagaggagccagcgccggaaaagatggcggtggtgcgctgacgtcacttccgcttcaacactctggccgggcgaggctcgtgggctccagtttcagc

SEQ ID NO: 65998 - DNA, 122 bp, Homo sapiens
cgatctcggtcacgctccaaatcaagatcccggacgcggtcccgctctccttctcacactcgacctagacggcgccatagatcccgatcaaggtgagttgtggctttaagatcaacaaagat

SEQ ID NO: 65999 - DNA, 122 bp, Homo sapiens
cggagtctgatggtggtgggctgggctcgggcccttcagtgcacctgctgagcctcctcccgtggcgggtgtcaaggagggcatgtgtccgccaggcgggcggcagctgcggggaggcgcgt

SEQ ID NO: 66000 - DNA, 122 bp, Homo sapiens
ctctgccggaggtgaggtcagtgatcccccggcccctcgcctgtcaggaggatggacagacgatcccatctgatactcacagccaccgcagggcggcggggcctgagagcatcaggccaccc

SEQ ID NO: 66001 - DNA, 122 bp, Homo sapiens
actcttggccaacattcctagagcccctgccacgggactgctgtgggctgagactggtgtcgcctctcccttgaaagcatggcctgctctgccgtgtgcctggcttggccactggttctcct

SEQ ID NO: 66002 - DNA, 122 bp, Homo sapiens
actttctggtctcctcctgctctttctctcctcgcgtctcctccgcttcctctcacttttcggacaaaccagtccttctgaggcccatgggttcccgggctgcctccggggctgctcctgtg

SEQ ID NO: 66003 - DNA, 122 bp, Homo sapiens
gggggcgggcccgcccgtcaccatggagactccaccctagaagattcttctctgggcccgcggaggctcacgggatgaggtaatgctccgctgccctcctacagtcgggcccttctttctcc

SEQ ID NO: 66004 - DNA, 122 bp, Homo sapiens
tcagagccggagaggggcctgtcagcgagaaatgaaaggccccaggtcccggctggtgctcggcttgtgagcgtgtgtgtgcccgtgggagtgcgtgtgtgtgcgggtgcctgggagcttgc

SEQ ID NO: 66005 - DNA, 122 bp, Homo sapiens
gcctggtgcgggcccgggaaccacacgacctccaggttctcccaccccgggacccgggtccgatggaagagaggagaggcagctctgctaaaggacttgaaggctttcacgccacagggacc

SEQ ID NO: 66006 - DNA, 122 bp, Homo sapiens
aaaagtcatcctttggtatcaaagaaagtttcattgcatggttgcacggaaaaagcaccacggtgaataattattcctttttttttcattagtggcctttctaagaggctgaggtattcaaa

SEQ ID NO: 66007 - DNA, 122 bp, Homo sapiens
atatataaatgctcatgctttaaaaaaaaaaaaaaaaaaaatacagcaagtttaaccaggcgcaatagttcacatcagtaatcccagtggctgggaaagctgaggtaggaggatcactttta

SEQ ID NO: 66008 - DNA, 122 bp, Homo sapiens
aacacctgatatttatttccactaaatctcagctatatctctagggaacagaaataccttcgtttaaaaagaaaagtggaaacagctagtacagaaatccactggttttgttagccaccttt

SEQ ID NO: 66009 - DNA, 122 bp, Homo sapiens
cccgccgcccgccggcagcaccgcggccagcgccgtcttacctgccgcgccgcgccgctccgctccgccagcccgcagcgccgcagtcgccgctacccgacttccattttctctcgctttaa

SEQ ID NO: 66010 - DNA, 122 bp, Homo sapiens
ccaagttttcgggtctccgaaccagtgacagtcacgtgtcgctcagtgacacatgagaaacgtgtgcttagccgctgctgtgtgatcacagagtctttacacaagcctcgatggtgcatgta

SEQ ID NO: 66011 - DNA, 122 bp, Homo sapiens
ccattgctcatggcccttctctaggcgacactcacctggtgccagaaacagcagaggtagcggccagtgagcgcttcctccatccggggctcgggcggcgagctggctgcaagactgggcac

SEQ ID NO: 66012 - DNA, 122 bp, Homo sapiens
ctttccctcaggccggcttcttggcccggagtttttggaaacaagtttcaagaaaataatcgatttccaaaagaaagttagctggctccactgacgccttggcatggatggatagggagtgg

SEQ ID NO: 66013 - DNA, 122 bp, Homo sapiens
cgcccgaggcctctgctgccggtggtgcccagggccggctcacgctggccagcatggagacgcgtgtcctgcaggaaactatctctcggttccgggcattggcggtggacccccacggagtt

SEQ ID NO: 66014 - DNA, 122 bp, Homo sapiens
gcggtcccggctgggtgagaccagcaggcggctctagcgcgcgggagctgggcgaggctccgggacgacctcaccaatggagactgcagtatttagcatgccccacccatctgcaaggcatt

SEQ ID NO: 66015 - DNA, 122 bp, Homo sapiens
ttccctttgatcattcttttctctttctagctttgatgttttggtttccattctgtaattcgcacactattttgtggacatgctcttttcaaatttctctccaaaacaatagtacaaaggca

SEQ ID NO: 66016 - DNA, 122 bp, Homo sapiens
ttgggggacctcagccggcagctccggagagggcctacccttggggtcgctgggtgaggccggcacgattcttggctccaaaaggaaagtttctgcttcttgttctggcgcgagaagccaaa

SEQ ID NO: 66017 - DNA, 122 bp, Homo sapiens
gcagctgtccccagcagcccatccctgttgggtccacccggcaacaaaagcccttgcggtcgcggccacacccctgtcaacctaaagttgacagctcattttgccacggcagccctggccac

SEQ ID NO: 66018 - DNA, 122 bp, Homo sapiens
agcgccgggtgacgctcggagcgcacttgagagcaaagttgaggactggggagtcgcagccgctcgttacgtgcagccctgggacctttcgtcccctctggtcacttgcggcagactcagga

SEQ ID NO: 66019 - DNA, 122 bp, Homo sapiens
ctccgggaaaaggtgagctctgagcgctacctgctcactgaacagcggaagagcgagcagcgcccaggccccgacgctgtgcagagccccgggagggcggcgtttgcgtgattgttcaaggt

SEQ ID NO: 66020 - DNA, 122 bp, Homo sapiens
agtgcaattggtagatatataaatacacctttacatgtcacatttatttataaatgcacacggcacatgtgacattcgcatatttttgcacttaattctcagaattattttaagaaaaagca

SEQ ID NO: 66021 - DNA, 122 bp, Homo sapiens
caggagaacatggatgaatcctgacacaccccttcccgttccatttaaacgcaggaaccacgggcgatatctgcggcacttacccgcctaaatttagagctcctcagtaaagctaaactcag

SEQ ID NO: 66022 - DNA, 122 bp, Homo sapiens
cgcccccaggaacgctctcctcgagccctcccccaaacagactcgctagcactcaagacccggttattcgcccacccgagtacctccagtcacactccccgcggttcatacgcatcccatct

SEQ ID NO: 66023 - DNA, 122 bp, Homo sapiens
agtagattccgtaagaatgagagaatgtgtgtatgtttttgaactggaagacattctgaccgggatctacagagatataaatgggcaaatccagtacagtttaaacacaggagttcttatct

SEQ ID NO: 66024 - DNA, 122 bp, Homo sapiens
agggcggggagcgctcacctttctgggaggaacgaaggccgcggcctagcgtacctggggcggaagtggctctgcctaccgagacctcctggactacgcttcccagaattcccgacgggatc

SEQ ID NO: 66025 - DNA, 122 bp, Homo sapiens
cggagcggggaagcacgccgcctccctacgcaccagcatggcacctcgcacaagtagcgccgccaaagtttccccacgagggggctgagggacaaaagcccctcccgaaactcgcccgaact

SEQ ID NO: 66026 - DNA, 122 bp, Homo sapiens
tgcggctgacaaggggctggagcccacaaggaggctgtggagcccgctcccagagcactccgagttcagacacacttccaccagctctcctaggctccccagcttctgtgtcaggtacaggt

SEQ ID NO: 66027 - DNA, 122 bp, Homo sapiens
tgggagtggggagggctctttaagcggcggccgcgctaataacctgtccaggagatggctcgtggcaaattgctttgttagtcttgtcagcgcggccggggccgccgtcagcgcgcgccatg

SEQ ID NO: 66028 - DNA, 122 bp, Homo sapiens
ccctgctaacggtatttctagaagatgggcagaggacaagccaaaccccgggagggaccacgcggcctgggaaacagttcggcaaggaggccgggcccctgtcccgcctctgagggcggagg

SEQ ID NO: 66029 - DNA, 122 bp, Homo sapiens
ggccagcgccagttccgggtgggcgtgggctcggcaggccctgcactgggagctgcaggccggccccgccgccccgggcagtgaggagcttagcacctgggccagcagctgctgtgctcgat

SEQ ID NO: 66030 - DNA, 122 bp, Homo sapiens
tgagcacacagcagacaggacagtcctattagtgttggtgtgaccgtgtgcacgcgttcccggcattacagcatcacagcaaaagtaacaggatggcgggtggggggcaccagatgcaaacg

SEQ ID NO: 66031 - DNA, 122 bp, Homo sapiens
ccaagttgaggtcccgatgccagaagcagtcccactgcctgtggcccgggctgaggacggcgttgagaagctgggacttggagttgctactgacgtccatgcgcacgaaggcgaaggcgggc

SEQ ID NO: 66032 - DNA, 122 bp, Homo sapiens
ccttccagctctgtgagtctaggaatcaggggaaatgacagtggcctctcttccgggagacgaatccagctggagccatctggtcctggctcggcacatccctccctccctccaccccaggc

SEQ ID NO: 66033 - DNA, 122 bp, Homo sapiens
ccattacagctaagcgttcccagacccagcagaaaccctgggttcctgcagagcactcaacgtgcagcaaagtgtcccagctctgcaaagggcagctggaaatggatttaaaatggcaacgc

SEQ ID NO: 66034 - DNA, 122 bp, Homo sapiens
tgcccactcacagccagtgtgtgtgcaggctgctgtccactgtgccctggggggtggggtcgcctggttgagaacccctggtcctgtggggcccaggtgggaggtgggcccaagcctggtgc

SEQ ID NO: 66035 - DNA, 122 bp, Homo sapiens
gtgcgcccctaggattccaggctctgtgcgcttcccccgcgaatagctgggctcccgtaccggcgaggttcaaccccagagagcctgcccagcccctggcccactcacccgtcacgtagatg

SEQ ID NO: 66036 - DNA, 122 bp, Homo sapiens
aagaagagagggtagggggtttccagaatgataaagcaatgtgccaatgtcatgcagtttcgagaggccactgaggtggtagggaaagcattgcccatgtgtggctccatctccccgagcct

SEQ ID NO: 66037 - DNA, 122 bp, Homo sapiens
cattaccatccatctcagtttcatgtaactgccaaccggcattaacgccctcctcctcgccgaggcagaaaatagaaaaggaagaattcagcagattttccccggtggccccctcggcggca

SEQ ID NO: 66038 - DNA, 122 bp, Homo sapiens
agaatcctcaaccagatagtcacagtgcactttgaatgactaatttaagccattacattacgaaataagggataaatcatacttttcataacactactgcataggaacagttttaagagtca

SEQ ID NO: 66039 - DNA, 122 bp, Homo sapiens
tgacctcctgcaggccatgtgtgtattacttgtctagtgatgtcctctcaaagtgctgtacgcgagctcggcgccacctccgcctccctttcagagcctgctccccgccctctctgctcgct

SEQ ID NO: 66040 - DNA, 122 bp, Homo sapiens
ataccaggcaaggctggtgccactggcaaggatgatctaccaggagacctgccaccaatacggagctagagaaagtgcttccttctcataccaggagacaccagggtggttgtgggtgagga

SEQ ID NO: 66041 - DNA, 122 bp, Homo sapiens
tgcccaagcgcgcgcactggggggccctctctgtggtgctgatcctgctttggggtcatccgcgagtggcgctggcctgccctcatccttgtgcctgctacgtccccagcgaggtccactgc

SEQ ID NO: 66042 - DNA, 122 bp, Homo sapiens
atggccgggccgagagaggggggccgtcttctcttccggcgccaggcacacatccgggagcggcctgcgccgcaaggcactgtggggtatgtaggccagagtcatttctcctgaggcgactc

SEQ ID NO: 66043 - DNA, 122 bp, Homo sapiens
tgtcccccagcctttggactgtcaccaaacaagccattcgttcatcaaatactttttaagcgcctaccatgtgcctgacaagggagatgtaacggtgagaaaaactaggtgtggtccaggcc

SEQ ID NO: 66044 - DNA, 122 bp, Homo sapiens
agcctgaggaataagtgtctgtggttcaagccacccagtctgcggtattttgtgaggcagcgggagaaagctatggagggctgttattttgttcgtatcatctttcgtgatgtgaaagctct

SEQ ID NO: 66045 - DNA, 122 bp, Homo sapiens
aggttcgtcgtgtgtataatgtggcaatctgcaccgtaaaccccgagctgcgcagcctggcgcggcgtgcgtccgtaacgcatttaaccaccatttattgttgttattatcatttttattat

SEQ ID NO: 66046 - DNA, 122 bp, Homo sapiens
aaagtgttgggattacaggcgtgagccattgcgcctgggcaggtattttttctcattaagcgctccccatccaagtctgccctaggcaggagtgcctagtgcacgggtacatacataccccg

SEQ ID NO: 66047 - DNA, 122 bp, Homo sapiens
ggcacaggggaggaagaggggaagggaaaagagaagggaaggaggacaaaggaatgaagacgggataggagaaaagggcaaagaactagattgctgatggacattcagtcattggctgggga

SEQ ID NO: 66048 - DNA, 122 bp, Homo sapiens
gaggcgaacagtgaaatagtgcatttatcttaaaagtgaaataattccaggatggtagggcgagaccctgtgatgggtgaatttacctcacttgataccaagggcccttaatactcggggaa

SEQ ID NO: 66049 - DNA, 122 bp, Homo sapiens
tacaaggactggtctcagaacatgtatttcaactgctcagaagacaaccccagtcgagagcgctgctctgtgccttactcctgttgcttgcctactcctgaccaggtgagccagcatcctgc

SEQ ID NO: 66050 - DNA, 122 bp, Homo sapiens
ttgtcccgtggttctcacggtcacgggggcagcagaggacagggctcatagctggcggtccgtcttcgttttctgcaacatagtggtttatggttctgctggtagtggaactgtatcatagt

SEQ ID NO: 66051 - DNA, 122 bp, Homo sapiens
gtctatcaaatgggattgatcacagtccctgccacgcagaaaggcggtgtggattccgctcgcatgtctgataaagcgcttgcttggctcagcgcctgcccctcggacgacacccgtctacg

SEQ ID NO: 66052 - DNA, 122 bp, Homo sapiens
gacctgggtcacctccagatgtggacacacaggcacactcccacacacacgcgacggagccgcactcgccgcaagagagaccaaagggaagccctgagactcccctgctgctggaaacgctc

SEQ ID NO: 66053 - DNA, 122 bp, Homo sapiens
cctaatttcctgctccagggcagtaaacacaaatatttcttcaaggggtgatgaaaacctcggaagttttaatttgaggttatctgctacgaaacagtatttctaaaaggctaaagtgataa

SEQ ID NO: 66054 - DNA, 122 bp, Homo sapiens
attctttcagctcctttgtttcatacggaactccagatcctgagtaatccttttagagcccgaagagtcaaaaccctcaatgttccctcctgctctcctgccccatgtcaacaaatttcagg

SEQ ID NO: 66055 - DNA, 122 bp, Homo sapiens
tgcaggaggagatcgacctcgtggtgggacgcgcgcggctgccggcgctgaaggaccgcgcggccatgccttacacagacgcggtgatccacgaggtgcagcgctttgcagacatcatcccc

SEQ ID NO: 66056 - DNA, 122 bp, Homo sapiens
ggtgatccaccagcctcagccccccaaaatgctgggattataggcatgagccaccgcacccggacaaaagtaagactttttaataatggttttgcaagatcggatgtgtgatgggcaggcac

SEQ ID NO: 66057 - DNA, 122 bp, Homo sapiens
cgcccgttcatacacacatgcgcacacgcccccgttcgtacacacatgcccgcacgcccccgttcgtacacacatgcacgcacgcacccgttcgtacacacaggcccgcacgcacccgttcg

SEQ ID NO: 66058 - DNA, 122 bp, Homo sapiens
cagtgtgccgtgctcgtgccggctcttcccagcagactggtatctggctgtaacgtttgacgtcttcatattgccagtctgtattgaggggtgatgtacatggccatacagccaaatgggtc

SEQ ID NO: 66059 - DNA, 122 bp, Homo sapiens
gtttgcagcgcgaggccagggggcttccctgggactcggcgaccgccctgtgcgctcggacgcgcaggcaaatccccgctccgctgcgcctggtgtgcacggagccctcctacttgcttcct

SEQ ID NO: 66060 - DNA, 122 bp, Homo sapiens
gggggacagacgatgatgggggacagtggaagggaacacgtcagatgcagtaaggtggatcggtgtgagaagagagagcggcgcataatcccaagtccccaaacccaaaacaggaacaggga

SEQ ID NO: 66061 - DNA, 122 bp, Homo sapiens
tgggaatcattaagattggagaaagctcctctttccatgtatgtgtgtctctcctttctgcgactctaccctgtcctctgtggctccggtttctgttccctgtgacttcatcctgcactggt

SEQ ID NO: 66062 - DNA, 122 bp, Homo sapiens
ccagccaaggatactgtcctgacatgcagtgaactcccctgtgggtcacttgggctccagcgggaccacctgctgggatgcgacctcctttgctcctctgccacctggcctgcatgcaggag

SEQ ID NO: 66063 - DNA, 122 bp, Homo sapiens
aagcgccaggacaatggggacccgggacgacgagtacgactacctattcaaaggtgcggccggtggggcacagacgggcgaagtcgtggcggcgaggcggcgggcagacgggccaaggccgc

SEQ ID NO: 66064 - DNA, 122 bp, Homo sapiens
tttgtttggaaactaagtttgtgtcctgtgtctcagtagctctcagggtggtggcagtcacgcccccccggtcccagggctgggaagatgcttgggctagcccccgctgcagccccggagat

SEQ ID NO: 66065 - DNA, 122 bp, Homo sapiens
tcctgggtaggagagagaaggggactcactcctgagctccagaactcccccagtgccacgcgcgtgaaggagcgccttcaaactccacagcccccaccccgcgccgggaccccagccctccc

SEQ ID NO: 66066 - DNA, 122 bp, Homo sapiens
acaaatctctgcctcttgagtcaccaaagaggggtgcatccagggtgcactgggggaaaccgaggcccgttcacaccgcagcacccccctcgacctgcctccccagggatttgggtgccatg

SEQ ID NO: 66067 - DNA, 122 bp, Homo sapiens
atgctttcagatcttcataaatgcaaatcgctccttctggggtgggtgagcaagctgagccgcagagctgccttgggaggcgatggggtgaggttccagagggcaggaggagggagcagttc

SEQ ID NO: 66068 - DNA, 122 bp, Homo sapiens
agcacactcacctgccagccgctgccgtccgccatgtctgggcgaccggcgcgccaagcccgcccctcagtccgccagccaatgaaaaatgaagaaaacggcacctcgtgatcgactgacag

SEQ ID NO: 66069 - DNA, 122 bp, Homo sapiens
agactagggctgtttggctttaattaacagcagcattgttgcccttttccttgctagattcgtgcttgctgctcaaattgccaaaattaaatatttagggcaatgttcatgagtgctgggaa

SEQ ID NO: 66070 - DNA, 122 bp, Homo sapiens
acaaaggcccaggctttggggaggccctggttggtgcccttggggttgcctgcctggtttcggcaataaataacatgaggacccaaaaaccaaaccagaacaaaaaatacaaccagtatctc

SEQ ID NO: 66071 - DNA, 122 bp, Homo sapiens
ggcagccacctctgcaacctgcggtgctcccagctttggctgtggcgagcagctttcaaacgaggcactccaggatttgtgtttacccggggagttctggcggaatctaggagatctgctat

SEQ ID NO: 66072 - DNA, 122 bp, Homo sapiens
aagataagatgggagggtgggcaggctagcaagcagatgcatcccccaaaccccacaccccgtactgaggcccactcacgctttttcaaaggccagcttctctttctccagctgcttggata

SEQ ID NO: 66073 - DNA, 122 bp, Homo sapiens
tagaaagtcaccatttttttgttttcattaaaataattgtctcagttgttctgcgcttggcgaggtaaaccccggggcttagacttggttccaggatcacgctattttaagctaatttttat

SEQ ID NO: 66074 - DNA, 122 bp, Homo sapiens
tctctcacggaagaagaattccattctcccatcccaggaaggagagtgccctgcgtgccacgaaagagcccaggacccacaggacaaatacgtcactggcagacctgccttcgccagcgcca

SEQ ID NO: 66075 - DNA, 122 bp, Homo sapiens
gagaacgtgcgggaagagaagatcatcgagcatttcaaacggtgagtgacacgaggcccgcggccgcgctcgctcctcgggcgccgcttcccgccccggcccgttgccggcccctcccggag

SEQ ID NO: 66076 - DNA, 122 bp, Homo sapiens
tagaggactgagcaggaccccacttacctgggacctcaggatccatgctctcccagaggacgcctctcacacacatggggcggcagtcatgttacactcctgcagggcacaagaagccaaga

SEQ ID NO: 66077 - DNA, 122 bp, Homo sapiens
gaagcaattcttgtagctcccactggtagtcaagaatgaaagagaagctcctttcacttacggctcctgagtgggctgtctccgcagagagggcagggccaagctctgtctcctcacgataa

SEQ ID NO: 66078 - DNA, 122 bp, Homo sapiens
cgaggggagaacaggcagacataatatatattcacatcgagccccagagcgagcggcaggcgacaaatctcccctccttgaaggcaaaggaaaaaaagaccactgtttaaagctgcgtcgcc

SEQ ID NO: 66079 - DNA, 122 bp, Homo sapiens
cttcttgggtcggctcttggccccagcctgagtcttgggctgcagaggctgtgtgggctgcggaggaggcgcctggggctggggcgcgggcgtcttcttgcctggggagtgggccgagggcc

SEQ ID NO: 66080 - DNA, 122 bp, Homo sapiens
caggcaggtgacagctcagctcacttcagcccagcaagggcagccggccaggggtgcagacggcgttagcttcttccagggccggcgaaccccaagtcaaggtcgtcccagctcttggccag

SEQ ID NO: 66081 - DNA, 122 bp, Homo sapiens
gattcgtcccgcggcctctttgcccccggggtgtaagggtttcgggccgtggagaggaggcgctctgacccgcacgtctccacccgcgcagcccattgcacttcaagtcgcccttcttatcc

SEQ ID NO: 66082 - DNA, 122 bp, Homo sapiens
tccaactttgtacttactattagtttattgatttcttcagtgaagcctgttggattttctcggagaattgtattgagtccagagcatttgggggagaatcaacatcttaatattgggcctca

SEQ ID NO: 66083 - DNA, 122 bp, Homo sapiens
cttgtggctctttaatattataacggatacagaaaagttcagaaggactgagctagtttgcgaaaccacagcacactttggcaaagagggaatgcacaacaaaacgggtaagtttctttatt

SEQ ID NO: 66084 - DNA, 122 bp, Homo sapiens
aaggtggtgaaggagtgacctgtgcagatatttggggaagagcattccaaacagaggaaacggcaagtacaaagaccctgaaacggcaagtacaaagaccctgagatgggagtgtgcctagc

SEQ ID NO: 66085 - DNA, 122 bp, Homo sapiens
tgatggtggtttgggctgaggcccggttcccctgctggttttgctgatctgggacagtggcgctggctggaggggcccttgccccttgcctggccgtgtgcgtggccctcggctgtgagggg

SEQ ID NO: 66086 - DNA, 122 bp, Homo sapiens
ctgtcacggctatcccgtccaacctcgccggggtatccgggctcagaactgaacctactccgtctgggagcccaaggatggctcccccaagtcgcccccgcctggccccaagctccagagga

SEQ ID NO: 66087 - DNA, 122 bp, Homo sapiens
gcctactttttctatgtactgttcgtttgctggcaactactatgtttctgaggctgacctcgaaatcctagcctcaagcgctcctcccgcctgggtctctggagtagctgggattacaagcg

SEQ ID NO: 66088 - DNA, 122 bp, Homo sapiens
gcatcctcctgctcctctccgcaaataatgcgggcgccacagcttcccccagcctcagtccgaagcctgaccccaaggtagcccccaccacccccactgagggagctcaactccccactccc

SEQ ID NO: 66089 - DNA, 122 bp, Homo sapiens
cagcactgaggtgagatggagagagggtggggcggggtggggggcccagagcctgccgctcgccagggaaacaggagccggtggctaaatgcagacacactgtcatggtgctgagggcctga

SEQ ID NO: 66090 - DNA, 122 bp, Homo sapiens
cttgccccacctctttcaaaaggtggaactgggagaggggcgggcactgtatcttgcgaacgacagaaatggcaaccaactgtgcttctgcattacagaccaccaaccaatgggtggtggca

SEQ ID NO: 66091 - DNA, 122 bp, Homo sapiens
gacctcgtgtctccggcatggggaggaccagcagtgatccccacggcttccacgcggtggcgccgtctccccacggctgcttccaaggcctgctccgggctccgcagggctgtggctgtgtt

SEQ ID NO: 66092 - DNA, 122 bp, Homo sapiens
cattcattattcttcctcaatagaagaagggcggtttgttctcgagaagtgcgagctatgcgtgacatgcaaacaggaggtcgagggtcagcatgcatagcccagtctatcatctccgtgaa

SEQ ID NO: 66093 - DNA, 122 bp, Homo sapiens
cccatatcatttagggaaagtttcatgccagtataggaactgtgtgctagtcaaattctccgacactatgcagtggccacccttgtaagcagacctttctgttttttttgtttttttttttt

SEQ ID NO: 66094 - DNA, 122 bp, Homo sapiens
tgtgtgtgtgtgtgtgtgtgtctccccccaccctctgatttgctccaccccaaccccagccgtcctctgacctctgcctagctgacccctccactgggatgcccccagccttcctcagcact

SEQ ID NO: 66095 - DNA, 122 bp, Homo sapiens
tctcggtgacgctgagctttggcgagaactatgacaacagcaagagttggcggcggcgctcgtgctggagggtgagggtcgcgccgggctgactggggcccggggctgccgtgcccgccgcc

SEQ ID NO: 66096 - DNA, 122 bp, Homo sapiens
gaccttggaccgcactttgagaaccattagtttttctttcagctctacatcattcacagccgggcctggtggctcatggctgtaatcccaggactttgggaggctgaggtgggtggatcacc

SEQ ID NO: 66097 - DNA, 122 bp, Homo sapiens
ggagccactcctgacagtcctgttcctgctctgcctgcctccctggcaactacgactgatcgtgtgtcccactcagttccagccaaggaaactaagttctgctgggtagggcacctgggaac

SEQ ID NO: 66098 - DNA, 122 bp, Homo sapiens
ggcaaagctggctcagtccatcgtggtccctttgaagagctccaccagctccttgtagtccgggtcgatgaggtcggagggcaggtcgccatcgtcgttggttgcatccctgtccgctccca

SEQ ID NO: 66099 - DNA, 122 bp, Homo sapiens
ggctcaagaatccatccaaaagtcaagcgcatgaccctcctggctcttcaaagcctcttccgctaattcgggcacacctactatcttgtgggaaattcaggcgttatgttgcttagtcctca

SEQ ID NO: 66100 - DNA, 122 bp, Homo sapiens
cctccggcggctcccccttgtgggagatgtggggcatagcaaggcagtgcccagttgggacggtgcctgggtgggaggagggcgagagaagagtgctcgcactcagggatgtgccccagagg

SEQ ID NO: 66101 - DNA, 122 bp, Homo sapiens
gacacattctcatgatgaattcttaatgcagccattaaaatgttaattaagaatttcaaacggcatgagaataattaggtaaaaacaaagacatgaaattgcatgtataatatttcaactat

SEQ ID NO: 66102 - DNA, 122 bp, Homo sapiens
acccagaagccttgaattttttaagctttggaggagatgaagccagagaaagagaagccacgtttcccgccatggaaacacacttatgagtccttcgcgatgggcaaagcccacgtttgagt

SEQ ID NO: 66103 - DNA, 122 bp, Homo sapiens
gaggtggcggatatggggacacgaactgcgaagagaatccttgctgagtggggaggcccacgcgggggggcaggggcgggcactgtaatcctgggtacggcacggcctgtcccgaactcatg

SEQ ID NO: 66104 - DNA, 122 bp, Homo sapiens
tgtgtgtgttcagttttggcttgggtagggtgcaacagtgaggttgagtgatgagaagtacgtgaagggcctcagatcctgcttgggaaatttagattttatcctctaaaatgtaagaccaa

SEQ ID NO: 66105 - DNA, 122 bp, Homo sapiens
gcccacctggccccccacctgtgatggtgacagtgaagtaggcacactcatctccagcgacgcactgaaactcgcccccgtctgagggctgggtggcgggcagcaccaggcggcgatggggc

SEQ ID NO: 66106 - DNA, 122 bp, Homo sapiens
agagaaggcatctctttctaccttcaaatcagcatctggtttctgttcacaggagcaacgcgatgcacgacaacccccgcgccttcgtcagtggctctaactcctgtcacagccttgttcct

SEQ ID NO: 66107 - DNA, 122 bp, Homo sapiens
agctcatggtctggtgggctagacagtcaagaaaacaattaccattcaaactgattcatacgattagggaaagcacagggtaaaactgtaaacccagagggggaaaaaaagtaaaagacaca

SEQ ID NO: 66108 - DNA, 122 bp, Homo sapiens
tgcttaccagggacatggcgcaggaaccgttaacatggccttagacaaagggaggccggacggcgggtagaagcccttcatgatttgcaaggcaattacgtttggtttcaggaatgcaagaa

SEQ ID NO: 66109 - DNA, 122 bp, Homo sapiens
tccagcccaggagactttcatcttcatctcgcatgaaggatacaatttcgttttgacgcacggtttagagaagccgttgaacgtccacacaatctgttatgctaaatcacacctggtgtctg

SEQ ID NO: 66110 - DNA, 122 bp, Homo sapiens
tggaaggaaggccttccctccagggcgcaaagcacacgtggcagggtcaaaatccagtcccgaacttcccaagccacagcaggtcactggaaaaagtgatgcctttgtgtttgtgccttttt

SEQ ID NO: 66111 - DNA, 122 bp, Homo sapiens
cacttttaagtttaaaagccctggaatcccttgggagaagggaaagatggaggtagggaccggaaagctttccaaagttgattctgggcaaacaaatatcaggtgaagattaggaaccggca

SEQ ID NO: 66112 - DNA, 122 bp, Homo sapiens
cagttcttgttttggtggggagttgagcacgagcagaacgcaccgagttacacacacagacgcaaaggccattgcagcagcaaaaggctaaagacataaaaagttagagatgtcttaggaca

SEQ ID NO: 66113 - DNA, 122 bp, Homo sapiens
aaccacagacggcttcggctgtgcctagggcaacagccaacctaggagccagcgggctttcggggaaaaaaaagaaaaagacatctaaaataaaatgtttaaactgtttcaaaataattatc

SEQ ID NO: 66114 - DNA, 122 bp, Homo sapiens
attggccaaagactggaaacaacccaaggcccagcatgaggggatctgctggctaactcacggtgagctaatccacggcgagctaacccacggcgagctaacccacggcgagctaacccacc

SEQ ID NO: 66115 - DNA, 122 bp, Homo sapiens
taacggcgggtaacccgccccacccgccgcacaacacacccaactgcacggactcacgtccgggatcccctgcctgcctctcgaggaagacacctgcccaggccggccgcagaagaggtcgc

SEQ ID NO: 66116 - DNA, 122 bp, Homo sapiens
caaactcgggaaagtccgggaaagcctattggaaggacaggtggcgagcgcacagtaggtcgtctccggcacgtgtcaggcgctttcctgaaaatgccccgcgggaggtgatcttctgacac

SEQ ID NO: 66117 - DNA, 122 bp, Homo sapiens
gaaccaccgcgcccagccacaaaattgtttttaaaaaaactattttacaaaatctttgaccgtaattatttttaagatgaaaaatatgttatataaattataaaatgttacttaacacaaat

SEQ ID NO: 66118 - DNA, 122 bp, Homo sapiens
ccccgtcggggatctgcgcgccgctcaggccagccataaccaccacggctgttatgggtgcggttactatggcaacagagcaaccggaagcggaagactgccggtttccttgtcgcaagaaa

SEQ ID NO: 66119 - DNA, 122 bp, Homo sapiens
ctcactctgtgttcacctcactgtagaaggtcataaatgcttcctcggtgctgcctccgccgcctgaagtcccgctctctcctgaagccgccatttccccggcccagccaccacgtgaccct

SEQ ID NO: 66120 - DNA, 122 bp, Homo sapiens
tcccgttcccgtttcaggggggaagctgcagagttctggagctgtgagtagcaccgctgtcgccgcaaagcagaacccccagtgattagggacgctccacggacttcacggctgcacggccg

SEQ ID NO: 66121 - DNA, 122 bp, Homo sapiens
gaccaacgtgagcccggccctggggtgcgggggtgggggtcatgccagtaggacgcctggcgccaacaccgccttcccacaccctcccagggccggctgcccgtgaagtggatggcgcctga

SEQ ID NO: 66122 - DNA, 122 bp, Homo sapiens
cccaccctggccggcgccctgcggtgctccctccgctctccgcctgttctcggggcgttccggcttccacaacgttgggatctggagtcaggccgaagctgctgcttatccgcagtagggca

SEQ ID NO: 66123 - DNA, 122 bp, Homo sapiens
ggtgcacacgtctgagcgcagctgggctgggtgttggccctcgtgcagcagcatcttggccgtcccctgaggagagcgttagggcctggtgacggggggaggtggtgcggtccccactgtgc

SEQ ID NO: 66124 - DNA, 122 bp, Homo sapiens
tggtgactgacactggaacatacaaagaacatccctctgtaaaaacagttgtcagattagcgccaagaaacaaagcaggccagaatggcctctttcactgttttaaaagcatgcaattggat

SEQ ID NO: 66125 - DNA, 122 bp, Homo sapiens
gaattttgcggttaaaggtataaaatcctgctgtattaatggtacagcatgtagtaaaaacgtgggtggaaggttaacactaatctgatcaaatgcaatatgcctatgtcatcccccaaagg

SEQ ID NO: 66126 - DNA, 122 bp, Homo sapiens
aaaaagagagagagacgatgaggaccactgtgagggggccattttcccaaaagataaacacgcccatagttcagttcagtagacccttattgcacaccaaccactgtgctctttgattttac

SEQ ID NO: 66127 - DNA, 122 bp, Homo sapiens
cctacgctcactgtcattggctattgcaaagggcgaggcctactgattggctgcgcggggcggagccttcgggcgcgaaaaagggactgggctctctgcatgatatagggctctcaatcatg

SEQ ID NO: 66128 - DNA, 122 bp, Homo sapiens
ctgacgttttgagagattggatgattaaatctctgactccaaacacaacgcttcctccaacgcggtttggccttggagaggaaggcagcttctttcaagacacccctgagcgagaaagtcgc

SEQ ID NO: 66129 - DNA, 122 bp, Homo sapiens
ttattttctgacgggctggctggcctgcactggtgagttctctctcaggtcacagcagaccgaaccactaggcttaccagtgactaatctcacagcaggcatacccagctcatgctcttcct

SEQ ID NO: 66130 - DNA, 122 bp, Homo sapiens
gtcgccagcctgagcgagggtgctcaggtggtttctactctcattttcactttccagtgccgctgccgacttggaggggagaaaggggcggggcaaaccctggtttcgcccccccgccctca

SEQ ID NO: 66131 - DNA, 122 bp, Homo sapiens
gtaaataaatgagactctcatctgcgggtctcctgtggattctgccggggggcggggcttcggtggaaagggagcatggctgcgcagtaataatagcggcaggctgggaaaagctaatgtca

SEQ ID NO: 66132 - DNA, 122 bp, Homo sapiens
actctggcaaaaaagaatcagagagagatattaacttgagatgatcctgggcaaacctcccgaagctgcaggagagaaggaaaggcttcagatgatgcccacagtgagagggaagggaaaga

SEQ ID NO: 66133 - DNA, 122 bp, Homo sapiens
ctgtaaaatgtgtgtatgtgtgcgtgtgtttgggtgtaacgggcctcttgtttggctgcgcggcctgtccgtcactgcgcgggccaatggcaggctgccttatataaaatgagtgttttcag

SEQ ID NO: 66134 - DNA, 122 bp, Homo sapiens
cttcacgtccctcccttcctccttggagagccgctagatccaatcagtgtttgacctggccgcgcggagggggcgggcccatgatacgcaatcgaaccccgcccgtctctcgggcaacgcct

SEQ ID NO: 66135 - DNA, 122 bp, Homo sapiens
ggggctcgtgtgcctcccagctactcgggaggttgaggcacatttagaatcgcttgaacccggtaagcgcaggttggcagtgagccgagatcgcgccactgcactccagcctgggcgacaga

SEQ ID NO: 66136 - DNA, 122 bp, Homo sapiens
tgatcctgtctttttgctactgtagcactgtgcgagaggtagcacctgagaactggtacccgaagagcggaggaggcgcgtgtgcaaccattgcccgggatcagtatgtgcatttaaaggtg

SEQ ID NO: 66137 - DNA, 122 bp, Homo sapiens
aggcatgagcctgattttccagtccggggaggggcggagggagatggcactggggacgcccgggcgatggggcctgactcagagccagaaccacagggctcctccgctgtattgtcgtcggg

SEQ ID NO: 66138 - DNA, 122 bp, Homo sapiens
actctggtaccaaagcagaaacactggcatctcagggctgtatcctgggtcgaagcctcccgagatgtgttctcctgacctcctttttaggcaagacagctgacccactcctggcctttggc

SEQ ID NO: 66139 - DNA, 122 bp, Homo sapiens
gggaggagggcgggcagaataaacttcccgaggcgcagaggctcgggctgggagcacgaccgcgggcggggcgggcggaccagctgggcttgcccccgggggcggcgggggagaccgtcaca

SEQ ID NO: 66140 - DNA, 122 bp, Homo sapiens
agaactccccagcaggataacatactagttgcccacaatggcaacctgctcatgaatgcacgttttgatttccctcccgtcctcatctcacatcctcactcccctcctggtgcctcctggga

SEQ ID NO: 66141 - DNA, 122 bp, Homo sapiens
cagaaggtaatggagagagttttcatttgcttatttagtgaaaaacagaggaaaatcactcgaggcaaaagaagcaggactgagtcctgggttagttctgattcctcacaagccctaagaca

SEQ ID NO: 66142 - DNA, 122 bp, Homo sapiens
gcacaggttctgaggtgacactgtgctatgcatgttgcagcaacaagacaaaagccaccacggctgcagcagagagaaaggccaggcctcccttagtgctggcctaagccactgtcagctgg

SEQ ID NO: 66143 - DNA, 122 bp, Homo sapiens
tcatgccagcctgagggacggtccccatggcatcacgggagggctccgtgacgtcacagtcgggggatcccgctgctccccctaagcaggcctgtactcacccgtgcattcgaagtgcacct

SEQ ID NO: 66144 - DNA, 122 bp, Homo sapiens
cttgcagctcccctggggctgaggctgagtacagatctgctggcctcgccctatagcacgcgagggctctgccagtgcgcccccatctgctgcttcctagggatggtggtgacttcctcaaa

SEQ ID NO: 66145 - DNA, 122 bp, Homo sapiens
gaatctctaagttttagatggttgtcttattgctacatcatttccagatgtggattctctcgttctgggaatgtataagctatgttgttccaggcatacttgtaagtgcttgggaagcagta

SEQ ID NO: 66146 - DNA, 122 bp, Homo sapiens
ggccaggccgcagcactgtggtcggtgcgggcgtggcaggggcggggcggccttatcgctcggctctcccgcctacgcctcccgctgcagagtaagccgggctgccgtcttctcgccatggg

SEQ ID NO: 66147 - DNA, 122 bp, Homo sapiens
gggagcgcccgtggggtgggggcatctgggagcgcccgtggggttgggggcatctgggagcgtccgtggggttgggggcatctgggagcatccgtggggtgggggtatctgggagcgtccgt

SEQ ID NO: 66148 - DNA, 122 bp, Homo sapiens
gggtcccggctctcgcgctccggccgactggcggccccgccggcgcctcgggccccgcgacgtcagcgctggggcggggccaggccctaagccccgccccacctcgcctctaccccgccccc

SEQ ID NO: 66149 - DNA, 122 bp, Homo sapiens
tccacctgcttcggccttccaaagtgctggaattacaggcatgagccaccgcgcccagcccgttccatgggagtttctgctatattctggttactggttactgactggctgtcagcagtagt

SEQ ID NO: 66150 - DNA, 122 bp, Homo sapiens
aggctgcccacgttaactccggcaaactgctgctcctcagcacaggacaactcaccctagcgcccgccgccttcactacttcatcccaggtgcccacaccctagatccacgattacacctga

SEQ ID NO: 66151 - DNA, 122 bp, Homo sapiens
ggtaaccagatggttggaagtggggctaagagggtcacacagggacaaatccccacccagcgtgtcaggacagctttgttcttcttgccagatgtggtggcctagatcgctgaaagcccaca

SEQ ID NO: 66152 - DNA, 122 bp, Homo sapiens
tcttagggtgtcagaaccacccggatgccgcaccaaaaaacaggaaaaatccaagtcctgcgagaggcagtcaaaggtatctgtgcatccgtgtaccgacttggatccactacagaattgca

SEQ ID NO: 66153 - DNA, 122 bp, Homo sapiens
gccacaaaggcctcgggactctcaaaggtcacagggtccagggcagccacatcctcacagcggaatgacaagtccccctgcagcttcatcttggggtccccttcctttgccaggcgggatag

SEQ ID NO: 66154 - DNA, 122 bp, Homo sapiens
gcataccccagtgaacagaagaaaaccgctccccttgtgaaaagtgctttttagtataggcgatgaggaggaaactggcttttacacaattaccaaaattcaggatgtggctttggagttcc

SEQ ID NO: 66155 - DNA, 122 bp, Homo sapiens
ttggcctctctgagccctgtatgaaggatgggccaagtatgggcttgggcttgggaggcccggtggcttgtagctagatttctgcatcacagagcctctggatccattcattcattctccgc

SEQ ID NO: 66156 - DNA, 122 bp, Homo sapiens
ccgccccgacctcgccggcgcccagcgggaagtgtgggcagaagcgcgctggggaggatccgccggctgcggggccggcggagtgcaggggcgcgggcggtggacgaggggagagggatggg

SEQ ID NO: 66157 - DNA, 122 bp, Homo sapiens
ctcctgagtagctgggaccataggcacatgccacccatcacacccagtactttgggagaccgaggtgggagaatcataagcccaggagtttgagactggccgggacaacatagtgagactcc

SEQ ID NO: 66158 - DNA, 122 bp, Homo sapiens
gtgtgcaggggggttgctgggagcatcacagagcagccgcagagcctggccctccaggaccggaaggtatgaggtgttttgcaggatctctagggctttggggagagaagggtggggaaaga

SEQ ID NO: 66159 - DNA, 122 bp, Homo sapiens
gcaggatgatgcgggtcttcttgtcgcgggccgggttgccagccagctccaggatctcggcggtcaggtgctccagcacggccgccaggtacacctgcgctctggccccgacacgctcggca

SEQ ID NO: 66160 - DNA, 122 bp, Homo sapiens
attggagaattccctgtgtttttctttgggtctaaagattattactggacgcatcaggcgcgagtgttcccgtacatggagggggaccggggcagccgctaccagggggtcagagggatcgg

SEQ ID NO: 66161 - DNA, 122 bp, Homo sapiens
tcccgcactgtcccggtggctatggtggcagctactcacttaagtgttctttgctctccacgttgctccccacgcagcaccagagttaacatcccgaaaagagagggagaaaatctgtttaa

SEQ ID NO: 66162 - DNA, 122 bp, Homo sapiens
ggtagactgggagcgctgggagctgtggcaggccagccgccgcagcacagtggtgagatgcgcggtccacagtcgttcccccttgggagttgttctcccctgaggaacagaggatagggact

SEQ ID NO: 66163 - DNA, 122 bp, Homo sapiens
cagccgcagccatgctgtgcctcctgctcaccctgggcgtggccctggtctgtggtgtcccggccatggacatcccccagaccaagcaggacctggagctcccaaaggtttgaggctggggg

SEQ ID NO: 66164 - DNA, 122 bp, Homo sapiens
gtcccccccatgcctttccccagaaacagttgagagaatgggtagctggtgggaccagaccggtttcccagaggacaggaaggccaataaaaatatcagctgcctgcctggagtgtggtgtc

SEQ ID NO: 66165 - DNA, 122 bp, Homo sapiens
gtgcagaggcgtgtacccgaaaagcaaagtgcggcctcacacggttctttaatctggagccggactcctgggaaacaaaccaaacagacgcaggtacgtgctcagctctgccgttgcggttt

SEQ ID NO: 66166 - DNA, 122 bp, Homo sapiens
cgccgggggcacgagtagggcctgggctgactgggacacggactcgagcgacgaggacgacgcctactacgcggcgccgcgcgttgggggcatcgtgtggcggcccgggccgctcaaggctg

SEQ ID NO: 66167 - DNA, 122 bp, Homo sapiens
tttaagcaggctaacagctctgacagctgggcgcccgagactgcctcgctaaagcgcatgcgctagtctcagggcgccaggcctgagctgtaaattctggctagcgtcacaatgaatgccac

SEQ ID NO: 66168 - DNA, 122 bp, Homo sapiens
tttcccgcggccgcctttcagccgagagagtgacagattggaggtcagcggctggcgggacggaagccctcgccgggcagatggacccgctccgggccgcgccggggacccccgccccgcgc

SEQ ID NO: 66169 - DNA, 122 bp, Homo sapiens
ccgatctggaaaaggaccagcagaaactggaaatgtcaggctcaaaggaggtggggataccggctcccaatgctgtggccacactaccagacaacatcaagtttgtgaccccagtgccaggt

SEQ ID NO: 66170 - DNA, 122 bp, Homo sapiens
ctatggagtccggcgtggcagcggcaatccctggccaaaggtacttggggtcattttccgcggggggttacgtgcgggagcgtgtcctccacaaacggattttccccccttaagcggactta

SEQ ID NO: 66171 - DNA, 122 bp, Homo sapiens
gcatccaggtacctgtgttcctgcacggaggcctctaggttcgcaggagacccaaagcaacgggccgtaggctcactcaggagcagctcctagctccccactccgccacggccctgcgggaa

SEQ ID NO: 66172 - DNA, 122 bp, Homo sapiens
ggagccagatccaaagttctgggaagcagctgaggcttacaatttacattagaacaatcacgcatgtttagcattttcataaatttacatttttactcattttggaatgtactcagacattt

SEQ ID NO: 66173 - DNA, 122 bp, Homo sapiens
gagaagggctcccacaagctctcctttcgaggcatgggcactgattcccattctatcccccgtgcgagaccgcctctatcatctgggagtgcatttcacgagtttgccctgagtggagaagc

SEQ ID NO: 66174 - DNA, 122 bp, Homo sapiens
ggctggcgacagattgtgcaggaatgcgaggaatgcaccaggggcagagtccacacagcccgccgcggctgccctagcgccttccctccccagctctcgccgcgcagccagaggtcaccgga

SEQ ID NO: 66175 - DNA, 122 bp, Homo sapiens
ggtgacgatggacaagagtcgccccatcgtaagcgaaagtggactgagaggaagcacaaacgcatggactcaaccagctcgcccagattcaccctcaggccttttgccatctgaaaagggcc

SEQ ID NO: 66176 - DNA, 122 bp, Homo sapiens
accactatctgcactgtcagcactttagccccggcagggctggagcgggaggtggggaggcggcaatgagagcacggtaaggagctacccctttaagggtcaaaacagatggccctccagca

SEQ ID NO: 66177 - DNA, 122 bp, Homo sapiens
agcacggatgcagggggagaaggggtgcatgaatgactgtgtgtggctgaggacagccctcgggtgctctctgtcaggtgtcatgttggcagctggccctgtctgcccttggtgtccaagcc

SEQ ID NO: 66178 - DNA, 122 bp, Homo sapiens
tgtccgttcccggggatgggggcgggggacctgggccaggccggagcagaacctgcaccccgactgggtgcgggtcagcgtccgggcccgggcaagactcaggcttgcgcccccggccccct

SEQ ID NO: 66179 - DNA, 122 bp, Homo sapiens
acatcacagctctagagaagctggctaagaaagtgaagaggggctcactttcagcctccgcgaggacacacctccgcagccgccgcagctcccctggcccccgcagggagattcgcccgggc

SEQ ID NO: 66180 - DNA, 122 bp, Homo sapiens
ttgctcagtggagcaggcagatgttcttgttccaaaaggttcactagccatgcagctccccgtctcttcaaagctgcggagagagtgactctccgatgagtcacagctgcttctttgctgat

SEQ ID NO: 66181 - DNA, 122 bp, Homo sapiens
actgccagttgaccacagctttccccagccccagacccttctggtcccaggccgggcacccgactctccagggcagcacctaggacagcagctgcagtaccgaagcggcagcttaaagacag

SEQ ID NO: 66182 - DNA, 122 bp, Homo sapiens
cacctctcagctgggttaggaggcaggcggaggcttttcgcgggggctgtgcctggtgggcggttttcccagagcagggagcaaacaggactgagttggcgccagcttcctcggatgtagat

SEQ ID NO: 66183 - DNA, 122 bp, Homo sapiens
gagttttttttaagtgcgggacaaggattgtctcggtgttgttactgcacgcacaccgcccgttgtaatggatagatgcattagtgaaagtgctaggtacactcatttattttctaaatctc

SEQ ID NO: 66184 - DNA, 122 bp, Homo sapiens
cagaggccagaaataaacacatgacatacctatcggcagagcccggaaatcaacgcatcacgtacctatcggcagagcccggaaatcaacgcatcacgtacctatcggcaaagcggtgtctg

SEQ ID NO: 66185 - DNA, 122 bp, Homo sapiens
ctatgtagttacttttaattctctcagtgatgtcttagagcacctaccttcctgtttaaacgagcgcctgacgctgcgttcacgggcagttttacaacgggatgccgcaaatgcatttcaag

SEQ ID NO: 66186 - DNA, 122 bp, Homo sapiens
aggcatttctaacaagctcccaggtaatgcccatgctactggccaaaagatcaaactttgcggcactattcacaatagcaaagacttgcaaccaacccaaatgtccgtcaatgatagactgg

SEQ ID NO: 66187 - DNA, 122 bp, Homo sapiens
gggccggaaggagggatcctggagcggggcttggaggccaccgggtgggactctgagggtcgacagcgttaagttccagccggctccacccgttcacagaggaccgcgcttttcgcgtgcgc

SEQ ID NO: 66188 - DNA, 122 bp, Homo sapiens
gcttaagctacctgctagactgagactttctgcgaagccggcgtgtctgcgagcagcactcgctaaggctctgcgtttaacagacactacctttgggaaggcgcttatcacaaaaagtccct

SEQ ID NO: 66189 - DNA, 122 bp, Homo sapiens
aagatgccaagaaaggtcaaaggaaccatctctggtcaaaaaaaacgtaacggattaaagcgattaagaaagtgaagggggtaacactaggaactaaaactaaattctgttaatctcacacc

SEQ ID NO: 66190 - DNA, 122 bp, Homo sapiens
tgacgtcgctgagcaacggaagagtgggcagcatttgctctgaacgctcgtgcgcgctaccgcccagacggaagcggaagtgccggtggagcgcgagtaggaagtggtgagttcggagtaga

SEQ ID NO: 66191 - DNA, 122 bp, Homo sapiens
ggaaggcgggtctggggtacgagaccaggagctgtgcggtctccgacgggacttggcctccgcggggccctgctgccccccagcggcgatgcgcggcactgcagaggcggcggcgggaccgg

SEQ ID NO: 66192 - DNA, 122 bp, Homo sapiens
ttccaaagtgaggaaaaaggatgaaggcttatatgagtgcagggtgactgatgccaactacggggagcttcaggaacacaaggcccaggcctatctgaaagtcaatgccaacagccatgccc

SEQ ID NO: 66193 - DNA, 122 bp, Homo sapiens
aggagacaaagcagagccttgtctgtatctgggcagcaggtgttccatgctgctaggtggcgggggtcgggggtcttctgtttcactaacaggaacaaagacagaaaccatgacagggctgc

SEQ ID NO: 66194 - DNA, 122 bp, Homo sapiens
ggcagggggatcacctgaggtcgggagttcaagaccagcctgacgaaaatggagaaaccccgtctctagtaaaaacacaaaattatctggtggtatggcgcatgcctgtaatcccagctact

SEQ ID NO: 66195 - DNA, 122 bp, Homo sapiens
agccccgcaactgcatttctcaaagcctcaggaggatcctcctggctttcatcctgaacgcgagttaacttaagttcagaagcggggcaggcagtggcctgggaactacattacccaaaaga

SEQ ID NO: 66196 - DNA, 122 bp, Homo sapiens
accacctttatgaactgtaacattcccctggaaggtctgcagtttcagtcctgaggccagcgggaccaggaactcaccggaaggaacgaacaactccagatgtgccacctttaagagctgta

SEQ ID NO: 66197 - DNA, 122 bp, Homo sapiens
tattttaggaagcattgagttcattgcacctctttccttcctagacttcaagaactagtgcgcagggggaacagccagtacccaggcgccaagtacatcatccgagacaatggtgatcgcat

SEQ ID NO: 66198 - DNA, 122 bp, Homo sapiens
cagctgtcgtaacagggccacaccacgcggcgcctgctctggggagcgcctccatcagaccgttcttcctctgggggttcagggggcccctgggccagttcccagtcatagggagggccctc

SEQ ID NO: 66199 - DNA, 122 bp, Homo sapiens
gcttttccctgcctttcggacttgtttattaccaagatatctgatttcagcaaaggaaaccggcactggagcaaggtttttattggccatgagcaagaggaattcagggtttgcctttgatt

SEQ ID NO: 66200 - DNA, 122 bp, Homo sapiens
ccaggtctgggcctggtatctcacagtagcgggtaaggcaggcccggcagaagttgtggccgcagtcgatagtgaccggctccctcagggtaccctgacagatggggcagttgacttcatct

SEQ ID NO: 66201 - DNA, 122 bp, Homo sapiens
gcgcgcacgccgaggggcgcgttgagcgctggggggcggagcctgatgcgggatgattggcgtccgagcgctgggctgttccgtggacccgcgcggccacgccagtgtgctgtgcacgggaa

SEQ ID NO: 66202 - DNA, 122 bp, Homo sapiens
agaggcgcaatttgtttttcacaaatagcaaaatctgaaaggcccgctgcgcctagctagcgtcgcacgtttacgtttgtacgtctcctgccggcccgctgcattgctttccctttgtgggg

SEQ ID NO: 66203 - DNA, 122 bp, Homo sapiens
agagccaaaataaatactggctgggcggtaaggaacgcggggccttggtagagcaaagtgcggaccaaagactttgcgtctggttgcttttaccttgcctagtagggtcttcgttctggcgc

SEQ ID NO: 66204 - DNA, 122 bp, Homo sapiens
ccccgggcggcctctgcgagcagcggggcctggagatcgagatgcagcgcatccggcaggcggccgcgcgggaccccccggccggagccgcggcctccccttctcctccgctctcgtcgtgc

SEQ ID NO: 66205 - DNA, 122 bp, Homo sapiens
aaaacagtgtgtggtaaagatgtaaaatatttctaattctgttgtgggctgtggcactcccgtggaaggcttgccacagacacagccagaggcatccacgtgggcccctgctgcacacctgg

SEQ ID NO: 66206 - DNA, 122 bp, Homo sapiens
aggaacatcaacaaagacaaggacattttttagaaaactgcaacagactcagtgtgtctccgactttggcccaagtgggcaaccataaggatactgagctaacagtgtactaaaccaagtag

SEQ ID NO: 66207 - DNA, 122 bp, Homo sapiens
gcatagactcacccgcctgccttgcctcgcttttccctcagccgactccacgggctgccgcgtcctcacaagaaaccaccgaacgagcgtcggggaaaaaactcttcagaaccgggcctgat

SEQ ID NO: 66208 - DNA, 122 bp, Homo sapiens
ctccgggttgggacagtggcatgattgccggtggtgggggttctgagggaggcgcacacccgggtttgtttgggcgcagaccttggtcgtccccggcgggggcccttctggcgtcggaccgg

SEQ ID NO: 66209 - DNA, 122 bp, Homo sapiens
aaacctccagtgatggggatgaggtcattcaaaagtcacatgttcttgagacacaggctgcgcgtactaaacatcaccataaagtgatatcagccctaaattaaagtagcagttattcattt

SEQ ID NO: 66210 - DNA, 122 bp, Homo sapiens
acgcgagtaggtgccccggaacaagatctggggagggacaggaagtgtcgagtgggcgggcgttctgggaaaggtcagatgttctcagtgtgaagtggttatgctggcttcctccaattcct

SEQ ID NO: 66211 - DNA, 122 bp, Homo sapiens
tggagggtcgtcaccgtggggaccagcccccgggtgtccgggagccaggtgtgtggccagcgtggcactctccacggtccggggcctgggccgtggtgtggactagcgaggcccctcgtggc

SEQ ID NO: 66212 - DNA, 122 bp, Homo sapiens
ccggtcgacctgggacatggctagctgccagctgtttcacaccctcaggcagcagctggtcgaccccagaggcccgaccgaggagcagccacaagtggaggttggccatgtgtggccaaatt

SEQ ID NO: 66213 - DNA, 122 bp, Homo sapiens
ttcaggagccctggtgggtggacagaagctccctgctcccccagcctgtctacccagcagcgctttggccagtcccattcctgtacttctgagcctgcctgtcagtccctcctcacacgcac

SEQ ID NO: 66214 - DNA, 122 bp, Homo sapiens
cccttcggccccggcccctgccctggttccgttgcgcgccccggatgtggcgcggctgcgcgaggagcaggaaaaggtaactagcagccccgcgccgcttccgcctccgcccgccgggctgc

SEQ ID NO: 66215 - DNA, 122 bp, Homo sapiens
cttttcttgcccttagacattggagcttcaggttcttgggcctttggattccaggacttacgacagtgccccttggttctcaggcctttggtctcaaagtgggagttgcaccattggctccc

SEQ ID NO: 66216 - DNA, 122 bp, Homo sapiens
ctccgacttggtttcagggctctcctggggcagccggccctgcggggtagcctcgtggctcgtcaggtgctggagcctcctctcgtagtcagccttgagctccagcatttccctggagagcg

SEQ ID NO: 66217 - DNA, 122 bp, Homo sapiens
ttggggctacgcaggccactcctaggccactggctgggcgtccgaacgtgggtcaccccgcgcacagtctagaggttcagaaagatgctgtggcccactttaaaacaaagcccaattattag

SEQ ID NO: 66218 - DNA, 122 bp, Homo sapiens
tgttggaagacaacctctaaaattttggaggggaaagtattcctttcatattttatttggcggatatatacagatggcacattccttttagactagagaaaaaattaagatgcgtgccctta

SEQ ID NO: 66219 - DNA, 122 bp, Homo sapiens
ctccgccccccccgaggctcccttccatcgttgctatggcagctaaatcaacaaactcggcgcacgtgggggcgggggaggggaaggaggggcgcgggcggggctgggccgggccgtgacgc

SEQ ID NO: 66220 - DNA, 122 bp, Homo sapiens
tagagcctgacaaaacctgagttaattggccgagcgaatgtcgttcgcgtcaggagagcacgtccggagaagccaagggaaatgtggagcaggagcagccaaagtggcccatcggctctcga

SEQ ID NO: 66221 - DNA, 122 bp, Homo sapiens
tgccattggtaacctccctgggctgtatctgcatgttggaaacatggtgacattccctgtcgctgtcatttcctaaagctctggcatccgagaccttttggtctcactgagcaggtatcaca

SEQ ID NO: 66222 - DNA, 122 bp, Homo sapiens
tgcaggattgagcagaaatcaccaggtgtgagtaatcatcttcccaatcccagcctttaccggaaacctctcctcggcctccacactcctctccttaatgatggtggaggcgtccctttgta

SEQ ID NO: 66223 - DNA, 122 bp, Homo sapiens
ctctattctctgcacaccagtcctgaatagctacagtgctcaaccgaattttggcgcgcccgcttccccggcaggctccaacccggcgcggcccggaggcttcccgggggccaacagcccag

SEQ ID NO: 66224 - DNA, 122 bp, Homo sapiens
catgtaaaaaacagcctggggtaaaaacgcgaccaagaaaatgaccacagtcttggcagacgtctgaccattaggagcaatgtctacaacgaagagtcagaaagaggcagagggcacaggag

SEQ ID NO: 66225 - DNA, 122 bp, Homo sapiens
atggcgctgcaagtcacccaacctgaaaagctggagagtttgttttatctcctcttcaatcgccatacagctacaaaagacttattttcctcattctttctacttctagtctacactcctgt

SEQ ID NO: 66226 - DNA, 122 bp, Homo sapiens
attcaaatgcatgacaattaagccttatatgtcacagtgtgaagtagggacacaggcactcggtgcacagctgctgtaaaccagccagaaccagtccatggtcggtgacctcaacaggagac

SEQ ID NO: 66227 - DNA, 122 bp, Homo sapiens
ccctggagtatttattcgcctttctcagattaccaggaggatcagccttttaggggtaatcgaccatttctccttctttgaggaatcatctctttcttctgctcccaatactcccacctccc

SEQ ID NO: 66228 - DNA, 122 bp, Homo sapiens
agtaaactgtgtctgtctccacagccgcctctttgggttcgtgagatttcatgaagatggcgccaggacgaaggccctactgggcaaggtaaggcagctgcgagtcggagcgcggacaccgt

SEQ ID NO: 66229 - DNA, 122 bp, Homo sapiens
tttccactacccggagcggtctctgaggcaccgcgagatgtgtgaacattcaggggctttcgcccgccttatctctcttgatcctctattcgaccccgagaagtaggagaggcagggataag

SEQ ID NO: 66230 - DNA, 122 bp, Homo sapiens
gctgaaaggtgtcagcctcattaaggtgaaatttgaggatatcaaggattggtccgacctcgtaacgccacaaggaataatgggttagtgattacccagtgtatctttttttttttttgtct

SEQ ID NO: 66231 - DNA, 122 bp, Homo sapiens
gctctaggtggccgcaggtgggcctctgactggccgtggggtgcaggcggcccgctggggcgggaaggcagaaactaggcgtggaacttgggggaggggtgggggggcggtctaccagtgga

SEQ ID NO: 66232 - DNA, 122 bp, Homo sapiens
tcgaactcctgagctcaagcatctgtccgactcagcctaccacagtgttgggattacaggcgtgagccaccgcacccagcccctacttgaatttttatgtcattattgactcttcaccactc

SEQ ID NO: 66233 - DNA, 122 bp, Homo sapiens
gcagactcggtccccagaaccacactctgcttcactgactgtcctgcccccatcccgggccgcaccagcagcatggccaggaagccactgccatgagcacgctctccaccacaatgaggttt

SEQ ID NO: 66234 - DNA, 122 bp, Homo sapiens
tcagaccacgccatccagggggcgctcagcggccaagcctctgggccgacaatgggtgtgcggcggtgtaggctgagcgccctggactgcgtggcgggggatgggggtcagtgaagctgccg

SEQ ID NO: 66235 - DNA, 122 bp, Homo sapiens
tgctacttgagaactgtataacattggtcatcttgttcaacttctgagccccagtttactcgtgtgtataataatattgaaatttgttaacggcttaaggcacttagtagggtatctggatc

SEQ ID NO: 66236 - DNA, 122 bp, Homo sapiens
gggtgggggcgtgcggcactgagggaagcaggggtccacggggaacggcgtcactcctttcgtgcagccaagttccaggcgcattgtgtactggtccgaacttgagctcacaatttgggatt

SEQ ID NO: 66237 - DNA, 122 bp, Homo sapiens
aaccccagcctctcacacctccatgcctttgcacatgagtggaatccacttcccatcttccgctgaaaaatactttacaaagaggtcaccacatctagtccacagccagtttttacatggtt

SEQ ID NO: 66238 - DNA, 122 bp, Homo sapiens
ctttgtatcattttatgaagaaaggtaaaaataccacaggcgagaacaagcagcaaagggcggatgagatttttcatctgcagctttgaattgatacctttaagtattgagctattcttttg

SEQ ID NO: 66239 - DNA, 122 bp, Homo sapiens
aggctgcagtcttttgtaggcaagggataggcagatgctcctaaactataaatgcctgtgcgcgtattaaaaacagatacttctttggtgagactactgaaaaaacagtgctctttgatctg

SEQ ID NO: 66240 - DNA, 122 bp, Homo sapiens
cccggtaccgtgcccccgagcaggcagagcgcctgtgcccacctggaggccatcagcccacggcgctcaggcacttggctttcataattcccaacagggccagtttgcagtctttgctttaa

SEQ ID NO: 66241 - DNA, 122 bp, Homo sapiens
tgatctcgtgatccgcccgccttggcctcccaaagtgctgggattacaggcgtgaaccaccgcgcccggcagtttaaatattttagtggctatcagaaacacatctcaaattgcttttcaga

SEQ ID NO: 66242 - DNA, 122 bp, Homo sapiens
tgtttaatcagcgtcctccttacctaacttggcctgcttggccctcaggcccgggcggcccgagagcattccacggcacctgcaatgctttccaattcccggaaagcagaatgcagccaact

SEQ ID NO: 66243 - DNA, 122 bp, Homo sapiens
attaagacgaaaaggaaaaccgtccgacaaatgtgtttggtggattatgacaccatgacgcgtggcctcagtttcctcactttgaaaaatatccttcaagcagcacagagcgggcggtttgt

SEQ ID NO: 66244 - DNA, 122 bp, Homo sapiens
ccagacattcctttcaccctcccagcacttgatctctgtgggtggggtgggatggaggagcggctttcataagcccttaggggatttctgtgtgaggaccagaagcagaccctgaaatgagg

SEQ ID NO: 66245 - DNA, 122 bp, Homo sapiens
tctaaagacagcgcagagttcccaaatgccctccacagagcttcccctaatgttaacactcgcatagccatggtacacttatcaaaactaaaaagttaacattgggacaatattaactgtac

SEQ ID NO: 66246 - DNA, 122 bp, Homo sapiens
gtgggcagggtctggcccctgctgcggatcaaagaccggtgctatctgcaggggtcacggcggggataccttttgctcgttcattctttttaaagccctgggcactgacccatggtccttgg

SEQ ID NO: 66247 - DNA, 122 bp, Homo sapiens
cggtgctggccgcccaggcctggcggtgggcctgcgagaatacccagcgttggtgccgcgcgccctctgggtgtcccgctggctgcccccagcccagagctccctcctcaacctacctcact

SEQ ID NO: 66248 - DNA, 122 bp, Homo sapiens
gcgcgggcccctgggcccggaccagggagcaggcagccgttgccggcggggctgcatggacgcaggaaagttggctcggcacccgacagacacgggctcggagcgggcagtgccggcgctcg

SEQ ID NO: 66249 - DNA, 122 bp, Homo sapiens
ttccgattcctgtctctaggtcacctccgcaacacagcaacggaagtagggtgttgagcccgcccacacttccggaagaattgcactggactgtgggtatcctggtctccgcgtgtgtgagt

SEQ ID NO: 66250 - DNA, 122 bp, Homo sapiens
gattcttggagggagggaccagagcagaggtggtgagtggcaggaggaggcaaatgtccccgcaaccaggaagttcatcgggttgaagtttcctctgccgtcgcctcctgctcgccagcaga

SEQ ID NO: 66251 - DNA, 122 bp, Homo sapiens
attgtatagtatgtgagttgtatctcaataaagcattttttaaaatagccttgggctgggcgcagtggctcatgcctataatcccagcactttgggaggccgaggcaggcggatcacctgaa

SEQ ID NO: 66252 - DNA, 122 bp, Homo sapiens
cagacccgtgctgggatgcccccaagaacatgtggcgggctggctcctggtgggtggccccgagtgaaggaaggacccgggaggggtcttggaatgactttagccaggcctctctcattccc

SEQ ID NO: 66253 - DNA, 122 bp, Homo sapiens
caaactacatgttccaggatgctttgggcggcagatctcgcggaagccgcgaggagagcccggccccgtctcgcgcgcctgcttccgcctccctgtggcggcggcttgttgttgtggaggcc

SEQ ID NO: 66254 - DNA, 122 bp, Homo sapiens
gaattatctaattttatgaacagtcttgcttccttttattaaagaatagtgcttagaggccgggcgcggtggctcacgcctgtaatcccagcactttgggaggccgaggcaggcggatcacg

SEQ ID NO: 66255 - DNA, 122 bp, Homo sapiens
tggtgggtgagagcctggctgaccaccaccctcttctacagtgtaacctacagtagattgcgtcatgagagtgtgtccgcatctgtaacgccatgaaagtcgtgagggttaaaggcatgggc

SEQ ID NO: 66256 - DNA, 122 bp, Homo sapiens
ccacggtgaggacccaccctggcatgatctcccctcatcacctccccagccacatgtactcggccattcctgttgctgaggccctgctgacaccaaggccaggctggatgcaggtccctctg

SEQ ID NO: 66257 - DNA, 122 bp, Homo sapiens
agggtttcttttccctataatatctttactgtaaggcagctacttctccctaaataatttcgaagaatttcaaaacactttactaaatagatttaatcatatctacagaatcctatcaactt

SEQ ID NO: 66258 - DNA, 122 bp, Homo sapiens
tctttccttccttttttcctttcttccttcctttctctctttcttttgtgcatatggcaacgttcatgttcatctcaggtggcatttgcaggtgaccagaatgaggcacatgacagtggtta

SEQ ID NO: 66259 - DNA, 122 bp, Homo sapiens
aggcagtgatgtctgtcggtaccccaaggcctgtgtggaggcagcaaagtgtctgggggacggactggtttcccggctttgctcaagctccgatgcccacgggaggagggtaggaggcagtc

SEQ ID NO: 66260 - DNA, 122 bp, Homo sapiens
acgcgagaagaaactaaagcacagagacgcaaggctaaggctgctccggaggccacacagcgaagagtgggcttcacccagaccccaggtgcaagtctgggcttttctttgagccttagctg

SEQ ID NO: 66261 - DNA, 122 bp, Homo sapiens
ttcataaatacattctatgacgttcacacaagaacaaaatcacctaagaatgcatttctccgagagtatcctggttgttaagtgatgcatgactgttgtttggaaaacactggcttagaggt

SEQ ID NO: 66262 - DNA, 122 bp, Homo sapiens
tatggaaattagtcaacactgacaatctgtcgcctgcagcagttgcttgtttgcaaatcacgtcttttgcagaaatgaggccagcccttttcgggacacttccatcgctttttttctttttt

SEQ ID NO: 66263 - DNA, 122 bp, Homo sapiens
cccggctctcggccaatgacagggcgcagggccagagatggtggcgcggactggctggctcgtgccgcacgcctccttcccgccctcggtggcgcacgggggcggggcccgctgccgtaaaa

SEQ ID NO: 66264 - DNA, 122 bp, Homo sapiens
aagagagtgggcccgccttcagggtctggggccttccaggttgggtcgtaggggcgggagcgcacaggctgcgagagaggagcaaaggttggtggagggagaagagcagtctggggcctggc

SEQ ID NO: 66265 - DNA, 122 bp, Homo sapiens
gcagcgtggccgttcacatcacgcgcttcactaagcctcctatcactagtaacctttcagcgcattgtttaaaaagaaagcagtttctgtccctttctgtagttcctttaagttcaggatgt

SEQ ID NO: 66266 - DNA, 122 bp, Homo sapiens
ggccccgacggccgctcggtgcgcagctgctttaccagttgggtcacgttggccaggtgccggttgggccgcatgtgcctctgcgggaaggtctcccggcactgcgggcacgacacgttagt

SEQ ID NO: 66267 - DNA, 122 bp, Homo sapiens
cccccttcagactctctctctggaagccttcaggcaggtgggctcagagtcctcaggcatcgcaggtcagagatggggagattgtgggatgcgagggcctgaggccctgagtcgccggctgg

SEQ ID NO: 66268 - DNA, 122 bp, Homo sapiens
gcatctctgccatccctcatccctcgctccaccccacacgcccgccgtacggaccgtctgcgacagctgctaggcctctggactagatccaggctgtcagccaaagcccatgcccccaaagt

SEQ ID NO: 66269 - DNA, 122 bp, Homo sapiens
ctattctcgtcaaaagattgtttcctctgattgttatcaaccacctgtgtctggtttgaccgttatttcctgcctgtgcatgtccaagagggcgactccgtccttcctttccaagtctttgc

SEQ ID NO: 66270 - DNA, 122 bp, Homo sapiens
gggtcggcaaacctttttgggaaagggccagggagttaatattttcgtcgttgaaggccacgtggtctccaactcaatcatccagctttgcccttgaggaagaagcagccatacacagtctg

SEQ ID NO: 66271 - DNA, 122 bp, Homo sapiens
agcagggttggaggaccctcggaataacccccttggggaggtggacaaggacaatctcagcgaagagcttgctcccctcctccccacccttaggaaacgtccgtgaaccggagtgagagggc

SEQ ID NO: 66272 - DNA, 122 bp, Homo sapiens
agaacgtttgtaggcatgtgggtctctattatcctcaaggttaacttcaaggaggaaaaccgcacccgctgatacagtgtttctaggagctcgacgagaaaaggcaaactgcgagccttctc

SEQ ID NO: 66273 - DNA, 122 bp, Homo sapiens
cccgcctccgggtgttgctctggagttgcgggggccacgggcgggccaccgaggagctggcgcgcggtattgatccgtcccgccgccccaagcctctcctgaggcctccctctggcgtcccc

SEQ ID NO: 66274 - DNA, 122 bp, Homo sapiens
cgggtgggctgagcacctcctgctgcccggcctacgctccccggccagccgcgccgctcacgccccaacttgggcccgcgccccccagcccccgcccaggcccgcgccccccagcccccgcc

SEQ ID NO: 66275 - DNA, 122 bp, Homo sapiens
tctcactcatgcagggttccctgaagctcacagctgcttgtgtggctagcaaatggtcaccggtctgatgaccgccatggacaagccaatccctcccagtgctctccccaaacctctcctcg

SEQ ID NO: 66276 - DNA, 122 bp, Homo sapiens
acaggagagaaggaagatgatagagacggacatcctccagaaagtcacccgggatgcctgcggcccgaccagcagtgacaaaggtggggtgaaggaggcgccctgccacgctgcggagtcag

SEQ ID NO: 66277 - DNA, 122 bp, Homo sapiens
gctgtagcggggaagagtttgaccggatcccaaagcgattcagtggcttgtaaacaccctcgaagcacatataatcagcaaccagggagagatggcgagggtcgaccgcgatgcctgtcaaa

SEQ ID NO: 66278 - DNA, 122 bp, Homo sapiens
aggctgtaaggtagttaaaatatagctaagtttttctagctagctggaaaacgagctattcgagattgcatatgaagtgattctaggagaaaaaactatttcatccagagctgctgaaatct

SEQ ID NO: 66279 - DNA, 122 bp, Homo sapiens
ccccgcctccgccagggtccttgggtgagtggcccagggcttcggccacattcttcagggcggcaatgggcgagggcacaccaggggtctcagcggagtacgggccgccgggtgccacccag

SEQ ID NO: 66280 - DNA, 122 bp, Homo sapiens
caggaccctaaaagggcaccagggccacctctgccagcacagaggctgacacagggagggcgcagccacccctgcatggtgacagtgactggtgtttcacatttaccaatccctgcttctgg

SEQ ID NO: 66281 - DNA, 122 bp, Homo sapiens
taagctccttggcgcctcctgttaggaaggcatttttcaacctgtacaagaccagtttcacgaacttgatcccacagccaataataagtccgcccctttgaaagtctaaaaccacaaaccta

SEQ ID NO: 66282 - DNA, 122 bp, Homo sapiens
ttatccaaagttcatggaaggggcagctcctgtggaatccactcctaagtggcgctcactcggtggttccactggcagtgctccaagtaccagttcctcctgctgcatgcaccacggggcca

SEQ ID NO: 66283 - DNA, 122 bp, Homo sapiens
gtggaggttccgcagaagaaatgactgggaagggggaaaagtacggggagagggagggcccggcgcctaggggtcccccgtctgggttcccaccccgcccagaactgggctaccgtcgcgcc

SEQ ID NO: 66284 - DNA, 122 bp, Homo sapiens
ccatctgcaaatcaaggagtgaggcctcgggaggaaccagcactaccaacaccttgatctcggacttccagtctccagaaccatgagatgatgaaagtctgtgtttaagctgcccagtctgt

SEQ ID NO: 66285 - DNA, 122 bp, Homo sapiens
ctcaagtgatccaccctccttggcctcccaaaatattgggattacaagcatgagccactgcgcccaaccttcagcttacaattgttaagtactcagaaggcctttgaccagttaaatccaca

SEQ ID NO: 66286 - DNA, 122 bp, Homo sapiens
ctgttttagaatctgatggcagtgtagacacctctgacttcctgggctctgggctcaccccgagactggttggaggaacaactttaaattgttcactgcattcctactatgatacatccttt

SEQ ID NO: 66287 - DNA, 122 bp, Homo sapiens
tgaggccccgagtgtgaagggacttgtctaaggtcacacagctacagccagaagaggccacgggctagggctgcctgatgtagtggtcaccagaggcactgtcaggaaggcctgagagtcac

SEQ ID NO: 66288 - DNA, 122 bp, Homo sapiens
gtgttgaggcaagctggcttttgtgtcggcccttaggggctgaggtgaaaggctttgacacggagccagggtagctttggcagcttctcccctcctggtcagaacacttccactttcagttg

SEQ ID NO: 66289 - DNA, 122 bp, Homo sapiens
gtgaaaggaagcctccctcgggttcgagtgattcggggtggatttttttcccgaggggggcgggggggccccgagggaggggggtgggggggccaaggaatgcggctccgtgtacgggagct

SEQ ID NO: 66290 - DNA, 122 bp, Homo sapiens
aaacttctgtctcagtttatgcacaggctgccttacaactcctgtggaattagctgttagcgcctcaatcagaaattcctttaaaatgctagagaagccagatacagctacaacagtaacag

SEQ ID NO: 66291 - DNA, 122 bp, Homo sapiens
gactccctggagcccacagagggctcaggcgccgggggggaccctgcagccaagggggagcgctggggccaggcctcctgccgggctgagcacctgaccgtccccagctttgcctttgagcc

SEQ ID NO: 66292 - DNA, 122 bp, Homo sapiens
cgtgggtgggcgtggtccttaggggcgtagggtggggctccccctcccctcccgagtgggcgtggtcgtcagggcgcggggtggggctccccctcacctcccttccctccctaccctcccct

SEQ ID NO: 66293 - DNA, 122 bp, Homo sapiens
acacaaacacaggagctcacacataaactcatgaacttactgacaagtctgtccaggcaccgtctctcccacacaccacaaattcacttgttagatccacatttataactttcacaggcttt

SEQ ID NO: 66294 - DNA, 122 bp, Homo sapiens
tcccccacacctgatcgtcacaagccgtctaagacacgtggtctagggtttgctagtgatcgtctgtgggctttccgagcctgcgctggttttgctgccacaacctgaggtccgcggacgtc

SEQ ID NO: 66295 - DNA, 122 bp, Homo sapiens
agccgctgtggcagcgtatgctgccacggggactgaagatggcgccgcgaggtgagattccggaggtgtgtgagtcgctggtccctttcccttcggtcgctccctcccacctctgtcccaga

SEQ ID NO: 66296 - DNA, 122 bp, Homo sapiens
aagtccctttggagcgcagaagaaaaactcagctatggaacaaggtagagaatggaagcacgttagtgctagcagagtctgcctgagacctgggtaggtccccaacatttgggacggctgtt

SEQ ID NO: 66297 - DNA, 122 bp, Homo sapiens
acctgggaagcgcaaggggtcagggagttccctttccgagtcaaagaaaggcgtgacagacgcacctggaaaatcgggtcactcccacccgaatactgcgcttttcccaccggcttaaaaaa

SEQ ID NO: 66298 - DNA, 122 bp, Homo sapiens
cctcttccgcagttctggcttcgaggaggtcaagccctttaaggtggcatcgccctaagtcgcaggagcgggtctctccgcccctccctcgggccggggggcggggcctcctaatccggaac

SEQ ID NO: 66299 - DNA, 122 bp, Homo sapiens
gggtatgatcattgtgttcggagttgtttactgagcagactgctgctaacctcctcctatcgttgattgcctaccagaagaagcagtccagctcagtttcctggttccaagaaagagaattc

SEQ ID NO: 66300 - DNA, 122 bp, Homo sapiens
agatgaccgacgacgacctgtttgtggacttggggagcggtgagtgtcgcccgccatgcccggctcctgtgcacttccaggccacacgctctgtgcctgccccatgcctgcttggagaagag

SEQ ID NO: 66301 - DNA, 122 bp, Homo sapiens
actgagaaactggaagtgactcagtggctggggctggaattgccggaagtcctgttcactcgcatgtctggagatgggtgctgcctgggagctcagcccatgctaaggatggcattcctccc

SEQ ID NO: 66302 - DNA, 122 bp, Homo sapiens
ttcttttgctgtgaatagagttagtttccaaacagggcgctacctctctcatttaacagtcgatgatttcagacagtaagagaaatttcaatcctaggctgttgggatagtcaggaattcca

SEQ ID NO: 66303 - DNA, 122 bp, Homo sapiens
aaagtgtcaactcaattaatgtgcattaatttgtatatttcttgatgatgtgccggtaagcgatcaacaaacgcctgttaaaccaaacaggaagggcaattggcacagcggtgtggtggtta

SEQ ID NO: 66304 - DNA, 122 bp, Homo sapiens
gttgatataaacaccaatgccagggggtggagggtctgcatcgctgaggagagccctgagcgccaaggaaaatggtccacccgctggccaagccaccaccgtctcccaggctcccgggacac

SEQ ID NO: 66305 - DNA, 122 bp, Homo sapiens
aggggattggctggcgcgcagggcggacgggaggaggggctacggggcggggcgagggcgcggtaaatggcgctctgagtactttctgtctcagtccggctggccgctcacgcgtcgggccc

SEQ ID NO: 66306 - DNA, 122 bp, Homo sapiens
ctgcagcttccagccatcctccctttttcttcgccacttcctggttaccatggagacacacgtcatttacgtgccgtgcgtcgccttggaaacagaggagcatccgcgacacccccgggaga

SEQ ID NO: 66307 - DNA, 122 bp, Homo sapiens
tggcctctcttggctccatctctgcactggctcacagcagcaaaagcatgtccacccccacgccctgcaccgcagactaaggcagctcactgcacctcaacgaggaagagccaggctctgac

SEQ ID NO: 66308 - DNA, 122 bp, Homo sapiens
tactaggcatcttcttacatttttattttcaaagccaatagcttctaagtatttcttctgcgatcattgaacatttgctggatctgctgcccaagtgtgaaatactgactaacaggccgcag

SEQ ID NO: 66309 - DNA, 122 bp, Homo sapiens
acaggccacagtccgccaaaacagcgggttggacgctactgctcctcgtctgcccgcagacggcagcctccccgctgggcctccctcggtatttgagggccaggccaatcatctgtcctctc

SEQ ID NO: 66310 - DNA, 122 bp, Homo sapiens
aagcaggtttattagggccctggggccaggaatgcctaagatatgagttaaggccagggccgtgagaaaaggtgactctcctgaggccaaacctttgcatctcagaagccctggctggagac

SEQ ID NO: 66311 - DNA, 122 bp, Homo sapiens
cagagatgcgccatgtccaccattgtaagtactccttcaggtgtcttgaagcgtaccctgcgtatgagctaatctaaaaacaattgtcatgtcatcaggataaagcagaacaggctgacttt

SEQ ID NO: 66312 - DNA, 122 bp, Homo sapiens
tgggcagtccacagcgacctcagactccgctcactgacaattcagtctgggaaccggaagcggatgctccgcagggtcgaaaagaggccgggccagggtgcaacgagctgaccctccccttc

SEQ ID NO: 66313 - DNA, 122 bp, Homo sapiens
cccacgctctgctctgtcccagtctcctgttgggcaaatccaactgaaaggcagagagtccgtggggtggggtaggtcagcgcccaaagcatggggcaggtggaaaagagaggagattggat

SEQ ID NO: 66314 - DNA, 122 bp, Homo sapiens
cagcgagactccgtgggcgtaggaccctccgagcgaggtgtgggatatagtctcgtggtgcgccgttttttaagccggtctgaaaagcgcaatattcgggtgggagtgacccgattttccag

SEQ ID NO: 66315 - DNA, 122 bp, Homo sapiens
ggggcatcccgggagcaagggccgggccaggcctgggcgcggggcattgtgggaggtggacgccgctccggggcgggtaggtgagtggggaggggcgggaagggtgcacatcttggggaggg

SEQ ID NO: 66316 - DNA, 122 bp, Homo sapiens
ctggaagcagcccatggcgaagtgtggtctccacacaaatgtggtgataaatttcagtgacgggcaacaggatctttggcccatgatgctttctgtggttggaggtgttgtgaggtgctcct

SEQ ID NO: 66317 - DNA, 122 bp, Homo sapiens
ggaacacaaactcagcttcttcccaagcttcagggcagggctggcaagttttgccttccccgccagcaagagccctggctttaggggtcttgctacagttttcccagactggaggtcttggg

SEQ ID NO: 66318 - DNA, 122 bp, Homo sapiens
gttttccattttgctaaaggctgtcaatctgtattctctcttttgcagaaccgtgggtaccgatggatgtggccgagagccctgaacgggatcctcactctccagaggatgaagagcagcca

SEQ ID NO: 66319 - DNA, 122 bp, Homo sapiens
agtccctgcggctcacccacactaccctgagggcccgttgtcgcttgtgggggccttccacgagagacacaagcacactgctccaaaatctgcagctttacagtcccaccgggaaagtgctg

SEQ ID NO: 66320 - DNA, 122 bp, Homo sapiens
ctcttccactttcacctacgagacagagaaaacataagctggccctgtcgtgatgggcctcgcagcccctctgtcacatcactacggcctacctcaaagacttcctcagccctcagctcctt

SEQ ID NO: 66321 - DNA, 122 bp, Homo sapiens
cccaactggttggctgccggtggcaaacgtgatctggggcagactgggtggcaccccccccgctccatcaaaaatagattctcggatggacaacagcagcagccaatcagggactggggagg

SEQ ID NO: 66322 - DNA, 122 bp, Homo sapiens
ggggtggggactgcccaaggccttcatgggagcccagggcacctgcttctccacccagcacgctggtctgctttgccctgggctttgctatgactgcccagatttcatatacactgatctgt

SEQ ID NO: 66323 - DNA, 122 bp, Homo sapiens
agttccgtactcggagctcaaggtgacagaggactgcgcttccagccctgcgctgcgcatcgcgtcggtcccgcggacctttgccccgcctccttccacacccgttcccttgacagctgggc

SEQ ID NO: 66324 - DNA, 122 bp, Homo sapiens
aacactctggtatttgtctgcctctcttgttccagcgccgttttccctatatccggaattcgtccctgcgcattccaatacctgaagcggccacagggtacaggacagggagccctccgaca

SEQ ID NO: 66325 - DNA, 122 bp, Homo sapiens
taatttcctttgaacttatcaacactgcttttctttcaaggatttatccagcctacctaccgtttccagtcgagcctctgcttcatccttcacgatgtagccagagtcatcagacacgagtc

SEQ ID NO: 66326 - DNA, 122 bp, Homo sapiens
gtgttcccaaaggtgccttcataatgaaattcctgttactattattaccagtgttactgtcgctactgttagagtactctcaaaagagcctgtctccctctcctggagtagaacttaaaatg

SEQ ID NO: 66327 - DNA, 122 bp, Homo sapiens
gggtggtgcccatggcacgagttgccgcggcctctctgcaaatcacagcgctagcgctttcgaggaagggagatcagctttattgaacacctactaattctctggatttgactcagtagctt

SEQ ID NO: 66328 - DNA, 122 bp, Homo sapiens
ttaggttttggcagggggacctggttctggggttaagaagctcaaattagaatttctgctcggagtcacagtatttgggacccaggtccaaacacggttggagccaagattcaatctctggg

SEQ ID NO: 66329 - DNA, 122 bp, Homo sapiens
cttgggaagaggtcttgaggtagagctgtgggagtcacgcatagttgaagccaagggatacgacatggtctgcaaggcagataatataaagaaataacagaactccaagagcagccctgaag

SEQ ID NO: 66330 - DNA, 122 bp, Homo sapiens
agcccgggcagcagaactgactgatgaggatttcatgcgacggcagattctcgagatgagcgccgaggaagacaacctggaggaggatgacactgccacctccgggcgtggcctggccaaac

SEQ ID NO: 66331 - DNA, 122 bp, Homo sapiens
tcttgtcagcgggcttggaaatggcaggaactggacctcgggactcgatgctgagccctgcgaagttgccatattccccccacgcctggaaccgctaggctgcgggcgcgcctctccccttt

SEQ ID NO: 66332 - DNA, 122 bp, Homo sapiens
ctcatcttccgggagattcatgccagtctggtgccagggccatcagagaggcctggggggcgccgcaggggacgccggacaggcagccccggtgagggagcccacgtgtcagcagctgtggc

SEQ ID NO: 66333 - DNA, 122 bp, Homo sapiens
actgccattatttttatgtgaaggactacatctacttggtaggctgctatgaaaaaatgtcgtaggtgctatatgtcatctcatatttgtaaatcgaggggacatttaaaaattgggggaaa

SEQ ID NO: 66334 - DNA, 122 bp, Homo sapiens
ggttattaatgaagggaatgtgttagtatctcgacctagataatggagcagagtttggtgcgggtaaagggttacatgtctaggagttcaaggatcaaaaccctagtcacagatgtgtagat

SEQ ID NO: 66335 - DNA, 122 bp, Homo sapiens
tcaaaaggtacacaactctgtgctctcttctaatttgctcctccaggtactcaatggaagcgtaaaaagaggcactagctggccaagaagacaatcagattcaggagccctggcttacactc

SEQ ID NO: 66336 - DNA, 122 bp, Homo sapiens
actcctggcttcttttgtgttttaactctctttgctctctttagatattaggttggtttccgtcaagtaagataaactcaaaggtaacatttgtacggggaactttaggatgcactatgaga

SEQ ID NO: 66337 - DNA, 122 bp, Homo sapiens
gtcaccctttggcactgtcctttctccctgtgagtcctctccctctttttctttccttcccgctccacgcccttcaacgctccctgccgctcattgcaagccgccgcccttccctccccctc

SEQ ID NO: 66338 - DNA, 122 bp, Homo sapiens
ggaaatacgtcctgagaaatgacgggaatacgtcctacgacacacgtcggctatagagcccgtggctgccagcacagacctggatggtctagcctaggacacacgtcggctatagagcgtgt

SEQ ID NO: 66339 - DNA, 122 bp, Homo sapiens
aaccgcgagtgctttgcagtctcgcttttttgggggtcttctcaaatagccaccttcattcgctcttcccatgctctgcttcagttttataaatagcatttctacctgacatgtacatgtgt

SEQ ID NO: 66340 - DNA, 122 bp, Homo sapiens
tttttttttttttgcctgaaatgatacagtagtgtataaaccaagtatctctgcttgcatcgtcatctgcctgtcatgtatgctcaatgtagtaaccacagtgatccttataaaagtaaagt

SEQ ID NO: 66341 - DNA, 122 bp, Homo sapiens
agttagtgagttctcacgagatctggttgtttgaaagcgtgtagcacttcctccatctcccggtctctttcctgtcctgccatggtaaagaagtgcttatttccccttcgctttccaccacg

SEQ ID NO: 66342 - DNA, 122 bp, Homo sapiens
ggcagccgccgctggtgagtggggttcctggcggtccccggcggagcgggagcggcggggcgtttccgggggtccgggtgggttgccgcgagcgctgtgcggtcagggcggggctcaggtgt

SEQ ID NO: 66343 - DNA, 122 bp, Homo sapiens
cgatgatggagtgaggcgtggaccacagagctagtccgggatcgcgagttcgactgcgggcgccgctctgcgaggtcacacggctgcgcccattgcagagtaccggacaggagcggctataa

SEQ ID NO: 66344 - DNA, 122 bp, Homo sapiens
ggggcccctcccccgcgtgccggccgtgggagcggctctgacaagcctcctgggggcccgcggttggggagggccagactgatttatggggagaaggagatcccccatcctcagccgacctg

SEQ ID NO: 66345 - DNA, 122 bp, Homo sapiens
ttcctcacaaccaggagcctggagggaacacagagcgatgcaagcctggagaaaaggccccgatggcccccagaagacctcttcagacagcatgtgagtagctactgtgtactgtgctctcc

SEQ ID NO: 66346 - DNA, 122 bp, Homo sapiens
tgaatgtgcctctggtggctgctgagaaaaatacactgtgcagctcagtgtgtggagtgccgtgctcaggccgggctgccgggccagtgcggggatccgggcagcgtgtggagtgcggtgct

SEQ ID NO: 66347 - DNA, 122 bp, Homo sapiens
gccccgcgtagcccgcacagcctttccggcagtacctgcggcccctctccgccgggcctgcgcttcccgccaccgccgaccattctgcagctgcagcgccagcagaattccccgatccgcgg

SEQ ID NO: 66348 - DNA, 122 bp, Homo sapiens
gcttccgggtttgtgcgaatctgctctctggggacagaagccaggcctgggcgggacccgcggggaggtaggcggggcctgagcgaggtaggggcggggcgcgaggcggagagaccttgccc

SEQ ID NO: 66349 - DNA, 122 bp, Homo sapiens
cagttcgttttgggagataacttgttttgctccaagccgcatccgttgaccccttacagtcggatggtctagatgactgaatggagttttgagttggacttttgtgtccctgacggagttgg

SEQ ID NO: 66350 - DNA, 122 bp, Homo sapiens
gctcgtgctcgggaactatcggattaaacttgaatcgagtgaaattacacaaaggagcgccgcggaggaggcggcccggggacccggacaccctgaaactcaccagagacccgttcgccccc

SEQ ID NO: 66351 - DNA, 122 bp, Homo sapiens
cataaactctgaaacactgacgcacaagcgaaaacacacgcacatgtttgggtcttctcccgctgcgcaagttctttgaaactgagcggagaaaaatcgtcttcacatggtgtctcacactt

SEQ ID NO: 66352 - DNA, 122 bp, Homo sapiens
atcaaggaaacagctgtcaaaatacagtgtttgagaatagctttttaaaatttctttgtacgtagagtattttatcagttgctaagtacttaagaaatgcgctattatcctaatttatgaat

SEQ ID NO: 66353 - DNA, 122 bp, Homo sapiens
ttaccataaggtgatgtaagtgcctatgttccctttgtaacccctccagattctgagccccgttatcactcttaaccagagtaagggcatatgttaaacactcaacaaatgtttattaaatg

SEQ ID NO: 66354 - DNA, 122 bp, Homo sapiens
acatccggcgtgccaaactcgcgtggccggcagtcaaaaccccgggtaggtgcagaatctcgagtaggtgcacgtggtacctacctcgagacccgccccctcatcacggaattgcctgagaa

SEQ ID NO: 66355 - DNA, 122 bp, Homo sapiens
gtcccggctggagaagcgtggctccggggtggggcgtgcagggctagcccgggcgggggacgctgcccaacaagcaggtttgcggagactcacaccttagattctgagtttttaagcttgtt

SEQ ID NO: 66356 - DNA, 122 bp, Homo sapiens
agaggtctggagaaatgacaactactgagaactcttgcagatgctcaaaccacacagacacgataggtgctaagtcacaactcctgtccttgtacaaatgttactaagtgacaagcacatcc

SEQ ID NO: 66357 - DNA, 122 bp, Homo sapiens
gtcatgtcatgagggcactccagcagccctgtggagaggccaggtgacaaggagctaaggcgttggggcaagccaaggccttggaagcagctactctagccctggtgatgccctcacacgac

SEQ ID NO: 66358 - DNA, 122 bp, Homo sapiens
gtttgtcatattctgatatagcagcagtaagacacacatcaaagagtattcaaggaaaaccgacctagaccaaagagatatgtttccccaggaattttggaggcatagctgatagataaagt

SEQ ID NO: 66359 - DNA, 122 bp, Homo sapiens
acttttgagcaggagatttctgatcttggctgcatccaattctccatcagccaggaaagacgttggtgttaaggttgacatacctgtcaaggacgataactaccatggcttccagtgcttta

SEQ ID NO: 66360 - DNA, 122 bp, Homo sapiens
cgagactgtccaaaaaaaaaattgataattaaatgttaaaagtcagcgactccagtaatacgtggtgggctgagtattagactactggcttacatcctctgatgtcattactttcttgttcg

SEQ ID NO: 66361 - DNA, 122 bp, Homo sapiens
ttctcattgtgtcctatcagggggtgtatatttcagttgttttcatttctaatggtgttacgtggatcactaaatgaagattgtgttgaccagctttcccattgtttccctctttgtaatta

SEQ ID NO: 66362 - DNA, 122 bp, Homo sapiens
aacccccactgggttggctgagcccaagtttaatttctctgcaagctctgaactaagaatcgatgctgaagacttctcatcgaggaagaaagccacattcttcatggagagcagtgacataa

SEQ ID NO: 66363 - DNA, 122 bp, Homo sapiens
caagaaaattttgctacaatagtttggttcaaacaatctttcagttactgagcaacataccgttgtcatcaagattcctgacaatgcattctgagtcaaaatgcacatcagattccaggtac

SEQ ID NO: 66364 - DNA, 122 bp, Homo sapiens
ctcccgtcacgcagcgtcagaaactcgatcttcctggcgtggccgcctcccgtcacgcagcgtcagaaactcggtcttcctgccatggccacctcccatccggcggcatcagaaactcggac

SEQ ID NO: 66365 - DNA, 122 bp, Homo sapiens
gaccctcccgactactcctgtgcccgttgccatgccatttgttggatcacttgcaggccccgagtctcaaacacatgatttatcatcagatcgtacagtcgtcagaagggtcccaccgtttc

SEQ ID NO: 66366 - DNA, 122 bp, Homo sapiens
agcgtgccccgccccggcccgctccatctccaaagcatgcagagaatgtctcggcagccccggtagactgctccaacttggtgtctttccccaaatatggagcctgtgtggagtcactgggg

SEQ ID NO: 66367 - DNA, 122 bp, Homo sapiens
ttttaatttaatgtctttggtgattatgctttatgtccacttcaaattgtaatgccctgccggtgaggccagggtcccttctgcttcaagttcatacccttctgtactacctgtcttgttga

SEQ ID NO: 66368 - DNA, 122 bp, Homo sapiens
caactctcagcactctaaactcttcactaagatgtcttcacaggattaaagctcttaactcggcctgcgccaccatcttttgctcggatactagcccgcaatacccactcacctaccacccg

SEQ ID NO: 66369 - DNA, 122 bp, Homo sapiens
cggcagcccgatgcacgggaaatgcaggagagcgggcaccctcaggaccacggggaaggccgaggggaggcacggggcgggtggagccagcctgagcctaggcgcgccctctggcacccact

SEQ ID NO: 66370 - DNA, 122 bp, Homo sapiens
gtgtgatgctgagcaaacttttggtcttgactcttgaaataattaaagagagcagttctccgttttggccttcaggaagggaaatctgcccatggaactctcccaatcagattaacaaactg

SEQ ID NO: 66371 - DNA, 122 bp, Homo sapiens
gcagggacccggctggccgcctccccttgcaggaaacaggtgtttgaacgcgatagcggccgccagtcaactaaggcattaaaagctcgctttataacatcgatttcctggagtgcggtggg

SEQ ID NO: 66372 - DNA, 122 bp, Homo sapiens
cgccggctttcaagcctcaaacttgggggatccccgggctgcctgcctgggagctctgggcgctccggcctcccctcgccctggaacccgctctccggccgctgtcgtggggggtcccctct

SEQ ID NO: 66373 - DNA, 122 bp, Homo sapiens
aaaactgagttagccagttgttcctaagatactcctgatgctgagagtgtgagcaggaggcgctgccccatccgcaagtcagtgtcccccaccccctgcggggtccacagcccaggcatctc

SEQ ID NO: 66374 - DNA, 122 bp, Homo sapiens
cctcccccccttttttgtgctgaggctaatttaggactgggaaacctctttggcatcgagcggcagatggacatttttaatcagtgtgggagcctctgtgtgtgctagcagatccccatacg

SEQ ID NO: 66375 - DNA, 122 bp, Homo sapiens
accccgtgagataaagttgcaaacttaagaagccatgtctgcacatttctgctggccagccgaattccacaaagcccctgactctgtgacaacgctcaaccctccggaggatgaagtgaaga

SEQ ID NO: 66376 - DNA, 122 bp, Homo sapiens
agtgcactgtcacgagggtgcaccatcacgaaggcgtgccatcacgagggtgcaccgtcacgaggttgcactatcacgagggtgcaccatcacgagggtgtgtcttcacgagggtgcactgt

SEQ ID NO: 66377 - DNA, 122 bp, Homo sapiens
actctgttgtgctatcaagtgctgggtcttatacattccagctaattatatttttgcaaccgttaaccatcctcccttccccacaactcccttgcctctgctactcttcccagcctctggta

SEQ ID NO: 66378 - DNA, 122 bp, Homo sapiens
catgcagggttttcacgctgtgggttccctggcagccacctcccatcactatggtgtcctcgcttcagttttgacacgacatcattagcagctgcagacagtccttgttccggctgaataag

SEQ ID NO: 66379 - DNA, 122 bp, Homo sapiens
tcgggcacggtaggccgaggggagaggggacacttccgaccttcaaacgcgcgcgctgaacgaggcgcccccagcgtcaacacagacaactgggtgccatccgatttccctgccaagggaca

SEQ ID NO: 66380 - DNA, 122 bp, Homo sapiens
ttggggagaacgtgaaacttggatgacagggtggaggcttaaaagggaacatgttaacagcgaaaaaccccagtttggctgaagagaacagagatataaggtcaaaaagaaaggactagatc

SEQ ID NO: 66381 - DNA, 122 bp, Homo sapiens
tgtagaggcggccactgatttcacacaccccggagagggactcacgggtagcacaacggccggttcggcaatagcaggtggctcttgcctgagaacctgtggaaagaagagagggtcaggca

SEQ ID NO: 66382 - DNA, 122 bp, Homo sapiens
ggcgaggggtagaaccacatcgcttgactcttaagtgtgtttccaactgctcccacttcccgttttctttagagaaacccagaccaaacaaggaaagggaaataggccacggtagggtcatt

SEQ ID NO: 66383 - DNA, 122 bp, Homo sapiens
ctcccctgtgacatgtctccatgacaagccgttagtattcactcagagacaaattccaaacgcatctttgatctcactacttcaaggaatccctttagtcacttagaaatggaaacagtctg

SEQ ID NO: 66384 - DNA, 122 bp, Homo sapiens
gtcacgacacgcgcttcccctcgcctgcacgcggcgtggcgtgagaggggccctggcagccggcgcgcccacccctgatccttcgaggcccacgatgaagcccatcctacttgcaataacgg

SEQ ID NO: 66385 - DNA, 122 bp, Homo sapiens
taagcagatgctggaagacccaggctggttctgaggttcctgtctccacaagcaagtccacgcgaatcctccccgttgctggatttactttaatgctgccgaagtctcaaaaggggcctctg

SEQ ID NO: 66386 - DNA, 122 bp, Homo sapiens
gagccgcagccgacaccaagttgatgtctgtgagcagctgaccttctggacctccatcagcggcctgcagccaggagctgaagccacagagacggtgtcttctcagctatgataacctcagt

SEQ ID NO: 66387 - DNA, 122 bp, Homo sapiens
cgcacgctgggtgcacgtggatccctcctcccatgtggggtgggccacgtcggtaggtggcggctgcctccctctgtcccgtcaccgaactaacagttatgccttgcctttcagaacgtctg

SEQ ID NO: 66388 - DNA, 122 bp, Homo sapiens
tggggacattaaccaggatggggcccctggaggagacctagtcccagggcggggtggggacgatttgcagccctgggtgggtgggaggtgagatcaccgtatggtattaggtgtcctgttct

SEQ ID NO: 66389 - DNA, 122 bp, Homo sapiens
agccaagcccaccaagggcaatggcgagcctgccacaaagctcccacccccggagacccccgatgcctgcctcaagctcgcctctcgggcagccttccagggggccatgaagaccaaggtgc

SEQ ID NO: 66390 - DNA, 122 bp, Homo sapiens
agggaggctgcaggcaccgcgcagcagccgaggatgagagaggtaaccggagggaacgggcgcacacaactgcttccgcaggacttcctgcgataacacgcccacagcccgggcgccgagca

SEQ ID NO: 66391 - DNA, 122 bp, Homo sapiens
gaaggaaaaaagacaggataggtaatgagctgagtggtcacatttttgtgaggctttgatcggccctccctgaatccataggttccatgtgaaagggggttagaggaacagtccattattca

SEQ ID NO: 66392 - DNA, 122 bp, Homo sapiens
tcctccagccttcactctccctagccctagagggcactccctccctgggaatggagcactcgggctctagcttcccagagagaagagagcccaggatccctaacaaaagatggggagaaggg

SEQ ID NO: 66393 - DNA, 122 bp, Homo sapiens
tggctctggtcttccagccacaagctcagcagctgctccatgctctccatcactgcacttcgatggcgagtcaaccgagaggctctcagaggagtagctatttgtgaactcgctttgatttt

SEQ ID NO: 66394 - DNA, 122 bp, Homo sapiens
ccggaccttgtgcatttcctatgcaacgtgtaaaatttgtatttgaggggtgggggcgggcggagctggaaaatggcttttttccgctggtgaacactcactgaccccccgtattcgggcgg

SEQ ID NO: 66395 - DNA, 122 bp, Homo sapiens
ccgggggcgcgggaggggccggtctccgccgcatccgccccgggactggttgggcggccccgctctgcccctccgccctcagggccgcggcccagcccacgaccgctgcacagaaggagccc

SEQ ID NO: 66396 - DNA, 122 bp, Homo sapiens
aaaaggcagagggtgggggagagtattatgggaagccctaatagataagaggaatgctaacggttgatttaagaaggaaaaataaacaaagttaaggtcagactctttattttgaatgctat

SEQ ID NO: 66397 - DNA, 122 bp, Homo sapiens
ctgctctcttccagagagaacttacttgaaggtcgatgttttctcttgctgattccatctcgctgccctcaagtcccttcacacgcaccgggtgccgggaacagactgcgtgggctcctcca

SEQ ID NO: 66398 - DNA, 122 bp, Homo sapiens
cgaggcagtgcccagcatggagctggaactcagggatgtgggggaaaaaatcctgcccatcgcataacaaccaccaccgtctactgagagctcacgccggaccaggcggcaggctgagttgt

SEQ ID NO: 66399 - DNA, 122 bp, Homo sapiens
gaagggggttcttaccgctgaggagaggccggttgtgccggtaggaggcgggcagctggccgacaccctccatgcggtggctcatgacgcgtgcgaggtggcccgtgtggtgcaggctgccc

SEQ ID NO: 66400 - DNA, 122 bp, Homo sapiens
ctcctcctcttctcctccctcttccctcatctcccccctccttcctctgccccaccccagcggggagcagactgctcctccaggctgtatagacctgccctcttgcattaaacaacttctct

SEQ ID NO: 66401 - DNA, 122 bp, Homo sapiens
tgtcatctactaactacgtgaccctggaaagcttatttaacctatgtgagcattggtttacgaatctgtaaagtgacaatcacataggtctgctgtgagggttaaactatgtagggctataa

SEQ ID NO: 66402 - DNA, 122 bp, Homo sapiens
cttgtggtacatgtcggtgaccctgaagcccagaaagggaaagggttttgttgtcagacacgcagcaaggctgcagaggctggactcctactgaggtcttcttgactcccagcccagggagt

SEQ ID NO: 66403 - DNA, 122 bp, Homo sapiens
cggcggcgggaggaggagggtgaatccccgctcagtccatccctcattcctgtgccagctcggcgacgtacactgctgcttagggagcaaagcacttccaccgctttcacgcgacgaaggtc

SEQ ID NO: 66404 - DNA, 122 bp, Homo sapiens
ataatgtttttcctcaaccctcctaagctcttccttggaatagacttctgtaacaaaagacgcattaacacaagaaaaacagtttattaaggcatgcagcgcacatctcaagggagaaacgt

SEQ ID NO: 66405 - DNA, 122 bp, Homo sapiens
cgctgcagagaggcatgagcagcagcaggacacatgtgatacattgagggtgactcctagcgtgggtagggcctagtggggcacgggaatgtggctggagaccaaggtgggagaggcagcca

SEQ ID NO: 66406 - DNA, 122 bp, Homo sapiens
aatttttttttaggtgacaccccccctacaagccggccgtccttccgggggagcccggagcgagcccggctctcgcctggtggtgtttctcactcgggcctccaaatgttgtacttgagcga

SEQ ID NO: 66407 - DNA, 122 bp, Homo sapiens
ccctgaaagctttactgtcccagatgccctttcaggcaactaacacccaaagatgactgacgtggagcaggagggaagataactaggaagatgggcagagaataaaagagaaaagtttacag

SEQ ID NO: 66408 - DNA, 122 bp, Homo sapiens
aatgaatgagcaaatgaacaaaaatgtagtcgggacagaagtcggagccccacatcctcacgccatataaactgtcatgaccagacgaccgctcagctactcacagtcgctctgtgatcggc

SEQ ID NO: 66409 - DNA, 122 bp, Homo sapiens
accacagcaacctggccaggggtgggagggcaatccatggggacctaccctgagacaggccgcgatcaagaaccctcagcgtccccagagcaacccagccacaccatgactgaggccagaga

SEQ ID NO: 66410 - DNA, 122 bp, Homo sapiens
ttaaaagaaattaaggagtgtgtaagcaaaaactcagttgtatgtaagaaaacccaattccgcctgagaaaaaggaagagttggagtcctttaaaaattaactgcctgtttttctgtggcta

SEQ ID NO: 66411 - DNA, 122 bp, Homo sapiens
tcacagccttcattgctcagtaaaagctgtttctgtcctgcaggttttcatttgcatgtccgcaattttgcacctgcaggtctcttccagaaggccatcattcagagcggcactgccctgtc

SEQ ID NO: 66412 - DNA, 122 bp, Homo sapiens
gccagctgatgcctgtgggaaggactagcccaagcctgccaggtcctggcacagagcaggcgttggggaccagggtctgggtgcctgtgtggacacactgaccaggctgcggcccagccctg

SEQ ID NO: 66413 - DNA, 122 bp, Homo sapiens
ggaaagctcggggaggagggggtggccgcagagaaggaaaaggaccctcacttccggttgcgttcagtgcagaccagctgagcacccactgcccgagcctgctgtgggtcagccctgggccg

SEQ ID NO: 66414 - DNA, 122 bp, Homo sapiens
acatgtggtcgctttttggatgatttcttcaggtttaaaagtctcttctgttcatcctaccggggtgccgtctcctgccggtcttttcatctcaccaggtaaaacgcttattttacaattta

SEQ ID NO: 66415 - DNA, 122 bp, Homo sapiens
caaaatagtcctttcctactctgagcccagactccatcagagtgtacctacaacccagtccgtcaccaagtatggaattacaggctggcatggaaagggacactgcattaggaggctaataa

SEQ ID NO: 66416 - DNA, 122 bp, Homo sapiens
ggggcaggggacgccggcgagggaagggcgaacggacaggagtacatttgctggattctccggacagcaccgaggaggtaggtccgcagccaactttggagtagagtttaccgtagtggggg

SEQ ID NO: 66417 - DNA, 122 bp, Homo sapiens
gcggccttcggtaagaggctgcccgacgcggcgccagtgtgcagagtggtctattagggccgctcagtccggagccccggcggcacgggcccggccctgcaccagggtgatgcacctgctgc

SEQ ID NO: 66418 - DNA, 122 bp, Homo sapiens
gactgggtgatgcctcaggagaaaccaccctagtagttccgctccgagggcggaagtgcgcgtctcttgtttgtgcggctgaccagttggcgacatggtggcacccgtgctggagacttctc

SEQ ID NO: 66419 - DNA, 122 bp, Homo sapiens
gggtacacgaaggctggggaggtcccagcggggtgccgggaggctgcaggtgaccagatccgcgtgcgcagccggcagacagcttggagtcggtgggctgaatcttcaccactgtcctgccg

SEQ ID NO: 66420 - DNA, 122 bp, Homo sapiens
taaaccttcggatttttagactttcttctcgcttcctctgacccaggctgagggagcccccgaggctactgcggggcggggccggggcggggtggggcgccctcgccgcctcaggcagcgcc

SEQ ID NO: 66421 - DNA, 122 bp, Homo sapiens
cggcaacgggattcgagtccaggtccacactgggatccgagctccgagtacgtgaaggggcgggccttcgggctcggaacaaggaggagccaaaagctttggacccgaaggggaacagacgg

SEQ ID NO: 66422 - DNA, 122 bp, Homo sapiens
cacaggagatgtgcaggcctcgtcatctggggtcttacgtgtcagtgatgtggggtctgccgggtcagtgagggggtctgtgaggtcactagtgggaggccactcccaaagtgattcccctc

SEQ ID NO: 66423 - DNA, 122 bp, Homo sapiens
agcctcccagcttggacagcttggcgttggcatccttaacggccagctccccacactgctcggcatctgcgagggtggcctccagggaagccctctggcctttgaggccctcaatctcagcc

SEQ ID NO: 66424 - DNA, 122 bp, Homo sapiens
gggctgcggctgcaggcacgctcgggcgccactgggcctcgaccgcggtcacgggcggggcgtccagatctgctcggcaccttggtttcttggatgacctctcggtgacagccctcagcgtc

SEQ ID NO: 66425 - DNA, 122 bp, Homo sapiens
gcgacatcaccttcatgatacctgtctagctaacatgacccagcagagcaccgcagcttacggcaatatttattttttattgcttgatgaatgtttacatatgtgcacacctgggaagtccc

SEQ ID NO: 66426 - DNA, 122 bp, Homo sapiens
gaagcctgtcgaccagaaacccagtttgtttccccctatctttccaagaacttggaaattcggctgcttttggtggtcgccccaccgtctgaccacctcctctgcggaggaggggctgggct

SEQ ID NO: 66427 - DNA, 122 bp, Homo sapiens
caggctggtgtgcagcggcgcgatctcggctcactgcagccccgatctcctgggctcaagcgatccttcagcccgggccaaagcgcggagcttccagaagcttttattttctaaatctcacg

SEQ ID NO: 66428 - DNA, 122 bp, Homo sapiens
ttctggcctccagggcggtctgggtgggaggaggaggtgggcggccggaaggtggttgagcgtttccgctccactgcgcggccccggagcccccaaacgcaggtcagcatggaggggcagcc

SEQ ID NO: 66429 - DNA, 122 bp, Homo sapiens
cggcacgcgggctgcgcgccctcccgcaagccaccgctcagcgccagcgcgccggcaagccgcctaccttaggggtctgcacttcaggtcccgtcggcacctccaacttcctcttggttacc

SEQ ID NO: 66430 - DNA, 122 bp, Homo sapiens
ttgaggttaataggggtttcggcacaaaggatggaccctcatctgccgcctgctgttttgcggggaaagggtagtaagttatttggagagagaaatacccaacaccagggctggaaccccgg

SEQ ID NO: 66431 - DNA, 122 bp, Homo sapiens
ctccctgccaactccccccaaaagatctagcttcccagtaacaagtaatgctattgaaagcgaggtttgaaacacctgcatgaattcaatctaaaaccaaaacagagagcagtcaagtttaa

SEQ ID NO: 66432 - DNA, 122 bp, Homo sapiens
ttggaacctttgacctgatctaaagtggactttgtagcaacaagaggagcatcagcgggtcggggaggggtttgggggtgggctggggggtgggggaccctttgtggattttctttgccttt

SEQ ID NO: 66433 - DNA, 122 bp, Homo sapiens
ccattagctacatgaaaatagcatttgaaatgtggctcatgggccaggtgcagtggctcacgcctgtaatcccagcactttgggaggccaaggtgggtggatcacttgaggtcaggagtttg

SEQ ID NO: 66434 - DNA, 122 bp, Homo sapiens
cagacagcgggaagaccaccaaagatcaggctgacagtgcccatcaagcatctaggccaccgcctcgggctggaccgaacggggacagggtggacaggactgccacgcgtgggctgtaaata

SEQ ID NO: 66435 - DNA, 122 bp, Homo sapiens
agaacaatgccagcacagggctccaagagggcagcacgccagccacagatggaaggtgctcggcacacacgcggtcagtacgggctcccacaggcagcacagggctccgagagggcagcaca

SEQ ID NO: 66436 - DNA, 122 bp, Homo sapiens
tctcttttcttctttttctaaaatgaatctgggagtttcctttagcccctgttttgtggtcgcctcccatacacgttttatctgtccgtggcattttcttttatttattgaaagcaccgtgt

SEQ ID NO: 66437 - DNA, 122 bp, Homo sapiens
ccgggccacgcgccggtcaccgagaagcagcgactccagccccttccgcaaaccaagacccgccacctagagccgccgcccaatcccctttgggcctgaagccgtcctccgccgccccggca

SEQ ID NO: 66438 - DNA, 122 bp, Homo sapiens
cccttactgcctcaagctcccatggacctgtgggcggggagttaaatccctgttccatctcgcctgttcccagagtttgaggactttcaccctgtccagttcccagggaaggtgatgtggga

SEQ ID NO: 66439 - DNA, 122 bp, Homo sapiens
gggacagcgcctctaaggggagtagtaatgcaatgtggcttccttcctctcctcccctgccgcctctgggggtggagctgatgcccctcaccccaatacccagcctagtagcagtactttgg

SEQ ID NO: 66440 - DNA, 122 bp, Homo sapiens
tgcacacagccttaaaatgactgagttgctctggaaaatgacagaaattcatgtaaggcacgatgaagaaataggagaaatacatgtatgtaaatatattcctagagcagcgtttttcacat

SEQ ID NO: 66441 - DNA, 122 bp, Homo sapiens
caggttggcgcaaacaaagccctgattgactgcccggaggggcgggcctcgctgcatggccgcctcctcccctcccaggccgccagggatttgccgggaagagcgggggcagggggagactc

SEQ ID NO: 66442 - DNA, 122 bp, Homo sapiens
agaccatgaacccatcagaaggaaaaaactccgaacatcagaaggaacaagtttcagacacgccacctttaagaactgtgatactcaccgcgagggcccgcggcttcattcttgaagtccgt

SEQ ID NO: 66443 - DNA, 122 bp, Homo sapiens
gtaccacgcgctgctggagaagtacgaggagctgctgagcaagtgccggcagcacggggccggagtgcggcacgccggcgtgcagacctcgcgccccatctcccgggacagctcgtggaggg

SEQ ID NO: 66444 - DNA, 122 bp, Homo sapiens
ggggcggggcgagcactcgcggcgcggggcgcgcacgtggcttggccgggacgcctggtccggcttgctggcttcaactacggtgagatgttttgcgaccctggggtaaaatgagggtaaag

SEQ ID NO: 66445 - DNA, 122 bp, Homo sapiens
agggactcccagtcaccacagctaggagttgagcatggggaagctgggctgccaaatgaccggggagtgggtgggcaggggtgccgggtgggagaggacagcaggaaggccacatgggccgg

SEQ ID NO: 66446 - DNA, 122 bp, Homo sapiens
agcggcgggatctgcggccgcccggggccctcggccaacatcccagcatcctctgcgccgcgccggccccggactccatttcccagcggcccctgcggcctgccctagggctgcggcgcctt

SEQ ID NO: 66447 - DNA, 122 bp, Homo sapiens
ggcgtaggacactctgagccatgtgcgggatataatctcctggcgcgccattttttaagccggtcggaaaagtgcagtattcgggtgggagtgacccaattttccaggtgccgtctgtcacc

SEQ ID NO: 66448 - DNA, 122 bp, Homo sapiens
aagaccagaggtaaggactcaggtcccctaactcttggtccagtgctccagcccctgtaccgtgctgcttctcaaactacctgagagtcagataggactcagaaccagacagcattcaggca

SEQ ID NO: 66449 - DNA, 122 bp, Homo sapiens
tagggcacaaggttccgtgtgaggcccctcagtcaggacggcatctgggagggagccccacggaggcttcacggcaacgccagcatggagggagccggcactcacctagggggctgtaggat

SEQ ID NO: 66450 - DNA, 122 bp, Homo sapiens
aagctttgcaaaggaatgtttacaaagaaattgggaaatacaaacaaaaacaaagagtatcgtcagcagaaaaaggatcaagacttccccactgctggccagaccaaatcccccaaattttc

SEQ ID NO: 66451 - DNA, 122 bp, Homo sapiens
gaactgtttagaaagaggaaaaggcaggcaccacaatagaatatgactcagccatgaaaacgcacgaggctctgacgcaggccaccttgaggacgtcatgctcagtaagagaagccagacaa

SEQ ID NO: 66452 - DNA, 122 bp, Homo sapiens
tgcctgttttgagaaggtgatgacatcacctggttgtacattgctgggctctgggaccctcggccaagtgcccagatcaggcagagaagaggctgggatcctggcaaaaggttcttctaagc

SEQ ID NO: 66453 - DNA, 122 bp, Homo sapiens
aggctgatttctgccgtccacaccatctggcccaggaaggcccctaagaagtggtgtccacgcctctttgaccctcacccacatactagagatgggggtctttggacctccaaaaaggcacc

SEQ ID NO: 66454 - DNA, 122 bp, Homo sapiens
atgggcagcaatttagatccacatcatcctgtccaggtctttctcaaagacagactttaacggttctctggaaatgaaaagcagcaagcgtcatagtatctaatggcaatttaaacaggcca

SEQ ID NO: 66455 - DNA, 122 bp, Homo sapiens
tgtgtgcacgcgcgtgcgcagccagcagggggcgcagctgcagtgcatctcagggagctgcggctgctgggccccaggaggagctccatgaccaagagatgggcagaaaagtcaccccttcc

SEQ ID NO: 66456 - DNA, 122 bp, Homo sapiens
agagaaaaaagtctttataatccatgtatatgaagttcaaaagctggcattactgatctgcgatgacatagtcaggcaagttggtaccattgcataggcagagatggaaagaagcttgtggg

SEQ ID NO: 66457 - DNA, 122 bp, Homo sapiens
aaagaaattttttcaccaaattgccatggtgttataaagatcaaagacagctgttagaagcgaaccccctgcaaggttctaatgcatgcggttctgtgcctgtcagcggggtgagcgccacc

SEQ ID NO: 66458 - DNA, 122 bp, Homo sapiens
atcacagggatcccaaagggtatggtgcttgtggagctctcaactgccccaccctaaactcgagtgtgcttgttaaagtggacagggtgccagtggaggctggtgggccaatctccacaggg

SEQ ID NO: 66459 - DNA, 122 bp, Homo sapiens
agtctgccttaataaaagtggcaagctcttggcttccccgtggtatggctctatccaccacgggggcagagcttaactacaccatgtagatgtgcctgccagtcagggaccgctgtaactgt

SEQ ID NO: 66460 - DNA, 122 bp, Homo sapiens
ttccctctagtattgtgaagcagattattagatttgagaagatgtgttccacaaatgtctcgaaagagtccaggagtggaggctgctaaatggtttgcttaattctaatgctttatacagat

SEQ ID NO: 66461 - DNA, 122 bp, Homo sapiens
gggcgaggacccagggcccttctggattgtggtagcgccagggctgctccccattttgtgcgtcgcggaggaggggccggggctctgggcttccgccacacccatcctcacttgaaattgcc

SEQ ID NO: 66462 - DNA, 122 bp, Homo sapiens
agtggtgggtgcctgtaatctcagctacttgggaggccgacgcaggagaattgctggaaccggggaggcggaggttgcagtgagccgagatcacaccattgcactccagcctggacaataac

SEQ ID NO: 66463 - DNA, 122 bp, Homo sapiens
acatctaggcacaaggactatcaaaaaataatctgtcagaaaatctccattgaggtcaggcgcagtggctcactcctgtaatcctagcactttgggaggccgaagcaggtggatcacctgag

SEQ ID NO: 66464 - DNA, 122 bp, Homo sapiens
gagaggagctgccggaactgaccttgctgaccacactgttggagggccctggagataagacgcaggtgtgaggacaggctctggggaggctcctttcactcaaggggcattcgtttgctcac

SEQ ID NO: 66465 - DNA, 122 bp, Homo sapiens
aggccagcacaggcctctctcgcattttgccttgtgcacccgcgcaacccccagcaaccccgaaaccccaacgtggcaccaagggaagggtgaaaatgaagtgctcttgtgggccaaccacg

SEQ ID NO: 66466 - DNA, 122 bp, Homo sapiens
acagctgtgcagcaccttccggaattgggcgcccaggcggcggatgtgatgcaagctctgcgcacgcgcgctagtctccctcggccatctaggatcaggaggcgggtctccctcctcgggac

SEQ ID NO: 66467 - DNA, 122 bp, Homo sapiens
tgcgtgcgtcatgctctcagaaacacgcatgcgtgcgtcatgctctcagaaacacgcatgcgtgcgtcatgctctcagaaacacgcatgcgtgagtcatgctctcagaaacacgcatgcgtg

SEQ ID NO: 66468 - DNA, 122 bp, Homo sapiens
ttctttctgcagaggcctcctgaggaagcagtttttccatcttaacgggactgcttggcccgctgggtccaaacagccacaggtccagcaaaagcagggaggagccggtgcccggagcttca

SEQ ID NO: 66469 - DNA, 122 bp, Homo sapiens
ctcagatgctgtcctgggggaactggctggcaagaccccttccacccagctggaggggtccggaggaggccgaatccactcccacatctgctctgggctcgctttggagttcccctctgagc

SEQ ID NO: 66470 - DNA, 122 bp, Homo sapiens
gcagggccaggacgagacagccccagcgggtggcaagcaggaaaggcctccagaggcccacgcgggtcttctgatccagagcagcactggcccgggcggtgggcggtgctcaaacaccagtg

SEQ ID NO: 66471 - DNA, 122 bp, Homo sapiens
atcgggagacagacagggagagagacagagagagtttggagagaaggcggcatgatcatccgatcatcttgggccccatcagtctccttgggaatgctaacatgtctcctggtatagtcttt

SEQ ID NO: 66472 - DNA, 122 bp, Homo sapiens
gattctctatctaaatttggaagtgacaggaaggaccagagactgtaaatgtgtagctgacggccccaggaggtagatttttataggtctacacctagcaggtcagtcatagcaagtgctta

SEQ ID NO: 66473 - DNA, 122 bp, Homo sapiens
gcataagccaatgaatgaatacgtgaatgaatagattaataaatgaatgaagaagaatcacggcagaactcctaacccctagcacgcctgcctaggggaacaggaataagtcaggaaagaaa

SEQ ID NO: 66474 - DNA, 122 bp, Homo sapiens
agaggccccgttcctgagccaggaagttccctacagagctgaccagagtcccccaagctgcggatccgcggttctcaccagagatggcgaagccgctgaagcccacggctaggaccaggaag

SEQ ID NO: 66475 - DNA, 122 bp, Homo sapiens
agtccgttcttggggtctgcacgctcgcagtcagccctcaggggctacaaatttagccctcggggtctgcacactggccgtcagcccttggggtccgcacgctcgcagccagccctccggtc

SEQ ID NO: 66476 - DNA, 122 bp, Homo sapiens
caagtatcattccttcttccggagccgggaccccaggtcaagcctggggcccccacagggcggtcccaaccccactgcccggagcgcacccctgctccctgggaggcaggatatcgtgccgc

SEQ ID NO: 66477 - DNA, 122 bp, Homo sapiens
gccagattctgtacctccacactgtggggacaagtctgcaataacctatgacccctaggccgccgcagcctttggcggttctgcgtcccttggcctgtcccggtcatcgctagccacggcca

SEQ ID NO: 66478 - DNA, 122 bp, Homo sapiens
tccgtgtgatccccaatacctttgctgtcttctgtaccaaggcagccaaaaacacaggcccgttgtctgagccgatccataaggcggtcaaaatctaggaattagatctcgaagaagcacag

SEQ ID NO: 66479 - DNA, 122 bp, Homo sapiens
gctggcggcgcggtctcgtggggcggggcggagtcttatggggcgagacctcagcgcctgcgcaagcgccgcagcagccgcccgtacttccgctttactcagattttggaccgcggggccgg

SEQ ID NO: 66480 - DNA, 122 bp, Homo sapiens
tcctcacttctcagatggggcggccaggcagagacgctcctcagctcccagacagggtcgcggccgggcagaggcactcctcacatcccagacggggcggaggggcagaggtgctccccaca

SEQ ID NO: 66481 - DNA, 122 bp, Homo sapiens
cagctggttgttaactttagccaagacaaaaatccctattcagctacttacctaggggtgcgtctcaggctgaaaacggctgtctaccatcccagaagtaggaaaaaaacccctcatcttcc

SEQ ID NO: 66482 - DNA, 122 bp, Homo sapiens
gttttacagaatggacaaggaaaacaacaagggggttgaggcacccagggactagcaaaccgttatcatccctaagactgaagagacaaagagaaggacatgttattacagtgtgagaagac

SEQ ID NO: 66483 - DNA, 122 bp, Homo sapiens
taggcgccgcagccctggccctctagaggccgacggaggagtgcgggggaagttagcttgcgcctgtctcgtcagccgtgcacgagaaaaaaaaggaccttcgagaagaacaagggagggca

SEQ ID NO: 66484 - DNA, 122 bp, Homo sapiens
ctgtggaccgggaatgtcaggggatcatgggcactgtggactgggaatgccaggggaacacgggcacggcggaccgggaatgtcaggggaacgcaggcacggctgaccgggaatgtcagggg

SEQ ID NO: 66485 - DNA, 122 bp, Homo sapiens
aagacatttccagagtcacattcaaacccaaaatcagccagctccaaatcaggtccattacgctaatactgaagacaaatggatataggagtaaccaccactattaatttcaagcagtattt

SEQ ID NO: 66486 - DNA, 122 bp, Homo sapiens
gagacttcagtgtagatcctgcctggtgactggctgcttcacatggcagtgtgcagagggcgcctgatgcccacgtggcagtgtgcggagggcacctgatgccacgtggcagtgtgcggagg

SEQ ID NO: 66487 - DNA, 122 bp, Homo sapiens
gttttaatgtagatttttttttgcacccatgctgtttattgctaaatgtaatagtctgatcgtgacactgaaaaaaatatatatttgtgttctgagtaatggaaaaataagggaccaaggaa

SEQ ID NO: 66488 - DNA, 122 bp, Homo sapiens
gggcggcagggagagggggcaggcggtgaaccgagcggaccgcggtgaagacaggcgaggcgggggcggggcggggcggggcggggagcgagtcccgccgggagggagggaggctggcggcg

SEQ ID NO: 66489 - DNA, 122 bp, Homo sapiens
cgggtgtccgggagggaggggagcctggcggggtctggggcctcgtcgcggagggcgctgcgagggggaaactggggaaagggcctaattccccagtctccacctcgaatcaggaaagagaa

SEQ ID NO: 66490 - DNA, 122 bp, Homo sapiens
cgtgaggaagcccgggggtcgcagtgaagcccaacccactggtgctgggataacctcgcccgcaacccggatccaggccgcaggtcccccgaggctccgcccctgacggcgacactcaatcc

SEQ ID NO: 66491 - DNA, 122 bp, Homo sapiens
gggcagaaatatccaagcacttctgggaaactttaaaaaaatgcatgtgacgtctggcagcgtctggtctccccaactgtattcagccttgagggtgttgtggatagacacgccctgctcca

SEQ ID NO: 66492 - DNA, 122 bp, Homo sapiens
cattggggaggatcaccacctcaagttcaaagaaacactcattctcctcagcatatgaggcgccagcacagagtttttctctgtctattctgttggaggttgtgaaaatttccccagtgctg

SEQ ID NO: 66493 - DNA, 122 bp, Homo sapiens
tccacccacagcagcctctcaaggtgctgagattacaggcatgagccaccatgccagccacgcctgggtttatgctaaggaggtgactcatgggtgaacccttagataatttcaagggaggg

SEQ ID NO: 66494 - DNA, 122 bp, Homo sapiens
cctgtgactcaagccaggagaaaaaaaggagttgctcaaataaagcgtccctggcagtaacgaatcattaactttcagcccactccaaggaatgggtggcctgagggtcacgtgctaaagag

SEQ ID NO: 66495 - DNA, 122 bp, Homo sapiens
cagagctagcagaatggatatccacaatctagttccaacttctgtgccaatcaggacacacgctgtgtgacatcaacgctctggacaccagctctctttcatggagttctgaattccattcc

SEQ ID NO: 66496 - DNA, 122 bp, Homo sapiens
aggcagcacaagccggcccggagctgaggcaccctcccttttccccgccaggcacagctgcgtccccccgaggccattgccaggtggctgcacgctggggtcacccctcctgaggatgtaga

SEQ ID NO: 66497 - DNA, 122 bp, Homo sapiens
agggaatgtttctccagtagggtcacttccttgggaatctgaccctaggagcatgcatttcgtgaagccctgcaaaggtgatggtggtcccggcaggaaagggttccttcagcccaacatag

SEQ ID NO: 66498 - DNA, 122 bp, Homo sapiens
agtcctgcttttccaattgcactgtactggcatcaggttaactagaaagcacaaaacaaacggtgattaaaaaaaataagaacagtatacattctatgtatttacacatgtttttagaaact

SEQ ID NO: 66499 - DNA, 122 bp, Homo sapiens
ccacgtgaagccagcctaactgagctctggactttggggacagctgtcagtggcctaggccgcaggtgagatttatccattcatctctcaatctattttctttcttcattcactagccactc

SEQ ID NO: 66500 - DNA, 122 bp, Homo sapiens
ccatgagacactggaagagtctacaagaacacagtgatttatggtgggggctttgcaccacgtattattgctgtatctccacagagggtaaaaactaggtcagccacacaggcagtcagctg

SEQ ID NO: 66501 - DNA, 122 bp, Homo sapiens
aggtgtccttgaagcgcattctcaggtcggaatcttgcattcagaggttccaggctgagtcgcacaacctgaaggccagcccgatgcaacgaaactgcggtaccgcaactcctctgcctggc

SEQ ID NO: 66502 - DNA, 122 bp, Homo sapiens
gttgtgatgggagaaaagggttggctgctggaaacagtatggtgccctggaggctgcgtacgtacacaccctaagaattcacatcaccattagcagaagattagaagtcaatggatatggat

SEQ ID NO: 66503 - DNA, 122 bp, Homo sapiens
ccatgagtcagaagcaggagaggcttttgagcagtcacagtccagcaagcaccaccttaacggtaggcagctactgtgcagatgcctgcctgagcctccctcttggccagaggcagtcacag

SEQ ID NO: 66504 - DNA, 122 bp, Homo sapiens
gctctttcctttccaccaaccctctcccgctcacccacagagcccgacctgccacacacacggctcccaggtgagctccgtccccgccccgcccagccaccaaggtcaccttccgaaggaac

SEQ ID NO: 66505 - DNA, 122 bp, Homo sapiens
acggacagacgctgccctaccagggattcggaggacctggtgggcaagagcatgacccagcgactcccgcctcgggcaagcgcccccggcttccagcgctgggagcgccctgggcacgccgg

SEQ ID NO: 66506 - DNA, 122 bp, Homo sapiens
agtgtggctggaaagtaaaagggagagcaaggtggggatcagatctgctgggccaataaccgcttaaacatcatgggttttatgttgagagcttgggaaggttgtgtttttaaatgattgct

SEQ ID NO: 66507 - DNA, 122 bp, Homo sapiens
tcaaacagcgccgcctcattgaaggagacccggcggcccgtggagctggtggacaggaagcgttcggtctccgcatcctggcactcggggtcctctccccggaagtcggggtctgcgtggag

SEQ ID NO: 66508 - DNA, 122 bp, Homo sapiens
ggaattatcatccaacacctctgtccccgataaatccctttaattcaaaaaaccatagcccggttcggcgcggtagaaaagaaccaagaaagggaagaggagcccagaaatcaacccgctgc

SEQ ID NO: 66509 - DNA, 122 bp, Homo sapiens
cataggattcagactctacttacaagttctttatttaaaaagtgcactctgggccgggcgcggtggctcacgcctgtaatcccagcactttcggaggctgaggcaggaggatcacgaggtca

SEQ ID NO: 66510 - DNA, 122 bp, Homo sapiens
ggcgcagtgcacaggccattgacattccctacagcagagtcccctcgacctaggtgtgcccggtgcccagtggactggcccttcactgtgcctccatctctgcctctcctcctggggtcgtg

SEQ ID NO: 66511 - DNA, 122 bp, Homo sapiens
ttctgggagggacccgggggtgctgcctagggagaagggcttaactactctgacttccaccgaagagtttctcagagaatgcgccctcgcagctttccctgaataaacattaccaggactta

SEQ ID NO: 66512 - DNA, 122 bp, Homo sapiens
acgcgcgggttttggccgggtcagcgcgcatacgcacacaggcacacccactcctggtcccgggggaaggctcactcttcggttttccagggctaaaggccaaggccacgcggatttctgag

SEQ ID NO: 66513 - DNA, 122 bp, Homo sapiens
ggacgaagagggtaaaagcttagccgacaaattgtaaggagatctcaaggtcgtgcaagtcgaaagtccttaaagtcctggtcctgctgagaagctcctaatagatattatcttcttttatt

SEQ ID NO: 66514 - DNA, 122 bp, Homo sapiens
tctggatgtagcgtcggtggaacctttagatactctcctctggaaaagccaccatgaattcggtagctgggaataaagagaggcttgcggtctccaccaggggcaagaaatacggggtaagt

SEQ ID NO: 66515 - DNA, 122 bp, Homo sapiens
ggttccctggtaaaactccaactggcctgtgcactgctctggggtggagccacagaagttcgctcctcagtttgcagctgggaggagcctggccctcctcttcctcgggagaacctgggatt

SEQ ID NO: 66516 - DNA, 122 bp, Homo sapiens
gccgccctcgccccccaaccccagcgctaacgttgcgggaggaatgaacgaatgaaggaacgagaccagacaggagccctgggacccagcactcaccaaagcgcttccgggtccaccagtgt

SEQ ID NO: 66517 - DNA, 122 bp, Homo sapiens
tcacacaagagtcactcattggattttctactccacgcacacgctgtcaataatggcaggcgccacctaaaggggcaggtgccagtgtaatttaacaggggagaaaaagtacagaggccacc

SEQ ID NO: 66518 - DNA, 122 bp, Homo sapiens
cgctgtcccttttttcacaacaattccttcagttgcattttcccatatggccgggccaagcgtggtgaatatgcaaagcaggaagagaccattcctggcgggcgggggaggccgcggcgctg

SEQ ID NO: 66519 - DNA, 122 bp, Homo sapiens
tggcaaccttgaggcttcttcgattatattatttcccctctggcccttcatagttgccaccgaaaagattctccctggccttcaaatctgtcccttcatctgaccagaaatattatcaagtc

SEQ ID NO: 66520 - DNA, 122 bp, Homo sapiens
ggtgttacaatagtatgcaagaccctgagcccaggatcctagccccatagccactccaaacgcttgcacctggattgcagcaccatggcagctgcttgtaggatatgtaagacctgccacca

SEQ ID NO: 66521 - DNA, 122 bp, Homo sapiens
ggagcgcggcctagcggctgcctttaacacaaagaaacaaacaaaactcggaaaagcaggcgccgttcccgctgaggccggattgatggcagatgctaggcgaggaaagatatggcaagagc

SEQ ID NO: 66522 - DNA, 122 bp, Homo sapiens
ggcctttgcaccggcagctctaggcctgatgtgtcctgccctcaggcccctctgtagagacggggatgtcttccttgccctacgtcagccgggtcggaggtcacctacccccgcgaaaacct

SEQ ID NO: 66523 - DNA, 122 bp, Homo sapiens
cggggcacggccgcaggcgtggtctgggggtgcggcctgagggcggaccccctgaggccccgccccaccccaaccccaaccgggcgtcccccagccgcgcccccagcgggaccgagcgtgac

SEQ ID NO: 66524 - DNA, 122 bp, Homo sapiens
ataataataataacctggcatcttgttttgatttaagtatgaaaagccggtgtctgcaggcggctgctgagctaagcgcttttcctgctggggcaccgtggagctgttgtcagaggtgcggg

SEQ ID NO: 66525 - DNA, 122 bp, Homo sapiens
agatgaaaccttttccaagggtttttcagtgggagagatgcatgatgtaattgctggtgacgaggattgctagggcttctctgtggagccaagattacaggggaagagagtggaagcaggtg

SEQ ID NO: 66526 - DNA, 122 bp, Homo sapiens
ggtgtcctctgccacccacaggctagctgagcaccgcgtgcggaatgctgggtaccctcccgctcaaagcagggctgtgtgtaagttattatatttatttacaacagagtctcagtcgattt

SEQ ID NO: 66527 - DNA, 122 bp, Homo sapiens
ttacacaatagaaacttattttcctgcagttctggaggctgaaagtccaggacaaggtgtcgacagctttagattcttctgaggcctctctgcttggcttgcagatggctgccttcttactg

SEQ ID NO: 66528 - DNA, 122 bp, Homo sapiens
cggactgagggcgacgagtgccgggtccctaagagaagccgagcccggccccgcccccgccggccccgcctccttgtaggccccgcccccagccgccaagtcctgcctccggataggccccg

SEQ ID NO: 66529 - DNA, 122 bp, Homo sapiens
tttcagtcatggatttaaaggtatttgatgggtttgagttgcaattattatcctttttgacggtcaagttgtctcccatttggtcagtggtagccttttccagttggctccagagtcctttt

SEQ ID NO: 66530 - DNA, 122 bp, Homo sapiens
ggcgtcagtggcttgttggagttggcaggcggaggcaggtggtccagcgggctgcgccgccgctcctcccccggcgccgccttgccgtcctccttggaagtcatctcggccttgttcggggt

SEQ ID NO: 66531 - DNA, 122 bp, Homo sapiens
actatcatcacacattacttttatttcatcgaatatttcaccttccggtcctgcgtgggccgagaggattgccgtacgcatgtctgtacgtatgcatgtaactcacagccccttcctgcccg

SEQ ID NO: 66532 - DNA, 122 bp, Homo sapiens
agcggctccagggagaggccatgctttccaggtcttctccggcactccccacaaagccagcgactccaattatgactcctgagctgagaggcctgccaaggtcatcccacgggggctgctgg

SEQ ID NO: 66533 - DNA, 122 bp, Homo sapiens
gtttcaaagagatgctcaaggaaaggctcacatagaaggcaacatagcactgagggtcaacggggagccctgggcttcttggggcaaccaacaggaagcagattgtccttgatgttctcata

SEQ ID NO: 66534 - DNA, 122 bp, Homo sapiens
ccaacggcaattacaggaacctaatggccttcctgccgcaccgctccgtggcacccggctcgctgtgatgaattgctcattatgtgcagtgttggaatagcctccacaagattaataattgg

SEQ ID NO: 66535 - DNA, 122 bp, Homo sapiens
aaaaatgatttcagtgaacctttatctgaaaggatataaccatgtcctgatggaatactgcgatgggcaggtagaagggaatgagatgggccaggcgcagtggcttacgcctgtaatcccag

SEQ ID NO: 66536 - DNA, 122 bp, Homo sapiens
ccagctcgcccagattcaccctcaggccttttgccatctgaaaagggcctatcggatgcgcgacatcacgagtgacgcgtagtcattttcccacgtcccgtccctgccccctcctagtggga

SEQ ID NO: 66537 - DNA, 122 bp, Homo sapiens
caatcctcctctttcggaaaacaaaactaggaagtatggaaagaaagaggccattaaccacgaaaagaaaagcccaaaggaggccctgagggcatcccctagtcctcctcacctcagtaaag

SEQ ID NO: 66538 - DNA, 122 bp, Homo sapiens
tctattagaagccatgggtcacggaagagaaccgtggaacccagtgacaagtgttcagctcgattacgaccaacccgggcacttaaccgtgcaggaatgatggcaagcctttagcccgattt

SEQ ID NO: 66539 - DNA, 122 bp, Homo sapiens
ccaggctgcataccgtcggtgctcagagttgggccctgtgagcccatgtccccatgtccccgaggtgctcaagtcagtagaagacagggtgggaggtcaggacactgccatcggggtgcaca

SEQ ID NO: 66540 - DNA, 122 bp, Homo sapiens
ttggtaccaggccctggggtgatccctttttcatgccgatgccctgattcctcacactcccgggaaagggtcccttggcccattttgtacacaagaaaactggctctaataggagcgatgga

SEQ ID NO: 66541 - DNA, 122 bp, Homo sapiens
agacagatccaggcggacgcccagaggcgtgtgagctggggctacaggcttgcaaggtatcgagttcaccggctgctgaaaaatcagttatgaaggtatacgtaggggtgggacagtgaatg

SEQ ID NO: 66542 - DNA, 122 bp, Homo sapiens
cgccagtcccggtgcgcagcgcggcagctgcgccagctgttgacaactgtctcattccaccgccgcagctaccacgccttttgctgcttgctacttgccgtgggagtctgcgagccgggagc

SEQ ID NO: 66543 - DNA, 122 bp, Homo sapiens
ccaaagtcgtgaaattgggaattttttaatcatttatttagaaatatgagtagataccatcgagcaggagtcataagtagcttaaagtcacttcaagtctaaagagaactaaaataaattta

SEQ ID NO: 66544 - DNA, 122 bp, Homo sapiens
gcgggcgaggaaaatggggcgccccacagaggagggggcgtggggggggctggttttccccgagactgagaaatgaatttctgcacccggactgggaccccctgggtcaggaccctccactc

SEQ ID NO: 66545 - DNA, 122 bp, Homo sapiens
ggtcccctcctcctcaaccacctggctgggagagggctcgtaccctcctgctttgggctgcgttctcactttcacccagacctcacgctcctaaacacctccttggatttgggcacatacgc

SEQ ID NO: 66546 - DNA, 122 bp, Homo sapiens
ccgtcctgaagactgtccgctggagaagtgacggcggcgctagccaatcagaggcctgatcggggtcgtgatcggcggactaaagggcgggcggagaaggaagcggcatgaagaaggcgaaa

SEQ ID NO: 66547 - DNA, 122 bp, Homo sapiens
cattacaggagtgaatcccgcggggactcacatttcatccagccaacattccagggcattcgttttgtggtgtgcaataggcagacagtaacatttggcaacagtggtgagagggtattggg

SEQ ID NO: 66548 - DNA, 122 bp, Homo sapiens
cgaaattctataaacctgtcagattaagtttcttaactctgaaagaatattgcatgttcccgctcccccttttctgttttctttcccctccctccttttccccattactccctgccttcctc

SEQ ID NO: 66549 - DNA, 122 bp, Homo sapiens
gctggggatgtagagggcggattttggagggtcattattaagaggcttccgaccactgggcggcacccttggtctaacggacaatgcgggggaggaggacgaagaccgacacttccagaagc

SEQ ID NO: 66550 - DNA, 122 bp, Homo sapiens
agcagcctcttggccactggcggtcacagcttgacgcaggcctgtgcctgccaaagccaccgtgctggctcctggttccaggaaaaggataccatgaagcaaacttcttgaatgatggctct

SEQ ID NO: 66551 - DNA, 122 bp, Homo sapiens
gtttgatcaaatgttacatccacacatctaaatttcaaagctaagggcaaagtatggagtcgacatatgagcccttttttagttaagacattttgaatatgcctgcctttatctgcaccata

SEQ ID NO: 66552 - DNA, 122 bp, Homo sapiens
tctgtgcaggacgctgcccctccccgtccagctgagctttcctgaggaagctctggatgtcgcccgtgtctgttgctcatgtgtttgtttctcccttttgcttctctgccggctcagaggag

SEQ ID NO: 66553 - DNA, 122 bp, Homo sapiens
tttccccgcctcccaaccgtgaggtgttgggtttgggggacgctggcagctgggttctcccggttcccttgggcaggtgcagggtcgggttcaaagcctccggaacgcgttttggcctgatt

SEQ ID NO: 66554 - DNA, 122 bp, Homo sapiens
ggtcgacagaccgggaggaacgctcgagggagcaccaggcctgttacaacgagcgcgcgccgacgcacgtctccacccacccggcgcaaccgccagagcgcgctcccagcaaccgcggctct

SEQ ID NO: 66555 - DNA, 122 bp, Homo sapiens
acgttaatgctggtccgaattccaaagggaggaggagggtctagtgaggcgggtcccacccggcctttcccatcagagcccgaactcgcggttcaggttccctctaggacgcccttggccga

SEQ ID NO: 66556 - DNA, 122 bp, Homo sapiens
ctccctctctcggcccggccggggtcgcctcgcggcgccgggacccgaaggccaggctcgcgggcccctcccagcgacagcccgagcccggcccgctatctccaccgcatctcacaggctga

SEQ ID NO: 66557 - DNA, 122 bp, Homo sapiens
tgaaaaaagccctgtctgagaataattcttgtgtctgagcccaagatgctgtcaccttgccgtggatcgttaaagtactcagtgtgctcccatcctcagagctgtgccctgagacagcctaa

SEQ ID NO: 66558 - DNA, 122 bp, Homo sapiens
cccagattaattggatgcagcctcagactttgaacgtcagagctggctggggggtgtgtgcgctggtgtgtttgagtgtgaaatgtgctaataaggaggagagacctctcctttgcaatgtg

SEQ ID NO: 66559 - DNA, 122 bp, Homo sapiens
accactttttgttgttgaatgcctatacatcttttttaagacccaggttgaatgtatatacgttcatttgacaagtgtttgagtctcattgtgtgacaagccttttgctatgtgctgagtac

SEQ ID NO: 66560 - DNA, 122 bp, Homo sapiens
agccgtaggcgttctttcctgcccccccagcctcccgcaacggatgtactccgagcccttcgaactctcggggtaccagtgagaactctgaactgagagtttcttctgagatccggcaaagc

SEQ ID NO: 66561 - DNA, 122 bp, Homo sapiens
caacccttgccctgatcactctctttgggggtgtttttgaggctctagggagctgatgtgcgggcaaaggttataatccagaaaatgctctacaaatttaagtaaggttttggcagaattgg

SEQ ID NO: 66562 - DNA, 122 bp, Homo sapiens
accgcgcagcctttgatgacccccgctgccttcccgccaatcctacatccaatcagagagcgtccccagtacacatgttgagcaatggccaatcagaactgggatccggccctcagcccgcc

SEQ ID NO: 66563 - DNA, 122 bp, Homo sapiens
agggacccggagacgtgggctttgtcagtttaacagattctgcctccgggaaccaactgccgggagattctgattggctcagccgcgtgcccacgtgaccgaccaaaaccggccaccagggt

SEQ ID NO: 66564 - DNA, 122 bp, Homo sapiens
gcctggtggtggtggaggacctgcactctggcgcccagcagcactggtccggccactctgcggagatctccacgctggccctcagccacagtgcccaggtgcccgcctgcatcgccctcctc

SEQ ID NO: 66565 - DNA, 122 bp, Homo sapiens
ctgcaaagtgaggaaaggtaggttccccttcctagggatcgcagcagtcccacgctccgccggactcctggcaaacagcagacgcccaattcctgcgcgccgagtcgtctgagccgcactga

SEQ ID NO: 66566 - DNA, 122 bp, Homo sapiens
ccagcgtgcacgcgtctccgccacgcctcactcccgtctgcgcctggatccaccgccacccgcttgtataaaaagtgggccccacacggtgcagcttcgtagtctgcaaagaaaatgtccaa

SEQ ID NO: 66567 - DNA, 122 bp, Homo sapiens
ctttttttcatacatgttatattaaatgcatgaggaatggaggtttacggtgtccacccccgccccccactttgtatcagccaatcatagaacggcatgcaaatgaacgcaaatgaatgcca

SEQ ID NO: 66568 - DNA, 122 bp, Homo sapiens
ctcacagcctggctgggtttgggctgggtgcctatttttagttgtcttctgttactgagccggatgaatactgccccttctttcagtttgctttggataatggccaaatgccaaaatctact

SEQ ID NO: 66569 - DNA, 122 bp, Homo sapiens
tggaagcttggctctaactctgtgcaagaccattccatgttagcgcttgaggcaggcaggcgcctgtcatctcattggcacaaagggccttggatcaagagagagcagaattagaaaacacc

SEQ ID NO: 66570 - DNA, 122 bp, Homo sapiens
atttctctaccgtcccagggagaataattggaaaagcgagccctgagtactcagcccacccgcccttctcctgctgaactgtcgaacgtagccaccagctagcctgagcttgttctgatgtc

SEQ ID NO: 66571 - DNA, 122 bp, Homo sapiens
tagcgacgggtagcaaactttgtccccttaagcgcaagagcaatcctcgcaaagtttgtgcggcggagcccactccctacctgagctggggaagctcccgcccgcgccgtgtggctgccggg

SEQ ID NO: 66572 - DNA, 122 bp, Homo sapiens
atgccttggccttacctaaactgaaaatcctgacaagaaaaacattctacacagtcatcacgtataaattatttctgaaattgtgttccatgaggcaaaagttccacaaaagattctggggg

SEQ ID NO: 66573 - DNA, 122 bp, Homo sapiens
ggggtcagggagttccctttcctagtcaaagaaaggggtgacagatggcacctggaaaatcgggtcactcccaccccgatactgcgcttttccgaccagcttaaaaaacggcgcaccaggag

SEQ ID NO: 66574 - DNA, 122 bp, Homo sapiens
catcctacaacagcagaattgagtagttgcaacagagaccttacagcccacaaagtctgacgtgtttactctctggacttttacggatgaacatgctaaactctggtctacccattgcttga

SEQ ID NO: 66575 - DNA, 122 bp, Homo sapiens
cctgacccaccccagggcgggctggtctccccttggggggccgggggccaagaatgggcgcgtcaactggggcaaattaacacgtaggaaaacaccccagcacctggagaaacaggagctgg

SEQ ID NO: 66576 - DNA, 122 bp, Homo sapiens
ccgccgcgcagcatccgtggggaccagattgcctgggtggaaggccatgaaccaggctgtcgaagcattggtgccctcatggcccatgtggacgccgtcatccgccactgcgcagggcggct

SEQ ID NO: 66577 - DNA, 122 bp, Homo sapiens
ggaaactgtcacaccttcacaacctcaatacccagctttgtggggccagcaggacttctccggtcctgcattcggtaattcaaattgagtatttctttagcaactcttgcaattctaataaa

SEQ ID NO: 66578 - DNA, 122 bp, Homo sapiens
ctcctgccagcaaactcctgttccagacagaaaacggccgacgctttaagtctcagtgagcgaccaaggggctgagacccaagtcaatccaaaacgcctctgagcgtaaaggagtcagtgat

SEQ ID NO: 66579 - DNA, 122 bp, Homo sapiens
ctgaaagtcgtgagagatttttgggtgtataacttgctgagtctgaggtagtctgattttcgtagccagcttgttattcgcagtattggtggcagtgcagatataaaggtataaagaccaag

SEQ ID NO: 66580 - DNA, 122 bp, Homo sapiens
cgtcactgccgcgaacgtgtgggacacccatcatcttaccacatcacatcgtcactgccgcgaacgtgtgggacacccatcatcttaccacatcacatcgtcactgcgtgaatgtttttctg

SEQ ID NO: 66581 - DNA, 122 bp, Homo sapiens
gtgggaccaggtcctcctccccagcctctaactggcccgggcggtcagcaggggccaatccgggcctggcttcaggccccgcccttcaccggccaaccggagctgcctctgggctggaagga

SEQ ID NO: 66582 - DNA, 122 bp, Homo sapiens
gctctggctcttcttggggcctccgctggtccgaccatctggcagctctcttaaccaccacggccaccccacgaatggaagtttgggacgtgcctgggttgcccttaaggaggacacccccg

SEQ ID NO: 66583 - DNA, 122 bp, Homo sapiens
ctgcagttctggtctggtagggttcctttgattcatgattctatcatcctatgtatccttcgctgttttggtcactcctaaaggcagcctacatttgaatgaggatgtgacattctaaattt

SEQ ID NO: 66584 - DNA, 122 bp, Homo sapiens
gtgataaaaggacctccacattttcaccatgtatatttggagcctgaatgctaaaacagtcgttattattgttctcatatatgaacacccacatgtcatggcccatgcagtcaatgattttg

SEQ ID NO: 66585 - DNA, 122 bp, Homo sapiens
agagctttctgcagtgatggatatattctttatctgcattgtccagtatgaagcatgtggcgattgtgcacttgaaatgtggatagtgcaaccaaggaattaaattattttactttattcta

SEQ ID NO: 66586 - DNA, 122 bp, Homo sapiens
tggggtatatattttttcggtttcggaatcacctctgcgctgacctccgcgtaggccgcacggcctaggcctcggagggccgctcgccgcctgctttctccgcagcccacccttgcggtcac

SEQ ID NO: 66587 - DNA, 122 bp, Homo sapiens
ggtgatgacggcgccgacctcttggcgctgttgtgagagtgaagtgggcgcgtggttagacgccagccacagttgtctttgggttatgtcgtcatgaagccggcgctctacagttgtgtaac

SEQ ID NO: 66588 - DNA, 122 bp, Homo sapiens
aacatgatcgcttataagccagcggtcccaattcggtccaccgctcagtctgcagtggtccgcccgaccgcgtcacgtgttcgtcaatttccttcctgcataaccggaagtctctctctcct

SEQ ID NO: 66589 - DNA, 122 bp, Homo sapiens
atttcaaggcctcgctggtggaggccacctggctgcccgcatacttcacctggctggcaacgcgccgcagctctgacggtcgcttccggtccttgagcccgatgtaggcgtgggagccgtcg

SEQ ID NO: 66590 - DNA, 122 bp, Homo sapiens
cgggcttctcatgggaggggcggacaagcgaggctcccccgagccagccaggggtgggggcggcggccgcagtgactcgggctggggagaggggcgcacagcagacccgcagagagccggct

SEQ ID NO: 66591 - DNA, 122 bp, Homo sapiens
ttccgcatgtgcggcttgctctccctttgcacgcactggaagtaggcgcagtgcacgcagcgctactccaaggggagcaagctctgcaggacgcgctgatcccctggcgtctgcgggtcctc

SEQ ID NO: 66592 - DNA, 122 bp, Homo sapiens
cgggcagggactcaacaagacgccaggaacctgggtcacttcctccccacgtggctacgccgtcagagaggcctggggaacccctgactgacaggtgattccaaccactgccacactgggtg

SEQ ID NO: 66593 - DNA, 122 bp, Homo sapiens
cctgccagctcagcgcccgcgccgcaggccccggagcccagcccgttgtctggccgcccgcgttccctgcacgctgggccgagcacacttgccctctagctccgtggcagccgcgcagcccc

SEQ ID NO: 66594 - DNA, 122 bp, Homo sapiens
attaacttgcggtgggggagaggaagtttcacggaagaggcaccatgagggtgaagttggcgagacagagaaaaggtcaggacattccaggccgaggcaaggcctgtgtacaggcctggtgg

SEQ ID NO: 66595 - DNA, 122 bp, Homo sapiens
tcgttccgcctcagcctccagagtagctgggaccacagggaccacaggcgcccgccacgacgctggcattgattgattgattgattgattgagagagaggtagcctccctgtgttgcccagg

SEQ ID NO: 66596 - DNA, 122 bp, Homo sapiens
gggctttgaagccgttcccaagcactctgacaccgatgggtggggagccgtgtccaggcacgagcgtgctcaccgagcgtcacaggcatgcagtgtcgttccccgagctgtgggtccattga

SEQ ID NO: 66597 - DNA, 122 bp, Homo sapiens
gctcagtcagtactatgtagatatcattagtgctgcgtcacactgactctcggtcagtaccgtgtagatatcattagtgctgcatcacactgacactcggtcagtaccgtgtagatatcagt

SEQ ID NO: 66598 - DNA, 122 bp, Homo sapiens
ggagctttctgttttatataccccaatacctgggtttcccatttcgggtataggtagaatcgagattacaggaaacccgaagccccctggccggggcagagcgggacccttgtttcccagtg

SEQ ID NO: 66599 - DNA, 122 bp, Homo sapiens
tccataatcagatgctcttccctaaaatgattgtgagtgcaatcattcattcacatgacacgggtataagagacactctcgccggcacggtggctcacacctgtaatcctagcactttggga

SEQ ID NO: 66600 - DNA, 122 bp, Homo sapiens
ctgcggtagaaagcccggcggcactcgccgcacttgtagggcttctcgccggtgtgggatcgctggtgcttgatgaggttggtgctctgggtgaaggctttctcgcactccgtgcacttgta

SEQ ID NO: 66601 - DNA, 122 bp, Homo sapiens
cgggatggagcgaagggtggcggggccaggaattccagggagggtctcctttcctcacaacgtctttgtccttgttcccctaggtacggacgtgcgggagcccgacgacagccctcaaggtg

SEQ ID NO: 66602 - DNA, 122 bp, Homo sapiens
ccgaaggtcaatgcctcttgacaccctaatcaaggaaataaaataaagctgactgagatccgctcggaaaatctttctggatctaaactcccagtgcgctttgcgccccaagtggccatcgc

SEQ ID NO: 66603 - DNA, 122 bp, Homo sapiens
gagccccacctccacgtgtgcccggggcgggtctcccagcagcaccacctcctccacccccgaagctgcttcttagaccaaaggcttgctccttgcaaaagactgaacagctgcatcgtttc

SEQ ID NO: 66604 - DNA, 122 bp, Homo sapiens
gtgaagaggtctataggctttttcacttttggttatctgctcaggcgctccttggggtcgcgcatggtctcggacagggtttgcaaggacttcggagctaaccagtttggagccataaccct

SEQ ID NO: 66605 - DNA, 122 bp, Homo sapiens
tccagcagtcctccacccgagctgagcctgcttcttctagggctgctcgccctctgatgtcgtttcatcgttttagggacgagggttcctgggcccatcagctttgggacctgagttgggac

SEQ ID NO: 66606 - DNA, 122 bp, Homo sapiens
accccctccttcccttcatccaaacaaggccctttggcgtgaataatagctcagcggctccgaagccgtattgatcggctgcaaacccggctccgccgagagctgccagggcttttcctggg

SEQ ID NO: 66607 - DNA, 122 bp, Homo sapiens
gttgggtcgagtggcggtgaggccgtggtcagaggtctggagggcgccccccatccaccccgtcttgggcacccccacttaatgctgacagtgagtggagcggactaatcccaatggcagtt

SEQ ID NO: 66608 - DNA, 122 bp, Homo sapiens
cgcgccgtgacctgtacaggtcgcgggagtcgtagggaggacgccgggacacctggaagccgagaaatggtgcgtgtgaggggtcaggcgtccccagacctgggggaggggctggttggaac

SEQ ID NO: 66609 - DNA, 122 bp, Homo sapiens
ccagcgcaccctcccagctgctggcccaggtgctaagcccctcactgcccggggccactccgagtacaggagcccgccaagcccacgcccatcaggaactctagctggcccgcaagcgccac

SEQ ID NO: 66610 - DNA, 122 bp, Homo sapiens
aaaaaggatgaaaggtaaattgttgccagattgtagcgtcctctagtggcagtctaaattcggactttattctgtgtcggaatcttccagaagaggagtggcataaaaaaattgatgctgtg

SEQ ID NO: 66611 - DNA, 122 bp, Homo sapiens
gttgggaccaggtgtgccatctgtacagagcagatttttttatcatctcttaacccactccgtgaccacacaggccaactcttagtctgtgtttctttgtcctgcttatctggtagggaaag

SEQ ID NO: 66612 - DNA, 122 bp, Homo sapiens
tatctccattttatagatgagaaaactgaggcccctggagtagtattaattttccaagaccgcattgctcaccaagggtacagcagggacccaagctcgacactctcacccttaaacatttc

SEQ ID NO: 66613 - DNA, 122 bp, Homo sapiens
taaattacaaagtgctggtttcgtctccagagaccagttggcgtttgcttctgaccaaaccgaaccaaccagagagtggatttcctaaaaatgatgtcagtcaagtccatctctctgacctc

SEQ ID NO: 66614 - DNA, 122 bp, Homo sapiens
gagctctttaaccaaacccaacctccccaattcgccgccttccccgctcccacaaccacacgttcccgtgtgagggcttattgcctccagccagccagcgtccttcgcccccacattcacga

SEQ ID NO: 66615 - DNA, 122 bp, Homo sapiens
actggcagctcttgtgtgtgtcattgattggtctgattgtccctctaggggcagcagtatcgctcatttgaactggccaaaaatagggaccctgagaaggaagggagctcggctttcctgag

SEQ ID NO: 66616 - DNA, 122 bp, Homo sapiens
gcttattgatataaaatcctgctgtgggcttaaagagaccagcaagcatgcattgcgttgcgtgttgaactgtagtaagttagaggcaagaaagaataaacaaatcagggctgtgaaaaggg

SEQ ID NO: 66617 - DNA, 122 bp, Homo sapiens
tatttattttttagtggaaaccaggtttcgctatgttggcctgggctcaagggatcctcccgccttggcctggggactacaagcatgcaccaccctgcccaccctatttttttttttttttt

SEQ ID NO: 66618 - DNA, 122 bp, Homo sapiens
ctccctccctgcgcctggcaggctgtgcgggttctggggacaggggccagtgtcgcaaagcgccgagggcttaaggagggcgacagtgccttctgttaggaccaccgcagagggcagggagc

SEQ ID NO: 66619 - DNA, 122 bp, Homo sapiens
cagatgccagggttaggattttgtttgttttcctttaataaacatccttacagtatatgacgagcctgtggctttcaagctgtggacatctggcctagctagatttctacttttgtttgttt

SEQ ID NO: 66620 - DNA, 122 bp, Homo sapiens
cgagttatttcccggatccgagtctgacgtcttttccccgccgcttgcggtggttgtgaccgaaccttgagttttggaacaggtcacatggctttgaaatcacggtcaattcacctggtgct

SEQ ID NO: 66621 - DNA, 122 bp, Homo sapiens
aactttctaatgtctctaagacgtgggtggcaagggtaggctgttagcactccagaataacgttgctatgcacccattcagggcttagcctcacagccaaactgagatccagaccccagaga

SEQ ID NO: 66622 - DNA, 122 bp, Homo sapiens
tgagacttccccacaggttaataaacaacctgtccggcacaggttaacaggagcctctctcgccctctcctgccccacccccgccaccttttaaggaagcttttgccttcccggaggtttgc

SEQ ID NO: 66623 - DNA, 122 bp, Homo sapiens
gaacagtgacatgtggggtcctttgggggtgccacagtccagctgggcacccccgggaggcggggcatccacccgtgccagggggcggcatgggcccggggcctgtcagtccccatcccctc

SEQ ID NO: 66624 - DNA, 122 bp, Homo sapiens
cgggataaagggtgacacggagaagagggtgtgagccatggggttcttcaagtgtggctccgaacatggcgacaaaagctgactcgaaaatactcattaccacgaacacagggttacattcc

SEQ ID NO: 66625 - DNA, 122 bp, Homo sapiens
tgggccacgacgacaggcacacctggcaactggtgataggtgcttggggcaaggggaaaacgtgggtgggaaattatataattctttaccaaaatggacttgaacctttccttgctcccatg

SEQ ID NO: 66626 - DNA, 122 bp, Homo sapiens
atttagggggagggggaggggggttcaaatcaaagttaaactctctaccgtatcgctcctcgctggcgattagcggaggagagaaaggaacagcaaatccaacacagaagctgtgaaactgg

SEQ ID NO: 66627 - DNA, 122 bp, Homo sapiens
tcagtagagcagaggtatcccgtgtcttacaggaccatgagtacctcagcagagcatagtcgttgactaggagcaacctgtaggaaccatgatttcagcacaagtttgctgatatatttctg

SEQ ID NO: 66628 - DNA, 122 bp, Homo sapiens
ctacttatcaaatcctgcttcttggaggcacttcttggacatgaagcaaaccttagggaccgatcattggggccagacccccttcccctgcccaagagtgtgactgacccccaggcatgggc

SEQ ID NO: 66629 - DNA, 122 bp, Homo sapiens
gatggggggggtggggccgcgaggcgggggcggggcctggcgctcggtggaaggggcgggcgctccataccatctggatggggcgagctaactccaaggaagggggtgtggtcgcaggactg

SEQ ID NO: 66630 - DNA, 122 bp, Homo sapiens
gggcctacgactgcggggcggggccggagcctgggacaggcgggacctgaggtggtggggcggggccggaacgtggagtgggcggggcctgaggctgtggggcgggaccggagcgcgggatg

SEQ ID NO: 66631 - DNA, 122 bp, Homo sapiens
tgcagttttgtcatattgattgctttgtagtagtgcatcaatgtcccaggttcactcaaacgctgtaacattttgaaaaattaataagtagcagggacaatggaaaattggttgttgcaagg

SEQ ID NO: 66632 - DNA, 122 bp, Homo sapiens
ttattccactgcctgctcatgttatactgtataaattccttgactgtcatttagtgcccccgtcacccatttcctgtccgtgtctcagtgtaacatatactcagctctggctgagcttgtga

SEQ ID NO: 66633 - DNA, 122 bp, Homo sapiens
cggggggtgagaggcaattataaccccagcgagcggagggcgcgggggatgggcgccgggcgggcgggggcggggagcgcggcgcgggtccccaggtggcgagcggaggtgctcccgccgcg

SEQ ID NO: 66634 - DNA, 122 bp, Homo sapiens
aaggcgccgccatggccagccgacttccggggtggggcttcctgccgcagagccgccttccgccctccctgggcgcccccgctagagggcccgcccccctcgctcagggctgggaggagaca

SEQ ID NO: 66635 - DNA, 122 bp, Homo sapiens
cctggtgagaaacgtttctgcctcgccttgaccttcccttgctccagacttgtaatcaaccgcacggattcctttgtaatagggactggtatttggaaatcaagatctggttgccaggtttg

SEQ ID NO: 66636 - DNA, 122 bp, Homo sapiens
gtggggggcagggggaggaccagtaaacacaattagtttcatcattcatagtgtctgtcccgggacaaatacaagccagcaactaccagcagcagcattgctattcctggaatggagacctg

SEQ ID NO: 66637 - DNA, 122 bp, Homo sapiens
gagacgaggaagggtgatcctgccaagtgtcttagaggagggcagaaccggaaatactagcgggcgcaccccagtgctgcataccacacatagaagaagtcagaatagttcctttagagagc

SEQ ID NO: 66638 - DNA, 122 bp, Homo sapiens
gcagaataaaatacataaaaataaacctcagctgctcagcaacgactgaaaaaccaccaccgggcaatccctccccatggccaccgagcaaagttccaccgcctcccctacgccgaccgccg

SEQ ID NO: 66639 - DNA, 122 bp, Homo sapiens
acagcagcctctcctctcccacggtggcgcttgtttggggctgtggccaaagtgtttgcccggcccctgactgtgtccttccggagctgccgaggactgcagagagggcctggcttgtcccc

SEQ ID NO: 66640 - DNA, 122 bp, Homo sapiens
aacataatttctgggctttatagacctagtgaaagagaacggcgcacggtttattctaatcgtccacctgagtcattcggttcggtttgggttgccaaggaggctctaactggagccctttc

SEQ ID NO: 66641 - DNA, 122 bp, Homo sapiens
ggcgtggttgcgaggggcggggcttgtcctgaccaggctcctccctgcagtatgtggtggcgcgtcctgagcagggagcgcttcttcggggcctgttcctgccctcgtgcccgggctgcggc

SEQ ID NO: 66642 - DNA, 122 bp, Homo sapiens
ctcaagtgatccacctgcctaggcctcccaaagtgctgggattacaggcgtgagccaccgcgcctggccaaggggtagctttttagcattgatttaaaattcagcataataatctggagatt

SEQ ID NO: 66643 - DNA, 122 bp, Homo sapiens
cttaagaaatcagaaaaatcaattgttcttctcttatatcaagaccaatccttaatgcatcgtgaaagactggaacacctgggtggcatatgcaagcatcatcggaattgatctcaggatcg

SEQ ID NO: 66644 - DNA, 122 bp, Homo sapiens
ggctactgccgccgggtcatgtgataatcaggctgcaagggctcaggctgctgcggtggccgttgctcagcccctcccctgccggcccaagcgagactcgcaccgggatcgtgacctcctgg

SEQ ID NO: 66645 - DNA, 122 bp, Homo sapiens
cgcgattgctccgagataacaaagcattggcagatgctggtggagcaggcctgcccttgacgtgggcaagaagcttggggaaaaagacaatttcctgcttgtcttttcttgtcaaaatacat

SEQ ID NO: 66646 - DNA, 122 bp, Homo sapiens
gggaggctgcgtagatgccgtttcagagcaggccagggtcggaggttggaagagccattccggagggcagggggtgttgacgggggcacagaggaatgccctgagcccgagccggcagcgaa

SEQ ID NO: 66647 - DNA, 122 bp, Homo sapiens
aaaaaaaaaaataccaatgtggcaggcaggctggtggctgtctgaggtcagtccagagtccggagaagcagcattttatttatttatttatttatttatttatttattgagtactgtcaccc

SEQ ID NO: 66648 - DNA, 122 bp, Homo sapiens
tgttaacttgtacaaggtctcactactagggtacatcttcagatcagacacactaagtaacgtgccagaaataaattcctcccatttaaagcatgtatgcgtgtggacagtaacacgtgaaa

SEQ ID NO: 66649 - DNA, 122 bp, Homo sapiens
aatatgtttctatcatttataagtcacccagcctatgggattttgttatagcagcccagacggatgaaggcagaccatgcccatgttttgcggtgctgccccacagcagtgggaaggccagc

SEQ ID NO: 66650 - DNA, 122 bp, Homo sapiens
ctcactagccccacccgggtcagggaatggttctatcacctcaggagagcagaggctccacggcttcagactccttggtttagaaagcgactacgtttccttggccttagaaggaaacagcc

SEQ ID NO: 66651 - DNA, 122 bp, Homo sapiens
gtgacattagctgagtcaggcttcattatgttcttctcatacagacttggcagcggctgacgtgcgtgcgcagctcccctgccttcaaggtggacggcgtaggcttcctaaaacacgacaca

SEQ ID NO: 66652 - DNA, 122 bp, Homo sapiens
taatgtagctactagaaattttaaaattaagcatgttgctcaccttatgtttctattggacggctctctctagacacaaaggctgccaagagggacctcactctggcttcagggagaagaga

SEQ ID NO: 66653 - DNA, 122 bp, Homo sapiens
gtaaggtttgcggtggccgctaggcgatgacaatcagcgaaggtctcttagattctgagccgttagggcttatggccttctcagaaaaaaataaaccttaccggatgatgtgaagggtatca

SEQ ID NO: 66654 - DNA, 122 bp, Homo sapiens
aaatgtgattttaacatcaattagaaaaccacgttctcctaaggcagtaattctcaatcccggcagtatgttacaatcagctaaggaagatttaaaaagattgaatgcaaatttctgagaga

SEQ ID NO: 66655 - DNA, 122 bp, Homo sapiens
ctcccccacccctcctgccccgagcagaaggagggcccgccaggatgtgggatgtggctccgctcctcgatcttgcttcaggagggctccagcaagggcaccagtgcccgcggcctcctctc

SEQ ID NO: 66656 - DNA, 122 bp, Homo sapiens
cagctctgtaccctctgctgtatgtgcagggccacagcccaggccctcgaggactgagggcgctggggcagctctggaggctgtccttggggaactccacctgctctggcctgctgtggcct

SEQ ID NO: 66657 - DNA, 122 bp, Homo sapiens
cttggcttggcctaggatggggcgcggccagaatgccttgcttaggggcgaggcccacagcgccccgatggctgcccagcgagcaactgagcaaccaggctgatgttacaggttctacaggt

SEQ ID NO: 66658 - DNA, 122 bp, Homo sapiens
tgctacactagtggttaagcaatttccaattcagaaaaaaaaagtgcagcttgctgccagcgcagttttctcggggcaaacgcaaaatgggttaataatgatttctgggcttctgataggat

SEQ ID NO: 66659 - DNA, 122 bp, Homo sapiens
ctgccaactcaaccgtcccatgccgccgctaatccgggacccacagccacgccgccgcagcggagtctgcgcgcccccagccctagaccgccaggccacgcccccgtcacgcgccgccagcg

SEQ ID NO: 66660 - DNA, 122 bp, Homo sapiens
ctgggggtagctggtgccctttttgttttacaaataaggaaaatgcggttctgggaggggcggttagggacccacactgccagtggcagagcctgaattagaagcaggaggccccctggagc

SEQ ID NO: 66661 - DNA, 122 bp, Homo sapiens
agctggagctgagaaggaggggtccgcaggcctcacctgcaacccctccccagccccatccgtgctccgtaccccccgccccacatcctgccgcaggctgaaggtaagtggccagctacggg

SEQ ID NO: 66662 - DNA, 122 bp, Homo sapiens
aaccacagggtcccctccacacacacccgagccccgcctcccgaccgcattggctcataccggcctcggcttcacgtctattggaaggaaccgctgtctatctctatgcctcctcatatcag

SEQ ID NO: 66663 - DNA, 122 bp, Homo sapiens
tgtccactcacccattcatgcactcacttatacattcatttattcctaagtatttatgagcgcctgcgcccaccacgtgctggcaagaattgggtttctccccttcctgggaagctgtaata

SEQ ID NO: 66664 - DNA, 122 bp, Homo sapiens
tgtccagcacattctgattgtggtcaatctcaacagaaacacatgtagtgaaatgaaggccgggtatgtgggtcttttcctacgctgcaaaatggattcattgttctgcggaatttgagcct

SEQ ID NO: 66665 - DNA, 122 bp, Homo sapiens
cgccctccctgcgccgggggcgggagcccagcgagcgcagagccccggccccgcgcggcccgagtgccacatcactgcgctggccgtccaaggtccgccgccccaccatgccgcccccgctg

SEQ ID NO: 66666 - DNA, 122 bp, Homo sapiens
tgtggcaggaccgaagcctgctcctcgtgtggggcccggcgcgaaaacagcttgtgcagccgctgagtgactgaggaccgtgtcccagtgtagtgtcatttcctcgtacatgtggagtttaa

SEQ ID NO: 66667 - DNA, 122 bp, Homo sapiens
agtactgtaccctgagctcagaagatgggcttgtactgcatgatgggcatgacaatgcaccggggctgtccctccctcctaaaggcagttaacatagcctttatgcagtgggttcctaggca

SEQ ID NO: 66668 - DNA, 122 bp, Homo sapiens
tacagctggatagtccaatgagtgtaagaaggcttctctacaaacacatgctgcccacatcgaagttcctctttaatctactgcagtttgaaattgtcccccactttctccaagagtccact

SEQ ID NO: 66669 - DNA, 122 bp, Homo sapiens
ggtgcggcggggatcaggaattctaaagggctgaggtgtcaaagccccaagtacctggtccgctggagggaccgagagagatcatctagggctggagtggggctggggcttcccctctgtct

SEQ ID NO: 66670 - DNA, 122 bp, Homo sapiens
gaaaggggagagcaggagcaatggcagaggagtccggagaggctcctgaggagtgtacttcgccttggaagttctccaggccctccgaggtggacgcgtgcagcacgggcactgaaccctga

SEQ ID NO: 66671 - DNA, 122 bp, Homo sapiens
cgacgggagcgctgcgggggctcaggcgtccgggtggctccggggggctccaggcgggggcgccatgggcggcgtggtgcggccagggccggcgggactcaagtgcggggcgggggcccagg

SEQ ID NO: 66672 - DNA, 122 bp, Homo sapiens
gtagtgccctgttatcacatcactgcatgtttatctctggccaccagctagagccatttgcgtggggtatagtactggaaactgtcaatggtgactgagacttgcttctgttattaaaagtt

SEQ ID NO: 66673 - DNA, 122 bp, Homo sapiens
cagcgcctcccaggcagccagcgagcgaagggagcgctctgggatgggacttggagcaagcggcggcggcggagacagaggcagaggcagaagctggggctccgtcctcgcctcccacgagc

SEQ ID NO: 66674 - DNA, 122 bp, Homo sapiens
tccagtcttgagtgtaaactcgtgtttacaggtcttaaagtcctgacctggtgatccgcccgcgtggacctcccaaagtgctggaattacaggcgtgagccaccactcctggcctatgccag

SEQ ID NO: 66675 - DNA, 122 bp, Homo sapiens
ccagtaacaagcgaagccaaccagccaagccgcgccaagcgaagccggtatgcccgaccgcgcatgcgcacctctgacagctcgtcactgcgcgtgcgcacaaccgacaggtggccaaccgt

SEQ ID NO: 66676 - DNA, 122 bp, Homo sapiens
tctccaccgtgcccttcctccaacccaggtgggctaccaaataaatgtgaactggaaaaacgtcacacacctctccccacacaggaaagggaaacaagtccttcttcctggtagcccatatc

SEQ ID NO: 66677 - DNA, 122 bp, Homo sapiens
ccaagccaattattttcatactaccattgagaactgacaacaaagatggtactaaaaactcgaaatcccctgacactcatacacagcccagaaaatcattaagttgtgttctcatctgtgct

SEQ ID NO: 66678 - DNA, 122 bp, Homo sapiens
aatttttttaagtttttaatgctgcagctatgtgtacagtcgcaaaaaatttccccgctgcgacctacaactaaaaacaaaaacaaaaacaaaaacaaaacaaaaaacaaacaaaaaagcta

SEQ ID NO: 66679 - DNA, 122 bp, Homo sapiens
cggagcacgagggtcgcaggtgcagaacagcgggaagatgcgctcccccagggggccaggcgcctggaaggcgtaaagcaggtcgagtgagcggccgtcgtagaaggccacgcggccccgct

SEQ ID NO: 66680 - DNA, 122 bp, Homo sapiens
tgccactctgaggactggacggagttccagacctgcctccggggacctcctgcgtgagggcggaggccctttcatgaccgtgagatgctccgggccttcctggtcagcatgagctgcagcct

SEQ ID NO: 66681 - DNA, 122 bp, Homo sapiens
aaaatgtacaccacacttacagcccttgtcagatatgtgagtatttgagacaagcagattcgccccaccattctaccccagtgagccaggagatgaggatggggcagcagcccactgctgca

SEQ ID NO: 66682 - DNA, 122 bp, Homo sapiens
ccctcagccgtgagtgacaatagaagcccttggtaacggggctctgaaaacgggtttgaccggatccagcgatagattctttaagccagaggtctgtaacctttttagcaccagaaccggtt

SEQ ID NO: 66683 - DNA, 122 bp, Homo sapiens
aaaaattatgttctaccaggacgccacggcctttctgtggcttttgtttcttaaaaccttcgcatttcatcctccatacgctcacaatggagggcaaacagattccatcatctacaggcttt

SEQ ID NO: 66684 - DNA, 122 bp, Homo sapiens
tcagtttatctcgccaacattgtgttagccagtgattcgcaggcgcttctgtgtctgctccgtgatgcttacactacaaagggcctgatgtgatgtatacctcggagcctgcattcgtctct

SEQ ID NO: 66685 - DNA, 122 bp, Homo sapiens
gaaaagtcccaccctcgggtcctagtggccctaggacggcgttgcgaagaatgaccgcggcgaagcccgcagcccctatccgctgcacctgcctagcccccaaggcggctccggccagagcc

SEQ ID NO: 66686 - DNA, 122 bp, Homo sapiens
aaggaacatcaacgatgccagccagagggccttcacatccacagaactgagtgccattgtcgttttctattgttaatttgtccagggacatattcaaaggagatcaagatgaagatggacat

SEQ ID NO: 66687 - DNA, 122 bp, Homo sapiens
cattaacgccccgcttcctcagcgactgcgttcaaatacagccccaatcaggacgctccacgcaccatcggtacacagacccacaggccgcgagtccatgcccagaactcgactcacccgag

SEQ ID NO: 66688 - DNA, 122 bp, Homo sapiens
aggaaagaccactctgaaaggccaggattccctgtggaactgactaagtctttagtttaacgccttcctttgtccagtcccacttcctttattcctccacaagtgttgataggagggtactg

SEQ ID NO: 66689 - DNA, 122 bp, Homo sapiens
tcgggggaagtcgtgggcccgggtactggcctggggctgggcgcagagcggtggtgagtgcggcggtgtcacacactcgttggctgtgctggcgctgctatccgggaggtcaggcggtgctg

SEQ ID NO: 66690 - DNA, 122 bp, Homo sapiens
ctactcaggtaccggggtccgcaaaaacaaaaccatcacctgttacgacaccacctcagacgagtacctgcgaagttatttcatctacagcatgtgcacgaccgtggccatgttctgtgtcc

SEQ ID NO: 66691 - DNA, 122 bp, Homo sapiens
cgtcgagtgcggtcgaggtcgggaggtttggtgcttggagggaggatacaggtttaggcccgacaaacacttagagcttgtgtggccatcttgtctttctaacggtgccatttcctccctga

SEQ ID NO: 66692 - DNA, 122 bp, Homo sapiens
cggcggcggcggcggccggtggcggccccccacgcaggccgtcctcctcctcggggggctcgtccagcagcactcggccccggcccagcttccacatggtcaggcgggctccggcgtccctc

SEQ ID NO: 66693 - DNA, 122 bp, Homo sapiens
aaagggagccgaaagagaccggagggagaggcgggtggagaagaattataagtcaggcaacgtatgcaggcagccagaagagatggggctaaacgccagggaatccgtcccttggcctgagg

SEQ ID NO: 66694 - DNA, 122 bp, Homo sapiens
agaaaggagtgagtgggctggctcgcagcctggcgtgacaagcaatgcataaatgtatgccgtatgagtcacctgtccacagtggccccagcagctctctctagcagggcttggccaagact

SEQ ID NO: 66695 - DNA, 122 bp, Homo sapiens
gcgccctgggcgcctggtcggccccaccgatgtgaagcgcgcgggtggcaatcaagtcaccgtctccgtttactccccgcagtgtggtcgcgcaacttggagcgcagcccctcactcaccga

SEQ ID NO: 66696 - DNA, 122 bp, Homo sapiens
caaacacgcaaacgggatgtgaccctccctaggcggcggagttggcctgggcagtgcttgcgacgcactggtcgactaagcaaaggagttgttaaggaacctcacaagtttgtcctctcatc

SEQ ID NO: 66697 - DNA, 122 bp, Homo sapiens
acctcacttccgcttccgcacgctgccacctctgattggctgttgctcaagtcgtgggggcgggaccaatgggcgcccttagatgctgggcatcccagcatgcgttgcgagatcccaggtcc

SEQ ID NO: 66698 - DNA, 122 bp, Homo sapiens
ccgggccttgacggctggaaccgtggagtaaagtctttgggctgcgcatgcgcgatgcttcgccctgccccacctctcggtcgcggattggcgggcgcgggtcacgtgggcacgccacccgc

SEQ ID NO: 66699 - DNA, 122 bp, Homo sapiens
aagccagcaggaagcctcagccttagaaacattagcggtagaaggaggtttggaatactgcggacttaatagaactacttttggttgcaagtaacagaaaatgtgactggaataggccatta

SEQ ID NO: 66700 - DNA, 122 bp, Homo sapiens
aggcactttagaagaataaaggaacgatgacaatgcaaatcagagccagtgaaggtcacacgttttgcataaagtgccttgcagtctaattcatgtgaacttcgcctgaggagaggaaagtg

SEQ ID NO: 66701 - DNA, 122 bp, Homo sapiens
tatgcgccctcccccaggtacctgaggcggttccgggagatgaagccgcgggtccttcagcgctggagccgccaaatcctgcggggacttcatttcctacactcccgggttcctcccatcct

SEQ ID NO: 66702 - DNA, 122 bp, Homo sapiens
atctgtcacgatgtcccttaatggctgggatatcttcccttccccttttctccactgttgcgacgattaggccccaacttgcacatctgccctacaggaggcagcaaggccctaaacttacg

SEQ ID NO: 66703 - DNA, 122 bp, Homo sapiens
attataaacataacgacatatcaaaaggaagtcttgactttcctactgagaattctacttcgctgagactcatggtaaagatgcaaaactggtataactcgaattcctgaaatgtaacttgc

SEQ ID NO: 66704 - DNA, 122 bp, Homo sapiens
tccaggttcttaacgctcttgatttttaccctctaggactcattgcgtacacgccctcaccgccgcccagtttcggttcctaacaaaagcacgttcctcatcagccacccataatcaagaca

SEQ ID NO: 66705 - DNA, 122 bp, Homo sapiens
gcagccaccatgtaagaataacttttgcctcctactgtgattctgaggcctccccaatcacgtggaactctaagcccaattaaacctctttttcttgccagtctcaggtatgtttttatcag

SEQ ID NO: 66706 - DNA, 122 bp, Homo sapiens
tcctcctcacctttcttttcggctctagggtccttggctgggtcggggtcgctgtaggcacgtggatagaaggcgggggcggcgggaaaggcagacgcacacttggccggtgaaggcgcgcg

SEQ ID NO: 66707 - DNA, 122 bp, Homo sapiens
acgacctcggtcgagcatgttcaccagggcccaggtgagacggattctgcagcgggtgcccgggaagcagcgatttggcatctaccggttcctgcccttcttttttgtcctgggaggaacga

SEQ ID NO: 66708 - DNA, 122 bp, Homo sapiens
ccgtgctgagcccttccagctctgccacgcgcaggaagccggtgcggtgacggcagcgcacgctcccaggcacctgcctttgcccacgccggggaggcgcttcctgtgagtcaggactcggg

SEQ ID NO: 66709 - DNA, 122 bp, Homo sapiens
gaaagaagggcctagccctctggtgaacaaagctcgattaggaggtgtccatgtggataccggtgacccctgtgcggccgtcggtctccacgccacgctgggcagggtccgggaaccagcgc

SEQ ID NO: 66710 - DNA, 122 bp, Homo sapiens
gcggacgggctgcactccaagcagctagctcctgcactaggctctcagccagggatgatgcgctgctgccgccgccgctgctgctgccggcaaccaccccatgccctgaggccgttgctgtt

SEQ ID NO: 66711 - DNA, 122 bp, Homo sapiens
cctgtttcctcacctggtaaataggtatgatgacctctgcctcccctgggcgactgctggcgccgtgaggtggtggacgtgcaggggtggccacacgcagggatggcaggtgcttgagagca

SEQ ID NO: 66712 - DNA, 122 bp, Homo sapiens
taagaaaaggaagtgtccaggccaacagcaaacaccaagagtgggtttggtcaatatttgcgcctctgtccactgagtctgctgtttgcatcagctatggtgagggcgcaggaggggccggt

SEQ ID NO: 66713 - DNA, 122 bp, Homo sapiens
gtaagggagagaaacagaaaaagaaaaagaaaaagaaaaaaagaaaagaaaaaccacacacgctggtgaagcaaggggctctatgcaaatctgcagtctccaaacagcaaatcactgaagct

SEQ ID NO: 66714 - DNA, 122 bp, Homo sapiens
gggcggtgcgccgggccgcgggcgcgcaaggaggggcgagagggtggggaggggcggggccggcgtcctcgtcacttgataaaacgcctgcgagtctccagagaacaacgggctcattcagc

SEQ ID NO: 66715 - DNA, 122 bp, Homo sapiens
cgggtcggacctatacccaaccacctgtgtgagagcttctttcaactagttttaacagcccgttggttaggcaccgggcggagccccgcgccagaacgactccaggatctcctactgccccg

SEQ ID NO: 66716 - DNA, 122 bp, Homo sapiens
gattgggtcagagaggggcacctgaccctagtgcagccagtttctaagctggcctgtggccgactcagagctctgctcaaaagagccatctattctgtgtggtgattggcttgctcagccag

SEQ ID NO: 66717 - DNA, 122 bp, Homo sapiens
ataaggggtcaagctctggacatggaagtcacaagcctggcaccggattcggggcatggccgggagccagggcagagctcgtcgttgccaaactcagagtcagcccatcccccgccacccag

SEQ ID NO: 66718 - DNA, 122 bp, Homo sapiens
tcttagcgtataatggaaaatgtgttgccatgtgaaatctagagcctctgttcactactccgcgaattgaaggcggcaggagtctttgtctcatttacacacagtgcctgcgagagactctt

SEQ ID NO: 66719 - DNA, 122 bp, Homo sapiens
gtagaagttgaagcggcttcagtgcaaaactaacattctctggatctttctcacgctgttcggaaagtagatcacccactgttatttccttttcctggcttttttttttttcctaacagaca

SEQ ID NO: 66720 - DNA, 122 bp, Homo sapiens
tgagcacggccacgatgaaaatgatgaggaggccgccagccactgcgatgctgacgatggcgggcaggctgagcgggctgtccggggcaatgtacaccatccccggggagtactccatgcca

SEQ ID NO: 66721 - DNA, 122 bp, Homo sapiens
agaatcggggttttgagggcgagatgagtttatgttttatccaactggccctcaaagtcccgcttttggggtcattctggacagcgagggactcaggccccggcagtctcgggagggtgagg

SEQ ID NO: 66722 - DNA, 122 bp, Homo sapiens
acataattcagctttgggtctcaaccagacatagggacacacagagtaagtcaggaaagccgtcatatggcttcctggatagctgaaattgcctcagcaaaggtatacaaataaagaaattt

SEQ ID NO: 66723 - DNA, 122 bp, Homo sapiens
tgagttttgagctaaaatatgctttactgaaggtaggtacaaaaacattcagaccactaacggctgatccagaaccagtttatgactcacagatgttgatttactggtataaatgtaagatt

SEQ ID NO: 66724 - DNA, 122 bp, Homo sapiens
tttgcggcagtgctggcccctaaatgcgtctttaaaatcctaattgcttttaattccatccgttacctgatgatttctttggccggagcacgtgctttactgtctatcctactctgcttttt

SEQ ID NO: 66725 - DNA, 122 bp, Homo sapiens
ttcttctggcttttccccctttctttttaaccattcatccagctctacagagcacaaggccgactacagaattagtttaaaagaaaaaaaaaaaattaagctactttccaagcaggtaaaat

SEQ ID NO: 66726 - DNA, 122 bp, Homo sapiens
gacggaccgagaagccctgccccgccagccgccccaacctggcaagcctggcttcccgggcgctgaaaaccccgtggctcagggatcgccgcgtagcacgctctggctctactcgggccctg

SEQ ID NO: 66727 - DNA, 122 bp, Homo sapiens
ccgccccgtcttaaagggatagtgcccttgagactcggatctcagcctctcaggcgaacccgaacctggacgcgctacgatgagagcgagttcgagtccaggctccactggctgggtagaaa

SEQ ID NO: 66728 - DNA, 122 bp, Homo sapiens
caactgcttcagcacattgtttacaagtgaccagatgtccacaaggaataaaaacaacagcgatatgtctgtccatgcagattttacaaagcttctcctcttgcagacgccttagcggctct

SEQ ID NO: 66729 - DNA, 122 bp, Homo sapiens
cccggggcagctcttgaaaaacaccagcatctacagatcccacagagaccttgacgcccacgttgccctgaggttagagacccccgaattggaagtgagcaggaactagacggtgcgggggc

SEQ ID NO: 66730 - DNA, 122 bp, Homo sapiens
cctaatccctggttttggaaatgctgcatttcactgcaaacccttctatgcaggctgacacggtatccccccaaaccctcgagggaggtgttgtgttttgtttttttttttcaacgcagcag

SEQ ID NO: 66731 - DNA, 122 bp, Homo sapiens
aacctaaagaatgaagtcatgccccggcctgcacccgggaaactgcacacagcgaaagatcgccactgagataaagagctgaaagctattccccaattcagctgtttcagccgtgcggtctc

SEQ ID NO: 66732 - DNA, 122 bp, Homo sapiens
cccgggccggcagcacgtgcacggtcatccaggacacagcccagggcctgcagcgggcaacggcttctgctgggagcacttccatctggaaaccagagaggtgtccacagagaaggggcagg

SEQ ID NO: 66733 - DNA, 122 bp, Homo sapiens
ccagaggggttggaggagactgaggaccttgggcagagaaagtgtttgaaggtgagaggccggacaccgggaagcatagtacactctcatctcagacaccacctccccggcagcgccacctc

SEQ ID NO: 66734 - DNA, 122 bp, Homo sapiens
ccaacttaaacgcctccaggggttctctcatcctggtttaagtccacggcctggtaagcacggcccgccccttctcacttcctactgtgctctcaccacttccacttcccccaacatgcctg

SEQ ID NO: 66735 - DNA, 122 bp, Homo sapiens
ccagggggagggccacacaccatgaccagctgggatccttttggttcataatcggcctctcggggtctggtggtacaaggggcagtgtaccagtggctgggaacacccccagacagccttga

SEQ ID NO: 66736 - DNA, 122 bp, Homo sapiens
ggcagcactctggttctgagaagtttacagcccatttccagaaaagccacgaatattcctcgccttgcttttaatattcaacattttctttagaggcattctgtattttaatcctctcattt

SEQ ID NO: 66737 - DNA, 122 bp, Homo sapiens
ggaaagcgggcacagaggtggccacccctgttcccctcctggcaccatgatggtcaggaccgccgggagcccatgcccacctccctcagctcccgtggtgcgcccgggggaaatgtggttgg

SEQ ID NO: 66738 - DNA, 122 bp, Homo sapiens
gggaccaagaccaggaaatctaaccaataagcaatggtaacagtgactcagtgctcagtccgccctcagtggcccgagtccgaggtgggcatcatggcaccagtttacatctcggaaaggga

SEQ ID NO: 66739 - DNA, 122 bp, Homo sapiens
agttctgcattcttggtctgcttcccagtgggacgagtaagcacgcagaggtcctccccacgcagccccgggctcggctttggaggagggcagcccgtctgccctgctacaaagcaagccaa

SEQ ID NO: 66740 - DNA, 122 bp, Homo sapiens
gattcactaacttgtcttcttcccgggtggaaccccactctcccttcagttactactgttcgccgggctagaatagtccttaacaatacacacacagccaataaacccatcaagctcaagac

SEQ ID NO: 66741 - DNA, 122 bp, Homo sapiens
cctaacccccagccccccaaacctcattccatcctcgtgccagtgaacacacctccgtcccgtgctccactgttaggtgagtcattctaaccagctctggtgttgggcaccttgcagatgtg

SEQ ID NO: 66742 - DNA, 122 bp, Homo sapiens
ttgaagctattattgtagtatagtgaaagattatagtggctaagattgatggggagacaccggaactggaaaaaatatgtatagattcaaaagataatcaggaaggagatttgatttaaaaa

SEQ ID NO: 66743 - DNA, 122 bp, Homo sapiens
aacggaaaccccaaggctgttcagaacaggccattctgagtctgctagtccagcaagcctcgccgcaggcagagtggggaggatttggccagcgggccctcctgggacagggaagctgcgag

SEQ ID NO: 66744 - DNA, 122 bp, Homo sapiens
ggggtctagggtgccttgcccttacctgttacctggcaccaggtgagctctgggagggggcgcgcagcaggctcgggtctggggtgcagtttccgcgctgctcattgaagactgcgccggac

SEQ ID NO: 66745 - DNA, 122 bp, Homo sapiens
agcccggcctatttcagcccggccaaaccgcttggtgacttggaggccgggccgaggccccgcccctcacctgctgatcctacccttggatgggacaaacagagggccctgctgggccggcc

SEQ ID NO: 66746 - DNA, 122 bp, Homo sapiens
gtgctgtgagcttgtcctgccttctttcaaggtagtatgtaatttggctggagagcaagacgggaacatgcagtaactcacaatgtgagacaataaatgaggctccgcatttggcttccatt

SEQ ID NO: 66747 - DNA, 122 bp, Homo sapiens
cacgtgtccctgcacatggccagcccacatgtgcagagtggcagcgcgccatgctccccacgggctcacccgtgcttccgcacacacgcgtgaagcacgtaagcaccgcacgatcacaggcc

SEQ ID NO: 66748 - DNA, 122 bp, Homo sapiens
ggaggttgtatttctccatattaaacctaggtattctgaggcttaggggggttagttaatcggcccaggatcccagagctgaaagtggaaattgtgatggaaacgaggcttctcctactcta

SEQ ID NO: 66749 - DNA, 122 bp, Homo sapiens
tctctaatcctgtgcccatgacagacatcaccagtcaaccacaacacagtatttaactaacgcaagtcaactcctcagaatctttaacattcttgtttgtgctactgtaccaatcaatcaat

SEQ ID NO: 66750 - DNA, 122 bp, Homo sapiens
gcgcccagagcgccttgttcgggatgggtttgtgcattcacgcttccccagataggtgaccggccccgcttgctcctcacaggctcctattcagaaggctgcatttatagaggaggctgtag

SEQ ID NO: 66751 - DNA, 122 bp, Homo sapiens
ctgaagggatacccaggcaatccccgaaactacaatgcccaaaatgctccaagtgggacgcgcccagagtgaaggagcaaaggggactcggccgccatgttaggagtactgggacgattccg

SEQ ID NO: 66752 - DNA, 122 bp, Homo sapiens
gccgatggcccgggggcgggccggggtctgggggtggttgtcccccatcggggcacagcccggcctctagccgcccggtagactccccgccccccacctcgccccggttcccggaggaaaag

SEQ ID NO: 66753 - DNA, 122 bp, Homo sapiens
cagggggcgccagtcacccagctaggaagtgaatggcgtcccttgctgtgatgcagtccacgacctgcacaccctcacatggcagcctgggcaggggcagatacactcacttctccatggcc

SEQ ID NO: 66754 - DNA, 122 bp, Homo sapiens
cctggtccggtttgctgaagcaacacacttggcctacccactgggtggggcaggaagtctcgagccttcacttggggtgaggaggagggagatcggtcagcagctttaccgcccgctctgct

SEQ ID NO: 66755 - DNA, 122 bp, Homo sapiens
tcatttctaacacgtttcggttacaagagatctgggtcccccttgattagaggagctgtccggaggcaaccttttcttggtaccttcttcctgacatatcaagacttgctgagactagggag

SEQ ID NO: 66756 - DNA, 122 bp, Homo sapiens
cacacaagccccagcacagccgcctgccgcagcctcccgcacacgctcctggggctgtgccgcagctgccactcggccagcagctcctgcaggcggcaccgtgtccccgtcacccacaccag

SEQ ID NO: 66757 - DNA, 122 bp, Homo sapiens
agtgcgccgagctctcccggcagtacagccaggttgttctggaggcattcccagcagcagcggccctgcgtcttcgccgccgcgcagctcgctctcgcctgggcccctgccgctgcagctgc

SEQ ID NO: 66758 - DNA, 122 bp, Homo sapiens
ggtgagcatgttgagttgaggagcagcaggacaggcacctgcaggcagcccccctggccacgttcccctccctcccttccaagtcctgggacagacgctcttcaccaaggggttcagcttct

SEQ ID NO: 66759 - DNA, 122 bp, Homo sapiens
ttcccttgatgtgaagtctccggaacaggcccttctttagagacggagagccaatgcgtgcggggcctggggagacgggagtggttgctcatgggtagggggttccttttggggtgacggaa

SEQ ID NO: 66760 - DNA, 122 bp, Homo sapiens
ataaagttataatagccaaaacagcatggtagtggcacaaaaaaataaacatagaggtcccggcgccactcggcccagagggaccggtccacggactggaccgccgggaccacccggcccgg

SEQ ID NO: 66761 - DNA, 122 bp, Homo sapiens
tataacagaactcaggataatcaagttaatcctttcttttttcttgacaccagtgatattcggagggctgtctcaccccaacattttttgaactaaatatatagaagttgtcacattttgac

SEQ ID NO: 66762 - DNA, 122 bp, Homo sapiens
aagtggaaaaaatttcacccatcctttggagatgtttgatagaagctgaacccacctcttcgttagtactgtgtgaaattggctgtgatgtgctcgtggttgaagggtatgtagtcagcaac

SEQ ID NO: 66763 - DNA, 122 bp, Homo sapiens
caggagcgcgcgcgcgcgcgcgccttccctcctgagttcccctctggaagcagcgattcccgaggcaaattaaatatccttgggcagggggaggcgggttgccaagtcccaacgttgcacgg

SEQ ID NO: 66764 - DNA, 122 bp, Homo sapiens
tggccagccaattctggcggggccaggtggagtcctccttctggtcctgtgaccttggcccgggacgcccaggcagagcctcagtttccccatctgctaggcggtaaggtcggtctccaaat

SEQ ID NO: 66765 - DNA, 122 bp, Homo sapiens
gttacgggttctttttgcttctctgcgcccagagctccagtccttctcttcactgctctgcgtcctctgctcctggaggccaagcctctgtggccttgtgtcctgcaagtattcgcagattt

SEQ ID NO: 66766 - DNA, 122 bp, Homo sapiens
tcaaggtctggggtgggccggacatctacattttatttatgagacagagtctcgttctgtcgcccaggctggagtacagtggtgatctcagctcactgcaacctccgcctcccaggttcaag

SEQ ID NO: 66767 - DNA, 122 bp, Homo sapiens
tttgtttccctggtggttggaatttgcagagttcgtctcagtggtggctgctaatttattcgtttcatcggtcgaaaggggcgtatagaggtgggtcagcggggcacaaccggatccctcta

SEQ ID NO: 66768 - DNA, 122 bp, Homo sapiens
cctcccccttcggcgggcaccgctagtaccgcgcaaccaaaccgccccctgctccaccgccgcctcctcaggccgctccgcccacagccagcaaggtaagggagccattcgagccgccttcg

SEQ ID NO: 66769 - DNA, 122 bp, Homo sapiens
gctgcagctacgtagcagtatccccttggatccggcctcccgcccagtgcctttggtcgccggctgccgcacccgagcctgtaactgacctggcgtccctgcccttgcctggcggcggtggg

SEQ ID NO: 66770 - DNA, 122 bp, Homo sapiens
ttttttggagatgacatttctgattttcagaaattaacataaaatccagaagcaagattccgtaagctgagaactctggacagttgatcagctttacctatggtgctttgcctttaactaga

SEQ ID NO: 66771 - DNA, 122 bp, Homo sapiens
tgaggagccacctgggggcctcagccatgaggggtgacaggtggcaaaacgggccagctccgttcacgtcgctgtgcagctgtctccgccctccatctccagaacgttctcacattcccaag

SEQ ID NO: 66772 - DNA, 122 bp, Homo sapiens
cggacccgctgcgggcactggaggacccggggctagagggcgccgctctcgcccggctcgcgcctcggctcccggaaaagcagctctgtccgccgttcggctgcgctcacctcctttccgct

SEQ ID NO: 66773 - DNA, 122 bp, Homo sapiens
cccggtgcctcactctgcagaccccagtcctccgggctaagcaggttgtcggtgaagaaacgcgtcgggtcagcaatctcgctgagcagcatcagctccgccatctttcccccccacccccc

SEQ ID NO: 66774 - DNA, 122 bp, Homo sapiens
tccacgggtttcaagatccgttgaaatgcttcaggtgtggtttgcattctcaccgaccctcgggccagttccctcgcccccaaccgccgttatttgttccccccacctacttcaatagttgc

SEQ ID NO: 66775 - DNA, 122 bp, Homo sapiens
tgacttgcatggacttgtgccctccctacccaggcccacagactcctgcacgcaaatcaacgaatgccccaattatggatctaggaaggcagaaggcaagtcatgttccaggctctgtgcca

SEQ ID NO: 66776 - DNA, 122 bp, Homo sapiens
tttaagctagattttagtttatggcagcttttaaccattctatacatccccttgtccttacgtgggagataataaagcttttgtgtatagccagatacaaggatagatgaaatgctgcaggt

SEQ ID NO: 66777 - DNA, 122 bp, Homo sapiens
ggaccaacacgaactccggagacgtctgggtgcagctgcctcaggccctgctgtcttcaacggggactgaggttgcagtttagctggctttcctgttcctgcttccccgggtccccctcaaa

SEQ ID NO: 66778 - DNA, 122 bp, Homo sapiens
tgagggagaggaatcctcctgggtttccagatcctgtaccagagagtgattctgagggtccgtcctgctctctgggacaattaagggatgaagtctctgagggagtggaggggaagacaatc

SEQ ID NO: 66779 - DNA, 122 bp, Homo sapiens
tttttttctctgtgtgtgaatctgtaaatatacggcttattattcttatttcagagcctgcgaggtcaagctgcagagaacatgagcttctacctccagatgtgccagggtgcatctcgtgg

SEQ ID NO: 66780 - DNA, 122 bp, Homo sapiens
gtgcgggcacctggggtgggaacagtggggggaccagggtgggcccctgggctccgaggccgccccaggcccgcccgcctaccggctctcagagaaagaacagggggccgcgcccgccccac

SEQ ID NO: 66781 - DNA, 122 bp, Homo sapiens
agcctccccttccagtctttctggacagctattaagcacttgcagccttcggaggctctgcgctctgatccgctgtttgagcccaacactttaatttattctttctggacactggagtcact

SEQ ID NO: 66782 - DNA, 122 bp, Homo sapiens
aagagtaaacgagcaggcaccactgtgacacccggagcagcgtctggcatgttgtaagtacgcagtaaacgcgcactcttatcactgcaatggcgggggccgcttccctgcattggtgagtt

SEQ ID NO: 66783 - DNA, 122 bp, Homo sapiens
ccgagagagttcttccagtcagaggtttgggaatgggggagaagggagtgcccggaatcccgacctcagaactgagcctccgaagtgggaaacagtggctcccccacacgctcaagggccag

SEQ ID NO: 66784 - DNA, 122 bp, Homo sapiens
aacaggctgatcctgcgctggcgagaagctcagccatttaggggaaagcgaaatcgaaagcggccgcctgctcactagataacgcctacttccaaaagtggcctgcccagactattttggta

SEQ ID NO: 66785 - DNA, 122 bp, Homo sapiens
ggcgccctggtctcctgcacggagctgcggtgagcacatccgggtcccgatggatgcatgcgtggggatggagggcgtgccctgagttgggtcaatgatgagaaccttatattgtcctgaag

SEQ ID NO: 66786 - DNA, 122 bp, Homo sapiens
ggagttgcgcggctggagtgagcccaagaccatcaggcatatcttaggacagcctaaccccgttttcccccccaccggccccaaatcctgcaggtccccggcctgtgacgttttaggaaagg

SEQ ID NO: 66787 - DNA, 122 bp, Homo sapiens
catgtgcaggtgtgttacatgttcattgtcagctcaacgcgtacacgtgcaggtgtgttacgtgttcattttcgactcaaggcgtacacgtgcagatgtgtcacatgttcattttcagctca

SEQ ID NO: 66788 - DNA, 122 bp, Homo sapiens
tctaggaattcggggcacacaggagcaatgaacaaaagtcagtcactcaacagatgggcacgaggcctctctattcccatgaatgttttttgtgtttgctatttttgcagtgctaaacacaa

SEQ ID NO: 66789 - DNA, 122 bp, Homo sapiens
agaaaagcaattcaataggctcttacaattaggttttgagttagcctttgaaaaacaggacgagcaaagaaagattttatttttaggcttatctgataagtttcctttgttgttgtagttgt

SEQ ID NO: 66790 - DNA, 122 bp, Homo sapiens
gaccatcacatccaggccactgccttactaaaagcctgcgaggacaagtcctccccgccacggagcctgggaaatggtcagcagactcgccctcccaccaacctctgtctgggttcccatct

SEQ ID NO: 66791 - DNA, 122 bp, Homo sapiens
gttgttttttttctttgtgggcggggtggtgtccgtttgtaaaaatgggaatagtcctcccgctacctacctcatagggttgggctcatatcaaaatagaaaacaaagccagggaacagtgg

SEQ ID NO: 66792 - DNA, 122 bp, Homo sapiens
agctgaagcataaagcaaatgtaggggtgagtgaaatcagtgttagaagtcccattctgacgactcagggaaacttggaaacggatgctttggggccactggatgtgtgtccgtaagagtgg

SEQ ID NO: 66793 - DNA, 122 bp, Homo sapiens
tgacggctatgatgccattgatggtgcaggtcagacagttcacggtgacgtctatgatgccgttgatggtgcaggtcacacagttcacggtgacgtctatgataccgttgatagtgcaggtc

SEQ ID NO: 66794 - DNA, 122 bp, Homo sapiens
gaataagcacgaggatgcctggagagccaggcactggcctgccctccctataccccaaggcgtcctgaaatctggcagggatggcaagcaggagggacccccaaaggtcatctgaatcccca

SEQ ID NO: 66795 - DNA, 122 bp, Homo sapiens
ccacgggcccccatctcacctggcacccctcagccagggtggcttctcccaggaagcactcggctcattttagattgattggtttaaccccagtctcgtttcagtagatcaggaagaacgtg

SEQ ID NO: 66796 - DNA, 122 bp, Homo sapiens
ggccaggcggcagaattttctttctcacttgccagggagccattccttctgcagctgtctcgcaggcatggacaacctgcgcgagactttcctcagcctcgaggatggcttgggctcctctg

SEQ ID NO: 66797 - DNA, 122 bp, Homo sapiens
gctacatatttctcacttttctgtgtgccagatttacaccttaaaaatagagatcaaggacgagcgagcttggaaccaagggaacactatatggggaacttagcttgtcatgtggcatctgg

SEQ ID NO: 66798 - DNA, 122 bp, Homo sapiens
gcgctgtgggcaagagcttttgccaaaggagaatggagaaaaagacggaagcacccaggccgactggactcaccgacgccccacacaagtgcctcgatctgcatctcttgcaaattatttat

SEQ ID NO: 66799 - DNA, 122 bp, Homo sapiens
atttgaggaaaggaggccgtttgaaattaccagttaggaataaaacaggcagatcacattcgtggctcaatcggattcccctataatcagagctaataactgtatttttctgctactaaaca

SEQ ID NO: 66800 - DNA, 122 bp, Homo sapiens
gccctgggtgggaactgagtgaaataaggcacaggccaccgatgtaaacagggacagtgccgcagaaaaaggtccacctgggctgcagcggccttggtgacagcaggccctggaacggtatt

SEQ ID NO: 66801 - DNA, 122 bp, Homo sapiens
tttacagctgctgcccacggctcacgttaacacctgagatccgcctcctgtcagatcagccgcagcattagattctcatagaagcgtggaccgtatcgtgagctgcatatgcaagggatcta

SEQ ID NO: 66802 - DNA, 122 bp, Homo sapiens
gaagaagacgccgagtgaggtcacggtgcccacgagggtggattcccctcggcctgaccacgccaggaggtggccgaagggaagagggtggggcaggggctgctctgcaccctctagcagag

SEQ ID NO: 66803 - DNA, 122 bp, Homo sapiens
aagctgagtgggatcattcctcttaagaattcttacagcagccagataagaggccaattccgtcagggagagagagaatgcgaggtggagggccctggtgggaagatgggctgttgttgccg

SEQ ID NO: 66804 - DNA, 122 bp, Homo sapiens
agaagtttcgcaggctgaaaaatcaatttgcccgcctggcacctgggtctggggcctccccgctaacatcagtggcaggcgaaatgtggcctcccctctgcctgccctgatgcgtcagacct

SEQ ID NO: 66805 - DNA, 122 bp, Homo sapiens
ccttccacatccctccctctgcaaagcctcacctgccccaggtgtgcttccagctgtgcccgttcgtctgtgggctgctgtaactgctggttagcatcaggggcttcacaccagctagataa

SEQ ID NO: 66806 - DNA, 122 bp, Homo sapiens
cgccagctgccagcctgccacctgcctcccccacccgccccgggcctcggcggccacggacgatgccaaagcccttcgcagcagccttggcagggacctggggctttcatcacttcgccatc

SEQ ID NO: 66807 - DNA, 122 bp, Homo sapiens
gtgggaagagataatctaaggtaagatactcaaaaaaggatttcaggcagcactgaaggacgctaactttctgatggtacagtgcttgtgacatcctctagcattgttaagaacctggaact

SEQ ID NO: 66808 - DNA, 122 bp, Homo sapiens
gagtgcactgcttatttatttttaaagttctctggagagctatctcctacctcttctccacgtggtaccattggaaatgtcttctccaacacatttctactattacacaagagggtcaaaca

SEQ ID NO: 66809 - DNA, 122 bp, Homo sapiens
ccaccccacagatcagttttcctagtctttgggaaacgggttgtgttttttttcctttgccgtgttggatttccggtcccggctgacacctcccttcgtgtgtgcgcccctccccacccctg

SEQ ID NO: 66810 - DNA, 122 bp, Homo sapiens
ctgcggcgcccgggcggccggcgagggcacagcgcagccatccaggggtaccctggagcccgacagaagcagggccgggctccagatgtcccctggcaattgcgccccgacccccgaaatgc

SEQ ID NO: 66811 - DNA, 122 bp, Homo sapiens
gtagaggccggagaagaaggcggtgccagggcgtcctgcggaagggccgggggcggggctcgtgacgttgccgggacagccaatcacgcctggttttatcagtggccccgcccttttaccgc

SEQ ID NO: 66812 - DNA, 122 bp, Homo sapiens
acacataacaagaagcctggaagaaggctcctctgtgtgtgttcagctgctcagggatgacgttaaggactcagtctctttccatgattccacatggccaccttcaacatcttgccttttct

SEQ ID NO: 66813 - DNA, 122 bp, Homo sapiens
tgtcagtaaaagaaacggttttaagaagggaaaacttttcaataattgtaacacacgtagcgagctgcttccccagtatttaaaaggagcagtatgctgctccttttaaacaaaaccctttt

SEQ ID NO: 66814 - DNA, 122 bp, Homo sapiens
cggggtggggtggagtggggtgtgcctccggcgggcggtcagcaagtcagtccgtccgagcgccggcgtcccggtctccagcgcccgcccgcgacagcgaccgggactggcgccccgctgct

SEQ ID NO: 66815 - DNA, 122 bp, Homo sapiens
gcgcagacacatgctaattttaataattattcaaaacaccccgtgctcccttagtgcctccgccagactccgctggagcttttgttcctgacgtccgtgctcagctctctccgctctcccct

SEQ ID NO: 66816 - DNA, 122 bp, Homo sapiens
attcccctttctcattcaattgcatctcaatttctgtaatgtaacattcatcacaattggcgagatactccatcatcagttttgcatgcttcttatacgccttaccaactgctcccttattg

SEQ ID NO: 66817 - DNA, 122 bp, Homo sapiens
gagcaaacaagttttcaggggtcaagaaatttgagcaagttcacattaacttgtaaatcacgaaattgagcatcagatacaagcatctggctgcacttcctgagtttgtacgtcctactctc

SEQ ID NO: 66818 - DNA, 122 bp, Homo sapiens
acctctatatgctctttctcaccaccaggccttcagaatgcagttggaaatgtgccctctcgtctgggtgtggtggctcatgcctgtcatcccagcactttgggaggccaaggtgggcagat

SEQ ID NO: 66819 - DNA, 122 bp, Homo sapiens
tgcggagaggcctgagtcccgccacagctacttcccaccagttccaaccagccctttcgccgtctctcgggatgtcggaccgggcactctcaccatttctaggcttctagggggtcctggcg

SEQ ID NO: 66820 - DNA, 122 bp, Homo sapiens
gttacgctgggactgccgcgtagaattgggacccgtcacaagagctgagttcccgaccctcgagccccctgcactgcggcacggagagaaatgccagcaggctgctctcaccgtagaccagt

SEQ ID NO: 66821 - DNA, 122 bp, Homo sapiens
cctaccctcccctcccctcccctccgcccccctccccttccggagcccggccccgcgcgccgccatgcctggtgccgcaccgccccctggtgcccacgtcaagcatggcgcggagcgactgc

SEQ ID NO: 66822 - DNA, 122 bp, Homo sapiens
ctaccccgaggaacgacctgcttaccccctgccttactcccttacctggaacagttccggcggattgtattctggttgggggatgaccttcggtcctgggaagccgccaagttgtttgcacg

SEQ ID NO: 66823 - DNA, 122 bp, Homo sapiens
cacctgagcccgaaattgtccctaacaaacccaacacccgcagggctgacgtttggactccggggtgcggtgtcgatgaaatgggcaccgcgtgctttccatgcaaaagacacgaagtctgg

SEQ ID NO: 66824 - DNA, 122 bp, Homo sapiens
gatgcagcatcctggcatccaaggaggtgccactaagtagctacaagatgtggggcctggcgagaggaaccacaaaagaacgcagaaaaaaaaagcaacaaaaagccagtgacaaagctgcg

SEQ ID NO: 66825 - DNA, 122 bp, Homo sapiens
atgtggcagggaaagctgagagcgccaaggtccccttgctttatcccaagctcggagggacgcagcctggcatggctctggcctagcagccaggtgacatggccaggcaccttcctgtacag

SEQ ID NO: 66826 - DNA, 122 bp, Homo sapiens
tccccgaggaaacccaagagctaccagaaatatggtggcctcttcttgaccttccgtgggcgtcaatcaggttgcggttggaagggagatgagtcacaggcctgtaatctgccacctgcttt

SEQ ID NO: 66827 - DNA, 122 bp, Homo sapiens
cctctacctcgaggcaggtggggcctgtggttcctagccgcccgaggtggccatcttccccggctgtggtccggtgtgccccttgtactccttaaccgcgcgcatctggctttaacaggtga

SEQ ID NO: 66828 - DNA, 122 bp, Homo sapiens
tcttttctcatctttgtctttagaaaaatctccgaggtagagaagagtgcagaaacagcacggatttgctccggagcgtttcccactctgcgcagtccgcctgacctctcctcttgcggacc

SEQ ID NO: 66829 - DNA, 122 bp, Homo sapiens
aaagcactgggtaccagccttctcagctcagacaaactgttattgatccggtctcgtcggcgcttctcaattatctgcagaaggcaagcaaaacaaaggaaggcattaccattacgactgta

SEQ ID NO: 66830 - DNA, 122 bp, Homo sapiens
caggtctttgcttaaatgtgtcactcctaagtccttatgaatacctcctcccctcagtcacggtctgccccattatcctggctttattatttagtagtactaatgactatataaaactgtag

SEQ ID NO: 66831 - DNA, 122 bp, Homo sapiens
cattaaaatgcaatcttcactaagaagcagtctctgtgttgtctttgcacaagtggccttcggtctactcagcccgatctgatgggcctttttagcaagagagaaacaagaatgcaagtaac

SEQ ID NO: 66832 - DNA, 122 bp, Homo sapiens
cactgggaagaagtccaccaatagccggtttgaaaactacggagacaagtttgcagagaacgatgtgattggctgctttgcggtgagtgctagcagcctgtgggagttggcagaaccagatg

SEQ ID NO: 66833 - DNA, 122 bp, Homo sapiens
cgcgttcggcgcgcacctgcccatcgaggcggcagggccagcaggcggcctaggcgcggccgggccacgcggcatcccccaaagctggagctcgccgactcttccctaccttttcaagagac

SEQ ID NO: 66834 - DNA, 122 bp, Homo sapiens
gctgggactgagagggatgactttgggggctaagctggggagggaggatgggagggagaacgtgtagctctgccacaccactgggaggcttttgctctaacccaacaaatgcctgcttcttt

SEQ ID NO: 66835 - DNA, 122 bp, Homo sapiens
gtgctaatctttatcccattacctgtgtcttcaggtatcacaagtttctgtgagagccaacgtgacagatttttagcaatgaaaaaagacacactcgccaaatcatctcaattgccaacgca

SEQ ID NO: 66836 - DNA, 122 bp, Homo sapiens
cctctgtcacccccaaacctgcccaccgcccgcctctacccgaccctccctcagggaaatcgggactcagcccccaacgcccccacctgccgctctgcccacctcagcgcacaccgccagag

SEQ ID NO: 66837 - DNA, 122 bp, Homo sapiens
cactccaccggttgactgaggtcgccgcccatctttccacccccgctgtgtgactctagacgattgtcttaacctctccgagccttagtaagtaggcaagtggaaaaagaagtcagaagact

SEQ ID NO: 66838 - DNA, 122 bp, Homo sapiens
cccctgtctcaaaaaaagaaaaattatttctatccatcaatagttgctaaccagtaggatcggagggaaaattgcaacgtgctttactttaggcttgcaggtacgaaagactgagggaggaa

SEQ ID NO: 66839 - DNA, 122 bp, Homo sapiens
gtagaagggtgtcgccctcaaagggagctctcccttcacctaccccggccccagcctcctcgggcatgaaggagctttaggctcttgctggaggggaaaatcctagccccagctagggaggg

SEQ ID NO: 66840 - DNA, 122 bp, Homo sapiens
tctttcatgagctggtggaaacaccggagcgcccgctcctggaaagccccgttctcatagcgctcatggccaaacgctccccgcttggcagcatccgccagctgtaactggaggaacaggac

SEQ ID NO: 66841 - DNA, 122 bp, Homo sapiens
ggggccccatctgagacccggatcttggtcacatacggggttaggcggaatggctggtaccgaggccctggatcccggtcaggacctcctctagcaaaggagagaggagcattagggacttt

SEQ ID NO: 66842 - DNA, 122 bp, Homo sapiens
aaaggagaagtgaaaaggccccagccggggtgaatcatcagtcctggggaagaacccaggcgcctgagccccagctccgggaagcaggcactggggagggggcttcaaggagggagtgcccc

SEQ ID NO: 66843 - DNA, 122 bp, Homo sapiens
tgctggggaagggatggaggtcaggtgacccgcccctctatctctacgtaggggagtctccggagtccctgggctgccccactgcagggacggggtggggcctctgggtggcagcacctcca

SEQ ID NO: 66844 - DNA, 122 bp, Homo sapiens
agccggaactccggacttctgcaaggccagacgtgaggcgacactgaattgctcccgagacgcgggaagggcgaaggcaatcgaagcgaagagctttaactcatcttctccaggatttgggg

SEQ ID NO: 66845 - DNA, 122 bp, Homo sapiens
tggcctaacccagcttagcacagaaacccacttcactagtcgtttttgaacaggctccctcgcagcatccgtagatcattcttcaaagagtaagaggagtaaaatgcggttctggcacttag

SEQ ID NO: 66846 - DNA, 122 bp, Homo sapiens
agaacggaggccaatttctcccctccccaggccaggacaccttcttacgcttttttaatgcggtaactcttaagaaaggaaggtatatttacaagaatgtagggttaagtgttttggagaca

SEQ ID NO: 66847 - DNA, 122 bp, Homo sapiens
gggaaggcttcactgaaaacagacgctcgacggaaaactgactctgcaggcccgagctttcggagtttgatttctgtgggccccttaaacgggcactgggtacaggagaggccccaactctc

SEQ ID NO: 66848 - DNA, 122 bp, Homo sapiens
tccccactccccgctcccccgtttctttgcttcccggacgccgtcctttaccccgcagtccgctctgcctgagaccccccgatagaggagctgcacccacgcccaagaccgattcactgggc

SEQ ID NO: 66849 - DNA, 122 bp, Homo sapiens
caaagcctctcggagccatttccgctaacgtactcagggcgacgggcgtaagatggcggccgcgcaggcgcaaaatgtcgcagccgtagggaggctccgcctctgacgcttgccttgcatca

SEQ ID NO: 66850 - DNA, 122 bp, Homo sapiens
cgcggccaggccgggcagctgttgatccccgggccattcttttaaagcccaggcagagcgcgggtgggaagcgtgcgaggagagctgagccagggagttgcggggaggagaaggtaagaatg

SEQ ID NO: 66851 - DNA, 122 bp, Homo sapiens
gccgtgcgggctgcaggggccccggtgcctccgaggcagcgcgtgggcgaggggtgcgcccgggccccagggccccaggcagcccggcttgccatgggcatccagggcatggagctgtgcgc

SEQ ID NO: 66852 - DNA, 122 bp, Homo sapiens
ctgggcatgctgcatcttaaccttttgtatttattccctcaccttctgcagggctccgtgcgggctgaaattaaagatttcttagaggctgcgtcgccagcgtcctgtttatcccctctgca

SEQ ID NO: 66853 - DNA, 122 bp, Homo sapiens
ctgggggcatttggacttccagaggactgtgcttgaaccaaacacacaggtctctcatgacggaactggaggcaccgaaggccactccgcaggagcggggctgactgcagggcctggccacg

SEQ ID NO: 66854 - DNA, 122 bp, Homo sapiens
cccggcggggagggcgggcgcctcggcctccccgccccggaaccctgcaccgcccagagccgccacgcctcccggctgtaggctccgcatctgtaaaatgggccgatgaaccccaagggtcg

SEQ ID NO: 66855 - DNA, 122 bp, Homo sapiens
cacaaaactttttacagatgtcccattccccggttcccctcgttcactccagagaccacacgacaccacgctctgcctagaccgggagtgggcagcacctgaagtggccatggctcatcctg

SEQ ID NO: 66856 - DNA, 122 bp, Homo sapiens
ccagttgtcccaggatctgctggcccaggacggtccggatgtagccgtactcagctggggcgccgggggctgccatggggccggtgggggcgaccgagctgctcgcctgcctctggactcgc

SEQ ID NO: 66857 - DNA, 122 bp, Homo sapiens
ccaccatctcacagtccaaggctaaggctcttgtcaggccgccgaaggccggctcttccacgagtctgaggctgacgctgccctcactgtgactcaactgtttcctcgctatcttggccacc

SEQ ID NO: 66858 - DNA, 122 bp, Homo sapiens
cctaggccagagagtgtggtcctgcagcacatccagtgctggggcacccacactgtgaaacggatgcagactctccaatgcaagtgtagacaacctggaacagcacagggcacagtgatcac

SEQ ID NO: 66859 - DNA, 122 bp, Homo sapiens
tcttggcttcaggtcagcacacacctcctggaatagtgccttagcttgcacttttgatgacggattgctcagtccttagcatctcttctttcctgtgtgtgtgtgcgcgcgcgtgtgtgtgt

SEQ ID NO: 66860 - DNA, 122 bp, Homo sapiens
tggcctctgtgctcatctttccaggacagagccccgtttggtgtttctggttctgtgctgcgtagagaacttggcaccctggtcctatgcacagaagaggagctttccgaaggctccgggag

SEQ ID NO: 66861 - DNA, 122 bp, Homo sapiens
ctcaaaacccccgcaacggtcccaaaccccttccagggactgggactacggaccctggtccgaccttctcgcgggcttcccactgcgccaatcaaatcccagaaacagtgagtgctagaggc

SEQ ID NO: 66862 - DNA, 122 bp, Homo sapiens
agcaagcaggaccctcaagaagggaggagagagaccactgggcgtgcagcactttgcactcgggggaagggctcctgaaacttggaagtcagcaaatatctgctgtacttcaccagaggtgg

SEQ ID NO: 66863 - DNA, 122 bp, Homo sapiens
ctgactgccttttgaggtggtcaataataggtgctaacattaaacttggagcagttaagtcggtgagctgtgtggttaccttgtcagtggagtgtgaaaaagactaagctgcggactgtttc

SEQ ID NO: 66864 - DNA, 122 bp, Homo sapiens
ctgggtgggagttgtctggatccatagggttggagccacagataacagagccattaatctcggggtctcagcctctcttaacggaccttccaggcactgctgagaaaaccaggttaatggtt

SEQ ID NO: 66865 - DNA, 122 bp, Homo sapiens
gcgcccctgagcggcctccaggagtgaagagccggccaaggccctgccaaggctgcagggcggggacacccagtgggggacgcccgggaggggaaacccttcgggcgggcggaccctcgggc

SEQ ID NO: 66866 - DNA, 122 bp, Homo sapiens
tgccctcagcccaccaggagccacggacgccggatcctcaggctgcactggtccctcaggcgtgggcctgtctgcagaataaacccggctgagcgcaaacctcaaaatccacgggaaccagg

SEQ ID NO: 66867 - DNA, 122 bp, Homo sapiens
cgcgggctggcgggggacccttcaggcccggccccgtttgggcctcggctcctggaaaagcgactcgcgcctctgggaagccgcagccccagactccagtcgcgcttctcgcccggcgccgc

SEQ ID NO: 66868 - DNA, 122 bp, Homo sapiens
tttgaaatgaaaatagaagtgacccttccccttatagcaattccggtctagtagaaaagacgtgcatgaagcaaagggtcaccctccaaatgaacaattaccactatgatgaggtcaaccca

SEQ ID NO: 66869 - DNA, 122 bp, Homo sapiens
tctgagaaaagggaggaaagaggcggggcctgcacggtgtgtccccgccctccaggccggcgtcaactctcattggctcagcgccacgcgggactttaaactcccgctcgagacaccgcccc

SEQ ID NO: 66870 - DNA, 122 bp, Homo sapiens
tcctccatcccaccaaaaataacccacaatgactccaaatcttgtttttcttttttaaaacgctattctcttgggactaaactgttcagaataatcagtattcttattccctttccactgta

SEQ ID NO: 66871 - DNA, 122 bp, Homo sapiens
acggccacgcggctctcgggagccgtttcctgcgctcgggctctgcaccggcaggctccacgctgagggtccctccacatccaccccatcgtgggagggaggctcagtgctctgcaggggcc

SEQ ID NO: 66872 - DNA, 122 bp, Homo sapiens
gccatttccccgtcctgagctgttgctcatatcaaatgtcactcggggatgactaagagccgatgttgatgaggagccttcagcgttacggtaaaggagctcgtgcaaacttagaccccagt

SEQ ID NO: 66873 - DNA, 122 bp, Homo sapiens
gaaatatcaccttctaatttagactggcttaattccgtcacgcaaaaatagcaacagccccggggctgcgagatgggatatcaggtctctcctggcgtgacggcgagccaggctgaaggatg

SEQ ID NO: 66874 - DNA, 122 bp, Homo sapiens
tgagcccatggtaggaacaaaacaccagcaccagcgagtctgggcactgcaggccacggacgtgtccaggggccttgccaaggctgaagtctctctgttggcagaatatgcagaatatgtgt

SEQ ID NO: 66875 - DNA, 122 bp, Homo sapiens
tccttgttgctgcctgccccaggaagagacagtggcctgggttcagtgtgatggctgtgacgtctggttccatgtggcctgtgttggctgcagcatccaggctgccagggaggccgacttcc

SEQ ID NO: 66876 - DNA, 122 bp, Homo sapiens
ccattgaggacttgacctaatttaaagagtgtgctgttgtccactgtgtacggtgggtggcgattgctggaccccagacgctttccttggagcttcaggaaagcctgggcctccctgtctct

SEQ ID NO: 66877 - DNA, 122 bp, Homo sapiens
tggggagtgaatcagccatttggcattcttccctacttctgactgactcagaagtacttccgtcacaactgccacacatttttgaaaaagaaggagtggagttgttatatgagtcataagag

SEQ ID NO: 66878 - DNA, 122 bp, Homo sapiens
ggtagaaaagatcttttgctcattgcccaggtgagacggcctggtgcgtcctctcagcctcgacacgcgtcaagtaaaagaaaggttaaaattagaaaattcaatttatttgataatttccc

SEQ ID NO: 66879 - DNA, 122 bp, Homo sapiens
ccaaagaacgcgggcaaactaatcagccttcggatgaccgcaaccaggtgcgggagccaccgcacaaaagcacctagggaggaacgagggacgtatagggaggttgcggtggctcctttaga

SEQ ID NO: 66880 - DNA, 122 bp, Homo sapiens
ccaggatgagacgactgggcgctgcgaggcgtgccgcgtgtgcgaggcgggctcgggcctcgtgttctcctgccaggacaagcagaacaccgtgtgcgaggagtgccccgacggcacgtatt

SEQ ID NO: 66881 - DNA, 122 bp, Homo sapiens
cgcccgcgccgcaacctaacccgggcgcggggcggggcctgccggcgggggcggagcccgcgctcgccaatggcaaagcggcctcgcctggcgctcattggccaccggctcgcagagcggcg

SEQ ID NO: 66882 - DNA, 122 bp, Homo sapiens
acagctcacagttcgcagcagatgtaaaggttttacctgccctgagcaaacgcctggcagcgttcagtgtggtggaatctacgcacaaggctccgggaaaacacaggccccagctgcatttg

SEQ ID NO: 66883 - DNA, 122 bp, Homo sapiens
tgggttctgagctcaggccataagggccccctgccggttggagacccccctccatgagaacgtgctgcagggagcaattactccctcagcctgggacttggaatgaaggcgtggagccaact

SEQ ID NO: 66884 - DNA, 122 bp, Homo sapiens
agcacctggcacagaggagagtaatgaacagctatagaagagagtgaggaaggaatgaaacgtgcctgtgttttgctgactctggcatttgcacttggtttttccccacaatggcaaatggc

SEQ ID NO: 66885 - DNA, 122 bp, Homo sapiens
ggctccctcatcagagacgtgcgacatgtaaaccaaattaaactatggtgtccaaagatacgcaatctttatcctagtaattgtggtcattggatgatgttggtttgggcaggccatctcta

SEQ ID NO: 66886 - DNA, 122 bp, Homo sapiens
tctctgggttcgaattcagctgctgcaggctgggtagaatgacagatggagtgacagcatcgcccgtcactcctgtctcgccccaagcctctaactcggctttaagggagatcagcagcagt

SEQ ID NO: 66887 - DNA, 122 bp, Homo sapiens
ctcgcggacacaggggcggggccgccgagggggactggctgcgggaggggtttaggcttccgcccccagcccggaacctttcttctccggccctggcaggttccgggagcctcggctcgtgg

SEQ ID NO: 66888 - DNA, 122 bp, Homo sapiens
gcggaggagggccggggagggacgccggaaggactgggtagggacgcccggaggactgagcgtagggccgagaggaggggcgcaaggaggaacggggggagggccctgtctcaccctaaacc

SEQ ID NO: 66889 - DNA, 122 bp, Homo sapiens
gcctgggctctgaggcctgaacgacttggtttccggaattccttccgctgctttcgaccgcgggactctggagctttgctaacctgccccgtgcctgggtctcctctaggtcaaggagaggg

SEQ ID NO: 66890 - DNA, 122 bp, Homo sapiens
cgcgcgcggcggccacatctggaaagacttaccctgcgccggcgacaccctcgcggggcgcgcgagctgcagcacagctatccggaggcgtctcgcttcctgtgcaacccaatgactcacct

SEQ ID NO: 66891 - DNA, 122 bp, Homo sapiens
gggagcagatgaaccagtttatgagctgccccggcttgtctggacaggtcatttctctgccgcatccacatgttgaacggagtttaaagtctgcagttggctcctgctaatgtgatgcatgg

SEQ ID NO: 66892 - DNA, 122 bp, Homo sapiens
cctcagctgagcgctgtaagtatattattacatttaatcctctcaaccatcttatgggatcgatattattagctcatttcacagaggagaaagttgaggcttaaagaggtgatgtaattttg

SEQ ID NO: 66893 - DNA, 122 bp, Homo sapiens
tgcggcagcggcgacgacaccccccagcctcagcgcgcgacacccgcccggtggcggcggcgcgtctccacgagtctgtcttgctgctgctcctgcagccgccgctgccctgtggtgtcgcc

SEQ ID NO: 66894 - DNA, 122 bp, Homo sapiens
cccggctcgccgcgctcccgccggcaccatggaggaattcctgggacaaccgcctgcagccggcgacttttccccaggaatctctggcctggcgccctttgggtgagatgacggggtgctgg

SEQ ID NO: 66895 - DNA, 122 bp, Homo sapiens
gaggaaaggatctgaggggcctccagggcccgtggcttcaccctggggtgggggcaagggcggggcgtggtgcctcttccggggtgggatgggtggatgctcgtggttcattcccacgtggg

SEQ ID NO: 66896 - DNA, 122 bp, Homo sapiens
tgtctatattaggatttcccgatgtgagggtgaaatgtgtctgggttaatagggctcctgcgtggaaagacagggagagaagttttccttttgcgcctgaatgttgcagatcctctctctct

SEQ ID NO: 66897 - DNA, 122 bp, Homo sapiens
gagccggagagcgcctgcgcgtcggagcctctttgttgctggggcgctggggtccagctgcgcgtgcgcagtaggccggcaccgacaagtgcgctgcaccagtggcaccggctgggggcgag

SEQ ID NO: 66898 - DNA, 122 bp, Homo sapiens
tgaaagcataatttaagggagggggactacatgaccacagagaggtaaagcccaggataccgacagggaacagtgctgtagtggtccaggtagctggggtttaggatattcatttggagagc

SEQ ID NO: 66899 - DNA, 122 bp, Homo sapiens
gcgtaagcttggaatgtatatctttgaaattgcaggtcaaagcctccgcattaaagcacccgatgaggcaaagctacaattatgtgagccatgtgtgttatgcaacactttttgatagctgt

SEQ ID NO: 66900 - DNA, 122 bp, Homo sapiens
tcgcggctctggaatgccaggcatccaggtcacccgcggctgcaagattaatggctccagcgaggagccaagaacagctcggcgctcactcgctccccggggagcggaaacgcctcccggcc

SEQ ID NO: 66901 - DNA, 122 bp, Homo sapiens
agtacacctcgcccaggacctcttgattctgaccatgccctgccccaaaccctgccttcccgggtcccaggactccagctgctcctcgcgtgacaacacttgcccgctttgaaagccctcct

SEQ ID NO: 66902 - DNA, 122 bp, Homo sapiens
tgcactccagcctgggtgatagagcaagaccccaactcaaaaaaaaaaaaaaggatcccacggttcaccttgtgctgccacgatcggttggcagctctgctctgtgccgtcctgtgcctgtc

SEQ ID NO: 66903 - DNA, 122 bp, Homo sapiens
tccaatcagggactgcatggagtgaaggctgggctgaggttctggtagggttcaagctaccgttgccctccagtttccaactgggaacatggtgtaggctctgcagtaacccacttccacca

SEQ ID NO: 66904 - DNA, 122 bp, Homo sapiens
gatggggccaatcaggcagggctgggtggctctcgatggactcaccaaccaggatgagaacgcagaccaagagggcgatgagggcgccggggctgagggaggcggccatgacaaaggccgtg

SEQ ID NO: 66905 - DNA, 122 bp, Homo sapiens
ggcaggaactgagatgaaagagtcaggcagaggccgagacactcagggcatcagaggccccgacaagagatttggattaattttgagaatagtagagaacctttaagagggtctaaatgagc

SEQ ID NO: 66906 - DNA, 122 bp, Homo sapiens
cgggtcggggtgccttcttgggcccccaaaatgcggaaccagagagtccgcacctggactcgccccgggccacggcgctccccctggggtcgggccggtgttccgggtccgagtgccccggg

SEQ ID NO: 66907 - DNA, 122 bp, Homo sapiens
caggacgtgcaaatacataggttacaaaatggaaaatggtattttggaggatgggaggcccgtgtagccagagataatgggagaaggtgagggggcacccaaaacaatcccacaagctctct

SEQ ID NO: 66908 - DNA, 122 bp, Homo sapiens
tgctacgcagcagccccaaaggctgcaactggcaggagcggccggtatttctcaggggatcgctaaaacgaatctaaagagaaaatcagcttctcggttaccttcagtcagctctggcttcc

SEQ ID NO: 66909 - DNA, 122 bp, Homo sapiens
tggggggtgcgcgaggtcaccggatggacgtctggggagctgcagggtgggggcgccctgcgccgcggctgagggtcttctgggggatgtgcggccagctgaggtcgggtgggggcatgggg

SEQ ID NO: 66910 - DNA, 122 bp, Homo sapiens
gtgggcctaagccttggaggatctggggtgggggtggcgcggggtccaggcccggggcgccgagaggtggctggtccggctgcccacgccgagacgcgcgaggtgagcgggcgccggggcgg

SEQ ID NO: 66911 - DNA, 122 bp, Homo sapiens
acagactctgaagcttgtatggatagggcatttgacctgggtttcagaaagtagcccctgcggtaagcatcagggtgtggggaacaaaatggtcattatttgcttgaaacgacagatgataa

SEQ ID NO: 66912 - DNA, 122 bp, Homo sapiens
ctgaaaggcttccagaaaagcaagtaacactaaatcaagaagacagtctaaattcagccccgcacagtggctcatgcctgtaatcccagcactttgggaagccgaggtgggtggatcacctg

SEQ ID NO: 66913 - DNA, 122 bp, Homo sapiens
tcggggacggggcggggctggcggcgggggcggggacccggagcgggaagatggcggcggcgcaggaggcggacggggcccgcagcgccgtggtggcggccgggggaggcagctccggtcag

SEQ ID NO: 66914 - DNA, 122 bp, Homo sapiens
ccgtcagcccttcctgcgccagcccggggtctttggtaggcgccggtgagtgactatccccgagtgaccgcccacatccatcccccaccaggacttccgggagaagaacatggactacatgc

SEQ ID NO: 66915 - DNA, 122 bp, Homo sapiens
gggagctccgggaaaccccgtgggcctgcgcggcgttcttccttttcgatccgccatctgcggtgggtgtctgcacttcggctgctctcgggttagcaccctatggtgccttctcttgtgat

SEQ ID NO: 66916 - DNA, 122 bp, Homo sapiens
gactccatttgggaagaagagtctcaaaagcgccctggtgatgcctctgggaggcaggggcggtcctggcagggtggttgatgtggtctgcgcagcctgcatccccggcctccctttccctg

SEQ ID NO: 66917 - DNA, 122 bp, Homo sapiens
acagccatggtcgaggcatgtttgtctttcctccccacctggaaggtgactccccaactccgcccacctggaaggtgactccctgattccatctcaagctccagcatcgtgacctagctgta

SEQ ID NO: 66918 - DNA, 122 bp, Homo sapiens
tcggggatggtttcagagcttcaccggcctcccttccccaccctgcaaaccttcaaagcccgagcccacgcctcgcacgtgctattcccaacagagaaaaatgtgaccccatccacgtcctg

SEQ ID NO: 66919 - DNA, 122 bp, Homo sapiens
cccccaaaaagccagaaatgattttttccagatggagctggaagggggctcagggctgagcgtgatggggtagagatgtttgggacctattttacgttttaaccttaagtcagagaagtgaa

SEQ ID NO: 66920 - DNA, 122 bp, Homo sapiens
gcaacaaaacatatgttaaggaaaatttaaggaaggccgttcattggactaagctcctgtcgtaggccccaacagaacaacccaaaatggagtcacatgtgtcaaagttctacaacaccaaa

SEQ ID NO: 66921 - DNA, 122 bp, Homo sapiens
agaaaaccgagggatgaagtaaccggacagcctcacaacaggaggggaggtggtgggattcgagtccaggccagtctgacccaccctccagccccaggtctctgggattgagggctgggagg

SEQ ID NO: 66922 - DNA, 122 bp, Homo sapiens
gtcacagaggcctggctgaagagggttggctggactcttgttcagagctactggggacctcgatcatccagggaggcttgtcctgcagttgcttttaggctaatgggctctgcatcagcttt

SEQ ID NO: 66923 - DNA, 122 bp, Homo sapiens
agggctgtatgcagtagactggagggcgatcgcgggctccaccgggagggagcagctgtgcgccttgacgtaaaatccccaccctggctccaatggcccgcacctgccctggggtgcgccgg

SEQ ID NO: 66924 - DNA, 122 bp, Homo sapiens
ccgctgccggggctgacagagaccctggcccgcggtctgcagcctcctcagtcgtgcgtgcgttcattccgctcatagcttctgtcactcagcaagcgctcaacacagacgcatgagatacc

SEQ ID NO: 66925 - DNA, 122 bp, Homo sapiens
tgggttgtgtcagtgtcagacctctgaaattcagttcttcagctgggatatctctgtcatcgtgggcttgaggacctggagagagtagatcctgaagaactttttcagtctgctgaagagct

SEQ ID NO: 66926 - DNA, 122 bp, Homo sapiens
gctttctgctggcttcctagctccagtggtgcccgtgtaaagggcctaggtcatacacagcgggtagtgtctacaaatcctcttcggaataatcccttccgagtaccggctcgccatgtgta

SEQ ID NO: 66927 - DNA, 122 bp, Homo sapiens
cctcccccgcagctggggccagcggtgccaagcgcagctggacgagcggcagcagctgggcgagtgacagccccggctccgcgcgccgcggccgccagagccggcgcaggggaagcgcccgc

SEQ ID NO: 66928 - DNA, 122 bp, Homo sapiens
cggccatccctcgcgcttttacgcgggagcgtccgcagggccggaaggaggcccctgccccgtccaaggctgcaccagctgccccgccgcccgcccggacccagcccagcctcattgctgac

SEQ ID NO: 66929 - DNA, 122 bp, Homo sapiens
tccggcggcgcggggcgcggcgtgggtcgtaccaagtgcgtcctgccctggctcgcactgcgccctacgtgggcccatagcaatggtgtcaccaccgtatctggggtgatgtctacggggaa

SEQ ID NO: 66930 - DNA, 122 bp, Homo sapiens
ccgtggctccctccatctgcagtatcccccacctccagcccgtcctgccctcctgttctccgtctcgcttcccgtcggtgcctccgggatctcacagccctcgcacctcttttgtgacccag

SEQ ID NO: 66931 - DNA, 122 bp, Homo sapiens
acccatcctccatctcctagcgggtgacatggtactttggtaggtagcacacaagtggatcgttggagctgaaggataattcaaattggtaaactgattcgagggaccatgtgcaaccatga

SEQ ID NO: 66932 - DNA, 122 bp, Homo sapiens
cagtgtgaccctcagagggcacgtgacatggaggagctgcttcctcatgggatccgtccccgcttcccttgggaaaccgaggccacctgaagcacgtccctgttcctggcccaccctgaggt

SEQ ID NO: 66933 - DNA, 122 bp, Homo sapiens
atggtacttaaaagtcattggtcaaggctgacctgtgtccctcaggggtggagtcaggtccggagagggtcagcagtgatggatggacactaagtttgtgataatgtgtgctggatcctgag

SEQ ID NO: 66934 - DNA, 122 bp, Homo sapiens
gcgcatgagcggtggcttgttgagagaggccccaaatgaaaaactcttcttcgtggacaccggctccaaggaaaaagggctaagaagagaaccaaagtccagaagaagtcactgcttctcaa

SEQ ID NO: 66935 - DNA, 122 bp, Homo sapiens
agctcgcagagcgcagaaactgtcttccctctccctctagggtttagcacaaggatttggcgacagcactcgataaacgtttactaaataattgggttaatgagtcccgccccgccaacccc

SEQ ID NO: 66936 - DNA, 122 bp, Homo sapiens
gctcagcaccccgcagccgccctcgacgcgtcctctacgggtcactgaggccgcggggcccgacctgcggcctctcagaaccacggcaccgcccctgcccgccccagcgccactccggcacc

SEQ ID NO: 66937 - DNA, 122 bp, Homo sapiens
tgtttctgggatttttttggcagacatgccatcggagtctatctctcttagagaagtcagcggctttgcactctgaagcaggatcggagactcctttcgggatgagcagcagtggggcagag

SEQ ID NO: 66938 - DNA, 122 bp, Homo sapiens
tgcagatctggacgaagaatttcctgtcctaactaggcctcagtttccctgaaataacatcgattaggtgggagtgggtgtgggtcagtaggatttcctcttacccccagcccttttcaatc

SEQ ID NO: 66939 - DNA, 122 bp, Homo sapiens
cagtaggcattccagtttgttttgcgttttagagatgtataagagaaagggacaggtaggcgcaaacagaaggcaaaaggaccagaaggtttcctttagtgacagggaagaaacacaggatc

SEQ ID NO: 66940 - DNA, 122 bp, Homo sapiens
gcatatgagtcagtccagaaaaataggcacatcccacccgccaaccacagtgactgattgcggaagaggcacttgaccccaggtcacacaagggggttccgtcctgggacttttgctgcact

SEQ ID NO: 66941 - DNA, 122 bp, Homo sapiens
cggggggtgcccaggccagggccctgtcgcctgcggcgctgagggcccggggtggggctgcgccctgagggccctgccctgccctccgcacgcctctggccacggtcccttccccggctgtg

SEQ ID NO: 66942 - DNA, 122 bp, Homo sapiens
gctggaccatgggagaggtggtagggatggggggtctctagtcagggactcgaggggcaacgatggtgcttgggaggccagaagagtagctgtacctaattgacatggaagtattttagtgt

SEQ ID NO: 66943 - DNA, 122 bp, Homo sapiens
ctccccctccggcctgacccctcctaccattgtcccgaatggccgccgcgcctccacccccgcgcattcttacctcctgacaaggccaaggtcagggaggcgatcactagggccaggggcca

SEQ ID NO: 66944 - DNA, 122 bp, Homo sapiens
tctcgcccaggcacggcgcaggctcaccacgcagggaacacgcctctcgcccaggcacggcgcaggctcaccacgcagggaacacgcctctcgcccacagcgcagccttgatctcgcaggtt

SEQ ID NO: 66945 - DNA, 122 bp, Homo sapiens
ggcgcgtttctggagcaccgagcgggtggggagcccttccagcctcccagcctctgccggcgagcagctttttcgatttcctgccggctctcggccccgcagtgcgttgtggccgcgcgcta

SEQ ID NO: 66946 - DNA, 122 bp, Homo sapiens
aggggaagaaacccaacactaaagtttccatagagcattaccctgtgaaagcctcttctccggagggccctaacctgggtcccagatgtggttaaactgatttgcccctcgttggctcacat

SEQ ID NO: 66947 - DNA, 122 bp, Homo sapiens
gaggtcgaggcacctgttttgtggaaggaaaataagttgcgaggcagaggtcccaccccacgggagaaagtgcctctccgccgcacatgccaggggcccagagggccctgatcatccctggt

SEQ ID NO: 66948 - DNA, 122 bp, Homo sapiens
gcatgacatacactatcaaattacttttaacctcacagaaacatgacacagacttttttccgtggtattaagcacctcctcttccttgctgtattttaggacaacgtaacttcaacttccct

SEQ ID NO: 66949 - DNA, 122 bp, Homo sapiens
ctagggaggggtctgagctcaccctggcagcgcccgcgtcctcgccagcgcccgcgtcctcgccagcacccagccatggttcgcgattgtaggcactctcctagggaggggtccgagctcgc

SEQ ID NO: 66950 - DNA, 122 bp, Homo sapiens
ggctctggtaccaggcgacccggcctagtgtctgaacctggactttccttgagacctgagcgccctggcctgcagctgagccctcccggacaccctggctgctctgtcctgcgtgaggtgca

SEQ ID NO: 66951 - DNA, 122 bp, Homo sapiens
cttcagagaggtttagtttcgtttcccagaagcatcagttcggtcccaaaacgctgcaaacgcgcgctgcctgcagtaggagagaggaaaccgcgaagcgcgagaaaaggcgcccccgtccc

SEQ ID NO: 66952 - DNA, 122 bp, Homo sapiens
gaccatgcatttatggagacagagcatgccctgggtggccaatgagcacgcagaggagggcggagtggcccccggctggccagactccgagggacgcgggacccaggggagggggggtggaa

SEQ ID NO: 66953 - DNA, 122 bp, Homo sapiens
gagtcgcatctatttatatatgttatgtcttattgctcagcaaccagctctcggccggggcgtgggccgggaagaggggtctcctggtgcagcgggttggcgtgactcatcaccgccgcgca

SEQ ID NO: 66954 - DNA, 122 bp, Homo sapiens
aggaggagaggtgtgtgggcggatgagggataagctattgatcagctcccaaaccaatctcgcccccaagcactgctttaagaacgctggggtccaagaagagcttgttgcaaaaaggactg

SEQ ID NO: 66955 - DNA, 122 bp, Homo sapiens
aacgtagttaaccgggtgtctgaccacatggctgccaggagcctagtgagtctgcgcacacgcactacctccgccccggcagttcctgagtgggtgcgcaggcgcaagaggagcacaccgtt

SEQ ID NO: 66956 - DNA, 122 bp, Homo sapiens
atatagaaaactacactgcagtgcacactgtccctcagcaggcgtggtggcatggaaggacgcgaacgaccccgggagtggcgggtgaggagggaaggggagcgagcgggtgcgaggtgccc

SEQ ID NO: 66957 - DNA, 122 bp, Homo sapiens
cacgaccctccactgtaggggggtcccgctgccaccctccacgctagaggggtctcaccacgaccctccaccctagacaggtcccgccgcaaccttctgccctagagggatcccactgcgac

SEQ ID NO: 66958 - DNA, 122 bp, Homo sapiens
aactaggggcacgtggcaggaaggggaggcaaggccaaggcaggggattcccccaccggccgccccccaaacccctaccgatggcccccaataaatatttgcaggggatgccagggcttgcg

SEQ ID NO: 66959 - DNA, 122 bp, Homo sapiens
ggcatcctctgcgcggctggctaataccgaggtttaggcgttagttggtccgctttgacccgaggaagagcatggagcagaagaccgccctgcgttatcccccggctgggccgcggggcacc

SEQ ID NO: 66960 - DNA, 122 bp, Homo sapiens
agcgcgcgataaagcgcggttttggaagtcacggtggccgagtggttaaggcgttggactcgaaatccaatggggtttccccgcacaggttcgaatcctgttcgtgacgggttttttttttt

SEQ ID NO: 66961 - DNA, 122 bp, Homo sapiens
ttgaagtcttactatgtgcccagcactgctctttgctttgattctctgatctttggattccgtgttgaaggtgacacttttctggctttagagtttttagggtctgttgcattttcggagta

SEQ ID NO: 66962 - DNA, 122 bp, Homo sapiens
gagggtgacctcagggccggattggaccctgcttcgtgggaggcgggactcagggcttagcgggcggaggagtatttaagaccgggcggagttggaggtggccaagggcagaatgagcggga

SEQ ID NO: 66963 - DNA, 122 bp, Homo sapiens
gctgcgccttgccgcagcatctccgggcactctgaggctgccgccgggacagggtcggagcgccgcagaacccaccgaaacttcccaggggggcaattcaaaattcgccggacgcgtcgccg

SEQ ID NO: 66964 - DNA, 122 bp, Homo sapiens
aggggacgcgcccagaagctctccggtggggtagggcgtagatcgcttaccctcgcggggcgtggcgctttgctcaaggacgctcccaaaagctgctccccaacacccagtcgcttttaacc

SEQ ID NO: 66965 - DNA, 122 bp, Homo sapiens
ggttccccactgccaccaccaggccaataccacggcaggctcacggagccctgtcccttccgaatcatccacaggtgaccaaaaacacaggctcctactgcttttatgagctgtgaagcatt

SEQ ID NO: 66966 - DNA, 122 bp, Homo sapiens
cccccgcccttgccatccactgagccggtcggggccacggagccgcccacgccagcccttcggccgcctcagctgcggcgcgcgccccactcagaccctaaagaatgtacgtaccacccctg

SEQ ID NO: 66967 - DNA, 122 bp, Homo sapiens
tggtgggggccgagtcagctgcagccatgataacagctgctcccaggaggccccgtctcccggacagccacagtatctatccgacagttcccgttctgtggggcccaggccggatcgatgca

SEQ ID NO: 66968 - DNA, 122 bp, Homo sapiens
ggacaggctccgatgtaatggatgaggaaacggaggtactgaggggccaagtcactttcccgagccatggctaaaaactgacaagaccgcagcacatgagccacaccacggaagccacccaa

SEQ ID NO: 66969 - DNA, 122 bp, Homo sapiens
ccggcggcacccatttcggtgactttctccccatttcatgtaaacagaattgccagggaccggttaccgtggatatgtttttctaaaaactcagtgtctgcacaatccattgatagaactgg

SEQ ID NO: 66970 - DNA, 122 bp, Homo sapiens
tacggaatttgttccttctgactttaggatatgttcggagtttcttccttctggtgggttcgtggtcttgctggcttcaggagtgaagctgcagacgttcgaggtgagtgttacaactctta

SEQ ID NO: 66971 - DNA, 122 bp, Homo sapiens
gccccgccctgccccgcgccccgccgcctgcttattcaggaggcgcgccccgctcctctgcggagactccaaggagggttttgctcagcccaggctcgcacctgcctgctccccgcgcgaca

SEQ ID NO: 66972 - DNA, 122 bp, Homo sapiens
agtgccttgcggcaggcggcagagcgtggcttcgggagcgccaccaggacaggccaggaccggccacgtagagtggtggttttgctcactgagtcacactccgaggatgaggttgcgggccc

SEQ ID NO: 66973 - DNA, 122 bp, Homo sapiens
cccttgggaagacgcgcacaccctggcaaaccatgtgtacacccgcggtagaagcaggtgcgtgttttacagtagcttagctgcggagtccacccagcccctggcatccgcagctcggctcg

SEQ ID NO: 66974 - DNA, 122 bp, Homo sapiens
ctggggaaacgggatgcaccagcgggctctgtagtaacactgagaaaccctgggtcacttcgatgttggaattagtattaagagggtgtttttttgttgttcaactatggttgtagagaaaa

SEQ ID NO: 66975 - DNA, 122 bp, Homo sapiens
agccgctaagatgcaaataccctaggacgcttatgtaaacttccccctcccgcaggtgcacgcgcgggccacgaaacgctgggagaatatgaaaggccacctcttaaagaaatcatctccac

SEQ ID NO: 66976 - DNA, 122 bp, Homo sapiens
ccttctcctgcagctgctaatccagtgtttccacgtcgtgctggcctcccacctgcaggacgagttcaccgtgcaaatgcaagcggcgtgggacaagttcctgactggtgtggccgtggtgc

SEQ ID NO: 66977 - DNA, 122 bp, Homo sapiens
aaaaaataaagcagggaaggcaaacatgaagtgtgggtgaatgtgacattttagacagggcggccaagagaggcctcaccaaggaggggacattggaatgaagacgtaaagaaggtgagggg

SEQ ID NO: 66978 - DNA, 122 bp, Homo sapiens
ttagaatgtttattcaagggggcagggccacttcccaatggaagacctcctcagccaaaccggagggttaccaggagcaggggaggctgtgcttgcctcctgcagggcaccaggcaccctgg

SEQ ID NO: 66979 - DNA, 122 bp, Homo sapiens
ggaaaacgagtttttagccggggtattccagcaggatcagggggcagctggtgggagtctcgaggcagtgagggggggcggggcgtggagatgaaagggccgagtctgggtatttggaccgt

SEQ ID NO: 66980 - DNA, 122 bp, Homo sapiens
gactcaggtttttttggagacccccatcctcaggggcaggaggggaggggagaggaaacccgagcctggtgaggaggttaaaagtttgaacttgatccctgccaaggaggagttgggtctca

SEQ ID NO: 66981 - DNA, 122 bp, Homo sapiens
actccttcccacccccaggccagcagtgactgcctccaagactccccctccttccagcaccgcctcatggtttccatggcaacagaaaatgttggtgggaagcaaaaatgctgaactgcaac

SEQ ID NO: 66982 - DNA, 122 bp, Homo sapiens
tcccagggacgcagctgggggtgtcctggaattcacgactctgcagcccgaggtgcgccgcgtgcgcaggagggggtggggtccgggggggcacggactcccctctcacgttgcttggtccg

SEQ ID NO: 66983 - DNA, 122 bp, Homo sapiens
tcctgtccagttatggagacagacatgcaaacagatcactcccatcagtgtaggaaggcccgtgctggaggtgttcctgagttgctcggccactgaggaagggccttgaagtggaggtgggt

SEQ ID NO: 66984 - DNA, 122 bp, Homo sapiens
aaatccagtctcagctattctctgagaatgccaaactgaaaccacgttgcacactcgcaacgtggccccaggggagccgcggcctggcaacgcgcgcatcctgtggtagttcaggagcgcca

SEQ ID NO: 66985 - DNA, 122 bp, Homo sapiens
actgtttaagacatataaattaatgtctattgcacaggcttggctgggtgactcacattgcggcttctatttctggtgggggagactcagatacatttgtcatgactccagtaagtggtaaa

SEQ ID NO: 66986 - DNA, 122 bp, Homo sapiens
gggtgggcctggagcctcaaattctttcagacctgagttcaagttcttggcttccaaccacggagcctgcgtcttacccataggtcaatggggagattcgcagtggtgtgaatctgcccacc

SEQ ID NO: 66987 - DNA, 122 bp, Homo sapiens
gaaggccaggagaggcggggatggcgtcccccgggggcccgtactgcacatcgtggtggtcggatttcaccacaagaagggctgccaggtgaggaaagggcccgcccccgcccccagccgtt

SEQ ID NO: 66988 - DNA, 122 bp, Homo sapiens
agctcattccagcacttaaactctcccagtttttgtatctacggagttcagctcaaggtccgtatcctattgcagtattcttgaataaagtcttccttgcctgcttaacatgtcctgtttaa

SEQ ID NO: 66989 - DNA, 122 bp, Homo sapiens
gagaaggacattccctcggagctgctcgaggacccggctgtgacagtcgctgaagatgtacgcccgggggcggcacatcttgcagatggccaggcctgtgaggccggcgccactgccaagct

SEQ ID NO: 66990 - DNA, 122 bp, Homo sapiens
ggggaacgggaacccgggccgcgccctcccggccgccgtccccgctcaggctggggccggcgccaaaaatgtctcagggcgcagacacggaagcacccccagggctagtgcgcctgcgcacc

SEQ ID NO: 66991 - DNA, 122 bp, Homo sapiens
ttgaagtttaaatacctaaactgcatctgctcttagggcactcgtgctgtttaaccatttcggccattttgtcatcaatatagtttatgtattcctccacccaactgtgagttcctcaagga

SEQ ID NO: 66992 - DNA, 122 bp, Homo sapiens
gacagcgcgaagtgagactgcaaaagtcccaggaaaacgtcactcaccaaaacgctcccgcgccttccaggcagaagtgcggtaaaacttttggcagaaaccacctgtggctgccgacgggc

SEQ ID NO: 66993 - DNA, 122 bp, Homo sapiens
ccagaccagatctgtgtcttcggttctggcggtattgtggaagatagattggagttcggccggctaaaagctagaatccagtttggaggattattatagtgcaaactaggaactgggacccg

SEQ ID NO: 66994 - DNA, 122 bp, Homo sapiens
gtcggacgccgggcgggcggatgtaggcagcagacggtggacgctgagggtcggggcctgcgccctgtggggcagcctcagcgcagcttctcgggtggggcggggcgctcggggcctaaggc

SEQ ID NO: 66995 - DNA, 122 bp, Homo sapiens
ccggggtggcggcagtggggcgtcgagtcgagagcccggccgaccgacgcgcgacccgcgcgcgtgccactgcaagctctgcctgccggccgggagtctccaaggcaagggacgcactcggc

SEQ ID NO: 66996 - DNA, 122 bp, Homo sapiens
taagaacgcccctgaacgctgattggcccctgtgggcgcggggcgggacagcgaggtgttcgcggggctgggctccaaggcgcaaggcggcctgacaccaggtacccggctcccggttcctc

SEQ ID NO: 66997 - DNA, 122 bp, Homo sapiens
cagggtcctctgagagcagttttaagacccgcacgtgcccccctgggcactgggcaaagacgtctgtgaaggtacccccacggtcgatggcaaagtggaagcggccctcggggctgcccatg

SEQ ID NO: 66998 - DNA, 122 bp, Homo sapiens
gtggggattagaacccagtctttggagcctatggactcccagcctgatgccagaaggagtcggctgaacctcagactgtggagggaatataaatcccatgttggggtgatatgaaaagccag

SEQ ID NO: 66999 - DNA, 122 bp, Homo sapiens
gttcttcaaatcgggcacgggtaatggaggtatagaagtcgattccttcatagagagaatcgatctcaatactggcctgggtgctggaagagagggtacgcttagcacgttcacaagcagta

SEQ ID NO: 67000 - DNA, 122 bp, Homo sapiens
gatctcactgtccaccatgtcctccttgcccttgagtctggacttgtcaatgatcttcatcgcataggcctgcctggtctcgcggtgtctgcactccttcacgacagcaaagttcccatccc

SEQ ID NO: 67001 - DNA, 122 bp, Homo sapiens
ctggatttagtgatgaaattcaagctgagagcctacagtggccaccatcaggcattgaaacgcctccacttctgggccctaagtggggggcagcaagcaccttgacatagacgttgcccacg

SEQ ID NO: 67002 - DNA, 122 bp, Homo sapiens
atgtgtggtcccaagtctggaagaagctccttcctcttctcccgctgggagctgcgtggccgatgggagcccatctccaccgcggcacctgcatggtctcagccttccggttcggtgccgct

SEQ ID NO: 67003 - DNA, 122 bp, Homo sapiens
aaaaacttctcagctgcaagttagaagtggactggccattgaggaggctctcagcggagtcgctcttcacaggagtcttgaacgcggtgtggaatcggcagcgaggaatcctggagcacaga

SEQ ID NO: 67004 - DNA, 122 bp, Homo sapiens
cacttggttggaaggaagctactaagggagacacacaagtaaatagttgaactgtgtgttcgcagacaggaaggaacactttacccctcaaagtgcaagaacagttgcaggaaggcttcctt

SEQ ID NO: 67005 - DNA, 122 bp, Homo sapiens
ctacccacagcccaggaccatgcggagcaacgctcgcccagccactcgccgcctaggccccgccccgccccgctctccggccactcagcggtaaccagctggtcccgcccgccggacgaagg

SEQ ID NO: 67006 - DNA, 122 bp, Homo sapiens
ccgtatttacccatgcattggtctgtagtgtaaattgcaaaggaatcttgcctgagagcccgctctgacaaatcaggatatgttctctgaaatgtggtccatttattagctctcagtcacag

SEQ ID NO: 67007 - DNA, 122 bp, Homo sapiens
aaataactgggaagggcagtctgagctataaatgggagcacagtggagacagaccgtgtgcgtgctggtatgtgtgtatgcatttgtgtgtacacatatgtgcatatgtatatatgaagata

SEQ ID NO: 67008 - DNA, 122 bp, Homo sapiens
cctctgcagtcattcatgggtgctgaaaataaagataccctttctgtcgaaagtgttcgccgggctgcctctgcctccctggaaaagcagcagggcacacaggcttcctaggcagcccctga

SEQ ID NO: 67009 - DNA, 122 bp, Homo sapiens
agaatttctttcctgatttgtccacgctgcccctgacgcctctgccccctttggagagtgcgagggagcttccacaaatcccatcctgtgcagaaggcaggcctgtggcctgggagccgggg

SEQ ID NO: 67010 - DNA, 122 bp, Homo sapiens
tccacttcgagttctcctctgctgtgcccgaagtcgtcctgaacctcttcaactggtaagcgggcaccgccaggctaggcacggcggggacgggaatggagacgggcagacgacctctggcc

SEQ ID NO: 67011 - DNA, 122 bp, Homo sapiens
aggcgctgagcgaggcatcgctgcctggccggggcttctcggatctggggaaatcgaggtcgctttccccggctctctgcagcggggcagcgctgtccactcactccccgctccccgcgcac

SEQ ID NO: 67012 - DNA, 122 bp, Homo sapiens
ctgtccggtctaagaagaaacacaattttaaactagatatgagttacctgcccccatgtccggaagggaccactgaaaactgcctggatggtgtgtggtaacctgcacacactcactctgac

SEQ ID NO: 67013 - DNA, 122 bp, Homo sapiens
catcactgccaccttcctcctcttcctcctcttcttcctcctcctcggctcctcagcggccgggcggccccaccacccacggagatgcaccctccagcagcagctccctggcagaggcccag

SEQ ID NO: 67014 - DNA, 122 bp, Homo sapiens
cttaccttccagcagccgttggataatgctgtcgatgttgagtttatctaaatccgccatcgccttcccaccgccgaccctcccgcagcggcgccgccgccggctcgcgcccgggactcaca

SEQ ID NO: 67015 - DNA, 122 bp, Homo sapiens
gcatgaggcgcggcggcccgcgccctgattggtccggttatctgacccggggcctgccagcgccagacaatagtcggagtcaaattattcgccatggagacgctgtcagtcactggtaaccc

SEQ ID NO: 67016 - DNA, 122 bp, Homo sapiens
ctggaagccacgaactccagtcacccaggcctgctgcgctccaccctttatgggagggtgcgtgggggtgagcagatgctggagccggagcgagcgcttttggtcgccggtaggagcgaact

SEQ ID NO: 67017 - DNA, 122 bp, Homo sapiens
aaccctcttgggtgtttctcagtgcaggaagaagcagtggtggggagggggagctgcggccggcactagtgaccccaccgtctgagagcttctaacagggggcgagtttcagcaggctccgt

SEQ ID NO: 67018 - DNA, 122 bp, Homo sapiens
caacatggccaacgccctggccagcgccacttgcgagcgctgcaagggcggctttgcgcccgctgagaagatcgtgaacagtaatggggagctgtaccatgagcagtgtttcgtgtgcgctc

SEQ ID NO: 67019 - DNA, 122 bp, Homo sapiens
gacaactttctcctgactgactcagggctcaggatatgccctagagagaccgtgggcctccgtccagcctgcaaggtcccggctagttctaagagccaaataccaattttggctaagggtga

SEQ ID NO: 67020 - DNA, 122 bp, Homo sapiens
ttgcaacaaaacagagaacactagcaattttaaaaaataaaaataaagcagatcattagacgaccaaaactgtcatggagggatctttcacatggacaagtggtacccccggtgtagttcgg

SEQ ID NO: 67021 - DNA, 122 bp, Homo sapiens
gaacactgtcaaatttgtaagcaacattttagacagcaaatatgttgcttggattttagccgtcttaaacactgcaagcggcttaaccttatctcctagtgccactgccttcctggagtaat

SEQ ID NO: 67022 - DNA, 122 bp, Homo sapiens
ccaggagggcagcccaccttgggatgacagtggtgacaagagccagttgcaccccagcgccggtctgaagcttcctcctcctgagcctgctgtctccatctggggcaggcacccagcatttg

SEQ ID NO: 67023 - DNA, 122 bp, Homo sapiens
acagaggcacacatgccccctcccagtccagccggtgaaccagtgtgacctacaaataaacgaggctccggcagagctggggtgctggaagggaggcctggaccatgggggacggacctagg

SEQ ID NO: 67024 - DNA, 122 bp, Homo sapiens
tttcccagtctggggcggttacgagtggcgccactggaagcatccctaagcgggccgtggcgagggacccacggaagcatctccgtcggggaaattgctcaatcggagcacatgcactcggt

SEQ ID NO: 67025 - DNA, 122 bp, Homo sapiens
ggttgctgggtgatttgaagacatcagagccacaactgggcccggaggtggactctggcacgcagacctgttttatttgtccctactgagttaaaatttttaaaaattaatttaaaattagt

SEQ ID NO: 67026 - DNA, 122 bp, Homo sapiens
ctgaggctgcttcccaccttacatcaattgtcatttggcaactcaaggtcactcaaattacggcctgttgctttccctgcctggagcaccagagcagcagctcaaatattttgcccagaatg

SEQ ID NO: 67027 - DNA, 122 bp, Homo sapiens
gaggatcaccacagtgtctcttcccggccagacagtgctctcccgagaggcaatctagcacgtagctttctcatctcatctcacatttttggcattcacattgcacgactcaaactgattat

SEQ ID NO: 67028 - DNA, 122 bp, Homo sapiens
acggccgcccgcccggcgctgccgccactgccgggtgccactgcgcccgcgcgccccctccgatgtgggctggagcgcagccaagcactccagaagttaacctcttaaagacccggagctgc

SEQ ID NO: 67029 - DNA, 122 bp, Homo sapiens
acgcaccgggccggggactgggtggcctggtgtgtgggcgcggcagggcgcaggcgcaggcgcagtgtgcgtccgcgtctgaggggagggatgtgggggaagcgacggcccccggtttgttt

SEQ ID NO: 67030 - DNA, 122 bp, Homo sapiens
agtcagctggtgaagagtgggaggcgggtgttcgcaaccgcctaggcctgcgcgggtcaacgcagcttggcggctgcgagccagcgagcggcgcgtgacgaagagcctgagcgacgggtcac

SEQ ID NO: 67031 - DNA, 122 bp, Homo sapiens
tggtgccacctgtgggcatctgtcttctgcggagtgtgcgtgaggcggcatcgcacactgcggcatctgtcttcggagtgtgtgtgagtgtgtgtgagtatgtgtgaggcagcgtcgcacac

SEQ ID NO: 67032 - DNA, 122 bp, Homo sapiens
gccttgcgctgggattgggggtgggggtgggagtggggagggctctttaagcggcggccgcgctaataacctgtccaggagatggctcgtggcaaattgctttgttagtcttgtcagcgcgg

SEQ ID NO: 67033 - DNA, 122 bp, Homo sapiens
cagcggggaggtcagcccgttctctgggatctgccacacctgtggtagggacagggccaccgagctcagtcctctgctggtcctattgctggcccccttcggccacacccacgaccctggcc

SEQ ID NO: 67034 - DNA, 122 bp, Homo sapiens
atgctgcaaactcagactgcaaatccagaagcctgcagccttccggggattggctccctgcgaagataaccctgtccttcaacaaaccctcgcttcctatttgcattcctaattggcatctt

SEQ ID NO: 67035 - DNA, 122 bp, Homo sapiens
catgtacaccatttcctgaatcctagaggcaatctactttattctgcctaattttttgatcgttacatctgtgcctccaaatagtgtgttatagtgccgttttgtttttcactcttatgtat

SEQ ID NO: 67036 - DNA, 122 bp, Homo sapiens
agaggccctaagggggcaaaggttcccggagaaacgcgccccggagtaacgggggagcggcggcgattgcactgcgcgcggtccaagttgctggcgagccaggctgggcgcgttcggggtgg

SEQ ID NO: 67037 - DNA, 122 bp, Homo sapiens
gagtagctgggactacaagtacgtgccaccatacctaattttttaacttttttgtagagacgggtttttgctgtgtttcccaggctggtcttgagctcctatcctcaagtgatcctcccacc

SEQ ID NO: 67038 - DNA, 122 bp, Homo sapiens
gcccagttctgagcgtcggaaaatgggcactcgctccctgggggtttggggcaacttccccgctacgtcgcccagggattttaaataattgccagccaccagaaaccccctaacccttaatt

SEQ ID NO: 67039 - DNA, 122 bp, Homo sapiens
ctcctcatttgtccagcagcctaacagtggtgccctttctctgtgctgctttccctgcttcgggagcagcagttatggtagaagcagatggctactgattgggggagctttgtggctctaat

SEQ ID NO: 67040 - DNA, 122 bp, Homo sapiens
gccgggccgcgggcgcgcaaggaggggcgagagggtggggaggggcggggccggcgtcctcgtcacttgataaaacgcctgcgagtctccagagaacaacgggctcattcagcggtcgcgag

SEQ ID NO: 67041 - DNA, 122 bp, Homo sapiens
ccacctcctgggttcaagcgattctcctgccccagcctctggagtagatgagattacaggcgtccactaccacgcccagctaatttttgtattttcagtagagacggggttccaccatgttg

SEQ ID NO: 67042 - DNA, 122 bp, Homo sapiens
cacccgagggcacactcaccaggttcactgcaagccctgagcgttttgcgtttggtgccccgagtgtaagcctaagtattctgtctccgacacgtaaaacaacttaaagtgccattttccaa

SEQ ID NO: 67043 - DNA, 122 bp, Homo sapiens
ctccgaatataccactgacaccggggcccaggcacaaccccactacacccctccttgtctcgaccccaaatcccagacttatccacgaatggccctggggccccaaacgaccacagttcctt

SEQ ID NO: 67044 - DNA, 122 bp, Homo sapiens
tgggattacaggcgtgagccaccgtgcccggccgtctactacttcttaaagggtgagaggcggaaggatcacttgagccctgaagtgtgcgactgcagttagcttttatcgtaccactgcac

SEQ ID NO: 67045 - DNA, 122 bp, Homo sapiens
taggtttagctcctggatcgataacttttttccaaagtttgatcccattgtagctattatcgctgcagacaaaacttcctttattgatatgatatgtagaagtgggtttactaaggtttaat

SEQ ID NO: 67046 - DNA, 122 bp, Homo sapiens
gacaactgtgatcaaaactatgatgccagaattggtccaaactaagaaaaccctctcccccgctcatttctgtctgggcaggctactcatgacacttgacaagtcccagccttgatcaagaa

SEQ ID NO: 67047 - DNA, 122 bp, Homo sapiens
gacttccagccagccaagggcttccccccacccctgtagggcagggagagtcccaggccgcgccccacacagaggaagggcccccagaccacagcctgacggcacccgaccgtcccccttcc

SEQ ID NO: 67048 - DNA, 122 bp, Homo sapiens
ccctatttttccaattgagtaatcagggttcagagaggtaaagtaacttacccaaggctacgcagctactaaatgctagtagttcctggtatttgtactgaatgctgattacaaagaccatg

SEQ ID NO: 67049 - DNA, 122 bp, Homo sapiens
atgtctgaccaatagtaagcactcaatacatgttagctttattctctcttttatttttctcgcttcttttctcctgctcttcaaaaaagtgagtggttgaaccacctaggtgatctctgctg

SEQ ID NO: 67050 - DNA, 122 bp, Homo sapiens
ggctgtcgtcgctgaccccgcaggtcccggccgtctgcagcaggtgctcagcctggtacacggcgtgccgtccgccctcgccaccttcatccaggggctcgatcaggtgcaggtctgacccc

SEQ ID NO: 67051 - DNA, 122 bp, Homo sapiens
aaatcggtgacaaagtgacccggggggtcggggtccggaatccacggaggcctggcgggacgggacctcagtcgagctttcgcgttgtgtcctggggatagcggttcccggacggccgcggg

SEQ ID NO: 67052 - DNA, 122 bp, Homo sapiens
ccaacgatgttaccatcaaggactttgggaaccagcttttctctctgcgcatgcgccgcccggcccactccgccattttcatccggaagtgcgtcacccagaggcggtcttgtagcggggcc

SEQ ID NO: 67053 - DNA, 122 bp, Homo sapiens
gcaggggtccgggatctgcggacgtggcccggtggggagcgcgccccttggtccccgctccgccctccggccttcgcggcgctctctcgctgggcctttgtccccacctctcaggctcggac

SEQ ID NO: 67054 - DNA, 122 bp, Homo sapiens
cccccatccctttccagacctgtctgtgttgctctgaatctgtccttccctgagaactggcggggagatatcagggaggaggggagatttctttgtgctatgtcaacgcatctagacagagc

SEQ ID NO: 67055 - DNA, 122 bp, Homo sapiens
cccctgtgacactgctgcttggggcatcgtctccgaggccttagtatggtaggcggagctcgtcgactcgcgcgcgcggccgtatatagggcgctccgaggaagcagcaggttttgaggagt

SEQ ID NO: 67056 - DNA, 122 bp, Homo sapiens
agagtccttgtctctgactcagctctcttcaatcagtgggcattttaatctccatgtgaacggccaggccagcctgtctccagatgctcttccctcctctgagtccagtctgtgtaccactg

SEQ ID NO: 67057 - DNA, 122 bp, Homo sapiens
gcacagccactgcttttcacttccaggcctttgctagtattgttttctatgcctacaggccgccaccaccccacccacttttcctgtgtttgccttcccctgccgacacccaagcttgaaga

SEQ ID NO: 67058 - DNA, 122 bp, Homo sapiens
caacgccgagcatgtcgcattaatccattgatgaatcagacccccaacctccactaggggcgagccccgtggcttcttcaggcagctctgttgtggacagttcgatatgtttatattaattc

SEQ ID NO: 67059 - DNA, 122 bp, Homo sapiens
catttcacaggtaaacactggccaccgtcgccgcttacctcagttaacattattacaccccggggaagtgaggtcctccctagcctcgcctcatggcaacagccgtagcagcagcgaaaact

SEQ ID NO: 67060 - DNA, 122 bp, Homo sapiens
tgttgttttcttgttcgtgatttttttttttttttttttttacaatgaaggcattccaatcgggctaatacaaacatgaggcattctcaaactacaggaaattgctttccttaactacactc

SEQ ID NO: 67061 - DNA, 122 bp, Homo sapiens
gatcttctcggaggaaaggggcgctgggggccgagtgctggatcccactcaggctcactgcgcctggcaaagcgggggagtggggagtcgggtatggtcttttggtgaagttgtgggtctcg

SEQ ID NO: 67062 - DNA, 122 bp, Homo sapiens
tctaagcctggattcatgccctacccaggacatttcctttttgtggcatgtgagcagagccgttaccaacgctaagatttactgctttggggatcggttcagaacaaatgttccaaacagcc

SEQ ID NO: 67063 - DNA, 122 bp, Homo sapiens
tgtttgccgtcatccccttctgccgcgacgtgaaggtgctggcctcagtcatggcgctggcgggcttggccatgggctgcatcgacaccgtggccaacatgcagctggtaaggatgtaccag

SEQ ID NO: 67064 - DNA, 122 bp, Homo sapiens
ttcgggccgccctgggactgtgtcctagtctctaaatgggcgtcccggcccagtcctccacgtgtttgctcattcattcattcagcagacaatttcctccgaggcgttgaaggaggtcccta

SEQ ID NO: 67065 - DNA, 122 bp, Homo sapiens
ttgtaacctgaagctagtctccttcctactccggactgaatttcttctgtataatgcaagcgatctggcatgatgatatacaaagaccgataaaattttgctggggattctgaaagtaaaaa

SEQ ID NO: 67066 - DNA, 122 bp, Homo sapiens
aggcaggtttgtcccctcacaggattttcccacgcagggacccctgggggaagggacttccgaagggacccctgggggaagggacttcccagcggctctagacagtgccctggagagccgca

SEQ ID NO: 67067 - DNA, 122 bp, Homo sapiens
ccatagcatccctcctttttaattaacaaaaataacaggggcaaaaataacagcagcgctcgctgaccaagcgccagcatctatctgccaggcacatgctaaatgctgcactcttctatcgc

SEQ ID NO: 67068 - DNA, 122 bp, Homo sapiens
cgcctagcagatttggggccaggctaattggggcccatcgtggcccacagatgccagctccgggccatgctgagggacaggggagcggaggatactgcctgtttcccggcggggggccctgc

SEQ ID NO: 67069 - DNA, 122 bp, Homo sapiens
gcggcactgggccctccccacgggacccctcacctcgcccccacccggccacgtgacaggcggagcctgacctccccgggaagggcccgaggaatcgctcgctcaaatcccggcgaccccag

SEQ ID NO: 67070 - DNA, 122 bp, Homo sapiens
tgacttttgtatcgctttgtggagaacaaagtgaagctgaaatgtaggtattataagacacggtcaatgagagttttttagaaaacaatcaggatttaaaaatgagtttgaatttctaggca

SEQ ID NO: 67071 - DNA, 122 bp, Homo sapiens
acaagagacaggaaaaaaatgagtcatagctcactgcattctagatctcctgggctcaagcgatcctcctgcctccgcccaggtagctagaactacaggtgcacaccacaacactgggattc

SEQ ID NO: 67072 - DNA, 122 bp, Homo sapiens
tatgcccacttatgctatgctcagagagaaaaacacagcagggttgggaggacaccagctcgtgtggcttttttccaggggtcatgtgttgggttatataggattctctaattatttaatga

SEQ ID NO: 67073 - DNA, 122 bp, Homo sapiens
gaacatggggcggcgcgcagtcctgaagggggaagccgggctgtgccggcctggctctgccggcctggctctgcatgctgggagctgtagtctcttcaccgctcccgcccgttgtttcaagc

SEQ ID NO: 67074 - DNA, 122 bp, Homo sapiens
ctgattcatctgcagagtggatagcttgccccgcagggtggctgtggtgaagcaaggcaacgtctgttactgcatgtcgaagccgggctcagctgtttctttctgcatggaaagttcttctg

SEQ ID NO: 67075 - DNA, 122 bp, Homo sapiens
agctgctttagtgaagtgtgaaaggtgaaatcaaaacgtctttttgttttgaggtcaaaacgcctttaagcagtgtgtttacatgactgttgtagctttctggaagataatgttggaaggtg

SEQ ID NO: 67076 - DNA, 122 bp, Homo sapiens
tctccactcttccctgctcccagtcacccccacccacaacccccgctgatcacatcctcccggtgcccgccacaggcaaccagagaacaacagaccctcctccagagtccccgttctaggac

SEQ ID NO: 67077 - DNA, 122 bp, Homo sapiens
gcgctagggtccctccctcctcccggctctccgcaggcgccctcccctcgccgggggccgcgagttgcatttggtaaaacccagccccggaatatatagatcgttggagcgcaatgaagtag

SEQ ID NO: 67078 - DNA, 122 bp, Homo sapiens
tgtaagagtggaggaaaatgttaggatagagaagtgcaggagagtctaattaaatactgtcgtcagccaacgctttcctgaagaagtgactagctttgctcaggaactgaaagaaggcctct

SEQ ID NO: 67079 - DNA, 122 bp, Homo sapiens
agagggagcacctgtcgggctggacccggggaggcactagtgcacagatgggggagcagccgaagaggggagcgcccaagtcctcagccctgtctcctgaacagccccagccacgtgcccga

SEQ ID NO: 67080 - DNA, 122 bp, Homo sapiens
ccaccgcagggcccaaggtgaaagtcctccccttgccggaggccagctggcagggcctttcgtggctggaagtggccagtttggttccggtgctgacccctaggccccagcgcagctgcctc

SEQ ID NO: 67081 - DNA, 122 bp, Homo sapiens
gcagaagatcgtgctggcggagaagtccgccgcctgcgaggccttgctggaggagatcgccgtcaacaccgctgtaggtgagtgagggcggggccagggcagcccatccccaacacccaata

SEQ ID NO: 67082 - DNA, 122 bp, Homo sapiens
atttatggactcacatgtgtaaactgattaagtagggcggctcaccgtaggatagagtggcgtgataaagtggccagacaccatcagtgacaaagcatttctttcccctgtgttaaagtatc

SEQ ID NO: 67083 - DNA, 122 bp, Homo sapiens
gtgcgcgctggtctgcaggagggtttcaccagactgctgaagccggggacagaagtgtcacgcagtttaccggaaagctagttactcaacggaaagcaccatcttttggcctgagatgccgc

SEQ ID NO: 67084 - DNA, 122 bp, Homo sapiens
cccctcctcaacgacatatgtcagaatcagaagccacaaatcattctctgccacccagcacgctgccttggtctcctagaccactttccccaacaatgggaaaggcgccaggcccagaacaa

SEQ ID NO: 67085 - DNA, 122 bp, Homo sapiens
aggtggagcaagtgcccggagctctcggccatcatgtgcgaatgttttgctccgtgctgacgcctccctcggcaccgtcctgtctgtgttgtggactgggcagctctcacggggttgggcgc

SEQ ID NO: 67086 - DNA, 122 bp, Homo sapiens
gttgcggcagctcgtcctggagcacggcaatgtggggcaggggccgcacgaaaggcagctcgccgtccaggtccaccatcggctcctccagggctgccaggggcacagaggcgccttagccc

SEQ ID NO: 67087 - DNA, 122 bp, Homo sapiens
ttgcggcaggtcccgcccccggcccgtctcgcgcttccattggcccgccgcggcccccgccgctgtttgtctcggcttccccgccacccattggcccgctcgggtcctcccaggaagtttga

SEQ ID NO: 67088 - DNA, 122 bp, Homo sapiens
gaaggaaggaaggacgtcccatctcggcgctccagggttgagcaaatgtcagtcccaggacggtggctccgggtgggggcgggggcgacggtccgcagccgtctcccaccagctccctgttc

SEQ ID NO: 67089 - DNA, 122 bp, Homo sapiens
acgaccaattttaaaggttatttagggctcacacatctacaagtgcagattttacagcagcggactttatttttctcagatatattaaaaataagtcactgatgtgtcaaatgttttctatg

SEQ ID NO: 67090 - DNA, 122 bp, Homo sapiens
ccaagaactcccccacgcagctcctgccattccctccgcctgatttctgctggaggaggtcgtcagtttgcaggggcagaatacgaagcctccggggaattagacaagacaatattcctgag

SEQ ID NO: 67091 - DNA, 122 bp, Homo sapiens
cccccgcgcgtggcacccacgtggggctttctcactcctcccagcttggttttctcacctcggtcttgtagagtcaccccccacccagcacttcccctgcggctggactccgctcagcccat

SEQ ID NO: 67092 - DNA, 122 bp, Homo sapiens
gggctgtcagaacaagacagaggccagtccgggcagctctgccctcctcatctccgggggcgtcccctccaggtttcaggaatgagcctcaggaactggggtgtgggggcccggacggggag

SEQ ID NO: 67093 - DNA, 122 bp, Homo sapiens
aatgagacatcttaggccttgtatggtggctgatgactgtaatcccagcactttgggaggcggaggtgagcaggtcacttgcgcccaggagttcaaaaccagtcggggcaacatggcaagat

SEQ ID NO: 67094 - DNA, 122 bp, Homo sapiens
gaagagtagggttggaatgtgacgttgttagcatttggcaggaccaaaaccagaggcaaacggaggcagtgggatggaaaggcagttgattttgatgaaggcttgttgggagttcagctttc

SEQ ID NO: 67095 - DNA, 122 bp, Homo sapiens
agtattgttgatttttatttgttataattctgctatttattctctcaatttatttcaatacgccacctatactcatgggtccagtctaatttgctcaactataaaaatgcaattccaggcat

SEQ ID NO: 67096 - DNA, 122 bp, Homo sapiens
gcgggtcccggccgaggggctgcgggcgcgctggagactccgccgtgtgggaacccaacgcggggcctgtgtgtgctatcgaattacttattcatagaaaaaaaaaagggggggagagaaaa

SEQ ID NO: 67097 - DNA, 122 bp, Homo sapiens
acctcactgtgacttccagaggctaccgcattgaacagaatgcctaccaaggacttgctccgtagcaaagtaacctgcaattggagagggaattgctgctggaactcagagtaaacatgtag

SEQ ID NO: 67098 - DNA, 122 bp, Homo sapiens
gttgaagctgttccggaaggatctggactcgggcggcgcagcagaggggtcggggtcgggcggcggcggcagagcctccggcctgaggccccggaggaacgacggtctcggggagcggcccc

SEQ ID NO: 67099 - DNA, 122 bp, Homo sapiens
gggagccgggcatgctgggcagatgatgggcgagcggggcatgttgcacatttccagccccgggttagctcacccgctgaaatccccactcccgcatctggtccacaccatcctctgcccaa

SEQ ID NO: 67100 - DNA, 122 bp, Homo sapiens
ctgcgcctccctgatttggagttgcagaaccttgccctgcttttatctcactttaccgcccgagaatggcgccagccggggtggggggggctaaagatttggacccagaccgtgccactgcc

SEQ ID NO: 67101 - DNA, 122 bp, Homo sapiens
aatacccacatgccattctcaggcagtgaagatttgagagaaagagctctatttgaaaaccgtaacaagtccgtggggtttccatggttggagcacatgctaaaattctctctctctctttt

SEQ ID NO: 67102 - DNA, 122 bp, Homo sapiens
caaaatgatgaggtgaaaatttgatgtaaatagttgttcattttacttttacagttttaacggtgaaaaactattttgggtcatggctgtatgttcattaattcataagagggggttatgca

SEQ ID NO: 67103 - DNA, 122 bp, Homo sapiens
cccgccacggagtgggggcgcggttgggggcgggtgtctgccattgcccgctagcgttggcgccccaagctcggtttcactccctccggaagtgggaccagccggctgcttttcccggatgg

SEQ ID NO: 67104 - DNA, 122 bp, Homo sapiens
agctggcttctctcggtgcaatctaaaaggcggagctcggagtagcctgtgccgtcgggacgggaagatgtcagcgggcgttgtcctgccactcgggcgctctgggcgtgggccttgggtgg

SEQ ID NO: 67105 - DNA, 122 bp, Homo sapiens
tgttcgcggcagggactgcggggcggggtggaagccgggggcaaggacccgctggaggcccgccacacccgcgaccctcccggccacgccactgcccaccccgacgtctaccctggcggaga

SEQ ID NO: 67106 - DNA, 122 bp, Homo sapiens
aaaaggaggaagcagcagcagcagtggacagaaaacacccagattagaacttgggcccagcgcttctgctctgcctctgtcccctggtggacagggatgagctgtgtaaggtcagttttcca

SEQ ID NO: 67107 - DNA, 122 bp, Homo sapiens
aagaaagttgtaaaaaggcttagcacacacctcacatgtgaactgtgctcaacaaatcaccgtcatcactgcaaccacctcaagaaagtgactttattgtaaatttgaggtgccaagtaatt

SEQ ID NO: 67108 - DNA, 122 bp, Homo sapiens
gaatcaaaggggccccctggcgagaggcagccgagcttgcctttataacagccgcgctcccgagagggtcgacccactcccgacaggaagcaccagcccctcttcacggacaaacccgtccc

SEQ ID NO: 67109 - DNA, 122 bp, Homo sapiens
tgcagcctattacagtaatggaggtgaggcagatgagagtttccgaggaaccgatctccccggagtagattcagtgcctagaatttctacggaagccacctgagaagaaaacaggtctatct

SEQ ID NO: 67110 - DNA, 122 bp, Homo sapiens
gacacactcaccgattacacaggcaggagaggcattttctgtgagacaaaattcctctttcgtcctccagcttcggtgcgatctaacggatgttttatcattcctgtcatggcgctatgtaa

SEQ ID NO: 67111 - DNA, 122 bp, Homo sapiens
gggcggcacccaagcctagggggcacagtggagaggggtgtgcatggctatttttattaccgaggggtcaggagaggcttacagaattttgcctcacatgccctccccatcatttcccaaac

SEQ ID NO: 67112 - DNA, 122 bp, Homo sapiens
gaccggagtcgcctccccggggcagcccgcacgttccccggctggccttgtccggggtggcgagcagaggcctggcctggccccccagccgcgtccctgccagctctcggcggccgcgagga

SEQ ID NO: 67113 - DNA, 122 bp, Homo sapiens
gtgactgcttcaccgtcgaaagagcgatggagactgcggcccaagttaggattaggacagcggtttttcagtccggagattccggccacaactatttttgtctgtttttatcgtaagccaga

SEQ ID NO: 67114 - DNA, 122 bp, Homo sapiens
agagaggacactggggcttggacccgcaagaggtcaggaaccatgtcctcctcatctctccgcccttgttctgggcttcgcccggaagaggcacagatggacgtccgtggaagaaacgaccc

SEQ ID NO: 67115 - DNA, 122 bp, Homo sapiens
cacctgcaaagcacaaaatgtacaaagtactttttctcaattgtcacaaagagtgacagacgtctcaaagttcccaattaagtgctacttacctttagggagagctctttccttttttggtt

SEQ ID NO: 67116 - DNA, 122 bp, Homo sapiens
gatgagggtggcaaggagctgacgctgacggaaggaaagttgcggagcccccgaaggacccgcagctggcgagactgccaggaatgttcttagagagtcattttggctttcagaccaagtga

SEQ ID NO: 67117 - DNA, 122 bp, Homo sapiens
gtcgccgcctgcggacggcgaaggggcgggtgaaacgagtttccagcgtcgagcctgcttcgtttcaaggtggacgccacatgcaagccacgagcgcgtcgccgcacggtgtacgcccacgg

SEQ ID NO: 67118 - DNA, 122 bp, Homo sapiens
gaggctgaggcagtgaccacagcagacgcacctttcaaacgtgcagggaaaggtggctgacgggaggcgtgagcagccatcccagcttctgctcgtcgtgggaagcagaagggagtcgcccg

SEQ ID NO: 67119 - DNA, 122 bp, Homo sapiens
cccagagatatgaggcaccctttgctccacccacagcagggccccgtcagactctgccagcgcgtcctgcccgcttccctcggtgacctgctcagacaatggagagggatgggccaggttct

SEQ ID NO: 67120 - DNA, 122 bp, Homo sapiens
cgccgcctttgcctttatagccgccgatatgctaatcacccgagccgggtagccaatggccgcctccccctcgcgtcgcccctccgcctgcctctgacaatccctttaatgtggaaaggctt

SEQ ID NO: 67121 - DNA, 122 bp, Homo sapiens
tggctcttgccgttgccctctacttgggctactactgggcatgtgtgcttcaggtgggtgcgggtccaccgctctggccagcgggtttgggtgtagggggcagcttccagacacgggcttgg

SEQ ID NO: 67122 - DNA, 122 bp, Homo sapiens
cccggagttaggagggggtgtgggagcccgtggagcacaggtgaactgaggccgccttcccggggcgccgctggccagccccaaagggttactttggccttggctgtgggccgaatgcgaag

SEQ ID NO: 67123 - DNA, 122 bp, Homo sapiens
catgaacccaccagaaggaggaaactctgagcacatcctagcatcagaaggaacaaactccggacatgctgcgtttaagtactgtaacactcaccgcgagggtccacagcttcattcttgaa

SEQ ID NO: 67124 - DNA, 122 bp, Homo sapiens
caccagaaggagagagttaaaggggaagaaagcccttgagtaggagccaagtcatctgaacgcacaccctgtgcccagaggaggaggggcaagagttgctttccatgaagagtgcacctgat

SEQ ID NO: 67125 - DNA, 122 bp, Homo sapiens
taatctttgtttctgaagccagtggagcccagctgcccagccttggggggaccacaaccacgacagaaactgattaagttgctctgcaagtgtttgctgagtgcctattgtgtgccaggcac

SEQ ID NO: 67126 - DNA, 122 bp, Homo sapiens
cactagtgcctgttttcctgactctgacttcctgggtctcggcaccacagatagcttctgcgtttctctacaggagggaagaagcaatttccaattctgagcttcatgagggaggagaataa

SEQ ID NO: 67127 - DNA, 122 bp, Homo sapiens
gtcggcaggggtgccacccctggccatccgccagctggccgggtctcagcccttctccagcgagggcctgggccgcctggtggtgggcgacttctccgactacaacaacagctacgtcgggg

SEQ ID NO: 67128 - DNA, 122 bp, Homo sapiens
tgaggagtcaaatatttcaacaggcgaaccaagaaggcaaacagggagaaaggaaagagccgtgagcacgcgctatctcccaacatcccagtggtcgggatcctcaccttttgatgagcttg

SEQ ID NO: 67129 - DNA, 122 bp, Homo sapiens
ggatggggtcttccccttcgtcacttattcagttactctgaaggtggtagaagggggcatcgcccaagctgtcaaggcgccccagaaattgaaaaacagaagttgagtattcatctgcctct

SEQ ID NO: 67130 - DNA, 122 bp, Homo sapiens
tcgaagcccagatacatcaatttaaatttggttgtccgtggtgtttaatacgcaaggccacgggattgactgagatcaccaaaagaatcaatataaataaagaagagaagaggactaaggac

SEQ ID NO: 67131 - DNA, 122 bp, Homo sapiens
taggcgctgcgcagggtgtgatttacctcccgagaagtgcacattccctccacccggcatcgtcatcatcgtgttgatctccttctggagcgtccacagcgctcccgacaatgcgagtcttc

SEQ ID NO: 67132 - DNA, 122 bp, Homo sapiens
agtctggggcccaagaacgcaggctccatctcctcccgcaggagccaggctgatgatgctcgcagggatcggatactgggagcccctgaacgcagccaacccggcgcgcaccggtgggggcg

SEQ ID NO: 67133 - DNA, 122 bp, Homo sapiens
ggaacggcggccgcgggtggtgcggagggaggccttgcgggcggatcgggcgcttggcggcggaggtggtgggaggcggcgggcgggagcgcgggtcaggccggccccggcgatggcggacg

SEQ ID NO: 67134 - DNA, 122 bp, Homo sapiens
gtgttaagctgctcaaatatactgccatcacctattacaaggcactacctggtttctctgcgtacccgtggttcaaattcaatgtagttactgtaatgcctgtatttagcctgttttggcta

SEQ ID NO: 67135 - DNA, 122 bp, Homo sapiens
cagcccgagagccaatcattctccagagagcagagccagctgctttatcagaaattctttcgattttcttagcaacatgagtatccccttctagaagaaagatgttgcctcttggggaaacg

SEQ ID NO: 67136 - DNA, 122 bp, Homo sapiens
atacacacgcatgcagatcacattcccaccactccccttccctgtgctttcccaacaccccgggtctctggaattggttttaactgagatgaaagacagagaaggaactgcggatgcccccc

SEQ ID NO: 67137 - DNA, 122 bp, Homo sapiens
gttttgttgacgcggctgccgagcacttccagtaggtttcctaatgaactggtttgttatcggcctcactgcagcgctgataattacatcagaaacagggggcccactcgtccttcccacgc

SEQ ID NO: 67138 - DNA, 122 bp, Homo sapiens
gagtgtactcaggacaggcgctttgggccaggctgctaatattgaaaagagcttgctgggcgttgtggctcaagcctgtaatcccagcattttgggaggctgaggcgggaggatcgcttgag

SEQ ID NO: 67139 - DNA, 122 bp, Homo sapiens
cctcacaactacccatgcacctgccaaacccggcaattaagcttcttacacatccagccccgacaggggtctacactacagataatgcccgggttcaaattccgactccggattccccactc

SEQ ID NO: 67140 - DNA, 122 bp, Homo sapiens
ggagaagagatcccgtttcttggcaacaggaagctcttggtttacacagtgtcacccaagcgactgggagccgcgtcctgctctgggactgagccgttggagctgccccgctgaccgcacta

SEQ ID NO: 67141 - DNA, 122 bp, Homo sapiens
ggagagaagatgggaggcaaggactggaccgacgggcctctagcttcagggcgccaggttcggggcgcaaatccgggagggaagctccggccgcccagcccaggccgcttggagatccctgg

SEQ ID NO: 67142 - DNA, 122 bp, Homo sapiens
ataagagcacaaaataagctttgggagagatatatgaaacacttaaagttgttgggactacgtgtatctggaagaagaaatttaggtctttgacttagcagttaataaaatagcagtggtta

SEQ ID NO: 67143 - DNA, 122 bp, Homo sapiens
gcgcctcggcctggccgcgatgaagtccccgcccctcctcaggtgacggatcgccgctgccgtcccgggctgcccaccaccccggcgcgtgcccgggagcctccaccctccccgggttctgt

SEQ ID NO: 67144 - DNA, 122 bp, Homo sapiens
agctgccagcgaattccggcggcagttcgcgggtaccttcccagcccatcctatctgctccggaccgcgggtgacattcagatttccaacaccgccccgagcttgctttaccagacaccctc

SEQ ID NO: 67145 - DNA, 122 bp, Homo sapiens
ctgtaggaaatgaagtttctgaaagctgctaatttggggcagtaattgaaaacattactacggaacagaatggaaagtaaatattggatgtatgtctcccaccttaacaaaacgagggattt

SEQ ID NO: 67146 - DNA, 122 bp, Homo sapiens
ctggccccaggacctcaacttgaagggttgctgacggttgcttgctccgtctggggaccccgggaggaagctgcctcggatttaacgccttgtcattacatgggatagaactgtgtaaaaat

SEQ ID NO: 67147 - DNA, 122 bp, Homo sapiens
tggcaagggggcgggggtctgtggaagacaaccccaggctggggtggcttctctcaaacccgggcatgcacagtgctggccgtatcggtccgagccctcggctgccagggagagaagctgag

SEQ ID NO: 67148 - DNA, 122 bp, Homo sapiens
taacatgtttatgccactgatttacacactttaataatttttttttttgagacagggtctcgctatgtcacccagactggaatgcaatggcaggatcatggctcactgcagccttgacctcc

SEQ ID NO: 67149 - DNA, 122 bp, Homo sapiens
gggcgagaaagaagcctgggtcagaaggaggtgggggagggggactgaggaccacctaagcgcaagaagggttgggtgtagaagagatttctgggagactagagcagctccatggtccagca

SEQ ID NO: 67150 - DNA, 122 bp, Homo sapiens
tacgtggccatctgcaacccactacgtcatagcatggtgctcacttatacagtggtgggtcgtttggggcttgtttctctcctccggggtgttctctacattggacctctgcctctgatgat

SEQ ID NO: 67151 - DNA, 122 bp, Homo sapiens
gctgacttccggtgcactcctgcgcgtgtgcacctctctctgtgtgcgtgttcgcgcatgcgcgccgccgctgcactgccctcgcttcctgtgcgtcctcaggtcaccgcttgctctagttc

SEQ ID NO: 67152 - DNA, 122 bp, Homo sapiens
gttcttttttgggttctgacctaccacagcgttcagagaactacatccgggtttagaggccgtacgtttgcgatatagcccaatagcagtcgttatggtgggggaggcggggcgagacctac

SEQ ID NO: 67153 - DNA, 122 bp, Homo sapiens
acccgcctgtccgcaggctgagctactcggaccacggagcgcgacggggaggcgcgactgcggctcagcaaggactaagttagcaacaagacactcctcactgtgcacgacatggtcgcgag

SEQ ID NO: 67154 - DNA, 122 bp, Homo sapiens
ggatggctgtgggctgatctggccctctgatgagttcagactgcctcgagaaaggcgagtcgggctggaaggcctctgaggctgaaggagggtcctggcagcccagggttaccctcgacacc

SEQ ID NO: 67155 - DNA, 122 bp, Homo sapiens
ctccggcgatctcccgttggatgaattgcacaggctgaaactcgagtcccctttgatttgcgcttcattaattattcatgattcaggttggaaggcctgctgacgaccccctgtggccgttc

SEQ ID NO: 67156 - DNA, 122 bp, Homo sapiens
tgacagcctttcacctggctggagttatggcttctgtcccatttcccttttgttacatctcgactgtgtgtgtttaaagggcaatgtcatattctaatcctctcttccatctgaaagtccag

SEQ ID NO: 67157 - DNA, 122 bp, Homo sapiens
cagttccctccgagcaccagagagtggatttccggatcgcgcaatgcatgcgtggaagtgcgtccccggaagtacggaggccgacaggaagagaaggaaaaaagagaaggcgctgtcccgct

SEQ ID NO: 67158 - DNA, 122 bp, Homo sapiens
tctcctctgcagccctggaagcaggactggatccagcaggccctcttgtgcttgccaggacgttcctgccctggactgtctacttgtcctcatgctctccaccccggggccttgtgggtagg

SEQ ID NO: 67159 - DNA, 122 bp, Homo sapiens
ggtgatccactggcctcagcctcccaaagcactgggattagaggcgtgagccaccacgcccggccgggatactgaattttggttgtgattattattcatatttgagtttatttattatttgt

SEQ ID NO: 67160 - DNA, 122 bp, Homo sapiens
tcggaaggcactctgcaaaccgaaactgactctccagcactgggtttgttgcttcatctccgagtgaaggtgcaggtgaccacgctcagctctccacccacaggagccatggcttggcttgt

SEQ ID NO: 67161 - DNA, 122 bp, Homo sapiens
ctgtagcccacggcacttggtgcgtctgtagcccacagcacacggcgcgtctgtagcccacggcacatggcgtgtctgtcttggcacgcactggaagcacgtgccctgccctcatgctgcca

SEQ ID NO: 67162 - DNA, 122 bp, Homo sapiens
ctagccttgtccactctagttcagccttcttccctctcagctctgatttctcctctcccccgtggggctgcattttcatggagtacctatctccaggcactgctctcattttatcaaccctc

SEQ ID NO: 67163 - DNA, 122 bp, Homo sapiens
cagctggcgacccgggaccccggcgcccctcccagattgggcgggatcagacccccgaggcggatgccgcttagtcagacttggctgttactgttacctgtgttgttgagattattggcccc

SEQ ID NO: 67164 - DNA, 122 bp, Homo sapiens
cctcctgggagtgggggcgggagcgcgcggtgggcgggggcggcgcgggaacaatagcggcgcggaggcgggggccagccgagggggcgtggggctgcgggacctgggtgcgctccgctgcc

SEQ ID NO: 67165 - DNA, 122 bp, Homo sapiens
acagaactcaagggcactggcgctgagcgctgcccatgcagctggcaattaagccattgccgaaaacaacaataaaacagattttgggcaagtagggaatggtggattgaatccagtgtggc

SEQ ID NO: 67166 - DNA, 122 bp, Homo sapiens
ctggctgccggtgttctgttaaattagggtgagtgcttgtctgtgcttcagtttccctttcggttaggcaggactggtcttcccactagctatcatctatagtttacttaactctattatca

SEQ ID NO: 67167 - DNA, 122 bp, Homo sapiens
ttgtaattgtagttcatcatgtgatgacttatgaaagaggaagttggtatgttttagtcacgtagactctgccctcttgcttgaggcaccaggtcctctcaaaagagaattatgatcatctt

SEQ ID NO: 67168 - DNA, 122 bp, Homo sapiens
tgctctgtgtgatctccgttggctctgcctacggccactgcttgggcgtgcagattgtgccgtcataatggaagctgagctttgaagaagtcacgcttaatgctttgatgcgatctcttgaa

SEQ ID NO: 67169 - DNA, 122 bp, Homo sapiens
ggggcagatccgagggctgcctctcccagggaccctgacaggtgccctcccgcccgcgcccgagacccttccccagagctggtttcttcaaccacaagatcagcgcccagacctacggaacg

SEQ ID NO: 67170 - DNA, 122 bp, Homo sapiens
ccagcccctaaatgataccacgtgctcggtcctgccaccgcctggtgaacgctggatattcgacttgaggtgggggagaatcccagccccgtcattttggaaagagttgggccacaaggtgt

SEQ ID NO: 67171 - DNA, 122 bp, Homo sapiens
gtgggggcggggagacacaggcaacccaccctaggatcctaaaaatatgcctggagagtgcgcatgtaccaactgtttggaatggttcccaacgcacaagaaatagaactgatccatgcagc

SEQ ID NO: 67172 - DNA, 122 bp, Homo sapiens
gccccgtgcgcgtccccggcgttggcgtcttcgtcctgttgctggtctccgtccggtcgccggccgtctaggtctccggccctccccagccgctcctgcgcccttgccggccccgccgcccg

SEQ ID NO: 67173 - DNA, 122 bp, Homo sapiens
cagcgtcccctcccccgccacgcccgtcgactttctgggagttgtagtccaagtgtaaaacggaagctcaaccacgaatcttacctctcagcatgctgggagttgtagtccgccgctagaaa

SEQ ID NO: 67174 - DNA, 122 bp, Homo sapiens
ccgcaaccgagagggctgggcagaactataagaggcgcggagggggcgtgcagcagagtgcgttcctcgtctgccagccggcttggctagcgcgcggcggccgtggctaaggctgctacgaa

SEQ ID NO: 67175 - DNA, 122 bp, Homo sapiens
ccgcacggggccttaggggatccccacgcacagcactcacagtcctaaacaggcgtgtgccggctgtggctgccgagaaaggaacttgggccacctgctcactcgctcatcggactggcgta

SEQ ID NO: 67176 - DNA, 122 bp, Homo sapiens
atgtcacaatacacaaagcatgcaggccttaagcagaagaggagagtcacatcacctaggcggtgggcccagcaatacatcacaattcctgcttggacaaagcccaatccatagaggagagt

SEQ ID NO: 67177 - DNA, 122 bp, Homo sapiens
caggctaacacatattcctgaactagggtagaccacacaggcccaaagactacctactatcgcgctgagctatttttgtttacaagattctgacaccaaatatgtcgggggtttttccacac

SEQ ID NO: 67178 - DNA, 122 bp, Homo sapiens
ttagcgagagtactgactccgactccaagagtggcctccggggtttcagcgcttacaacccgagcagtcggatccccaagtctaccaccagctcgaactcctccgatggggccgtcacagcc

SEQ ID NO: 67179 - DNA, 122 bp, Homo sapiens
ctgagaaagtttggtggccggagactgtggggcgcttaggtaccgacctaacaacttctgcgcctgtttccagggacgagccacgcacggtgccccctgaacacctaacagtcccgggggca

SEQ ID NO: 67180 - DNA, 122 bp, Homo sapiens
tgccaggctgatcttgagcctaccttctgcctcccggacactggctgctctggatgatgacgaggagagaaggcccggcgctacgagcagccaagggcagcttctctgagtgcagcctgaaa

SEQ ID NO: 67181 - DNA, 122 bp, Homo sapiens
ggttggaaaccgtccaatcatgcaggcagctggagcgaagaggaaggctttcgggtttggcgcggccatttgtctcttgctgcagctggtgctccaaatctggtcttagctgcttcgtgtct

SEQ ID NO: 67182 - DNA, 122 bp, Homo sapiens
ccctccctggccggcgccgcccgacccgctcccccatcctagagggaattccctgcgccgcggctgtgaggcacctccaccccggcctgaaatgcaccgcagtcctgaaggaaatccaccct

SEQ ID NO: 67183 - DNA, 122 bp, Homo sapiens
ttttaattttttgtttgttttactttttgttgttgttggtgttgttggtttagaaaaactcgaagtaagaaaagggtaatgggatccttgttcatgtctgggaagtcccagtgagagagtca

SEQ ID NO: 67184 - DNA, 122 bp, Homo sapiens
tttctaccagcattatcaccatcatctactctccactggaaaaataatggagcaggaggccgggcgaggtggctcaagcctgtaatcctagcactttgggaggctgaggtgggcagactgcc

SEQ ID NO: 67185 - DNA, 122 bp, Homo sapiens
tccctccggagacggaacattgttccgcctttaattcttcccaggagctgcggaggaaggcgtgagaaccggagcccggggtgacttgcgggggaggggatcgcttccccgtcgcccacacc

SEQ ID NO: 67186 - DNA, 122 bp, Homo sapiens
gacacagcacgaagccctgctcggcctccagaaaacgaggctcgctcctgagtcttggctcgctgggccaccgtcaccctgctctctggttcaagaggcagcggccaggccagccgagccag

SEQ ID NO: 67187 - DNA, 122 bp, Homo sapiens
gtggggctttagaggagtctctgggctggccggttggggactacaagtcccagggtgcttcgggcccgcgaacccacgtcggggacctcttttttagccccgcatgatcgggacttgcgtga

SEQ ID NO: 67188 - DNA, 122 bp, Homo sapiens
tgcagccagcagctgcttcgcgacgtcgtagtagccccggttacaggcctcgtgcagcgccgtccagcctggaaacagacactcaggacgtacgttatttaatcctcagaacttccctcctg

SEQ ID NO: 67189 - DNA, 122 bp, Homo sapiens
aggggagggtgtaggtagtgtatccagatcacctgtggagctttttccaaatgtacatgccgattgcttatcccacattgagtcctttatcctttccttctcttttccaccaaacttcctct

SEQ ID NO: 67190 - DNA, 122 bp, Homo sapiens
gatcaagagaacagatggtaacaagaaggaaatgacattggagaggaggatagagatttgcggtcttcagttttgaaaggcaatagctaagaggggttatgaacaaataatatacaaatatt

SEQ ID NO: 67191 - DNA, 122 bp, Homo sapiens
tgacggacaggagggcaaccaactgccttaaacaacgggaaggaagaggcggtctaaattcgtccacttcccgggagaggtgagaatgtaaacacgcgcgttctccaatcagaactgcgctc

SEQ ID NO: 67192 - DNA, 122 bp, Homo sapiens
cttctcgcttcatttcattaatttcatcttccattgctgatactctttcttccagttgatcgcatcagctactgaggcttgtgcattcgtcacgtagttctcatgccgtggttttcagctcc

SEQ ID NO: 67193 - DNA, 122 bp, Homo sapiens
taaaagttgctattctaagtcttctatccaccactaatttaggacaactctgctgggttgcgttatttcatactagcttatttagtggttccattttcactcctcaatagattttatgtatt

SEQ ID NO: 67194 - DNA, 122 bp, Homo sapiens
ggcctcggtccctcctgtcgtgcagggagttctgctcctggaaatattcctcctcttcatcgaagaagccgttctccagagcgtaagtgcagtctgggctggaggctgcctggcatgccccc

SEQ ID NO: 67195 - DNA, 122 bp, Homo sapiens
cgcaccccatgctgcctgcggaggcacaggacagacgccactgggcagcccttgcggaagcgctggatcctttaccctgaaatcactgggtccccagttctgcagacaggaacctgagcctt

SEQ ID NO: 67196 - DNA, 122 bp, Homo sapiens
tcttttcagggtttttgcatgtctgatcaatggctctacctgaaaccaaaaagagctccccgcagccccagccagaagtgactcagtaagcaggaccgtttcccacacccctatgattgcac

SEQ ID NO: 67197 - DNA, 122 bp, Homo sapiens
aattgtggactagagcagaaggcgcccagccacaagctcaagttctatcccctttgcactcgataggcagatcccctgggaggatcaggccacctgtttaccagtgcttcctaacctatttg

SEQ ID NO: 67198 - DNA, 122 bp, Homo sapiens
ccgtgcagggtaaaaagccactgcgagccagggacagctggcctccaaaacccccaaggacgcggtggaggtaccttcagttaaaagtgactacaactggggctgctgtgctgtgagatctc

SEQ ID NO: 67199 - DNA, 122 bp, Homo sapiens
ggcgtcttctatcagaaggggccgaggggcctggacacggctgctctcgcttctgctcctcgcagcctgggaggtggggagcggccagctccgctactccgtccccgaggaggccaaacacg

SEQ ID NO: 67200 - DNA, 122 bp, Homo sapiens
tttgccagagcctttactgtgagtaggacaggactcaggaggcctctgaacaaaaagaagcgttgaagcttcatttggttgttggaattgggagagcacaattggttggaaggaaatcaggt

SEQ ID NO: 67201 - DNA, 122 bp, Homo sapiens
agacttccccagctgttcatgacatccagggcagtgaccttggctgtgtgaggagtggctcgggcacaggtggtctcaaagggcctgttaccctggagctgcctccctgcatcttagcaagc

SEQ ID NO: 67202 - DNA, 122 bp, Homo sapiens
gcccgggtggtgggaccgatcctggagcccagatcaagccaagtccggccaaagctgtgtcgcaaagtaagaatctgaagacaggtccggtgcttaaatgactattattctaaagagttgaa

SEQ ID NO: 67203 - DNA, 122 bp, Homo sapiens
tgttgcagtggctccgcgatgaggctgtgctgagtgagagacgcccccttctcagcttctcgcagactcttgctccctgcgctccagcgccgctcacggctggtgctggcaggcctggcatt

SEQ ID NO: 67204 - DNA, 122 bp, Homo sapiens
aagaactctaccaactccaaaaggaaacaatgcccagttctgctccgtcaagggcccacccgggctccttccaacctggagaaatctttactaacatggggcccagggcacacaccacactg

SEQ ID NO: 67205 - DNA, 122 bp, Homo sapiens
taggtgtgcctgtgcgtgtgcatagggtgcgggccatgataaggtgcactgttgcgctctcgcctgtgggcgcggatttcccgaccaagcacccactggtgcccaggcgtggggggtcgtct

SEQ ID NO: 67206 - DNA, 122 bp, Homo sapiens
gtgggtggggacagggctgaggagcaggtcatccaggcggccatgcgcaagtacccgaaccggtacctgggcagctccccatcttctcagcatcttgtgggaggcccagtgtttgaaagaaa

SEQ ID NO: 67207 - DNA, 122 bp, Homo sapiens
acgaacaccaatcaaagaccagagcccggcttcagtagcgacgattgggcagtctggccacgtgctcgtgggggtgtggcctttgtttctgcgtcccctggggcctgctctgactaaggcaa

SEQ ID NO: 67208 - DNA, 122 bp, Homo sapiens
gtgaaatgcaatttacctgaaataaagcccaattatggaattagctaattaaagccatggcggaggctgggcctggccggccgagtgctcaatgcccgccggtgcccgtggactgagggaac

SEQ ID NO: 67209 - DNA, 122 bp, Homo sapiens
cacagtcccataccttgtgggtggatgcagcaacagagctgtgcagaagggcaatttggccgtaatcatcaaaactcaaactgagcacacctgctcccaaggccccacttctagaaatccac

SEQ ID NO: 67210 - DNA, 122 bp, Homo sapiens
gacaggtttagatttatggaaaagtttcgaagatagtataacagagctacccgcatgccccgggcccgcttcccattcttcctcaggaaaggctcattggccataacggacgaaccagcagg

SEQ ID NO: 67211 - DNA, 122 bp, Homo sapiens
ttagcatatgaataatacactctagtctacagagaagataatggaagccaatagtccaagcgttcaagtggtacttacttcatttaaaagtaaaagcccgggatagacaaagacagaaaaag

SEQ ID NO: 67212 - DNA, 122 bp, Homo sapiens
gagcgacaccactgcgtgtgcatgacgatggagctgggtaggggaggctcagaactcatccgagatgacaccttgcctgcggcttggcttgcttgaagggtccccccatgtgaccttggaga

SEQ ID NO: 67213 - DNA, 122 bp, Homo sapiens
caagtgctccggagagtgacaggtaggtactcaccacacacgctggttcctgcctctgctcgttactggttgatctctaaacagaaactagactttgcagaacagagaaaaactaaatttgg

SEQ ID NO: 67214 - DNA, 122 bp, Homo sapiens
caggcccgacggggggcggggcctgggcggcggcggcgttagttctccgggtacctcaggcgcctcagcctccttagtctcctcatcctgcttcacaggctccgcggcctccggcctcctcg

SEQ ID NO: 67215 - DNA, 122 bp, Homo sapiens
gacttttaagcagatagaaaatattgtcatttcttttaattcacagcattactttcaagccgaacaaaggccagggccggggggaggcgggggaagggctcggctgtaatgaagcgcctcta

SEQ ID NO: 67216 - DNA, 122 bp, Homo sapiens
cagtaaatgcaaccatagaggatgatagggtcgctaagaattgggatttgattcgaggcacggtggaagccgcggaagggaacatgatttgatctgatttacctttaaaaattaacgacctc

SEQ ID NO: 67217 - DNA, 122 bp, Homo sapiens
ggagacttttacggagaggatgagaggagctgcctcctgagcgcaaggtctgctccaagacggtccagtagcactaggtccagtctccgagccatgcctctgagcctagtcttcttcaggcg

SEQ ID NO: 67218 - DNA, 122 bp, Homo sapiens
gcagctctgtgcagcagggagttcaggggatgaaaacaagagcagtcgtggtgacaggcccgggctagtgtatcctcctcacctgacctgagcaagctccagggagcagcacaggggtctgg

SEQ ID NO: 67219 - DNA, 122 bp, Homo sapiens
agtttcacagagctgcaatctccaaatacacacatttgttctcagatgacagcagttcttcgaattaacagtgaaaatattaagccgaaggaagacattttggttgtcttgacaggttgact

SEQ ID NO: 67220 - DNA, 122 bp, Homo sapiens
accgccagggctcctccaggtgtgggggcctctccctcctcctaagggcgtaggcagtaccggaatttcgaccccagaagggtctggcgacgagtttgacagaggtctgggaagaggctctg

SEQ ID NO: 67221 - DNA, 122 bp, Homo sapiens
tgaaaactcaagggcaggcgcctggtccagcgattcggaaaccgagatgcaaagtcctcccgcgctcctagagaggacccggaagcgcggcgcggtcccggaagacgaggtggtgacacgct

SEQ ID NO: 67222 - DNA, 122 bp, Homo sapiens
acaacaatatgttgtatgaaatggctaaaaggattcagggaaaaaggcgcttgtggtgcacgtctttgttaacctggctgtgttggcctagcttgttttcagcaattccccagctagttgca

SEQ ID NO: 67223 - DNA, 122 bp, Homo sapiens
aaaggctcactgcagcctcctgggctcaggcatcctcccgagtagctagaactacaggtgcgcgccaccattcctggctaatttttaagttttttgttgaaacgggagtctcgctatgttgc

SEQ ID NO: 67224 - DNA, 122 bp, Homo sapiens
cgcgcccgcgagactcggacccggcctagggctcagcgagctctcagcggggcgggcggacgcaggcagcccaggggagtggggcccgccctgcgccgccatcacccctttaagtgccaggc

SEQ ID NO: 67225 - DNA, 122 bp, Homo sapiens
ccctcccctcccttcgctttgcttcctagtccccggagtcgctaccgcccactttctagccggacaaacagcagtccagggccaggcacacagcagtccaggaccgggcacagcactcaccc

SEQ ID NO: 67226 - DNA, 122 bp, Homo sapiens
ccgtttgtttttcttagagggtaatgaaaatttaacagctttctgctgcatcctgagtcccgctcctaataactattaacatgcctagtttcttcaactttttctacctcaagagaggaaga

SEQ ID NO: 67227 - DNA, 122 bp, Homo sapiens
actgtcagggtcctgcgctgctggtctcacgcagccttcttccccgggccgcagccagcacggcctccaccgttttcctatgggccctgagagccctgacgttgcggcagcgccagccgggc

SEQ ID NO: 67228 - DNA, 122 bp, Homo sapiens
acctaaccacctggtagtcctttttggttctcccctaactcggtgctcaatgtcagggtccgagtgctctgcagtggatgtggctgggctggggttgccctgtaaagtgttgaagaggatct

SEQ ID NO: 67229 - DNA, 122 bp, Homo sapiens
gttcttgccatcttccttttgacctttttacctcgctttggtggctgtgaaatattcccgcgcaggagctggagcggggaggagtggggcagagcacgggaggcacagaagaaattgtcccc

SEQ ID NO: 67230 - DNA, 122 bp, Homo sapiens
agataaccctggtaataattctcgtatctacaatgcattctgggatgcaaatgagctgagcgccggaacaagagttcctctaaaccctctctctcttaccagtaaatggagagaggcacttg

SEQ ID NO: 67231 - DNA, 122 bp, Homo sapiens
aggcatttggactcagaaagagattctggtggccagacgggctgagcttgttggtggccgcgtgccgtcggcccgccataggggatgtggggttgctctcggggtcagaggagctgttggca

SEQ ID NO: 67232 - DNA, 122 bp, Homo sapiens
tccacccaggacacccagctcctcttgacaggacctgaccctctgtgcccagcgtcatcacggcaagcatctcctcactcaccagccttggagtcggacttgttttgtggtgggctgagggt

SEQ ID NO: 67233 - DNA, 122 bp, Homo sapiens
acaaatcttaaggcaaatagtcctgttcctattcacttgtcattgcaatgaagcatctgccgctcactgtttttttgttattttttttcctgattactccaattcaaaaacatcatcctacc

SEQ ID NO: 67234 - DNA, 122 bp, Homo sapiens
ctcattcttccttcctgtctgatttcaacagccaacagcctcgcagacacatcgaggagccggggcaccctggcttggtcaccgcccccgtgcaagttaagtgcgggggcgatgctgggggt

SEQ ID NO: 67235 - DNA, 122 bp, Homo sapiens
cgagcgcaacaaagctgagcggcgcgtcgcttcaggaacgaagaagcctcgttatgcaagcggtgagtgacccccgaagggcccggaccttctgtccacagtgctagggcgcgcgagggcgc

SEQ ID NO: 67236 - DNA, 122 bp, Homo sapiens
ctccaagttacaaaaaagcttttacgaggtatcagcacttttctttcattagggggaaggcgtgaggaaagtaccaaacagcagcggagttttaaactttaaatagacaggtctgagtgcct

SEQ ID NO: 67237 - DNA, 122 bp, Homo sapiens
cagtgtcctcctctgtccccgccacacacgctctcacacgcacacactcaggcgtggaggcgcatacaccagcccccagtccttgcagccagcacagtcaaagcgccgcggtcccggtggcc

SEQ ID NO: 67238 - DNA, 122 bp, Homo sapiens
tcccggcaccttggatgcgctgggactggtcctcgtggttgctgagcatgctgctctgaacggttgtattttatttgatgaaaaataggaggccgggcgcagtggcttacgcctgttacctc

SEQ ID NO: 67239 - DNA, 122 bp, Homo sapiens
ccacggcctccgtcccgaggtagggtgggtgggcgagcgcagcctgatgctcttttgctccgggtttctgcccccgggcggacggtgtagactctgtagcgagcggagagcgaaggtgcaaa

SEQ ID NO: 67240 - DNA, 122 bp, Homo sapiens
gggacagggagtggggacgcagaggcgggataggaagccgccttctccgggatgcccagacgcctaagcctggcagaggcaaagcgctagacggagcaccgcaaaagcccccatggagcggt

SEQ ID NO: 67241 - DNA, 122 bp, Homo sapiens
cacgcagggtcgcggcgtgctcgcgcccgcagacgcctgggaactgcggccgcgggctcgcgctcctcgccaggccctgccgccgggctgccatccttgccctgccatgtctcgccggaagc

SEQ ID NO: 67242 - DNA, 122 bp, Homo sapiens
ttcatgataaagaaagggaattccggagtgctcaatattttacatgagttgcaggtgggccggtagcggaagtgggcagctgtccttcaacccagccataaactctgtttattggtgactat

SEQ ID NO: 67243 - DNA, 122 bp, Homo sapiens
ttttcggaaatttgcatttggtgtggaaagccggcgtggtgcgtttagcttgagcaggggcgccttggaggtctatttccaaggctgtgggcctggcgccctcacgacattgtacctatccc

SEQ ID NO: 67244 - DNA, 122 bp, Homo sapiens
gtgcgcgaagggtagacctccagacctaggcaggggtccacgagggagggtcagtggactcggagcagccctggggctcctccctcacgccaggtgctcaccggaagtggagacgttggccg

SEQ ID NO: 67245 - DNA, 122 bp, Homo sapiens
tgcttaccaagtcgctcacgagtgggataggtttcctcttgcggatgtctggcatgctgtcgatgatgatgagaccgccccctgggctgaaagacacagagggacactgagggcccagatgt

SEQ ID NO: 67246 - DNA, 122 bp, Homo sapiens
tcttagaaccagatgcctgttattcactcccaagcctcctaggcaacccgccagtgagatcgtcccgccagtgagatcgtcccgctgttagtctttgagttgatggccagtcagccctgggt

SEQ ID NO: 67247 - DNA, 122 bp, Homo sapiens
tgttgttgggagtacatctgctgagtatgggcagatgcgtatgcctgcaaccctagcccccgttgatatcctacaacattatcatcaccccagaaagttccttcatgcccctgcccactcag

SEQ ID NO: 67248 - DNA, 122 bp, Homo sapiens
aggtccatcccacggcaggtccatcccgcggcaggtcctccccacggcagatcctccccacggcaggtcctccccacagcaggtctgccccacgctcatccctgccttctacttctacagca

SEQ ID NO: 67249 - DNA, 122 bp, Homo sapiens
ccgaacagagccagcgagggaccccgggctgtgcttgaggcccgacgacgcgccatatcccggcagcgccgcagctcaggcctctgcgaatctgtggtccacacgctgataaacttagaggc

SEQ ID NO: 67250 - DNA, 122 bp, Homo sapiens
gatgtgcttcctgatgcaaaacatccaactaatgagctgagcatattctttttatgctctcgcacctgcagtaataaacgcaatgaccactcccccattcgaagatcctgtatttcagagag

SEQ ID NO: 67251 - DNA, 122 bp, Homo sapiens
gtatttggaagtctgggctccagtctcagctccccactcggctcgtcggtcgcgggccgacgttcctccagccctcgcatggatttctgggcctggtgttggggacatggtgacaaagaagc

SEQ ID NO: 67252 - DNA, 122 bp, Homo sapiens
ggcggggacggcgggggtgggcagctgcagtaaggaatacattggacaatgtctgtcaagcgtctacccttgcgtggccccatagtaagctcagtagtggggatgatgtttttgcagctgtg

SEQ ID NO: 67253 - DNA, 122 bp, Homo sapiens
ttctagtttccagccgtcagatgtgccgcagcctgctgggagctccggtaggtttgaggccggagaggaggtgccccacgcttaaagtgggagccacacctcggacaccaggtgggggcttc

SEQ ID NO: 67254 - DNA, 122 bp, Homo sapiens
tagctcaattcaaaatctagctcaaaagtcatttccactatagactcttccctgcctgctcgagacagaattagtagctctgccatttgtacttctaagacatttggtttctttcactgtaa

SEQ ID NO: 67255 - DNA, 122 bp, Homo sapiens
ctggcggccccggcgaacccccgcgccgcacaggccgtgtgcgccggatcccggtgcctccgcgccagctgagacctgcctttcccaggggcggctttgctccggcccctaggcccccgccc

SEQ ID NO: 67256 - DNA, 122 bp, Homo sapiens
aattaaggattcccagcagctctttgggatttttacagcttccactcatgtgttgacacccgcgtccaggagaaactcgctccaagtgcatctagcgcctgggacctgagacggcgttggcc

SEQ ID NO: 67257 - DNA, 122 bp, Homo sapiens
cccaatagagcgagacgccgtctcaaaataaaataaaataaaataaaataaataagtgagcgagtgtatgagtcggcctcccaagtcctgagaggctcagagcttgacccccaccagcaacc

SEQ ID NO: 67258 - DNA, 122 bp, Homo sapiens
aatctccaggcagctctccatgacacactctcatagcatcctcaatttgttagacactctcgtagcatcctcaatttgttagacactctcgtagcatcctcaatttgttagtattgtgatgt

SEQ ID NO: 67259 - DNA, 122 bp, Homo sapiens
cagtgaaactgtgtgtgatgctgcagtgattgatacgtgtcattagacatttgtctaaaccgaaggaatgtacaacaccaagagtgacccctgatgtcaagtatggactttgggagacaatg

SEQ ID NO: 67260 - DNA, 122 bp, Homo sapiens
tttgaaactcattagtttaactcttaaaacatagtgttgttaaacagtattttttgggggcgggtggatagctttttgttctatcttgtacagaaaacagtaatggaatcactcatgttcag

SEQ ID NO: 67261 - DNA, 122 bp, Homo sapiens
gagctcatttggaaacctttttgagctttcctgtggcactttattttctggtatttcactcgtcaaaaagggcagataagtttctgtctgtctgtctgtctgtctgtctctctctctctctc

SEQ ID NO: 67262 - DNA, 122 bp, Homo sapiens
gcgtcccgggcccctggaggctcagtggagggttgggctccagggagctcagagctctctcgttcagggacccgagagtgacacgcgtggcatctctttgcaacccacgtccgcgccgcagc

SEQ ID NO: 67263 - DNA, 122 bp, Homo sapiens
tccgcctcccgccccggcaccacgccgcgcccgcgtccccgcccagtgcccgcgcctttgcgggccccggtcctgcggggcccctcgcgcactccagaagcatcagtatcctccgggcggcc

SEQ ID NO: 67264 - DNA, 122 bp, Homo sapiens
ctctggccaggagacatggatgcctgaccccagagggcccccgtcctgccctcccctccccggccccaccagggcctcagccccacattccacgcaggcctgcagctttaagccatccgctg

SEQ ID NO: 67265 - DNA, 122 bp, Homo sapiens
cttccctgggtcagggacgagccagtgacttgactcttgggcgctaagcttgggagggagcgcaggaggccgctgtccttcctttccggttcacgtcacccttctctccctctgttgctcca

SEQ ID NO: 67266 - DNA, 122 bp, Homo sapiens
tgcaccgcgtacgctgggtgcggttgcaggtggacagcagcttcccttgccacgtgcaggcgccgagccagcctggctccccgacccacgcaccctgtgcccccaggtgccagctcttgcat

SEQ ID NO: 67267 - DNA, 122 bp, Homo sapiens
agccttggtagagcagggactgcggagatgttttcctgctgtgcgggtttaggggcttctcggtggtctggccccggcctccccctccaccgtcaggtagcagcacctccaccatccccctc

SEQ ID NO: 67268 - DNA, 122 bp, Homo sapiens
ccgttcctttctgcagcaggacgggctggccaagagcaaccgattgtcgagataagaggccgatagctgtcgggcacggagctggtgggcgccaggctggcggggcgtggggcaagcctccg

SEQ ID NO: 67269 - DNA, 122 bp, Homo sapiens
gaacaggataagccaaagaaaaggttatcatagggaagatgtagaaatagcttggtaatacgagcttgccaaaaaaattgatacagagccagtaatttaccttcaacagggtaagaaatggg

SEQ ID NO: 67270 - DNA, 122 bp, Homo sapiens
acggaggctaatcagaatttctggaagctgcattcccgtgttgactttctgtcctgcagtcgggtttgcttaagacgtttgcgtaacagcggggaaatgtagttttgaaactggaaggggac

SEQ ID NO: 67271 - DNA, 122 bp, Homo sapiens
ataccacctcacactcactagaatgctaaaatcacaaagactgacaatatcaagtgctgacgaaaaggtagaacaactggaaccctcatatattgctggtgtggatacaaaatcatatagcc

SEQ ID NO: 67272 - DNA, 122 bp, Homo sapiens
atggcttgcattggtcttttattgcggaaacataagtgatggtctagagtagcctgttggcgcagtcataggaagctctgcccccaacagcaagtgtggcagcaataattggaaattaccaa

SEQ ID NO: 67273 - DNA, 122 bp, Homo sapiens
ctcctcgcgcgtcagggagagctgtgcacccaactaggctctgtgaggacggactgaggtcggcctgcaggctgcggccccgaaggcaggatttgtggagagatgattcgcgagccttggag

SEQ ID NO: 67274 - DNA, 122 bp, Homo sapiens
ccgagactcaccgacctgccgtgctgccacttctacaccgaaatggctggtccgaggccgcgtctccagagctgcgtcccagaagcccccgctttcgatccccaccgcgatgctgcagccgt

SEQ ID NO: 67275 - DNA, 122 bp, Homo sapiens
tccttgaagggttccattttgaccctgatcatcctcagtagacatggaagctactccaagcgtggccttggaggtttggggaccctggacagcatacaaatggaggggtgaggggcagccga

SEQ ID NO: 67276 - DNA, 122 bp, Homo sapiens
ggaaagggtgtgggccggaagagagctaagaggggcagggtagggggtccccgttcggtccgcagattcatgccgggtagaaagtccccgaatgcggtgaatcagttccagcgttcaggagg

SEQ ID NO: 67277 - DNA, 122 bp, Homo sapiens
gcgagggcggcctcctgtaagacctcttagcgggcccatcgctgaggtgcagggacatgtcgcggccgaactcacctcgtggcctcggcgtggtgctctcagctcatgcccggaaaccaggt

SEQ ID NO: 67278 - DNA, 122 bp, Homo sapiens
caaacttccttctagttatcttccataatacttaacacagcagtaattaaaaaatataaccgcaataatttgtttatgacagtcttccttggtaagagtctaagctccatgacagcaaggac

SEQ ID NO: 67279 - DNA, 122 bp, Homo sapiens
aaaaaaaaaaaaaaaaaaaaaaaaccagtcctgaccagcctgggcaacatagtaagaccccgtctctgaaaataaaaaatgaaaaattagccgagcatggtggtgcacacttgtagtctcag

SEQ ID NO: 67280 - DNA, 122 bp, Homo sapiens
tgagcccaggaggcggaggtttcagtgagctggggttgcaacagtgtactccagcctgggcgatagagtgagactccgtctcaaaaaaaaaaaaatcagattgctttattgctggttttctt

SEQ ID NO: 67281 - DNA, 122 bp, Homo sapiens
gacaaagaaaatctttgggtgggacacaaaggaaaggggcgagcggagggacccccagcccgagtctctatatagtcttgattccgcccgccgcagctctggagcaggggagaagtggaccc

SEQ ID NO: 67282 - DNA, 122 bp, Homo sapiens
cagttcccaggcttcccagcagagggagacaccattccactcccaagaccaccaaggggtcgtcccagacacaagcttcaagggtctagggaagagacgctatccgcccagacacaaagacc

SEQ ID NO: 67283 - DNA, 122 bp, Homo sapiens
aataactgaagatcacggtccttgctgggttcccgggaggccggtgcttttcagtgctgccggctgcagagtgcatcacttcacacgccagctgggcttctggcggagttgtaagtcaaagt

SEQ ID NO: 67284 - DNA, 122 bp, Homo sapiens
ttgggggcacgtgacccttgctggcggacagcagacatgcacggtgacacgtctgagtgtcggtacacacagacagacagaactcagagaacaacaaatgggctggggcaggggcacggcat

SEQ ID NO: 67285 - DNA, 122 bp, Homo sapiens
tactaagcggccttggatacctggccgcgggatgctgggcggcgtcaggtgagcggtggtcgctgggcctcaggtaaagggcgccaacagtggtgggccggctggggcgttggtgcggcctg

SEQ ID NO: 67286 - DNA, 122 bp, Homo sapiens
tttgtcctagaactggcacagcgcctgccctacctgcagccctgggttgtggccctgttgcgtaccatgtgatttgccaccccgcttctaggccatattaattcagccagaactgaacacct

SEQ ID NO: 67287 - DNA, 122 bp, Homo sapiens
ctgcgccccaattctcgctcgtttgccaagaggtagccgtgtcggggagctagagttctccggggactctctcctgcccctcgtggccctctgtggaaccctcgttttaggatctgcacgcc

SEQ ID NO: 67288 - DNA, 122 bp, Homo sapiens
cacctcagataccataacttgtccaaggtctcttcttacctctcccaccctaaatgaagacgggccctgggtcctaatcatacattcctttttcctccactgtgagctgagacaaagccctt

SEQ ID NO: 67289 - DNA, 122 bp, Homo sapiens
ggacatcaaagaaagggctcgtgctgggaaagcgggcggggctgagagcggccctgcagccgacgcgcatgcgctctatcgacctgcggctgggtggggggtgcactgggaaaaggggcggg

SEQ ID NO: 67290 - DNA, 122 bp, Homo sapiens
gggccaccaggccgtggccgggcccggctgcttaggtaggccttctcctcttccagtgcccgacgcaggtcttccgccttggccatcagcttggagatgttgaggctctcggcctccagctt

SEQ ID NO: 67291 - DNA, 122 bp, Homo sapiens
gtgggactgggatccgcgcactggctgtcgacgtgcagaactggggctccccaaaggaaacgcagacctctccccaactcccacctggacccggatccgtagacagaccccgcgggcgtgtg

SEQ ID NO: 67292 - DNA, 122 bp, Homo sapiens
ctgaataaatgcgaggataaatgtttgattctttccccgagcaaatattgtccctggagccgagtgcagccagcgcagagtgagcggagcctgggctcccccgaggcccgacacagggcccg

SEQ ID NO: 67293 - DNA, 122 bp, Homo sapiens
caaaagggggctggagcggaggttcctcaacatcaaatccagaaaaacagggtggggacacggcagggcccagcagcaccatcccctgaacacccacaaacactgtcccttcctcagcaggt

SEQ ID NO: 67294 - DNA, 122 bp, Homo sapiens
aggtgtggtctgtgtggtcgctggaagtcctttgttcaatagctgtgccacgcacttgaccgtagctaatcccagcgactgtaaacggaaaagccaaagttaggtcaaataaaagaacaaca

SEQ ID NO: 67295 - DNA, 122 bp, Homo sapiens
tccttgcggccgccctcagtgaggagccctgagtaaaacatcgctgaggcgccggcggcccggtagcccacagccccccggcagcctcagcctcgagctcctccagcgccgcaagggccccg

SEQ ID NO: 67296 - DNA, 122 bp, Homo sapiens
aagacctgttcaaagggtgtgtgtgggtcagggaggaagctcctcggtatccccccaacccggggttccttggcgtgtgtcctaacgagtacttggaagctcacagcaggcatgtggggagg

SEQ ID NO: 67297 - DNA, 122 bp, Homo sapiens
ggtctccaccgcgtaggaggtgcggtccatggcgcgacagtacaggtagcgctcggtgtccgagtagccgcgatgccggacgcggccggtggccccgctcgaggcgtagcggccgcgggcag

SEQ ID NO: 67298 - DNA, 122 bp, Homo sapiens
tccgcctcacagacagttgcgtccaggtaggaggccggacgcggagcggcggtacccaggcgattggcgggagcagcgggaactgctcttcactcagccctttaactcccgtttcccgctat

SEQ ID NO: 67299 - DNA, 122 bp, Homo sapiens
cccctgctccccaacccgcaaatgggtggtgagacctgagggactctcaaattcctccagcgatcccgccgtctctgtgcctggccctctttatctgggatcgagccactcacacccttgct

SEQ ID NO: 67300 - DNA, 122 bp, Homo sapiens
taagcatgcagtggctgatcttggtcaaagagcacagaccctggcacaggcggtggaaagcgcagttggggagtgcatccagtgagcggcaggcaggtacaagcttcccatgacagatagtc

SEQ ID NO: 67301 - DNA, 122 bp, Homo sapiens
gtggaggaggcgcctggccccttgggacctgcttcttctttcagttcgcgttttctctgtcgtgtacagctttggagggacacctttgggttccagactttgatgaacacaactttgtatac

SEQ ID NO: 67302 - DNA, 122 bp, Homo sapiens
tgctggacgagtttgagaacatgtcggtgacacgctccaactccctgcggagagacagcccgccgccgcccgcccgtgcccgccaggaaaatgggatgccagaggagccggccaccacggcc

SEQ ID NO: 67303 - DNA, 122 bp, Homo sapiens
tacatttacctagtagcctgtgctggtagggcagagagagtcagtcgtttttcctgagggcgttaggtgatttgagacctcaagtgttgtcactgtaagagaatcctccttataattaccat

SEQ ID NO: 67304 - DNA, 122 bp, Homo sapiens
cgggcctctgtgttagtgccctcgggaatttggttgatggggtgtttggggaagggaaggcgtgggggaggggtgttttggcctctccgagactctttgggccagataactgcgcggtcctt

SEQ ID NO: 67305 - DNA, 122 bp, Homo sapiens
agagactcagcttggcaaactggggtcatgggcaaccttggtgagctggggtcatggcctcggcaagagcggtcttgcggggccaggcacagtggctcacacctgtaatcctagcactctgg

SEQ ID NO: 67306 - DNA, 122 bp, Homo sapiens
gccccgcgccacccggagccccgccccctccgggaaccccgccctgcaccgccgcgtacccgggtctccaagccaacccagctccccaagccccgggaccccggccctccgtggccccctcc

SEQ ID NO: 67307 - DNA, 122 bp, Homo sapiens
acaggggacaccgatgcctgcccggggttttgctgtgataaccaaggaagctgacggccccgggcttctgtgtttgcagagagcttacagaaaagtcagcctcgatggacggcaagatgcac

SEQ ID NO: 67308 - DNA, 122 bp, Homo sapiens
accccagcacctggcagtgcccagacagagcagcaaactcaaggctatggctggccctggcgaaggccagatgccaaggcccaagacccagagtcctgggattcctctcccctcacaggacc

SEQ ID NO: 67309 - DNA, 122 bp, Homo sapiens
tctgacccatgcccaccatcacgccctgggaaggaaaggacaagaagccctgagcacgggcgcagcccccaccccggaaaccgggaggctcctgtgcagagaaagcgcccttgcctcccgcc

SEQ ID NO: 67310 - DNA, 122 bp, Homo sapiens
tccatggatctggataacgtcactcaggagctgcagccacattggaagccggaacaaattcgtagcaaggtagcagagcaggcaccaggacggatggagcccttcagggctggaaccaggac

SEQ ID NO: 67311 - DNA, 122 bp, Homo sapiens
gccaccagcatgcgtcgctggtgtcaccgtgtgtggtggcttgcgagggtgtgtgtgtcccgaagggaaaacactgtgcgtgtgataagttgcacacctcccaacacacactcctcgtttta

SEQ ID NO: 67312 - DNA, 122 bp, Homo sapiens
ttaaaagactcagatacgaagcaaccatacataagggggatgttacggagaggttgcacacgaaggtaatctttgtaaattgaatcacattgtaaatgcactggctttttagataattcctg

SEQ ID NO: 67313 - DNA, 122 bp, Homo sapiens
atctgcgtttatgaaggggatggcaccgcagaatcattcccccgtgggtggcatcgatttcgagggccgcctcatcctgggggccaagcctccactcttcaaggtgccaagtcaacctgaaa

SEQ ID NO: 67314 - DNA, 122 bp, Homo sapiens
tccagggccacgtgcccctcccccggggtggccagagagcgctgcagcgctcccactccccggcccgagatccacgcgcctctgcatctaccccgcccccatgcgccggggccgaccccagg

SEQ ID NO: 67315 - DNA, 122 bp, Homo sapiens
gtacctagagcgtctctggatgacggggaccaaggataagatgcgaggcggattgctaaacgtggcagggaatgtggtgcagaacgagttgcaaaatgtgcccccagaatgcagcataaaag

SEQ ID NO: 67316 - DNA, 122 bp, Homo sapiens
gaggacccggaggaccctccgtgggcacctggcaaagatctatgccatgcactgggggaccgactcaaggtgtgtgtgtgtgcgcgggctggcgctgtgggccgactttctagcaggccgtg

SEQ ID NO: 67317 - DNA, 122 bp, Homo sapiens
ggcactgtcgcaggaccagcggcgttctaagcccccaagtgagagcagcaagggtgccggcgggcacaaggcactgtcgcaggaccagcggcgttctaagcccccaagtgagagcagcaagg

SEQ ID NO: 67318 - DNA, 122 bp, Homo sapiens
ccccttccatacctgaatgtagtcagcgaaaagctgtacccgcgctccgccatctttacccgaagagccaaagcacagccgcacacatgcgcactgtggccgatttcctttcatttccccgc

SEQ ID NO: 67319 - DNA, 122 bp, Homo sapiens
cgcgctccgggaaggagacccggttacccaggccagcgaccttcatacatgggggttccacgtcagaactgccccaagcaccacccacggataattgaatggaacgggtttgcgatgggggc

SEQ ID NO: 67320 - DNA, 122 bp, Homo sapiens
acgtgcacacaggcatgcacacatacacatgagcgcacacacacaatgcacactcgagcacgcatgcacatacacacgtgcacacacgacgcccagggagtctcagggagcctgtaccagcc

SEQ ID NO: 67321 - DNA, 122 bp, Homo sapiens
tgttgtagagatggggttttgtcgtgtttcccagactggtctcaaactcctgagctcaagcgatccgcccaccttggcctcctgaagtgcttttacaggtgtgagcaacttttttacaggat

SEQ ID NO: 67322 - DNA, 122 bp, Homo sapiens
tgattttcaaccaccatcattacaactagggtttgactttgctattaattaatgtttgctcgtaagcttttatcttttcttctactgccgacattctattattctctttttgatggttgata

SEQ ID NO: 67323 - DNA, 122 bp, Homo sapiens
aggagacgggtggggtggggggtgtgcgcgcatgtcccgtggctttgctggatgtggagccgcacttggtgggtccagggtcgcagggcagtgctggaaacgtctgtgcccatccacgaagc

SEQ ID NO: 67324 - DNA, 122 bp, Homo sapiens
ccgtccttttggggagactgttctgcgattcccacaatggggctgtatataattgggaggcgtctgaggaattgctcattttggaatgagggtgaggagtcagaaaacatatgaacaacaac

SEQ ID NO: 67325 - DNA, 122 bp, Homo sapiens
cggcgggcgggagagcggcgctccttacccgggggggttgctggggtttcttaaaaagcccgggcagggcggcctactctaattccatttgctgtcacaaaaaaaaaaatcaagggaattgg

SEQ ID NO: 67326 - DNA, 122 bp, Homo sapiens
ttgtttgaattcccaggaatcaatcacccaatcagtcaacaaggaagtgatgttcagtctcgtgaatagctccaactcttcagctctccagattttcctagggaagacagagaaaatcctac

SEQ ID NO: 67327 - DNA, 122 bp, Homo sapiens
gtattacttgtcttaaagaatagggtagtattactcactcttgaagtggtactcttgaatcgggtagtattactcttgaatagggtagtattactcacgcctgaatcgctatggcaaaatcc

SEQ ID NO: 67328 - DNA, 122 bp, Homo sapiens
ggactggctgaccccctagggttggcagtagcccctgaccctcagtatggccaacactaccggagagcctgaggaggtgagcggcgctctgtccccaccgtccgcatcagcttatgtgaagc

SEQ ID NO: 67329 - DNA, 122 bp, Homo sapiens
gtaaggggtgccatggagcacccgggaaggacccaggcctgggcagggaggcgttggggccggctctagggagcaaagctgtcggagtccaggcctctatcacccgactgctgacactgccc

SEQ ID NO: 67330 - DNA, 122 bp, Homo sapiens
tgtccggttgcctccagagaagatgagcctgggcggagaccggcctcactgacatgcccccgccctggcctcaggcctgccctgctgaggcccgataaggcccggcccaggtccgcctcagg

SEQ ID NO: 67331 - DNA, 122 bp, Homo sapiens
aggtttgggtcgaagaggtcacgggggagaggttcgtaacgtcacaggcctgcgacggagcgcgactgcgtgacttcggcctccggggcgctggcgggcggggcggggtctgtagttagcgg

SEQ ID NO: 67332 - DNA, 122 bp, Homo sapiens
ggaacaaacatgcccgagataccgcacacccatcaacccaccagctcctgcacacacactcgcccagtgcaatgagataccgcatacccttaaacccaccagctcctgcacacacaccctgc

SEQ ID NO: 67333 - DNA, 122 bp, Homo sapiens
gaggagtcttggggtgcaggaagcacatacggtgaactgagcatttctccccatgaacggcgattccttgggtccttctgagtgaccttccagaagcatctctgtaaccttgtgaacactga

SEQ ID NO: 67334 - DNA, 122 bp, Homo sapiens
cagggggacccctggaaccagggagagtggcctgagcaggaaatcaggtcccaggtaacacgggcttcagcgggctcaggctggggaggggacaggtgtctcggactgcgggcggaggaacc

SEQ ID NO: 67335 - DNA, 122 bp, Homo sapiens
cctgatcagcggaaaacttctcctgcttcacttgatttccctgagtcccagaaaagttcccgtggtggttctcctgatctctggaagtcttccttttttattgagcctcagaaacctgtctt

SEQ ID NO: 67336 - DNA, 122 bp, Homo sapiens
ccaggtcccgacacacagcagttgctccccatacgccgctctgcggtcggccggtgcatccggccccctgccctgtacaatgctgatgctgcagacctgtctcttgcagggcgcctctgtgg

SEQ ID NO: 67337 - DNA, 122 bp, Homo sapiens
ggatggcagcctgtggcttcatgacttcgtgggacacccacctgctctgcccagaatggacggagctctttccctgctccatcacaggaacaaggcagccctggagccctgtccctcactca

SEQ ID NO: 67338 - DNA, 122 bp, Homo sapiens
gcttcactcttgaggccagcaagaccacgaacgactatggatggaaagaacaaacaactccgggtggaaggaatgaacaactcgagacgagccgccttaagagccataacactcaccttgaa

SEQ ID NO: 67339 - DNA, 122 bp, Homo sapiens
ggagaggaagtccagttgggcccggccgggcttcagaggcgcagggcgggagccgcctcgcgcagggtcctccccaagccggcgccaggccctgccctcgtccggccctgccctcgtctggc

SEQ ID NO: 67340 - DNA, 122 bp, Homo sapiens
ccccggagggcggcgtccacctgaccccccagcccgagccgccgccgccgcctcccagcccggcctgcgctgccccctggcggtggggccaggagccatcccagcctctaagcccccgaccc

SEQ ID NO: 67341 - DNA, 122 bp, Homo sapiens
ggagaaggtaggggaaagacccattgtcggaccggaccgtggccagggtggcgggctgaacggccttcttaaaactccttccgtggccgggaagcccgctggaccagagtagccgtggcctc

SEQ ID NO: 67342 - DNA, 122 bp, Homo sapiens
ttgtaagtcacccagatttccagcgctggtctcaaacccaggatgtgagatggtgcactccgtgttctgtccactacaacacagggcctctgcaggcacaggtgacctgcagatgggctgca

SEQ ID NO: 67343 - DNA, 122 bp, Homo sapiens
acttgccgcagcttcttgggggcctcaccctgcgggcggccctcggacctcggtgagccccgcggtccagccctcccagcagacacccctgcagccgactccctgggacccccgcctagcgc

SEQ ID NO: 67344 - DNA, 122 bp, Homo sapiens
ttgccaaagatctgtgtttagcgggctggttttccttagaaccgaagcattagcagcgtccggtgaaaactgagcatacaataccgtggtctggaatttggacagataattaaatgagacac

SEQ ID NO: 67345 - DNA, 122 bp, Homo sapiens
gtgcgcgagagccaatcaaaagcggatgtcgaaaagaggcgccgctccagccagtcacgtcgcgaggtgcggtcggggccggctgacgcgactgcgggcctcagccaatgggcgtgccactg

SEQ ID NO: 67346 - DNA, 122 bp, Homo sapiens
cccaccttggcctttcaaagtgatgggattataggtgtgaatcaccgcatccagcctctccgtcatgcttcaccaatcttttggctcccattttctctgtgtgggcttcattttagactagc

SEQ ID NO: 67347 - DNA, 122 bp, Homo sapiens
ttattcatttgacacgcactgaccaagcgcctcctgcctgctggcctctgtgctgagtaccgggatgtaaacgtgagcaatacagggccccagctctcaaggagcctatggtcaatcagagt

SEQ ID NO: 67348 - DNA, 122 bp, Homo sapiens
cctctctgctgcattcctgcctgccctactggcactgacagcaacacaagtgaggctgttcgatcaggaaatgaggctaaaggtgtccttgggcacagagaaagtgcagaggaaaagtaagc

SEQ ID NO: 67349 - DNA, 122 bp, Homo sapiens
aaattaataagttgacaccactaaacgacagggaagacgggcatgcgtacagcgctctgccgggcgggtgaagtgcagcctccatcaaaaggcagcagacagacagcgccgggctgcgagtc

SEQ ID NO: 67350 - DNA, 122 bp, Homo sapiens
tcctgttctccctgcaggaaggcagacgggtacgggttgttctggacagccttctgcctgcgggaaagcccccacacccaacccgacagcacctcagagcatttccacccttcagtgatctc

SEQ ID NO: 67351 - DNA, 122 bp, Homo sapiens
ctgttatgtttccaattcaaagatcaagtctatattctaccacattttattaaaatactacgcacttacattaatatgcttataactagcggtggttcacgcctgtaatcccaacactttgg

SEQ ID NO: 67352 - DNA, 122 bp, Homo sapiens
cataacggtccaccactccccagtaacagggattccctgtaatttgaagcaaatcaggcacgagacctatatgtaatcaatctgtgtgtggactttccaagctccttgtctgctaacatggg

SEQ ID NO: 67353 - DNA, 122 bp, Homo sapiens
tcattcatgagactgtggctggagagggaatcaagcctctcaaaaatgtgtttcttcccccggttaggcaacatcagcaaaccagacaaaatactacgtctcttatcgtcgaaatgaatttg

SEQ ID NO: 67354 - DNA, 122 bp, Homo sapiens
tagagaactcacctttcccctccgagatagagggcttcaggggctcagcctggtgtgaatcgagtgccccacagtcactcgcccagggccgatcccatttgcccaaaacccctttcccagtg

SEQ ID NO: 67355 - DNA, 122 bp, Homo sapiens
cccggaagcacactcgtttctgggctgtgctgaaactgctgctgctgctgctttgtgcagcgggggcgctggttgcttgtcaggtgacacagctacagcagctgcccctttgtgtccggaat

SEQ ID NO: 67356 - DNA, 122 bp, Homo sapiens
gctcccgaaactacacctggctgcagggagcagggctgtccgggattctccagagcgcttcgccgcctgccacacacggggtgtcccggcgaccgcctgacccagctcccctgacgctaact

SEQ ID NO: 67357 - DNA, 122 bp, Homo sapiens
gcacgtggaggtgggtatgattgcatgaattcattatatggaccagcttctgttgttctccggagtgtccagaggtcttcccatcataatagcaataagaaatgtgctagtgaggtggcact

SEQ ID NO: 67358 - DNA, 122 bp, Homo sapiens
ttcacaatacctttatcaaattccaactattttctacttttcttccttatacaacccaggcgcacgggttgaaataattttccttaagaaatccaggaagctctggcctggccctccctcta

SEQ ID NO: 67359 - DNA, 122 bp, Homo sapiens
taaagttaacaactgcaacaacaaaagcgtggtaagtaggcagcgccctggcagtgaaagcgttaacagggctgggtaaggcgatcccttgaaatgagtaagactgagtggttaaagttttc

SEQ ID NO: 67360 - DNA, 122 bp, Homo sapiens
aggttggggcccggggcgcgctgccaggcaggaacagatgcatccggaggctgcccggcccgagtgttagctcctcaaagagcagaggatacgaccatttaaatggaagacccaagggaatc

SEQ ID NO: 67361 - DNA, 122 bp, Homo sapiens
gcctctgcaccacggagctgcttggtggggggtgtgggggaacctcagctactgtctctccggaatgtatgaccacaaatatggcgacagtgagttcacagggcatagcaccaccggccact

SEQ ID NO: 67362 - DNA, 122 bp, Homo sapiens
gaaggctcattagacgattacaaatttcgcagctgctcgcagcccaattaggcagctcttcgggtgagtggaagctgtgggggtcagggcgggttgatgttccctctctccagcccggacct

SEQ ID NO: 67363 - DNA, 122 bp, Homo sapiens
cgagaattcgagaacaacttggtcaacaaagcgaaacccccgtttctacaaaaaagttaacggggcatggtgcgtgcacatgtggtcccagctacatgggaggctgaagcaggaagatcgct

SEQ ID NO: 67364 - DNA, 122 bp, Homo sapiens
gcggcctcgcgaggcctgctgggaaatgtagttctcccacccagcctcgccacgcgggggcgctgggacaactgcagatgttggaggggagttcgaatcccaggcttcccggcccgcagact

SEQ ID NO: 67365 - DNA, 122 bp, Homo sapiens
ctactgcttctgtgaggagtgacatttaattcccccaaggaacccgagacccgggaaaagcgtagcgttcacagtgacctgtcaggaccacgtccaactctgtgacaggtatggtgggttca

SEQ ID NO: 67366 - DNA, 122 bp, Homo sapiens
ccgcccctgtcactgcgggcgaggcctgtagcaaagcctgctgggaaaatggtgggctttcgggaaggagggggcgaccgggaagcggcggagtcgggagagccggagagcctctgggaaag

SEQ ID NO: 67367 - DNA, 122 bp, Homo sapiens
caccaggaaaccccgcggccgcgctcgagcgcgcgccctccgaccacatgcacccgcatacgcatgctcccagcgctcccacgcgtgctgacaccctcccggcttccgcccacgcagtcgcg

SEQ ID NO: 67368 - DNA, 122 bp, Homo sapiens
gagagaaaaactataaacaagaccctgtgcactcaattagtttataatttagttgggaagcgcaacagatcattcaagaataacctaagagagttgagtgcacaatgaacatgaaactatgt

SEQ ID NO: 67369 - DNA, 122 bp, Homo sapiens
gccgggcacgcatcaatgtgtcactggagcagctcaagtcgctgctggagaaacactactcgcaccaggtgagactcaggcggggtgggggtgggtgggtgatacgatcccaacctccctct

SEQ ID NO: 67370 - DNA, 122 bp, Homo sapiens
gggatgaaagggatccagagagtctgtgcattggcagagaagatagtgtaactggcactgcggctggagggctggtcccacagtgagctacagccctgcccgctggccgtgggagaggctta

SEQ ID NO: 67371 - DNA, 122 bp, Homo sapiens
gcgtgccagtcagtgcctgggtcaccgcgaattccatcccaacccgctccggcaccgcgacggtctctcctgtcactggagacgtttcttgtgtcagtgcaaatatatgtcgttccttgttt

SEQ ID NO: 67372 - DNA, 122 bp, Homo sapiens
tccacaccagtcccgagggccacccccagccctcaacaccgcggcggtgggcgaagccagcggccccaccccgttccctggcgctgccgttccctggcgtttcctagctaggatctgtaggg

SEQ ID NO: 67373 - DNA, 122 bp, Homo sapiens
ttttaacattttaatatgaagagtttccaaaacttggaaagaatcggatttggaaagaatcggatggtgaaccctcagacctaccgtctagattctatgatcatgttaagtttttctcataa

SEQ ID NO: 67374 - DNA, 122 bp, Homo sapiens
gagctggttcccgtttcctcccagagccggcagggggggcaccaggcaaagtttgcaagacgcgcctccctcccacccctcccccttcctcgcccaacttcccatagccgcggcctcaacta

SEQ ID NO: 67375 - DNA, 122 bp, Homo sapiens
tctgggaaggcagtagaatggccagcattcctgcctgtaagtcttcccaagacagaggcccggtgacacagttcagccaggactgaccacagggctctagagctctctttggtgagacttcc

SEQ ID NO: 67376 - DNA, 122 bp, Homo sapiens
gaggaagcagccccccaggccggccgacttcaagttgcaggtcatcattatcggctcccgcggcgtgggcaagaccagcctgatggagcgcttcaccgacgacaccttctgcgaggcctgca

SEQ ID NO: 67377 - DNA, 122 bp, Homo sapiens
tctcaggaatggccttttataaaagagatcccagccccgggggatgggggggaaaggcctcgtacctgagtggctaggcccagagggggctgggcctaacccgtcacctgccacctccgggc

SEQ ID NO: 67378 - DNA, 122 bp, Homo sapiens
tccagactctgccctgtgactgtggctaattccaccagtgaaggctgcttccgagggacacgttcacggagcagctccccgcacagatgctgtggggcacaggcaggtccgcgctccccatg

SEQ ID NO: 67379 - DNA, 122 bp, Homo sapiens
cgcgtcctctaacgcaaatgaccatctttggcaacgtgcgccaatggaacagaccaagggcgctgggcccggggggtgagcgggggactggggagggccggggctgcctcggcgcctccgaa

SEQ ID NO: 67380 - DNA, 122 bp, Homo sapiens
tttccctggctgtctctttgtgggaaacctaacggcttgcctggaaaactcacgggaatgcgaagaagaggccactgaaaaagaccagcagcaccacattgaaggcagcaaagaggctaggg

SEQ ID NO: 67381 - DNA, 122 bp, Homo sapiens
tcatgttgtctatgcctagtgtctagggggcaaagtgaacagtaaactaatctgtgctaacgggcaagtggagaaaatcggggtcaggagaatccgcacatccagagtgctctgtctcctct

SEQ ID NO: 67382 - DNA, 122 bp, Homo sapiens
ccaccccctaccgcgaggagcacgagctgaggggaacacaagcccccgtcgggcactccccggcctcgccccaccccccaggcgcgcacccaacccatataaggcgaggggaggcaatcgcg

SEQ ID NO: 67383 - DNA, 122 bp, Homo sapiens
caaataatcacaaaaggcaaaagtggaaagtctgtcaagtttagagattggttctgggcacggccaaggtctcttgggcaaactgccagcaggtccctgtgggaggcaattatgatgtcatg

SEQ ID NO: 67384 - DNA, 122 bp, Homo sapiens
gcagatagaaaatagtaaatgaaaccctttcagatatttcctggccttatttagtaaacacgtctttttgaaagaactctgaatacacctgcagatttttcaaagcccagattctacacact

SEQ ID NO: 67385 - DNA, 122 bp, Homo sapiens
tgggggaactggccttgtgttttggaacagctgcagccggcgctgggcccgcctggaatgcgggaacaggctgcacaccaggacttttatggaaacttgctgctggagacggcggcggcggc

SEQ ID NO: 67386 - DNA, 122 bp, Homo sapiens
gcgccctgcgcgagctcccccggcccaaggggctgcagcgactgctgcttatcaacaacgcgggtaagaccccggggctggagcggactccccatgtgagcgcccacttcctccaccgctgg

SEQ ID NO: 67387 - DNA, 122 bp, Homo sapiens
ccctggacccctacatcctcacctcccggggcagtgggggcctgtgggtggcaggggccgcggagccgagaccccttgcaggccaccggagaacccggtgggggtggggggtgcggcgcgga

SEQ ID NO: 67388 - DNA, 122 bp, Homo sapiens
caatgaaagaggggaagtggcgtttctttgcaaccctggaattccattctcccgcacctgcgaggatgctgctctgacccgtcggccagcaccaggccctcgggagccgagcccaggcaggt

SEQ ID NO: 67389 - DNA, 122 bp, Homo sapiens
acattggaaatgactattgtcacaaagctctgcccccgggtttcacgctcgcattcctgacggctgtgaccccgacctttaggagaacgccccgcgccgcgaagccacctcggccacctagg

SEQ ID NO: 67390 - DNA, 122 bp, Homo sapiens
agatgagggctgcggaggcttctaggaggggcccgtggggatctgtgggccaggacaggccgggagcaggtgctgtgggtacgacccacccaatgctggctgaactgggggctgtgctcacc

SEQ ID NO: 67391 - DNA, 122 bp, Homo sapiens
gagtggccgggaggggggaggggagaatgtccggggctttgctgaccccctacccactaccgctagggtctggctgttatttgctggagagaatcatttaaagaaactatcatcagtttcct

SEQ ID NO: 67392 - DNA, 122 bp, Homo sapiens
ccctgggggaggcactggcaggcctgcccgacactctttccctgttgcactactataggccgctgggaagcagtgcaatgatgaaagggcatcggtcaggtccagcctgctaccctgggagg

SEQ ID NO: 67393 - DNA, 122 bp, Homo sapiens
ctctccagccgggatccgagaacccaaagccccgcaaactgcgcaggcccagtaggggctcgcaaaccgggggccccagggttctcactggccagcatacttgtgtagaactttgttttttc

SEQ ID NO: 67394 - DNA, 122 bp, Homo sapiens
tccagcacaattctaccagagactgtgtgaggcctaaggtatgtatactccccttgatcccgataaccctgaaaatcagcacatgattcacatggctttagtccgtcaaagcgcggaacacg

SEQ ID NO: 67395 - DNA, 122 bp, Homo sapiens
ggaaactgtctgtccttggattagttaggagaaaaggctcggctgccctaacagcacccccggggaaagggctttgtcaactttaggtccctggacctcctagagaagtagtgatgtccaaa

SEQ ID NO: 67396 - DNA, 122 bp, Homo sapiens
gccatgggactaggcagaacacgctgtgtgcaatgcaaggctgagcacgctgggccccttcgggatgctggcggttacatgggcagtgggacgggtggagtgacacggaacatgcctcagtt

SEQ ID NO: 67397 - DNA, 122 bp, Homo sapiens
ctggccctgtgggcatttgagtttataacaccacccccattgtggcacacccctccaccccgtaaaacacaggctctgctcttggaatcagtcttcctgatctgtggctgtgccctccaaca

SEQ ID NO: 67398 - DNA, 122 bp, Homo sapiens
gcaagcaggcaaaactaacctatgctgttcaaagtcagacaatgcctgttctgggggtgtcgaagcatgatagaagagaacatgaagaattcttatggagggctagtaatagttttgtttct

SEQ ID NO: 67399 - DNA, 122 bp, Homo sapiens
tcgatactgaaatccaggcagtacagaattttattttcccaaaattctggaactcaggaccgagaacattttgctgctgtattaaagcccagaaaactgaaatcagaggatttcatataata

SEQ ID NO: 67400 - DNA, 122 bp, Homo sapiens
gcaaatttatatcttagctctgtcacaggctagatgtccttaggcaagaaacctattaaccgccttccctttcatcctctcagcccctttcttctccctcctgggctaattgcttatctgta

SEQ ID NO: 67401 - DNA, 122 bp, Homo sapiens
tggatgttagaacacacccctgggctggcctggttagaaactgacagctccctggatgtgcgagacaagcaagacccttcctgggcctcaacttccctgcctgagcaatggtcgacattggt

SEQ ID NO: 67402 - DNA, 122 bp, Homo sapiens
gccacctgctcacctgtggcaaactcctcccacatctggccaaccaggccctccacactgcgtgctggcctccacctggagccacgggcccatcctgaggggacggaaatggtttcacctga

SEQ ID NO: 67403 - DNA, 122 bp, Homo sapiens
agcatcccgcgccgcactatggaggcagccatcttggagcgtaccaaaaggaacagccaacgggttacggacagaggaaggggcggggttacagctcgacctctcggggcgcccagaattgg

SEQ ID NO: 67404 - DNA, 122 bp, Homo sapiens
gccggcaacctgaaatcagagcaggcgtccgtggcgctcaggaaccttgctgagcttcgccgatctttcattgttgcttcatttgggtaccaagggcctctcattctgtggattctttgcct

SEQ ID NO: 67405 - DNA, 122 bp, Homo sapiens
gccccctctctgcctggcagtaaatgttgtcggtgaagtggttccatcaacaggaattcacgtagagcagtggggttgttgaaatataaaacttattctgattcctctttactcagaattac

SEQ ID NO: 67406 - DNA, 122 bp, Homo sapiens
gggtgtgaggtgatgtcaaaaggtagacaccagggctagagggcgcataatcttgcaggccgtgctaatgattttgttttctacccaagaatgctacttcaggagatcagtcaaaaggttag

SEQ ID NO: 67407 - DNA, 122 bp, Homo sapiens
gctcgagttcagcgactgctgcctcgatagtccgcacttccgagagacgctcaagtcgcacgaagcagagctggacaagaccaacaaattcatcaaggagctcatcaaggacgggaagtcac

SEQ ID NO: 67408 - DNA, 122 bp, Homo sapiens
tttcttctgcagggagaggggctattttggtcctgagtacttttaaccccatgtgaaccacgcggacgggtggacagttggagggccagtagcagcagcaggagcctctgcccacttggggg

SEQ ID NO: 67409 - DNA, 122 bp, Homo sapiens
tcagcggggtggaggggttgcactgcggtaatatggctcttccttagccagcggcggcaacggcggcagcggcggcagcggcggcggctactgtctgggctgagcagtagtgcctctcgggt

SEQ ID NO: 67410 - DNA, 122 bp, Homo sapiens
agtggcagagcaagtagaagaacctaatcttcctgtgctcttcgtatccacgctgaaccccgtccattcttctgaatgccctgggctggaattgtgatgatacatgatggatacatgggaaa
